United States Patent Application Publication US 2017/0114356 A1 - sequence listing, part 14

SEQ ID NO: 17633 - DNA, 3313 bp, Zea Mays
ctccaaagcagcaggcgcgctcccgcccggtccgcgacccggcgcggcgagcatgcatgagcgtgcacacatgcctgcctgccgccccgcgttccgaaccgactcccccctctaacatccagcgagccggcctcggtctgttcccaagcggctgattcgtctgggttgcccactgctgcccgcggccatggatcagcagcggaagagcagcctcaggtcgtacgggtccaacgcctcgtcccagtcagggtccttcgacttcaaccacgaccaggacacggaacgcgccggccagcccggcggcgacgaccgccgggaggtcgtcgtcaagatcgacgccgagccgcactcgccggtctccctccacgcggccggcggcgtgtccgggcacagctccgcggccagcacgccgcgggccggtggcgcggcggtgcgcattctcgcgccgtctgcgtccgggtcgagcgcgtcgacttccagcgtcggaggcgacgcgtccggctccggcgaatcgttcagcttcaggaaacgcccgccgcagtctccggccggcggggactccggcgaggatccgccgagccgcctcatcggcagcttcctccggaagcaggcggcggccggcggcgagctgtccctcgaccccgacttcgaggtggaggagatgagaaggccgccacgcgcgccgacgtctgtcaacgcctccagggagctgcgcgtctcgttccaggacccccggaaacggatgtccccgtccacgtcgtccgcgtcgtcctcctcctacggcgccggcggcgacagccggaaccagagcaccatcgacgtggacgctgccgaggtgctgcgctgcacgtcgacgtccaccggttcctccctgctggcgcgcagcaggacgcgatctcggctgatggatcccccgccaccgtcgacgtcgtcgagtgcccccgccaacgagggggatccccgaaagtcatttgtctcgaaggggctgccgcccaagtccggtcagctccggtcgggtcttatcggcaagtcggggctcatcggcaagtcggggcccatcggcaagacaggtgcgttcgacgatgaggacgacgacccgttcatggacgagggcatgacctcggacttcaagcgcgacacgatggattgccttctcatcatggagtgggtcagcctggtggtcatcgtgggcgcgctcatctgcagcgtcaccatacccagcctgtcggtaaagaagctctcggggctccacctctggaagtgggagctcctcgtgttcgtgctcatctgcggccgcctcgtctctggctgggtgatccgcatcgcagtcttcttcgtcgagcgcaacttccttctgcggaagaaggtgctctacttcgtgtacggcgtgcgccgcgccgtgcgcaacgtgctctggctgggtgtggcgctcgtgtcctggcacctcctgttcgacaaggccgccaagcgggagacgcacacgctggtgctgccctacgtcaccaaggtgctgtgctgcctcctcgtggccaccgtgatccgcctcgtgaagacgctgctgctaaaggtgctcgcctcgtccttccacgtctcctcctacttcgacaggatccaggaagcgctcttcaaccagtacgtcatcgagaccctctccggcccgccgctagtagacgagagccggatgatggctgaggtgcagaggctccagagcgcgggagcatccatccccagtgagctcgaagcgacagcgatgccgggcaagtcccggccactgcccaagagtgggcgcctcacgacggtcgcgtccaagcgaggaggaggaggagcagcagcagccagcaagcagctgcataggcagaaaaccgagcgccatttggatgacggcatctcgattgaccagcttcacaagctcagccagaagaacatctccgcgtggagcatgaagaggctgatgaagatcgtcaggtacggggcgctgacaaccatggacgagcagctcaagcatgcaacaggcgaggacgagctggcgacagagatacacagcgagtacgaggccaaggttgcggccaagaggatcttccagaacgtcgccaagcctggatccaagcacatatacctgtcagatttgatgcgtttcatgaggcaggaagaagctctgaaggcgatggatctcttcgaaggagcgcaggagcacaacagggtcagcaagaggtcgctcaagaactgggtggtaaacgcgttcagagagcgcaaggctcttgcgctgacgctcaacgacaccaagaccgcggtgaacaagctgcaccagatggccaacgtcgtggtcgcgctgatcgtgctcgcgctctggcttctcatcctgggcatcgcgacgtccaagttcttcgtcctgctcagctcgcagctcctcgtggcggtgttcatgttcgggaacacgctcaggaccatcttcgaggcgatcgtgttcctgttcgtgatgcaccctttcgacgtcggcgaccggtgcgaggtcgacgggatgcaggtggtcgtggaggagatgaacatcatgacgacgatcttcctccgatacgacaacctcaaggtgtactacccgaacagccagttagcccagctaccgatcatgaattactacaggagccctgacatgggagattcggtggacttctccgtccatgtcgcaacaccggtggagaaactgtccctcatgaaggagaggctattgcattaccttgacaacaagaaggagcactggtaccctggctccatggtcgtcctgcgcgacgtggacgacacgaacaagctgaaggtctccatctggtgccgccagacgatcaacttccacgacatggggatgaggttcgagcggagggagctgctgctccaggagatgatcaaggtcttgagagacctcgagatcgagtaccggatgctgccgctcgacgtcaacgtccggagcgcgccgaccatccagtcctcgaggatgccggcgacatggacgtttaactactgagatcttggctggatagtggataccatcaggcttgttgtgagattgtgctgctagaggtagtagtagtagtagttcctgagtgagtgttgagctgtgacagcgtgctgatgagatgcaacaggtttttgctgtcgctgcagccatcacttgctcttcccgccctgtagttgttgtgttgttggtccatactccgtagtttggtgcttgtaattagggaacttcttctgctacagaataactttgttggattatctagcttacttcaaagattaaacttctgaagttattacatcaaaatat

SEQ ID NO: 17634 - DNA, 855 bp, Zea Mays
ctcgatttgtgcagccccagttgtgaccttgtcgaatcccggtgtgttaatcgatcacgtgatgcggaggacaagaaccagatttctctcaaggtgatgctggtgaaagaacctaaagcttggataatctgataatatgatcaagtaccaggatgagagatgctccccaagcggacgtcatctaacaacactgacttagtgttatcccaggcaagccccggtgcatttgccacctccttgttgttataaaacttttatcacttatatgttgcattaggtgataggagttgagtgatgaaacaattgatgcattgccattccttggaatttgattatcttccttgattcctgttttataaagagaactaaagatgcttagccctgcttagataattaaaagttgttctttttttaaaaaaatgatgtgttacatgggatatgggaaatttttgtgaaaaagaaattgggatggtgaatccatatggccatgatggattcaacatccagaaaaagtacctctgtcaggtaccaaagattgggaaatggtttaaataaaatgagaccagacgttgagcaggaaaggtcgcccgtctgtgtcgattaaggaccgttccgattgttggcctgctgatctaggaccctttaactggccacatgcctcatcatgggtaagcttagcctcggttggaccaataccagaaaggccggcccgcaatgggagtggagagatggcgagagtagcttgtaccctccgtggcaagagactggaaggtggggtgctgtactctcggaaacatggcgggcaccatggcgagggtaacgtgtaccaaccaggccaacggctggaaggtgggg

SEQ ID NO: 17635 - DNA, 993 bp, Zea Mays
caacaagctccacctcgatttgtgcagccccagttgtgaccttgtcgaatcccgaaatccctggaagtttggttgaatgaaagcgaagtctcgaggtgtcgttcattaggtactcgacgtatgggctaaattgtagctcgacgtggtgcttatagtctccgagctgaatttaattttgggtgtgttaatcgatcacgtgatgcggaggacaagaaccagatttctctcaaggtgatgctggtgaaagaacctaaagcttggataatctgataatatgatcaagtaccaggatgagagatgctccccaagcggacgtcatctaacaacactgacttagtgttatcccaggcaagccccggtgcatttgccacctccttgttgttataaaacttttatcacttatatgttgcattaggtgataggagttgagtgatgaaacaattgatgcattgccattccttggaatttgattatcttccttgattcctgttttataaagagaactaaagatgcttagccctgcttagataattaaaagttgttctttttttaaaaaaatgatgtgttacatgggatatgggaaatttttgtgaaaaagaaattgggatggtgaatccatatggccatgatggattcaacatccagaaaaagtacctctgtcaggtaccaaagattgggaaatggtttaaataaaatgagaccagacgttgagcaggaaaggtcgcccgtctgtgtcgattaaggaccgttccgattgttggcctgctgatctaggaccctttaactggccacatgcctcatcatgggtaagcttagcctcggttggaccaataccagaaaggccggcccgcaatgggagtggagagatggcgagagtagcttgtaccctccgtggcaagagactggaaggtggggtgctgtactctcggaaacatggcgggcaccatggcgagggtaacgtgtaccaaccaggccaacggctggaaggtgggg

SEQ ID NO: 17636 - DNA, 1036 bp, Zea Mays
cacctctatgtagtgcccttggcatgctcgatgaaatacagcaacaagctccacctcgatttgtgcagccccagttgtgaccttgtcgaatcccgagaaatccctggaagtttggttgaatgaaagcgaagtctcgaggtgtcgttcattaggtactcgacgtatgggctaaattgtagctcgacgtggtgcttatagtctccgagctgaatttaattttgggtgtgttaatcgatcacgtgatgcggaggacaagaaccagatttctctcaaggtgatgctggtgaaagaacctaaagcttggataatctgataatatgatcaagtaccaggatgagagatgctccccaagcggacgtcatctaacaacactgacttagtgttatcccaggcaagccccggtgcatttgccacctccttgttgttataaaacttttatcacttatatgttgcattaggtgataggagttgagtgatgaaacaattgatgcattgccattccttggaatttgattatcttccttgattcctgttttataaagagaactaaagatgcttagccctgcttagataattaaaagttgttctttttttaaaaaaatgatgtgttacatgggatatgggaaatttttgtgaaaaagaaattgggatggtgaatccatatggccatgatggattcaacatccagaaaaagtacctctgtcaggtaccaaagattgggaaatggtttaaataaaatgagaccagacgttgagcaggaaaggtcgcccgtctgtgtcgattaaggaccgttccgattgttggcctgctgatctaggaccctttaactggccacatgcctcatcatgggtaagcttagcctcggttggaccaataccagaaaggccggcccgcaatgggagtggagagatggcgagagtagcttgtaccctccgtggcaagagactggaaggtggggtgctgtactctcggaaacatggcgggcaccatggcgagggtaacgtgtaccaaccaggccaacggctggaaggtgggg

SEQ ID NO: 17637 - DNA, 1202 bp, Zea Mays
aaaagttgcacaagtgatggttgagaagagtagacggaacgggacccaacccaccctaacccatcattcattcattctccactagaagcacgggttactgcacccatgacctgtaggtggtggtgcaagatacttcagataaagatatatatgtgcgtgtgtgtgaaagacagagaacctggctacgcctcaatctagccgggaagaacagctccacggaagaaacaaaggcggcagagtgctagaccggccatccgcgtgccagactgccagtgccctctcctctgcagccaccaactcctgcttcccagaagctagatctggacgaacatggcagcagtcccggtctacagcatcacaagagcggagatcgacgagttctggagcaggaaggaagtggaagcagaggagcggcgactcgctgccgagaaggaagctgcaagaatcacggccaagacactcaagatggaagattacgtgctctacgagcaaatggtcagggagattctcatggaggggaacggaggagacggatcagccatagcggcagctgccaccggtggcactaccgaggcacagatcgttggcatcaaacactggagagatgtaccgccatattctgctcatcaactccacgccagccaaacgtcgatgctcttgccatcttttaggtgtccccgccaaggataagctggggcgtgggggaatcaggaaatgtggatgtgattcatgtgtctgataatattttgggttcaataagctgcgacttatttcccatatggaatttaatttaattgtatatctatcttccagtattgcttgagagatcaagtaacaagtatggataatcatgttgcttcacgtataaaagcaagatactgataagaaatttaattgtcattacatcattgcttgccactacgacgtacgttctgtcatgtgaaaccttgacttcttcaaaaatacgagttgcaatattgcttgtattcaggtttcaaagtatattcgtgttggaaatccataaaaagcggctagcgctaaccaaatgttcatcaagcttgtgagcctgagtagggatcaataacgaaacaaaaaaaaataagtaaaaatcatgaacgctaattattccactgcattaaaaaaaagaaggtaaactggtcgaagtggatacatttgtcagcaaggacatttcttcacgtttg

SEQ ID NO: 17638 - DNA, 931 bp, Zea Mays
  misc_feature (931)..(931): n is a, c, g, or t
gcccgctaattggagtctctcccgtagtcccgtgtttgagttgttctctcatctccatcttcgcaacgaccacgaattccacggccaaccaatctctggtctatcgctctcttctccttgtctttaaatctgagacttttttttgttcgcgtcctccgccctcaaccgtagccacctcgctgcccctgccgccgacacccctgctcgccgttgctgcagccgcacaggcgatggatcatgaagaagtgcctcccgggttcctctatccgcagaatcgcggaggccgtccaggtcaagaactacgaacctggtgactatgtcgctcgcgaaggtgaacctgtcaatggcctttacatcatagtggatggccaggctgaagtttctgcacctgcgaatgcagaagaagcaaatcgcccagactatgtgttaaataagtacgactactttggttatggaactaatagttctgttcatcaagtcaatgttgttgcactatcaaagctgacctgcttcatattgcccaatcaatatggacatttgttacaaccaaaaacaatatggaatgcagaggaaacacctgaacattctttgctggaacaaattttgcacttagaaccactagaggtcgatattttccgtgggtttactttgccggaagctccaacttttaggcaagtttttggaggacaattcattggacaggcactagcagcagcatccaagactgttgattgtctaaaaatggtgcatagtttgcatgcaatttttcttgttgctggagacaataacataccgataatatatcaagttcatcgggcacgtgatggatccagctttgccacaagaaaagtggaggcaaagcagaagggcctagttgtattcaccttgattgcttctttccagaaggaagaagtgggttttgagcatcagn

SEQ ID NO: 17639 - DNA, 1046 bp, Zea Mays
  misc_feature (1046)..(1046): n is a, c, g, or t
gcccgctaattggagtctctcccgtagtcccgtgtttgagttgttctctcatctccatcttcgcaacgaccacgaattccacggccaaccaatctctggtctatcgctctcttctccttgtctttaaatctgagacttttttttgttcgcgtcctccgccctcaaccgtagccacctcgctgcccctgccgccgacacccctgctcgccgttgctgcagccgcacaggcgatggatcatgaagaagtgaccgaattcctgggccaggtgcccctcctgcagtgcctcccgggttcctctatccgcagaatcgcggaggccgtccaggtcaagaactacgaacctggtgactatgtcgctcgcgaaggtgaacctgtcaatggcctttacatcatagtggatggccagtaggagtgggggcagaagctgattctatttttagcagtaatattttctgctacttcaatgacatcctcattatcctgaaggctgaagtttctgcacctgcgaatgcagaagaagcaaatcgcccagactatgtgttaaataagtacgactactttggttatggaactaatagttctgttcatcaagtcaatgttgttgcactatcaaagctgacctgcttcatattgcccaatcaatatggacatttgttacaaccaaaaacaatatggaatgcagaggaaacacctgaacattctttgctggaacaaattttgcacttagaaccactagaggtcgatattttccgtgggtttactttgccggaagctccaacttttaggcaagtttttggaggacaattcattggacaggcactagcagcagcatccaagactgttgattgtctaaaaatggtgcatagtttgcatgcaatttttcttgttgctggagacaataacataccgataatatatcaagttcatcgggcacgtgatggatccagctttgccacaagaaaagtggaggcaaagcagaagggcctagttgtattcaccttgattgcttctttccagaaggaagaagtgggttttgagcatcagn

SEQ ID NO: 17640 - DNA, 928 bp, Zea Mays
  misc_feature (928)..(928): n is a, c, g, or t
gcccgctaattggagtctctcccgtagtcccgtgtttgagttgttctctcatctccatcttcgcaacgaccacgaattccacggccaaccaatctctggtctatcgctctcttctccttgtctttaaatctgagacttttttttgttcgcgtcctccgccctcaaccgtagccacctcgctgcccctgccgccgacacccctgctcgccgttgctgcagccgcacaggcgatggatcatgaagaagtgaccgaattcctgggccaggtgcccctcctgcagtgcctcccgggttcctctatccgcagaatcgcggaggccgtccaggtcaagaactacgaacctggtgactatgtcgctcgcgaaggtgaacctgtcaatggcctttacatcatagtggatggccagaagaagcaaatcgcccagactatgtgttaaataagtacgactactttggttatgttctgttcatcaagtcaatgttgttgcactatcaaagctgacctgcttcatattgcccaatcaatatggacatttgttacaaccaaaaacaatatggaatgcagaggaaacacctgaacattctttgctggaacaaattttgcacttagaaccactagaggtcgatattttccgtgggtttactttgccggaagctccaacttttaggcaagtttttggaggacaattcattggacaggcactagcagcagcatccaagactgttgattgtctaaaaatggtgcatagtttgcatgcaatttttcttgttgctggagacaataacataccgataatatatcaagttcatcgggcacgtgatggatccagctttgccacaagaaaagtggaggcaaagcagaagggcctagttgtattcaccttgattgcttctttccagaaggaagaagtgggttttgagcatcagn

SEQ ID NO: 17641 - DNA, 1017 bp, Zea Mays
  misc_feature (1017)..(1017): n is a, c, g, or t
agggaattgcccgctaattggagtctctcccgtagtcccgtgtttgagttgttctctcatctccatcttcgcaacgaccacgaattccacggccaaccaatctctggtctatcgctctcttctccttgtctttaaatctgagacttttttttgttcgcgtcctccgccctcaaccgtagccacctcgctgcccctgccgccgacacccctgctcgccgttgctgcagccgcacaggcgatggatcatgaagaagtgaccgaattcctgggccaggtgcccctcctgcagtgcctcccgggttcctctatccgcagaatcgcggaggccgtccaggtcaagaactacgaacctggtgactatgtcgctcgcgaaggtgaacctgtcaatggcctttacatcatagtggatggccagtaatattttctgctacttcaatgacatcctcattatcctgaaggctgaagtttctgcacctgcgaatgcagaagaagcaaatcgcccagactatgtgttaaataagtacgactactttggttatggaactaatagttctgttcatcaagtcaatgttgttgcactatcaaagctgacctgcttcatattgcccaatcaatatggacatttgttacaaccaaaaacaatatggaatgcagaggaaacacctgaacattctttgctggaacaaattttgcacttagaaccactagaggtcgatattttccgtgggtttactttgccggaagctccaacttttaggcaagtttttggaggacaattcattggacaggcactagcagcagcatccaagactgttgattgtctaaaaatggtgcatagtttgcatgcaatttttcttgttgctggagacaataacataccgataatatatcaagttcatcgggcacgtgatggatccagctttgccacaagaaaagtggaggcaaagcagaagggcctagttgtattcaccttgattgcttctttccagaaggaagaagtgggttttgagcatcagn

SEQ ID NO: 17642 - DNA, 964 bp, Zea Mays
  misc_feature (964)..(964): n is a, c, g, or t
ctaagatcttcatccgctagggaattgcccgctaattggagtctctcccgtagtcccgtgtttgagttgttctctcatctccatcttcgcaacgaccacgaattccacggccaaccaatctctggtctatcgctctcttctccttgtctttaaatctgagacttttttttgttcgcgtcctccgccctcaaccgtagccacctcgctgcccctgccgccgacacccctgctcgccgttgctgcagccgcacaggcgatggatcatgaagaagtgaccgaattcctgggccaggtgcccctcctgcagtgcctcccgggttcctctatccgcagaatcgcggaggccgtccaggtcaagaactacgaacctggtgactatgtcgctcgcgaaggtgaacctgtcaatggcctttacatcatagtggatggccagaagaagcaaatcgcccagactatgtgttaaataagtacgactactttggttatggaactaatagttctgttcatcaagtcaatgttgttgcactatcaaagctgacctgcttcatattgcccaatcaatatggacatttgttacaaccaaaaacaatatggaatgcagaggaaacacctgaacattctttgctggaacaaattttgcacttagaaccactagaggtcgatattttccgtgggtttactttgccggaagctccaacttttaggcaagtttttggaggacaattcattggacaggcactagcagcagcatccaagactgttgattgtctaaaaatggtgcatagtttgcatgcaatttttcttgttgctggagacaataacataccgataatatatcaagttcatcgggcacgtgatggatccagctttgccacaagaaaagtggaggcaaagcagaagggcctagttgtattcaccttgattgcttctttccagaaggaagaagtgggttttgagcatcagn

SEQ ID NO: 17643 - DNA, 1611 bp, Zea Mays
atgccggcatgccgcccaaggaactggagaagtggagagacagcgccgcggcccatacctcttgctcttgttgccgccgcgcagcctctctttctaacagctgggtcccaactactcctgtccccacttggcattgtaaccaagctgccgcagcccgcagcggccaccaatgcggagcggccgcctgcgtcccttcacctatccgaatggggcttatcgccaccatccaatcgaagctctggaacctcctccactcccagcttccgccgacgctcgcttcagctgctgctttccttcccatccttcaacaggtgcaatttgcatttcccatggagctcactgattaataacgtctcccttcagccttctttcaagttttacagaaagtgcctgacaaactgcccatattttgcactgaccatgcattcaactacaaagcccttgggttcatctatgccggtaaagagggcgcatttgaagccacatgccgcagacatcaagaggaacccccatgtacatgagctttacaaattggtttaccgacttccggagaaccttagctggctgttggcaccaccagaaattcctaaaagacctgcctcaaagaagaaaaaacaaaaagacgaaatagtggccggtaacagctttggtgtgatcttggagtgggagggagttgttgtggatgatgatgatccagacttggagccccgggtttggtatgttctatcactagaagaggggaagtctttccctccagatgcattgctgaagaaaatcgagggaatgagaactgaccaggctattgcagaagtcttatgttggtcagaagatccagcagaaatccaaaggttggcaacacacaaggaggttatatatcaaaaacttcaaggtggatactaccagctgcgaccacatgtgcttgatttcttgaacacccttgtgggttttgacattccaatagcaattgcagctcctcgctcaaggaagagccttgaagaagggatcaaaactgttggtctgcaaggctacttcgatgctatagttgcattggaggacttctgcttagggaaacctgatggtgagatgtttgaagtcgcagcggagcaacttggtctggaaccagatgcctgtgttgtgtttggtaactcaaacttgacgacggaatctgcacataacgctgggatgaggtgtgtggcagttgcaggccgacaccctgcctatgagctccaatcagcaaaccatgttgtgagatggcttgatcagctctctattgttgacttgcagaggcttgctaatggtgaagttattggtcgcaggggtagagaatctgacatggatatggaaattgtgattgaggaatgatgatgtttctgcaaaaatgacgcactaatatattgttgtgcttataatctgatacacctaagtaatgcattacattttgtaaacaggccaagcagtgcaagttccggactaaggatactccggagtttgcattaccttcctggtttgcttgtgatgaattggaattcgcctaaaactcttttagtcattagagttggaagtgaagaaactcccacccgtaacttgtatgtctttcgagaccaagcacga

SEQ ID NO: 17644 - DNA, 1526 bp, Zea Mays
atgccggcatgccgcccaaggaactggagaagtggagagacagcgccgcggcccatacctcttgctcttgttgccgccgcgcagcctctctttctaacagctgggtcccaactactcctgtccccacttggcattgtaaccaagctgccgcagcccgcagcggccaccaatgcggagcggccgcctgcgtcccttcacctatccgaatggggcttatcgccaccatccaatcgaagctctggaacctcctccactcccagcttccgccgacgctcgcttcagctgctgctttccttcccatccttcaacaggtgcaatttgcatttcccatggagctcactgattaataacgtcccttgggttcatctatgccggtaaagagggcgcatttgaagccacatgccgcagacatcaagaggaacccccatgtacatgagctttacaaattggtttaccgacttccggagaaccttagctggctgttggcaccaccagaaattcctaaaagacctgcctcaaagaagaaaaaacaaaaagacgaaatagtggccggtaacagctttggtgtgatcttggagtgggagggagttgttgtggatgatgatgatccagacttggagccccgggtttggtatgttctatcactagaagaggggaagtctttccctccagatgcattgctgaagaaaatcgagggaatgagaactgaccaggctattgcagaagtcttatgttggtcagaagatccagcagaaatccaaaggttggcaacacacaaggaggttatatatcaaaaacttcaaggtggatactaccagctgcgaccacatgtgcttgatttcttgaacacccttgtgggttttgacattccaatagcaattgcagctcctcgctcaaggaagagccttgaagaagggatcaaaactgttggtctgcaaggctacttcgatgctatagttgcattggaggacttctgcttagggaaacctgatggtgagatgtttgaagtcgcagcggagcaacttggtctggaaccagatgcctgtgttgtgtttggtaactcaaacttgacgacggaatctgcacataacgctgggatgaggtgtgtggcagttgcaggccgacaccctgcctatgagctccaatcagcaaaccatgttgtgagatggcttgatcagctctctattgttgacttgcagaggcttgctaatggtgaagttattggtcgcaggggtagagaatctgacatggatatggaaattgtgattgaggaatgatgatgtttctgcaaaaatgacgcactaatatattgttgtgcttataatctgatacacctaagtaatgcattacattttgtaaacaggccaagcagtgcaagttccggactaaggatactccggagtttgcattaccttcctggtttgcttgtgatgaattggaattcgcctaaaactcttttagtcattagagttggaagtgaagaaactcccacccgtaacttgtatgtctttcgagaccaagcacga

SEQ ID NO: 17645 - DNA, 2513 bp, Zea Mays
atgccggcatgccgcccaaggaactggagaagtggagagacagcgccgcggcccatacctcttgctcttgttgccgccgcgcagcctctctttctaacagctgggtcccaactactcctgtccccacttggcattgtaaccaagctgccgcagcccgcagcggccaccaatgcggagcggccgcctgcgtcccttcacctatccgaatggggcttatcgccaccatccaatcgaagctctggaacctcctccactcccagcttccgccgacgctcgcttcagctgctgctttccttcccatccttcaacaggtctgtataatcctctaatgtgtccggatcttgtgaagtagctactgattgggttaagatgaagcattgtgttgttcatttgttgtttgctgtctgtcgttcctggaaaaaaatgttcgtaaatggcggagtttcgctgcaagattgcgccttgttgcttcgcatttgttgtccaatagttgggatggagctaattaaactgagctccttatgctaaagttcgccttttattctgacacttgttgtaagttcgcctaaaatgcggaaggcatgtctataggaaaagttactgttaggttgttctttttataggtccatatgatgatctatctgtagaaatgctttcaagaagtgaggctctgcatatgctttcttcctaaactctaagtatactgccagcagaactaagataacgaaccaattgcttatccccagctagctgattttaatggaaaaaggaattcttgccccccttttgcagatttctttagtatttttgtttttggatcaaaggcttttacctagctttattagaaagcatattgctcaaaccctgacccagcactgggtttgccagtaaaaaacaaacaaacaaaactcgcataccagcgtgcaaagcacttctagttaacccctgctcacagatttctttagtttctcactgaagctaacactctataactaaacaagctgttaacatggagcatctatctctcgattgatgctggcaatgaatttatgcactgtgcattatgttgttataactttgcgaaagcaccattggtacagttgtaagatgtggaagtatagctccactcactatggctcaaatcctagtgtgcacatattgaagagaggtaaatggtggcgtgtacctctagttggtgcagaaggtggatataccccctccaatattttgtaaatttttttataccttttgcttgttcttaatgcaggtgcaatttgcatttcccatggagctcactgattaataacgtcccttgggttcatctatgccggtaaagagggcgcatttgaagccacatgccgcagacatcaagaggaacccccatgtacatgagctttacaaattggtttaccgacttccggagaaccttagctggctgttggcaccaccagaaattcctaaaagacctgcctcaaagaagaaaaaacaaaaagacgaaatagtggccggtaacagctttggtgtgatcttggagtgggagggagttgttgtggatgatgatgatccagacttggagccccgggtttggtatgttctatcactagaagaggggaagtctttccctccagatgcattgctgaagaaaatcgagggaatgagaactgaccaggctattgcagaagtcttatgttggtcagaagatccagcagaaatccaaaggttggcaacacacaaggaggttatatatcaaaaacttcaaggtggatactaccagctgcgaccacatgtgcttgatttcttgaacacccttgtgggttttgacattccaatagcaattgcagctcctcgctcaaggaagagccttgaagaagggatcaaaactgttggtctgcaaggctacttcgatgctatagttgcattggaggacttctgcttagggaaacctgatggtgagatgtttgaagtcgcagcggagcaacttggtctggaaccagatgcctgtgttgtgtttggtaactcaaacttgacgacggaatctgcacataacgctgggatgaggtgtgtggcagttgcaggccgacaccctgcctatgagctccaatcagcaaaccatgttgtgagatggcttgatcagctctctattgttgacttgcagaggcttgctaatggtgaagttattggtcgcaggggtagagaatctgacatggatatggaaattgtgattgaggaatgatgatgtttctgcaaaaatgacgcactaatatattgttgtgcttataatctgatacacctaagtaatgcattacattttgtaaacaggccaagcagtgcaagttccggactaaggatactccggagtttgcattaccttcctggtttgcttgtgatgaattggaattcgcctaaaactcttttagtcattagagttggaagtgaagaaactcccacccgtaacttgtgtatgtacagtatatatatgtattacctattcttccctacatctttgaaggtgt

SEQ ID NO: 17646 - DNA, 800 bp, Zea Mays
cacacttcatccgtcagactgtcacgaggcacgacctccgtcgtccaccccaacccaccctgggtccctggccatataaaaccctcgccggtgcggtgacgtctcgtcatctcggcccacaacctcagctagtcagctccgccgcttttgctttctctctccaggctctcggcttcgtccacaagctacagccgcgcgctcctccttgacccggcctgaccccgctagttcgccgcctgccgtctgccgccccagcatggccgccgcgtcgtccgccacctccgtccacgacttcaccgtcaaggattcgagcggcaaggacgttgacctcagcgtctacagggggaaggttcttctcatcgttaacgtcgcatcccaatgtggcttaaccaactccaactacactcagcaggcccagctctatgagaagtacaagaaccaaggctttgaaatcctcgctttcccgtgcaaccagtttggtgggcaggagcctggtaccaacgaggagattgcccagtttgcctgcacacgcttcaaggctgactaccccatctttgacaaggttgatgtcaatggtaacaatgctgcgcccatctacaagtttctgaaatctagcaagggtggccttttcggcgacagcatcaagtggaacttttccaagttcttggttgacaaggaggggcgtgttgtggatcgctatgctccaaccacttcacctctgagcattgaggctataaacataaatcttcaatcaagatgacgacgaactgacgcaaaggcgaaggagagagcgacgagag

SEQ ID NO: 17647 - DNA, 985 bp, Zea Mays
ctcgccggtgcggtgacgtctcgtcatctcggcccacaacctcagctagtcagctccgccgcttttgctttctctctccaggctctcggcttcgtccacaagctacagccgcgcgctcctccttgacccggcctgaccccgctagttcgccgcctgccgtctgccgccccagcatggccgccgcgtcgtccgccacctccgtccacgacttcaccgtcaaggattcgagcggcaaggacgttgacctcagcgtctacagggggaaggttcttctcatcgttaacgtcgcatcccaatgtggcttaaccaactccaactacactcagcaggcccagctctatgagaagtacaagaaccaaggcttgttcttgattcattgctcttgctttgaaatcctcgctttcccgtgcaaccagtttggtgggcaggagcctggtaccaacgaggagattgcccagtttgcctgcacacgcttcaaggctgactaccccatctttgacaaggttgatgtcaatggtaacaatgctgcgcccatctacaagtttctgaaatctagcaagggtggccttttcggcgacagcatcaagtggaacttttccaagttcttggttgacaaggaggggcgtgttgtggatcgctatgctccaaccacttcacctctgagcattgagggacctcgcgattagatgcgccgctagaccaacctccttgtcaccgtcctagtgcacagctcgccgccgcttactgatgattcttgagcgcctccctatcttccgccttctcctctaactctggtgagcgagagagtggatacgacagcgtcttgctaccacccatggggccccctcgttggtgtgtgctcccattcaagatgagcatgccacagccgagcggcctctcagtggtgccctagtggcctgttcgtgacattgctcctctttgtttcagctttttatagcttctggccatcaaaatttgttgcgga

SEQ ID NO: 17648 - DNA, 1044 bp, Zea Mays
cacacttcatccgtcagactgtcacgaggcacgacctccgtcgtccaccccaacccaccctgggtccctggccatataaaaccctcgccggtgcggtgacgtctcgtcatctcggcccacaacctcagctagtcagctccgccgcttttgctttctctctccaggctctcggcttcgtccacaagctacagccgcgcgctcctccttgacccggcctgaccccgctagttcgccgcctgccgtctgccgccccagcatggccgccgcgtcgtccgccacctccgtccacgacttcaccgtcaaggattcgagcggcaaggacgttgacctcagcgtctacagggggaaggttcttctcatcgttaacgtcgcatcccaatgtggcttaaccaactccaactacactcagcaggcccagctctatgagaagtacaagaaccaaggctttgaaatcctcgctttcccgtgcaaccagtttggtgggcaggagcctggtaccaacgaggagattgcccagtttgcctgcacacgcttcaaggctgactaccccatctttgacaaggttgatgtcaatggtaacaatgctgcgcccatctacaagtttctgaaatctagcaagggtggccttttcggcgacagcatcaagtggaacttttccaagttcttggttgacaaggaggggcgtgttgtggatcgctatgctccaaccacttcacctctgagcattgagggacctcgcgattagatgcgccgctagaccaacctccttgtcaccgtcctagtgcacagctcgccgccgcttactgatgattcttgagcgcctccctatcttccgccttctcctctaactctggtgagcgagagagtggatacgacagcgtcttgctaccacccatggggccccctcgttggtgtgtgctcccattcaagatgagcatgccacagccgagcggcctctcagtggtgccctagtggcctgttcgtgacattgctcctctttgtttcagctttttatagcttctggccatcaaaatttgttgcgga

SEQ ID NO: 17649 - DNA, 2425 bp, Zea Mays
cagaaacgcggtgatgtgtgaatcgtcaatgttcctgatgtcgccgtctccgtcaccgtcaccgccgcagccgtctaggccgccaccggagtacaagcacttctgtcgagtatgcaacaagggattcacgtgcggcagtgcgctcggtggacatatgagagctcatggcgctagcgacgttgatgggttcggcgtcgacgacgacgactcgctcgacgaagagccgacggcgcccgcgcggtgcactggggcagatcagtgggacgtggcgggaacgtcgtcggcgactcacgcgtacgcgctccgggcgaatccgaataggttgatcaggagctgtcaggtttgcaagaactgcgggaaggagttcacgtcgtgggatcttttccttcaacacgggaaatgcaactcatcagagggcggcgagggagaagagggtgagatggatgggtcagactcgctacgttcgtcgctgcctgcctcagaagccggcggcggcggcgaggaggacccggcagtggcagcagccgcatggtcaaaagggaaaagatcgcgtcgtgtcgtcagaacagatgacccttcgtccaccatggtgtcggcggagcggtgcacgtcaggggacgaggacgaagagcttgcaaattttcttgtcatgctctcgtcgtccaaatccaacaacaacgacgaccaaacgatcgttattacagccgaccatcataaggagccagtatgtgcctctactggtgaaggtggtggtggtggagagcctttaccatttcaatcgcaaacaatctctcttttcacgcaaacccaaacacaagagccagttgtgccactgctgccttcgacggtagcggctacggtatctcaatacatcgcacccatatcacgtggagtttttgagtgcaaggcgtgcaagaaggtgttcacctcacaccaagctcttggaggacatcgggctagccacaagaaagtaaaaggttgttttgctgctaggttcgacaacaatgccaccgaaacagcgatcaataatcctactatagctgctgataccaatagtaaggccgttgttgtcaataatgcagatgcaagcgtagacgccgccacaagagtttttgctatcactagcgtcgacaccgatgtagggacaagtaatgaggcaacatcatcgtcgttgtcaatggcacatgctgttcccatacgacacaatccagcatcagccaccaccaccacgttcaccgtcgcagcgcattgcaagaaaaacgtgaagatgcatgagtgttcagtatgccaccgcttgttcacctctgggcaggcactcggaggtcacaaacgatgccactggctcacctcaaacacgtcagatccatgtaacccactagccatcccacccctaactgaagatctcgtcgtcggcgaagttaaacaccacgacgataccctccaaccaacggtggatgccaccgagccactcctcgacctcacaatagcagcaaatccagctgtagcactagctgcttctacaatgcgccccgacatagcatctactgtacacttgaagcaactagttgtcgcagcaccaagtaataatgttagccaccgaaagaaaactgcagcaacgggtagccataccacagatgcggtggttgaggaagatgaggcggatagcatcataatcaagaaagctaagattagcgatcttaaagacgtggtcaatatggatggcaaggccgccacccgcccactccaacctcatgcacaggcaaccgtgaagcatccacaagcaacagtgaaacgtaatctgtgcttgctactcatctgtccaaaagtcctacaggtactggtgggcggtggtacatctgcgtcgggcacaccctgcactgcagcaagctctgtcgcatcctggccggactcttcctatagtacccattccgacaaggtgcaaggatcaggtagcatgcccgctactctaccaccactgatccatatctttcaggtcattgtattgctattttgcaggccatcgactagaacaaagatccttctagagaaccatattgtcgattcagaaatttctcttacagccactgttattttggtcggggccgatgtacatagagatgccagggaaggtgtcctggagtttgagagagctttcagggagaggttctctgcttacacattagctgctaagaggcatattgactccactaccatcttcgacgtccaaggtgtgatctatgtggtttttgctcttagaatatattgcttgtcatacatatgtttgttgttctgtatcacaacttctttagctaatttatatgatatgaggcctaggagttgccacttcgcttatgcttgcttcaactcttctcaggggctcacatggatcatcctcgagcgcaagcaaactttgagatcgcgctga

SEQ ID NO: 17650 - DNA, 4379 bp, Zea Mays
ttatgaggtccttcttgcttctctatttgtcagtggaaaagtacacttctctgaagaaaaaagagaaaagaagcacaaattcttgaagggacgaagaactaagactgaaggatcaaatccatcacctcaggtggaagatggctatgcccacattcttgatctgacccgagtacaaatggaggattgggttgtgactgttcctgagggccgtgtcgaggtcctgactatcattgaaagatacaacacaaaactttgttcactgacgaagaagtttgacattaaagatgagacctaccattggacccataattatcattttaattttaggttatatgagaagttactttgcagtgtgtttgatattctcgaagatgggcaacttgtagaggaggctgatgagatactggaaataacaaagctgacctggcctatattgggcgttactgagaagctgcaccacatattctatgcctgggtgcttttccagaagttttctcaaactggggagattcttctactgaaacatgcaagccttcagatacgggaatttcgattgtaccatgacgttaaagaaatagagttatatacaaacagttttatttgttctgtggatgcctatggtggcaacaaggttctaagtttggttgacagtgtcctactcaaaataaatgtttggtgccgcagacagctaggcaattatcatgcacactatagtaagaataactactcgatctttgaggccacactgaacttggtcttgctattggtgacaaactccagtgaggacgattttgaagaaaccatgttcattgagagcccagtagggagtacaccagaactgaagttgatccatttactcattgtcagatccatccatgctgcttataagcaagcactaatttcatcaaatggccgatcagattcagaatttaagcatccattgacaattcttgcaaatgagctaaaggcagtggcagagaaagagtgcactgacttcagtccaatacttaacaagcactatcctgaagctcaaagagtagctctaatcttcttacacatgctatatggaaaacaattggaacttttcttggaaaggacagataattcggagaactcaaaagagatactggcagcatcaaataattttgagctctttatagctcagaagctttactcagtgtatggggaaactgttgggtcttcattctccaactatttaaagccatacatggtaggtcacttttcttcaccccttgttctccaatggcttcatgctcaacacgagaatgtcttggagtggacaaaacgtactattgagatagaggattggacacctttatcagctcacgagaaacaagcaagatctgtggttgaagtattccggattgtggaggagactgttgatcagttctttaatacgagcctgcccctggaaattgtccacttgcgaagtctactcatcggaatcactaggagtcttgaagtctatttgcttcacatggaaaatcaacaagtgcctggatctactcttctccctagtgctccagtcttgacacgttatgcagaatcaatgaatccatttgcaaagaggaaacttattgagcctacggttcctgaagaaaaggttgctatgaagttgaacaatttggcagtgcccaaattatgtgtgaaactcaacactcttcaattcatcagggatcaacttgatgccatagaagaaggtgtcaaacaatcctgggtctctgtcttgtcagctgtcagattgttggattatttgtcttgtatggctagtggaagagctctttcagaaagtttgacatcatctgatgaatcggttgatgagttgtttacaatatttgatgatgtgcgaatgactgctgtgaagataactgatgtgatcttgaactttattggaacaagggctgtattttgggatatgcgggattcatttattttctctttgtatcgagacagcgttgaaggagcacgcatgcagatatttatccccacaattgaccaagttcttgatcaggtatgtgatttaattgttgatgtgttaagagaccaagttgtactcagaatatttcaagcctgcatggatggactcatttgggtcctactggatggaggcccatcacgtgctttttttgagacagatgtggatttgatgcaacaagatcttgctattctcaaggatctctttatagcagagggtcaaggtttaccaatagatatagttgaaaaggaggctagacaaactcaccagatattggacttatatatgctgaaggccgatgcagttattgatatgctgataaatgcaagtgaccaaatgcctcacgatcctgaagctacaaatgctcgaagaagatatgtacatgatgccaacacccttcttcgagttttgtgtcataagaaggataaaattgcctctacattcttgagaatccagtaccatcttccaaggtgttcagattatgatgatgttcctgtgaaggatgtgtcatctaaagtacctatcttttcagacatgctgaaaagaggtacctcattcaattggtctgagacagggcaacaaagctttagaattatgaagaagaaactgcaagaagctacttggcagtaaagatgggtcttgctaaggaaactctgcttggtttgcagttttttttatatatacaacagcagtgagctgtactcaatcagcaggggaagagcaccccgcgggcattgttttagaagacccccccccccccccccccccacacacacacacaaaataaacagtgcagaccctatagcatcacacccctaaccctggtcactacccacaagtaggtctgcactgcttgtgcaggttgactggcactatccacggataggctggcgctttgccactcttttgtgggttgtcagcaagggaggtttttaaaatcagcaccgaaatttgttcctgcaggaagttgaaatgagtcgttggaggtgctgagtcacaatcactaggctatgaatcctttcaccagtgagctgtactatcgaaggaactctgcacggtcaaggctccatattattcagtataagctcccaaaggtccacaatggtgctcattgtgacggtggccctggttgaattcatgaagtatgactgcaaagcttcatttggagggttttagtttcgaaaatatgaaggacaagcttggtgcagtggtgagaagccttaccagttaccaccgagccaaaggttgttagttctagagttccggtacaatgggcgctagtgcgctacatatttggaaacccgatagattaactattcgaaaatccggaagtaacatgactgtttattaagttatttttctcccccctcccaaaacaactggaagctgaagccaacacaggcggtgccaaagtggcctttaatattttcagaagcacgggagcactgtctatgcacaatccgttgcagttaaatgtctaggttggcaatgcgccaatgtagtgactgtcggatacttgtggttactgagctttaccggctcttggaactcgttactacagtaccaaagaagtgaagaagctgaagccaacgcaagctgtgccaacgaggcacgaaatatttgcacaggctcgggactcgggagctcactctgtctatgcactataagttgcagttaaggttcgttctagctgtcacgtcattatcaatcactagtgttagtttttatctacctcaacgatactgttgagaatcactattggtgatcaacaccattacatgtctcaatttcttccttattttcttggtcatctatttttaattctttggacaattctttaatggtcaaatgtggatcattttcatgtcattatttatttggtcggtgttatgattcatcgatttatcgttcaaacaattttatataatttaacttcatgttatctatatagaggtgtttcgctatggccttcttttggtcagaggtctaggtgcgttgcttgcactttgcattgcgctctagccctatcgcgaccaaacagggcgtggtggttcgacactatcggactttggagtcatagtatcgcatgcatcacttcggttagtgacaaagtgcacaatacatgtgctctagccagaaccagtttgtcgggcctgccatggaagtcatcctttgcaacttgaagcagctaggcatcatctaatctgcttggctgggtcgtaggcaagcagttgtggatgttgttgaagagggtgatatttcaattgtttgtggaccatcgatccttgagctcagctacatgatggtacacttgcgagaaggctcagtagtggagttgtatgtggttgtttagcttgtacacaagcatggcactttgatctcc

SEQ ID NO: 17651 - DNA, 4759 bp, Zea Mays
agtcaagaactgtctgatgatgatataagggaaacagcttatgaggtccttcttgcttctctatttgtcagtggaaaagtacacttctctgaagaaaaaagagaaaagaagcacaaattcttgaagggacgaagaactaagactgaaggatcaaatccatcacctcaggtggaagatggctatgcccacattcttgatctgacccgagtacaaatggagatttcagaatctatggacatcctgactaaacgagctttaagacatattagtttgaagacggtgaaagaaacgcttgatgtgccccgtatatcactacagctcttaagttctgttggcaaacttgattttccaaccgaaagattgcgtgggcaatggcagaaaagacaggcgaatgttcttgaagaactacttctcttctcagcatctcttgagtatgatacgagcaacacattacggatagttctctctaagctaaaaagtacagaggattgggttgtgactgttcctgagggccgtgtcgaggtcctgactatcattgaaagatacaacacaaaactttgttcactgacgaagaagtttgacattaaagatgagacctaccattggacccataattatcattttaattttaggttatatgagaagttactttgcagtgtgtttgatattctcgaagatgggcaacttgtagaggaggctgatgagatactggaaataacaaagctgacctggcctatattgggcgttactgagaagctgcaccacatattctatgcctgggtgcttttccagaagttttctcaaactggggagattcttctactgaaacatgcaagccttcagatacgggaatttcgattgtaccatgacgttaaagaaatagagttatatacaaacagttttatttgttctgtggatgcctatggtggcaacaaggttctaagtttggttgacagtgtcctactcaaaataaatgtttggtgccgcagacagctaggcaattatcatgcacactatagtaagaataactactcgatctttgaggccacactgaacttggtcttgctattggtgacaaactccagtgaggacgattttgaagaaaccatgttcattgagagcccagtagggagtacaccagaactgaagttgatccatttactcattgtcagatccatccatgctgcttataagcaagcactaatttcatcaaatggccgatcagattcagaatttaagcatccattgacaattcttgcaaatgagctaaaggcagtggcagagaaagagtgcactgacttcagtccaatacttaacaagcactatcctgaagctcaaagagtagctctaatcttcttacacatgctatatggaaaacaattggaacttttcttggaaaggacagataattcggagaactcaaaagagatactggcagcatcaaataattttgagctctttatagctcagaagctttactcagtgtatggggaaactgttgggtcttcattctccaactatttaaagccatacatggtaggtcacttttcttcaccccttgttctccaatggcttcatgctcaacacgagaatgtcttggagtggacaaaacgtactattgagatagaggattggacacctttatcagctcacgagaaacaagcaagatctgtggttgaagtattccggattgtggaggagactgttgatcagttctttaatacgagcctgcccctggaaattgtccacttgcgaagtctactcatcggaatcactaggagtcttgaagtctatttgcttcacatggaaaatcaacaagtgcctggatctactcttctccctagtgctccagtcttgacacgttatgcagaatcaatgaatccatttgcaaagaggaaacttattgagcctacggttcctgaagaaaaggttgctatgaagttgaacaatttggcagtgcccaaattatgtgtgaaactcaacactcttcaattcatcagggatcaacttgatgccatagaagaaggtgtcaaacaatcctgggtctctgtcttgtcagctgtcagattgttggattatttgtcttgtatggctagtggaagagctctttcagaaagtttgacatcatctgatgaatcggttgatgagttgtttacaatatttgatgatgtgcgaatgactgctgtgaagataactgatgtgatcttgaactttattggaacaagggctgtattttgggatatgcgggattcatttattttctctttgtatcgagacagcgttgaaggagcacgcatgcagatatttatccccacaattgaccaagttcttgatcaggtatgtgatttaattgttgatgtgttaagagaccaagttgtactcagaatatttcaagcctgcatggatggactcatttgggtcctactggatggaggcccatcacgtgctttttttgagacagatgtggatttgatgcaacaagatcttgctattctcaaggatctctttatagcagagggtcaaggtttaccaatagatatagttgaaaaggaggctagacaaactcaccagatattggacttatatatgctgaaggccgatgcagttattgatatgctgataaatgcaagtgaccaaatgcctcacgatcctgaagctacaaatgctcgaagaagatatgtacatgatgccaacacccttcttcgagttttgtgtcataagaaggataaaattgcctctacattcttgagaatccagtaccatcttccaaggtgttcagattatgatgatgttcctgtgaaggatgtgtcatctaaagtacctatcttttcagacatgctgaaaagaggtacctcattcaattggtctgagacagggcaacaaagctttagaattatgaagaagaaactgcaagaagctacttggcagtaaagatgggtcttgctaaggaaactctgcttggtttgcagttttttttatatatacaacagcagtgagctgtactcaatcagcaggggaagagcaccccgcgggcattgttttagaagacccccccccccccccccccccacacacacacacaaaataaacagtgcagaccctatagcatcacacccctaaccctggtcactacccacaagtagttgaaatgagtcgttggaggtgctgagtcacaatcactaggctatgaatcctttcaccagtgagctgtactatcgaaggaactctgcacggtcaaggctccatattattcagtataagctcccaaaggtccacaatggtgctcattgtgacggtggccctggttgaattcatgaagtatgactgcaaagcttcatttggagggttttagtttcgaaaatatgaaggacaagcttggtgcagtggtgagaagccttaccagttaccaccgagccaaaggtagttcgacacagcctttctacaaaaatacagggatacggcttgccacgattatttctctcgggccctactcatgtggaagtctgtctttttttttcccctcgaaaataccctggccgatccggtgctagtaccgaactggaggatttattttacctggtccttggcttcagcttgatcagattctctcttatgtacaggttgttagttctagagttccggtacaatgggcgctagtgcgctacatatttggaaacccgatagattaactattcgaaaatccggaagtaacatgactgtttattaagttatttttctcccccctcccaaaacaactggaagctgaagccaacacaggcggtgccaaagtggcctttaatattttcagaagcacgggagcactgtctatgcacaatccgttgcagttaaatgtctaggttggcaatgcgccaatgtagtgactgtcggatacttgtggttactgagctttaccggctcttggaactcgttactacagtaccaaagaagtgaagaagctgaagccaacgcaagctgtgccaacgaggcacgaaatatttgcacaggctcgggactcgggagctcactctgtctatgcactataagttgcagttaaggttcgttctagctgtcacgtcattatcaatcactagtgttagtttttatctacctcaacgatactgttgagaatcactattggtgatcaacaccattacatgtctcaatttcttccttattttcttggtcatctatttttaattctttggacaattctttaatggtcaaatgtggatcattttcatgtcattatttatttggtcggtgttatgattcatcgatttatcgttcaaacaattttatataatttaacttcatgttatctatatagaggtgtttcgctatggccttcttttggtcagaggtctaggtgcgttgcttgcactttgcattgcgctctagccctatcgcgaccaaacagggcgtggtggttcgacactatcggactttggagtcatagtatcgcatgcatcacttcggttagtgacaaagtgcacaatacatgtgctctagccagaaccagtttgtcgggcctgccatggaagtcatcctttgcaacttgaagcagctaggcatcatctaatctgcttggctgggtcgtaggcaagcagttgtggatgttgttgaagagggtgatatttcaattgtttgtggaccatcgatccttgagctcagctacatgatggtacacttgcgagaaggctcagtagtggagttgtatgtggttgtttagcttgtacacaagcatggcactttgatctcc

SEQ ID NO: 17652 - DNA, 5274 bp, Zea Mays
ctcagttttcaccctctccgtctcccgtgagccagccagaagtcctagctccgcgcccaaaccctcggcctcgaccagcacctgcgcgcggtgggccatggatgcggcgtcgatgctggagctgtatcgccgcgaccggcgcaggctcctcagcttcctgctctccgccggcggtggaggcggccgggccctcgatctctcccgcgtcgacctcgacgccgtcagcgccgactacgcgctcgagtgcgtcgcctccggcgcccattttaatgcttcggaagccacgaggaggtacttcgacgagaggaggtaccctatcatgattgggtcgtcatcagggaactcttattttcttctttcgaggccaatgccatctgattcctctccaaaggaagcagcacctagcattgggccacaggcacctgtacaagacaactcaagttcaacaggacaaccaactgaaccaagagatttcttcagggatgctcttagtacctcaggaataggctatgacacggaagatgataaattggcagatatttctcctcagcaagtaaacaaagtggatattctttctctaggtttgcctaggctaaccacagaactgtctgatgatgatataagggaaacagcttatgaggtccttcttgcttctctatttgtcagtggaaaagtacacttctctgaagaaaaaagagaaaagaagcacaaattcttgaagggacgaagaactaagactgaaggatcaaatccatcacctcaggtggaagatggctatgcccacattcttgatctgacccgagtacaaatggagatttcagaatctatggacatcctgactaaacgagctttaagacatattagtttgaagacggtgaaagaaacgcttgatgtgccccgtatatcactacagctcttaagttctgttggcaaacttgattttccaaccgaaagattgcgtgggcaatggcagaaaagacaggcgaatgttcttgaagaactacttctcttctcagcatctcttgagtatgatacgagcaacacattacggatagttctctctaagctaaaaagtacagaggattgggttgtgactgttcctgagggccgtgtcgaggtcctgactatcattgaaagatacaacacaaaactttgttcactgacgaagaagtttgacattaaagatgagacctaccattggacccataattatcattttaattttaggttatatgagaagttactttgcagtgtgtttgatattctcgaagatgggcaacttgtagaggaggctgatgagatactggaaataacaaagctgacctggcctatattgggcgttactgagaagctgcaccacatattctatgcctgggtgcttttccagaagttttctcaaactggggagattcttctactgaaacatgcaagccttcagatacgggaatttcgattgtaccatgacgttaaagaaatagagttatatacaaacagttttatttgttctgtggatgcctatggtggcaacaaggttctaagtttggttgacagtgtcctactcaaaataaatgtttggtgccgcagacagctaggcaattatcatgcacactataaataactactcgatctttgaggccacactgaacttggtcttgctattggtgacaaactccagtgaggacgattttgaagaaaccatgttcattgagagcccagtagggagtacaccagaactgaagttgatccatttactcattgtcagatccatccatgctgcttataagcaagcactaatttcatcaaatggccgatcagattcagaatttaagcatccattgacaattcttgcaaatgagctaaaggcagtggcagagaaagagtgcactgacttcagtccaatacttaacaagcactatcctgaagctcaaagagtagctctaatcttcttacacatgctatatggaaaacaattggaacttttcttggaaaggacagataattcggagaactcaaaagagatactggcagcatcaaataattttgagctctttatagctcagaagctttactcagtgtatggggaaactgttgggtcttcattctccaactatttaaagccatacatggtaggtcacttttcttcaccccttgttctccaatggcttcatgctcaacacgagaatgtcttggagtggacaaaacgtactattgagatagaggattggacacctttatcagctcacgagaaacaagcaagatctgtggttgaagtattccggattgtggaggagactgttgatcagttctttaatacgagcctgcccctggaaattgtccacttgcgaagtctactcatcggaatcactaggagtcttgaagtctatttgcttcacatggaaaatcaacaagtgcctggatctactcttctccctagtgctccagtcttgacacgttatgcagaatcaatgaatccatttgcaaagaggaaacttattgagcctacggttcctgaagaaaaggttgctatgaagttgaacaatttggcagtgcccaaattatgtgtgaaactcaacactcttcaattcatcagggatcaacttgatgccatagaagaaggtgtcaaacaatcctgggtctctgtcttgtcagctgtcagattgttggattatttgtcttgtatggctagtggaagagctctttcagaaagtttgacatcatctgatgaatcggttgatgagttgtttacaatatttgatgatgtgcgaatgactgctgtgaagataactgatgtgatcttgaactttattggaacaagggctgtattttgggatatgcgggattcatttattttctctttgtatcgagacagcgttgaaggagcacgcatgcagatatttatccccacaattgaccaagttcttgatcaggtatgtgatttaattgttgatgtgttaagagaccaagttgtactcagaatatttcaagcctgcatggatggactcatttgggtcctactggatggaggcccatcacgtgctttttttgagacagatgtggatttgatgcaacaagatcttgctattctcaaggatctctttatagcagagggtcaaggtttaccaatagatatagttgaaaaggaggctagacaaactcaccagatattggacttatatatgctgaaggccgatgcagttattgatatgctgataaatgcaagtgaccaaatgcctcacgatcctgaagctacaaatgctcgaagaagatatgtacatgatgccaacacccttcttcgagttttgtgtcataagaaggataaaattgcctctacattcttgagaatccagtaccatcttccaaggtgttcagattatgatgatgttcctgtgaaggatgtgtcatctaaagtacctatcttttcagacatgctgaaaagaggtacctcattcaattggtctgagacagggcaacaaagctttagaattatgaagaagaaactgcaagaagctacttggcagtaaagatgggtcttgctaaggaaactctgcttggtttgcagttttttttatatatacaacagcagtgagctgtactcaatcagcaggggaagagcaccccgcgggcattgttttagaagacccccccccccccccccccccacacacacacacaaaataaacagtgcagaccctatagcatcacacccctaaccctggtcactacccacaagtaggtctgcactgcttgtgcaggttgactggcactatccacggataggctggcgctttgccactcttttgtgggttgtcagcaagggaggtttttaaaatcagcaccgaaatttgttcctgcaggaagttgaaatgagtcgttggaggtgctgagtcacaatcactaggctatgaatcctttcaccagtgagctgtactatcgaaggaactctgcacggtcaaggctccatattattcagtataagctcccaaaggtccacaatggtgctcattgtgacggtggccctggttgaattcatgaagtatgactgcaaagcttcatttggagggttttagtttcgaaaatatgaaggacaagcttggtgcagtggtgagaagccttaccagttaccaccgagccaaaggttgttagttctagagttccggtacaatgggcgctagtgcgctacatatttggaaacccgatagattaactattcgaaaatccggaagtaacatgactgtttattaagttatttttctcccccctcccaaaacaactggaagctgaagccaacacaggcggtgccaaagtggcctttaatattttcagaagcacgggagcactgtctatgcacaatccgttgcagttaaatgtctaggttggcaatgcgccaatgtagtgactgtcggatacttgtggttactgagctttaccggctcttggaactcgttactacagtaccaaagaagtgaagaagctgaagccaacgcaagctgtgccaacgaggcacgaaatatttgcacaggctcgggactcgggagctcactctgtctatgcactataagttgcagttaaggttcgttctagctgtcacgtcattatcaatcactagtgttagtttttatctacctcaacgatactgttgagaatcactattggtgatcaacaccattacatgtctcaatttcttccttattttcttggtcatctatttttaattctttggacaattctttaatggtcaaatgtggatcattttcatgtcattatttatttggtcggtgttatgattcatcgatttatcgttcaaacaattttatataatttaacttcatgttatctatatagaggtgtttcgctatggccttcttttggtcagaggtctaggtgcgttgcttgcactttgcattgcgctctagccctatcgcgaccaaacagggcgtggtggttcgacactatcggactttggagtcatagtatcgcatgcatcacttcggttagtgacaaagtgcacaatacatgtgctctagccagaaccagtttgtcgggcctgccatggaagtcatcctttgcaacttgaagcagctaggcatcatctaatctgcttggctgggtcgtaggcaagcagttgtggatgttgttgaagagggtgatatttcaattgtttgtggaccatcgatccttgagctcagctacatgatggtacacttgcgagaaggctcagtagtggagttgtatgtggttgtttagcttgtacacaagcatggcactttgatctcc

SEQ ID NO: 17653 - DNA, 5179 bp, Zea Mays
ctcagttttcaccctctccgtctcccgtgagccagccagaagtcctagctccgcgcccaaaccctcggcctcgaccagcacctgcgcgcggtgggccatggatgcggcgtcgatgctggagctgtatcgccgcgaccggcgcaggctcctcagcttcctgctctccgccggcggtggaggcggccgggccctcgatctctcccgcgtcgacctcgacgccgtcagcgccgactacgcgctcgagtgcgtcgcctccggcgcccattttaatgcttcggaagccacgaggaggtacttcgacgagaggaggtaccctatcatgattgggtcgtcatcagggaactcttattttcttctttcgaggccaatgccatctgattcctctccaaaggaagcagcacctagcattgggccacaggcacctgtacaagacaactcaagttcaacaggacaaccaactgaaccaagagatttcttcagggatgctcttagtacctcaggaataggctatgacacggaagatgataaattggcagatatttctcctcagcaagtaaacaaagtggatattctttctctaggtttgcctaggctaaccacagaactgtctgatgatgatataagggaaacagcttatgaggtccttcttgcttctctatttgtcagtggaaaagtacacttctctgaagaaaaaagagaaaagaagcacaaattcttgaagggacgaagaactaagactgaaggatcaaatccatcacctcaggtggaagatggctatgcccacattcttgatctgacccgagtacaaatggagatttcagaatctatggacatcctgactaaacgagctttaagacatattagtttgaagacggtgaaagaaacgcttgatgtgccccgtatatcactacagctcttaagttctgttggcaaacttgattttccaaccgaaagattgcgtgggcaatggcagaaaagacaggcgaatgttcttgaagaactacttctcttctcagcatctcttgagtatgatacgagcaacacattacggatagttctctctaagctaaaaagtacagaggattgggttgtgactgttcctgagggccgtgtcgaggtcctgactatcattgaaagatacaacacaaaactttgttcactgacgaagaagtttgacattaaagatgagacctaccattggacccataattatcattttaattttaggttatatgagaagttactttgcagtgtgtttgatattctcgaagatgggcaacttgtagaggaggctgatgagatactggaaataacaaagctgacctggcctatattgggcgttactgagaagctgcaccacatattctatgcctgggtgcttttccagaagttttctcaaactggggagattcttctactgaaacatgcaagccttcagatacgggaatttcgattgtaccatgacgttaaagaaatagagttatatacaaacagttttatttgttctgtggatgcctatggtggcaacaaggttctaagtttggttgacagtgtcctactcaaaataaatgtttggtgccgcagacagctaggcaattatcatgcacactatagtaagaataactactcgatctttgaggccacactgaacttggtcttgctattggtgacaaactccagtgaggacgattttgaagaaaccatgttcattgagagcccagtagggagtacaccagaactgaagttgatccatttactcattgtcagatccatccatgctgcttataagcaattgacactttaatatgctccattaggcactaatttcatcaaatggccgatcagattcagaatttaagcatccattgacaattcttgcaaatgagctaaaggcagtggcagagaaagagtgcactgacttcagtccaatacttaacaagcactatcctgaagctcaaagagtagctctaatcttcttacacatgctatatggaaaacaattggaacttttcttggaaaggacagataattcggagaactcaaaagagatactggcagcatcaaataattttgagctctttatagctcagaagctttactcagtgtatggggaaactgttgggtcttcattctccaactatttaaagccatacatggtaggtcacttttcttcaccccttgttctccaatggcttcatgctcaacacgagaatgtcttggagtggacaaaacgtactattgagatagaggattggacacctttatcagctcacgagaaacaagcaagatctgtggttgaagtattccggattgtggaggagactgttgatcagttctttaatacgagcctgcccctggaaattgtccacttgcgaagtctactcatcggaatcactaggagtcttgaagtctatttgcttcacatggaaaatcaacaagtgcctggatctactcttctccctagtgctccagtcttgacacgttatgcagaatcaatgaatccatttgcaaagaggaaacttattgagcctacggttcctgaagaaaaggttgctatgaagttgaacaatttggcagtgcccaaattatgtgtgaaactcaacactcttcaattcatcagggatcaacttgatgccatagaagaaggtgtcaaacaatcctgggtctctgtcttgtcagctgtcagattgttggattatttgtcttgtatggctagtggaagagctctttcagaaagtttgacatcatctgatgaatcggttgatgagttgtttacaatatttgatgatgtgcgaatgactgctgtgaagataactgatgtgatcttgaactttattggaacaagggctgtattttgggatatgcgggattcatttattttctctttgtatcgagacagcgttgaaggagcacgcatgcagatatttatccccacaattgaccaagttcttgatcaggtatgtgatttaattgttgatgtgttaagagaccaagttgtactcagaatatttcaagcctgcatggatggactcatttgggtcctactggatggaggcccatcacgtgctttttttgagacagatgtggatttgatgcaacaagatcttgctattctcaaggatctctttatagcagagggtcaaggtttaccaatagatatagttgaaaaggaggctagacaaactcaccagatattggacttatatatgctgaaggccgatgcagttattgatatgctgataaatgcaagtgaccaaatgcctcacgatcctgaagctacaaatgctcgaagaagatatgtacatgatgccaacacccttcttcgagttttgtgtcataagaaggataaaattgcctctacattcttgagaatccagtaccatcttccaaggtgttcagattatgatgatgttcctgtgaaggatgtgtcatctaaagtacctatcttttcagacatgctgaaaagaggtacctcattcaattggtctgagacagggcaacaaagctttagaattatgaagaagaaactgcaagaagctacttggcagtaaagatgggtcttgctaaggaaactctgcttggtttgcagttttttttatatatacaacagcagtgagctgtactcaatcagcaggggaagagcaccccgcgggcattgttttagaagacccccccccccccccccccccacacacacacacaaaataaacagtgcagaccctatagcatcacacccctaaccctggtcactacccacaagaagttgaaatgagtcgttggaggtgctgagtcacaatcactaggctatgaatcctttcaccagtgagctgtactatcgaaggaactctgcacggtcaaggctccatattattcagtataagctcccaaaggtccacaatggtgctcattgtgacggtggccctggttgaattcatgaagtatgactgcaaagcttcatttggagggttttagtttcgaaaatatgaaggacaagcttggtgcagtggtgagaagccttaccagttaccaccgagccaaaggttgttagttctagagttccggtacaatgggcgctagtgcgctacatatttggaaacccgatagattaactattcgaaaatccggaagtaacatgactgtttattaagttatttttctcccccctcccaaaacaactggaagctgaagccaacacaggcggtgccaaagtggcctttaatattttcagaagcacgggagcactgtctatgcacaatccgttgcagttaaatgtctaggttggcaatgcgccaatgtagtgactgtcggatacttgtggttactgagctttaccggctcttggaactcgttactacagtaccaaagaagtgaagaagctgaagccaacgcaagctgtgccaacgaggcacgaaatatttgcacaggctcgggactcgggagctcactctgtctatgcactataagttgcagttaaggttcgttctagctgtcacgtcattatcaatcactagtgttagtttttatctacctcaacgatactgttgagaatcactattggtgatcaacaccattacatgtctcaatttcttccttattttcttggtcatctatttttaattctttggacaattctttaatggtcaaatgtggatcattttcatgtcattatttatttggtcggtgttatgattcatcgatttatcgttcaaacaattttatataatttaacttcatgttatctatatagaggtgtttcgctatggccttcttttggtcagaggtctaggtgcgttgcttgcactttgcattgcgctctagccctatcgcgaccaaacagggcgtggtggttcgacactatcggactttggagtcatagtatcgcatgcatcacttcggttagtgacaaagtgcacaatacatgtgctctagccagaaccagtttgtcgggcctgccatggaagtcatcctttgcaacttgaagcagctaggcatcatctaatctgcttggctgggtcgtaggcaagcagttgtggatgttgttgaagagggtgatatttcaattgtttgtggaccatcgatccttgagctcagctacatgatggtacacttgcgagaaggctcagtagtggagttgtatgtggttgtttagcttgtacacaagcatggcactttgatctcc

SEQ ID NO: 17654 - DNA, 5159 bp, Zea Mays
ctcagttttcaccctctccgtctcccgtgagccagccagaagtcctagctccgcgcccaaaccctcggcctcgaccagcacctgcgcgcggtgggccatggatgcggcgtcgatgctggagctgtatcgccgcgaccggcgcaggctcctcagcttcctgctctccgccggcggtggaggcggccgggccctcgatctctcccgcgtcgacctcgacgccgtcagcgccgactacgcgctcgagtgcgtcgcctccggcgcccattttaatgcttcggaagccacgaggaggtacttcgacgagaggaggtaccctatcatgattgggtcgtcatcagggaactcttattttcttctttcgaggccaatgccatctgattcctctccaaaggaagcagcacctagcattgggccacaggcacctgtacaagacaactcaagttcaacaggacaaccaactgaaccaagagatttcttcagggatgctcttagtacctcaggaataggctatgacacggaagatgataaattggcagatatttctcctcagcaagtaaacaaagtggatattctttctctaggtttgcctaggctaaccacagaactgtctgatgatgatataagggaaacagcttatgaggtccttcttgcttctctatttgtcagtggaaaagtacacttctctgaagaaaaaagagaaaagaagcacaaattcttgaagggacgaagaactaagactgaaggatcaaatccatcacctcaggtggaagatggctatgcccacattcttgatctgacccgagtacaaatggaggcaagatttcagaatctatggacatcctgactaaacgagctttaagacatattagtttgaagacggtgaaagaaacgcttgatgtgccccgtatatcactacagctcttaagttctgttggcaaacttgattttccaaccgaaagattgcgtgggcaatggcagaaaagacaggcgaatgttcttgaagaactacttctcttctcagcatctcttgagtatgatacgagcaacacattacggatagttctctctaagctaaaaagtacagaggattgggttgtgactgttcctgagggccgtgtcgaggtcctgactatcattgaaagatacaacacaaaactttgttcactgacgaagaagtttgacattaaagatgagacctaccattggacccataattatcattttaattttaggttatatgagaagttactttgcagtgtgtttgatattctcgaagatgggcaacttgtagaggaggctgatgagatactggaaataacaaagctgacctggcctatattgggcgttactgagaagctgcaccacatattctatgcctgggtgcttttccagaagttttctcaaactggggagattcttctactgaaacatgcaagccttcagatacgggaatttcgattgtaccatgacgttaaagaaatagagttatatacaaacagttttatttgttctgtggatgcctatggtggcaacaaggttctaagtttggttgacagtgtcctactcaaaataaatgtttggtgccgcagacagctaggcaattatcatgcacactatagtaagaataactactcgatctttgaggccacactgaacttggtcttgctattggtgacaaactccagtgaggacgattttgaagaaaccatgttcattgagagcccagtagggagtacaccagaactgaagttgatccatttactcattgtcagatccatccatgctgcttataagcaagcactaatttcatcaaatggccgatcagattcagaatttaagcatccattgacaattcttgcaaatgagctaaaggcagtggcagagaaagagtgcactgacttcagtccaatacttaacaagcactatcctgaagctcaaagagtagctctaatcttcttacacatgctatatggaaaacaattggaacttttcttggaaaggacagataattcggagaactcaaaagagatactggcagcatcaaataattttgagctctttatagctcagaagctttactcagtgtatggggaaactgttgggtcttcattctccaactatttaaagccatacatggtaggtcacttttcttcaccccttgttctccaatggcttcatgctcaacacgagaatgtcttggagtggacaaaacgtactattgagatagaggattggacacctttatcagctcacgagaaacaagcaagatctgtggttgaagtattccggattgtggaggagactgttgatcagttctttaatacgagcctgcccctggaaattgtccacttgcgaagtctactcatcggaatcactaggagtcttgaagtctatttgcttcacatggaaaatcaacaagtgcctggatctactcttctccctagtgctccagtcttgacacgttatgcagaatcaatgaatccatttgcaaagaggaaacttattgagcctacggttcctgaagaaaaggttgctatgaagttgaacaatttggcagtgcccaaattatgtgtgaaactcaacactcttcaattcatcagggatcaacttgatgccatagaagaaggtgtcaaacaatcctgggtctctgtcttgtcagctgtcagattgttggattatttgtcttgtatggctagtggaagagctctttcagaaagtttgacatcatctgatgaatcggttgatgagttgtttacaatatttgatgatgtgcgaatgactgctgtgaagataactgatgtgatcttgaactttattggaacaagggctgtattttgggatatgcgggattcatttattttctctttgtatcgagacagcgttgaaggagcacgcatgcagatatttatccccacaattgaccaagttcttgatcaggtatgtgatttaattgttgatgtgttaagagaccaagttgtactcagaatatttcaagcctgcatggatggactcatttgggtcctactggatggaggcccatcacgtgctttttttgagacagatgtggatttgatgcaacaagatcttgctattctcaaggatctctttatagcagagggtcaaggtttaccaatagatatagttgaaaaggaggctagacaaactcaccagatattggacttatatatgctgaaggccgatgcagttattgatatgctgataaatgcaagtgaccaaatgcctcacgatcctgaagctacaaatgctcgaagaagatatgtacatgatgccaacacccttcttcgagttttgtgtcataagaaggataaaattgcctctacattcttgagaatccagtaccatcttccaaggtgttcagattatgatgatgttcctgtgaaggatgtgtcatctaaagtacctatcttttcagacatgctgaaaagaggtacctcattcaattggtctgagacagggcaacaaagctttagaattatgaagaagaaactgcaagaagctacttggcagtaaagatgggtcttgctaaggaaactctgcttggtttgcagttttttttatatatacaacagcagtgagctgtactcaatcagcaggggaagagcaccccgcgggcattgttttagaagacccccccccccccccccccccacacacacacacaaaataaacagtgcagaccctatagcatcacacccctaaccctggtcactacccacaagaagttgaaatgagtcgttggaggtgctgagtcacaatcactaggctatgaatcctttcaccagtgagctgtactatcgaaggaactctgcacggtcaaggctccatattattcagtataagctcccaaaggtccacaatggtgctcattgtgacggtggccctggttgaattcatgaagtatgactgcaaagcttcatttggagggttttagtttcgaaaatatgaaggacaagcttggtgcagtggtgagaagccttaccagttaccaccgagccaaaggttgttagttctagagttccggtacaatgggcgctagtgcgctacatatttggaaacccgatagattaactattcgaaaatccggaagtaacatgactgtttattaagttatttttctcccccctcccaaaacaactggaagctgaagccaacacaggcggtgccaaagtggcctttaatattttcagaagcacgggagcactgtctatgcacaatccgttgcagttaaatgtctaggttggcaatgcgccaatgtagtgactgtcggatacttgtggttactgagctttaccggctcttggaactcgttactacagtaccaaagaagtgaagaagctgaagccaacgcaagctgtgccaacgaggcacgaaatatttgcacaggctcgggactcgggagctcactctgtctatgcactataagttgcagttaaggttcgttctagctgtcacgtcattatcaatcactagtgttagtttttatctacctcaacgatactgttgagaatcactattggtgatcaacaccattacatgtctcaatttcttccttattttcttggtcatctatttttaattctttggacaattctttaatggtcaaatgtggatcattttcatgtcattatttatttggtcggtgttatgattcatcgatttatcgttcaaacaattttatataatttaacttcatgttatctatatagaggtgtttcgctatggccttcttttggtcagaggtctaggtgcgttgcttgcactttgcattgcgctctagccctatcgcgaccaaacagggcgtggtggttcgacactatcggactttggagtcatagtatcgcatgcatcacttcggttagtgacaaagtgcacaatacatgtgctctagccagaaccagtttgtcgggcctgccatggaagtcatcctttgcaacttgaagcagctaggcatcatctaatctgcttggctgggtcgtaggcaagcagttgtggatgttgttgaagagggtgatatttcaattgtttgtggaccatcgatccttgagctcagctacatgatggtacacttgcgagaaggctcagtagtggagttgtatgtggttgtttagcttgtacacaagcatggcactttgatctcc

SEQ ID NO: 17655 - DNA, 5159 bp, Zea Mays
ctcagttttcaccctctccgtctcccgtgagccagccagaagtcctagctccgcgcccaaaccctcggcctcgaccagcacctgcgcgcggtgggccatggatgcggcgtcgatgctggagctgtatcgccgcgaccggcgcaggctcctcagcttcctgctctccgccggcggtggaggcggccgggccctcgatctctcccgcgtcgacctcgacgccgtcagcgccgactacgcgctcgagtgcgtcgcctccgctcaggcgcccattttaatgcttcggaagccacgaggaggtacttcgacgagaggaggtaccctatcatgattgggtcgtcatcagggaactcttattttcttctttcgaggccaatgccatctgattcctctccaaaggaagcagcacctagcattgggccacaggcacctgtacaagacaactcaagttcaacaggacaaccaactgaaccaagagatttcttcagggatgctcttagtacctcaggaataggctatgacacggaagatgataaattggcagatatttctcctcagcaagtaaacaaagtggatattctttctctaggtttgcctaggctaaccacagaactgtctgatgatgatataagggaaacagcttatgaggtccttcttgcttctctatttgtcagtggaaaagtacacttctctgaagaaaaaagagaaaagaagcacaaattcttgaagggacgaagaactaagactgaaggatcaaatccatcacctcaggtggaagatggctatgcccacattcttgatctgacccgagtacaaatggagatttcagaatctatggacatcctgactaaacgagctttaagacatattagtttgaagacggtgaaagaaacgcttgatgtgccccgtatatcactacagctcttaagttctgttggcaaacttgattttccaaccgaaagattgcgtgggcaatggcagaaaagacaggcgaatgttcttgaagaactacttctcttctcagcatctcttgagtatgatacgagcaacacattacggatagttctctctaagctaaaaagtacagaggattgggttgtgactgttcctgagggccgtgtcgaggtcctgactatcattgaaagatacaacacaaaactttgttcactgacgaagaagtttgacattaaagatgagacctaccattggacccataattatcattttaattttaggttatatgagaagttactttgcagtgtgtttgatattctcgaagatgggcaacttgtagaggaggctgatgagatactggaaataacaaagctgacctggcctatattgggcgttactgagaagctgcaccacatattctatgcctgggtgcttttccagaagttttctcaaactggggagattcttctactgaaacatgcaagccttcagatacgggaatttcgattgtaccatgacgttaaagaaatagagttatatacaaacagttttatttgttctgtggatgcctatggtggcaacaaggttctaagtttggttgacagtgtcctactcaaaataaatgtttggtgccgcagacagctaggcaattatcatgcacactatagtaagaataactactcgatctttgaggccacactgaacttggtcttgctattggtgacaaactccagtgaggacgattttgaagaaaccatgttcattgagagcccagtagggagtacaccagaactgaagttgatccatttactcattgtcagatccatccatgctgcttataagcaagcactaatttcatcaaatggccgatcagattcagaatttaagcatccattgacaattcttgcaaatgagctaaaggcagtggcagagaaagagtgcactgacttcagtccaatacttaacaagcactatcctgaagctcaaagagtagctctaatcttcttacacatgctatatggaaaacaattggaacttttcttggaaaggacagataattcggagaactcaaaagagatactggcagcatcaaataattttgagctctttatagctcagaagctttactcagtgtatggggaaactgttgggtcttcattctccaactatttaaagccatacatggtaggtcacttttcttcaccccttgttctccaatggcttcatgctcaacacgagaatgtcttggagtggacaaaacgtactattgagatagaggattggacacctttatcagctcacgagaaacaagcaagatctgtggttgaagtattccggattgtggaggagactgttgatcagttctttaatacgagcctgcccctggaaattgtccacttgcgaagtctactcatcggaatcactaggagtcttgaagtctatttgcttcacatggaaaatcaacaagtgcctggatctactcttctccctagtgctccagtcttgacacgttatgcagaatcaatgaatccatttgcaaagaggaaacttattgagcctacggttcctgaagaaaaggttgctatgaagttgaacaatttggcagtgcccaaattatgtgtgaaactcaacactcttcaattcatcagggatcaacttgatgccatagaagaaggtgtcaaacaatcctgggtctctgtcttgtcagctgtcagattgttggattatttgtcttgtatggctagtggaagagctctttcagaaagtttgacatcatctgatgaatcggttgatgagttgtttacaatatttgatgatgtgcgaatgactgctgtgaagataactgatgtgatcttgaactttattggaacaagggctgtattttgggatatgcgggattcatttattttctctttgtatcgagacagcgttgaaggagcacgcatgcagatatttatccccacaattgaccaagttcttgatcaggtatgtgatttaattgttgatgtgttaagagaccaagttgtactcagaatatttcaagcctgcatggatggactcatttgggtcctactggatggaggcccatcacgtgctttttttgagacagatgtggatttgatgcaacaagatcttgctattctcaaggatctctttatagcagagggtcaaggtttaccaatagatatagttgaaaaggaggctagacaaactcaccagatattggacttatatatgctgaaggccgatgcagttattgatatgctgataaatgcaagtgaccaaatgcctcacgatcctgaagctacaaatgctcgaagaagatatgtacatgatgccaacacccttcttcgagttttgtgtcataagaaggataaaattgcctctacattcttgagaatccagtaccatcttccaaggtgttcagattatgatgatgttcctgtgaaggatgtgtcatctaaagtacctatcttttcagacatgctgaaaagaggtacctcattcaattggtctgagacagggcaacaaagctttagaattatgaagaagaaactgcaagaagctacttggcagtaaagatgggtcttgctaaggaaactctgcttggtttgcagttttttttatatatacaacagcagtgagctgtactcaatcagcaggggaagagcaccccgcgggcattgttttagaagacccccccccccccccccccccacacacacacacaaaataaacagtgcagaccctatagcatcacacccctaaccctggtcactacccacaagaagttgaaatgagtcgttggaggtgctgagtcacaatcactaggctatgaatcctttcaccagtgagctgtactatcgaaggaactctgcacggtcaaggctccatattattcagtataagctcccaaaggtccacaatggtgctcattgtgacggtggccctggttgaattcatgaagtatgactgcaaagcttcatttggagggttttagtttcgaaaatatgaaggacaagcttggtgcagtggtgagaagccttaccagttaccaccgagccaaaggttgttagttctagagttccggtacaatgggcgctagtgcgctacatatttggaaacccgatagattaactattcgaaaatccggaagtaacatgactgtttattaagttatttttctcccccctcccaaaacaactggaagctgaagccaacacaggcggtgccaaagtggcctttaatattttcagaagcacgggagcactgtctatgcacaatccgttgcagttaaatgtctaggttggcaatgcgccaatgtagtgactgtcggatacttgtggttactgagctttaccggctcttggaactcgttactacagtaccaaagaagtgaagaagctgaagccaacgcaagctgtgccaacgaggcacgaaatatttgcacaggctcgggactcgggagctcactctgtctatgcactataagttgcagttaaggttcgttctagctgtcacgtcattatcaatcactagtgttagtttttatctacctcaacgatactgttgagaatcactattggtgatcaacaccattacatgtctcaatttcttccttattttcttggtcatctatttttaattctttggacaattctttaatggtcaaatgtggatcattttcatgtcattatttatttggtcggtgttatgattcatcgatttatcgttcaaacaattttatataatttaacttcatgttatctatatagaggtgtttcgctatggccttcttttggtcagaggtctaggtgcgttgcttgcactttgcattgcgctctagccctatcgcgaccaaacagggcgtggtggttcgacactatcggactttggagtcatagtatcgcatgcatcacttcggttagtgacaaagtgcacaatacatgtgctctagccagaaccagtttgtcgggcctgccatggaagtcatcctttgcaacttgaagcagctaggcatcatctaatctgcttggctgggtcgtaggcaagcagttgtggatgttgttgaagagggtgatatttcaattgtttgtggaccatcgatccttgagctcagctacatgatggtacacttgcgagaaggctcagtagtggagttgtatgtggttgtttagcttgtacacaagcatggcactttgatctcc

SEQ ID NO: 17656 - DNA, 5238 bp, Zea Mays
ctcagttttcaccctctccgtctcccgtgagccagccagaagtcctagctccgcgcccaaaccctcggcctcgaccagcacctgcgcgcggtgggccatggatgcggcgtcgatgctggagctgtatcgccgcgaccggcgcaggctcctcagcttcctgctctccgccggcggtggaggcggccgggccctcgatctctcccgcgtcgacctcgacgccgtcagcgccgactacgcgctcgagtgcgtcgcctccggcgcccattttaatgcttcggaagccacgaggaggtacttcgacgagaggaggtaccctatcatggccaatgccatctgattcctctccaaaggaagcagcacctagcattgggccacaggcacctgtacaagacaactcaagttcaacaggacaaccaactgaaccaagagatttcttcagggatgctcttagtacctcaggaataggctatgacacggaagatgataaattggcagatatttctcctcagcaagtaaacaaagtggatattctttctctaggtttgcctaggctaaccacagaactgtctgatgatgatataagggaaacagcttatgaggtccttcttgcttctctatttgtcagtggaaaagtacacttctctgaagaaaaaagagaaaagaagcacaaattcttgaagggacgaagaactaagactgaaggatcaaatccatcacctcaggtggaagatggctatgcccacattcttgatctgacccgagtacaaatggagatttcagaatctatggacatcctgactaaacgagctttaagacatattagtttgaagacggtgaaagaaacgcttgatgtgccccgtatatcactacagctcttaagttctgttggcaaacttgattttccaaccgaaagattgcgtgggcaatggcagaaaagacaggcgaatgttcttgaagaactacttctcttctcagcatctcttgagtatgatacgagcaacacattacggatagttctctctaagctaaaaagtacagaggattgggttgtgactgttcctgagggccgtgtcgaggtcctgactatcattgaaagatacaacacaaaactttgttcactgacgaagaagtttgacattaaagatgagacctaccattggacccataattatcattttaattttaggttatatgagaagttactttgcagtgtgtttgatattctcgaagatgggcaacttgtagaggaggctgatgagatactggaaataacaaagctgacctggcctatattgggcgttactgagaagctgcaccacatattctatgcctgggtgcttttccagaagttttctcaaactggggagattcttctactgaaacatgcaagccttcagatacgggaatttcgattgtaccatgacgttaaagaaatagagttatatacaaacagttttatttgttctgtggatgcctatggtggcaacaaggttctaagtttggttgacagtgtcctactcaaaataaatgtttggtgccgcagacagctaggcaattatcatgcacactatagtaagaataactactcgatctttgaggccacactgaacttggtcttgctattggtgacaaactccagtgaggacgattttgaagaaaccatgttcattgagagcccagtagggagtacaccagaactgaagttgatccatttactcattgtcagatccatccatgctgcttataagcaagcactaatttcatcaaatggccgatcagattcagaatttaagcatccattgacaattcttgcaaatgagctaaaggcagtggcagagaaagagtgcactgacttcagtccaatacttaacaagcactatcctgaagctcaaagagtagctctaatcttcttacacatgctatatggaaaacaattggaacttttcttggaaaggacagataattcggagaactcaaaagagatactggcagcatcaaataattttgagctctttatagctcagaagctttactcagtgtatggggaaactgttgggtcttcattctccaactatttaaagccatacatggtaggtcacttttcttcaccccttgttctccaatggcttcatgctcaacacgagaatgtcttggagtggacaaaacgtactattgagatagaggattggacacctttatcagctcacgagaaacaagcaagatctgtggttgaagtattccggattgtggaggagactgttgatcagttctttaatacgagcctgcccctggaaattgtccacttgcgaagtctactcatcggaatcactaggagtcttgaagtctatttgcttcacatggaaaatcaacaagtgcctggatctactcttctccctagtgctccagtcttgacacgttatgcagaatcaatgaatccatttgcaaagaggaaacttattgagcctacggttcctgaagaaaaggttgctatgaagttgaacaatttggcagtgcccaaattatgtgtgaaactcaacactcttcaattcatcagggatcaacttgatgccatagaagaaggtgtcaaacaatcctgggtctctgtcttgtcagctgtcagattgttggattatttgtcttgtatggctagtggaagagctctttcagaaagtttgacatcatctgatgaatcggttgatgagttgtttacaatatttgatgatgtgcgaatgactgctgtgaagataactgatgtgatcttgaactttattggaacaagggctgtattttgggatatgcgggattcatttattttctctttgtatcgagacagcgttgaaggagcacgcatgcagatatttatccccacaattgaccaagttcttgatcaggtatgtgatttaattgttgatgtgttaagagaccaagttgtactcagaatatttcaagcctgcatggatggactcatttgggtcctactggatggaggcccatcacgtgctttttttgagacagatgtggatttgatgcaacaagatcttgctattctcaaggatctctttatagcagagggtcaaggtttaccaatagatatagttgaaaaggaggctagacaaactcaccagatattggacttatatatgctgaaggccgatgcagttattgatatgctgataaatgcaagtgaccaaatgcctcacgatcctgaagctacaaatgctcgaagaagatatgtacatgatgccaacacccttcttcgagttttgtgtcataagaaggataaaattgcctctacattcttgagaatccagtaccatcttccaaggtgttcagattatgatgatgttcctgtgaaggatgtgtcatctaaagtacctatcttttcagacatgctgaaaagaggtacctcattcaattggtctgagacagggcaacaaagctttagaattatgaagaagaaactgcaagaagctacttggcagtaaagatgggtcttgctaaggaaactctgcttggtttgcagttttttttatatatacaacagcagtgagctgtactcaatcagcaggggaagagcaccccgcgggcattgttttagaagacccccccccccccccccccccacacacacacacaaaataaacagtgcagaccctatagcatcacacccctaaccctggtcactacccacaagtaggtctgcactgcttgtgcaggttgactggcactatccacggataggctggcgctttgccactcttttgtgggttgtcagcaagggaggtttttaaaatcagcaccgaaatttgttcctgcaggaagttgaaatgagtcgttggaggtgctgagtcacaatcactaggctatgaatcctttcaccagtgagctgtactatcgaaggaactctgcacggtcaaggctccatattattcagtataagctcccaaaggtccacaatggtgctcattgtgacggtggccctggttgaattcatgaagtatgactgcaaagcttcatttggagggttttagtttcgaaaatatgaaggacaagcttggtgcagtggtgagaagccttaccagttaccaccgagccaaaggttgttagttctagagttccggtacaatgggcgctagtgcgctacatatttggaaacccgatagattaactattcgaaaatccggaagtaacatgactgtttattaagttatttttctcccccctcccaaaacaactggaagctgaagccaacacaggcggtgccaaagtggcctttaatattttcagaagcacgggagcactgtctatgcacaatccgttgcagttaaatgtctaggttggcaatgcgccaatgtagtgactgtcggatacttgtggttactgagctttaccggctcttggaactcgttactacagtaccaaagaagtgaagaagctgaagccaacgcaagctgtgccaacgaggcacgaaatatttgcacaggctcgggactcgggagctcactctgtctatgcactataagttgcagttaaggttcgttctagctgtcacgtcattatcaatcactagtgttagtttttatctacctcaacgatactgttgagaatcactattggtgatcaacaccattacatgtctcaatttcttccttattttcttggtcatctatttttaattctttggacaattctttaatggtcaaatgtggatcattttcatgtcattatttatttggtcggtgttatgattcatcgatttatcgttcaaacaattttatataatttaacttcatgttatctatatagaggtgtttcgctatggccttcttttggtcagaggtctaggtgcgttgcttgcactttgcattgcgctctagccctatcgcgaccaaacagggcgtggtggttcgacactatcggactttggagtcatagtatcgcatgcatcacttcggttagtgacaaagtgcacaatacatgtgctctagccagaaccagtttgtcgggcctgccatggaagtcatcctttgcaacttgaagcagctaggcatcatctaatctgcttggctgggtcgtaggcaagcagttgtggatgttgttgaagagggtgatatttcaattgtttgtggaccatcgatccttgagctcagctacatgatggtacacttgcgagaaggctcagtagtggagttgtatgtggttgtttagcttgtacacaagcatggcactttgatctcc

SEQ ID NO: 17657 - DNA, 5240 bp, Zea Mays
aggaaatgaatttcgaaaggaggaagcggaccggtagtccagttttgctgcgtcgcggggccccgacgcgtcgcagggccagtctcctcagttttcaccctctccgtctcccgtgagccagccagaagtcctagctccgcgcccaaaccctcggcctcgaccagcacctgcgcgcggtgggccatggatgcggcgtcgatgctggagctgtatcgccgcgaccggcgcaggctcctcagcttcctgctctccgccggcggtggaggcggccgggccctcgatctctcccgcgtcgacctcgacgccgtcagcgccgactacgcgctcgagtgcgtcgcctccggcgcccattttaatgcttcggaagccacgaggaggtacttcgacgagaggaggtaccctatcatgattgggtcgtcatcagggaactcttattttcttctttcgaggccaatgccatctgattcctctccaaaggaagcagcacctagcattgggccacaggcacctgtacaagacaactcaagttcaacaggacaaccaactgaaccaagagatttcttcagggatgctcttagtacctcaggaataggctatgacacggaagatgataaattggcagatatttctcctcagcaagtaaacaaagtggatattctttctctaggtttgcctaggctaaccacagaactgtctgatgatgatataagggaaacagcttatgaggtccttcttgcttctctatttgtcagtggaaaagtacacttctctgaagaaaaaagagaaaagaagcacaaattcttgaagggacgaagaactaagactgaaggatcaaatccatcacctcaggtggaagatggctatgcccacattcttgatctgacccgagtacaaatggagatttcagaatctatggacatcctgactaaacgagctttaagacatattagtttgaagacggtgaaagaaacgcttgatgtgccccgtatatcactacagctcttaagttctgttggcaaacttgattttccaaccgaaagattgcgtgggcaatggcagaaaagacaggcgaatgttcttgaagaactacttctcttctcagcatctcttgagtatgatacgagcaacacattacggatagttctctctaagctaaaaagtacagaggattgggttgtgactgttcctgagggccgtgtcgaggtcctgactatcattgaaagatacaacacaaaactttgttcactgacgaagaagtttgacattaaagatgagacctaccattggacccataattatcattttaattttaggttatatgagaagttactttgcagtgtgtttgatattctcgaagatgggcaacttgtagaggaggctgatgagatactggaaataacaaagctgacctggcctatattgggcgttactgagaagctgcaccacatattctatgcctgggtgcttttccagaagttttctcaaactggggagattcttctactgaaacatgcaagccttcagatacgggaatttcgattgtaccatgacgttaaagaaatagagttatatacaaacagttttatttgttctgtggatgcctatggtggcaacaaggttctaagtttggttgacagtgtcctactcaaaataaatgtttggtgccgcagacagctaggcaattatcatgcacactatagtaagaataactactcgatctttgaggccacactgaacttggtcttgctattggtgacaaactccagtgaggacgattttgaagaaaccatgttcattgagagcccagtagggagtacaccagaactgaagttgatccatttactcattgtcagatccatccatgctgcttataagcaagcactaatttcatcaaatggccgatcagattcagaatttaagcatccattgacaattcttgcaaatgagctaaaggcagtggcagagaaagagtgcactgacttcagtccaatacttaacaagcactatcctgaagctcaaagagtagctctaatcttcttacacatgctatatggaaaacaattggaacttttcttggaaaggacagataattcggagaactcaaaagagatactggcagcatcaaataattttgagctctttatagctcagaagctttactcagtgtatggggaaactgttgggtcttcattctccaactatttaaagccatacatggtaggtcacttttcttcaccccttgttctccaatggcttcatgctcaacacgagaatgtcttggagtggacaaaacgtactattgagatagaggattggacacctttatcagctcacgagaaacaagcaagatctgtggttgaagtattccggattgtggaggagactgttgatcagttctttaatacgagcctgcccctggaaattgtccacttgcgaagtctactcatcggaatcactaggagtcttgaagtctatttgcttcacatggaaaatcaacaagtgcctggatctactcttctccctagtgctccagtcttgacacgttatgcagaatcaatgaatccatttgcaaagaggaaacttattgagcctacggttcctgaagaaaaggttgctatgaagttgaacaatttggcagtgcccaaattatgtgtgaaactcaacactcttcaattcatcagggatcaacttgatgccatagaagaaggtgtcaaacaatcctgggtctctgtcttgtcagctgtcagattgttggattatttgtcttgtatggctagtggaagagctctttcagaaagtttgacatcatctgatgaatcggttgatgagttgtttacaatatttgatgatgtgcgaatgactgctgtgaagataactgatgtgatcttgaactttattggaacaagggctgtattttgggatatgcgggattcatttattttctctttgtatcgagacagcgttgaaggagcacgcatgcagatatttatccccacaattgaccaagttcttgatcaggtatgtgatttaattgttgatgtgttaagagaccaagttgtactcagaatatttcaagcctgcatggatggactcatttgggtcctactggatggaggcccatcacgtgctttttttgagacagatgtggatttgatgcaacaagatcttgctattctcaaggatctctttatagcagagggtcaaggtttaccaatagatatagttgaaaaggaggctagacaaactcaccagatattggacttatatatgctgaaggccgatgcagttattgatatgctgataaatgcaagtgaccaaatgcctcacgatcctgaagctacaaatgctcgaagaagatatgtacatgatgccaacacccttcttcgagttttgtgtcataagaaggataaaattgcctctacattcttgagaatccagtaccatcttccaaggtgttcagattatgatgatgttcctgtgaaggatgtgtcatctaaagtacctatcttttcagacatgctgaaaagaggtacctcattcaattggtctgagacagggcaacaaagctttagaattatgaagaagaaactgcaagaagctacttggcagtaaagatgggtcttgctaaggaaactctgcttggtttgcagttttttttatatatacaacagcagtgagctgtactcaatcagcaggggaagagcaccccgcgggcattgttttagaagacccccccccccccccccccccacacacacacacaaaataaacagtgcagaccctatagcatcacacccctaaccctggtcactacccacaagaagttgaaatgagtcgttggaggtgctgagtcacaatcactaggctatgaatcctttcaccagtgagctgtactatcgaaggaactctgcacggtcaaggctccatattattcagtataagctcccaaaggtccacaatggtgctcattgtgacggtggccctggttgaattcatgaagtatgactgcaaagcttcatttggagggttttagtttcgaaaatatgaaggacaagcttggtgcagtggtgagaagccttaccagttaccaccgagccaaaggttgttagttctagagttccggtacaatgggcgctagtgcgctacatatttggaaacccgatagattaactattcgaaaatccggaagtaacatgactgtttattaagttatttttctcccccctcccaaaacaactggaagctgaagccaacacaggcggtgccaaagtggcctttaatattttcagaagcacgggagcactgtctatgcacaatccgttgcagttaaatgtctaggttggcaatgcgccaatgtagtgactgtcggatacttgtggttactgagctttaccggctcttggaactcgttactacagtaccaaagaagtgaagaagctgaagccaacgcaagctgtgccaacgaggcacgaaatatttgcacaggctcgggactcgggagctcactctgtctatgcactataagttgcagttaaggttcgttctagctgtcacgtcattatcaatcactagtgttagtttttatctacctcaacgatactgttgagaatcactattggtgatcaacaccattacatgtctcaatttcttccttattttcttggtcatctatttttaattctttggacaattctttaatggtcaaatgtggatcattttcatgtcattatttatttggtcggtgttatgattcatcgatttatcgttcaaacaattttatataatttaacttcatgttatctatatagaggtgtttcgctatggccttcttttggtcagaggtctaggtgcgttgcttgcactttgcattgcgctctagccctatcgcgaccaaacagggcgtggtggttcgacactatcggactttggagtcatagtatcgcatgcatcacttcggttagtgacaaagtgcacaatacatgtgctctagccagaaccagtttgtcgggcctgccatggaagtcatcctttgcaacttgaagcagctaggcatcatctaatctgcttggctgggtcgtaggcaagcagttgtggatgttgttgaagagggtgatatttcaattgtttgtggaccatcgatccttgagctcagctacatgatggtacacttgcgagaaggctcagtagtggagttgtatgtggttgtttagcttgtacacaagcatggcactttgatctcc

SEQ ID NO: 17658 - DNA, 3688 bp, Zea Mays
ctcagttttcaccctctccgtctcccgtgagccagccagaagtcctagctccgcgcccaaaccctcggcctcgaccagcacctgcgcgcggtgggccatggatgcggcgtcgatgctggagctgtatcgccgcgaccggcgcaggctcctcagcttcctgctctccgccggcggtggaggcggccgggccctcgatctctcccgcgtcgacctcgacgccgtcagcgccgactacgcgctcgagtgcgtcgcctccggcgcccattttaatgcttcggaagccacgaggaggtacttcgacgagaggaggtaccctatcatgattgggtcgtcatcagggaactcttattttcttctttcgaggccaatgccatctgattcctctccaaaggaagcagcacctagcattgggccacaggcacctgtacaagacaactcaagttcaacaggacaaccaactgaaccaagagatttcttcagggatgctcttagtacctcaggaataggctatgacacggaagatgataaattggcagatatttctcctcagcaagtaaacaaagtggatattctttctctaggtttgcctaggctaaccacagaactgtctgatgatgatataagggaaacagcttatgaggtccttcttgcttctctatttgtcagtggaaaagtacacttctctgaagaaaaaagagaaaagaagcacaaattcttgaagggacgaagaactaagactgaaggatcaaatccatcacctcaggtggaagatggctatgcccacattcttgatctgacccgagtacaaatggagatttcagaatctatggacatcctgactaaacgagctttaagacatattagtttgaagacggtgaaagaaacgcttgatgtgccccgtatatcactacagctcttaagttctgttggcaaacttgattttccaaccgaaagattgcgtgggcaatggcagaaaagacaggcgaatgttcttgaagaactacttctcttctcagcatctcttgagtatgatacgagcaacacattacggatagttctctctaagctaaaaagtacagaggattgggttgtgactgttcctgagggccgtgtcgaggtcctgactatcattgaaagatacaacacaaaactttgttcactgacgaagaagtttgacattaaagatgagacctaccattggacccataattatcattttaattttaggttatatgagaagttactttgcagtgtgtttgatattctcgaagatgggcaacttgtagaggaggctgatgagatactggaaataacaaagctgacctggcctatattgggcgttactgagaagctgcaccacatattctatgcctgggtgcttttccagaagttttctcaaactggggagattcttctactgaaacatgcaagccttcagatacgggaatttcgattgtaccatgacgttaaagaaatagagttatatacaaacagttttatttgttctgtggatgcctatggtggcaacaaggttctaagtttggttgacagtgtcctactcaaaataaatgtttggtgccgcagacagctaggcaattatcatgcacactatagtaagaataactactcgatctttgaggccacactgaacttggtcttgctattggtgacaaactccagtgaggacgattttgaagaaaccatgttcattgagagcccagtagggagtacaccagaactgaagttgatccatttactcattgtcagatccatccatgctgcttataagcaagcactaatttcatcaaatggccgatcagattcagaatttaagcatccattgacaattcttgcaaatgagctaaaggcagtggcagagaaagagtgcactgacttcagtccaatacttaacaagcactatcctgaagctcaaagagtagctctaatcttcttacacatgctatatggaaaacaattggaacttttcttggaaaggacagataattcggagaactcaaaagagatactggcagcatcaaataattttgagctctttatagctcagaagctttactcagtgtatggggaaactgttgggtcttcattctccaactatttaaagccatacatggtaggtcacttttcttcaccccttgttctccaatggcttcatgctcaacacgagaatgtcttggagtggacaaaacgtactattgagatagaggattggacacctttatcagctcacgagaaacaagcaagatctgtggttgaagtattccggattgtggaggagactgttgatcagttctttaatacgagcctgcccctggaaattgtccacttgcgaagtctactcatcggaatcactaggagtcttgaagtctatttgcttcacatggaaaatcaacaagtgcctggatctactcttctccctagtgctccagtcttgacacgttatgcagaatcaatgaatccatttgcaaagaggaaacttattgagcctacggttcctgaagaaaaggttgctatgaagttgaacaatttggcagtgcccaaattatgtgtgaaactcaacactcttcaattcatcagggatcaacttgatgccatagaagaaggtgtcaaacaatcctgggtctctgtcttgtcagctgtcagattgttggattatttgtcttgtatggctagtggaagagctctttcagaaagtttgacatcatctgatgaatcggttgatgagttgtttacaatatttgatgatgtgcgaatgactgctgtgaagataactgatgtgatcttgaactttattggaacaagggctgtattttgggatatgcgggattcatttattttctctttgtatcgagacagcgttgaaggagcacgcatgcagatatttatccccacaattgaccaagttcttgatcaggtatgtgatttaattgttgatgtgttaagagaccaagttgtactcagaatatttcaagcctgcatggatggactcatttgggtcctactggatggaggcccatcacgtgctttttttgagacagatgtggatttgatgcaacaagatcttgctattctcaaggatctctttatagcagagggtcaaggtttaccaatagatatagttgaaaaggaggctagacaaactcaccagatattggacttatatatgctgaaggccgatgcagttattgatatgctgataaatgcaagtgaccaaatgcctcacgatcctgaagctacaaatgctcgaagaagatatgtacatgatgccaacacccttcttcgagttttgtgtcataagaaggataaaattgcctctacattcttgagaatccagtaccatcttccaaggtgttcagattatgatgatgttcctgtgaaggatgtgtcatctaaagtacctatcttttcagacatgctgaaaagaggtacctcattcaattggtctgagacagggcaacaaagctttagaattatgaagaagaaactgcaagaagctacttggcagtaaagatgggtcttgctaaggaaactctgcttggtttgcagttttttttatatatacaacagcaggaagttgaaatgagtcgttggaggtgctgagtcacaatcactaggctatgaatcctttcaccagtgagctgtactatcgaaggaactctgcacggtcaag

SEQ ID NO: 17659 - DNA, 990 bp, Zea Mays
ataagggaaacagcttatgaggtccttcttgcttctctatttgtcagtggaaaagtacacttctctgaagaaaaaagagaaaagaagcacaaattcttgaagggacgaagaactaagactgaaggatcaaatccatcacctcaggtggaagatggctatgcccacattcttgatctgacccgagtacaaatggagatttcagaatctatggacatcctgactaaacgagctttaagacatattagtttgaagacggtgaaagaaacgcttgatgtgccccgtatatcactacagctcttaagttctgttggcaaacttgattttccaaccgaaagattgcgtgggcaatggcagaaaagacaggcgaatgttcttgaagaactacttctcttctcagcatctcttgagtatgatacgagcaacacattacggatagttctctctaagctaaaaagtacagaggattgggttgtgactgttcctgagggccgtgtcgaggtcctgactatcattgaaagatacaacacaaaactttgttcactgacgaagaagtttgacattaaagatgagacctaccattggacccataattatcattttaattttaggttatatgagaagttactttgcagtgtgtttgatattctcgaagatgggcaacttgtagagttttctcaaactggggagattcttctactgaaacatgcaagccttcagatacgggaatttcgattgtaccatgacgttaaagaaatagagttatatacaaacagttttatttgttctgtggatgcctatggtggcaacaaggttctaagtttggttgacagtgtcctactcaaaataaatgtttggtgccgcagacagctaggcaattatcatgcacactatagtaagttcattgagagcccagtagggagtacaccagaactgaagttgatccatttactcattgtcagatccatccatgctgcttataagcaattgaca

SEQ ID NO: 17660 - DNA, 1315 bp, Zea Mays
ctcagttttcaccctctccgtctcccgtgagccagccagaagtcctagctccgcgcccaaaccctcggcctcgaccagcacctgcgcgcggtgggccatggatgcggcgtcgatgctggagctgtatcgccgcgaccggcgcaggctcctcagcttcctgctctccgccggcggtggaggcggccgggccctcgatctctcccgcgtcgacctcgacgccgtcagcgccgactacgcgctcgagtgcgtcgcctccggcgcccattttaatgcttcggaagccacgaggaggtacttcgacgagaggaggtaccctatcatgattgggtcgtcatcagggaactcttattttcttctttcgaggccaatgccatctgattcctctccaaaggaagcagcacctagcattgggccacaggcacctgtacaagacaactcaagttcaacaggacaaccaactgaaccaagagatttcttcagggatgctcttagtacctcaggaataggctatgacacggaagatgataaattggcagatatttctcctcagcaagtaaacaaagtggatattctttctctaggtttgcctaggctaaccacagaactgtctgatgatgatataagggaaacagcttatgaggtccttcttgcttctctatttgtcagtggaaaagtacacttctctgaagaaaaaagagaaaagaagcacaaattcttgaagggacgaagaactaagactgaaggatcaaatccatcacctcaggtggaagatggctatgcccacattcttgatctgacccgagtacaaatggagatttcagaatctatggacatcctgactaaacgagctttaagacatattagtttgaagacggtgaaagaaacgcttgatgtgccccgtatatcactacagctcttaagttctgttggcaaacttgattttccaaccgaaagattgcgtgggcaatggcagaaaagacaggcgaatgttcttgaagaactacttctcttctcagcatctcttgagtatgatacgagcaacacattacggatagttctctctaagctaaaaagtacagaggattgggttgtgactgttcctgagggccgtgtcgaggtcctgactatcattgaaagatacaacacaaaactttgttcactgacgaagaagtttgacattaaagatgagacctaccattggacccataattatcattttaattttaggttatatgagaagttactttgcagtgtgtttgatattctcgaagatgggcaacttgtagagtgttccatcacgagttcttgaatgtac

SEQ ID NO: 17661 - DNA, 1759 bp, Zea Mays
agagaaaagactccagggtccctaaatcccgtcccccaattccattctcggaagagaccatttccttcctcctgatctctcacggagttcctctccatggcgacgccccgctctccgagcccccgcgccgaagcgcccctcgattccgcgccgctgctgggcggtgcctccggcggcgggagccgtcgccgaggcggagcgctccgccgaccctcgctccgcggtgcggcgcagctgctgcgccgcggcgggcggcgagccatgcgggagccctcggtgctggtgcgggaggcagccgcagagcacctggaggaacggcaggcggactgggcctactcccgccccgtcgtggcgctcgacctgctctggaacctcgccttcatcaccgtcgctgcggtcgtgctcgtgctcagccgcgacgaggactcgcccatgccgctccggacctgggtcgccggctacgccctgcagtgcgtcatacacatggtgtgcgtcgcaatcgagtaccggatgcgccatggccagcgcggcggcgccggcgcagcgcccgctgacgaggaaaggggcagcgacggatcgtcgtcgtctagtgatgaggatgacagggagctcgatcgccatggtcgccgcaccgattacgccagtattgcaaaacacttggagtctgctaatacaatgttctccttcatatggtggataatcggattttattggatatctgctgggggtgaagaggttatccgggacgcacctcagctttactggctctgcatagtcttcctggcatttgatgtgttttttgttgtattctgtgttgctctggcttgtatcattggtattgctgtctgttgttgccttccttgtatcatagcaattctctatgcagtatctgatcaggaaggagcatctgaagatgacattcgtcaaatcccaagatacaaatttcggcggaccgatgagcctgaaaagcaagatgttgaccccatgggtccttttggtggaataatgacagagtgtggcaccaatcaacctattgagaaagtgcttgcagctgaagatgcaagttgcgggaactcccttgtgggcaccatttccactgcacctgcatcgataagtggcttcacatcaatgcaacatgccccctgtgcaagtacaacattcggaaaagcaacagtagcagtggaagtgaagaagtatgaatgcaaccgcttgacaatgccaatctgtttaaacttcgtgcctgtgtcgttgctaatgtaactccagggcttgagcagtgtaaatttttgtactaaaagaagtgctgatagagtcaattatgtattaaagttactcaaagtgctgtctatatgtcgtataagttaataaatagttgggtgtgcatctgtatttactgtcaggaatgattagttgcactgtaacttgtattctttcgagtgattcgggcgttttcctgctgggctatgatggcagtttgtcttccatggtttctactgacaagaaattttcgactggccattatttacagcagcgacatagctgatgaaagaagccaattggtgatggatgcttcgggtatagtccgtacagtgctatcatttgcatcgcaaagtagcgttcactgtttctcttgcggtgtactgtttcgtacagcgcccgtactccgcattttgcacatccgaagtcactgttccgccctccagcaagctttgcacatctgaagtcactattctgccccccagcaagctccttgaaccac

SEQ ID NO: 17662 - DNA, 1692 bp, Zea Mays
agagaaaagactccagggtccctaaatcccgtcccccaattccattctcggaagagaccatttccttcctcctgatctctcacggagttcctctccatggcgacgccccgctctccgagcccccgcgccgaagcgcccctcgattccgcgccgctgctgggcggtgcctccggcggcgggagccgtcgccgaggcggagcgctccgccgaccctcgctccgcggtgcggcgcagctgctgcgccgcggcgggcggcgagccatgcgggagccctcggtgctggtgcgggaggcagccgcagagcacctggaggaacggcaggcggactgggcctactcccgccccgtcgtggcgctcgacctgctctggaacctcgccttcatcaccgtcgctgcggtcgtgctcgtgctcagccgcgacgaggactcgcccatgccgctccggacctgggtcgccggctacgccctgcagtgcgtcatacacatggtgtgcgtcgcaatcgagtaccggatgcgccatggccagcgcggcggcgccggcgcagcgcccgctgacgaggaaaggggcagcgacggatcgtcgtcgtctagtgatgaggatgacagggagctcgatcgccatggtcgccgcaccgattacgccagtattgcaaaacacttggagtctgctaatacaatgttctccttcatatggtggataatcggattttattggatatctgctgggggtgaagaggttatccgggacgcacctcagctttactgcaattctctatgcagtatctgatcaggaaggagcatctgaagatgacattcgtcaaatcccaagatacaaatttcggcggaccgatgagcctgaaaagcaagatgttgaccccatgggtccttttggtggaataatgacagagtgtggcaccaatcaacctattgagaaagtgcttgcagctgaagatgcagagtgttgtatttgcctatctgcttatgatgatggtgcagagttgcgggaactcccttgtgggcaccatttccactgcacctgcatcgataagtggcttcacatcaatgcaacatgccccctgtgcaagtacaacattcggaaaagcaacagtagcagtggaagtgaagaagtatgaatgcaaccgcttgacaatgccaatctgtttaaacttcgtgcctgtgtcgttgctaatgtaactccagggcttgagcagtgtaaatttttgtactaaaagaagtgctgatagagtcaattatgtattaaagttactcaaagtgctgtctatatgtcgtataagttaataaatagttgggtgtgcatctgtatttactgtcaggaatgattagttgcactgtaacttgtattctttcgagtgattcgggcgttttcctgctgggctatgatggcagtttgtcttccatggtttctactgacaagaaattttcgactggccattatttacagcagcgacatagctgatgaaagaagccaattggtgatggatgcttcgggtatagtccgtacagtgctatcatttgcatcgcaaagtagcgttcactgtttctcttgcggtgtactgtttcgtacagcgcccgtactccgcattttgcacatccgaagtcactgttccgccctccagcaagctttgcacatctgaagtcactattctgccccccagcaagctccttgaaccac

SEQ ID NO: 17663 - DNA, 2031 bp, Zea Mays
gtttcccactcccatggggctcctcagctccctgccgccccatcgccggggcgccttctcgggtggcggatggcagtggtcgttcctcgacgtcgtatggggggtcttcctcatcgccgtggtcgtcttcctcgcgctcgtcttcactccgcggcgcggggaccccatcctaaccaccccctctgtcgcccgcgccggcggcacggtgccgccgtgcgctgcctctgaggtggacctcctcccctgcgaggacccgcgccgcagctcccgcctcagccgcgagatgaactactaccgggagcgccactgcccaactcgtggcgaggcgctcgcgtgccttgtgccgccgccccgaggttaccgcattcctgtgccctggcccgagagcctccacaagatctggcatgacaacatgccttatggtaagattgctgaaagaaaaggtcatcaagggtggatgaagcatgaaggttcgtacttcatttttcctggcggtgggactatgttccctgatggagctgaacaatatattgaaaagcttagccagtatgttccaatgaaaactggtgtcatcaggactggtcttgatatgggatgcggggttgctagctttggtggatttttgcttaaggagaatatcatgacactttcatttgcaccaagagattcacataagtctcaaatacaatttgctttggagagaggagttccagcatttcttttgatgttgggcactcgccgtcttccttttccagcacagtcctttgattttgtccattgttcccggtgtttgataccttttactgcctatagcccccctgtgagatggaagaatcaggagaaggaatgggatgaacttcaagcaatggcaggagctttgtgttacaaattgatcactgtagatggtaatactgccatttggaagaaacctgctgaggcttcatgtcttcctaaccaaaatggatttggccttgatctttgtagcaccgactatgatccagatgaagcatggtacttcaagttgaataaatgtgtcagtaaaatttcagtggcggaagagacagctataggttccattctcaagtggccagataggctgtctaaaccttctgctagggcatcagttatcaacaatggagcaaacttgtttgaagtagatagtcagaagtgggttaggagagtgtcatattataagaaatcgcttggtgtgaagcttgggagcacaaacatacgcaatgtcatggacatgaatgcattctttggaggattcgcagccgctataatatctgatcctgtatgggttatgaatgttgttcctggtcagaagccattgacacttggagttatttatgataggggccttataggggtttatcatgactggtgtgaaccattctcaacgtatcctcgtacctatgatcttattcatgctgatgcaattgactccttgataagtggcccgatttcaggcactagcagatgtgacctgtttgatgtcatgttggagatggatcgcatactgcgcccagaaggaactgccgttatacgggcctcgccagacgtagtagccaaggcagcacagatcgctcagtcgattcggtggaaggcacaggtgcatgacagtgaaccagaatcaggcagtaccgagaaaatacttgtggctaccaaaacattttggaagctgccactaacaaaacaataggctaatgcgagtttgaactttgaacccttttcacttgcgctcccttaattttgtattcttttggggtgcgctgaagggatatagcaggctaatgggattgctggagtagtttagtcaaggtggtcattctttccttcatttctttatagcgcaaagttaggtgtggtgtgattctcgttgtggctccattcccttgattctgattgatgttgttatagcctatgaacattactttaagccatctggtttattcccgtggtggttacagcaccctatgatcaagagaccaaccgatctagctgtataagagatttttttagttctgttac

SEQ ID NO: 17664 - DNA, 1024 bp, Zea Mays
aaactgctaaatcagggggggtcaaatttttcatccgttgtttctgacagtccacggcatggagtacggatatggagcacacgagtttccaacaagtggggtatttgaggtggaaccaaagagttgtcctggtttcacctacagaagatctgtgtggatgggcacaactgacttgtctagagcagagttccgctcgttcattgaaaatcttgcaggaaagtacaatggcaacacataccatttgatttcaaagaactgcaaccattttacagatgatgtctgtaaaaacttgaccaggaaatcaatctctgggtgggtgaatcggctagcaagagtgggttcatttttcaactgtcttctaccagaaagcatccaagtttccacagtaagacacgtccctactcatcctgcattttctgatgatgatatggattcggtatcttcatcggttattggagacagtgatctggaagagctggaccaacaccttctgccatcaactgctgacgtccattctatagacgtgccgccaaagctagcgaaagatcttctctgagttattcagcactttgggttttcacatagcaaggataacttggactgctgcagttgatgtccactgagtgcttctctgggtggcgcagccgcgcaggactccaggaatgtcgaatgctgctaattgtatcgattcttttgccactgaggtccttacatgcacacagagctctcgacagaaatgacacgctttctaatcctttgcctgttgttatgacttttatgttgtgacttcatcctaagtatcttgtgttcgagcgatactgtacgcattcagaatgccgtcaatggcgtgtctggttcgaggcatacaaagtagtatcttgtgttcgagtgatattgtaggcactgagaatgcgtcaatggtgtgtgtttgactggtcacaggtaatccatcgagtgtagttaaaccaaacaaatcttaatatcatctggcttcaatccgtgcagcttttcctagtgatatata

SEQ ID NO: 17665 - DNA, 1293 bp, Zea Mays
cgagaggtcaaggtggtaaccatgctagttgttctcgttcccttgttagttgagctctttcccttcctcgcttggaaccaaatcaattcggagcggcggagcaaaacgatcccttgcctcgcttccattcgaatcatctcgaatggggcactaatcgagaagctaatgacgcacaaatcgcgagatctgtagcgccactcggcttcaccggcggcgcggcgggcatggaagcgcagaacggctccggcgtaggggcgcccgtggtgctcaacgtgtacgaccttacgcccatgaacaactacctctactggttcggcctcggtattttccactccggaatcgaagtccacggcatggagtacggatatggagcacacgagtttccaacaagtggggtatttgaggtggaaccaaagagttgtcctggtttcacctacagaagatctgtgtggatgggcacaactgacttgtctagagcagagttccgctcgttcattgaaaatcttgcaggaaagtacaatggcaacacataccatttgatttcaaagaactgcaaccattttacagatgatgtctgtaaaaacttgaccaggaaatcaatctctgggttcatttttcaactgtcttctaccagaaagcatccaagtttccacagtaagacacgtccctactcatcctgcattttctgatgatgatatggattcggtatcttcatcggttattggagacagtgatctggaagagctggaccaacaccttctgccatcaactgctgacgtccattctatagacgtgccgccaaagctagcgaaagatcttctctgagttattcagcactttgggttttcacatagcaaggataacttggactgctgcagttgatgtccactgagtgcttctctgggtggcgcagccgcgcaggactccaggaatgtcgaatgctgctaattgtatcgattcttttgccactgaggtccttacatgcacacagagctctcgacagaaatgacacgctttctaatcctttgcctgttgttatgacttttatgttgtgacttcatcctaagtatcttgtgttcgagcgatactgtacgcattcagaatgccgtcaatggcgtgtctggttcgaggcatacaaagtagtatcttgtgttcgagtgatattgtaggcactgagaatgcgtcaatggtgtgtgtttgactggtcacaggtaatccatcgagtgtagttaaaccaaacaaatcttaatatcatctggcttcaatccgtgcagcttttcctagtgatatata

SEQ ID NO: 17666 - DNA, 1285 bp, Zea Mays
cgagaggtcaaggtggtaaccatgctagttgttctcgttcccttgttagttgagctctttcccttcctcgcttggaaccaaatcaattcggagcggcggagcaaaacgatcccttgcctcgcttccattcgaatcatctcgaatggggcactaatcgagaagctaatgacgcacaaatcgcgagatctgtagcgccactcggcttcaccggcggcgcggcgggcatggaagcgcagaacggctccggcgtaggggcgcccgtggtgctcaacgtgtacgaccttacgcccatgaacaactacctctactggttcggcctcggtattttccactccggaatcgaagtccacggcatggagtacggatatggagcacacgagtttccaacaagtggggtatttgaggtggaaccaaagagttgtcctggtttcacctacagaagatctgtgtggatgggcacaactgacttgtctagagcagagttccgctcgttcattgaaaatcttgcaggaaagtacaatggcaacacataccatttgatttcaaagaactgcaaccattttacagatgatgtctgtaaaaacttgaccaggaaatcaatctctgggtgggtgaatcggctagcaagagtgggttcatttttcaactgtcttctaccagaaagcatccaagtttccacaatgatgatatggattcggtatcttcatcggttattggagacagtgatctggaagagctggaccaacaccttctgccatcaactgctgacgtccattctatagacgtgccgccaaagctagcgaaagatcttctctgagttattcagcactttgggttttcacatagcaaggataacttggactgctgcagttgatgtccactgagtgcttctctgggtggcgcagccgcgcaggactccaggaatgtcgaatgctgctaattgtatcgattcttttgccactgaggtccttacatgcacacagagctctcgacagaaatgacacgctttctaatcctttgcctgttgttatgacttttatgttgtgacttcatcctaagtatcttgtgttcgagcgatactgtacgcattcagaatgccgtcaatggcgtgtctggttcgaggcatacaaagtagtatcttgtgttcgagtgatattgtaggcactgagaatgcgtcaatggtgtgtgtttgactggtcacaggtaatccatcgagtgtagttaaaccaaacaaatcttaatatcatctggcttcaatccgtgcagcttttcctagtgatatata

SEQ ID NO: 17667 - DNA, 2413 bp, Zea Mays
aattaggaatgggatcgtcccctccgccgttgcggcgagcaggcagcgagcgccgcagcccgcagcccgcagccaaacgccgccaggccggggaaggggaacggtggaagagaagtggagcaccagcgaaccgcatatgctcggggttcttcgtcgcgcagccctcgccgcagcgtcatcgccggcggcggacctccgacagagaagaccaagaagtttcatatggtcttaattgggctattgctggaaaaggtgtcattgtgaaagataaggtcctccataacttggaaacatctgagcttcagaaaggtggcgctacttaccctgactttttgtctggtataccacttcatgttagaggagatgttattggtggtgtccctggtgtttctaaagctcaatttgcaaagcttctaaaactggtgacgttccatctttcatccatctcgtgtctatatgttcaagatggcgccattggttcctcagcagaatgtgatgcaaaggttcgggtcattagtgataatccctctgctgttatgttactgtcgaatgtcctttggaaaataccagatcgtgcgatttcccatgacacatcccctttgactatatatgctaccagttcaataagtaacaacgttaagactgttcttggttctggaacacaatatgctaatggatttgctgtggcggatattgaacgatcatctctaatcctatgcggtaaagcatttgctgattcagctatcgtgaaagatgcacttactgctatgacagccccaatattgtctgcaagaggaggcctccctgttccaggatggattctgaactttggtggttctactgtattattgtttgccccagtggaaatcatgatgtcctgcgtagaaatccacaatgctctattgtccattgactgtggtgcagtcatatcttccaaggggtctactgtgcttttcccaacaaaggcaagcagggagcagaaactgcttaccaaaccaactgcagtaattatcgtatcatctgatagctctggcgccataccatctgtatgtaagctctctcctggccaggctgcctaccatttcttggctggatatcacgatggaaaatttgtcccagcatacaacagagccccctctcctgctgacccacttgcacttgcaagttctttattctcacatttgaaagaagatgatacaccatcgtatctgatcaacgctaagcactctggaaagtacattgacggcaatgggtttatgaaattattaaagctggcactatctcacgatcttcctgacatcaaaactgaaggctctagagttggggaactcaaggggaagtacaggagctttctatccagcaagtttggccaatgtttacccgaggaattctctttttaggagatacaccctgaggttgcaatgaacatgtatatttactggcataggtttacattttggtttgaaaaggtgtcagtattcccattctgtctcagtttcaatgtaatactctattaccttacattgcatctttccgcctcctggtgtttggatatactgacgtaacgacaatgtagctagtacctacatgcatgaattgtcttgtgcactccgcttcagtcaaattttgttaagcagcagaaaattggaaactctcagtatacatgtcacgtgcgactttgtgagctgcactgtgcactgcagagatcggactgtactattctgtaggatcgcttcgctccagattcccagtaacaaccaaatggtccaaagctgctcttcatcattctgcagtgtccccggcttcactttaccggacactgttgcctcttcacaattactactcctggggctggggcaaccagagtgcagaatgcagtgaactgtgaagcattggaggacacggtcaaccgtcgacattgagaaattgaaccttaccctttcgttttacgcgggagctgccagagcttcacatggttacgctgagaagaccggcgcggtggtccctctgcaccatggtccatgcatctcctcctcttatagatgctgatctccagagaacaggcgaagcaggtgaatctgttgatccattttatggatctttggagtaacgaaattgtttcatcctcaaacaacacaagaagcttaaagatccactcatgtaccatcaactgcagagggagctaatcgagcatcactgggcacgtctcggcgtcgacattcagtagaagcttgtgtcatgtaatgttatgtgagagtctaccaaagttagtgtgttgtcttcctattgtgcaagtcagtttttcattggtaagaagttagtagtagtagtagtgatcatgtgccttgtcgggttgttcatgttactttgtcatcgtcaggaaataaacttagtgtgttgtgtctctgtggtt

SEQ ID NO: 17668 - DNA, 1838 bp, Zea Mays
ggaagagaagtggagcaccagcgaaccgcatatgctcggggttcttcgtcgcgcagccctcgccgcagcgtcatcgccggcggcggacctccgacagtttcagtgtgcttaccatagaagcagtgagagattatcacctatccgagaccaagaagtttcatatggtcttaattgggctattgctggaaaaggtgtcattgtgaaagataaggtcctccataacttggaaacatctgagcttcagaaaggtggcgctacttaccctgactttttgtctggtataccacttcatgttagaggagatgttattggtggtgtccctggtgtttctaaagctcaatttgcaaagcttctaaaactggtaggttctaaattttggcttcaccactcaggccctgttcgttttttgtcaaacaatggggattgagggggaacaaatcccctataagtcaaaatcctcctcaatcccttccaatccccccccccccaaatccccatgattttgggatgaaacgaacatggcctcaatgggatgatgatattcaatgatgattgtcatgaatggagctgaaatactgttagtccctttttttagcatctgattttttttctcatttttaatttagttgtgacatctccctatttgttgaagggcagtcctggtgcaacaatgagagctgtctcactgagtcatcaggtcacgggttcgaagtagtctctccgtatttgcgggggaaggcttgcttcggtttatccctatcctagacgtcacatatgggagcctccaacagtggatctacctttttttatctccctgtttgttgacagactacttgcttgcataggtgacgttccatctttcatccatctcgtgtctatatgttcaagatggcgccattggttcctcagcagaatgtgatgcaaaggttcgggtcattagtgataatccctctgctgttatgttactgtcgaatgtcctttggaaaataccagatcgtgcgatttcccatgacacatcccctttgactatatatgctaccagttcaataagtaacaacgttaagactgttcttggttctggaacacaatatgctaatggatttgctgtggcggatattgaacgatcatctctaatcctatgcggtaaagcatttgctgattcagctatcgtgaaagatgcacttactgctatgacagccccaatattgtctgcaagaggaggcctccctgttccaggatggattctgaactttggtggttctactgtattattgtttgccccagtggaaatcatgatgtcctgcgtagaaatccacaatgctctattgtccattgactgtggtgcagtcatatcttccaaggggtctactgtgcttttcccaacaaaggcaagcagggagcagaaactgcttaccaaaccaactgcagtaattatcgtatcatctgatagctctggcgccataccatctgtatgtaagctctctcctggccaggctgcctaccatttcttggctggatatcacgatggaaaatttgtcccagcatacaacagagccccctctcctgctgacccacttgcacttgcaagttctttattctcacatttgaaagaagatgatacaccatcgtatctgatcaacgctaagcactctggaaagtacattgacggcaatgggtttatgaaattattaaagctggcactatctcacgatcttcctgacatcaaaactgaaggctctagagagatcggactgtactattctgtaggatcgcttcgctccagattcccagtaacaaccaaatggtccaaagctgctcttcatcattctgcagtgtcc

SEQ ID NO: 17669 - DNA, 1792 bp, Zea Mays
ggaagagaagtggagcaccagcgaaccgcatatgctcggggttcttcgtcgcgcagccctcgccgcagcgtcatcgccggcggcggacctccgacagaccaagaagtttcatatggtcttaattgggctattgctggaaaaggtgtcattgtgaaagataaggtcctccataacttggaaacatctgagcttcagaaaggtggcgctacttaccctgactttttgtctggtataccacttcatgttagaggagatgttattggtggtgtccctggtgtttctaaagctcaatttgcaaagcttctaaaactggtgacgttccatctttcatccatctcgtgtctatatgttcaagatggcgccattggttcctcagcagaatgtgatgcaaaggttcgggtcattagtgataatccctctgctgttatgttactgtcgaatgtcctttggaaaataccagatcgtgcgatttcccatgacacatcccctttgactatatatgctaccagttcaataagtaacaacgttaagactgttcttggttctggaacacaatatgctaatggatttgctgtggcggatattgaacgatcatctctaatcctatgcggtaaagcatttgctgattcagctatcgtgaaagatgcacttactgctatgacagccccaatattgtctgcaagaggaggcctccctgttccaggatggattctgaactttggtggttctactgtattattgtttgccccagtggaaatcatgatgtcctgcgtagaaatccacaatgctctattgtccattgactgtggtgcagtcatatcttccaaggggtctactgtgcttttcccaacaaaggcaagcagggagcagaaactgcttaccaaaccaactgcagtaattatcgtatcatctgatagctctggcgccataccatctgtatgtaagctctctcctggccaggctgcctaccatttcttggctggatatcacgatggaaaatttgtcccagcatacaacagagccccctctcctgctgacccacttgcacttgcaagttctttattctcacatttgaaagaagatgatacaccatcgtatctgatcaacgctaagcactctggaaagtacattgacggcaatgggtttatgaaattattaaagctggcactatctcacgatcttcctgacatcaaaactgaaggctctagaggttagtacgtagttcttggtgccctacatactcaatatcttggttagtgatatccataaagtacggtccaattttaaccgacaaaaatacatctttggttgaagttggggaactcaaggggaagtacaggagctttctatccagcaagtttggccaatgtttacccgaggaattctctttttaggagatacaccctgaggttgcaatgaacatgtatatttactggcataggtttacattttggtttgaaaaggtgtcagtattcccattctgtctcagtttcaatgtaatactctattaccttacattgcatctttccgcctcctggtgtttggatatactgacgtaacgacaatgtagctagtacctacatgcatgaattgtcttgtgcactccgcttcagtcaaattttgttaagcagcagaaaattggaaactctcagtatacatgtcacgtgcgactttgtgagctgcactgtgcactgcagagatcggactgtactattctgtaggatcgcttcgctccagattcccagtaacaaccaaatggtccaaagctgctcttcatcattctgcagtgtcc

SEQ ID NO: 17670 - DNA, 1705 bp, Zea Mays
gaacggtggaagagaagtggagcaccagcgaaccgcatatgctcggggttcttcgtcgcgcagccctcgccgcagcgtcatcgccggcggcggacctccgacagtttcagtgtgcttaccatagaagcagtgagagattatcacctatccgagagaagaccaagaagtttcatatggtcttaattgggctattgctggaaaaggtgtcattgtgaaagataaggtcctccataacttggaaacatctgagcttcagaaaggtggcgctacttaccctgactttttgtctggtataccacttcatgttagaggagatgttattggtggtgtccctggtgtttctaaagctcaatttgcaaagcttctaaaactggtgacgttccatctttcatccatctcgtgtctatatgttcaagatggcgccattggttcctcagcagaatgtgatgcaaaggttcgggtcattagtgataatccctctgctgttatgttactgtcgaatgtcctttggaaaataccagatcgtgcgatttcccatgacacatcccctttgactatatatgctaccagttcaataagtaacaacgttaagactgttcttggttctggaacacaatatgctaatggatttgctgtggcggatattgaacgatcatctctaatcctatgcggtaaagcatttgctgattcagctatcgtgaaagatgcacttactgctatgacagccccaatattgtctgcaagaggaggcctccctgttccaggatgtggaaatcatgatgtcctgcgtagaaatccacaatgctctattgtccattgactgtggtgcagtcatatcttccaaggggtctactgtgcttttcccaacaaaggcaagcagggagcagaaactgcttaccaaaccaactgcagtaattatcgtatcatctgatagctctggcgccataccatctgtatgtaagctctctcctggccaggctgcctaccatttcttggctggatatcacgatggaaaatttgtcccagcatacaacagagccccctctcctgctgacccacttgcacttgcaagttctttattctcacatttgaaagaagatgatacaccatcgtatctgatcaacgctaagcactctggaaagtacattgacggcaatgggtttatgaaattattaaagctggcactatctcacgatcttcctgacatcaaaactgaaggctctagagttggggaactcaaggggaagtacaggagctttctatccagcaagtttggccaatgtttacccgaggaattctctttttaggagatacaccctgaggttgcaatgaacatgtatatttactggcataggtttacattttggtttgaaaaggtgtcagtattcccattctgtctcagtttcaatgtaatactctattaccttacattgcatctttccgcctcctggtgtttggatatactgacgtaacgacaatgtagctagtacctacatgcatgaattgtcttgtgcactccgcttcagtcaaattttgttaagcagcagaaaattggaaactctcagtatacatgtcacgtgcgactttgtgagctgcactgtgcactgcagagatcggactgtactattctgtaggatcgcttcgctccagattcccagtaacaaccaaatggtccaaagctgctcttcatcattctgcagtgtcc

SEQ ID NO: 17671 - DNA, 2024 bp, Zea Mays
ccgcagcccgcagccaaacgccgccaggccggggaaggggaacggtggaagagaagtggagcaccagcgaaccgcatatgctcggggttcttcgtcgcgcagccctcgccgcagcgtcatcgccggcggcggacctccgacagtttcagtgtgcttaccatagaagcagtgagagattatcacctatccgagccattacaaaatatctgcaaaatttctcgactactttttgttgcacagagaagaccaagaagtttcatatggtcttaattgggctattgctggaaaaggtgtcattgtgaaagataaggtcctccataacttggaaacatctgagcttcagaaaggtggcgctacttaccctgactttttgtctggtataccacttcatgttagaggagatgttattggtggtgtccctggtgtttctaaagctcaatttgcaaagcttctaaaactgtcctggtgcaacaatgagagctgtctcactgagtcatcaggtcacgggttcgaagtagtctctccgtatttgcgggggaaggcttgcttcggtttatccctatcctagacgtcacatatgggagcctccaacagtggatctacctttttttatctccctgtttgttgacagactacttgcttgcataggtgacgttccatctttcatccatctcgtgtctatatgttcaagatggcgccattggttcctcagcagaatgtgatgcaaaggttcgggtcattagtgataatccctctgctgttatgttactgtcgaatgtcctttggaaaataccagatcgtgcgatttcccatgacacatcccctttgactatatatgctaccagttcaataagtaacaacgttaagactgttcttggttctggaacacaatatgctaatggatttgctgtggcggatattgaacgatcatctctaatcctatgcggtaaagcatttgctgattcagctatcgtgaaagatgcacttactgctatgacagccccaatattgtctgcaagaggaggcctccctgttccaggatggattctgaactttggtggttctactgtattattgtttgccccagtggaaatcatgatgtcctgcgtagaaatccacaatgctctattgtccattgactgtggtgcagtcatatcttccaaggggtctactgtgcttttcccaacaaaggcaagcagggagcagaaactgcttaccaaaccaactgcagtaattatcgtatcatctgatagctctggcgccataccatctgtatgtaagctctctcctggccaggctgcctaccatttcttggctggatatcacgatggaaaatttgtcccagcatacaacagagccccctctcctgctgacccacttgcacttgcaagttctttattctcacatttgaaagaagatgatacaccatcgtatctgatcaacgctaagcactctggaaagtacattgacggcaatgggtttatgaaattattaaagctggcactatctcacgatcttcctgacatcaaaactgaaggctctagagttggggaactcaaggggaagtacaggagctttctatccagcaagtttggccaatgtttacccgaggaattctctttttaggagatacaccctgaggttgcaatgaacatgtatatttactggcataggtttacattttggtttgaaaaggtgtcagtattcccattctgtctcagtttcaatgtaatactctattaccttacattgcatctttccgcctcctggtgtttggatatactgacgtaacgacaatgtagctagtacctacatgcatgaattgtcttgtgcactccgcttcagtcaaattttgttaagcagcagaaaattggaaactctcagtatacatgtcacgtgcgactttgtgagctgcactgtgcactgcagagatcggactgtactattctgtaggatcgcttcgctccagattcccagtaacaaccaaatggtccaaagctgctcttcatcattctgcagtgtcc

SEQ ID NO: 17672 - DNA, 2173 bp, Zea Mays
ccgcagcccgcagccaaacgccgccaggccggggaaggggaacggtggaagagaagtggagcaccagcgaaccgcatatgctcggggttcttcgtcgcgcagccctcgccgcagcgtcatcgccggcggcggacctccgacaggtgtcattgtgaaagataaggtcctccataacttggaaacatctgagcttcagaaaggtggcgctacttaccctgactttttgtctggtataccacttcatgttagaggagatgttattggtggtgtccctggtgtttctaaagctcaatttgcaaagcttctaaaactggtaggttctaaattttggcttcaccactcaggccctgttcgttttttgtcaaacaatggggattgagggggaacaaatcccctataagtcaaaatcctcctcaatcccttccaatccccccccccccaaatccccatgattttgggatgaaacgaacatggcctcaatgggatgatgatattcaatgatgattgtcatgaatggagctgaaatactgttagtccctttttttagcatctgattttttttctcatttttaatttagttgtgacatctccctatttgttgaagggcagtcctggtgcaacaatgagagctgtctcactgagtcatcaggtcacgggttcgaagtagtctctccgtatttgcgggggaaggcttgcttcggtttatccctatcctagacgtcacatatgggagcctccaacagtggatctacctttttttatctccctgtttgttgacagactacttgcttgcataggtgacgttccatctttcatccatctcgtgtctatatgttcaagatggcgccattggttcctcagcagaatgtgatgcaaaggttcgggtcattagtgataatccctctgctgttatgttactgtcgaatgtcctttggaaaataccagatcgtgcgatttcccatgacacatcccctttgactatatatgctaccagttcaataagtaacaacgttaagactgttcttggttctggaacacaatatgctaatggatttgctgtggcggatattgaacgatcatctctaatcctatgcggtaaagcatttgctgattcagctatcgtgaaagatgcacttactgctatgacagccccaatattgtctgcaagaggaggcctccctgttccaggatggattctgaactttggtggttctactgtattattgtttgccccagtggaaatcatgatgtcctgcgtagaaatccacaatgctctattgtccattgactgtggtgcagtcatatcttccaaggggtctactgtgcttttcccaacaaaggcaagcagggagcagaaactgcttaccaaaccaactgcagtaattatcgtatcatctgatagctctggcgccataccatctgtatgtaagctctctcctggccaggctgcctaccatttcttggctggatatcacgatggaaaatttgtcccagcatacaacagagccccctctcctgctgacccacttgcacttgcaagttctttattctcacatttgaaagaagatgatacaccatcgtatctgatcaacgctaagcactctggaaagtacattgacggcaatgggtttatgaaattattaaagctggcactatctcacgatcttcctgacatcaaaactgaaggctctagagttggggaactcaaggggaagtacaggagctttctatccagcaagtttggccaatgtttacccgaggaattctctttttaggagatacaccctgaggttgcaatgaacatgtatatttactggcataggtttacattttggtttgaaaaggtgtcagtattcccattctgtctcagtttcaatgtaatactctattaccttacattgcatctttccgcctcctggtgtttggatatactgacgtaacgacaatgtagctagtacctacatgcatgaattgtcttgtgcactccgcttcagtcaaattttgttaagcagcagaaaattggaaactctcagtatacatgtcacgtgcgactttgtgagctgcactgtgcactgcagagatcggactgtactattctgtaggatcgcttcgctccagattcccagtaacaaccaaatggtccaaagctgctcttcatcattctgcagtgtcc

SEQ ID NO: 17673 - DNA, 2236 bp, Zea Mays
cgagcgccgcagcccgcagcccgcagccaaacgccgccaggccggggaaggggaacggtggaagagaagtggagcaccagcgaaccgcatatgctcggggttcttcgtcgcgcagccctcgccgcagcgtcatcgccggcggcggacctccgacagagaagaccaagaagtttcatatggtcttaattgggctattgctggaaaaggtgtcattgtgaaagataaggtcctccataacttggaaacatctgagcttcagaaaggtggcgctacttaccctgactttttgtctggtataccacttcatgttagaggagatgttattggtggtgtccctggtgtttctaaagctcaatttgcaaagcttctaaaactggtaggttctaaattttggcttcaccactcaggccctgttcgttttttgtcaaacaatggggattgagggggaacaaatcccctataagtcaaaatcctcctcaatcccttccaatccccccccccccaaatccccatgattttgggatgaaacgaacatggcctcaatgggatgatgatattcaatgatgattgtcatgaatggagctgaaatactgttagtccctttttttagcatctgattttttttctcatttttaatttagttgtgacatctccctatttgttgaagggcagtcctggtgcaacaatgagagctgtctcactgagtcatcaggtcacgggttcgaagtagtctctccgtatttgcgggggaaggcttgcttcggtttatccctatcctagacgtcacatatgggagcctccaacagtggatctacctttttttatctccctgtttgttgacagactacttgcttgcataggtgacgttccatctttcatccatctcgtgtctatatgttcaagatggcgccattggttcctcagcagaatgtgatgcaaaggttcgggtcattagtgataatccctctgctgttatgttactgtcgaatgtcctttggaaaataccagatcgtgcgatttcccatgacacatcccctttgactatatatgctaccagttcaataagtaacaacgttaagactgttcttggttctggaacacaatatgctaatggatttgctgtggcggatattgaacgatcatctctaatcctatgcggtaaagcatttgctgattcagctatcgtgaaagatgcacttactgctatgacagccccaatattgtctgcaagaggaggcctccctgttccaggatggattctgaactttggtggttctactgtattattgtttgccccagtggaaatcatgatgtcctgcgtagaaatccacaatgctctattgtccattgactgtggtgcagtcatatcttccaaggggtctactgtgcttttcccaacaaaggcaagcagggagcagaaactgcttaccaaaccaactgcagtaattatcgtatcatctgatagctctggcgccataccatctgtatgtaagctctctcctggccaggctgcctaccatttcttggctggatatcacgatggaaaatttgtcccagcatacaacagagccccctctcctgctgacccacttgcacttgcaagttctttattctcacatttgaaagaagatgatacaccatcgtatctgatcaacgctaagcactctggaaagtacattgacggcaatgggtttatgaaattattaaagctggcactatctcacgatcttcctgacatcaaaactgaaggctctagagttggggaactcaaggggaagtacaggagctttctatccagcaagtttggccaatgtttacccgaggaattctctttttaggagatacaccctgaggttgcaatgaacatgtatatttactggcataggtttacattttggtttgaaaaggtgtcagtattcccattctgtctcagtttcaatgtaatactctattaccttacattgcatctttccgcctcctggtgtttggatatactgacgtaacgacaatgtagctagtacctacatgcatgaattgtcttgtgcactccgcttcagtcaaattttgttaagcagcagaaaattggaaactctcagtatacatgtcacgtgcgactttgtgagctgcactgtgcactgcagagatcggactgtactattctgtaggatcgcttcgctccagattcccagtaacaaccaaatggtccaaagctgctcttcatcattctgcagtgtcc

SEQ ID NO: 17674 - DNA, 1996 bp, Zea Mays
caggcagcgagcgccgcagcccgcagcccgcagccaaacgccgccaggccggggaaggggaacggtggaagagaagtggagcaccagcgaaccgcatatgctcggggttcttcgtcgcgcagccctcgccgcagcgtcatcgccggcggcggacctccgacagtttcagtgtgcttaccatagaagcagtgagagattatcacctatccgagagaagaccaagaagtttcatatggtcttaattgggctattgctggaaaaggtgtcattgtgaaagataaggtcctccataacttggaaacatctgagcttcagaaaggtggcgctacttaccctgactttttgtctggtataccacttcatgttagaggagatgttattggtggtgtccctggtgtttctaaagctcaatttgcaaagcttctaaaactgtcctggtgcaacaatgagagctgtctcactgagtcatcaggtcacgggttcgaagtagtctctccgtatttgcgggggaaggcttgcttcggtttatccctatcctagacgtcacatatgggagcctccaacagtggatctacctttttttatctccctgtttgttgacagactacttgcttgcataggtgacgttccatctttcatccatctcgtgtctatatgttcaagatggcgccattggttcctcagcagaatgtgatgcaaaggttcgggtcattagtgataatccctctgctgttatgttactgtcgaatgtcctttggaaaataccagatcgtgcgatttcccatgacacatcccctttgactatatatgctaccagttcaataagtaacaacgttaagactgttcttggttctggaacacaatatgctaatggatttgctgtggcggatattgaacgatcatctctaatcctatgcggtaaagcatttgctgattcagctatcgtgaaagatgcacttactgctatgacagccccaatattgtctgcaagaggaggcctccctgttccaggatggattctgaactttggtggttctactgtattattgtttgccccagtggaaatcatgatgtcctgcgtagaaatccacaatgctctattgtccattgactgtggtgcagtcatatcttccaaggggtctactgtgcttttcccaacaaaggcaagcagggagcagaaactgcttaccaaaccaactgcagtaattatcgtatcatctgatagctctggcgccataccatctgtatgtaagctctctcctggccaggctgcctaccatttcttggctggatatcacgatggaaaatttgtcccagcatacaacagagccccctctcctgctgacccacttgcacttgcaagttctttattctcacatttgaaagaagatgatacaccatcgtatctgatcaacgctaagcactctggaaagtacattgacggcaatgggtttatgaaattattaaagctggcactatctcacgatcttcctgacatcaaaactgaaggctctagagttggggaactcaaggggaagtacaggagctttctatccagcaagtttggccaatgtttacccgaggaattctctttttaggagatacaccctgaggttgcaatgaacatgtatatttactggcataggtttacattttggtttgaaaaggtgtcagtattcccattctgtctcagtttcaatgtaatactctattaccttacattgcatctttccgcctcctggtgtttggatatactgacgtaacgacaatgtagctagtacctacatgcatgaattgtcttgtgcactccgcttcagtcaaattttgttaagcagcagaaaattggaaactctcagtatacatgtcacgtgcgactttgtgagctgcactgtgcactgcagagatcggactgtactattctgtaggatcgcttcgctccagattcccagtaacaaccaaatggtccaaagctgctcttcatcattctgcagtgtcc

SEQ ID NO: 17675 - DNA, 1861 bp, Zea Mays
agcaggcagcgagcgccgcagcccgcagcccgcagccaaacgccgccaggccggggaaggggaacggtggaagagaagtggagcaccagcgaaccgcatatgctcggggttcttcgtcgcgcagccctcgccgcagcgtcatcgccggcggcggacctccgacagtttcagtgtgcttaccatagaagcagtgagagattatcacctatccgagccattacaaaatatctgcaaaatttctcgactactttttgttgcacagagaagaccaagaagtttcatatggtcttaattgggctattgctggaaaaggtgtcattgtgaaagataaggtcctccataacttggaaacatctgagcttcagaaaggtggcgctacttaccctgactttttgtctggtataccacttcatgttagaggagatgttattggtggtgtccctggtgtttctaaagctcaatttgcaaagcttctaaaactggtgacgttccatctttcatccatctcgtgtctatatgttcaagatggcgccattggttcctcagcagaatgtgatgcaaaggttcgggtcattagtgataatccctctgctgttatgttactgtcgaatgtcctttggaaaataccagatcgtgcgatttcccatgacacatcccctttgactatatatgctaccagttcaataagcagtaacaacgttaagactgttcttggttctggaacacaatatgctaatggatttgctgtggcggatattgaacgatcatctctaatcctatgcggtaaagcatttgctgattcagctatcgtgaaagatgcacttactgctatgacagccccaatattgtctgcaagaggaggcctccctgttccaggatggattctgaactttggtggttctactgtattattgtttgccccagtggaaatcatgatgtcctgcgtagaaatccacaatgctctattgtccattgactgtggtgcagtcatatcttccaaggggtctactgtgcttttcccaacaaaggcaagcagggagcagaaactgcttaccaaaccaactgcagtaattatcgtatcatctgatagctctggcgccataccatctgtatgtaagctctctcctggccaggctgcctaccatttcttggctggatatcacgatggaaaatttgtcccagcatacaacagagccccctctcctgctgacccacttgcacttgcaagttctttattctcacatttgaaagaagatgatacaccatcgtatctgatcaacgctaagcactctggaaagtacattgacggcaatgggtttatgaaattattaaagctggcactatctcacgatcttcctgacatcaaaactgaaggctctagagttggggaactcaaggggaagtacaggagctttctatccagcaagtttggccaatgtttacccgaggaattctctttttaggagatacaccctgaggttgcaatgaacatgtatatttactggcataggtttacattttggtttgaaaaggtgtcagtattcccattctgtctcagtttcaatgtaatactctattaccttacattgcatctttccgcctcctggtgtttggatatactgacgtaacgacaatgtagctagtacctacatgcatgaattgtcttgtgcactccgcttcagtcaaattttgttaagcagcagaaaattggaaactctcagtatacatgtcacgtgcgactttgtgagctgcactgtgcactgcagagatcggactgtactattctgtaggatcgcttcgctccagattcccagtaacaaccaaatggtccaaagctgctcttcatcattctgcagtgtcc

SEQ ID NO: 17676 - DNA, 2267 bp, Zea Mays
cggcgagcaggcagcgagcgccgcagcccgcagcccgcagccaaacgccgccaggccggggaaggggaacggtggaagagaagtggagcaccagcgaaccgcatatgctcggggttcttcgtcgcgcagccctcgccgcagcgtcatcgccggcggcggacctccgacagtttcagtgtgcttaccatagaagcagtgagagattatcacctatccgagccattacaaaatatctgcaaaatttctcgactactttttgttgcacagagaagaccaagaagtttcatatggtcttaattgggctattgctggaaaaggtgtcattgtgaaagataaggtcctccataacttggaaacatctgagcttcagaaaggtggcgctacttaccctgactttttgtctggtataccacttcatgttagaggagatgttattggtggtgtccctggtgtttctaaagctcaatttgcaaagcttctaaaactggtaggttctaaattttggcttcaccactcaggccctgttcgttttttgtcaaacaatggggattgagggggaacaaatcccctataagtcaaaatcctcctcaatcccttccaatccccccccccccaaatccccatgattttgggatgaaacgaacatggcctcaatgggatgatgatattcaatgatgattgtcatgaatggagctgaaatacttcctggtgcaacaatgagagctgtctcactgagtcatcaggtcacgggttcgaagtagtctctccgtatttgcgggggaaggcttgcttcggtttatccctatcctagacgtcacatatgggagcctccaacagtggatctacctttttttatctccctgtttgttgacagactacttgcttgcataggtgacgttccatctttcatccatctcgtgtctatatgttcaagatggcgccattggttcctcagcagaatgtgatgcaaaggttcgggtcattagtgataatccctctgctgttatgttactgtcgaatgtcctttggaaaataccagatcgtgcgatttcccatgacacatcccctttgactatatatgctaccagttcaataagtaacaacgttaagactgttcttggttctggaacacaatatgctaatggatttgctgtggcggatattgaacgatcatctctaatcctatgcggtaaagcatttgctgattcagctatcgtgaaagatgcacttactgctatgacagccccaatattgtctgcaagaggaggcctccctgttccaggatggattctgaactttggtggttctactgtattattgtttgccccagtggaaatcatgatgtcctgcgtagaaatccacaatgctctattgtccattgactgtggtgcagtcatatcttccaaggggtctactgtgcttttcccaacaaaggcaagcagggagcagaaactgcttaccaaaccaactgcagtaattatcgtatcatctgatagctctggcgccataccatctgtatgtaagctctctcctggccaggctgcctaccatttcttggctggatatcacgatggaaaatttgtcccagcatacaacagagccccctctcctgctgacccacttgcacttgcaagttctttattctcacatttgaaagaagatgatacaccatcgtatctgatcaacgctaagcactctggaaagtacattgacggcaatgggtttatgaaattattaaagctggcactatctcacgatcttcctgacatcaaaactgaaggctctagagttggggaactcaaggggaagtacaggagctttctatccagcaagtttggccaatgtttacccgaggaattctctttttaggagatacaccctgaggttgcaatgaacatgtatatttactggcataggtttacattttggtttgaaaaggtgtcagtattcccattctgtctcagtttcaatgtaatactctattaccttacattgcatctttccgcctcctggtgtttggatatactgacgtaacgacaatgtagctagtacctacatgcatgaattgtcttgtgcactccgcttcagtcaaattttgttaagcagcagaaaattggaaactctcagtatacatgtcacgtgcgactttgtgagctgcactgtgcactgcagagatcggactgtactattctgtaggatcgcttcgctccagattcccagtaacaaccaaatggtccaaagctgctcttcatcattctgcagtgtcc

SEQ ID NO: 17677 - DNA, 1823 bp, Zea Mays
gggatcgtcccctccgccgttgcggcgagcaggcagcgagcgccgcagcccgcagcccgcagccaaacgccgccaggccggggaaggggaacggtggaagagaagtggagcaccagcgaaccgcatatgctcggggttcttcgtcgcgcagccctcgccgcagcgtcatcgccggcggcggacctccgacagtttcagtgtgcttaccatagaagcagtgagagattatcacctatccgagccattacaaaatatctgcaaaatttctcgactactttttgttgcacagagaagaccaagaagtttcatatggtcttaattgggctattgctggaaaaggtgtcattgtgaaagataaggtcctccataacttggaaacatctgagcttcagaaaggtggcgctacttaccctgactttttgtctggtataccacttcatgttagaggagatgttattggtggtgtccctggtgtttctaaagctcaatttgcaaagcttctaaaactggtgacgttccatctttcatccatctcgtgtctatatgttcaagatggcgccattggttcctcagcagaatgtgatgcaaaggttcgggtcattagtgataatccctctgctgttatgttactgtcgaatgtcctttggaaaataccagatcgtgcgatttcccatgacacatcccctttgactatatatgctaccagttcaataagtaacaacgttaagactgttcttggttctggaacacaatatgctaatggatttgctgtggcggatattgaacgatcatctctaatcctatgcggtaaagcatttgctgattcagctatcgtgaaagatgcacttactgctatgacagccccaatattgtctgcaagaggaggcctccctgttccaggatggattctgaactttggtggttctactgtattattgtttgccccagtggaaatcatgatgtcctgcgtagaaatccacaatgctctattgtccattgactgtggtgcagtcatatcttccaaggggtctactgtgcttttcccaacaaagctctggcgccataccatctgtatgtaagctctctcctggccaggctgcctaccatttcttggctggatatcacgatggaaaatttgtcccagcatacaacagagccccctctcctgctgacccacttgcacttgcaagttctttattctcacatttgaaagaagatgatacaccatcgtatctgatcaacgctaagcactctggaaagtacattgacggcaatgggtttatgaaattattaaagctggcactatctcacgatcttcctgacatcaaaactgaaggctctagagttggggaactcaaggggaagtacaggagctttctatccagcaagtttggccaatgtttacccgaggaattctctttttaggagatacaccctgaggttgcaatgaacatgtatatttactggcataggtttacattttggtttgaaaaggtgtcagtattcccattctgtctcagtttcaatgtaatactctattaccttacattgcatctttccgcctcctggtgtttggatatactgacgtaacgacaatgtagctagtacctacatgcatgaattgtcttgtgcactccgcttcagtcaaattttgttaagcagcagaaaattggaaactctcagtatacatgtcacgtgcgactttgtgagctgcactgtgcactgcagagatcggactgtactattctgtaggatcgcttcgctccagattcccagtaacaaccaaatggtccaaagctgctcttcatcattctgcagtgtcc

SEQ ID NO: 17678 - DNA, 2078 bp, Zea Mays
gggatcgtcccctccgccgttgcggcgagcaggcagcgagcgccgcagcccgcagcccgcagccaaacgccgccaggccggggaaggggaacggtggaagagaagtggagcaccagcgaaccgcatatgctcggggttcttcgtcgcgcagccctcgccgcagcgtcatcgccggcggcggacctccgacagtttcagtgtgcttaccatagaagcagtgagagattatcacctatccgagccattacaaaatatctgcaaaatttctcgactactttttgttgcacagagaagaccaagaagtttcatatggtcttaattgggctattgctggaaaaggtgtcattgtgaaagataaggtcctccataacttggaaacatctgagcttcagaaaggtggcgctacttaccctgactttttgtctggtataccacttcatgttagaggagatgttattggtggtgtccctggtgtttctaaagctcaatttgcaaagcttctaaaactgggcagtcctggtgcaacaatgagagctgtctcactgagtcatcaggtcacgggttcgaagtagtctctccgtatttgcgggggaaggcttgcttcggtttatccctatcctagacgtcacatatgggagcctccaacagtggatctacctttttttatctccctgtttgttgacagactacttgcttgcataggtgacgttccatctttcatccatctcgtgtctatatgttcaagatggcgccattggttcctcagcagaatgtgatgcaaaggttcgggtcattagtgataatccctctgctgttatgttactgtcgaatgtcctttggaaaataccagatcgtgcgatttcccatgacacatcccctttgactatatatgctaccagttcaataagtaacaacgttaagactgttcttggttctggaacacaatatgctaatggatttgctgtggcggatattgaacgatcatctctaatcctatgcggtaaagcatttgctgattcagctatcgtgaaagatgcacttactgctatgacagccccaatattgtctgcaagaggaggcctccctgttccaggatggattctgaactttggtggttctactgtattattgtttgccccagtggaaatcatgatgtcctgcgtagaaatccacaatgctctattgtccattgactgtggtgcagtcatatcttccaaggggtctactgtgcttttcccaacaaaggcaagcagggagcagaaactgcttaccaaaccaactgcagtaattatcgtatcatctgatagctctggcgccataccatctgtatgtaagctctctcctggccaggctgcctaccatttcttggctggatatcacgatggaaaatttgtcccagcatacaacagagccccctctcctgctgacccacttgcacttgcaagttctttattctcacatttgaaagaagatgatacaccatcgtatctgatcaacgctaagcactctggaaagtacattgacggcaatgggtttatgaaattattaaagctggcactatctcacgatcttcctgacatcaaaactgaaggctctagagttggggaactcaaggggaagtacaggagctttctatccagcaagtttggccaatgtttacccgaggaattctctttttaggagatacaccctgaggttgcaatgaacatgtatatttactggcataggtttacattttggtttgaaaaggtgtcagtattcccattctgtctcagtttcaatgtaatactctattaccttacattgcatctttccgcctcctggtgtttggatatactgacgtaacgacaatgtagctagtacctacatgcatgaattgtcttgtgcactccgcttcagtcaaattttgttaagcagcagaaaattggaaactctcagtatacatgtcacgtgcgactttgtgagctgcactgtgcactgcagagatcggactgtactattctgtaggatcgcttcgctccagattcccagtaacaaccaaatggtccaaagctgctcttcatcattctgcagtgtcc

SEQ ID NO: 17679 - DNA, 2318 bp, Zea Mays
atgggatcgtcccctccgccgttgcggcgagcaggcagcgagcgccgcagcccgcagcccgcagccaaacgccgccaggccggggaaggggaacggtggaagagaagtggagcaccagcgaaccgcatatgctcggggttcttcgtcgcgcagccctcgccgcagcgtcatcgccggcggcggacctccgacagtttcagtgtgcttaccatagaagcagtgagagattatcacctatccgagaccaagaagtttcatatggtcttaattgggctattgctggaaaaggtgtcattgtgaaagataaggtcctccataacttggaaacatctgagcttcagaaaggtggcgctacttaccctgactttttgtctggtataccacttcatgttagaggagatgttattggtggtgtccctggtgtttctaaagctcaatttgcaaagcttctaaaactggtaggttctaaattttggcttcaccactcaggccctgttcgttttttgtcaaacaatggggattgagggggaacaaatcccctataagtcaaaatcctcctcaatcccttccaatccccccccccccaaatccccatgattttgggatgaaacgaacatggcctcaatgggatgatgatattcaatgatgattgtcatgaatggagctgaaatactgttagtccctttttttagcatctgattttttttctcatttttaatttagttgtgacatctccctatttgttgaagggcagtcctggtgcaacaatgagagctgtctcactgagtcatcaggtcacgggttcgaagtagtctctccgtatttgcgggggaaggcttgcttcggtttatccctatcctagacgtcacatatgggagcctccaacagtggatctacctttttttatctccctgtttgttgacagactacttgcttgcataggtgacgttccatctttcatccatctcgtgtctatatgttcaagatggcgccattggttcctcagcagaatgtgatgcaaaggttcgggtcattagtgataatccctctgctgttatgttactgtcgaatgtcctttggaaaataccagatcgtgcgatttcccatgacacatcccctttgactatatatgctaccagttcaataagtaacaacgttaagactgttcttggttctggaacacaatatgctaatggatttgctgtggcggatattgaacgatcatctctaatcctatgcggtaaagcatttgctgattcagctatcgtgaaagatgcacttactgctatgacagccccaatattgtctgcaagaggaggcctccctgttccaggatggattctgaactttggtggttctactgtattattgtttgccccagtggaaatcatgatgtcctgcgtagaaatccacaatgctctattgtccattgactgtggtgcagtcatatcttccaaggggtctactgtgcttttcccaacaaaggcaagcagggagcagaaactgcttaccaaaccaactgcagtaattatcgtatcatctgatagctctggcgccataccatctgtatgtaagctctctcctggccaggctgcctaccatttcttggctggatatcacgatggaaaatttgtcccagcatacaacagagccccctctcctgctgacccacttgcacttgcaagttctttattctcacatttgaaagaagatgatacaccatcgtatctgatcaacgctaagcactctggaaagtacattgacggcaatgggtttatgaaattattaaagctggcactatctcacgatcttcctgacatcaaaactgaaggctctagagttggggaactcaaggggaagtacaggagctttctatccagcaagtttggccaatgtttacccgaggaattctctttttaggagatacaccctgaggttgcaatgaacatgtatatttactggcataggtttacattttggtttgaaaaggtgtcagtattcccattctgtctcagtttcaatgtaatactctattaccttacattgcatctttccgcctcctggtgtttggatatactgacgtaacgacaatgtagctagtacctacatgcatgaattgtcttgtgcactccgcttcagtcaaattttgttaagcagcagaaaattggaaactctcagtatacatgtcacgtgcgactttgtgagctgcactgtgcactgcagagatcggactgtactattctgtaggatcgcttcgctccagattcccagtaacaaccaaatggtccaaagctgctcttcatcattctgcagtgtcc

SEQ ID NO: 17680 - DNA, 1839 bp, Zea Mays
atgggatcgtcccctccgccgttgcggcgagcaggcagcgagcgccgcagcccgcagcccgcagccaaacgccgccaggccggggaaggggaacggtggaagagaagtggagcaccagcgaaccgcatatgctcggggttcttcgtcgcgcagccctcgccgcagcgtcatcgccggcggcggacctccgacagtttcagtgtgcttaccatagaagcagtgagagattatcacctatccgagagaagaccaagaagtttcatatggtcttaattgggctattgctggaaaaggtgtcattgtgaaagataaggtcctccataacttggaaacatctgagcttcagaaaggtggcgctacttaccctgactttttgtctggtataccacttcatgttagaggagatgttattggtggtgtccctggtgtttctaaagctcaatttgcaaagcttctaaaactggtgacgttccatctttcatccatctcgtgtctatatgttcaagatggcgccattggttcctcagcagaatgtgatgcaaaggttcgggtcattagtgataatccctctgctgttatgttactgtcgaatgtcctttggaaaataccagatcgtgcgatttcccatgacacatcccctttgactatatatgctaccagttcaataagtaacaacgttaagactgttcttggttctggaacacaatatgctaatggatttgctgtggcggatattgaacgatcatctctaatcctatgcggtaaagcatttgctgattcagctatcgtgaaagatgcacttactgctatgacagccccaatattgtctgcaagaggaggcctccctgttccaggatggattctgaactttggtggttctactgtattattgtttgccccagtggaaatcatgatgtcctgcgtagaaatccacaatgctctattgtccattgactgtggtgcagtcatatcttccaaggggtctactgtgcttttcccaacaaaggcaagcagggagcagaaactgcttaccaaaccaactgcagtaattatcgtatcatctgatagctctggcgccataccatctgtatgtaagctctctcctggccaggctgcctaccatttcttggctggatatcacgatggaaaatttgtcccagcatacaacagagccccctctcctgctgacccacttgcacttgcaagttctttattctcacatttgaaagaagatgatacaccatcgtatctgatcaacgctaagcactctggaaagtacattgacggcaatgggtttatgaaattattaaagctggcactatctcacgatcttcctgacatcaaaactgaaggctctagagttggggaactcaaggggaagtacaggagctttctatccagcaagtttggccaatgtttacccgaggaattctctttttaggagatacaccctgaggttgcaatgaacatgtatatttactggcataggtttacattttggtttgaaaaggtgtcagtattcccattctgtctcagtttcaatgtaatactctattaccttacattgcatctttccgcctcctggtgtttggatatactgacgtaacgacaatgtagctagtacctacatgcatgaattgtcttgtgcactccgcttcagtcaaattttgttaagcagcagaaaattggaaactctcagtatacatgtcacgtgcgactttgtgagctgcactgtgcactgcagagatcggactgtactattctgtaggatcgcttcgctccagattcccagtaacaaccaaatggtccaaagctgctcttcatcattctgcagtgtcc

SEQ ID NO: 17681 - DNA, 2332 bp, Zea Mays
gaattaggaatgggatcgtcccctccgccgttgcggcgagcaggcagcgagcgccgcagcccgcagcccgcagccaaacgccgccaggccggggaaggggaacggtggaagagaagtggagcaccagcgaaccgcatatgctcggggttcttcgtcgcgcagccctcgccgcagcgtcatcgccggcggcggacctccgacagtttcagtgtgcttaccatagaagcagtgagagattatcacctatccgagagaagaccaagaagtttcatatggtcttaattgggctattgctggaaaaggtgtcattgtgaaagataaggtcctccataacttggaaacatctgagcttcagaaaggtggcgctacttaccctgactttttgtctggtataccacttcatgttagaggagatgttattggtggtgtccctggtgtttctaaagctcaatttgcaaagcttctaaaactggtaggttctaaattttggcttcaccactcaggccctgttcgttttttgtcaaacaatggggattgagggggaacaaatcccctataagtcaaaatcctcctcaatcccttccaatccccccccccccaaatccccatgattttgggatgaaacgaacatggcctcaatgggatgatgatattcaatgatgattgtcatgaatggagctgaaatactgttagtccctttttttagcatctgattttttttctcatttttaatttagttgtgacatctccctatttgttgaagggcagtcctggtgcaacaatgagagctgtctcactgagtcatcaggtcacgggttcgaagtagtctctccgtatttgcgggggaaggcttgcttcggtttatccctatcctagacgtcacatatgggagcctccaacagtggatctacctttttttatctccctgtttgttgacagactacttgcttgcataggtgacgttccatctttcatccatctcgtgtctatatgttcaagatggcgccattggttcctcagcagaatgtgatgcaaaggttcgggtcattagtgataatccctctgctgttatgttactgtcgaatgtcctttggaaaataccagatcgtgcgatttcccatgacacatcccctttgactatatatgctaccagttcaataagtaacaacgttaagactgttcttggttctggaacacaatatgctaatggatttgctgtggcggatattgaacgatcatctctaatcctatgcggtaaagcatttgctgattcagctatcgtgaaagatgcacttactgctatgacagccccaatattgtctgcaagaggaggcctccctgttccaggatggattctgaactttggtggttctactgtattattgtttgccccagtggaaatcatgatgtcctgcgtagaaatccacaatgctctattgtccattgactgtggtgcagtcatatcttccaaggggtctactgtgcttttcccaacaaaggcaagcagggagcagaaactgcttaccaaaccaactgcagtaattatcgtatcatctgatagctctggcgccataccatctgtatgtaagctctctcctggccaggctgcctaccatttcttggctggatatcacgatggaaaatttgtcccagcatacaacagagccccctctcctgctgacccacttgcacttgcaagttctttattctcacatttgaaagaagatgatacaccatcgtatctgatcaacgctaagcactctggaaagtacattgacggcaatgggtttatgaaattattaaagctggcactatctcacgatcttcctgacatcaaaactgaaggctctagagttggggaactcaaggggaagtacaggagctttctatccagcaagtttggccaatgtttacccgaggaattctctttttaggagatacaccctgaggttgcaatgaacatgtatatttactggcataggtttacattttggtttgaaaaggtgtcagtattcccattctgtctcagtttcaatgtaatactctattaccttacattgcatctttccgcctcctggtgtttggatatactgacgtaacgacaatgtagctagtacctacatgcatgaattgtcttgtgcactccgcttcagtcaaattttgttaagcagcagaaaattggaaactctcagtatacatgtcacgtgcgactttgtgagctgcactgtgcactgcagagatcggactgtactattctgtaggatcgcttcgctccagattcccagtaacaaccaaatggtccaaagctgctcttcatcattctgcagtgtcc

SEQ ID NO: 17682 - DNA, 1958 bp, Zea Mays
cgtcatgggccgatgaccctacatgggctaccccgcagccgcactgttgggctacccgagttgaattaggaatgggatcgtcccctccgccgttgcggcgagcaggcagcgagcgccgcagcccgcagcccgcagccaaacgccgccaggccggggaaggggaacggtggaagagaagtggagcaccagcgaaccgcatatgctcggggttcttcgtcgcgcagccctcgccgcagcgtcatcgccggcggcggacctccgacagtttcagtgtgcttaccatagaagcagtgagagattatcacctatccgagccattacaaaatatctgcaaaatttctcgactactttttgttgcacagagaagaccaagaagtttcatatggtcttaattgggctattgctggaaaaggtgtcattgtgaaagataaggtcctccataacttggaaacatctgagcttcagaaaggtggcgctacttaccctgactttttgtctggtataccacttcatgttagaggagatgttattggtggtgtccctggtgtttctaaagctcaatttgcaaagcttctaaaactggtgacgttccatctttcatccatctcgtgtctatatgttcaagatggcgccattggttcctcagcagaatgtgatgcaaaggttcgggtcattagtgataatccctctgctgttatgttactgtcgaatgtcctttggaaaataccagatcgtgcgatttcccatgacacatcccctttgactatatatgctaccagttcaataagtaacaacgttaagactgttcttggttctggaacacaatatgctaatggatttgctgtggcggatattgaacgatcatctctaatcctatgcggtaaagcatttgctgattcagctatcgtgaaagatgcacttactgctatgacagccccaatattgtctgcaagaggaggcctccctgttccaggatggattctgaactttggtggttctactgtattattgtttgccccagtggaaatcatgatgtcctgcgtagaaatccacaatgctctattgtccattgactgtggtgcagtcatatcttccaaggggtctactgtgcttttcccaacaaaggcaagcagggagcagaaactgcttaccaaaccaactgcagtaattatcgtatcatctgatagctctggcgccataccatctgtatgtaagctctctcctggccaggctgcctaccatttcttggctggatatcacgatggaaaatttgtcccagcatacaacagagccccctctcctgctgacccacttgcacttgcaagttctttattctcacatttgaaagaagatgatacaccatcgtatctgatcaacgctaagcactctggaaagtacattgacggcaatgggtttatgaaattattaaagctggcactatctcacgatcttcctgacatcaaaactgaaggctctagagttggggaactcaaggggaagtacaggagctttctatccagcaagtttggccaatgtttacccgaggaattctctttttaggagatacaccctgaggttgcaatgaacatgtatatttactggcataggtttacattttggtttgaaaaggtgtcagtattcccattctgtctcagtttcaatgtaatactctattaccttacattgcatctttccgcctcctggtgtttggatatactgacgtaacgacaatgtagctagtacctacatgcatgaattgtcttgtgcactccgcttcagtcaaattttgttaagcagcagaaaattggaaactctcagtatacatgtcacgtgcgactttgtgagctgcactgtgcactgcagagatcggactgtactattctgtaggatcgcttcgctccagattcccagtaacaaccaaatggtccaaagctgctcttcatcattctgcagtgtcc

SEQ ID NO: 17683 - DNA, 1966 bp, Zea Mays
ctcatgcactccaagcgctaacaattgttgggccattggcaacgcgtccagtccagcaaatcgtcatgggccgatgaccctacatgggctaccccgcagccgcactgttgggctacccgagttgaattaggaatgggatcgtcccctccgccgttgcggcgagcaggcagcgagcgccgcagcccgcagcccgcagccaaacgccgccaggccggggaaggggaacggtggaagagaagtggagcaccagcgaaccgcatatgctcggggttcttcgtcgcgcagccctcgccgcagcgtcatcgccggcggcggacctccgacagtttcagtgtgcttaccatagaagcagtgagagattatcacctatccgagaccaagaagtttcatatggtcttaattgggctattgctggaaaaggtgtcattgtgaaagataaggtcctccataacttggaaacatctgagcttcagaaaggtggcgctacttaccctgactttttgtctggtataccacttcatgttagaggagatgttattggtggtgtccctggtgtttctaaagctcaatttgcaaagcttctaaaactggtgacgttccatctttcatccatctcgtgtctatatgttcaagatggcgccattggttcctcagcagaatgtgatgcaaaggttcgggtcattagtgataatccctctgctgttatgttactgtcgaatgtcctttggaaaataccagatcgtgcgatttcccatgacacatcccctttgactatatatgctaccagttcaataagtaacaacgttaagactgttcttggttctggaacacaatatgctaatggatttgctgtggcggatattgaacgatcatctctaatcctatgcggtaaagcatttgctgattcagctatcgtgaaagatgcacttactgctatgacagccccaatattgtctgcaagaggaggcctccctgttccaggatggattctgaactttggtggttctactgtattattgtttgccccagtggaaatcatgatgtcctgcgtagaaatccacaatgctctattgtccattgactgtggtgcagtcatatcttccaaggggtctactgtgcttttcccaacaaaggcaagcagggagcagaaactgcttaccaaaccaactgcagtaattatcgtatcatctgatagctctggcgccataccatctgtatgtaagctctctcctggccaggctgcctaccatttcttggctggatatcacgatggaaaatttgtcccagcatacaacagagccccctctcctgctgacccacttgcacttgcaagttctttattctcacatttgaaagaagatgatacaccatcgtatctgatcaacgctaagcactctggaaagtacattgacggcaatgggtttatgaaattattaaagctggcactatctcacgatcttcctgacatcaaaactgaaggctctagagttggggaactcaaggggaagtacaggagctttctatccagcaagtttggccaatgtttacccgaggaattctctttttaggagatacaccctgaggttgcaatgaacatgtatatttactggcataggtttacattttggtttgaaaaggtgtcagtattcccattctgtctcagtttcaatgtaatactctattaccttacattgcatctttccgcctcctggtgtttggatatactgacgtaacgacaatgtagctagtacctacatgcatgaattgtcttgtgcactccgcttcagtcaaattttgttaagcagcagaaaattggaaactctcagtatacatgtcacgtgcgactttgtgagctgcactgtgcactgcagagatcggactgtactattctgtaggatcgcttcgctccagattcccagtaacaaccaaatggtccaaagctgctcttcatcattctgcagtgtcc

SEQ ID NO: 17684 - DNA, 1111 bp, Zea Mays
agttgtctgcatcctcttaatggatggccatcttgagaactatactagcgactacaccctacaggtgttggtaggctactgcgccgtgtacatcttcatgcagaccttcatgatcccaggaacgatattcatgtcactgcttgctggtgctctgtttgggcagctccggggcgtggccctggtagtcttcgccgccactgctggcgcttcttcgtgctatttcctgtcgaagatgattgggaagccactggtgttcacgctgtggccagataaactcagcttcttccagagacagggtgaccccaacattgccaaataccttcatcaacttggcttcaccgatagtagatgtcccctaccacatattcttactgggaactctcattggccttatcccagcttcttatgtgactgtcagggctggaatcgctcttggagaattaacttcgctaagcgacctttacgacacccagtcgatagcgctgctattcctgatcggtgttgtttcagtcacaccagcattgttgggcaaggacgaggcacaagaaaaaccatcagaaatggctgtaggcgcgtcgtgatcaccaaagcaccgagcacctgtacatatcaacatgcagccatgcagtggcttcattagttcagatcgacgggcccgtgtggctggatgacaaaaacggttcgcatggctactacacagcttggataggccattcagcacattatgattatgaacgattgaatgaatctgggaagcagaatgcccgttccacaagctgctctgatgtgtaaacgagtagtgctgttcggataggcctggcatttagtctaatccctgtttatattgaccagattcattcaatccatattcagtggttcaaagataatgccctgtccagctgctgtgttcctcaatgtctttctccatttctaatttcccttctgtgcctgattgcctactggttcttttgtgatccgcatcacttaggcatttggcaagtgatgatgcataatgccttccggtcggtaggaaacagtagagcttgtttcctccctttccatgccaagtgacgcggtcgtgaaatgcgcgacatgcaaaaggaagcagtag

SEQ ID NO: 17685 - DNA, 1127 bp, Zea Mays
ctgccccttaagctcctcatttttttctttgtccggttggttggtgccggtggtgcacgaaagcttccgccttctctctgttttctcgtacgaaatttgatgccgatatgccctatgattatctgcacgcaagttgtctgcatcctcttaatggatggccatcttgagaactatactagcgactacaccctacaggtgttgatgattgggaagccactggtgttcacgctgtggccagataaactcagcttcttccagagacaggttgctaaaagaagagagaagctcttgaattacatgcttttcctcagggtgaccccaacattgccaaataccttcatcaacttggcttcaccgatagtagatgtcccctaccacatattcttactgggaactctcattggccttatcccagcttcttatgtgactgtcagggctggaatcgctcttggagaattaacttcgctaagcgacctttacgacacccagtcgatagcgctgctattcctgatcggtgttgtttcagtcacaccagcattgttgggcaaggacgaggcacaagaaaaaccatcagaaatggctgtaggcgcgtcgtgatcaccaaagcaccgagcacctgtacatatcaacatgcagccatgcagtggcttcattagttcagatcgacgggcccgtgtggctggatgacaaaaacggttcgcatggctactacacagcttggataggccattcagcacattatgattatgaacgattgaatgaatctgggaagcagaatgcccgttccacaagctgctctgatgtgtaaacgagtagtgctgttcggataggcctggcatttagtctaatccctgtttatattgaccagattcattcaatccatattcagtggttcaaagataatgccctgtccagctgctgtgttcctcaatgtctttctccatttctaatttcccttctgtgcctgattgcctactggttcttttgtgatccgcatcacttaggcatttggcaagtgatgatgcataatgccttccggtcggtaggaaacagtagagcttgtttcctccctttccatgccaagtgacgcggtcgtgaaatgcgcgacatgcaaaaggaagcagtag

SEQ ID NO: 17686 - DNA, 1196 bp, Zea Mays
ctgccccttaagctcctcatttttttctttgtccggttggttggtgccggtggtgcacgaaagcttccgccttctctctgttttctcgtacgaaatttgatgccgatatgccctatgattatctgcacgcaagttgtctgcatcctcttaatggatggccatcttgagaactatactagcgactacaccctacaggtgttgctccggggcgtggccctggtagtcttcgccgccactgctggcgcttcttcgtgctatttcctgtcgaagatgattgggaagccactggtgttcacgctgtggccagataaactcagcttcttccagagacaggttgctaaaagaagagagaagctcttgaattacatgcttttcctcagggtgaccccaacattgccaaataccttcatcaacttggcttcaccgatagtagatgtcccctaccacatattcttactgggaactctcattggccttatcccagcttcttatgtgactgtcagggctggaatcgctcttggagaattaacttcgctaagcgacctttacgacacccagtcgatagcgctgctattcctgatcggtgttgtttcagtcacaccagcattgttgggcaaggacgaggcacaagaaaaaccatcagaaatggctgtaggcgcgtcgtgatcaccaaagcaccgagcacctgtacatatcaacatgcagccatgcagtggcttcattagttcagatcgacgggcccgtgtggctggatgacaaaaacggttcgcatggctactacacagcttggataggccattcagcacattatgattatgaacgattgaatgaatctgggaagcagaatgcccgttccacaagctgctctgatgtgtaaacgagtagtgctgttcggataggcctggcatttagtctaatccctgtttatattgaccagattcattcaatccatattcagtggttcaaagataatgccctgtccagctgctgtgttcctcaatgtctttctccatttctaatttcccttctgtgcctgattgcctactggttcttttgtgatccgcatcacttaggcatttggcaagtgatgatgcataatgccttccggtcggtaggaaacagtagagcttgtttcctccctttccatgccaagtgacgcggtcgtgaaatgcgcgacatgcaaaaggaagcagtag

SEQ ID NO: 17687 - DNA, 1395 bp, Zea Mays
tcttggcctagaaaagcaaagtgagggacgagaaagggagggaagtgtgaaggtaggagagagagagagggagccaagggaagctctcttctttcttcctcctcctcgtcctctcgaattccgtctcttgtctctgtcctcctcgctcggcttccccggttcttgagaggggaaataggaggcggagccgaggagagggatggggagggacgagaggttcccagtgtgggaggccgcgctcggcgctggggtcgccgccgccttcgccgctgggctcgtcggggtttacctttccatgccggactccgactacagcttcctcaagctgccacgtaatctccaggaactccaaatcctcactggccatcttgagaactatactagcgactacaccctacagctccggggcgtggccctggtagtcttcgccgccactgctggcgcttcttcgtgctatttcctgtcgaagatgattgggaagccactggtgttcacgctgtggccagataaactcagcttcttccagagacaggttgctaaaagaagagagaagctcttgaattacatgcttttcctcagggtgaccccaacattgccaaataccttcatcaacttggcttcaccgatagtagatgtcccctaccacatattcttactgggaactctcattggccttatcccagcttcttatgtgactgtcagggctggaatcgctcttggagaattaacttcgctaagcgacctttacgacacccagtcgatagcgctgctattcctgatcggtgttgtttcagtcacaccagcattgttgggcaaggacgaggcacaagaaaaaccatcagaaatggctgtaggcgcgtcgtgatcaccaaagcaccgagcacctgtacatatcaacatgcagccatgcagtggcttcattagttcagatcgacgggcccgtgtggctggatgacaaaaacggttcgcatggctactacacagcttggataggccattcagcacattatgattatgaacgattgaatgaatctgggaagcagaatgcccgttccacaagctgctctgatgtgtaaacgagtagtgctgttcggataggcctggcatttagtctaatccctgtttatattgaccagattcattcaatccatattcagtggttcaaagataatgccctgtccagctgctgtgttcctcaatgtctttctccatttctaatttcccttctgtgcctgattgcctactggttcttttgtgatccgcatcacttaggcatttggcaagtgatgatgcataatgccttccggtcggtaggaaacagtagagcttgtttcctccctttccatgccaagtgacgcggtcgtgaaatgcgcgacatgcaaaaggaagcagtag

SEQ ID NO: 17688 - DNA, 2986 bp, Zea Mays
agcagcctgagtgcctgacttaactttgcttaaaccctcttctccctccatctcccgcgccgccgccgcaaaaccctagctccgacgcccctccgccgttgccgcggccgccagaaccagccatggcttcgacgcatgtttataagaagaactaccgctgcgaccgctccctgcagcagttctacacgggcgggccctttgcggtcgggctcgcccccggcggcgatggcgagggcggcgccgaggctgaggccttcctcgcgtgcgcgtgcggtggagaggtacgcgtggtgtccgccgcggacgcctccgccataggggagcccgtcgacggagactcggaggccatcaccgcgctagcgctgtcccccgactcacggctcatattcgccgcgggccacagcaggcttattagggtctgggacctcgcgtcccgaacttgcatacgcagctggaagggacatgatggtcctatcatggccatggcatgccatgcttctggtggtttgcttgcaactgccggagcagacaagaaggtctgcgtatgggatgtggatggtggattttgcacccattttcttagaggtcatatgggcgttgtgacaaccattatgtttcacaaagatccaaagcgccttttgttgttttcaggaagtgaagatggcactgtgcgagtgtggaaccttgaaaccaaaaaatgtgttgctgttcttaaagagcatttttcagcagtcacttcattggcattgtctgatgatggacaaacattgctcagcgctgggagggataagattgttaccgcatgggatattcgtaagtacagctcaaagaagacaataccgacatatgaaatgatagaagctgtttccttcattggatcaggaagtgagctcttggcttgtttgggcatagaactggcaaatataaaggagaaatctgctggttattttcttacagttggtgaacgtggggtcgtgcgtgtctggtgcttggagagttgtgtttgcgtgttcgagcagcaaacatctgatgtaactgttaactcagagaacgaggaaaccaggaggggctttacatctgctgttatgttgccaaatgatcaaggattgctatgtgttactgctgatcagcagtttttgttctattgtcccaaaagaactgatgatggggactttgaactgtctctatatagacgactaataggttataatgatgagattcttgacttgaagtttatcggggaggaggaacaataccttgccgtggctaccaacttggagcaggtccgtgtttacgatgttgcgtcgatgtcatgttcttatgtactcgctggccacactgaaatagttgtttgcattgacacctgtgtctctgcttccgggaagacacttgtcgtaactgggagcaaggatcatactgtaaggttatgggatgccgaaagaaaaggctgtattggcattggcaaaggccatctgggagctgttggttctgttgccttctcaaagaaaacaaataacttttttgttagtggcagcagtgatcgaaccatcaaggtatggacctgggacgatgcacttggtgatgctgaggatgaagtccctcttaaagcaaaggctgttgtagctgcacatgataaagatattaattctctggcaatttcacctaatgatggccttgtttgcagtggttctgaggaccgaactgcttgcatatggaagctccctaacctagtgttatctgttgtccttaagggacacaaaagaggaatctgacatttgaaggtcatacatcaagtgttctgcgagcttctttcctttcacgtggaactcaagttatttcttgcggaagtgatggtctagtgaagctatggacaatcaagacaaatgaatgtattgctacttatgataagcatgatgggaaggtctgggcattggctgttggcatgaaaactgaaatggttgctactggtggaaccgatgctgtcctcaacctgtggcatgattccaccatggaagataagcaggaagattttcgtaagaaggaggaagaagttttaagaggccaggaattggaaaatgctgtgtcagattctgactacgcaaaggcaatacaacttgcatttgagcttagaagaccacacagacttctagatttattctcaaagcttgcaaggagagctgatgcagaggatccaatagaaaaggctcttcttggtcttccaacggatggccttcgcgtgcttcttgaatacgtccgtgaatggaatacgaagcccaagttctgtcatgttgcacagtttgtgctttttcggttattgaggagtttctctcccactgatatcctggagatcaagggcatcagtgagctccttgagggccttattccgtattcgcagaggcatttcagccgagtcgatagactagtccgaagcacgtttctgttggactatacgctgatgcgaatgtccgtggtagatccagatgtagatgcgggaacaatcaaagatgaaatgaacggttcgtctgtggagaacggtgaacttgcagagcctcggcctgcttcacctgtaccacagaagtcaagcaagaagagaaaatctggcaaatcaggtaaaaagggcaaggagaagaaggtgaaggttgcctcaagcggactactcagcaaggatgtttctgttgaaccctaaatatctagctgagaatctgttttttttatgcatgccgccaattttgtagctgctgttgcaacggacgttgcccaacacacgaatcccatatgatgtaaatgcatttttgctgatttattaggagggcgaagtgttatcaaaatctgccatgccaaatgttctggtaagcaaaagttgccaaaagttggatggaataatttttacatagatttggtaagccaagtatgaggtattggtaagttctggtctcaaaccaaatggctggcaaaagcatcggcctgccgcctgcctaagtttttg

SEQ ID NO: 17689 - DNA, 1360 bp, Zea Mays
atcatccctagctgctgcccttttgtggccttgtcacagtagcggctcagccacccacctctcctttcccatggccgccgccgccgttcgccgcctactgcgtggggcctcctccacctccgtatccaacaccagccgtctcctctcctccaccacctcgccgcctccccaccggagccccaacaccaactcaccggttgccttcgactggtccgacgacgacgctgacggctcctcacatctaccgccgtccacggaaaagaaggatgaactacctcccccctactacgaccccttcaacaagaagcccgccattgccgagccgtccgaccccaccaacctacaggaggtcttccacaagatgcggaaagagggcctcaccgattacgccatcaagatgttcgacggattgtccaaggacgggctcacccacgaagctctcgcgctctttgccgtcatcaaggataggggctccatgcccgacgtcgtcgcccacaccgccgtcctcgaggcgtacgccagcgcaggccccgcgcactggcgcgacgccgtgcgcacgtacgaccgcatgctcgcgtccggcgtcatgcccaacgcgtacacgctggccgtgcttgtcagggggctcgcggccagcgaccggtgcgcagaagcaggcaagtaccttgtcgagatgctcgaccgcgggatgcggcccaatgtggcgacgtatctggccgcgttcgaggcgtatctgaggatggagaaagtggaagaggggaaagcactgctagagacgatgaaggggaaggggttcaggccagacgaggaggccgtgcgtggcggcactgtgaagcgggggcaagtgtttgatggcctaatgaaattgctctttggcaagtaatagtggctaaacctacaagtttttgggacagattttgaatgctagaatgtctttttttaaatgggtagcatgcaatattattcactgtggatcttattttaatggagccctcacatagcatgaaaataatgaggaaatctaaggaatttgggctttcaaatttttatggtgatttcagcatcgaatacatttcttatgcaagttgcaccctcaaagagacaaatgacggatttgacttctatcatcatctaaagctctgttcttcaagacatgtttaagcatattgatatggcccagctgaatcgggtatattttaggaaacatggaaatatgaaatgctgattggctgtgtctattttggtaccaaataatcctttatgtaatgctagtattagttaccttctttagcattatactgcttcatagtttatatgtttagaaaaaaagatataaataaatgaaaagtaaggagagaaa

SEQ ID NO: 17690 - DNA, 819 bp, Zea Mays
gtcaattcttattaccaaatttgtacatgtcgttatgtttctgccgtgttgatagataaaaagaacaaaaatagagaggttacagtgaatgagttcctgccagcgaaaaaatgccatcaacacgatcaagtactcgatagggtgttttctcccacatacagtgccatatatgttactaactctatactagctttgctttgatagtattctatgtagagcaataatttgtgttatcagaacagagctcactaaagtcgtttggatgttatactgcaaggatttgtgtggctcacaccttattgaaagcatcaggaagtgatctctaggactctagctgcttaattgtggatgctacaccattttctcaacactttatccagaatccgcctcacgccccacgcttctccacgcctccgcccaggcaactctcacccgccgccgaagccgcccacagacctgcgcccgccgctcggccgcctttacggccgcagcccgcagcccggccgaccccggcgcctccgcggcttcgctcatctgccctcccgcggcccgcccagacctccgccgaccgtcgacccccgtccggccgtccagtcgacgcctgaccttcgcctgcggccgctgcctggccgcccgtacagccgcaggccgcagccccgcctccgcccgccagactccgcccctccacccggcgtcctccgccacagtgcccgaccaccccgcgccgccgcagcagcagcaggtgagcgtctctcgtccctttcctactgtcctgtgcacgctctgggttccggtgcttgctctgtttgatctgctcta

SEQ ID NO: 17691 - DNA, 905 bp, Zea Mays
aaaggaaaatagtaagtatagaaatgactctatgtcaattcttattaccaaatttgtacatgtcgttatgtttctgccgtgttgatagataaaaagaacaaaaatagagaggttacagtgaatgagttcctgccagcgaaaaaatgccatcaacacgatcaagtactcgatagggtgttttctcccacatacagtgccatatatgttactaactctatactagctttgctttgatagtattctatgtagagcaataatttgtgttatcagaacagagctcactaaagtcgtttggatgttatactgcaaggatttgtgtggctcacaccttattgaaagcatcaggaagtgatctctaggactctagctgcttaattgtggatgctacaccattttctcaacactttatccagagtactgtagtacaacccattcttccttgtattttctcctttccatacattccactctattttatctctaatatttgcggttcctaattagttttgtctgcaatagttggattcttgtttgacccaggtttcagtactttttgatattaacccttgatgttgtttgctttgatgttaacgtattgatgaattttatatctgactctgatcttattttcttaaagatagaaaattaaatggccacttgaattgtgtatactttgttggagcattgatttgttttgattaatatatttagaaacatgctttgtcatcagttttgatacaacactacattaatcgcatgaaaatcacttgctaaaaaagttatgttgaatccaaacatgttaatgcttctcgatgtatcttatccttatatgttgactccgtttcaacgcacggacactcatctagtagcctattaaagttgaaactttttttaacagatccgcc

SEQ ID NO: 17692 - DNA, 490 bp, Zea Mays
cttttttttgtcggtgcactttaagaggtgtcaagaaagcaaggaaaaataagcaaactctgctgaatgtcaagcttacctctgtatacataaaatggacaagcacacttagtaccgtgaaggtgagcaatgtatcactgaaagcagcacagcgtgagataaaggaattcttttccttttctggtgacattgtgcatgttgaaatgcagagtggcgatgaactttctcaagttgcctacattacttttaaagacaaccaaggagctgagacggcaatgcttctcacggtatatttattgtctcatttgaaagttttggaggactcaaactatttttcatggattgatgattcactatctgtattatcgtgaaagtatggtatccatatgttttcttatttaatgtgttaataatcaatatttcagcaatgtgccattgtactgcaatttgttgccatgacatttttaagtcccaaccaaagactgtatcc

SEQ ID NO: 17693 - DNA, 655 bp, Zea Mays
ttttgaaatagcaaatgagatagtaaatacaatagttcagctggagacacgtagtggggaccagttcggacgtgccccacacgacgccacgtcaccaccccacgtcgtgtcgaagggcagcgccgcggcgggcgctcctcgaacctctctataaaccgcccactggacacggccactccattttagactctactccccgcttacgattcaagtcagcggtttagggttcgagatctcggcattgcgccgcggaagccatggcgacaagcacacttagtaccgtgaaggtgagcaatgtatcactgaaagcagcacagcgtgagataaaggaattcttttccttttctggtgacattgtgcatgttgaaatgcagagtggcgatgaactttctcaagttgcctacattacttttaaagacaaccaaggagctgagacggcaatgcttctcacggtatatttattgtctcatttgaaagttttggaggactcaaactatttttcatggattgatgattcactatctgtattatcgtgaaagtatggtatccatatgttttcttatttaatgtgttaataatcaatatttcagcaatgtgccattgtactgcaatttgttgccatgacatttttaagtcccaaccaaagactgtatcc

SEQ ID NO: 17694 - DNA, 1559 bp, Zea Mays
ctcacgctgtcgccgagaaaaactcaggaacccaatcagccgacggaatctcacctgctctgctcctcagccccagcccaggccttcgctctcgctgccctgagccctccgcgttccccgcccgccacgcgatgccggcgtgggccgaagcggcgctcgtgctcgcctcaccatcccccgccaccgcctcctcgaccacgtcatcatgtggcgccaggccgcgcgccgccgtggggtccgtcaggctcttctgcaagcattcgttccaaagctggattccagattcataattaccgtacaaggatgtttaagattaaagcaaaagcagaatctggtgatggctacacacggcttgctccacttagatttgaatctccaagtggccagcttctgattcaaatactacaatcacaccctcatcttatccctgcaacagttgatcagcaacttgaaaatcttcaatcagagaaatctgcccaaagtgaagaagcctcaaaagttccccaggacctcctctacaagagaattgcagaagtcaaagagaaggaaaggcaaaatgccttagaagagattatctactgttgggttacatataggttcatggaaaatgacatatatatgacacctgcattatcaccagggggtggccctgtacgtgacatatccgcattgcctaatcaagaagacaaattgcgaaacatacactccgcagacgcctttgagatgatacaaaaccatctcaatcttatcatgggagaaaagatagcatcaccgcccgatactgttgttgagatcagcaacttgaatcttggaaagctgtatgcagcatccatcatgtatggttactttctgaagagagtggatgagcgattccaacttgagaaaactatgaagactctcccaccaaagcccaaccagcagatagtatttgaaaacctacagcctaatccattctgggatatggagtccttagtacagattacacctgatggggaggagataagtttggacgatgaaaaatcaaatccaaacaagttgaggtcttatgtctcacaactggatgctgacacattgcaaagatatgctactatcagatcgaaggaagccgtctcactgatcgagaagcaaactcaggcgttgtttggacggccagacatcaaagtattggacgatggttcggtcaatgcaaaggatggcagaatgataacaatcacatttacagagctcaatcatctggtcttggaggcagttgctttcggttccttcctttgggaagctgagagttacgtagaatcaaaataccattttgtcaacagttgaatgtgccttttcttatttgaattttggaaatggtttgtgtacatgtgatagggtaggatccatatctgatctattttttcagtgtattcatggttcttgctcgctatcagtaacagccaaagcatcaccacccatgaaccatgcctgtaacaggtttgagatttttcatcaaaggaagcgggcctgatccatagtgtaatctaacaggcaagtggaaattaacaaacagttgatgtttt

SEQ ID NO: 17695 - DNA, 1454 bp, Zea Mays
ctcacgctgtcgccgagaaaaactcaggaacccaatcagccgacggaatctcacctgctctgctcctcagccccagcccaggccttcgctctcgctgccctgagccctccgcgttccccgcccgccacgcgatgccggcgtgggccgaagcggcgctcgtgctcgcctcaccatcccccgccaccgcctcctcgaccacgtcatcatgtggcgccaggccgcgcgccgccgtggggtccgtcaggctcttctgcaagggattcccttgtagcattcgttccaaagctggattccagattcataattaccgtacaaggatgtttaagattaaagcaaaagcagaatctggtgatggctacacacggcttgctccacttagatttgaatctccaagtggccagcttctgattcaaatactacaatcacaccctcatcttatccctgcaacagttgatcagcaacttgaaaatcttcaatcagagaaatctgcccaaagtgaagaagcctcaaaagttccccaggacctcctctacaaggggtggccctgtacgtgacatatccgcattgcctaatcaagaagacaaattgcgaaacatacactccgcagacgcctttgagatgatacaaaaccatctcaatcttatcatgggagaaaagatagcatcaccgcccgatactgttgttgagatcagcaacttgaatcttggaaagctgtatgcagcatccatcatgtatggttactttctgaagagagtggatgagcgattccaacttgagaaaactatgaagactctcccaccaaagcccaaccagcagatagtatttgaaaacctacagcctaatccattctgggatatggagtccttagtacagattacacctgatggggaggagataagtttggacgatgaaaaatcaaatccaaacaagttgaggtcttatgtctcacaactggatgctgacacattgcaaagatatgctactatcagatcgaaggaagccgtctcactgatcgagaagcaaactcaggcgttgtttggacggccagacatcaaagtattggacgatggttcggtcaatgcaaaggatggcagaatgataacaatcacatttacagagctcaatcatctggtcttggaggcagttgctttcggttccttcctttgggaagctgagagttacgtagaatcaaaataccattttgtcaacagttgaatgtgccttttcttatttgaattttggaaatggtttgtgtacatgtgatagggtaggatccatatctgatctattttttcagtgtattcatggttcttgctcgctatcagtaacagccaaagcatcaccacccatgaaccatgcctgtaacaggtttgagatttttcatcaaaggaagcgggcctgatccatagtgtaatctaacaggcaagtggaaattaacaaacagttgatgtttt

SEQ ID NO: 17696 - DNA, 1998 bp, Zea Mays
ctcacgctgtcgccgagaaaaactcaggaacccaatcagccgacggaatctcacctgctctgctcctcagccccagcccaggccttcgctctcgctgccctgagccctccgcgttccccgcccgccacgcgatgccggcgtgggccgaagcggcgctcgtgctcgcctcaccatcccccgccaccgcctcctcgaccacgtcatcatgtggcgccaggccgcgcgccgccgtggggtccgtcaggctcttctgcaagggattcccttgtagcattcgttccaaagctggattccagattcataattaccgtacaaggatgtttaagattaaagcaaaagcagaatctggtgatggctacacacggcttgctccacttagatttgaatctccaagtggccagcttctgattcaaatactacaatcacaccctcatcttatccctgcaacagttgatcagcaacttgaaaatcttcaatcagagaaatctgcccaaagtgaagaagcctcaaaagttccccaggacctcctctacaagtaagttctctcaattccttagaactgtttccttcaaatcagcagcaagcactcatatatcatacctgctattttgttcacaatgttttatgttaagatgtgaaatctggaaggcaattatccatgaaaaattatgcgcatttagtctcacgacattgaacaaaatggtttctgtatgcaaaaggcacagttcagacaatatataatttggaagaacagaaacagtgttggcagtagagatagggggaacaaggtggagctaagtagattgactgatgagatgatagcctaccataacttgcttgggactagaaggctttgatgttgttgttgtaccctccattgaatcatgtaaatatagtcatagtcacatcaatgaaacacttaacacttcactaattggtgataagctaattgaactacaggagaattgcagaagtcaaagagaaggaaaggcaaaatgccttagaagagattatctactgttgggttacatataggttcatggaaaatgacatatatatgacacctgcattatcaccagggggtggccctgtacgtgacatatccgcattgcctaatcaagaagacaaattgcgaaacatacactccgcagacgcctttgagatgatacaaaaccatctcaatcttatcatgggagaaaagatagcatcaccgcccgatactgttgttgagatcagcaacttgaatcttggaaagctgtatgcagcatccatcatgtatggttactttctgaagagagtggatgagcgattccaacttgagaaaactatgaagactctcccaccaaagcccaaccagcagatagtatttgaaaacctacagcctaatccattctgggatatggagtccttagtacagattacacctgatggggaggagataagtttggacgatgaaaaatcaaatccaaacaagttgaggtcttatgtctcacaactggatgctgacacattgcaaagatatgctactatcagatcgaaggaagccgtctcactgatcgagaagcaaactcaggcgttgtttggacggccagacatcaaagtattggacgatggttcggtcaatgcaaaggatggcagaatgataacaatcacatttacagagctcaatcatctggtcttggaggcagttgctttcggttccttcctttgggaagctgagagttacgtagaatcaaaataccattttgtcaacagttgaatgtgccttttcttatttgaattttggaaatggtttgtgtacatgtgatagggtaggatccatatctgatctattttttcagtgtattcatggttcttgctcgctatcagtaacagccaaagcatcaccacccatgaaccatgcctgtaacaggtttgagatttttcatcaaaggaagcgggcctgatccatagtgtaatctaacaggcaagtggaaattaacaaacagttgatgtttt

SEQ ID NO: 17697 - DNA, 1471 bp, Zea Mays
ctcacgctgtcgccgagaaaaactcaggaacccaatcagccgacggaatctcacctgctctgctcctcagccccagcccaggccttcgctctcgctgccctgagccctccgcgttccccgcccgccacgcgatgccggcgtgggccgaagcggcgctcgtgctcgcctcaccatcccccgccaccgcctcctcgaccacgtcatcatgtggcgccaggccgcgcgccgccgtggggtccgtcaggctcttctgcaagggattcccttgtagcattcgttccaaagctggattccagattcataattaccgtacaaggatgtttaagattaaagcaaaagcagaatctgttgatcagcaacttgaaaatcttcaatcagagaaatctgcccaaagtgaagaagcctcaaaagttccccaggacctcctctacaagagaattgcagaagtcaaagagaaggaaaggcaaaatgccttagaagagattatctactgttgggttacatataggttcatggaaaatgacatatatatgacacctgcattatcaccagggggtggccctgtacgtgacatatccgcattgcctaatcaagaagacaaattgcgaaacatacactccgcagacgcctttgagatgatacaaaaccatctcaatcttatcatgggagaaaagatagcatcaccgcccgatactgttgttgagatcagcaacttgaatcttggaaagctgtatgcagcatccatcatgtatggttactttctgaagagagtggatgagcgattccaacttgagaaaactatgaagactctcccaccaaagcccaaccagcagatagtatttgaaaacctacagcctaatccattctgggatatggagtccttagtacagattacacctgatggggaggagataagtttggacgatgaaaaatcaaatccaaacaagttgaggtcttatgtctcacaactggatgctgacacattgcaaagatatgctactatcagatcgaaggaagccgtctcactgatcgagaagcaaactcaggcgttgtttggacggccagacatcaaagtattggacgatggttcggtcaatgcaaaggatggcagaatgataacaatcacatttacagagctcaatcatctggtcttggaggcagttgctttcggttccttcctttgggaagctgagagttacgtagaatcaaaataccattttgtcaacagttgaatgtgccttttcttatttgaattttggaaatggtttgtgtacatgtgatagggtaggatccatatctgatctattttttcagtgtattcatggttcttgctcgctatcagtaacagccaaagcatcaccacccatgaaccatgcctgtaacaggtttgagatttttcatcaaaggaagcgggcctgatccatagtgtaatctaacaggcaagtggaaattaacaaacagttgatgtttt

SEQ ID NO: 17698 - DNA, 796 bp, Zea Mays
ctttttttaccctggtactatgcaccaggtggacataagggttgcccctggatcacatgcaactgaagctgctgtgaataagcaactgaacgacaaagaacgtgttgcggctgcattggagaacccaaacctactggacatggtcgaagagtgcttatcaccaacatttgattgaggcctgaatatcaatatatcggtgtgacatggtgttgatgttcaggagccacacatgctcattgccaatggagttcactcctgtctttcgagaaccaaaatgccttgggtgttaagtgacgtgttgcatgatttttttcctccgccccgttcagttattatatatgctactatggcgctaccctttttggacgtttttggtgcttgtgacctcactgatcaatgcgagatgtaatcagctcttgtgctgtagctttcagagtgctgtcgctgtcactgtcagtgccacgccattttgtggctgtgtacccccacacgatcaacttggtaggagaatcctagaatcctctagcacgggttgtttctgttaccataccggaagtgttttattctgagtttctagcatgtttttttatcgtataacaggcccttagtttgcataagaaaatcgttatttctattaaagtttggcttcttggctcaactgatcatgctaattctgtggcttaatttattgcctgctgtgttttaatgtattgtttttctctattagtatgcgtgagaaggcagtatggcagtatgggataaggacattatggaacatttttgagacatttgtaag

SEQ ID NO: 17699 - DNA, 1584 bp, Zea Mays
atggatcgatttcctcggtcgcgatccgggtcgcagctcgccaccaagcaatgtatgcgaggaggcccaacactgcctgtaaggcccacaagagactatagagaagttggaatggatcacttgtagcaccagaaagacacggccgagtcgtctttcccgacgcaaaagtcgacgacgcgtgcgccttgctcgctcgctcgccgtctgccgtcgttctaggtttagagccaggtcaccagcgctaggagggcgcgaagtcgagtagacggccgggcctctcccgttctccacggacggctagcgctactggaggcgacgcctggacggcgaccccgcacactcacagccacaccctccacctgtgtgactattcaagggcttaggccgagccgcccggccaatcgccgtccgccggaccgctgaggaatttttctttctcgtcaaaagttactgcattcattttacagtaatggctatggggttgattaatgctaatcctataatccatgagaaaaaagagaggcgtgccagacaggcaccagagaccacagatgaaaatgcagcagagcccatagatcagctggaaatatttgatatccttcttaatgatttcttcaaatagatataaaggatccagagcacccgtactcactggaacagctgaatgtggtgactgaagattcaattgaactcaatgatgaaagtaattatgtcagggttacattcaccccaacagtggagcactgcagtatggcaactattattggcctttgcatacgcgtgaaacttgtacggagtctccctcctcgttacaaggtggacataagggttgcccctggatcacatgcaactgaagctgctgtgaataagcaactgaacgacaaagaacgtgttgcggctgcattggagaacccaaacctactggacatggtcgaagagtgcttatcaccaacatttgattgaggcctgaatatcaatatatcggtgtgacatggtgttgatgttcaggagccacacatgctcattgccaatggagttcactcctgtctttcgagaaccaaaatgccttgggtgttaagtgacgtgttgcatgatttttttcctccgccccgttcagttattatatatgctactatggcgctaccctttttggacgtttttggtgcttgtgacctcactgatcaatgcgagatgtaatcagctcttgtgctgtagctttcagagtgctgtcgctgtcactgtcagtgccacgccattttgtggctgtgtacccccacacgatcaacttggtaggagaatcctagaatcctctagcacgggttgtttctgttaccataccggaagtgttttattctgagtttctagcatgtttttttatcgtataacaggcccttagtttgcataagaaaatcgttatttctattaaagtttggcttcttggctcaactgatcatgctaattctgtggcttaatttattgcctgctgtgttttaatgtattgtttttctctattagtatgcgtgagaaggcagtatggcagtatgggataaggacattatggaacatttttgagacatttgtaag

SEQ ID NO: 17700 - DNA, 1617 bp, Zea Mays
atggatcgatttcctcggtcgcgatccgggtcgcagctcgccaccaagcaatgtatgcgaggaggcccaacactgcctgtaaggcccacaagagactatagagaagttggaatggatcacttgtagcaccagaaagacacggccgagtcgtctttcccgacgcaaaagtcgacgacgcgtgcgccttgctcgctcgctcgccgtctgccgtcgttctaggtttagagccaggtcaccagcgctaggagggcgcgaagtcgagtagacggccgggcctctcccgttctccacggacggctagcgctactggaggcgacgcctggacggcgaccccgcacactcacagccacaccctccacctgtgtgactattcaagggcttaggccgagccgcccggccaatcgccgtccgccggaccgctgaggaatttttctttctcgtcaaaagttactgcattcattttacagtaatggctatggggttgattaatgctaatcctataatccatgagaaaaaagagaggcgtgccagacaggcaccagagaccacagatgaaaatgcagcagagcccatagatcagctggaaatatttgatcacattagagatataaaggatccagagcacccgtactcactggaacagctgaatgtggtgactgaagattcaattgaactcaatgatgaaagtaattatgtcagggttacattcaccccaacagtggagcactgcagtatggcaactattattggcctttgcatacgcgtgaaacttgtacggagtctccctcctcgttacaaggggcgaagccaactttaaatttatgctgatggctgatgcactgctaaggggtggacataagggttgcccctggatcacatgcaactgaagctgctgtgaataagcaactgaacgacaaagaacgtgttgcggctgcattggagaacccaaacctactggacatggtcgaagagtgcttatcaccaacatttgattgaggcctgaatatcaatatatcggtgtgacatggtgttgatgttcaggagccacacatgctcattgccaatggagttcactcctgtctttcgagaaccaaaatgccttgggtgttaagtgacgtgttgcatgatttttttcctccgccccgttcagttattatatatgctactatggcgctaccctttttggacgtttttggtgcttgtgacctcactgatcaatgcgagatgtaatcagctcttgtgctgtagctttcagagtgctgtcgctgtcactgtcagtgccacgccattttgtggctgtgtacccccacacgatcaacttggtaggagaatcctagaatcctctagcacgggttgtttctgttaccataccggaagtgttttattctgagtttctagcatgtttttttatcgtataacaggcccttagtttgcataagaaaatcgttatttctattaaagtttggcttcttggctcaactgatcatgctaattctgtggcttaatttattgcctgctgtgttttaatgtattgtttttctctattagtatgcgtgagaaggcagtatggcagtatgggataaggacattatggaacatttttgagacatttgtaag

SEQ ID NO: 17701 - DNA, 1641 bp, Zea Mays
atggatcgatttcctcggtcgcgatccgggtcgcagctcgccaccaagcaatgtatgcgaggaggcccaacactgcctgtaaggcccacaagagactatagagaagttggaatggatcacttgtagcaccagaaagacacggccgagtcgtctttcccgacgcaaaagtcgacgacgcgtgcgccttgctcgctcgctcgccgtctgccgtcgttctaggtttagagccaggtcaccagcgctaggagggcgcgaagtcgagtagacggccgggcctctcccgttctccacggacggctagcgctactggaggcgacgcctggacggcgaccccgcacactcacagccacaccctccacctgtgtgactattcaagggcttaggccgagccgcccggccaatcgccgtccgccggaccgctgaggaatttttctttctcgtcaaaagttactgcattcattttacagtaatggctatggggttgattaatgctaatcctataatccatgagaaaaaagagaggcgtgccagacaggcaccagagaccacagatgaaaatgcagcagagcccatagatcagctggaaatatttgatcacattagagatataaaggatccagagcacccgtactcactggaacagctgaatgtggtgactgaagattcaattgaactcaatgatgaaagtaattatgtcagggttacattcaccccaacagtggagcactgcagtatggcaactattattggcctttgcatacgcgtgaaacttgtacggagtctccctcctcgttacaaggggcgaagccaactttaaatttatgctgatggctgatgcactgctaagggtacagaaaagttgtctagttagtggtggacataagggttgcccctggatcacatgcaactgaagctgctgtgaataagcaactgaacgacaaagaacgtgttgcggctgcattggagaacccaaacctactggacatggtcgaagagtgcttatcaccaacatttgattgaggcctgaatatcaatatatcggtgtgacatggtgttgatgttcaggagccacacatgctcattgccaatggagttcactcctgtctttcgagaaccaaaatgccttgggtgttaagtgacgtgttgcatgatttttttcctccgccccgttcagttattatatatgctactatggcgctaccctttttggacgtttttggtgcttgtgacctcactgatcaatgcgagatgtaatcagctcttgtgctgtagctttcagagtgctgtcgctgtcactgtcagtgccacgccattttgtggctgtgtacccccacacgatcaacttggtaggagaatcctagaatcctctagcacgggttgtttctgttaccataccggaagtgttttattctgagtttctagcatgtttttttatcgtataacaggcccttagtttgcataagaaaatcgttatttctattaaagtttggcttcttggctcaactgatcatgctaattctgtggcttaatttattgcctgctgtgttttaatgtattgtttttctctattagtatgcgtgagaaggcagtatggcagtatgggataaggacattatggaacatttttgagacatttgtaag

SEQ ID NO: 17702 - DNA, 471 bp, Zea Mays
atggatcgatttcctcggtcgcgatccgggtcgcagctcgccaccaagcaatgtatgcgaggaggcccaacactgcctgaatttttctttctcgtcaaaagttactgcattcattttacagtaatggctatggggttgattaatgctaatcctataatccatgagaaaaaagagaggcgtgccagacaggcaccagagaccacagatgaaaatgcagcagagcccatagatcagctggaaatatttgatcacattagagatataaaggatccagagcacccgtactcactggaacagctgaatgtggtgactgaagattcaattgaactcaatgatgaaagtaattatgtcagggttacattcaccccaacagtggagcactgcagtatggcaactattattggcctttgcatacgcgtgaaacttgtacggagtctccctcctcgttacaaggggcgaagccaactttaa

SEQ ID NO: 17703 - DNA, 2403 bp, Zea Mays
ttttgaggagtttctctgctagtacaatccaattgactgtacattgatctctaatatttgttgccaatatctttcatagaaacattgaaaaattcctcaagtacagtgtcggttcattggacatgttccatgtgcacattcagtaatcatgaaagcatggtgtactgtgagatgtgtggtgttttccgtgagacctttgtcaaatctgccaaggatggtctgttaaaagccgttgcagtgtcaagtgagcctaggacatctgctgcgtcaaaaaacgattctgccaaggcgccagtgaagactcgtgctgtaaattctgatggtgattctatgagaaagcatgctagcatgtcttatgataaagccaattccacgcagttaccatctgctggtagctcactaggtgctgaaaaaaagaagaaaacccctgtactttctgaagaagtacctgtggagaggatagctctgttggcttccgatggttttcagtcaaagggtaaccagaatagcggggctagcagttcttcgcagaatgacaatgtgatccagaaactctcttctgacgtaggccagctaaatgtaaacaagaacaatgtgaatgttacgaaatcttgtttgcctgatgagtataagcctgagaagtggatgttagctgatctggagtcaagggcgttgagccaactgaaccttgcaatagtcggtcatgttgattccggcaagtcgacactatctgggagattactgcatctcttaggaaggatatcaaaaaaatatatgcacaagaatgaaaaggagtcgaaagaaaaggggaaggggtcatttgcttttgcatgggccatggatgagagcagtgaagaaagggaacggggtgtgacaatgactgtggctgtggcttatttggagaccaagaaattccgtgtggttttgcttgactcacctggtcacaaagattttgtgccaaatatgatatctggtgcaacacaagctgatgcagctattcttgtcgttgatgcttcaactggttcttttgaagctggcatggatggcgaaggaggaaaaagtgttggccagactaaagagcatgctcagcttgttagaagctttggtgttgaacagcttgttgtcgcagtcaacaagatggatgctgttgattatgcaaaagaaaggtttgatttcatcaagctacaacttggtagtttcctgcggtcatgcaacttcaaggactcagctattacctggattcctcttagtgctgtagaaaaccaaaatttgatcaaagctccttcagatgctcgtttgacctcctggtatcaagggttttgcctcttggatgctatagattttctgcagcttccttctcgggatgtttcaaagcccttgattattccaatctgtgatgttataaagtctcagtcaacaggacaattggcagcttatggaaaattggaaactggagccatccaaattggttctaaggtgttagttctaccttctgggcaagaggcgactgtgaaagccattgagcgggactctaattcatgcaccgtagcgagagctggtgataatgtggcaatttgtttacagggtattgatggaaaacaactaatacctggcggggttctttgtcaccctggtttccctgtgcctgtagctaaccacttggagctgaaggttctagtcctggacatcactactcctattcttgttggctctcaggtggagtttcacatacatcatgtgaaggaggctgcaagagtaacaaaaattgttgcattacttgacaagactggcaaaccaagtaaatcggcacctcgatttcttaaatccaagcagaattctgttatacaggtcacactagatggagctgtctgtgttcaggaattctccaagagccgagctcttgggagggcatacttgaggtcggctgggcgcaccattgctgttggcgttgttaatcggataattggccaagatcagaactagaagacctactacactcttctgaaatctgaaccaaatccttgtcgttgccttgtcgttgctacggttatactctacgtagtagacactggcaacatgatgttgggaaattttgtttagcagctgcttatagccattccattgtattgagttatatgtgtaagatagtagtcacagctgagttgtgttctaacccccggcttttgcaaaaatgctatggaatccttcgaagttatatatgctgactacttgtgattcgtgaccgctgattcgttatcgttcattactatatgtagtggacccaagtaaaacgatgttggcaaattttgtttagcatttgcatatcttcattctcattgtacttagatgtgtgtaagatggtcacagactcagctgagttttgatttctaatccttgactttt

SEQ ID NO: 17704 - DNA, 2259 bp, Zea Mays
ttttgaggagtttctctgctagtacaatccaattgactgtacattgatctctaatatttgttgccaatatctttcatagaaacattgaaaaattcctcaagtacagtgtcggttcattggacatgttccatgtgcacattcagtaatcatgaaagcatggtgtactgtgagatgtgtggtgttttccgtgagacctttgtcaaatctgccaaggatggtctgttaaaagatacagccgttgcagtgtcaagtgagcctaggacatctgctgcgtcaaaaaacgattctgccaaggcgccagtgaagactcgtgctgtaaattctgatggtgattctatgagaaagcatgctagcatgtcttatgataaagccaattccacgcagttaccatctgctggtagctcactaggtgctgaaaaaaagaagaaaacccctgtactttctgaagaagtacctgtggagaggatagctctgttggcttccgatggttttcagtcaaagggtaaccagaatagcggggctagcagttcttcgcagaatgacaatgtgatccagaaactctcttctgacgtaggccagctaaatgtaaacaagaacaatgtgaatgttacgaaatcttgtttgcctgatgagtataagcctgagaagtggatgttagctgatctggagtcaagggcgttgagccaactgaaccttgcaatagtcggtcatgttgattccggcaagtcgacactatctgggagattactgcatctcttaggaaggatatcaaaaaaatatatgcacaagaatgaaaaggagtcgaaagaaaagtgaagaaagggaacggggtgtgacaatgactgtggctgtggcttatttggagaccaagaaattccgtgtggttttgcttgactcacctggtcacaaagattttgtgccaaatatgatatctggtgcaacacaagctgatgcagctattcttgtcgttgatgcttcaactggttcttttgaagctggcatggatggcgaaggaggaaaaagtgttggccagactaaagagcatgctcagcttgttagaagctttggtgttgaacagcttgttgtcgcagtcaacaagatggatgctgttgattatgcaaaagaaaggtttgatttcatcaagctacaacttggtagtttcctgcggtcatgcaacttcaaggactcagctattacctggattcctcttagtgctgtagaaaaccaaaatttgatcaaagctccttcagatgctcgtttgacctcctgtcaacaggacaattggcagcttatggaaaattggaaactggagccatccaaattggttctaaggtgttagttctaccttctgggcaagaggcgactgtgaaagccattgagcgggactctaattcatgcaccgtagcgagagctggtgataatgtggcaatttgtttacagggtattgatggaaaacaactaatacctggcggggttctttgtcaccctggtttccctgtgcctgtagctaaccacttggagctgaaggttctagtcctggacatcactactcctattcttgttggctctcaggtggagtttcacatacatcatgtgaaggaggctgcaagagtaacaaaaattgttgcattacttgacaagactggcaaaccaagtaaatcggcacctcgatttcttaaatccaagcagaattctgttatacaggtcacactagatggagctgtctgtgttcaggaattctccaagagccgagctcttgggagggcatacttgaggtcggctgggcgcaccattgctgttggcgttgttaatcggataattggccaagatcagaactagaagacctactacactcttctgaaatctgaaccaaatccttgtcgttgccttgtcgttgctacggttatactctacgtagtagacactggcaacatgatgttgggaaattttgtttagcagctgcttatagccattccattgtattgagttatatgtgtaagatagtagtcacagctgagttgtgttctaacccccggcttttgcaaaaatgctatggaatccttcgaagttatatatgctgactacttgtgattcgtgaccgctgattcgttatcgttcattactatatgtagtggacccaagtaaaacgatgttggcaaattttgtttagcatttgcatatcttcattctcattgtacttagatgtgtgtaagatggtcacagactcagctgagttttgatttctaatccttgactttt

SEQ ID NO: 17705 - DNA, 2329 bp, Zea Mays
ttttgaggagtttctctgctagtacaatccaattgactgtacattgatctctaatatttgttgccaatatctttcatagaaacattgaaaaattcctcaagtacagtgtcggttcattggacatgttccatgtgcacattcagtaatcatgaaagcatggtgtactgtgagatgtgtggtgttttccgtgagacctttgtcaaatctgccaaggatggtctgttaaaagatacagccgttgcagtgtcaagtgagcctaggacatctgctgcgtcaaaaaacgattctgccaaggcgccagtgaagactcgtgctgtaaattctgatggtgattctatgagaaagcatgctagcatgtcttatgataaagccaattccacgcagttaccatctgctggtagctcactaggtgctgaaaaaaagaagaaaacccctgtactttctgaagaagtacctgtggagaggatagctctgttggcttccgatggttttcagtcaaagggtaaccagaatagcggggctagcagttcttcgcagaatgacaatgtgatccagaaactctcttctgacgtaggccagctaaatgtaaacaagaacaatgtgaatgttacgaaatcttgtttgcctgatgagtataagcctgagaagtggatgttagctgatctggagtcaagggcgttgagccaactgaaccttgcaatagtcggtcatgttgattccggcaagtcgacactatctgggagattactgcatctcttaggaaggatatcaaaaaaatatatgcacaagaatgaaaaggagtcgaaagaaaaggggaaggggtcatttgcttttgcatgggccatggatgagagcagtgaagaaagggaacggggtgtgacaatgactgtggctgtggcttatttggagaccaagaaattccgtgtggttttgcttgactcacctggtcacaaagattttgtgccaaatatgatatctggtgcaacacaagctgatgcagctattcttgtcgttgatgcttcaactggttcttttgaagctggcatggatggcgaaggaggaaaaagtgttggccagactaaagagcatgctcagcttgttagaagctttggtgttgaacagcttgttgtcgcagtcaacaagatggatgctgttgattatgcaaaagaaaggtttgatttcatcaagctacaacttggtagtttcctgcggtcatgcaacttcaaggactcagctattacctggattcctcttagtgctgtagaaaaccaaaatttgatcaaagctccttcagatgctcgtttgacctcctggtatcaagggttttgcctcttggatgctatagattttctgcagcttccttctcgggatgtttcaaagcccttgattattccaatctgtgatgttataaagtctcagtcaacaggacaattggcagcttatggaaaattggaaactggagccatccaaattggttctaaggtgttagttctaccttctgggcaagaggcgactgtgaaagccattgagcgggactctaattcatgcaccgtagcgagagctggtgataatgtggcaatttgtttacagggtattgatggaaaacaactaatacctggcggggttctttgtcaccctggtttccctgtgcctgtagctaaccacttggagctgaaggttctagtcctggacatcactactcctattcttgttggctctcaggtggagtttcacatacatcatgtgaaggaggctgcaagagtaacaaaaattgttgcattacttgacaagactggcaaaccaagaattctccaagagccgagctcttgggagggcatacttgaggtcggctgggcgcaccattgctgttggcgttgttaatcggataattggccaagatcagaactagaagacctactacactcttctgaaatctgaaccaaatccttgtcgttgccttgtcgttgctacggttatactctacgtagtagacactggcaacatgatgttgggaaattttgtttagcagctgcttatagccattccattgtattgagttatatgtgtaagatagtagtcacagctgagttgtgttctaacccccggcttttgcaaaaatgctatggaatccttcgaagttatatatgctgactacttgtgattcgtgaccgctgattcgttatcgttcattactatatgtagtggacccaagtaaaacgatgttggcaaattttgtttagcatttgcatatcttcattctcattgtacttagatgtgtgtaagatggtcacagactcagctgagttttgatttctaatccttgactttt

SEQ ID NO: 17706 - DNA, 2296 bp, Zea Mays
ttttgaggagtttctctgctagtacaatccaattgactgtacattgatctctaatatttgttgccaatatctttcatagaaacattgaaaaattcctcaagtacagtgtcggttcattggacatgttccatgtgcacattcagtaatcatgaaagcatggtgtactgtgagatgtgtggtgttttccgtgagacctttgtcaaatctgccaaggatggtctgttaaaagatacagccgttgcagtgtcaagtgagcctaggacatctgctgcgtcaaaaaacgattctgccaaggcgccagtgaagactcgtgctgtaaattctgatggtgattctatgagaaagcatgctagcatgtcttatgataaagccaattccacgcagttaccatctgctggtagctcactaggtgctgaaaaaaagaagaaaacccctgtactttctgaagaagtacctgtggagaggatagctctgttggcttccgatggttttcagtcaaagggtaaccagaatagcggggctagcagttcttcgcagaatgacaatgtgatccagaaactctcttctgacgtaggccagctaaatgtaaacaagaacaatgtgaatgttacgaaatcttgtttgcctgatgagtataagcctgagaagtggatgttagctgatctggagtcaagggcgttgagccaactgaaccttgcaatagtcggtcatgttgattccggcaagtcgacactatctgggagattactgcatctcttaggaaggatatcaaaaaaatatatgcacaagaatgaaaaggagtcgaaagaaaaggggaaggggtcatttgcttttgcatgggccatggatgagagcagtgaagaaagggaacggggtgtgacaatgactgtggctgtggcttatttggagaccaagaaattccgtgtggttttgcttgactcacctggtcacaaagattttgtgccaaatatgatatctggtgcaacacaagctgatgcagctattcttgtcgttgatgcttcaactggttcttttgaagctggcatggatggcgaaggaggaaaaagtgttggccagactaaagagcatgctcagcttgttagaagctttggtgttgaacagcttgttgtcgcagtcaacaagatggatgctgttgattatgcaaaagaaaggtttgatttcatcaagctacaacttggtagtttcctgcggtcatgcaacttcaaggactcagctattacctggattcctcttagtgctgtagaaaaccaaaatttgatcaaagctccttcagatgctcgtttgacctcctggacaattggcagcttatggaaaattggaaactggagccatccaaattggttctaaggtgttagttctaccttctgggcaagaggcgactgtgaaagccattgagcgggactctaattcatgcaccgtagcgagagctggtgataatgtggcaatttgtttacagggtattgatggaaaacaactaatacctggcggggttctttgtcaccctggtttccctgtgcctgtagctaaccacttggagctgaaggttctagtcctggacatcactactcctattcttgttggctctcaggtggagtttcacatacatcatgtgaaggaggctgcaagagtaacaaaaattgttgcattacttgacaagactggcaaaccaagtaaatcggcacctcgatttcttaaatccaagcagaattctgttatacaggtcacactagatggagctgtctgtgttcaggaattctccaagagccgagctcttgggagggcatacttgaggtcggctgggcgcaccattgctgttggcgttgttaatcggataattggccaagatcagaactagaagacctactacactcttctgaaatctgaaccaaatccttgtcgttgccttgtcgttgctacggttatactctacgtagtagacactggcaacatgatgttgggaaattttgtttagcagctgcttatagccattccattgtattgagttatatgtgtaagatagtagtcacagctgagttgtgttctaacccccggcttttgcaaaaatgctatggaatccttcgaagttatatatgctgactacttgtgattcgtgaccgctgattcgttatcgttcattactatatgtagtggacccaagtaaaacgatgttggcaaattttgtttagcatttgcatatcttcattctcattgtacttagatgtgtgtaagatggtcacagactcagctgagttttgatttctaatccttgactttt

SEQ ID NO: 17707 - DNA, 2325 bp, Zea Mays
ttttgaggagtttctctgctagtacaatccaattgactgtacattgatctctaatatttgttgccaatatctttcatagaaacattgaaaaattcctcaagtacagtgtcggttcattggacatgttccatgtgcacattcagtaatcatgaaagcatggtgtactgtgagatgtgtggtgttttccgtgagacctttgtcaaatctgccaaggatggtctgttaaaagatacagccgttgcagtgtcaagtgagcctaggacatctgctgcgtcaaaaaacgattctgccaaggcgccagtgaagactcgtgctgtaaattctgatggtgattctatgagaaagcatgctagcatgtcttatgataaagccaattccacgcagttaccatctgctggtagctcactaggtgctgaaaaaaagaagaaaacccctgtactttctgaagaagtacctgtggagaggatagctctgttggcttccgatggttttcagtcaaagggtaaccagaatagcggggctagcagttcttcgcagaatgacaatgtgatccagaaactctcttctgacgtaggccagctaaatgtaaacaagaacaatgtgaatgttacgaaatcttgtttgcctgatgagtataagcctgagaagtggatgttagctgatctggagtcaagggcgttgagccaactgaaccttgcaatagtcggtcatgttgattccggcaagtcgacactatctgggagattactgcatctcttaggaaggatatcaaaaaaatatatgcacaagaatgaaaaggagtcgaaagaaaaggggaaggggtcatttgcttttgcatgggccatggatgagagcagtgaagaaagggaacggggtgtgacaatgactgtggctgtggcttatttggagaccaagaaattccgtgtggttttgcttgactcacctggtcacaaagattttgtgccaaatatgatatctggtgcaacacaagctgatgcagctattcttgtcgttgatgcttcaactggttcttttgaagctggcatggatggcgaaggaggaaaaagtgttggccagactaaagagcatgctcagcttgttagaagctttggtgttgaacagcttgttgtcgcagtcaacaagatggatgctgttgattatgcaaaagaaagtgctgtagaaaaccaaaatttgatcaaagctccttcagatgctcgtttgacctcctggtatcaagggttttgcctcttggatgctatagattttctgcagcttccttctcgggatgtttcaaagcccttgattattccaatctgtgatgttataaagtctcagtcaacaggacaattggcagcttatggaaaattggaaactggagccatccaaattggttctaaggtgttagttctaccttctgggcaagaggcgactgtgaaagccattgagcgggactctaattcatgcaccgtagcgagagctggtgataatgtggcaatttgtttacagggtattgatggaaaacaactaatacctggcggggttctttgtcaccctggtttccctgtgcctgtagctaaccacttggagctgaaggttctagtcctggacatcactactcctattcttgttggctctcaggtggagtttcacatacatcatgtgaaggaggctgcaagagtaacaaaaattgttgcattacttgacaagactggcaaaccaagtaaatcggcacctcgatttcttaaatccaagcagaattctgttatacaggtcacactagatggagctgtctgtgttcaggaattctccaagagccgagctcttgggagggcatacttgaggtcggctgggcgcaccattgctgttggcgttgttaatcggataattggccaagatcagaactagaagacctactacactcttctgaaatctgaaccaaatccttgtcgttgccttgtcgttgctacggttatactctacgtagtagacactggcaacatgatgttgggaaattttgtttagcagctgcttatagccattccattgtattgagttatatgtgtaagatagtagtcacagctgagttgtgttctaacccccggcttttgcaaaaatgctatggaatccttcgaagttatatatgctgactacttgtgattcgtgaccgctgattcgttatcgttcattactatatgtagtggacccaagtaaaacgatgttggcaaattttgtttagcatttgcatatcttcattctcattgtacttagatgtgtgtaagatggtcacagactcagctgagttttgatttctaatccttgactttt

SEQ ID NO: 17708 - DNA, 2309 bp, Zea Mays
ttttgaggagtttctctgctagtacaatccaattgactgtacattgatctctaatatttgttgccaatatctttcatagaaacattgaaaaattcctcaagtacagtgtcggttcattggacatgttccatgtgcacattcagtaatcatgaaagcatggtgtactgtgagatgtgtggtgttttccgtgagacctttgtcaaatctgccaaggatggtctgttaaaagatacagccgttgcagtgtcaagtgagcctaggacatctgctgcgtcaaaaaacgattctgccaaggcgccagtgaagactcgtgctgtaaattctgatggtgattctatgagaaagcatgctagcatgtcttatgataaagccaattccacgcagttaccatctgctggtagctcactaggtgctgaaaaaaagaagaaaacccctgtactttctgaagaagtacctgtggagaggatagctctgttggcttccgatggttttcagtcaaagggtaaccagaatagcggggctagcagttcttcgcagaatgacaatgtgatccagaaactctcttctgacgtaggccagctaaatgtaaacaagaacaatgtgaatgttacgaaatcttgtttgcctgatgagtataagcctgagaagtggatgttagctgatctggagtcaagggcgttgagccaactgaaccttgcaatagtcggtcatgttgattccggcaagtcgacactatctgggagattactgcatctcttaggaaggatatcaaaaaaatatatgcacaagaatgaaaaggagtcgaaagaaaaggggaaggggtcatttgcttttgcatgggccatggatgagagcagtgaagaaagggaacggggtgtgacaatgactgtggctgtggcttatttggagaccaagaaattccgtgtggttttgcttgactcacctggtcacaaagattttgtgccaaatatgatatctggtgcaacacaagctgatgcagctattcttgtcgttgatgcttcaactggttcttttgaagctggcatggatggcgaaggaggaaaaagtgttggccagactaaagagcatgctcagcttgttagaagctttggtgttgaacagcttgttgtcgcagtcaacaagatggatgctgttgattatgcaaaagaaaggtttgatttcatcaagctacaacttggtagtttcctgcggtcatgcaacttcaaggactcagctattacctggattcctcttagtgctgtagaaaaccaaaatttgatcaaagctccttcagatgctcgtttgacctcctgtctcagtcaacaggacaattggcagcttatggaaaattggaaactggagccatccaaattggttctaaggtgttagttctaccttctgggcaagaggcgactgtgaaagccattgagcgggactctaattcatgcaccgtagcgagagctggtgataatgtggcaatttgtttacagggtattgatggaaaacaactaatacctggcggggttctttgtcaccctggtttccctgtgcctgtagctaaccacttggagctgaaggttctagtcctggacatcactactcctattcttgttggctctcaggtggagtttcacatacatcatgtgaaggaggctgcaagagtaacaaaaattgttgcattacttgacaagactggcaaaccaagtaaatcggcacctcgatttcttaaatccaagcagaattctgttatacaggtcacactagatggagctgtctgtgttcaggaattctccaagagccgagctcttgggagggcatacttgaggtcggctgggcgcaccattgctgttggcgttgttaatcggataattggccaagatcagaactagaagacctactacactcttctgaaatctgaaccaaatccttgtcgttgccttgtcgttgctacggttatactctacgtagtagacactggcaacatgatgttgggaaattttgtttagcagctgcttatagccattccattgtattgagttatatgtgtaagatagtagtcacagctgagttgtgttctaacccccggcttttgcaaaaatgctatggaatccttcgaagttatatatgctgactacttgtgattcgtgaccgctgattcgttatcgttcattactatatgtagtggacccaagtaaaacgatgttggcaaattttgtttagcatttgcatatcttcattctcattgtacttagatgtgtgtaagatggtcacagactcagctgagttttgatttctaatccttgactttt

SEQ ID NO: 17709 - DNA, 657 bp, Zea Mays
cttattataggacgtgatgccactgaattaggatgtttgttcttttgctacctttgttaaaaacatcagatcattcgtattgtatccttcctcggattgcttcttttgttctactacaaatattctcaacatggcagggagaggtctcgaggtcaagcctagacccactgtcaagtgtgtgcttggacatgactttatcctgcactttccagtgctgcacttagggaatcaaagaaaagtgaaagtgtcatgtcaaagttgatgaccagaagcttgctattggaaccctctctattgaaaaatacccctagatagaaattgatttggttttcaataaagagtgtgagctgtcacacacatcgaaaactaccagtgtatttttatttggttacaaggttgagcaaccaatcgaggaagatgaatatcctttttaacattgattttttattagttttatttcatatgaagagaaggagctaaacattccagtaatcaaggaaaatgaataggaaatttggaagtgttccttctataaacacaagctcatgtggccgtccatcaactaaagaggagatcaatgaagtccatcaagagaagcaaacgtttgttgaaggagcaaagaaagaagtctgagaccgctgtgcccgtcgtatgcag

SEQ ID NO: 17710 - DNA, 497 bp, Zea Mays
gtttgcgtctgtgcaaataattcgaggaagcatgtggtcggacatgtatgctagatctgtggccacggcgtgggcaccacggcggacggcgacctctgcaccttctgtggcttccccatgtgccgcccctgctacgagtacaatcgcaaggatgacacccaggcgtgcccgcagtgcaaggccaacaagcgccaccaaggtctcgaggtcaagcctagacccactgtcaagtgtgtgcttggacatgactttatcctgcactttccagtgctgcacttagggaatcaaagaaaagtgaaagtgtcatgtcaaagttgatgaccagaagcttgctattggaaccctctctattgaaaaatacccctagatagaaattgatttggttttcaataaagagtgtgagctgtcacacacatcgaaaactaccagtgtatttttatttggttacaaggttgagcaaccaatcgaggaagatgaataatggatcttgattatga

SEQ ID NO: 17711 - DNA, 823 bp, Zea Mays
tagcaagtcattttctatttaggaattgtgctttgtttgtcctggaacttcgttgctgtcatagtctgctggatcaaggagggagattcaaagttgtttttccttgcaacaatctatgctttgcttggaattcctctgtcatatttgatatggtacaggccactctaccgtgcaatgaggactaacagtgctttcagttttggatggtttttcctgtgttacctgatccacattggtttttgcataattgctgccattgctccaccaattgtatttcatgggaaatcattaactggtattctggctgcgattgacactttctctgaacatgtgataattgggatcttttactttgtggggtttgcactgttttgtctggagacactgctgagcattggggttcttcagaaagtgtacatgtacttcagagggaacaagtgaagccagtcatgatggagagttacgtttgttgagaaaatttggagttacttgtggctacttgtagcacatgttcattcgatggttttgtgcatacctgtcagtacaccttgaatctataatttcttatgtcagttattggtgccgagaattgtttttttaaggtggtatgggagtataggtttgcttacggatgggtgctgtggttcttcactagctattcttgaaacgcagaagatcatgcgcccaagtcatgtttcagaattaatttactgtactcatacatgctatcgttcccctttggtgcggcgccgtagctgccgacggaactgcagtggcatcagcacacaaacagctataccttaaatcataaaggagcttatcc

SEQ ID NO: 17712 - DNA, 1080 bp, Zea Mays
cgtcgcagaatggaggagccggaggcggcaagcagcagtacggcttccggccgactgagcccgtcgggttcggcggcgctagcaggggcgacgccgtcgttgacgtcccgctcgagaccatgggggactctcggagcaaggtgaaggagctctcgtcgtgggaatcagatctgaagcggcgagaggcggatatcaagaggagggaagaggcgctgaagaatgctggcgtgccaatggaggagaagaactggccaccattcttccccatcatccaccatgatattgccaatgagataccagcaaatgtgcagaagttgcagtatcttgcatttgcaagctggcttggaattgtgctttgtttgtcctggaacttcgttgctgtcatagtctgctggatcaaggagggagattcaaagttgtttttccttgcaacaatctatgctttgcttggaattcctctgtcatatttgatatggtacaggccactctaccgtgcaatgaggactaacagtgctttcagttttggatggtttttcctgtgttacctgatccacattggtttttgcataattgctgccattgctccaccaattgtatttcatgggaaatcattaactggtattctggctgcgattgacactttctctgaacatgtgataattgggaaagtgtacatgtacttcagagggaacaagtgaagccagtcatgatggagagttacgtttgttgagaaaatttggagttacttgtggctacttgtagcacatgttcattcgatggttttgtgcatacctgtcagtacaccttgaatctataatttcttatgtcagttattggtgccgagaattgtttttttaaggtggtatgggagtataggtttgcttacggatgggtgctgtggttcttcactagctattcttgaaacgcagaagatcatgcgcccaagtcatgtttcagaattaatttactgtactcatacatgctatcgttcccctttggtgcggcgccgtagctgccgacggaactgcagtggcatcagcacacaaacagctataccttaaatcataaaggagcttatcc

SEQ ID NO: 17713 - DNA, 1151 bp, Zea Mays
cgtcgcagaatggaggagccggaggcggcaagcagcagtacggcttccggccgactgagcccgtcgggttcggcggcgctagcaggggcgacgccgtcgttgacgtcccgctcgagaccatgggggactctcggagcaaggtgaaggagctctcgtcgtgggaatcagatctgaagcggcgagaggcggtgaggatatcaagaggagggaagaggcgctgaagaatgctggcgtgccaatggaggagaagaactggccaccattcttccccatcatccaccatgatattgccaatgagataccagcaaatgtgcagaagttgcagtatcttgcatttgcaagctggcttggaattgtgctttgtttgtcctggaacttcgttgctgtcatagtctgctggatcaaggagggagattcaaagttgtttttccttgcaacaatctatgctttgcttggaattcctctgtcatatttgatatggtacaggccactctaccgtgcaatgaggactaacagtgctttcagttttggatggtttttcctgtgttacctgatccacattggtttttgcataattgctgccattgctccaccaattgtatttcatgggaaatcattaactggtattctggctgcgattgacactttctctgaacatgtgataattgggatcttttactttgtggggtttgcactgttttgtctggagacactgctgagcattggggttcttcagaaagtgtacatgtacttcagagggaacaagtgaagccagtcatgatggagagttacgtttgttgagaaaatttggagttacttgtggctacttgtagcacatgttcattcgatggttttgtgcatacctgtcagtacaccttgaatctataatttcttatgtcagttattggtgccgagaattgtttttttaaggtggtatgggagtataggtttgcttacggatgggtgctgtggttcttcactagctattcttgaaacgcagaagatcatgcgcccaagtcatgtttcagaattaatttactgtactcatacatgctatcgttcccctttggtgcggcgccgtagctgccgacggaactgcagtggcatcagcacacaaacagctataccttaaatcataaaggagcttatcc

SEQ ID NO: 17714 - DNA, 1190 bp, Zea Mays
gtgagtatctatctgaccaaccgtcactgttgcgtcgcagaatggaggagccggaggcggcaagcagcagtacggcttccggccgactgagcccgtcgggttcggcggcgctagcaggggcgacgccgtcgttgacgtcccgctcgagaccatgggggactctcggagcaaggtgaaggagctctcgtcgtgggaatcagatctgaagcggcgagaggcggatatcaagaggagggaagaggcgctgaagaatgctggcgtgccaatggaggagaagaactggccaccattcttccccatcatccaccatgatattgccaatgagataccagcaaatgtgcagaagttgcagtatcttgcatttgcaagctggcttggaattgtgctttgtttgtcctggaacttcgttgctgtcatagtctgctggatcaaggagggagattcaaagttgtttttccttgcaacaatctatgctttgcttggaattcctctgtcatatttgatatggtacaggccactctaccgtgcaatgaggactaacagtgctttcagttttggatggtttttcctgtgttacctgatccacattggtttttgcataattgctgccattgctccaccaattgtatttcatgggaaatcattaactggtattctggctgcgattgacactttctctgaacatgtgataattggggtaagctgagtgatcttttactttgtggggtttgcactgttttgtctggagacactgctgagcattggggttcttcagaaagtgtacatgtacttcagagggaacaagtgaagccagtcatgatggagagttacgtttgttgagaaaatttggagttacttgtggctacttgtagcacatgttcattcgatggttttgtgcatacctgtcagtacaccttgaatctataatttcttatgtcagttattggtgccgagaattgtttttttaaggtggtatgggagtataggtttgcttacggatgggtgctgtggttcttcactagctattcttgaaacgcagaagatcatgcgcccaagtcatgtttcagaattaatttactgtactcatacatgctatcgttcccctttggtgcggcgccgtagctgccgacggaactgcagtggcatcagcacacaaacagctataccttaaatcataaaggagcttatcc

SEQ ID NO: 17715 - DNA, 789 bp, Zea Mays
caaccgtcactgttgcgtcgcagaatggaggagccggaggcggcaagcagcagtacggcttccggccgactgagcccgtcgggttcggcggcgctagcaggggcgacgccgtcgttgacgtcccgctcgagaccatgggggactctcggagcaaggtgaaggagctctcgtcgtgggaatcagatctgaagcggcgagaggcggatatcaagaggagggaagaggcgctgaagaatgctggcgtgccaatggaggagaagaactggccaccattcttccccatcatccaccatgatattgccaatgagataccagcaaatgtgcagaagttgcagtatcttgcatttgcaagctggcttggaattgtgctttgtttgtcctggaacttcgttgctgtcatagtctgctggatcaaggagggagattcaaagttgtttttccttgcaacaatctatgctttgcttggaattcctctgtcatatttgatatggtacaggccactctaccgtgcaatgaggactaacagtgctttcagttttggatggtttttcctgtgttacctgatccacattggtttttgcataattgctgccattgctccaccaattgtatttcatgggaaatcattaactggtattctggctgcgattgacactttctctgaacatgtgataattgggatcttttactttgtggggtttgcactgttttgtctggagacactgctgagcattggggttcttcaggcttgccttagaggtggtgtcattgggcagagaggaatgtaac

SEQ ID NO: 17716 - DNA, 781 bp, Zea Mays
cgtcgcagaatggaggagccggaggcggcaagcagcagtacggcttccggccgactgagcccgtcgggttcggcggcgctagcaggggcgacgccgtcgttgacgtcccgctcgagaccatgggggactctcggagcaaggtgaaggagctctcgtcgtgggaatcagatctgaagcggcgagaggcggatatcaagaggagggaagaggcgctgaagaatgctggcgtgccaatggaggagaagaactggccaccattcttccccatcatccaccatgatattgccaatgagataccagcaaatgtgcagaagttgcagtatcttgcatttgcaagctggcttggaattgtgctttgtttgtcctggaacttcgttgctgtcatagtctgctggatcaaggagggagattcaaagttgtttttccttgcaacaatctatgctttgcttggaattcctctgtcatatttgatatggtacaggccactctaccgtgcaatgaggactaacagtgctttcagttttggatggtttttcctgtgttacctgatccacattggtttttgcataattgctgccattgctccaccaattgtatttcatgggaaatcattaactggtattctggctgcgattgacactttctctgaacatgtgataattgggatcttttactttgtggggtttgcactgttttgtctggagacactgctgagcattggggttcttcagatgggcccctgaggtggttttgtggtggtatgccacgaggcctgaggccg

SEQ ID NO: 17717 - DNA, 565 bp, Zea Mays
cgtcgcagaatggaggagccggaggcggcaagcagcagtacggcttccggccgactgagcccgtcgggttcggcggcgctagcaggggcgacgccgtcgttgacgtcccgctcgagaccatgggggactctcggagcaaggtgaaggagctctcgtcgtgggaatcagatctgaagcggcgagaggcggatatcaagaggagggaagaggcgctgaagaatgctggcgtgccaatggaggagaagaactggccaccattcttccccatcatccaccatgatattgccaatgagataccagcaaatgtgcagaagttgcagtatcttgcatttgcaagctggcttggaattgtgctttgtttgtcctggaacttcgttgctgtcatagtctgctggatcaaggagggagattcaaagttgtttttccttgcaacaatctatgctttgcttggaattcctctgtcatatttgatatggtacaggccactctaccgtgcaatgaggactaacagtgctttcagttttggatggtttttcctgtgttacctgatgatgtcattttttgc

SEQ ID NO: 17718 - DNA, 1640 bp, Zea Mays
ggacgacagtagtctatacgctgcgcgactttaagagaaattaaaaataattgtaatttatataatttagggcaacaaaacaccccgctccaacagtaaagctcgaaatctagattatatggcaaacccactacggtgtagtatatttgagacacttgagatggtgcttgtaacacccctgttgttaatggaaactaaaacctggcatgtcatcatatgcattggtatctttgtgttctaatacacttaaaatgtattcactagaaccaaaaaaaattaaatgcaatgtggtgatggataaaaagtaaaaaacctagtttaaaaaactctagttttggtccaaaagatgaaatttgtgatctgataatattttgccaaaagtcaaaatatcaaagttatatggattttcaaaccaagcaactttcatgtgtagagatttccaagtttcataggaaaaaatagaaaaaaactcaaaactaagtcttgacctgggtttggaattctgaaatttcttatcagcgagctctcttcaggcctttataacttttgatctgtagatagtttgaaaatggtcgatgtaacaaaattatagagttgcatcaggtgcacaaactttattaaatcacttaaccctaaatccatatgaaactggcagtaacagtggtctaaagattcaaggtttcatagtctggaagttcaaacttagcaccaattcagaagacttattttgtgtgtttagctcaactttggagtactctggtgtttaatccttggagtattaagtcataccttttatagaaaagtagtagattatctattaggatttaagtgtgtttaaggttgggggacttggtaccacataaaaatggtgtccaacagaatgtgatttatggcaaggaaaatatttgaggtgatgtgtatgagcctttagtcgataatcaatagccacacaacagctatttttgttgaaaataacatgaacgatcattttcaataatactaaatgctaacacatatggatttttaaccgacaaatggtcaacactagaaatacaagaatgtgatctatggtaggtgtacgagtctctggtcattaatcaaaggccacacaacctcatttttgtcaaaaatagtcattaacgattattttcaataataccgaaagatagcacatacgcatttttgaccaagaattggtctataccagaaatcgaagcatgtgatctattggaagaaaatatatgtgagatgagatatacgagcctttggtcaattatcaatggtcacacaacacctatttatgttaaaaatagtattaacgaccatttttaataatactgaaagataacaccgacatttttttaccaaaaatggtctccaataaaaatctaagaatgtgatatattgcaagaaaacgtatttggggtgaggtgtacgagcctctagttgatgaccaatggccacccaacccctattttttcgaaaatagccattaatgactgttttaataaatctaaagaataaaacctacagattttttaccaagaattggacttgtctagaaatctaagaatgtcatatgtggagtgacgtgaataagcctctgatcgatgatcaatggccacacaactcatattttt

SEQ ID NO: 17719 - DNA, 971 bp, Zea Mays
accatatgcacagatagcccagctttcgcgtttgtgttcacctgctctcgtgttgcctctctctgtatccgtctggtatcgccgtccctgccaccggtttcgtgtcgccgatgttccacctcgtcatggctgcagagtgcagaccgtaaggtgcttctaggttatggtgcttatgtttccaagttacttagtgcatgtaggactcatggggttcttcctttaatttctacgacttgttgtgcaccagaactggtgaagcgccaccggactttgatgtccaccgttgctggtgatgtggtgatttctgtggtctagccgtcgttgttggattcgtgcagcgtatagaccactgtcgtccgacggcccacgggccatgcaagctaccgacccaagggatctcccaaatacagatgtgaaagctctcgttcctcaccgcccgatgttgtgcgatgagccggagccaagggatctcttaaatcttgctcagttatagaaccctcggctgctctgcgatgagccggagccggaggcagcggtgtcagcgtggacagaggtggagtcggctcgaaaaggggcttcgtcggcccaggagcaggtggcttcccaggccgaggaggtgcaacagcggtggctggagcttggccaggtcgtccgctatcgggaccaaccccggagtcacgctgccgaggccgtgagccgggctggtgtcctcgggggacagctggctgaggctacggagcagccggtcgaggtgtccgctcgggccggaacccttgcggagaccctggctgcgatggcccaagcgcggtgctggcgtcctccttcgaggtggagatccttccgcccgtgtcaccgtccgaggccaggccagattccgccgaaggtggaaacgacgccgatggtgctgctgctccctctgtcgatgtctgaacctgcaggaacagtttgtctgtagtatgcgtatgtttttt

SEQ ID NO: 17720 - DNA, 2607 bp, Zea Mays
  misc_feature (1)..(2): n is a, c, g, or t
nnaccatatgcacagatagcccagctttcgcgtttgtgttcacctgctctcgtgttgcctctctctgtatccgtctggtatcgccgtccctgccaccggtttcgtgtcgccgatgttccacctcgtcatggctgcagagtgcagaccgtaagaactggtgaagcgccaccggactttgatgtccaccgttgctggtgatgtggtgatttctgtggtctagccgtcgttgttggatgtgcgcatattccccaggatccgatgactgttgtgatgcttttccttgtgtatggggtagtggtaggatttttgttgtaacaagtacatttttagttatttaaatgtacccaagattaaaagaattttagaaataaaaccataggtccaaaaatcatagaaaattgtgagaaatttatatacctttagaatagctcctggtcaaagtttgaacctgtttggaattgatttgaccagagaaccttgaaatagctaaataaagaagtttcaattaataaaacttgatgttaatatatgtttacctcaaattggaattctataaattgaagaacaacaagtttggtaattttagtatgtttatttctctgtttggtctaagtaaattcactttggggcacttttagcaaaacttggtagtatagaagagtggatactcttagcatatgtttgctttgagaactttatgtttcttctcctctcccttgtcaaagttgcatttcataacatttcataagcatccatatacttgtaattgacttgtagagcatctagaagaagaaataaaagtgaaagtggaagaggagccagctcctcaatctaaagttccttcaactgaaagtgttcttgaaggtctttccgaaggtgctccagtagggtttgctgctaactgcaatatcctagtcgaagagcctgactctcctcctcaccaaggcaagccctagagatgtcaatggggaattccccaccgggttatagcatcccatacccatccccatcatgtttgatccatccccatacccatccccatacccatcatgggtacaaaattcatcccatacccatccccattcgggtttcgggtccccaatgggtccccatccccaattaagggataactaggtactaacatgtagcacaaacaattcagatttcagacatcaccacatcgacaaagcactcatccatgaaccatgttcaattcatccatccatcagaaaagacataagtacttcgggaccgatagaagaaatggagaaatggagttttctcaccttcaccatctgagttcgttggcgcaatggcgcctaagaatccatggtcatcaccgtcgtctgggcagagcgtagcatatggctggttattttagggttttgttttttactagtctgctagttgtcttgttgggctaggacctggggcctggtgcgctgttgtgctgggcttggtggccggctcgccctcaactcattcatacaaacacgataggtgtacacgtatgaaatacccatgggtaatcgggttcggattattgcttcccaaacccatacccatttacccaatgggtggagattttgtcccatatctatacccatgggtacatttttcgtcccatacccgtaccctaatagaggaattccccacgggttggcgggtatcgggtccccattgacatctctaatccatcaccacatcccacttaaagtttttttggtcctagtgaatacattttaagtgtattacatcacaaagatgtcaatgcatatgatgtcatgccaggttttagtttccagtaacaccagggatgttacaagcaccatctcaagtgtctcaaatatactacaccgtagtgggctgccctataatctagatttggagctttacttttggagcggggtgttttgttgttgccctaaattatataaaatacaatcatttttaaattctcttaaagtcgtgcagcgtatagaccactgtcgtccgacggcccacgggccatgcaagctaccgacccaagggatctcccaaatacagatgtgaaagctctcgttcctcaccgcccgatgttgtgcgatgagccggagccaagggatctcttaaatcttgctcagttatagaaccctcggctgctctgcgatgagccggagccggaggcagcggtgtcagcgtggacagaggtggagtcggctcgaaaaggggcttcgtcggcccaggagcaggtggcttcccaggccgaggaggtgcaacagcggtggctggagcttggccaggtcgtccgctatcgggaccaaccccggagtcacgctgccgaggccgtgagccgggctggtgtcctcgggggacagctggctgaggctacggagcagccggtcgaggtgtccgctcgggccggaacccttgcggagaccctggctgcgatggcccaagcgcggtgctggcgtcctccttcgaggtggagatccttccgcccgtgtcaccgtccgaggccaggccagattccgccgaaggtggaaacgacgccgatggtgctgctgctccctctgtcgatgtctgaacctgcaggaacagtttgtctgtagtatgcgtatgtttttt

SEQ ID NO: 17721 - DNA, 1162 bp, Zea Mays
actaaaaaaaagcctatcgtcttgccgatttgctcccactcggccgctggaacgcacctgcgccctacgcctccatccgccctccatcgcctccaccgcaggccatagagcccgtcgtccgccgcacctagcgccttcggctccggtcacaggccccgccggaccgcccgcaggctgcagcgccgcgccgccggccgccgcagcagtcccgcgcggtcgcgcagttctggtcgtctggtctggcctgatgcccgtagcgctgcgtgcccgcctgagaccctgagtaggactgtaggagactaggaggtagtagcaagcagcagcgtgctccgcggctccgcactccgctggtctgcttgagatttgaagagttatttcggtcaaggttctagtggaagtggaccaaacactcgtgctagtggagtttgcaatgaacccgaaatacaagttcaagttcaagagaataatagtgaagaaattccaattgttcaagaagagaatgcacatattccagatgccaatggtgaagatgttgatgattttattcgatatatgacatttggttgtaaatggattatgatcacgatgacttttaaataagcctttcctggatgacgcaattggacaggaagtagatgatcatggtgaggatgcccacgtccttggcctccgacgccatctctccttcaactccgcatagtcgccagatgcggttgcctgcgtcgtcgatggccagttctttgtactccctcgagaggttgcaccaaggcttcgtttgcgagcatgccgcacggacggacaacgacaagcgcgcgggcggcaatggcggaggaggactcaacaacccaggtctacgtccccgtccctgccccgacgctgtttcgtggggtcggctcactctgcgacgacgtgccgctcgcggagtaggatgcctaccacgcgccgcgcattggcgctgccaccactccagccacctgggctgagtacgacgacatagtcttcaccgcggacgcaggctgccgtatgttggttgtgatcgtgaaaaaagatatatgcggacctaatcaaacatacttcactaactccattaaatcttttgaagctgtagctgtccatgttgaataattagacaaattccaatctaaattccgaatataaatca

SEQ ID NO: 17722 - DNA, 2240 bp, Zea Mays
cgcatatgaacaataatatataaatacacatatatttataaatattttttttaaatttgacaaatgaatgagacaattaataaccatggggccagtatagtccagtattaactggcaatatcttaggccggtcgagtaaaagatccactaaaaaaaagcctatcgtcttgccgatttgctcccactcggccgctggaacgcacctgcgccctacgcctccatccgccctccatcgcctccaccgcaggccatagagcccgtcgtccgccgcacctagcgccttcggctccggtcacaggccccgccggaccgcccgcaggctgcagcgccgcgccgccggccgccgcagcagtcccgcgcggtcgcgcagttctggtcgtctggtctggcctgatgcccgtagcgctgcgtgcccgcctgagaccctgagtaggactgtaggagactaggaggtagtagcaagcagcagcgtgctccgcggctccgcactccgctggtctgcttgagatttgaagagttatttcggtcaaggttctagtggaagtggaccaaacactcgtgctagtggagtttgcaatgaacccgaaatacaagttcaagttcaagagaataatagtgaagaaattccaattgttcaagaagagaatgcacatattccagatgccaatggtgaagatgttgatggtataaatcatttaaacctggatcacattatttctaatctgggacttcatattccaattaattcctttgctcctaatattagagatgaagttagaagggctttcatagctaaaggtccgactcaacaattggtcataattttcttgtcacatgataaaaggagctttcaaaaacattggtttagacaacatagttgtttggaatatagtgtggagtagaataaggcttattgcttctattgttacctttttaagcatgatcgaatggatgataaattttgacaagatgcatttacaaaagttagcttctcacagtggagaaatgtttatacggtattttcaaaacatgtcggtgggcctaatagcatacacaatgttgcagcaacaacatttcatgatttttgtaaccaaaggtccagtgttagtcataaggtttcaaattatagcaaagatgcattggtcaaatatgagacacggttggaaacattcttaagtattgtctgtcttcttacattgcaaactatcatttcggggacatgatgagactagtacttccttgaacaaagggaatttcttagaatttcttgattggtacaaaaaaggaatgaagaggtgagaagagctttagatgagttgtgtcccaaaaatgccaagatgacttcggggacgattcaaaaagaacttgcaaactgttgtgcagaagaagtcacacatgcaattaaagaagaaatggaggattgatattccatgttcttgttgatgaatctcgtgatatatcaattaaagaacaaaataagaaaacttgatggtgtgctacattaaaagaggaatttttaaaagactcgatcttcagaaaattaagaaggcatttcaaaataaggaaactagacaaatacaattgcctaggttttctagaactcgactcaactagagattttattcgatatatgacatttggttgtaaatggattatgatcacgatgacttttaaataagcctttcctggatgacgcaattggacaggaagtagatgatcatggtgaggatgcccacgtccttggcctccgacgccatctctccttcaactccgcatagtcgccagatgcggttgcctgcgtcgtcgatggccagttctttgtactccctcgagaggttgcaccaaggcttcgtttgcgagcatgccgcacggacggacaacgacaagcgcgcgggcggcaatggcggaggaggactcaacaacccaggtctacgtccccgtccctgccccgacgctgtttcgtggggtcggctcactctgcgacgacgtgccgctcgcggagtaggatgcctaccacgcgccgcgcattggcgctgccaccactccagccacctgggctgagtacgacgacatagtcttcaccgcggacgcaggctgccgtatgttggttgtgatcgtgaaaaaagatatatgcggacctaatcaaacatacttcactaactccattaaatcttttgaagctgtagctgtccatgttgaataattagacaaattccaatctaaattccgaatataaatca

SEQ ID NO: 17723 - DNA, 2406 bp, Zea Mays
atcacgcatatgaacaataatatataaatacacatatatttataaatattttttttaaatttgacaaatgaatgagacaattaataaccatggggccagtatagtccagtattaactggcaatatcttaggccggtcgagtaaaagatccactaaaaaaaagcctatcgtcttgccgatttgctcccactcggccgctggaacgcacctgcgccctacgcctccatccgccctccatcgcctccaccgcaggccatagagcccgtcgtccgccgcacctagcgccttcggctccggtcacaggccccgccggaccgcccgcaggctgcagcgccgcgccgccggccgccgcagcagtcccgcgcggtcgcgcagttctggtcgtctggtctggcctgatgcccgtagcgctgcgtgcccgcctgagaccctgagtaggactgtaggagactaggaggtagtagcaagcagcagcgtgctccgcggctccgcactccgctggtctgcttgagatttgaagagttatttcggtcaaggttctagtggaagtggaccaaacactcgtgctagtggagtttgcaatgaacccgaaatacaagttcaagttcaagagaataatagtgaagaaattccaattgttcaagaagagaatgcacatattccagatgccaatggtgaagatgttgatggtataaatcatttaaacctggatcacattatttctaatctgggacttcatattccaattaattcctttgctcctaatattagagatgaagttagaagggctttcatagctaaaggtccgactcaacaattggtcataattttcttgtcacatgataaaaggagctttcaaaaacattggtttagacaacatagttgtttggaatatagtgtggagtagaataaggcttattgcttctattgttacctttttaagcatgatcgaatggatgataaattttgacaagatgcatttacaaaagttagcttctcacagtggagaaatgtttatacggtattttcaaaacatgtcggtgggcctaatagcatacacaatgttgcagcaacaacatttcatgatttttgtaaccaaaggtccagtgttagtcataaggtttcaaattatagcaaagatgcattggtcaaatatgagacacggttggaaacattcttaagtattgtctgtcttcttacattgcaaactatcatttcggggacatgatgagactagtacttccttgaacaaagggaatttcttagaatttcttgattggtacaaaaaaggaatgaagaggtgagaagagctttagatgagttgtgtcccaaaaatgccaagatgacttcggggacgattcaaaaagaacttgcaaactgttgtgcagaagaagtcacacatgcaattaaagaagaaatggaggattgatattccatgttcttgttgatgaatctcgtgatatatcaattaaagaacaaaataagaaaacttgatggtgtgctacattaaaagaggaatttttaaaagactcgatcttcagaaaattaagaaggcatttcaaaataaggaaactagacaaatacaattgcctaggttttctagaactcgactcaactagagattttattcgatatatgacatttggttgtaaatggattatgatcacgatgacttttaaataagaagcgagatcatgcattttttatggctgcaatcgagttctgcctctttactgtggcatgcttatgcatgcactcgttcatgcacacatacatgcatttcaaatctcaagtcgaggttgagacgagtaccaagtatgacatggagtacctcctggcttggcagcctttcctggatgacgcaattggacaggaagtagatgatcatggtgaggatgcccacgtccttggcctccgacgccatctctccttcaactccgcatagtcgccagatgcggttgcctgcgtcgtcgatggccagttctttgtactccctcgagaggttgcaccaaggcttcgtttgcgagcatgccgcacggacggacaacgacaagcgcgcgggcggcaatggcggaggaggactcaacaacccaggtctacgtccccgtccctgccccgacgctgtttcgtggggtcggctcactctgcgacgacgtgccgctcgcggagtaggatgcctaccacgcgccgcgcattggcgctgccaccactccagccacctgggctgagtacgacgacatagtcttcaccgcggacgcaggctgccgtatgttggttgtgatcgtgaaaaaagatatatgcggacctaatcaaacatacttcactaactccattaaatcttttgaagctgtagctgtccatgttgaataattagacaaattccaatctaaattccgaatataaatca

SEQ ID NO: 17724 - DNA, 2070 bp, Zea Mays
atagcggacgcccccccccccccaagttcccacgagatcccgactcggacgaagctctcctcgccggccaccgtcgcggcagcttgctacgcacagggagtctgcggcgcgcgaggaatacagcgagggatggggtggggcacagtggtttacgagggcgcggtcgtcggctcgtcgctggtggggctcggctgggcggggctgtggttcctgaaccggcggctgtacaaggagtacgaggagcggcgggtgctggtgcagatcctcttcggcctcgtctttgccttctcctgcaacctcttcgagctcgttctcttcgagatcctgcccgtcctctccaagcacgcgcgcttcctcaactggcacctcgacctcttctgcctcatcctcctcctcgtcttcgtactcccctactaccactgctatcttctgctccgtaactcagggatgaggagggaccgggcgtggctcgtcgcggcgctctttctgctggtcttcctatacgggttctggcgcatggggattcacttccccatgccttcaccggagaagggtttctttacgatgccgcagttggtcagtaggattggggtgattggagttagtgtcatggctgttctttctggttttggtgccgtcaatctgccatacagttatctgtcgctattcatcagggaaattgatgaaacagacatcaaaaccttggaacgccagttgatgcaatccatcgagacatgtactgctaagaagaagaaaattattttgtcccagatggagatggagaggattcaaggatcagaggagaagttaaaggccagatcgtttctgaagcgtatagtgggaacagttgttagatctgtgcaggaagatcaaactgagcaggatataaaaaacttagaagcagaagtccaggcactggaagagctttccaaacagctgtttcttgagatatatgaacttcgtcaagctaagatagctgctgcgtattctcgaacttggagaggtcatcttcagaatctacttggatatgctttatcagtctattgtgtttataagatgctcaagtccttgcagagtgtagtctttaaggaggctctgttgatcctgtaacaatgtcaataacgattttcctgagacattttgacattggcattgatgttgcactgttatctcagtacatatctttgatgttcatcgggatgttggttgtcatatctgttcgaggtttcctggcaaatgttatgaagttcttcttcgctgtttctagagttgggagtgggtcgacaaccaatgttgtccttttcctatcagagatcatgggaatgtacttcatatcttccattcttcttataagaaaaagcctggcaaatgaatatagggtgatcattactgatgtcttgggtggtgatatccaatttgacttctaccatcgctggtttgatgctatatttgtggctagtgcgttcctctccttgcttcttatatctgcccaatacaccaccaggcaaacagacaagcatccgattgattgatgcatcttgcccacaatgtgtgcatgttgtctttttaaccagtattcatccaagttcctccaacagcggctatctgagtcacgtctggtgatgcagtgacgggacacgggattcattgtaatgcagtctgcacgatactactttttgactaggacaattgtggaagcccatattaggaattgattatgactttgtaaaatagcttgaaactagtgtcgtagcaccgtagcacggtatgttggtgtatcttatatatttttttggctgtttcatgtataacacacttcgcgacaactctgaatggtagatagatctgtttcttcatgtgacttcaggatgacaactatatacctgaatccttataggtacgtactttgcaatccgtaagcatatgctcttatattgatgatgtttctttggtgacccatcccatgcatattactccctcggagttccaaaatatagttctttctagctcttttttttcgtccacattcattcgaatgataataaatatagacatacatataaactacaa

SEQ ID NO: 17725 - DNA, 2527 bp, Zea Mays
atagcggacgcccccccccccccaagttcccacgagatcccgactcggacgaagctctcctcgccggccaccgtcgcggcagcttgctacgcacagggagtctgcggcgcgcgaggaatacagcgagggatggggtggggcacagtggtttacgagggcgcggtcgtcggctcgtcgctggtggggctcggctgggcggggctgtggttcctgaaccggcggctgtacaaggagtacgaggagcggcgggtgctggtgcagatcctcttcggcctcgtctttgccttctcctgcaacctcttcgagctcgttctcttcgagatcctgcccgtcctctccaagcacgcgcgcttcctcaactggcacctcgacctcttctgcctcatcctcctcctcgtcttcgtactcccctactaccactgctatcttctgctccgtaactcagggatgaggagggaccgggcgtggctcgtcgcggcgctctttctgctggtcttcctatacgggttctggcgcatggggattcacttccccatgccttcaccggagaagggtttctttacgatgccgcagttggtcagtaggattggggtgattggagttagtgtcatggctgttctttctggttttggtgccgtcaatctgccatacagttatctgtcgctattcatcagggaaattgatgaaacagacatcaaaaccttggaacgccagttgatgcaatccatcgagacatgtactgctaagaagaagaaaattattttgtcccagatggagatggagaggattcaaggatcagaggaggcacttactttactagccctgctttatgtttcatagaaaataatcctatattcacattggtttaacatgggaatatactctaggtgaaaaatggtaaaacttaaaatattttaatacatgatattgccatgtttttttatgtggtcatgtattgcaatcaaaggggtgatggattattccatataacactcaatggaacaagtcacaagttcacaacacggttgcaacttgcaagtggcaaattcttttattgtttgttgcataccatgtacagcatgagcgaataaagaatacttacttgcagaagttaaaggccagatcgtttctgaagcgtatagtgggaacagttgttagatctgtgcaggaagatcaaactgagcaggatataaaaaacttagaagcagaagtccaggcactggaagagctttccaaacagctgtttcttgagatatatgaacttcgtcaagctaagatagctgctgcgtattctcgaacttggagaggtcatcttcagaatctacttggatatgctttatcagtctattgtgtttataagatgctcaagtccttgcagagtgtagtctttaaggagtcaggctctgttgatcctgtaacaatgtcaataacgattttcctgagacattttgacattggcattgatgttgcactgttatctcagtacatatctttgatgttcatcgggatgttggttgtcatatctgttcgaggtttcctggcaaatgttatgaagttcttcttcgctgtttctagagttgggagtgggtcgacaaccaatgttgtccttttcctatcagagatcatgggaatgtacttcatatcttccattcttcttataagaaaaagcctggcaaatgaatatagggtgatcattactgatgtcttgggtggtgatatccaatttgacttctaccatcgctggtttgatgctatatttgtggctagtgcgttcctctccttgcttcttatatctgcccaatacaccaccaggcaaacagacaagcatccgattgattgatgcatcttgcccacaatgtgtgcatgttgtctttttaaccagtattcatccaaggttgacccattctttgtaccacagttttccagagcactgtttctccatacacttccatacacagttacaaaacataatacgtcagttaacttgaacaaagtctctattttgtaatatgtttcccgattgcattggtttatggtaaacagttcctccaacagcggctatctgagtcacgtctggtgatgcagtgacgggacacgggattcattgtaatgcagtctgcacgatactactttttgactaggacaattgtggaagcccatattaggaattgattatgactttgtaaaatagcttgaaactagtgtcgtagcaccgtagcacggtatgttggtgtatcttatatatttttttggctgtttcatgtataacacacttcgcgacaactctgaatggtagatagatctgtttcttcatgtgacttcaggatgacaactatatacctgaatccttataggtacgtactttgcaatccgtaagcatatgctcttatattgatgatgtttctttggtgacccatcccatgcatattactccctcggagttccaaaatatagttctttctagctcttttttttcgtccacattcattcgaatgataataaatatagacatacatataaactacaa

SEQ ID NO: 17726 - DNA, 2430 bp, Zea Mays
atagcggacgcccccccccccccaagttcccacgagatcccgactcggacgaagctctcctcgccggccaccgtcgcggcagcttgctacgcacagggagtctgcggcgcgcgaggaatacagcgagggatggggtggggcacagtggtttacgagggcgcggtcgtcggctcgtcgctggtggggctcggctgggcggggctgtggttcctgaaccggcggctgtacaaggagtacgaggagcggcgggtgctggtgcagatcctcttcggcctcgtctttgccttctcctgcaacctcttcgagctcgttctcttcgagatcctgcccgtcctctccaagcacgcgcgcttcctcaactggcacctcgacctcttctgcctcatcctcctcctcgtcttcgtactcccctactaccactgctatcttctgctccgtaactcagggatgaggagggaccgggcgtggctcgtcgcggcgctctttctgctggtcttcctatacgggttctggcgcatggggattcacttccccatgccttcaccggagaagggtttctttacgatgccgcagttggtcagtaggattggggtgattggagttagtgtcatggctgttctttctggttttggtgccgtcaatctgccatacagttatctgtcgctattcatcagggaaattgatgaaacagacatcaaaaccttggaacgccagttgatgcaatccatcgagacatgtactgctaagaagaagaaaattattttgtcccagatggagatggagaggattcaaggatcagaggagaagttaaaggccagatcgtttctgaagcgtatagtgggaacagttgttagatctgtgcaggaagatcaaactgagcaggatataaaaaacttagaagcagaagtccaggcactggaagagctttccaaacagctgtttcttgagatatatgaacttcgtcaagctaagatagctgctgcgtattctcgaacttggagaggtcatcttcagaatctacttggatatgctttatcagtctattgtgtttataagatgctcaaggtattactccaaattgcattagtaatttagtatacatcttgcatatattgtttatttgcacattatcaaatcatctcatttcatgtaccataagttatgagtcatgcaggaaacactgaacttgatgggcataaatatgtttaatcactccattttgcaacagttttatctagctttacatgttgctgcaaagattatttttatggaactttgttttcagtcttcgaatcacagtatcacacttcacatttgtgatttaaccttaaatgtattatatttttttttcagtccttgcagagtgtagtctttaaggagtcaggctctgttgatcctgtaacaatgtcaataacgattttcctgagacattttgacattggcattgatgttgcactgttatctcagtacatatctttgatgttcatcgggatgttggttgtcatatctgttcgaggtttcctggcaaatgttatgaagttcttcttcgctgtttctagagttgggagtgggtcgacaaccaatgttgtccttttcctatcagagatcatgggaatgtacttcatatcttccattcttcttataagaaaaagcctggcaaatgaatatagggtgatcattactgatgtcttgggtggtgatatccaatttgacttctaccatcgctggtttgatgctatatttgtggctagtgcgttcctctccttgcttcttatatctgcccaatacaccaccaggcaaacagacaagcatccgattgattgatgcatcttgcccacaatgtgtgcatgttgtctttttaaccagtattcatccaaggttgacccattctttgtaccacagttttccagagcactgtttctccatacacttccatacacagttacaaaacataataccggctatctgagtcacgtctggtgatgcagtgacgggacacgggattcattgtaatgcagtctgcacgatactactttttgactaggacaattgtggaagcccatattaggaattgattatgactttgtaaaatagcttgaaactagtgtcgtagcaccgtagcacggtatgttggtgtatcttatatatttttttggctgtttcatgtataacacacttcgcgacaactctgaatggtagatagatctgtttcttcatgtgacttcaggatgacaactatatacctgaatccttataggtacgtactttgcaatccgtaagcatatgctcttatattgatgatgtttctttggtgacccatcccatgcatattactccctcggagttccaaaatatagttctttctagctcttttttttcgtccacattcattcgaatgataataaatatagacatacatataaactacaa

SEQ ID NO: 17727 - DNA, 3243 bp, Zea Mays
atagcggacgcccccccccccccaagttcccacgagatcccgactcggacgaagctctcctcgccggccaccgtcgcggcagcttgctacgcacagggagtctgcggcgcgcgaggaatacagcgagggatggggtggggcacagtggtttacgagggcgcggtcgtcggctcgtcgctggtggggctcggctgggcggggctgtggttcctgaaccggcggctgtacaaggagtacgaggagcggcgggtgctggtgcagatcctcttcggcctcgtctttgccttctcctgcaacctcttcgagctcgttctcttcgagatcctgcccgtcctctccaagcacgcgcgcttcctcaactggcacctcgacctcttctgcctcatcctcctcctcgtcttcgtactcccctactaccactgctatcttctgctccgtaactcagggatgaggagggaccgggcgtggctcgtcgcggcgctctttctgctggtcttcctatacgggttctggcgcatggggattcacttccccatgccttcaccggagaagggtttctttacgatgccgcagttggtcagtaggattggggtgattggagttagtgtcatggctgttctttctggttttggtgccgtcaatctgccatacagttatctgtcgctattcatcagggaaattgatgaaacagacatcaaaaccttggaacgccagttgatgcaatccatcgagacatgtactgctaagaagaagaaaattattttgtcccagatggagatggagaggattcaaggatcagaggagaagttaaaggccagatcgtttctgaagcgtatagtgggaacagttgttagatctgtgcaggaagatcaaactgagcaggatataaaaaacttagaagcagaagtccaggcactggaagagctttccaaacagctgtttcttgagatatatgaacttcgtcaagctaaggtatttttgtgtgtgcaatgcatgatatctaattatcaatagtacattttgtagttgtactaattagtggatactccccactactttctcaaccttgttgttcatcctagtatcgtacagatcatctagtagctgtaatcctcatatgggtagtggtgtcgacaccttcaataagtattcagtgatatcgatataactggttctccatagtccatactctatgccataaaatcttagaaaaataacataaatgttctaacaccccctgtttttgtcctatgtagtcttgtagatgagagtgtttttccatggctcatgatctcccacaaaattcacaggacttcacattttgagttaatttctagctatgcgcacataagtatcaaggaattacatcttcatgtatcagtttcacaaaactagaactaattggggcatttgtttcaagcaactacagcattttgcatgtggagacctctgtcagccacacaagttatgtgtggacctatgtcaacttgtgtggctgccatgtggtccaatgccaaatgttgtaggatggtggaattgatggtgcaagtaattgtagttctgtgaactgatcctagaagtcgtagttcctttgtagttagacacaaatagttgtgtttttatgatattaactattttttttgtctcccacacccacactccaaactacaatcctcatgtgttatggaatcttttactttagtgtgtagggacaacagcatcgcagtcctttgagattttgcatcttaaacgtcatttaacagtagtgactattgggcatgtttgatttcagtggatctttcttaggctaagtaatctagctgttgctgtgctctcctgcaattgccatgcagatagctgctgcgtattctcgaacttggagaggtcatcttcagaatctacttggatatgctttatcagtctattgtgtttataagatgctcaaggtattactccaaattgcattagtaatttagtatacatcttgcatatattgtttatttgcacattatcaaatcatctcatttcatgtaccataagttatgagtcatgcaggaaacactgaacttgatgggcataaatatgtttaatcactccattttgcaacagttttatctagctttacatgttgctgcaaagattatttttatggaactttgttttcagtcttcgaatcacagtatcacacttcacatttgtgatttaaccttaaatgtattatatttttttttcagtccttgcagagtgtagtctttaaggagtcaggctctgttgatcctgtaacaatgtcaataacgattttcctgagacattttgacattggcattgatgttgcactgttatctcagtacatatctttgatgttcatcgggatgttggttgtcatatctgttcgaggtttcctggcaaatgttatgaagttcttcttcgctgtttctagagttgggagtgggtcgacaaccaatgttgtccttttcctatcagagatcatgggaatgtacttcatatcttccattcttcttataagaaaaagcctggcaaatgaatatagggtgatcattactgatgtcttgggtggtgatatccaatttgacttctaccatcgctggtttgatgctatatttgtggctagtgcgttcctctccttgcttcttatatctgcccaatacaccaccaggcaaacagacaagcatccgattgattgatgcatcttgcccacaatgtgtgcatgttgtctttttaaccagtattcatccaagttcctccaacagcggctatctgagtcacgtctggtgatgcagtgacgggacacgggattcattgtaatgcagtctgcacgatactactttttgactaggacaattgtggaagcccatattaggaattgattatgactttgtaaaatagcttgaaactagtgtcgtagcaccgtagcacggtatgttggtgtatcttatatatttttttggctgtttcatgtataacacacttcgcgacaactctgaatggtagatagatctgtttcttcatgtgacttcaggatgacaactatatacctgaatccttataggtacgtactttgcaatccgtaagcatatgctcttatattgatgatgtttctttggtgacccatcccatgcatattactccctcggagttccaaaatatagttctttctagctcttttttttcgtccacattcattcgaatgataataaatatagacatacatataaactacaa

SEQ ID NO: 17728 - DNA, 2074 bp, Zea Mays
atagcggacgcccccccccccccaagttcccacgagatcccgactcggacgaagctctcctcgccggccaccgtcgcggcagcttgctacgcacagggagtctgcggcgcgcgaggaatacagcgagggatggggtggggcacagtggtttacgagggcgcggtcgtcggctcgtcgctggtggggctcggctgggcggggctgtggttcctgaaccggcggctgtacaaggagtacgaggagcggcgggtgctggtgcagatcctcttcggcctcgtctttgccttctcctgcaacctcttcgagctcgttctcttcgagatcctgcccgtcctctccaagcacgcgcgcttcctcaactggcacctcgacctcttctgcctcatcctcctcctcgtcttcgtactcccctactaccactgctatcttctgctccgtaactcagggatgaggagggaccgggcgtggctcgtcgcggcgctctttctgctggtcttcctatacgggttctggcgcatggggattcacttccccatgccttcaccggagaagggtttctttacgatgccgcagttggtcagtaggattggggtgattggagttagtgtcatggctgttctttctggttttggtgccgtcaatctgccatacagttatctgtcgctattcatcagggaaattgatgaaacagacatcaaaaccttggaacgccagttgatgcaatccatcgagacatgtactgctaagaagaagaaaattattttgtcccagatggagatggagaggattcaaggatcagaggagaagttaaaggccagatcgtttctgaagcgtatagtgggaacagttgttagatctgtgcaggaagatcaaactgagcaggatataaaaaacttagaagcagaagtccaggcactggaagagctttccaaacagctgtttcttgagatatatgaacttcgtcaagctaagatagctgctgcgtattctcgaacttggagaggtcatcttcagaatctacttggatatgctttatcagtctattgtgtttataagatgctcaagtccttgcagagtgtagtctttaaggagtcaggctctgttgatcctgtaacaatgtcaataacgattttcctgagacattttgacattggcattgatgttgcactgttatctcagtacatatctttgatgttcatcgggatgttggttgtcatatctgttcgaggtttcctggcaaatgttatgaagttcttcttcgctgtttctagagttgggagtgggtcgacaaccaatgttgtccttttcctatcagagatcatgggaatgtacttcatatcttccattcttcttataagaaaaagcctggcaaatgaatatagggtgatcattactgatgtcttgggtggtgatatccaatttgacttctaccatcgctggtttgatgctatatttgtggctagtgcgttcctctccttgcttcttatatctgcccaatacaccaccaggcaaacagacaagcatccgattgattgatgcatcttgcccacaatgtgtgcatgttgtctttttaaccagtattcatccaagttcctccaacagcggctatctgagtcacgtctggtgatgcagtgacgggacacgggattcattgtaatgcagtctgcacgatactactttttgactaggacaattgtggaagcccatattaggaattgattatgactttgtaaaatagcttgaaactagtgtcgtagcaccgtagcacggtatgttggtgtatcttatatatttttttggctgtttcatgtataacacacttcgcgacaactctgaatggtagatagatctgtttcttcatgtgacttcaggatgacaactatatacctgaatccttataggtacgtactttgcaatccgtaagcatatgctcttatattgatgatgtttctttggtgacccatcccatgcatattactccctcggagttccaaaatatagttctttctagctcttttttttcgtccacattcattcgaatgataataaatatagacatacatataaactacaa

SEQ ID NO: 17729 - DNA, 2195 bp, Zea Mays
atagcggacgcccccccccccccaagttcccacgagatcccgactcggacgaagctctcctcgccggccaccgtcgcggcagcttgctacgcacagggagtctgcggcgcgcgaggaatacagcgagggatggggtggggcacagtggtttacgagggcgcggtcgtcggctcgtcgctggtggggctcggctgggcggggctgtggttcctgaaccggcggctgtacaaggagtacgaggagcggcgggtgctggtgcagatcctcttcggcctcgtctttgccttctcctgcaacctcttcgagctcgttctcttcgagatcctgcccgtcctctccaagcacgcgcgcttcctcaactggcacctcgacctcttctgcctcatcctcctcctcgtcttcgtactcccctactaccactgctatcttctgctccgtaactcagggatgaggagggaccgggcgtggctcgtcgcggcgctctttctgctggtcttcctatacgggttctggcgcatggggattcacttccccatgccttcaccggagaagggtttctttacgatgccgcagttggtcagtaggattggggtgattggagttagtgtcatggctgttctttctggttttggtgccgtcaatctgccatacagttatctgtcgctattcatcagggaaattgatgaaacagacatcaaaaccttggaacgccagttgatgcaatccatcgagacatgtactgctaagaagaagaaaattattttgtcccagatggagatggagaggattcaaggatcagaggagaagttaaaggccagatcgtttctgaagcgtatagtgggaacagttgttagatctgtgcaggaagatcaaactgagcaggatataaaaaacttagaagcagaagtccaggcactggaagagctttccaaacagctgtttcttgagatatatgaacttcgtcaagctaagatagctgctgcgtattctcgaacttggagaggtcatcttcagaatctacttggatatgctttatcagtctattgtgtttataagatgctcaagtccttgcagagtgtagtctttaaggaggctctgttgatcctgtaacaatgtcaataacgattttcctgagacattttgacattggcattgatgttgcactgttatctcagtacatatctttgatgttcatcgggatgttggttgtcatatctgttcgaggtttcctggcaaatgttatgaagttcttcttcgctgtttctagagttgggagtgggtcgacaaccaatgttgtccttttcctatcagagatcatgggaatgtacttcatatcttccattcttcttataagaaaaagcctggcaaatgaatatagggtgatcattactgatgtcttgggtggtgatatccaatttgacttctaccatcgctggtttgatgctatatttgtggctagtgcgttcctctccttgcttcttatatctgcccaatacaccaccaggcaaacagacaagcatccgattgattgatgcatcttgcccacaatgtgtgcatgttgtctttttaaccagtattcatccaagttttccagagcactgtttctccatacacttccatacacagttacaaaacataatacgtcagttaacttgaacaaagtctctattttgtaatatgtttcccgattgcattggtttatggtaaacagttcctccaacagcggctatctgagtcacgtctggtgatgcagtgacgggacacgggattcattgtaatgcagtctgcacgatactactttttgactaggacaattgtggaagcccatattaggaattgattatgactttgtaaaatagcttgaaactagtgtcgtagcaccgtagcacggtatgttggtgtatcttatatatttttttggctgtttcatgtataacacacttcgcgacaactctgaatggtagatagatctgtttcttcatgtgacttcaggatgacaactatatacctgaatccttataggtacgtactttgcaatccgtaagcatatgctcttatattgatgatgtttctttggtgacccatcccatgcatattactccctcggagttccaaaatatagttctttctagctcttttttttcgtccacattcattcgaatgataataaatatagacatacatataaactacaa

SEQ ID NO: 17730 - DNA, 2815 bp, Zea Mays
atagcggacgcccccccccccccaagttcccacgagatcccgactcggacgaagctctcctcgccggccaccgtcgcggcagcttgctacgcacagggagtctgcggcgcgcgaggaatacagcgagggatggggtggggcacagtggtttacgagggcgcggtcgtcggctcgtcgctggtggggctcggctgggcggggctgtggttcctgaaccggcggctgtacaaggagtacgaggagcggcgggtgctggtgcagatcctcttcggcctcgtctttgccttctcctgcaacctcttcgagctcgttctcttcgagatcctgcccgtcctctccaagcacgcgcgcttcctcaactggcacctcgacctcttctgcctcatcctcctcctcgtcttcgtactcccctactaccactgctatcttctgctccgtaactcagggatgaggagggaccgggcgtggctcgtcgcggcgctctttctgctggtcttcctatacgggttctggcgcatggggattcacttccccatgccttcaccggagaagggtttctttacgatgccgcagttggtcagtaggattggggtgattggagttagtgtcatggctgttctttctggttttggtgccgtcaatctgccatacagttatctgtcgctattcatcagggaaattgatgaaacagacatcaaaaccttggaacgccagttgatgcaatccatcgagacatgtactgctaagaagaagaaaattattttgtcccagatggagatggagaggattcaaggatcagaggaggcacttactttactagccctgctttatgtttcatagaaaataatcctatattcacattggtttaacatgggaatatactctaggtgaaaaatggtaaaacttaaaatattttaatacatgatattgccatgtttttttatgtggtcatgtattgcaatcaaaggggtgatggattattccatataacactcaatggaacaagtcacaagttcacaacacggttgcaacttgcaagtggcaaattcttttattgtttgttgcataccatgtacagcatgagcgaataaagaatacttacttgcagaagttaaaggccagatcgtttctgaagcgtatagtgggaacagttgttagatctgtgcaggaagatcaaactgagcaggatataaaaaacttagaagcagaagtccaggcactggaagagctttccaaacagctgtttcttgagatatatgaacttcgtcaagctaagatagctgctgcgtattctcgaacttggagaggtcatcttcagaatctacttggatatgctttatcagtctattgtgtttataagatgctcaaggtattactccaaattgcattagtaatttagtatacatcttgcatatattgtttatttgcacattatcaaatcatctcatttcatgtaccataagttatgagtcatgcaggaaacactgaacttgatgggcataaatatgtttaatcactccattttgcaacagttttatctagctttacatgttgctgcaaagattatttttatggaactttgttttcagtcttcgaatcacagtatcacacttcacatttgtgatttaaccttaaatgtattatatttttttttcagtccttgcagagtgtagtctttaaggagtcaggctctgttgatcctgtaacaatgtcaataacgattttcctgagacattttgacattggcattgatgttgcactgttatctcagtacatatctttgatgttcatcgggatgttggttgtcatatctgttcgaggtttcctggcaaatgttatgaagttcttcttcgctgtttctagagttgggagtgggtcgacaaccaatgttgtccttttcctatcagagatcatgggaatgtacttcatatcttccattcttcttataagaaaaagcctggcaaatgaatatagggtgatcattactgatgtcttgggtggtgatatccaatttgacttctaccatcgctggtttgatgctatatttgtggctagtgcgttcctctccttgcttcttatatctgcccaatacaccaccaggcaaacagacaagcatccgattgattgatgcatcttgcccacaatgtgtgcatgttgtctttttaaccagtattcatccaaggttgacccattctttgtaccacagttttccagagcactgtttctccatacacttccatacacagttacaaaacataatacgtcagttaacttgaacaaagtctctattttgtaatatgtttcccgattgcattggtttatggtaaacagttcctccaacagcggctatctgagtcacgtctggtgatgcagtgacgggacacgggattcattgtaatgcagtctgcacgatactactttttgactaggacaattgtggaagcccatattaggaattgattatgactttgtaaaatagcttgaaactagtgtcgtagcaccgtagcacggtatgttggtgtatcttatatatttttttggctgtttcatgtataacacacttcgcgacaactctgaatggtagatagatctgtttcttcatgtgacttcaggatgacaactatatacctgaatccttataggtacgtactttgcaatccgtaagcatatgctcttatattgatgatgtttctttggtgacccatcccatgcatattactccctcggagttccaaaatatagttctttctagctcttttttttcgtccacattcattcgaatgataataaatatagacatacatataaactacaa

SEQ ID NO: 17731 - DNA, 1456 bp, Zea Mays
ccaccgcgcagccctgcacggccgcggtcgcctataaggctagcccagccagtggtagcacgcacagcacagcagccgccctgctcggcgtaggagcagcccagagcgagcgagacagagggaaagagacacggccagccagggcgggggaggacgccgcgcagcagcacgcgatgagcggcaggtgggccgcgaggccggcgctcttcaccgcggcgcagtacgaggagctggagcaccaggcgctcatatacaagtacctcgtcgccggcgtgcccgtcccgccggacctcctcctccccctgcgccgaggcttcgtcttccaccagccacccgcccttgggtacgggccctacttcggcaagaaggtggacccggagcccgggcggtgccggcgtacggacggcaagaagtggcggtgctccaaggaggccgccccggactccaagtactgcgagcgccacatgcaccgcggccgcaaccgttcaagaaagcctgtggaagcgcagctcgcgcccccgccgcacgcccagccgcagcagcagcagcaggcccccgcgcccgctgctggcttccagaaccactcgctgtacccgtcgatcctcaccggcaacggcggcggcggggtaggtgctggtgctggtggtggcacgttcggcctggggcccacctctcagctgcacatggacagtgccgctgcctacgcgactgctgccggtggagggagcaaatatctcaggtactctgcatacggggtgaaatctctgtcggacgagcacagcacgctcttgtcgggcggcatggatccgtcgatgatggacaactcgtggcgcctgctgccatcccaaaccaacacattccaagccacaagctaccctgtgttcggcacgctgagtgggctagacgagagcaccatcgcgtcgctgccgaagacccagagggagcccctctctttcttcggcagcgacttcgtaaccgccgccaagcaggagaaccagacgctgcgccctttcttcgacgagtggcccaagtcgagggactcgtggccggagctgggcgaggacagcagcctcggcttctcggccacccagctctccatctccattcccatggcgacctccgacttctccaacaccagctccagatcgccgggtggaataccgtcgagatgaacgagtaccgtgcatgtggatcccagcgtcttagggttgacgactcttcggtgctggcctcgtcgtatcatgctcctaaattttcgaacgatatatgccttatgtaacgctatttctctcattgttacaacaccctttacccgtttggaattgtgttgaagtggatggtctgcgttgctcggttgttcattcgaccttttttcaatttggaaactccgtttctttgtactcagtgatctgtgcaagtgcaatgattcggtccatgcatgtctctggcttgcact

SEQ ID NO: 17732 - DNA, 1978 bp, Zea Mays
tagcaaccggccttatgcgagaacaactggataagcccatcacccatcgcccatcggcagcagaaggccactgcccggacggagcttccgaaagggaaccgggcagcggcaatggagggacagccgctccatctcctcatcgcccagttccaccacccttgcctacgcggtctcatccccaactaccctacccactacctgcccacctcccgcctccgactccgcgtacagcgtcgcaagccgaagcagctcgccgcagtgccttcgaggcgtccatcgggcagccaagccgacgcgcctggcctggtgccggtgcctaacacggtggcggcgctggtgctccagctgaccgtgtgctcgctcctttttctcttccccaaccgtgcccgagccctcgcgctcccgccccctccgggggccgctgcggtggttgaggcgacgcaggaggaggaggaggaggaccaggagtgggaggctgcgctgcagaagtggaagaccaagacctacgcgctctcggtgcccctccgggtcgtggcgctccgcggctccttccctccatcttggattaaggatttcgtcgaagctcaggggaagagactcaaattcagtcctgagctccgtgctaatcttgatgggatcttctctgagatgtcacaatgtatggacaagggtcaagttcagccgaagtctgcaatggcagctgatgttgtttcccttggggactcttggctcggctatgccatccgcaagggattgctagagcctatcaagaatgctgaagaacaggattggtttcatagcctgagtgacagatggaagaacggagaagcagatcctaatggtacaatatggggagttccatacagatggggcaccatggtcattgcttacaagaaagacaagttcaaaagacataatttgaagccaatacaggattgggaggatttgtggaggcccgagcttgccgggaggatttcaatggtcgattctcctagagaggtgattggtgctgttctgaagcatctgggctcatcatataacacagttgatatggaaatggacgtcaatggtggtagagcagcagtcctaaacagctttacgcaactacagaagcaggtccaactattcgacagcatgaactatctgaagtcgtttagtgttggagatgtatgggtcgcagtgggttggagcagcgacgtgatccctgctgcaaagcgaatgtctaatgtcgcggtggttgttcccaagtcaggcagcagcctatgggctgatctatgggcaataccatgcgcgacgagatttcagactgaccaaatcgggagccgagccagaggcccgtctccactggttcaccagtggttcgacttctgcctgcagagcgcaaggagcctacccttccgccaagacgtcatccccggagcatctccgctccacctcgagagccctgtgccagaggtccctcaagacaagaacaagaggaagccgaagctggacacgaaccttgtcaggggagtgcctccgcccgagatcctggagaggtgcgagtttctggaacccctgtcaggtaaggcgctggaggactaccagtggctgatgtctcgggtgcagagacctcgtcttggtttgtttgggaacatgttgcagaagatgtcagctgtacttgacttcaaaagaagatcttagagccactgtactgtgattgaccaagttttttttttctttttacttcgtggtgcaactcttaacaacgtcctctatattcatcctctatatatgtcctttacagtttcctctaaaagatttcatcctctatatctcatttctctccaacaacgtcctctaaatcacgtcctctatactcaaataatcatattaaagacattttttaattttattttttgtacatacgtatttatcatacttgagcaaatgtattgtacatattttagttttgctaaaccggttatttaaagtagtc

SEQ ID NO: 17733 - DNA, 5208 bp, Zea Mays
agctagtgtgaatgcggcaggccccgttctctgagaccgagctgtgtgaatgggcagaaaagtaatggcaggcagaggcaggcagaggcgagaagcaagaagaaaaacgaggggagcaaggaaatcgaggcaagaaagcaagggcagaggcgcagagcctgcaatctgctgtcccccgtcgccgccgctgcctcgccgttgcaatcgaggcaagaaagttagggagtgctggcgttgggcaagtcgctctgggcctctggggagacgggggctggaggggcggcgagatgatggaggccggcggcgcgggagcggggggaagggacgagagggtgccgcagtggggcgtgcaggagacacgggagctgatcgtggcgcgcagggagatggagcgggaggccgtcgcggcgcgccgcagcgccaagacgatgtgggaggccgtcgcggcgcggctccgggagcgaggctaccgacgaaccgccgagcagtgcaagtgcaagtggaagaacctcgtcaaccgctacaaggcattcatccctcgtccggcagataactttctaccctagtctcgtaacgctagattggccggtctgttctggaccaccagacaacgatgttctgctgtattgttcttgtgttgatggcaaaatgatatgcattgctggttcgtgacttcgtctttaggctcagcgtccccaaattggtcttctatcttgataggtccactttgagttgtttaggagtgtgtccacaactccccttgttcaccttcgctgcattatttgcgcaaccatttccatcagtgaagggcattcagaaatcttagtctttatatgttcatgataagtagagaaaagaaaactgattttgcagaatttatccttgcattgtgccacacatgttggaacgtaatgctttcaattgcacattttgaagtaggtggatagtaaattagtaatgctaagatctatggatagtacataccgcctccattccaaatgataatacattttgacttttctaaatacatagcttttgttatgcacttattatgtaattaggtatacaccgtgtctagatacatagtaaaagcaaagtatgtagaaaaactaaaatatcttataatttggaacgggagagtactgattaatttacagcacattagggtttttaaaaactttcttagtccaattgttgtttctgttttcaagttttcttcacaaatttcacatagaagcaatgcttgcttttgttactatattttgtatgttttggcatttaaaaaggtgtattccactttgttttgttctgaaatgaaaacatggcacaaatatttctaagaaactaggataacttatctagtacagtgaattattgctagtgatagaaaggggaatccacctaccattatctttgttgattgtgagtctatgatgcatgaaaagtcaatgtggaatctcaagggtttgaggggaattgagtggcaaattgtccagaattggtggttcagttaaagttagattttcactttttgagagcgtggattcattgtgaaccctaaaggaggctttcttcacattggttagtttgtctgagaaattgcacttgaactgtctcagagtgcgacatctgtcctgcaccggcaaaaagagggagtggtggtaaaattatgatactacctgttaggtgtgtgcgagagagagcatggatgcgttgattaggtttattgagagaaaaatgtgcaaaagctgtacattattgccgacgttcctgctgaccacaatagtcatgtaatattggtcttctgctgcaatagttataaaagacttcgtattttgtcccaatctcaatgataacgtcaggaaatagatcaattatatttttttcatcaggagctaatgaaaaattggaagttccatgttaggttcagattaactctgctgttgggttggttgggtggtgggtccaatttcaagctttgcattataatgtattcttcttttatgctcaagaaaacccagttcctacttacagagactggccgattgtttattgtttggacacatagttggttcatctttgccttgtggtctgtccaccttgtttgctttgtgatttcaacaaatagttagtactttcattctttagtttattgtaagcacaagctcatacgttatgcatccttccatttcatcaggggaaagaaacttctgatccagaaaatggtaggcagtgtcccttctttgatgagctgcatgccgtcttcacagaccgtgcaagagatatgcaacgacaactccttgagtctgaatctggggcttctgtcaaaaggaaactgaagcaacctggtggtgaccggtcatctgggctgtctgatgacgagggcaatggtggtgaagaaagtgatgaggagaaaccgttgcccagcaggaagaggaaagctgacgacaagaaacagcaacatcaaagaatgtctgggaaatcaagagcaggattttcaagcatacatgaactgctgcaggatttccttgtgcaacaacagcacattgatgtctggtggcgggagatgatggagagacgcgcccaggagcggattgtttttgaacagcaatggcggcagacaatgcagaagctggagcaggagaggttgctgttggaacactcgtggatggaacgggaggagcaaagaaggatgagagaagaaacacgggcagagaaaagggatgcactcctgactgctctgttgaacaaactcctacaggaagatctatagccggataagcttgctcttcatttcgtcagggtatagttgcagtagtggacattgttttgtcaccttgttttagcaattctttgtagctgctacatatattaacatgtgtttgttcaaagaaaattgtttcttatagcatttgtattaggttcctaggcattcttttccagttatttggtggagtaaaagttaattttatgtttaattgtggttgtaagtatcatactgtcaggtaagtatacagatcaatgctaatacgctttagcagttggctctctatcagtaatggacagaagttcatgtaatctgcttgttcaaaaaaataagttcatgtggcatcaaagaaaagaagttcatgtaatgtatgtgttcgaagataagctcatgtacagtcagatagatcttgagatcaaccacatttattcacaggtttcagcaaatgctttcagctagcaaccggccttatgcgagaacaactggataagcccatcacccatcgcccatcggcagcagaaggccactgcccggacggagcttccgaaagggaaccgggcagcggcaatggagggacagccgctccatctcctcatcgcccagttccaccacccttgcctacgcggtctcatccccaactaccctacccactacctgcccacctcccgcctccgactccgcgtacagcgtcgcaagccgaagcagctcgccgcagtgccttcgaggcgtccatcgggcagccaagccgacgcgcctggcctggtgccggtgcctaacacggtggcggcgctggtgctccagctgaccgtgtgctcgctcctttttctcttccccaaccgtgcccgagccctcgcgctcccgccccctccgggggccgctgcggtggttgaggcgacgcaggaggaggaggaggaggaccaggagtgggaggctgcgctgcagaagtggaagaccaagacctacgcgctctcggtgcccctccgggtcgtggcgctccgcggctccttccctccatcttggattaaggatttcgtcgaagctcaggggaagagactcaaattcagtcctgagctccgtgctaatcttgatgggatcttctctgagatgtcacaatgtatggacaagggtcaagttcagccgaagtctgcaatggcagctgatgttgtttcccttggggactcttggctcggctatgccatccgcaagggattgctagagcctatcaagaatgctgaagaacaggattggtttcatagcctgagtgacagatggaaggaaccagaacggagaagcagatcctaatggtacaatatggggagttccatacagatggggcaccatggtcattgcttacaagaaagacaagttcaaaagacataatttgaagccaatacaggattgggaggatttgtggaggcccgagcttgccgggaggatttcaatggtcgattctcctagagaggtgattggtgctgttctgaagcatctgggctcatcatataacacagttgatatggaaatggacgtcaatggtggtagagcagcagtcctaaacagctttacgcaactacagaagcaggtccaactattcgacagcatgaactatctgaagtcgtttagtgttggagatgtatgggtcgcagtgggttggagcagcgacgtgatccctgctgcaaagcgaatgtctaatgtcgcggtggttgttcccaagtcaggcagcagcctatgggctgatctatgggcaataccatgcgcgacgagatttcagactgaccaaatcgggagccgagccagaggcccgtctccactggttcaccagtggttcgacttctgcctgcagagcgcaaggagcctacccttccgccaagacgtcatccccggagcatctccgctccacctcgagagccctgtgccagaggtccctcaagacaagaacaagaggaagccgaagctggacacgaaccttgtcaggggagtgcctccgcccgagatcctggagaggtgcgagtttctggaacccctgtcaggtaaggcgctggaggactaccagtggctgatgtctcgggtgcagagacctcgtcttggtttgtttgggaacatgttgcagaagatgtcagctgtacttgacttcaaaagaagatcttagagccactgtactgtgattgaccaagttttttttttctttttacttcgtggtgcaactcttaacaacgtcctctatattcatcctctatatatgtcctttacagtttcctctaaaagatttcatcctctatatctcatttctctccaacaacgtcctctaaatcacgtcctctatactcaaataatcatattaaagacattttttaattttattttttgtacatacgtatttatcatacttgagcaaatgtattgtacatattttagttttgctaaaccggttatttaaagtagtc

SEQ ID NO: 17734 - DNA, 3578 bp, Zea Mays
agaaatcaaaatggatgcagggagacagctagtgtgaatgcggcaggccccgttctctgagaccgagctgtgtgaatgggcagaaaagtaatggcaggcagaggcaggcagaggcgagaagcaagaagaaaaacgaggggagcaaggaaatcgaggcaagaaagcaagggcagaggcgcagagcctgcaatctgctgtcccccgtcgccgccgctgcctcgccgttgcaatcgaggcaagaaagttagggagtgctggcgttgggcaagtcgctctgggcctctggggagacgggggctggaggggcggcgagatgatggaggccggcggcgcgggagcggggggaagggacgagagggtgccgcagtggggcgtgcaggagacacgggagctgatcgtggcgcgcagggagatggagcgggaggccgtcgcggcgcgccgcagcgccaagacgatgtgggaggccgtcgcggcgcggctccgggagcgaggctaccgacgaaccgccgagcagtgcaagtgcaagtggaagaacctcgtcaaccgctacaaggggaaagaaacttctgatccagaaaatggtaggcagtgtcccttctttgatgagctgcatgccgtcttcacagaccgtgcaagagatatgcaacgacaactccttgagtctgaatctggggcttctgtcaaaaggaaactgaagcaacctggtggtgaccggtcatctgggctgtctgatgacgagggcaatggtggtgaagaaagtgatgaggagaaaccgttgcccagcaggaagaggaaagctgacgacaagaaacagcaacatcaaagaatgtctgggaaatcaagagcaggattttcaagcatacatgaactgctgcaggatttccttgtgcaacaacagcacattgatgtctggtggcgggagatgatggagagacgcgcccaggagcggattgtttttgaacagcaatggcggcagacaatgcagaagctggagcaggagaggttgctgttggaacactcgtggatggaacgggaggagcaaagaaggatgagagaagaaacacgggcagagaaaagggatgcactcctgactgctctgttgaacaaactcctacaggaagatctatagccggataagcttgctcttcatttcgtcagggtatagttgcagtagtggacattgttttgtcaccttgttttagcaattctttgtagctgctacatatattaacatgtgtttgttcaaagaaaattgtttcttatagcatttgtattaggttcctaggcattcttttccagttatttggtggagtaaaagttaattttatgtttaattgtggttgtaagtatcatactgtcaggtaagtatacagatcaatgctaatacgctttagcagttggctctctatcagtaatggacagaagttcatgtaatctgcttgttcaaaaaaataagttcatgtggcatcaaagaaaagaagttcatgtaatgtatgtgttcgaagataagctcatgtacagtcagatagatcttgagatcaaccacatttattcacaggtttcagcaaatgctttcagctagcaaccggccttatgcgagaacaactggataagcccatcacccatcgcccatcggcagcagaaggccactgcccggacggagcttccgaaagggaaccgggcagcggcaatggagggacagccgctccatctcctcatcgcccagttccaccacccttgcctacgcggtctcatccccaactaccctacccactacctgcccacctcccgcctccgactccgcgtacagcgtcgcaagccgaagcagctcgccgcagtgccttcgaggcgtccatcgggcagccaagccgacgcgcctggcctggtgccggtgcctaacacggtggcggcgctggtgctccagctgaccgtgtgctcgctcctttttctcttccccaaccgtgcccgagccctcgcgctcccgccccctccgggggccgctgcggtggttgaggcgacgcaggaggaggaggaggaggaccaggagtgggaggctgcgctgcagaagtggaagaccaagacctacgcgctctcggtgcccctccgggtcgtggcgctccgcggctccttccctccatcttggattaaggatttcgtcgaagctcaggggaagagactcaaattcagtcctgagctccgtgctaatcttgatgggatcttctctgagatgtcacaatgtatggacaagggtcaagttcagccgaagtctgcaatggcagctgatgttgtttcccttggggactcttggctcggctatgccatccgcaagggattgctagagcctatcaagaatgctgaagaacaggattggtttcatagcctgagtgacagatggaaggtccatttgtgcaggaaccagaacggagaagcagatcctaatggtacaatatggggagttccatacagatggggcaccatggtcattgcttacaagaaagacaagttcaaaagacataatttgaagccaatacaggattgggaggatttgtggaggcccgagcttgccgggaggatttcaatggtcgattctcctagagaggtgattggtgctgttctgaagcatctgggctcatcatataacacagttgatatggaaatggacgtcaatggtggtagagcagcagtcctaaacagctttacgcaactacagaagcaggtccaactattcgacagcatgaactatctgaagtcgtttagtgttggagatgtatgggtcgcagtgggttggagcagcgacgtgatccctgctgcaaagcgaatgtctaatgtcgcggtggttgttcccaagtcaggcagcagcctatgggctgatctatgggcaataccatgcgcgacgagatttcagactgaccaaatcgggagccgagccagaggcccgtctccactggttcaccagtggttcgacttctgcctgcagagcgcaaggagcctacccttccgccaagacgtcatccccggagcatctccgctccacctcgagagccctgtgccagaggtccctcaagacaagaacaagaggaagccgaagctggacacgaaccttgtcaggggagtgcctccgcccgagatcctggagaggtgcgagtttctggaacccctgtcaggtaaggcgctggaggactaccagtggctgatgtctcgggtgcagagacctcgtcttggtttgtttgggaacatgttgcagaagatgtcagctgtacttgacttcaaaagaagatcttagagccactgtactgtgattgaccaagttttttttttctttttacttcgtggtgcaactcttaacaacgtcctctatattcatcctctatatatgtcctttacagtttcctctaaaagatttcatcctctatatctcatttctctccaacaacgtcctctaaatcacgtcctctatactcaaataatcatattaaagacattttttaattttattttttgtacatacgtatttatcatacttgagcaaatgtattgtacatattttagttttgctaaaccggttatttaaagtagtc

SEQ ID NO: 17735 - DNA, 2905 bp, Zea Mays
tttgttgcaagattaacagcaggcatcattcagacatatctagaatgtgatcctgagtttaagtactcagaggttctaaatccaaaacgcttcctcaccaatccctctaccccagcccacaatgatgggcttgacaatgcaaattgggacctcatattgtacgtcaacttggagttggttaataagatgtcaaacagaaggtttattgtcaaggaaatgcttgggcagggaacttttggtcaagtagtcaagtgctgggacacagaaactaatgactatgttgctgtgaaggtgataaaaaaccagcctgcattttaccatcaagctatcatggaggtttcactattaagaacgttaaatcagaaatttgatcctgatgatcagcataacattgtccgtatgcttgattatttgtcatttcaaaatcatttgtgcatagcttttgagatgcttggtcaaaacctgtatgaactgctcaaaaggaatcacttaagaggtctgaaattgaaatatgttcaagccttctcaaaacagatattggatgccatggttgtgatgagagaagctggaataattcattgtgatctgaagccagaaaatatcctgttagctcccagcgtcgcaacagctgcagcagtgaaagttattgattttggatcagcgtgcctggaggagccgctattacaggtctccagaggttctccttggctatccatatactactgcgatcgacatgtggtcattcggctgcatagttgctgaactgtttctaggcttgccattgtttcctggagcaacagaatatgatgtgcttcagagaatggtgaaaattctcggaggccaaccaccagatgaactgctaagggaagctaaaaacactgtaaggttttttaaacatgttggaagtatatatgctggcaatgcggcacctattggtctttctagtgcatacagaattttaagtgaagaagaggttgaagcgagagattccaagaggcaaaagatgggaaagtggtacttcccacacctgaagcttgacagactcatatgtacctatccttggaacaattctgaactggcagagacagagaaaacagatcgtttgggattagttgatttcttgaagggactccttgaatttgatccaaataagcgatggtcaccattgcaggctctacaccatccattcataacaggagaatcgtttactggtccatatgagccaatacccgagactgcaagaattcctgttgctcgtgcagcagcaattgatcacaatcctggaggggggcactggctacattcaggtctttccccgcaggttggaagtgtaaacagatacctacctttgaataatgtctaccctccaaaggttcctttttcttatgggagtagttatggaagctttggtagccatggcagctatactggtaatgctggttttggtaacagctatggaagcattggtgatgctaatgctatcaatatgtattactcacccttaggttcttctggattaacgcaaattggccctagtccagatgttagactaaggatgcgtctctcacatgatagaggaattcgattgagccctggtagtcttgggcctatgtctgttggagccagtccatcacagtttaccccaccgaactaccatatgcaaatcccagctaattctactgggacacatggttctggttctcctgcaagtggagtcattcatggttctccgttaggaaaagctgcagcagtgggcccatacaacatgaggagaaacttgccaatgccaccacatgattatgtatctcagcatggacaagggcgttttagagatggtgtcagctttagtcattctgatgcctgtgctcaaggacatacaggccactctcataatgcagcggtacctagttcttatcattctggttggagaccaaaaataggttcaaggagtggtatttccttggaggcctcgtctagtcatgtgccttcgaaggctccgtcacaatcatttgacttttcagcttcatcgacacttgatcctgctaattgggaccctaattatagtgatgagtcactattgcaagaagacaattcactgtcagctgatctaagcagcaacctccactttggagatgcaactggccaagaccacatctttgctacatctaaccctgtaccgacaaaccaaagaggagatcaattatttcatgtgtcctctcaaggagtgagtgcccattccagtgttctcatcaactacggtggttacaaccctcaaaattatcctcagcaaaatgcccgtcctcgtcatggacagccaattctccatcagcgatataatcaggcaacttccagtccaatgcggccaatgggaagccatcacaatgggcagcctgcgtggcctagtagttttggcatgggcgatggagtgccctggggaggaacaagagggcactcatttacgacaaggaaggattatgggagcatcttttagggtggagttgtggaccggaggaacgtcattgattcattgcaggcgtaaattatttgtatcagcgaaattggagtgcgatgattctggttgattgttttcgatgttgttactccatccctccacttggtcctttgtgaacacactggatatatacactatatgatcggtgacattagcactcctttgtaaccttttttaggaatcagaagtttgggtgttcccctaattgctgactgcattgtggctgtactgaatactgtaccattgtcaccggtgtaatatgaaggcgtgatgtaggtagactaaagggctctttgattcgtggctaaatgtgtcatactttatctaaggttagttgttcgaattaaagaactaaccttagtcagaaaaaatagtcaaagtgtggcaagttag

SEQ ID NO: 17736 - DNA, 2734 bp, Zea Mays
gtttgttgcaagattaacagcaggcatcattcagacatatctagaatgtgatcctgagtttaagtactcagaggttctaaatccaaaacgcttcctcaccaatccctctaccccagcccacaatgatgggcttgacaatgcaaattgggacctcatattgtacgtcaacttggagttggttaataagatgtcaaacagaaggtttattgtcaaggaaatgcttgggcagggaacttttggtcaagtagtcaagtgctgggacacagaaactaatgactatgttgctgtgaaggtgataaaaaaccagcctgcattttaccatcaagctatcatggaggtttcactattaagaacgttaaatcagaaatttgatcctgatgatcagcataacattgtccgtatgcttgattatttgtcatttcaaaatcatttgtgcatagcttttgagatgcttggtcaaaacctgtatgaactgctcaaaaggaatcacttaagaggtctgaaattgaaatatgttcaagccttctcaaaacagatattggatgccatggttgtgatgagagaagctggaataattcattgtgatctgaagccagaaaatatcctgttagctcccagcgtcgcaacagctgcagcagtgaaagttattgattttggatcagcgtgcctggagggtaaaacagtttactcgtacattcaggtctccagaggttctccttggctatccatatactactgcgatcgacatgtggtcattcggctgcatagttgctgaactgtttctaggcttgccattgtttcctggagcaacagaatatgatgtgcttcagagaatggtgaaaattctcggaggccaaccaccagatgaactgctaagggaagctaaaaacactgtaaggttttttaaacatgttggaagtatatatgctggcaatgcggcacctattggtctttctagtgcatacagaattttaagtgaagaagaggttgaagcgagagattccaagaggcaaaagatgggaaagtggtacttcccacacctgaagcttgacagactcatatgtacctatccttggaacaattctgaactggcagagacagagaaaacagatcgtttgggattagttgatttcttgaagggactccttgaatttgatccaaataagcgatggtcaccattgcaggctctacaccatccattcataacaggagaatcgtttactggtccatatgagccaatacccgagactgcaagaattcctgttgctcgtgcagcagcaattgatcacaatcctggaggggggcactggctacattcaggtctttccccgcaggttcttctggattaacgcaaattggccctagtccagatgttagactaaggatgcgtctctcacatgatagaggaattcgattgagccctggtagtcttgggcctatgtctgttggagccagtccatcacagtttaccccaccgaactaccatatgcaaatcccagctaattctactgggacacatggttctggttctcctgcaagtggagtcattcatggttctccgttaggaaaagctgcagcagtgggcccatacaacatgaggagaaacttgccaatgccaccacatgattatgtatctcagcatggacaagggcgttttagagatggtgtcagctttagtcattctgatgcctgtgctcaaggacatacaggccactctcataatgcagcggtacctagttcttatcattctggttggagaccaaaaataggttcaaggagtggtatttccttggaggcctcgtctagtcatgtgccttcgaaggctccgtcacaatcatttgacttttcagcttcatcgacacttgatcctgctaattgggaccctaattatagtgatgagtcactattgcaagaagacaattcactgtcagctgatctaagcagcaacctccactttggagatgcaactggccaagaccacatctttgctacatctaaccctgtaccgacaaaccaaagaggagatcaattatttcatgtgtcctctcaaggagtgagtgcccattccagtgttctcatcaactacggtggttacaaccctcaaaattatcctcagcaaaatgcccgtcctcgtcatggacagccaattctccatcagcgatataatcaggcaacttccagtccaatgcggccaatgggaagccatcacaatgggcagcctgcgtggcctagtagttttggcatgggcgatggagtgccctggggaggaacaagagggcactcatttacgacaaggaaggattatgggagcatcttttagggtggagttgtggaccggaggaacgtcattgattcattgcaggcgtaaattatttgtatcagcgaaattggagtgcgatgattctggttgattgttttcgatgttgttactccatccctccacttggtcctttgtgaacacactggatatatacactatatgatcggtgacattagcactcctttgtaaccttttttaggaatcagaagtttgggtgttcccctaattgctgactgcattgtggctgtactgaatactgtaccattgtcaccggtgtaatatgaaggcgtgatgtaggtagactaaagggctctttgattcgtggctaaatgtgtcatactttatctaaggttagttgttcgaattaaagaactaaccttagtcagaaaaaatagtcaaagtgtggcaagttag

SEQ ID NO: 17737 - DNA, 2879 bp, Zea Mays
aaggcgctaaccttgtccatcagtttgttgcaagattaacagcaggcatcattcagacatatctagaatgtgatcctgagtttaagtactcagaggttctaaatccaaaacgcttcctcaccaatccctctaccccagcccacaatgatgggcttgacaatgcaaattgggacctcatattgtacgtcaacttggagttggttaataagatgtcaaacagaaggtttattgtcaaggaaatgcttgggcagggaacttttggtcaagtagtcaagtgctgggacacagaaactaatgactatgttgctgtgaaggtgataaaaaaccagcctgcattttaccatcaagctatcatggaggtttcactattaagaacgttaaatcagaaatttgatcctgatgatcagcataacattgtccgtatgcttgattatttgtcatttcaaaatcatttgtgcatagcttttgagatgcttggtcaaaacctgtatgaactgctcaaaaggaatcacttaagaggtctgaaattgaaatatgttcaagccttctcaaaacagatattggatgccatggttgtgatgagagaagctggaataattcattgtgatctgaagccagaaaatatcctgttagctcccagcgtcgcaacagctgcagcagtgaaagttattgattttggatcagcgtgcctggagggtaaaacagtttactcgtacattcagagccgctattacaggtctccagaggttctccttggctatccatatactactgcgatcgacatgtggtcattcggctgcatagttgctgaactgtttctaggcttgccattgtttcctggagcaacagaatatgatgtgcttcagagaatggtgaaaattctcggaggccaaccaccagatgaactgctaagggaagctaaaaacactgtaaggttttttaaacatgttggaagtatatatgctggcaatgcggcacctattggtctttctagtgcatacagaattttaagtgaagaagaggttgaagcgagagattccaagaggcaaaagatgggaaagtggtacttcccacacctgaagcttgacagactcatatgtacctatccttggaacaattctgaactggcagagacagagaaaacagatcgtttgggattagttgatttcttgaagggactccttgaatttgatccaaataagcgatggtcaccattgcaggctctacaccatccattcataacaggagaatcgtttactggtccatatgagccaatacccgagactgcaagaattcctgttgctcgtgcagcagcaattgatcacaatcctggaggggggcactggctacattcaggtctttccccgcaggttggaagtgtaaacagatacctacctttgaataatgtctaccctccaaaggttcctttttcttatgggagtagttatggaagctttggtagccatggcagctatactggttcttctggattaacgcaaattggccctagtccagatgttagactaaggatgcgtctctcacatgatagaggaattcgattgagccctggtagtcttgggcctatgtctgttggagccagtccatcacagtttaccccaccgaactaccatatgcaaatcccagctaattctactgggacacatggttctggttctcctgcaagtggagtcattcatggttctccgttaggaaaagctgcagcagtgggcccatacaacatgaggagaaacttgccaatgccaccacatgattatgtatctcagcatggacaagggcgttttagagatggtgtcagctttagtcattctgatgcctgtgctcaaggacatacaggccactctcataatgcagcggtacctagttcttatcattctggttggagaccaaaaataggttcaaggagtggtatttccttggaggcctcgtctagtcatgtgccttcgaaggctccgtcacaatcatttgacttttcagcttcatcgacacttgatcctgctaattgggaccctaattatagtgatgagtcactattgcaagaagacaattcactgtcagctgatctaagcagcaacctccactttggagatgcaactggccaagaccacatctttgctacatctaaccctgtaccgacaaaccaaagaggagatcaattatttcatgtgtcctctcaaggagtgagtgcccattccagtgttctcatcaactacggtggttacaaccctcaaaattatcctcagcaaaatgcccgtcctcgtcatggacagccaattctccatcagcgatataatcaggcaacttccagtccaatgcggccaatgggaagccatcacaatgggcagcctgcgtggcctagtagttttggcatgggcgatggagtgccctggggaggaacaagagggcactcatttacgacaaggaaggattatgggagcatcttttagggtggagttgtggaccggaggaacgtcattgattcattgcaggcgtaaattatttgtatcagcgaaattggagtgcgatgattctggttgattgttttcgatgttgttactccatccctccacttggtcctttgtgaacacactggatatatacactatatgatcggtgacattagcactcctttgtaaccttttttaggaatcagaagtttgggtgttcccctaattgctgactgcattgtggctgtactgaatactgtaccattgtcaccggtgtaatatgaaggcgtgatgtaggtagactaaagggctctttgattcgtggctaaatgtgtcatactttatctaaggttagttgttcgaattaaagaactaaccttagtcagaaaaaatagtcaaagtgtggcaagttag

SEQ ID NO: 17738 - DNA, 1575 bp, Zea Mays
tgtgctcctccatgtcagataactgcctggagttagaagtggtaggaacaagtcagacatttcccgagcacgaccattaccgattcaggtcctaccatgcctgatatcagtatttaattaatacccaatgtaaacaactgaaataccgtttagccttcaaactataatctgtatgattaaaatgggctcagcagacccaaagaagtgaagaacatgatctttatcattaattttactggcatgtttggatcctgggaattgaatttcatttaataatcatactttacgcacagaccaattaagttatagaagcacatcatggcagtcctatagacttatatctaaacattggaaatttaagaaatgacaaattctaagtcaaacggtctaatctattaggtagattctaattcttcaaagtaaaccaaattagtcaggtgatccgtttacctattataatcagtctagatatatatgtgcctgctcatagcacaaccaaagcgcccaaacgaatttgctgtactagcaaccttttccccttcctgtctgaaattattcctatcctgaaaggtcaatttggtcaagcctgcataccacgacacaacacaacacaataatgtaccaaaaccgaaaggtgtactgattttgctttacgggaattttagagactattaatttgtcgtttgattttttttttgacatcaactttgaccggtttgtctttttcggaatatttgtgaaaatatagaaaaatccaattcatagttaaagtaagctatatgataaactaaatcaaaatgaaaataaatgataatgatgagtttttttttttaataagccgagccagtcaaaatttaataaaaaaaagttaaaacgacattcacagagggagtaggaggcacccgacggttgacacatacggattccatgggatcgtaactgtcttatcgcataagaaaaatattatctttgtcttgtaagtgagaaaaaaaaagcatgagaaagaaagttgctggtttcagacagtcgaagcaaccgaaacatgcagcagaaaacgattccgtctttcagaggatagactttgacctgtatccggggaagaaaacagagcaagtttttcgttctttcttttgcgataagaaaaaaaaagcagaggaagtttgatatagtaaatgaaagggaattggattgcagagacaaaagaaaaaaaaaccagaactttcgtggaccatcaaatcttcaaagacccaataaaacctatcgcgcgatcgatcacgatggtaacaggtatgtattcccaaacttgcagcgcctacagctcgcacaggcagtcgctacggaagaagtgaacgagaaaggcgcgaaagaaccaccctgaatttcaaaggtgaactgcaaactcgtaggccagtttcatactgtggcacgagcaaccaaagaacaccaaaccagacccgaaaaggttgtaaaagaaacgacgggtagcatgacaagaacataaataacacgaggaagaagaaggagaaagagcggccatgaccgaccttcctttccaagcctttccttcaaaccggg

SEQ ID NO: 17739 - DNA, 327 bp, Zea Mays
acctgctgctcaactagcagcaagcctgcgtcacccctctgtgaactcctcctagcacccccagcaccatttctgtgcacactgtcagctcctgcatttgcaccttcatcagctcttcttaccctcgaagctgcccggtgcgacggccttgagagcgagactgatcgactgttgctcggggaactagcagtgaatccactcggtgactgtgggctgttctccctgttcaatgaccgtttccttgatgtgttgaccctctccttgagccgagccagtagatcacgcccgggaccgggagtgtctcttgacctgttgccggtttcgcta

SEQ ID NO: 17740 - DNA, 3724 bp, Zea Mays
cgctttttctcttgcgcatgcaacgtccgcgttgtgcttgctgcgcattggcattctcatgccgctggacacaacctaacaagcagcacttgtgctgaatgcatcaaggcgctttaggtacactcttgatttgaaaaaggaggaacaaaaggaggagatcaggagaaaaatccgtgcacaggcacatgttataagggccgcttttcgtttcaaagaggctggccgaatccatgtacagtccgaagaaacaaaagtaccatgtgctgatggtgcacttggcttcggaatcaaagaagaccagattacagcactgacaagggatcacaactactctggtctgcagcaatatggaggggtttctggtgtagcacatatgctaaaaaccgatacacagaaggggattagtggagatgactcagatttgctggcaaggaaaaatgcatttggatcaaacacatatcctcgtaagaaaggaagaagctttttggctttcgtatgggatgcttgtaaagacttgacgctaatcatcctcatggttgctgctgctgtttcactggccttgggcataacaacagagggcataaaagaaggctggtatgatggagcgagcattgcctttgctgttcttctagttgtatttgttacagctatcagtgactacaagcaatcactgcaattccaaaatcttaatgaagaaaaacagaacattcgtttggaggttgttagaggcggaaggcgaatcacggtatcaatatatgatttggttgtcggtgatgttgtccctctcaaaattggtgaccaggtccccacagatggtatccttatcagtggtcactccctttccatagatgaatcaagcatgactggagaaagtaaaattgtacacaaagatcagaaatcaccatttctaatgtcaggttgcaaagttgccgatggatatggaacaatgctggtaactgctgttggaattaacactgaatgggggttgctaatggcaagcatatctgaagattcgggtgaagagacaccacttcaggttcgtttgaatggtgtcgctacttttattggaatggttggactttctgttgcccttgcagttcttgttgtacttttggccaggtacttcactgggcatacttataatcctgatggatctgtgcaatatgtgaaagggaatatgggtgtaggccagacgattcgtggaatagttaaaatattcacagtggctgtcaccattgtggtcgtggctgttccagaaggacttccattagctgtcacacttacgcttgctttctcaatgcgcaaaatgatgaaagacaaggctctggtgaggaggctttctgcatgcgaaacgatgggttctgccacaacaatctgcagtgacaagactggcaccttgacgttaaatcagatgactgttgttgaggcatattttggtggaaagaagatggactcacctgataatgctcagatgttatctgctgatgtcacatcgctgattgttgaaggaattgcacagaacacttctggaagcatatttgagcccgagcagggtggtcaagaaccagaggtgactggatcacctacagaaaaggctatcctgtcttggggactaaagctgggtatgaaattcagtgaaacaagatcgaagtcatctattcttcatgtatttcctttcaactcagagaaaaagcgaggcggggttgcggtgtacctggctggctctgaggtccatatacactggaaaggagcagctgaaattattttggattcatgcacaagctgggttgacactggtggttcgaagcattcaatgactcctgaaaaagttgccgaattcaagaaattcattgaagatatggctgctgctagcctccgctgtgttgcgtttgcctatagaactcatgagatggatgatgttccagacgaagatcggagagaagagtggcaacttcctgaagataacctgattatgcttggaattgtgggaataaaggatccctgccgtccaggagttcgagattctgttcgtttatgtcaggcagctggcattaaggtgcgcatggttactggtgataatcttcaaactgcaagagccattgccctggagtgcgggatacttgatgatcccaatgtgtcagagcctgtcatcattgaagggaaaacattccgggcgctgtcagacttggaaagggaggatgctgctgaaaaaatctcagtgatggggaggtcttcaccaaatgataaacttttacttgttaaggcactgagggcaagaggtcacgttgttgctgttactggagatggcacaaatgatgccccagcactgcatgaggcagatattggtctatcaatggggattcagggaactgaagttgctaaggagagttctgatattattatcttggatgacaattttgcctcggtcgtgagggttgtcaggtggggccgatcggtgtatgcaaacatacaaaagtttatacagttccaactaacagtcaacgtcgcagctctgataatcaatgtagttgctgccgtcagttccggaaacgtgccattgaatgctgttcagttgttgtgggttaacctaattatggacactttgggtgcccttgcattggcgacagaaccacctacaaaccatcttatggagagacccccagtagggagaagggagccattggtaacaaatatcatgtggagaaacttgattatcatggctacgtttcaagtttcagtcctccttagtctcaacttcaaggggataagcctcctgcagttgaaaaatgatgatccagcacatgcagataaagtgaaaaataccttcatattcaacacatttgttctctgccaggtgttcaacgaattcaattcacgtaaaccagatgagctgaatatattcaagggcatttcagggaaccatctttttattggcatcatagtaataacagttatactccaggcgcttatcgttgagttcctcggcaagtttgcctcaacagttaggctaagttggcagctgtggttggtatcgataggtcttgctttcttcagctggccactggcattcgtgggaaagcttattcctattcctaaacgtccattaggagaattctttgcgtgctgctgtaactgtaaggggagcaaacaaggccctgatgacgcaacctctaatggtaaggaagacaacaagcttgagccatgagatatcgcaaggtttggtggctggcaacgatggccttctgctgtttcttgccagggtttgacgtgttggatttgtaattgcccctgattgcgattgtatatatatatacacacacgggttgctcctaggatctgttatacgggcaacatcaatttcataatcatagagattttcctcttagtcttcatttaccgagttcattgcgaatatgattaaacttgtcttgtctgaatctgaatctataacgagagttgggctatggtacccttctggagctgaccatgagtaggatgtcctgagatcttggacatcctgtgatgaaagtctgggaagattttagggccggttttaggttggcttcaaagcttgagctgacctcaattgtctattaaggagagtagcatttacgagtctagtgatgaatttatttggtctataaactggttagaagacaatctgtaatttgtagtctcctgacatccaatagaattcaggagtggtgtaccgactctgcctctc

SEQ ID NO: 17741 - DNA, 3905 bp, Zea Mays
atggagtccttgtcgtcgggcggcgagctggcgcggcgccagagtagcggcggcggcagcagcggatggggtagcttcagtggcgacgccgacccgttcgatatccccgcgaagggtgcccctctcgagcggctcaggaagtggcggcaagcagcacttgtgctgaatgcatcaaggcgctttaggtacactcttgatttgaaaaaggaggaacaaaaggaggagatcaggagaaaaatccgtgcacaggcacatgttataagggccgcttttcgtttcaaagaggctggccgaatccatgtacagtccgaagaaacaaaagtaccatgtgctgatggtgcacttggcttcggaatcaaagaagaccagattacagcactgacaagggatcacaactactctggtctgcagcaatatggaggggtttctggtgtagcacatatgctaaaaaccgatacacagaaggggattagtggagatgactcagatttgctggcaaggaaaaatgcatttggatcaaacacatatcctcgtaagaaaggaagaagctttttggctttcgtatgggatgcttgtaaagacttgacgctaatcatcctcatggttgctgctgctgtttcactggccttgggcataacaacagagggcataaaagaaggctggtatgatggagcgagcattgcctttgctgttcttctagttgtatttgttacagctatcagtgactacaagcaatcactgcaattccaaaatcttaatgaagaaaaacagaacattcgtttggaggttgttagaggcggaaggcgaatcacggtatcaatatatgatttggttgtcggtgatgttgtccctctcaaaattggtgaccagatggtatccttatcagtggtcactccctttccatagatgaatcaagcatgactggagaaagtaaaattgtacacaaagatcagaaatcaccatttctaatgtcaggttgcaaagttgccgatggatatggaacaatgctggtaactgctgttggaattaacactgaatgggggttgctaatggcaagcatatctgaagattcgggtgaagagacaccacttcaggttcgtttgaatggtgtcgctacttttattggaatggttggactttctgttgcccttgcagttcttgttgtacttttggccaggtacttcactgggcatacttataatcctgatggatctgtgcaatatgtgaaagggaatatgggtgtaggccagacgattcgtggaatagttaaaatattcacagtggctgtcaccattgtggtcgtggctgttccagaaggacttccattagctgtcacacttacgcttgctttctcaatgcgcaaaatgatgaaagacaaggctctggtgaggaggctttctgcatgcgaaacgatgggttctgccacaacaatctgcagtgacaagactggcaccttgacgttaaatcagatgactgttgttgaggcatattttggtggaaagaagatggactcacctgataatgctcagatgttatctgctgatgtcacatcgctgattgttgaaggaattgcacagaacacttctggaagcatatttgagcccgagcagggtggtcaagaaccagaggtgactggatcacctacagaaaaggctatcctgtcttggggactaaagctgggtatgaaattcagtgaaacaagatcgaagtcatctattcttcatgtatttcctttcaactcagagaaaaagcgaggcggggttgcggtgtacctggctggctctgaggtccatatacactggaaaggagcagctgaaattattttggattcatgcacaagctgggttgacactggtggttcgaagcattcaatgactcctgaaaaagttgccgaattcaagaaattcattgaagatatggctgctgctagcctccgctgtgttgcgtttgcctatagaactcatgagatggatgatgttccagacgaagatcggagagaagagtggcaacttcctgaagataacctgattatgcttggaattgtgggaataaaggatccctgccgtccaggagttcgagattctgttcgtttatgtcaggcagctggcattaaggtgcgcatggttactggtgataatcttcaaactgcaagagccattgccctggagtgcgggatacttgatgatcccaatgtgtcagagcctgtcatcattgaagggaaaacattccgggcgctgtcagacttggaaagggaggatgctgctgaaaaaatctcagtgatggggaggtcttcaccaaatgataaacttttacttgttaaggcactgagggcaagaggtcacgttgttgctgttactggagatggcacaaatgatgccccagcactgcatgaggcagatattggtctatcaatggggattcagggaactgaagttgctaaggagagttctgatattattatcttggatgacaattttgcctcggtcgtgagggttgtcaggtggggccgatcggtgtatgcaaacatacaaaagtttatacagttccaactaacagtcaacgtcgcagctctgataatcaatgtagttgctgccgtcagttccggaaacgtgccattgaatgctgttcagttgttgtgggttaacctaattatggacactttgggtgcccttgcattggcgacagaaccacctacaaaccatcttatggagagacccccagtagggagaagggagccattggtaacaaatatcatgtggagaaacttgattatcatggctacgtttcaagtttcagtcctccttagtctcaacttcaaggggataagcctcctgcagttgaaaaatgatgatccagcacatgcagataaagtgaaaaataccttcatattcaacacatttgttctctgccaggttctgcgtttcagcttttatgcttataaaagaagtttctgccttttttttgtctattgtaactccggggctttatacaacaaatgcagtagtggcctgacatgtgcatttttgtcttgttaggtgttcaacgaattcaattcacgtaaaccagatgagctgaatatattcaagggcatttcagggaaccatctttttattggcatcatagtaataacagttatactccaggcgcttatcgttgagttcctcggcaagtttgcctcaacagttaggctaagttggcagctgtggttggtatcgataggtcttgctttcttcagctggccactggcattcgtgggaaagcttattcctattcctaaacgtccattaggagaattctttgcgtgctgctgtaactgtaaggggagcaaacaaggccctgatgacgcaacctctaatggtaaggaagacaacaagcttgagccatgagatatcgcaaggtttggtggctggcaacgatggccttctgctgtttcttgccagggtttgacgtgttggatttgtaattgcccctgattgcgattgtatatatatatacacacacgggttgctcctaggatctgttatacgggcaacatcaatttcataatcatagagattttcctcttagtcttcatttaccgagttcattgcgaatatgattaaacttgtcttgtctgaatctgaatctataacgagagttgggctatggtacccttctggagctgaccatgagtaggatgtcctgagatcttggacatcctgtgatgaaagtctgggaagattttagggccggttttaggttggcttcaaagcttgagctgacctcaattgtctattaaggagagtagcatttacgagtctagtgatgaatttatttggtctataaactggttagaagacaatctgtaatttgtagtctcctgacatccaatagaattcaggagtggtgtaccgactctgcctctc

SEQ ID NO: 17742 - DNA, 3940 bp, Zea Mays
cgaaacgcccctcgccggtaaccttctacactcttgctgtgcggcagccgtcccataaccggagttcggaggcggtgtcgtgggttcgcggcgcctgggttcagggttttggccggcgcctctctcgccagcgagcacgggtcgggatggagtccttgtcgtcgggcggcgagctggcgcggcgccagagtagcggcggcggcagcagcggatggggtagcttcagtggcgacgccgacccgttcgatatccccgcgaagggtgcccctctcgagcggctcaggaagtggcggcaagcagcacttgtgctgaatgcatcaaggcgctttaggtacactcttgatttgaaaaaggaggaacaaaaggaggagatcaggagaaaaatccgtgcacaggcacatgttataagggccgcttttcgtttcaaagaggctggccgaatccatgtacagtccgaagaaacaaaagtaccatgtgctgatggtgcacttggcttcggaatcaaagaagaccagattacagcactgacaagggatcacaactactctggtctgcagcaatatggaggggtttctggtgtagcacatatgctaaaaaccgatacacagaaggggattagtggagatgactcagatttgctggcaaggaaaaatgcatttggatcaaacacatatcctcgtaagaaaggaagaagctttttggctttcgtatgggatgcttgtaaagacttgacgctaatcatcctcatggttgctgctgctgtttcactggccttgggcataacaacagagggcataaaagaaggctggtatgatggagcgagcattgcctttgctgttcttctagttgtatttgttacagctatcagtgactacaagcaatcactgcaattccaaaatcttaatgaagaaaaacagaacattcgtttggaggttgttagaggcggaaggcgaatcacggtatcaatatatgatttggttgtcggtgatgttgtccctctcaaaattggtgaccaggtccccacagatggtatccttatcagtggtcactccctttccatagatgaatcaagcatgactggagaaagtaaaattgtacacaaagatcagaaatcaccatttctaatgtcaggttgcaaagttgccgatggatatggaacaatgctgtccaggtaactgctgttggaattaacactgaatgggggttgctaatggcaagcatatctgaagattcgggtgaagagacaccacttcaggttcgtttgaatggtgtcgctacttttattggaatggttggactttctgttgcccttgcagttcttgttgtacttttggccaggtacttcactgggcatacttataatcctgatggatctgtgcaatatgtgaaagggaatatgggtgtaggccagacgattcgtggaatagttaaaatattcacagtggctgtcaccattgtggtcgtggctgttccagaaggacttccattagctgtcacacttacgcttgctttctcaatgcgcaaaatgatgaaagacaaggctctggtgaggaggctttctgcatgcgaaacgatgggttctgccacaacaatctgcagtgacaagactggcaccttgacgttaaatcagatgactgttgttgaggcatattttggtggaaagaagatggactcacctgataatgctcagatgttatctgctgatgtcacatcgctgattgttgaaggaattgcacagaacacttctggaagcatatttgagcccgagggtggtcaagaaccagaggtgactggatcacctacagaaaaggctatcctgtcttggggactaaagctgggtatgaaattcagtgaaacaagatcgaagtcatctattcttcatgtatttcctttcaactcagagaaaaagcgaggcggggttgcggtgtacctggctggctctgaggtccatatacactggaaaggagcagctgaaattattttggattcatgcacaagctgggttgacactggtggttcgaagcattcaatgactcctgaaaaagttgccgaattcaagaaattcattgaagatatggctgctgctagcctccgctgtgttgcgtttgcctatagaactcatgagatggatgatgttccagacgaagatcggagagaagagtggcaacttcctgaagataacctgattatgcttggaattgtgggaataaaggatccctgccgtccaggagttcgagattctgttcgtttatgtcaggcagctggcattaaggtgcgcatggttactggtgataatcttcaaactgcaagagccattgccctggagtgcgggatacttgatgatcccaatgtgtcagagcctgtcatcattgaagggaaaacattccgggcgctgtcagacttggaaagggaggatgctgctgaaaaaatctcagtgatggggaggtcttcaccaaatgataaacttttacttgttaaggcactgagggcaagaggtcacgttgttgctgttactggagatggcacaaatgatgccccagcactgcatgaggcagatattggtctatcaatggggattcagggaactgaagttgctaaggagagttctgatattattatcttggatgacaattttgcctcggtcgtgagggttgtcaggtggggccgatcggtgtatgcaaacatacaaaagtttatacagttccaactaacagtcaacgtcgcagctctgataatcaatgtagttgctgccgtcagttccggaaacgtgccattgaatgctgttcagttgttgtgggttaacctaattatggacactttgggtgcccttgcattggcgacagaaccacctacaaaccatcttatggagagacccccagtagggagaagggagccattggtaacaaatatcatgtggagaaacttgattatcatggctacgtttcaagtttcagtcctccttagtctcaacttcaaggggataagcctcctgcagttgaaaaatgatgatccagcacatgcagataaagtgaaaaataccttcatattcaacacatttgttctctgccaggtgttcaacgaattcaattcacgtaaaccagatgagctgaatatattcaagggcatttcagggaaccatctttttattggcatcatagtaataacagttatactccaggcgcttatcgttgagttcctcggcaagtttgcctcaacagttaggctaagttggcagctgtggttggtatcgataggtcttgctttcttcagctggccactggcattcgtgggaaagcttattcctattcctaaacgtccattaggagaattctttgcgtgctgctgtaactgtaaggggagcaaacaaggccctgatgacgcaacctctaatggtaaggaagacaacaagcttgagccatgagatatcgcaaggtttggtggctggcaacgatggccttctgctgtttcttgccagggtttgacgtgttggatttgtaattgcccctgattgcgattgtatatatatatacacacacgggttgctcctaggatctgttatacgggcaacatcaatttcataatcatagagattttcctcttagtcttcatttaccgagttcattgcgaatatgattaaacttgtcttgtctgaatctgaatctataacgagagttgggctatggtacccttctggagctgaccatgagtaggatgtcctgagatcttggacatcctgtgatgaaagtctgggaagattttagggccggttttaggttggcttcaaagcttgagctgacctcaattgtctattaaggagagtagcatttacgagtctagtgatgaatttatttggtctataaactggttagaagacaatctgtaatttgtagtctcctgacatccaatagaattcaggagtggtgtaccgactctgcctctc

SEQ ID NO: 17743 - DNA, 3985 bp, Zea Mays
aaataaaactgcagcccccctccagaatccaaacacaaaaggcacaaacgcgaaacgcccctcgccggtaaccttctacactcttgctgtgcggcagccgtcccataaccggagttcggaggcggtgtcgtgggttcgcggcgcctgggttcagggttttggccggcgcctctctcgccagcgagcacgggtcgggatggagtccttgtcgtcgggcggcgagctggcgcggcgccagagtagcggcggcggcagcagcggatggggtagcttcagtggcgacgccgacccgttcgatatccccgcgaagggtgcccctctcgagcggctcaggaagtggcggcaagcagcacttgtgctgaatgcatcaaggcgctttaggtacactcttgatttgaaaaaggaggaacaaaaggaggagatcaggagaaaaatccgtgcacaggcacatgttataagggccgcttttcgtttcaaagaggctggccgaatccatgtacagtccgaagaaacaaaagtaccatgtgctgatggtgcacttggcttcggaatcaaagaagaccagattacagcactgacaagggatcacaactactctggtctgcagcaatatggaggggtttctggtgtagcacatatgctaaaaaccgatacacagaaggggattagtggagatgactcagatttgctggcaaggaaaaatgcatttggatcaaacacatatcctcgtaagaaaggaagaagctttttggctttcgtatgggatgcttgtaaagacttgacgctaatcatcctcatggttgctgctgctgtttcactggccttgggcataacaacagagggcataaaagaaggctggtatgatggagcgagcattgcctttgctgttcttctagttgtatttgttacagctatcagtgactacaagcaatcactgcaattccaaaatcttaatgaagaaaaacagaacattcgtttggaggttgttagaggcggaaggcgaatcacggtatcaatatatgatttggttgtcggtgatgttgtccctctcaaaattggtgaccaggtccccacagatggtatccttatcagtggtcactccctttccatagatgaatcaagcatgactggagaaagtaaaattgtacacaaagatcagaaatcaccatttctaatgtcaggttgcaaagttgccgatggatatggaacaatgctggtaactgctgttggaattaacactgaatgggggttgctaatggcaagcatatctgaagattcgggtgaagagacaccacttcaggttcgtttgaatggtgtcgctacttttattggaatggttggactttctgttgcccttgcagttcttgttgtacttttggccaggtacttcactgggcatacttataatcctgatggatctgtgcaatatgtgaaagggaatatgggtgtaggccagacgattcgtggaatagttaaaatattcacagtggctgtcaccattgtggtcgtggctgttccagaaggacttccattagctgtcacacttacgcttgctttctcaatgcgcaaaatgatgaaagacaaggctctggtgaggaggctttctgcatgcgaaacgatgggttctgccacaacaatctgcagtgacaagactggcaccttgacgttaaatcagatgactgttgttgaggcatattttggtggaaagaagatggactcacctgataatgctcagatgttatctgctgatgtcacatcgctgattgttgaaggaattgcacagaacacttctggaagcatatttgagcccgagggtggtcaagaaccagaggtgactggatcacctacagaaaaggctatcctgtcttggggactaaagctgggtatgaaattcagtgaaacaagatcgaagtcatctattcttcatgtatttcctttcaactcagagaaaaagcgaggcggggttgcggtgtacctggctggctctgaggtccatatacactggaaaggagcagctgaaattattttggattcatgcacaagctgggttgacactggtggttcgaagcattcaatgactcctgaaaaagttgccgaattcaagaaattcattgaagatatggctgctgctagcctccgctgtgttgcgtttgcctatagaactcatgagatggatgatgttccagacgaagatcggagagaagagtggcaacttcctgaagataacctgattatgcttggaattgtgggaataaaggatccctgccgtccaggagttcgagattctgttcgtttatgtcaggcagctggcattaaggtgcgcatggttactggtgataatcttcaaactgcaagagccattgccctggagtgcgggatacttgatgatcccaatgtgtcagagcctgtcatcattgaagggaaaacattccgggcgctgtcagacttggaaagggaggatgctgctgaaaaaatctcagtgatggggaggtcttcaccaaatgataaacttttacttgttaaggcactgagggcaagaggtcacgttgttgctgttactggagatggcacaaatgatgccccagcactgcatgaggcagatattggtctatcaatggggattcagggaactgaagttgctaaggagagttctgatattattatcttggatgacaattttgcctcggtcgtgagggttgtcaggtggggccgatcggtgtatgcaaacatacaaaagtttatacagttccaactaacagtcaacgtcgcagctctgataatcaatgtagttgctgccgtcagttccggaaacgtgccattgaatgctgttcagttgttgtgggttaacctaattatggacactttgggtgcccttgcattggcgacagaaccacctacaaaccatcttatggagagacccccagtagggagaagggagccattggtaacaaatatcatgtggagaaacttgattatcatggctacgtttcaagtttcagtcctccttagtctcaacttcaaggggataagcctcctgcagttgaaaaatgatgatccagcacatgcagataaagtgaaaaataccttcatattcaacacatttgttctctgccaggtgttcaacgaattcaattcacgtaaaccagatgagctgaatatattcaagggcatttcagggaaccatctttttattggcatcatagtaataacagttatactccaggcgcttatcgttgagttcctcggcaagtttgcctcaacagttaggctaagttggcagctgtggttggtatcgataggtcttgctttcttcagctggccactggcattcgtgggaaagcttattcctattcctaaacgtccattaggagaattctttgcgtgctgctgtaactgtaaggggagcaaacaaggccctgatgacgcaacctctaatggtaaggaagacaacaagcttgagccatgagatatcgcaaggtttggtggctggcaacgatggccttctgctgtttcttgccagggtttgacgtgttggatttgtaattgcccctgattgcgattgtatatatatatacacacacgggttgctcctaggatctgttatacgggcaacatcaatttcataatcatagagattttcctcttagtcttcatttaccgagttcattgcgaatatgattaaacttgtcttgtctgaatctgaatctataacgagagttgggctatggtacccttctggagctgaccatgagtaggatgtcctgagatcttggacatcctgtgatgaaagtctgggaagattttagggccggttttaggttggcttcaaagcttgagctgacctcaattgtctattaaggagagtagcatttacgagtctagtgatgaatttatttggtctataaactggttagaagacaatctgtaatttgtagtctcctgacatccaatagaattcaggagtggtgtaccgactctgcctctc

SEQ ID NO: 17744 - DNA, 2334 bp, Zea Mays
cagaatccaaacacaaaaggcacaaacgcgaaacgcccctcgccggtaaccttctacactcttgctgtgcggcagccgtcccataaccggagttcggaggcggtgtcgtgggttcgcggcgcctgggttcagggttttggccggcgcctctctcgccagcgagcacgggtcgggatggagtccttgtcgtcgggcggcgagctggcgcggcgccagagtagcggcggcggcagcagcggatggggtagcttcagtggcgacgccgacccgttcgatatccccgcgaagggtgcccctctcgagcggctcaggaagtggcggcaagcagcacttgtgctgaatgcatcaaggcgctttaggtacactcttgatttgaaaaaggaggaacaaaaggaggagatcaggagaaaaatccgtgcacaggcacatgttataagggccgcttttcgtttcaaagaggctggccgaatccatgtacagtccgaagaaacaaaagtaccatgtgctgatggtgcacttggcttcggaatcaaagaagaccagattacagcactgacaagggatcacaactactctggtctgcagcaatatggaggggtttctggtgtagcacatatgctaaaaaccgatacacagaaggggattagtggagatgactcagatttgctggcaaggaaaaatgcatttggatcaaacacatatcctcgtaagaaaggaagaagctttttggctttcgtatgggatgcttgtaaagacttgacgctaatcatcctcatggttgctgctgctgtttcactggccttgggcataacaacagagggcataaaagaaggctggtatgatggagcgagcattgcctttgctgttcttctagttgtatttgttacagctatcagtgactacaagcaatcactgcaattccaaaatcttaatgaagaaaaacagaacattcgtttggaggttgttagaggcggaaggcgaatcacggtatcaatatatgatttggttgtcggtgatgttgtccctctcaaaattggtgaccaggtccccacagatggtatccttatcagtggtcactccctttccatagatgaatcaagcatgactggagaaagtaaaattgtacacaaagatcagaaatcaccatttctaatgtcaggttgcaaagttgccgatggatatggaacaatgctggctcctgctgagccgctgcagcttcatgaacatatgctcaacggcacagctagattgcactggagcctcccaactttgcttaactgcatcaaataaaccaggaaccttcatccagaagctctcaaaatggaatctgcgcttacccttgttggccgcattcaaaccaagaaggagcggacaatgatcagaaaccccggctgccgtactttgcaagactgcatcaggaaaaatgccattccagccatcacaacagaaggcacggtccaacctcaccagagtaggagaccgtctttcattggaccaagtatatttccgacccaacaacggaatttccaatagatcactgtcatccaaaaaacgtcggaatctccccatcataggcctatccagattggcattattcttgtcagcggcttggtaaattaaattaaaaccacctgccacaagccagggcccattgcaaagagccctaatatttctaagctcctgcaagaacaacattttttcatcatcaccttgaggaccatagactccagttagccaccaattacgaccttcctgttcagcgaaaagaacaaaaactgagaaattatcaacccttgaaccgacggcctgacaagaacccccttccaagcaaccagaactccacctctagtaccaacagcaggtaaagcaacgaagttgtcatatacagtcccaaaaactgaaagtagcacctgctgggtcaaatttgcgaccttcgtctcttgcagacaaacgatatcaacattactagagaggatgacatccccgacactctgacagcattatggcgatcttttttattaaggccacacacgttccaaataagaatagcagagggattcatgaggacacaagaagtagatcgaccaatttcgaaaaaaacagaccttacaaaattgtaaggacctccacagtcctcacctgctctccatctccaacctcccagccaaagatggcagccatagcacacacatgagaatcagaaggcgaaggcttgaacaacttacagtatttatcttgagcactaggagagataatctccttctcttcatagccgaggtggcgcatcacccttttctgagcagcagagagcaccagccctggagaacaaggcac

SEQ ID NO: 17745 - DNA, 1183 bp, Zea Mays
cgcgccttggcctctgcctctatatacatacggccaaccgggcgccggccaccggccaccaccagaatcccagttccaccgtatctatcactatcagtcgacgccgacgctcctccatcctctgccagtaccaggtcgcctttttttttgcagttcttcctcgctctgctccaaggccggcgcagcgcaggagatcgaaggggaaggatgatggcggcgatgggcggcgcggtgcgggtgctgtgcggcgcggagaaggagcgggtggtgggcacgcgcaaggcgcccggggcgtgcccgcgctgcggcggggccgtggtggccgtcgacgtggagagcgagcgccgcttcctcggcctgccgctgtgcctccagagcaagcgcaagtactcctgcacccgctgcctccgccggctcgtcaccctctacagctgagagctcaagaacgagctacactacgctacacatgcacccctcgatctcttcttgccaagcgcccgccggcccgcccgtcgccgatgacaaaagctccggatcgtcgatttcacaataacgaccgtcaacgagccggagccgcgcgcgatggccagtgcctctctgcctctcgtcgtatggcgaccggcaccggcagtcagcagaggcggcgaacatgcgcgcgcgatagagggaagagcccgctagctagctcgccgttatgctgcgtccatctatcaccatctttgcttggaagtactagtaaattactagtgtactgtagtaaagagagagtgcaacttctcctcaccggccggagcgacgacttccgcctgctgctcactgtggagtgtggaccgatccgggactcctcagttgagaacttgagatgactggcgcaatggccatggactctggcgatttagcctccatgcatgctcatagctgacacgatctatgggcccggccggttggtatagttggtaccaactcagataggtcgataccgactgtcatgtatcgtcttttgattggtagtacatgatattttgatatccaaaaaactaaaagaatatgtttatgaactatgtatccctttagttttagatattatattttttatgtttataaatatgtcgattttatttatggtttgtaaactatgtaatgtgtatttatatttatgaactaaataattttttacttaatt

SEQ ID NO: 17746 - DNA, 2264 bp, Zea Mays
cctcctgccgattactgcggccgaaacagaagcacacaaagacattcgacgcggggacgacagagcgcacgcgcgaaccgccgccggaccacggcgacgagctcggatcccggcgatctagtcgccggaggtggtcccgatggctcggcggtcgtcttcctcgtcgtcgggggcctggcggtacctgaacccggcgtactacctcaagcggcccaagcgcctcgcgctcctcttcttcatcttcgtcgcggccaccttcgccttctgggaccgccagtcgctcgtcagcgagtacgagtctgagatttctcgattagaagatgatataaatcggttgcatgaccagctaagaagggctggagttcatctggatgaaaatccagtaataagcaacaagaattccagaaaaaatcctgtagaaattgatcatgtcaataatgaaaggcgggaaaaagttaaagaggcaatgctccatgcttggaattcttatgtgaagtacgcctggggaatggatgagcttcagccacaatcgaaggatggcatcaatagttttggtggtcttggagcaacccttgttgactcacttgatacactgtatataatgggcctgaaagatgaatttcagaaagctagagactgggtggcagagtcattagactttgacaaggattatgatgcgagtgtttttgaaacgaccataaggttgcattataagggttgttggaggtttgcttagtgcatatgatctatctggtgataaagtatttcttgataaggctaaagatattacagatcgtctattacctgcttgggatacaacatctggcatcccctataatagaataaacctagctcatggacgagcccataatcctggatggaccaacggtgacagtatccttgcagattctggtacggagcaacttgaattcatagctctgtcacagaggactggggatcccaaataccagcagaagagaacgtcatcacacagcttcagaagatatatcccagtgatggtttgcttcctatttacataaatcctcattctgggacagcatcgtactccactatcacgtttggtgctatgggagatagcttctatgaatatttgctcaaggtctggatccaggggaataaaactgagcatgtaaaacactacagacaaatgtgggagacatcaatggaaggtctattaagtttaacaaagaaaactacaccatctaattactactacatttgtgaaaagaatggtggctcattgtctgacaagatggatgaacttgcttgctttgcccctggtatgctggcattaggagcctctggttatgggccagaaaaatcagagcaaattatgaatatggcaaaagagcttgctaggacctgctataatttctaccaaaccactcccacgaagttggctggcgaaaattattttttccatgctggacaggacatgagtgtgggcacatcgtggaacatcttgagaccggagactgttgaatcacttatgtacctatggcgcttgacggggaatacaacataccaagattgggggtgggacatattccaggcatttgagaagaactcccgtgtagaatctggatatgtgggactgagagatgtgaacactggtgaaaaggataacatgatgcagagcttcttcctggcagagacgctcaagtacctctacctacttttctcccctccatcagtcatatcctttgacgagtgggttttcaatactgaagctcacccattgagaattgctccagtaaattataacaaaagcattggaacaccggtccgtccattcgggagaaaacagggaaagcctgagtaaccttggatatagagcagtggattttttttttaatccgacgtctgactctggcctccctgatgaagatgtgttctgacacgagggaactttctgcctgaagcagcaagggttagaaatcacggcaatagattgtttagagagaaaaatcataggtagatcatgatgctatatgcgaggcagtgacctccatgggtggtatggtcggagctcaagagcccccatagaagcttttatctttggacttgcttacgccccctgatgtgcgttgttgatgtgtagcatacatctaactcactgttcatatgttgttgctttcctgggacctctgcggagctgtattgtcattatttggcccatagttattactttttttcagatatgatttatatatatataagttgtttatggctttcgttaagta

SEQ ID NO: 17747 - DNA, 2268 bp, Zea Mays
cctcctgccgattactgcggccgaaacagaagcacacaaagacattcgacgcggggacgacagagcgcacgcgcgaaccgccgccggaccacggcgacgagctcggatcccggcgatctagtcgccggaggtggtcccgatggctcggcggtcgtcttcctcgtcgtcgggggcctggcggtacctgaacccggcgtactacctcaagcggcccaagcgcctcgcgctcctcttcttcatcttcgtcgcggccaccttcgccttctgggaccgccagtcgctcgtcagcgagtacgagtctgagatttctcgattagaagatgatataaatcggttgcatgaccagctaagaagggctggagttcatctggatgaaaatccagtaataagcaacaagaattccagaaaaaatcctgtagaaattgatcatgtcaataatgaaaggcgggaaaaagttaaagaggcaatgctccatgcttggaattcttatgtgaagtacgcctggggaatggatgagcttcagccacaatcgaaggatggcatcaatagttttggtggtcttggagcaacccttgttgactcacttgatacactgtatataatgggcctgaaagatgaatttcagaaagctagagactgggtggcagagtcattagactttgacaaggattatgatgcgagtgtttttgaaacgaccataaggttgcattataagggttgttggaggtttgcttagtgcatatgatctatctggtgataaagtatttcttgataaggctaaagatattacagatcgtctattacctgcttgggatacaacatctggcatcccctataatagaataaacctagctcatggacgagcccataatcctggatggaccaacggtgacagtatccttgcagattctggtacggagcaacttgaattcatagctctgtcacagaggactggggatcccaaataccagcagaaggcagagaacgtcatcacacagcttcagaagatatatcccagtgatggtttgcttcctatttacataaatcctcattctgggacagcatcgtactccactatcacgtttggtgctatgggagatagcttctatgaatatttgctcaaggtctggatccaggggaataaaactgagcatgtaaaacactacagacaaatgtgggagacatcaatggaaggtctattaagtttaacaaagaaaactacaccatctaattactactacatttgtgaaaagaatggtggctcattgtctgacaagatggatgaacttgcttgctttgcccctggtatgctggcattaggagcctctggttatgggccagaaaaatcagagcaaattatgaatatggcaaaagagcttgctaggacctgctataatttctaccaaaccactcccacgaagttggctggcgaaaattattttttccatgctggacaggacatgagtgtgggcacatcgtggaacatcttgagaccggagactgttgaatcacttatgtacctatggcgcttgacggggaatacaacataccaagattgggggtgggacatattccaggcatttgagaagaactcccgtgtagaatctggatatgtgggactgagagatgtgaacactggtgaaaaggataacatgatgcagagcttcttcctggcagagacgctcaagtacctctacctacttttctcccctccatcagtcatatcctttgacgagtgggttttcaatactgaagctcacccattgagaattgctccagtaaattataacaaaagcattggaacaccggtccgtccattcgggagaaaacagggaaagcctgagtaaccttggatatagagcagtggattttttttttaatccgacgtctgactctggcctccctgatgaagatgtgttctgacacgagggaactttctgcctgaagcagcaagggttagaaatcacggcaatagattgtttagagagaaaaatcataggtagatcatgatgctatatgcgaggcagtgacctccatgggtggtatggtcggagctcaagagcccccatagaagcttttatctttggacttgcttacgccccctgatgtgcgttgttgatgtgtagcatacatctaactcactgttcatatgttgttgctttcctgggacctctgcggagctgtattgtcattatttggcccatagttattactttttttcagatatgatttatatatatataagttgtttatggctttcgttaagta

SEQ ID NO: 17748 - DNA, 3639 bp, Zea Mays
accacccccactccaccctctctctccattgtctccattattttctctctcctccgtctccaccccctttattctctctctcccagctcctcctccctgtctgctcccctccacatccactgctgtggcgctctccctctcccgtctccccttaccttctccacctcccccattccgccaccgcacaagccgacctccctcaccaagaggagaaaagaaagggagagcgaaggaggcaaaccaggtgggacagcaacgcgacgtgcttgctattctctctaggagctcatgcaaggtgtaagtcttactgcaagaagggcagctgtgcatgttaagacccatacatagcttctcttgattacacagcacggggggtgaaaacttgagatacagttgatctcctggttcagagtatgggttcaaggtttgcatcgcatcagctgagcaatggcctgtatgtttctggtcgacctgaacaacctaaggagaaggccccaaccatttgttccactgcgatgccatatactgggggtgacatcaagaaatcaggagagctggggaagatgtttgatctccatgttgagaagtcaagaaaatctggtcctctaggaaatgctccttcaaggaatacttcatttggaggtgctgcttccaactctggacccgtatccaatgctggcggtcggtccaattactctggttctctttcatcttcagttcctggtgctggcggatcagccagagcaaaatcaaactctggaccgctcaataagcatggagagccaacaaagaggtcatctggtccccagtctggaggagtgaccccaatggcacgccagaattctggcccccttcctcctgtgcttccgacaactgggcttatcacatctgggcctatctcttcagggccacttaattcgtctggtgttccaaggaaagtatctgggccacttgattctgctgcgtcgatgaaaatgcgggctacttcctttgctcacaatcaagctgttactaatctcaacactgaagatggttactcaattcagggaagctttccgaagccaatactctgggctgtgattctgctctttgtgatgggtttcatagcaggtggtttcattctgggtgctgttcacaatgcaattttgctgatagttgttgtggtgatatttggttttgttgctgcacttcttatctggaatgcttgctggggtagtagaggtgcagttgggtttgttaatcgctatcctgatgctgatctcagaactgctaaagatggacaatatgtaaaggttacaggggttgttacctgtggaaatttcccccttgaatcctcgttccaaagggtcccgagatgtgtatacacttctactagcttgtatgagtacagaggttgggattccaaagctgccaatacagagcatcggcgttttacctggggcttacgctcaatggagcgccatgcggttgatttctatatctcagattttcagtccgggcttcgagcattggtgaaaacaggatatggtgcacgtgtgaccccgtatgtcgatgaatctgttataattgacatcaatccagacaacaaggatatgtcccctgattttttgagatggctacgggagagaaacctttcaagcgatgatcgtacaatgcgcctaaaagaaggtctgagatttctcgattagaagatgatataaatcggttgcatgaccagctaagaagggctggagttcatctggatgaaaatccagtaataagcaacaagaattccagaaaaaatcctgtagaaattgatcatgtcaataatgaaaggcgggaaaaagttaaagaggcaatgctccatgcttggaattcttatgtgaagtacgcctggggaatggatgagcttcagccacaatcgaaggatggcatcaatagttttggtggtcttggagcaacccttgttgactcacttgatacactgtatataatgggcctgaaagatgaatttcagaaagctagagactgggtggcagagtcattagactttgacaaggattatgatgcgagtgtttttgaaacgaccataaggttgcattataagggttgttggaggtttgcttagtgcatatgatctatctggtgataaagtatttcttgataaggctaaagatattacagatcgtctattacctgcttgggatacaacatctggcatcccctataatagaataaacctagctcatggacgagcccataatcctggatggaccaacggtgacagtatccttgcagattctggtacggagcaacttgaattcatagctctgtcacagaggactggggatcccaaataccagcagaaggcagagaacgtcatcacacagcttcagaagatatatcccagtgatggtttgcttcctatttacataaatcctcattctgggacagcatcgtactccactatcacgtttggtgctatgggagatagcttctatgaatatttgctcaaggtctggatccaggggaataaaactgagcatgtaaaacactacagacaaatgtgggagacatcaatggaaggtctattaagtttaacaaagaaaactacaccatctaattactactacatttgtgaaaagaatggtggctcattgtctgacaagatggatgaacttgcttgctttgcccctggtatgctggcattaggagcctctggttatgggccagaaaaatcagagcaaattatgaatatggcaaaagagcttgctaggacctgctataatttctaccaaaccactcccacgaagttggctggcgaaaattattttttccatgctggacaggacatgagtgtgggcacatcgtggaacatcttgagaccggagactgttgaatcacttatgtacctatggcgcttgacggggaatacaacataccaagattgggggtgggacatattccaggcatttgagaagaactcccgtgtagaatctggatatgtgggactgagagatgtgaacactggtgaaaaggataacatgatgcagagcttcttcctggcagagacgctcaagtacctctacctacttttctcccctccatcagtcatatcctttgacgagtgggttttcaatactgaagctcacccattgagaattgctccagtaaattataacaaaagcattggaacaccggtccgtccattcgggagaaaacagggaaagcctgagtaaccttggatatagagcagtggattttttttttaatccgacgtctgactctggcctccctgatgaagatgtgttctgacacgagggaactttctgcctgaagcagcaagggttagaaatcacggcaatagattgtttagagagaaaaatcataggtagatcatgatgctatatgcgaggcagtgacctccatgggtggtatggtcggagctcaagagcccccatagaagcttttatctttggacttgcttacgccccctgatgtgcgttgttgatgtgtagcatacatctaactcactgttcatatgttgttgctttcctgggacctctgcggagctgtattgtcattatttggcccatagttattactttttttcagatatgatttatatatatataagttgtttatggctttcgttaagta

SEQ ID NO: 17749 - DNA, 1739 bp, Zea Mays
cctcctgccgattactgcggccgaaacagaagcacacaaagacattcgacgcggggacgacagagcgcacgcgcgaaccgccgccggaccacggcgacgagctcggatcccggcgatctagtcgccggaggtggtcccgatggctcggcggtcgtcttcctcgtcgtcgggggcctggcggtacctgaacccggcgtactacctcaagcggcccaagcgcctcgcgctcctcttcttcatcttcgtcgcggccaccttcgccttctgggaccgccagtcgctcgtcagcgagtacgagtctgagatttctcgattagaagatgatataaatcggttgcatgaccagctaagaagggctggagttcatctggatgaaaatccagtaataagcaacaagaattccagaaaaaatcctgtagaaattgatcatgtcaataatgaaaggcgggaaaaagttaaagaggcaatgctccatgcttggaattcttatgtgaagtacgcctggggaatggatgagcttcagccacaatcgaaggatggcatcaatagttttggtggtcttggagcaacccttgttgactcacttgatacactgtatataatgggcctgaaagatgaatttcagaaagctagagactgggtggcagagtcattagactttgacaaggattatgatgcgagtgtttttgaaacgaccataagggttgttggaggtttgcttagtgcatatgatctatctggtgataaagtatttcttgataaggctaaagatattacagatcgtctattacctgcttgggatacaacatctggcatcccctataatagaataaacctagctcatggacgagcccataatcctggatggaccaacggtgacagtatccttgcagattctggtacggagcaacttgaattcatagctctgtcacagaggactggggatcccaaataccagcagaagagaacgtcatcacacagcttcagaagatatatcccagtgatggtttgcttcctatttacataaatcctcattctgggacagcatcgtactccactatcacgtttggtgctatgggagatagcttctatgaatatttgctcaaggtctggatccaggggaataaaactgagcatgtaaaacactacagacaaatgtgggagacatcaatggaaggtctattaagtttaacaaagaaaactacaccatctaattactactacatttgtgaaaagaatggtggctcattgtctgacaagatggatgaacttgcttgctttgcccctggtatgctggcattaggagcctctggttatgggccagaaaaatcagagcaaattatgaatatggcaaaagaggtaaatccttgtggcaatcctcctgtttatcgaagatttcaagtctttgcatgacacacttgatgggcaagtggtacccaagaaagacacttttcgttacttaggatcaatgcttcaaaaggagggagacatcgatgaggatgtcagtcatagaattaaagccggatggttgaagtggcgacaagctgcgggtgtcttatgcgaccaccgggtgccacgcaaactaaaaggcaaattctacaggacagcaatccggccggctatgttgtatggagcagaatgttggcccactaaaagacgacatgtccaacaactaagtgtggcagagatgcgtatgttgcgctggatatgtggccacacaaggagagatcgagtccgga

SEQ ID NO: 17750 - DNA, 1735 bp, Zea Mays
aaaaccccagcatgcgtcagctggcgaattatgacttgagctcatgcaaggtgtaagtcttactgcaagaagggcagctgtgcatgttaagacccatacatagcttctcttgattacacagcacggggggtgaaaacttgagatacagttgatctcctggttcagagtatgggttcaaggtttgcatcgcatcagctgagcaatggcctgtatgtttctggtcgacctgaacaacctaaggagaaggccccaaccatttgttccactgcgatgccatatactgggggtgacatcaagaaatcaggagagctggggaagatgtttgatctccatgttgagaagtcaagaaaatctggtcctctaggaaatgctccttcaaggaatacttcatttggaggtgctgcttccaactctggacccgtatccaatgctggcggtcggtccaattactctggttctctttcatcttcagttcctggtgctggcggatcagccagagcaaaatcaaactctggaccgctcaataagcatggagagccaacaaagaggtcatctggtccccagtctggaggagtgaccccaatggcacgccagaattctggcccccttcctcctgtgcttccgacaactgggcttatcacatctgggcctatctcttcagggccacttaattcgtctggtgttccaaggaaagtatctgggccacttgattctgctgcgtcgatgaaaatgcgggctacttcctttgctcacaatcaagctgttactaatctcaacactgaagatggttactcaattcagggaagctttccgaagccaatactctgggctgtgattctgctctttgtgatgggtttcatagcaggtggtttcattctgggtgctgttcacaatgcaattttgctgatagttgttgtggtgatatttggttttgttgctgcacttcttatctggaatgcttgctggggtagtagaggtgcagttgggtttgttaatcgctatcctgatgctgatctcagaactgctaaagatggacaatatgtaaaggttacaggggttgttacctgtggaaatttcccccttgaatcctcgttccaaagggtcccgagatgtgtatacacttctactagcttgtatgagtacagaggttgggattccaaagctgccaatacagagcatcggcgttttacctggggcttacgctcaatggagattttcagtccgggcttcgagcattggtgaaaacaggatatggtgcacgtgtgaccccgtatgtcgatgaatctgttataattgacatcaatccagacaacaaggatatgtcccctgattttttgagatggctacgggagagaaacctttcatgcgaagatacttcaaatattgatgtgataccagtttaactggcggtggaagggtagttgccaaaaaaagtgcctgttaaatatttgagtctattgtttcatggaatgctagttgagaaaaatgtgcaaatgttgggtgggtgtgattatggtaggctgagggtggttggttaagctggcctttggatgtatagttttttcttcttcttttaattgtgttttgttgtttctttttaattttcagttctgagatctgaaacttgtgtaaccacatgccttttaatctaaatctgcgtggcatttagattgacttggctttgaaattagaaggacgctctcttttgtgctttgtgttaaaaaaaaactcggcc

SEQ ID NO: 17751 - DNA, 1734 bp, Zea Mays
aaacctttgagctcatgcaaggtgtaagtcttactgcaagaagggcagctgtgcatgttaagacccatacatagcttctcttgattacacagcacggggggtgaaaacttgagatacagttgatctcctggttcagagtatgggttcaaggtttgcatcgcatcagctgagcaatggcctgtatgtttctggtcgacctgaacaacctaaggagaaggccccaaccatttgttccactgcgatgccatatactgggggtgacatcaagaaatcaggagagctggggaagatgtttgatctccatgttgagaagtcaagaaaatctggtcctctaggaaatgctccttcaaggaatacttcatttggaggtgctgcttccaactctggacccgtatccaatgctggcggtcggtccaattactctggttctctttcatcttcagttcctggtgctggcggatcagccagagcaaaatcaaactctggaccgctcaataagcatggagagccaacaaagaggtcatctggtccccagtctggaggagtgaccccaatggcacgccagaattctggcccccttcctcctgtgcttccgacaactgggcttatcacatctgggcctatctcttcagggccacttaattcgtctggtgttccaaggaaagtatctgggccacttgattctgctgcgtcgatgaaaatgcgggctacttcctttgctcacaatcaagctgttactaatctcaacactgaagatggttactcaattcagggaagctttccgaagccaatactctgggctgtgattctgctctttgtgatgggtttcatagcaggtggtttcattctgggtgctgttcacaatgcaattttgctgatagttgttgtggtgatatttggttttgttgctgcacttcttatctggaatgcttgctggggtagtagaggtgcagttgggtttgttaatcgctatcctgatgctgatctcagaactgctaaagatggacaatatgtaaaggttacaggggttgttacctgtggaaatttcccccttgaatcctcgttccaaagggtcccgagatgtgtatacacttctactagcttgtatgagtacagaggttgggattccaaagctgccaatacagagcatcggcgttttacctggggcttacgctcaatggagcgccatgcggttgatttctatatctcagattttcagtccgggcttcgagcattggtgaaaacaggatatggtgcacgtgtgaccccgtatgtcgatgaatctgttataattgacatcaatccagacaacaaggatatgtcccctgattttttgagatggctacgggagagaaacctttcatgcgaagatacttcaaatattgatgtgataccagtttaactggcggtggaagggtagttgccaaaaaaagtgcctgttaaatatttgagtctattgtttcatggaatgctagttgagaaaaatgtgcaaatgttgggtgggtgtgattatggtaggctgagggtggttggttaagctggcctttggatgtatagttttttcttcttcttttaattgtgttttgttgtttctttttaattttcagttctgagatctgaaacttgtgtaaccacatgccttttaatctaaatctgcgtggcatttagattgacttggctttgaaattagaaggacgctctcttttgtgctttgtgttaaaaaaaaactcggcc

SEQ ID NO: 17752 - DNA, 1690 bp, Zea Mays
accacccccactccaccctctctctccattgtctccattattttctctctcctccgtctccaccccctttattctctctctcccagctcctcctccctgtctgctcccctccacatccactgctgtggcgctctccctctcccgtctccccttaccttctccacctcccccattccgccaccgcacaagccgacctccctcaccaagaggagaaaagaaagggagagcgaaggaggcaaaccaggtgggacagcaacgcgacgtgcttgctattctctctaggagctcatgcaaggtgtaagtcttactgcaagaagggcagctgtgcatgttaagacccatacatagcttctcttgattacacagcacggggggtgaaaacttgagatacagttgatctcctggttcagagtatgggttcaaggtttgcatcgcatcagctgagcaatggcctgtatgtttctggtcgacctgaacaacctaaggagaaggccccaaccatttgttccactgcgatgccatatactgggggtgacatcaagaaatcaggagagctggggaagatgtttgatctccatgttgagaagtcaagaaaatctggtcctctaggaaatgctccttcaaggaatacttcatttggaggtgctgcttccaactctggacccgtatccaatgctggcggtcggtccaattactctggttctctttcatcttcagttcctggtgctggcggatcagccagagcaaaatcaaactctggaccgctcaataagcatggagagccaacaaagaggtcatctggtccccagtctggaggagtgaccccaatggcacgccagaattctggcccccttcctcctgtgcttccgacaactgggcttatcacatctgggcctatctcttcagggccacttaattcgtctggtgttccaaggaaagtatctgggccacttgattctgctgcgtcgatgaaaatgcgggctacttcctttgctcacaatcaagctgttactaatctcaacactgaagatggttactcaattcagggaagctttccgaagccaatactctgggctgtgattctgctctttgtgatgggtttcatagcaggtggtttcattctgggtgctgttcacaatgcaattttgctgatagttgttgtggtgatatttggttttgttgctgcacttcttatctggaatgcttgctggggtagtagaggtgcagttgggtttgttaatcgctatcctgatgctgatctcagaactgctaaagatggacaatatgtaaaggttacaggggttgttacctgtggaaatttcccccttgaatcctcgttccaaagggtcccgagatgtgtatacacttctactagcttgtatgagtacagaggttgggattccaaagctgccaatacagagcatcggcgttttacctggggcttacgctcaatggagcgccatgcggttgatttctatatctcagattttcagtccgggcttcgagcattggtgaaaacaggatatggtgcacgtgtgaccccgtatgtcgatgaatctgttataattgacatcaatccagacaacaaggatatgtcccctgattttttgagatggctacgggagagaaacctttcaagcgatgatcgtacaatgcgcctaaaagaaggatataggagtaaaaaaaaaat

SEQ ID NO: 17753 - DNA, 1033 bp, Zea Mays
gtatcgagccttgtatctggttgtctgtaaaccatatatacatgttttggttggaaaaaagaagaattatgttcttttgtttgtggagtgtagacttcttagctggataaaacaaaaaccttcattctttcagtttggctatcaggattcaggagtcagacctttggttctgcactgagagccatgttttttcttattctagaatttgattggttgacatttcgcttctcttgctctgctgttgtcattgtctgttacttgttagtttaaatagttagtgttgttcaaaggaaaaattctgcgtccagtggagaaatcaaggaaagatcctactgaaactgacaatgataaaagttaatcctatgctgattcactcctggcgtaagttgattcactttcatcaagggagcattttacgcccgctttattttgtatcctagggctgcatttcaagccaagccattgctaccaagcttaaatctgtcccaaaaccattggtcctcagttcagtatatgcctgcagtgtcaagcattggagatcttttatctaacgttctgaagtggcttcctgttataaaagggacattctgaaacggctcctactgaagaggcagctggggacagtgaaggtcttctgatgggttgtagttataacttatagtaatagacagctagggagcccctgcaacaatggatcccctcaagctgtcaagcatcttcggatggtgtgctcacagctggtaaaatgacactggttcaatcttatgtatttgcagaacccggtgcgctagcacctggacatggtgggtgtatggtccacggaacccagccgtggcgcataatgtaatagagtttgtagtttgtactttgtaccatattttccctcttgaataaaggcatgtgttacgctgaacacctgtggcacatgacaactcttcttggtgtgtaaccaccgtttggcttggggccttccgagttccaactgagacgtgtgctgtggccgccgtgcctatatcaccgatcttgaagtgtt

SEQ ID NO: 17754 - DNA, 751 bp, Zea Mays
aactttatccgttccaagtatctcccctcttgcgcctcctctcgactcttccgtttagtgcccaccgaaatctttctaccacccacgttccggcatccatggctcgtctgttcgcggcgcgagcccttacgctggcccgcccctcggcggcgccatccgccctccgcttctgcccctcccgcgcgctgtcggacaaggtggacttcatcgagatcgacctctccgaggagtccccttcctcttcatccggaggaggaggcattgagcttcactaccgtgcgggggtggccatccgcggcgtactttgtggcaggctcctactgaagaggcagctggggacagtgaaggtcttctgatgggttgtagttataacttatagtaatagacagctagggagcccctgcaacaatggatcccctcaagctgtcaagcatcttcggatggtgtgctcacagctggtaaaatgacactggttcaatcttatgtatttgcagaacccggtgcgctagcacctggacatggtgggtgtatggtccacggaacccagccgtggcgcataatgtaatagagtttgtagtttgtactttgtaccatattttccctcttgaataaaggcatgtgttacgctgaacacctgtggcacatgacaactcttcttggtgtgtaaccaccgtttggcttggggccttccgagttccaactgagacgtgtgctgtggccgccgtgcctatatcaccgatcttgaagtgtt

SEQ ID NO: 17755 - DNA, 171 bp, Zea Mays
atgcacagagcacaggcaatacagagagcagtatatggaagctaccattgggctgctcattgccatcattctgggcaggcagaggagcacggttctcgacccgagcaggagcctgtggtggatgagcagctgcacctcctgcccgctgaagccgtcttagaaaaggtgtaa

SEQ ID NO: 17756 - DNA, 1674 bp, Zea Mays
cgcctctctttccgttttccttcctcgtcgcggtcgtgggtcacttgccgccgcgccggcaacgtccccttcccatccccagccacgcataaatcaatcgatgcattggtccttggcacgacttgattcctgattccctctgctgttctccacccgctctctctctttcgcgtggcatttcttcctgccagcgacgaattggcgcgcgccgccgccgccgtctgcccaggcccttcgcccacccaccagacagacgtgtataagcgagaggaaattatctgccggccattttcactgacagctggtggagtccgagagacctaaatagatgaagctgcatcaagtttggcagttaggcgttaaggatatgaaggccgttccacttccacgtccgagatcagctccaaaaagacccagggaattgaccgatgaggagagggcctcgcgtgttgtttttaggcagatcctaacaacacctcctgttctatccaagaattcaaaaatagctttcatgttcttgactccggggacattgccatttgaaagattatgggaaaagttctttgagggccatgaaggaaggtataccatatatattcatgcctcaagggagaagcctgaacatgtcagtcccatatttgttggtcgagagatacacagtgaaaaggtaacttggggtaaaatttctatggttgatgctgagaggaggttgatggcaaatgctctacaagatattgacaatcagcattttgttttgctatctgatagctgtgtacctttgcacagttttgattatgtatatgactacctgatgggtgcaaatctcagttttattgactgcttttatgatcctggaccacatggaaattttagatattcacaaaatatgttgcctgaggtcacagagactgattttagaaagggttcacagcctgggatggaagatggtcgcaactgctacgctgacgaacattatttgccaacagtattccgtatgatggacccagatggaattgctaattggtctgtaacccatgttgactggtctgaagggaagtggcatccaaaagcttaccgggcaaagcacgttaatttggagcttctgaagaatatagcatcaatcgacgtgagccaccatgtcactagtgatggcaagaaagtggtcacagagaacccctgcctatggaatggagcaaagaggccatgctacctgtttgcgaggaagttctaccctgaatccataaacaatctcttgaccttgttcgcgaattacacacttatttgagcttctaggtgacgcttagaggctacagggaatattttgttatagaaatccttgtacattggttaggaacataataggagattaattaacaggatagcagttggtgaggagaaggctttcggctttcgctgcagcaacacagtggcttcggatataccacaactggtcattgctactcctttagcctcgtgttgctttcatagtttcttctacccacatttttagctgcggcgttttaccatgtacatcaagctttgtttttacaaggaatggtcattcaataggaaaatctgagatcatggtcttgtatttgccctcaagttctcggttctgactgccaaagcacggttcaaagggatacatggaaaattttactttataggaaacaa

SEQ ID NO: 17757 - DNA, 2158 bp, Zea Mays
cgcctctctttccgttttccttcctcgtcgcggtcgtgggtcacttgccgccgcgccggcaacgtccccttcccatccccagccacgcataaatcaatcgatgcattggtccttggcacgacttgattcctgattccctctgctgttctccacccgctctctctctttcgcgtggcatttcttcctgccagcgacgaattggcgcgcgccgccgccgccgtctgcccaggcccttcgcccacccaccagacgtgtataagcgagaggaaattatctgccggccattttcactgacagctggtggagtccgagagtaatgagagctgtgaagtttaatggcatgtttggaagcaccagtttttaagaaactggtttatgaaaattgatgtggtttcaaacataccggtttatgtctcagtttataggaattatattttcagatttttaagaaaccggtttatgaaaattgatgtggttctaaatataccggtctatgtctacgtttatagaaattaaattttcagtttattaaaaaccaagaagctagtctcatttagctaaaaaataaaaactggtttcttaaaaaacaatgttgctttcaaacaggacctaaatagatgaagctgcatcaagtttggcagttaggcgttaaggatatgaaggccgttccacttccacgtccgagatcagctccaaaaagacgtgcgtggatccctgccgttgcagcttttatctccatcgcgctagtctgggcttatctgtatcctcccccgcattacacttcttctgtgagggattggcttcctgcggaaccagccagggaattgaccgatgaggagagggcctcgcgtgttgtttttaggcagatcctaacaacacctcctgttctatccaagaattcaaaaatagctttcatgttcttgactccggggacattgccatttgaaagattatgggaaaagttctttgagggccatgaaggaaggtataccatatatattcatgcctcaagggagaagcctgaacatgtcagtcccatatttgttggtcgagagatacacagtgaaaaggtaacttggggtaaaatttctatggttgatgctgagaggaggttgatggcaaatgctctacaagatattgacaatcagcattttgttttgctatctgatagctgtgtacctttgcacagttttgattatgtatatgactacctgatgggtgcaaatctcagttttattgactgcttttatgatcctggaccacatggaaattttagatattcacaaaatatgttgcctgaggtcacagagactgattttagaaagggttcacagtggttctcagtcaaacgccaacatgcgttgatgattattgcagatagtctttactatactaagttcaagcttcattgcaggcctgggatggaagatggtcgcaactgctacgctgacgaacattatttgccaacagtattccgtatgatggacccagatggaattgctaattggtctgtaacccatgttgactggtctgaagggaagtggcatccaaaagcttaccgggcaaagcacgttaatttggagcttctgaagaatatagcatcaatcgacgtgagccaccatgtcactagtgatggcaagaaagtggtcacagagaacccctgcctatggaatggagcaaagaggccatgctacctgtttgcgaggaagttctaccctgaatccataaacaatctcttgaccttgttcgcgaattacacacttatttgagcttctaggtgacgcttagaggctacagggaatattttgttatagaaatccttgtacattggttaggaacataataggagattaattaacaggatagcagttggtgaggagaaggctttcggctttcgctgcagcaacacagtggcttcggatataccacaactggtcattgctactcctttagcctcgtgttgctttcatagtttcttctacccacatttttagctgcggcgttttaccatgtacatcaagctttgtttttacaaggaatggtcattcaataggaaaatctgagatcatggtcttgtatttgccctcaagttctcggttctgactgccaaagcacggttcaaagggatacatggaaaattttactttataggaaacaa

SEQ ID NO: 17758 - DNA, 1720 bp, Zea Mays
cgcctctctttccgttttccttcctcgtcgcggtcgtgggtcacttgccgccgcgccggcaacgtccccttcccatccccagccacgcataaatcaatcgatgcattggtccttggcacgacttgattcctgattccctctgctgttctccacccgctctctctctttcgcgtggcatttcttcctgccagcgacgaattggcgcgcgccgccgccgccgtctgcccaggcccttcgcccacccaccaggacctaaatagatgaagctgcatcaagtttggcagttaggcgttaaggatatgaaggccgttccacttccacgtccgagatcagctccaaaaagacgtgcgtggatccctgccgttgcagcttttatctccatcgcgctagtctgggcttatctgtatcctcccccgcattacacttcttctgtgagggattggcttcctgcggaaccagccagggaattgaccgatgaggagagggcctcgcgtgttgtttttaggcagatcctaacaacacctcctgttctatccaagaattcaaaaatagctttcatgttcttgactccggggacattgccatttgaaagattatgggaaaagttctttgagggccatgaaggaaggtataccatatatattcatgcctcaagggagaagcctgaacatgtcagtcccatatttgttggtcgagagatacacagtgaaaaggtaacttggggtaaaatttctatggttgatgctgagaggaggttgatggcaaatgctctacaagatattgacaatcagcattttgttttgctatctgatagctgtgtacctttgcacagttttgattatgtatatgactacctgatgggtgcaaatctcagttttattgactgcttttatgatcctggaccacatggaaattttagatattcacaaaatatgttgcctgaggtcacagagactgattttagaaagggttcacagcctgggatggaagatggtcgcaactgctacgctgacgaacattatttgccaacagtattccgtatgatggacccagatggaattgctaattggtctgtaacccatgttgactggtctgaagggaagtggcatccaaaagcttaccgggcaaagcacgttaatttggagcttctgaagaatatagcatcaatcgacgtgagccaccatgtcactagtgatggcaagaaagtggtcacagagaacccctgcctatggaatggagcaaagaggccatgctacctgtttgcgaggaagttctaccctgaatccataaacaatctcttgaccttgttcgcgaattacacacttatttgagcttctaggtgacgcttagaggctacagggaatattttgttatagaaatccttgtacattggttaggaacataataggagattaattaacaggatagcagttggtgaggagaaggctttcggctttcgctgcagcaacacagtggcttcggatataccacaactggtcattgctactcctttagcctcgtgttgctttcatagtttcttctacccacatttttagctgcggcgttttaccatgtacatcaagctttgtttttacaaggaatggtcattcaataggaaaatctgagatcatggtcttgtatttgccctcaagttctcggttctgactgccaaagcacggttcaaagggatacatggaaaattttactttataggaaacaa

SEQ ID NO: 17759 - DNA, 1780 bp, Zea Mays
cgcctctctttccgttttccttcctcgtcgcggtcgtgggtcacttgccgccgcgccggcaacgtccccttcccatccccagccacgcataaatcaatcgatgcattggtccttggcacgacttgattcctgattccctctgctgttctccacccgctctctctctttcgcgtggcatttcttcctgccagcgacgaattggcgcgcgccgccgccgccgtctgcccaggcccttcgcccacccaccagacagacgtgtataagcgagaggaaattatctgccggccattttcactgacagctggtggagtccgagagtaatgagagctgtgaagtttaatggacctaaatagatgaagctgcatcaagtttggcagttaggcgttaaggatatgaaggccgttccacttccacgtccgagatcagctccaaaaagacccagggaattgaccgatgaggagagggcctcgcgtgttgtttttaggcagatcctaacaacacctcctgttctatccaagaattcaaaaatagctttcatgttcttgactccggggacattgccatttgaaagattatgggaaaagttctttgagggccatgaaggaaggtataccatatatattcatgcctcaagggagaagcctgaacatgtcagtcccatatttgttggtcgagagatacacagtgaaaaggtaacttggggtaaaatttctatggttgatgctgagaggaggttgatggcaaatgctctacaagatattgacaatcagcattttgttttgctatctgatagctgtgtacctttgcacagttttgattatgtatatgactacctgatgggtgcaaatctcagttttattgactgcttttatgatcctggaccacatggaaattttagatattcacaaaatatgttgcctgaggtcacagagactgattttagaaagggttcacagtggttctcagtcaaacgccaacatgcgttgatgattattgcagatagtctttactatactaagttcaagcttcattgcaggcctgggatggaagatggtcgcaactgctacgctgacgaacattatttgccaacagtattccgtatgatggacccagatggaattgctaattggtctgtaacccatgttgactggtctgaagggaagtggcatccaaaagcttaccgggcaaagcacgttaatttggagcttctgaagaatatagcatcaatcgacgtgagccaccatgtcactagtgatggcaagaaagtggtcacagagaacccctgcctatggaatggagcaaagaggccatgctacctgtttgcgaggaagttctaccctgaatccataaacaatctcttgaccttgttcgcgaattacacacttatttgagcttctaggtgacgcttagaggctacagggaatattttgttatagaaatccttgtacattggttaggaacataataggagattaattaacaggatagcagttggtgaggagaaggctttcggctttcgctgcagcaacacagtggcttcggatataccacaactggtcattgctactcctttagcctcgtgttgctttcatagtttcttctacccacatttttagctgcggcgttttaccatgtacatcaagctttgtttttacaaggaatggtcattcaataggaaaatctgagatcatggtcttgtatttgccctcaagttctcggttctgactgccaaagcacggttcaaagggatacatggaaaattttactttataggaaacaa

SEQ ID NO: 17760 - DNA, 1955 bp, Zea Mays
cgctttcctcgcctctctttccgttttccttcctcgtcgcggtcgtgggtcacttgccgccgcgccggcaacgtccccttcccatccccagccacgcataaatcaatcgatgcattggtccttggcacgacttgattcctgattccctctgctgttctccacccgctctctctctttcgcgtggcatttcttcctgccagcgacgaattggcgcgcgccgccgccgccgtctgcccaggcccttcgcccacccaccagacagacgtgtataagcgagaggaaattatctgccggccattttcactgacagctggtggagtccgagagtaatgagagctgtgaagtttaatggcatgtttggaagcaccagtttttaagaaactggtttatgaaaattgatgtggacctaaatagatgaagctgcatcaagtttggcagttaggcgttaaggatatgaaggccgttccacttccacgtccgagatcagctccaaaaagacgtgcgtggatccctgccgttgcagcttttatctccatcgcgctagtctgggcttatctgtatcctcccccgcattacacttcttctgtgagggattggcttcctgcggaaccagccagggaattgaccgatgaggagagggcctcgcgtgttgtttttaggcagatcctaacaacacctcctgttctatccaagaattcaaaaatagctttcatgttcttgactccggggacattgccatttgaaagattatgggaaaagttctttgagggccatgaaggaaggtataccatatatattcatgcctcaagggagaagcctgaacatgtcagtcccatatttgttggtcgagagatacacagtgaaaaggtaacttggggtaaaatttctatggttgatgctgagaggaggttgatggcaaatgctctacaagatattgacaatcagcattttgttttgctatctgatagctgtgtacctttgcacagttttgattatgtatatgactacctgatgggtgcaaatctcagttttattgactgcttttatgatcctggaccacatggaaattttagatattcacaaaatatgttgcctgaggtcacagagactgattttagaaagggttcacagtggttctcagtcaaacgccaacatgcgttgatgattattgcagatagtctttactatactaagttcaagcttcattgcaggcctgggatggaagatggtcgcaactgctacgctgacgaacattatttgccaacagtattccgtatgatggacccagatggaattgctaattggtctgtaacccatgttgactggtctgaagggaagtggcatccaaaagcttaccgggcaaagcacgttaatttggagcttctgaagaatatagcatcaatcgacgtgagccaccatgtcactagtgatggcaagaaagtggtcacagagaacccctgcctatggaatggagcaaagaggccatgctacctgtttgcgaggaagttctaccctgaatccataaacaatctcttgaccttgttcgcgaattacacacttatttgagcttctaggtgacgcttagaggctacagggaatattttgttatagaaatccttgtacattggttaggaacataataggagattaattaacaggatagcagttggtgaggagaaggctttcggctttcgctgcagcaacacagtggcttcggatataccacaactggtcattgctactcctttagcctcgtgttgctttcatagtttcttctacccacatttttagctgcggcgttttaccatgtacatcaagctttgtttttacaaggaatggtcattcaataggaaaatctgagatcatggtcttgtatttgccctcaagttctcggttctgactgccaaagcacggttcaaagggatacatggaaaattttactttataggaaacaa

SEQ ID NO: 17761 - DNA, 1854 bp, Zea Mays
attaaaactttcggaacgaaacgagggaaaggcaacaacacacatttggcgcgccctctgcggtgtatcaaaacaaacaaaccgcatcgtcgctttcctcgcctctctttccgttttccttcctcgtcgcggtcgtgggtcacttgccgccgcgccggcaacgtccccttcccatccccagccacgcataaatcaatcgatgcattggtccttggcacgacttgattcctgattccctctgctgttctccacccgctctctctctttcgcgtggcatttcttcctgccagcgacgaattggcgcgcgccgccgccgccgtctgcccaggcccttcgcccacccaccagacagacgtgtataagcgagaggaaattatctgccggccattttcactgacagctggtggagtccgagagacctaaatagatgaagctgcatcaagtttggcagttaggcgttaaggatatgaaggccgttccacttccacgtccgagatcagctccaaaaagacccagggaattgaccgatgaggagagggcctcgcgtgttgtttttaggcagatcctaacaacacctcctgttctatccaagaattcaaaaatagctttcatgttcttgactccggggacattgccatttgaaagattatgggaaaagttctttgagggccatgaaggaaggtataccatatatattcatgcctcaagggagaagcctgaacatgtcagtcccatatttgttggtcgagagatacacagtgaaaaggtaacttggggtaaaatttctatggttgatgctgagaggaggttgatggcaaatgctctacaagatattgacaatcagcattttgttttgctatctgatagctgtgtacctttgcacagttttgattatgtatatgactacctgatgggtgcaaatctcagttttattgactgcttttatgatcctggaccacatggaaattttagatattcacaaaatatgttgcctgaggtcacagagactgattttagaaagggttcacagtggttctcagtcaaacgccaacatgcgttgatgattattgcagatagtctttactatactaagttcaagcttcattgcaggcctgggatggaagatggtcgcaactgctacgctgacgaacattatttgccaacagtattccgtatgatggacccagatggaattgctaattggtctgtaacccatgttgactggtctgaagggaagtggcatccaaaagcttaccgggcaaagcacgttaatttggagcttctgaagaatatagcatcaatcgacgtgagccaccatgtcactagtgatggcaagaaagtggtcacagagaacccctgcctatggaatggagcaaagaggccatgctacctgtttgcgaggaagttctaccctgaatccataaacaatctcttgaccttgttcgcgaattacacacttatttgagcttctaggtgacgcttagaggctacagggaatattttgttatagaaatccttgtacattggttaggaacataataggagattaattaacaggatagcagttggtgaggagaaggctttcggctttcgctgcagcaacacagtggcttcggatataccacaactggtcattgctactcctttagcctcgtgttgctttcatagtttcttctacccacatttttagctgcggcgttttaccatgtacatcaagctttgtttttacaaggaatggtcattcaataggaaaatctgagatcatggtcttgtatttgccctcaagttctcggttctgactgccaaagcacggttcaaagggatacatggaaaattttactttataggaaacaa

SEQ ID NO: 17762 - DNA, 2166 bp, Zea Mays
actgaacacgcattgccaaattaaaactttcggaacgaaacgagggaaaggcaacaacacacatttggcgcgccctctgcggtgtatcaaaacaaacaaaccgcatcgtcgctttcctcgcctctctttccgttttccttcctcgtcgcggtcgtgggtcacttgccgccgcgccggcaacgtccccttcccatccccagccacgcataaatcaatcgatgcattggtccttggcacgacttgattcctgattccctctgctgttctccacccgctctctctctttcgcgtggcatttcttcctgccagcgacgaattggcgcgcgccgccgccgccgtctgcccaggcccttcgcccacccaccagacagacgtgtataagcgagaggaaattatctgccggccattttcactgacagctggtggagtccgagagtaatgagagctgtgaagtttaatggcatgtttggaagcaccagtttttaagaaactggtttatgaaaattgatgtggtttcaaacataccggtttatgtctcagtttataggaattatattttcagatttttaagaaaccggtttatgaaaattgatgtggttctaaatataccggtctatgtctacgtttatagaaattaaattttcagtttattaaaaaccaagaagctagtctcatttagctaaaaaataaaaactggtttcttaaaaaacaatgttgctttcaaacaggacctaaatagatgaagctgcatcaagtttggcagttaggcgttaaggatatgaaggccgttccacttccacgtccgagatcagctccaaaaagacccagggaattgaccgatgaggagagggcctcgcgtgttgtttttaggcagatcctaacaacacctcctgttctatccaagaattcaaaaatagctttcatgttcttgactccggggacattgccatttgaaagattatgggaaaagttctttgagggccatgaaggaaggtataccatatatattcatgcctcaagggagaagcctgaacatgtcagtcccatatttgttggtcgagagatacacagtgaaaaggtaacttggggtaaaatttctatggttgatgctgagaggaggttgatggcaaatgctctacaagatattgacaatcagcattttgttttgctatctgatagctgtgtacctttgcacagttttgattatgtatatgactacctgatgggtgcaaatctcagttttattgactgcttttatgatcctggaccacatggaaattttagatattcacaaaatatgttgcctgaggtcacagagactgattttagaaagggttcacagtggttctcagtcaaacgccaacatgcgttgatgattattgcagatagtctttactatactaagttcaagcttcattgcaggcctgggatggaagatggtcgcaactgctacgctgacgaacattatttgccaacagtattccgtatgatggacccagatggaattgctaattggtctgtaacccatgttgactggtctgaagggaagtggcatccaaaagcttaccgggcaaagcacgttaatttggagcttctgaagaatatagcatcaatcgacgtgagccaccatgtcactagtgatggcaagaaagtggtcacagagaacccctgcctatggaatggagcaaagaggccatgctacctgtttgcgaggaagttctaccctgaatccataaacaatctcttgaccttgttcgcgaattacacacttatttgagcttctaggtgacgcttagaggctacagggaatattttgttatagaaatccttgtacattggttaggaacataataggagattaattaacaggatagcagttggtgaggagaaggctttcggctttcgctgcagcaacacagtggcttcggatataccacaactggtcattgctactcctttagcctcgtgttgctttcatagtttcttctacccacatttttagctgcggcgttttaccatgtacatcaagctttgtttttacaaggaatggtcattcaataggaaaatctgagatcatggtcttgtatttgccctcaagttctcggttctgactgccaaagcacggttcaaagggatacatggaaaattttactttataggaaacaa

SEQ ID NO: 17763 - DNA, 1267 bp, Zea Mays
aggggctatctggcctagcctcacgaggtcgggctggaaaccctcgcctctcgcggtctcgcctctccaagacacccaggccgccgccttcgcctacaggcaccttgccgcctccgtccgctgcccgtggcttccgtccacctccacctcactcacccactacatcgccgaccaagcgcagcaccgcgcgtggaccagacaccgcccgtggcttccgtggaccagacgccgcccgtggcttccgtggacgcagcaccgtgcgtggaccagccgctgctacatcgccgaccagctatatatgcttccctttattctgaaaagaggccagtacacacttcttgtcgtagtggtgcacaaaaaattagagaaatttctacaagcaggtagctgcgaggactgctatttagttaccaacaatgtgtccgattgttgtggcttagggacgagattcacaagcaggtagttatataaatcactcaatttctacaacattttttacttgcttaaatctgctatttcagtttttttgctagtaaaatctgctatttagttacctctattgtttaattgcttaaatctgctatttcaattttgtttctagtaaaatatgccgctatttgagttcagctatttatgtttacataagcaagtgcttcataaacatctaaatccacacctttgttccagttcagcaatgtcttctctttattacagatgtgctgatccaattcagttttcagagtatgttgacaatctgaatttagttcaagcaataccttctctttattacagatgtttaaccaggtgatacacaagggattttcatcaacaagtggtcgccagaagaactgaaacatcaagatggcgtttgcttttaggtcgtgtatgttgaaactatatgttttattattatgcactgagactatgtttgacattggtcgtgtacactgagactatgttttattatgagactatgttttattatgatgcactgagactatgtttgtgcacacatgttttattatgactatgtttttttatgagactatgttttattatgatgtactgagactatatttgtgtacacatgggctatgttttattgtgagactatgtttgacattggtcttgtaaagtagctgcacacattggttatatgtacactgcacacatgagcagtgtggagttctttgttggctgaaagagttccctgctggccgagtggtgtagagtcccctgctggctgccaaagagcagcagagaaagg

SEQ ID NO: 17764 - DNA, 1176 bp, Zea Mays
aggggctatctggcctagcctcacgaggtcgggctggaaaccctcgcctctcgcggtctcgcctctccaagacacccaggccgccgccttcgcctacaggcaccttgccgcctccgtccgctgcccgtggcttccgtccacctccacctcactcacccactacatcgccgaccaagcgcagcaccgcgcgtggaccagacaccgcccgtggcttccgtggaccagacgccgcccgtggcttccgtggacgcagcaccgtgcgtggaccagccgctgctacatcgccgaccaggtagctgcgaggactgctatttagttaccaacaatgtgtccgattgttgtggcttagggacgagattcacaagcaggtagttatataaatcactcaatttctacaacattttttacttgcttaaatctgctatttcagtttttttgctagtaaaatctgctatttagttacctctattgtttaattgcttaaatctgctatttcaattttgtttctagtaaaatatgccgctatttgagttcagctatttatgtttacataagcaagtgcttcataaacatctaaatccacacctttgttccagttcagcaatgtcttctctttattacagatgtgctgatccaattcagttttcagagtatgttgacaatctgaatttagttcaagcaataccttctctttattacagatgtttaaccaggtgatacacaagggattttcatcaacaagtggtcgccagaagaactgaaacatcaagatggcgtttgcttttaggtcgtgtatgttgaaactatatgttttattattatgcactgagactatgtttgacattggtcgtgtacactgagactatgttttattatgagactatgttttattatgatgcactgagactatgtttgtgcacacatgttttattatgactatgtttttttatgagactatgttttattatgatgtactgagactatatttgtgtacacatgggctatgttttattgtgagactatgtttgacattggtcttgtaaagtagctgcacacattggttatatgtacactgcacacatgagcagtgtggagttctttgttggctgaaagagttccctgctggccgagtggtgtagagtcccctgctggctgccaaagagcagcagagaaagg

SEQ ID NO: 17765 - DNA, 1310 bp, Zea Mays
aggggctatctggcctagcctcacgaggtcgggctggaaaccctcgcctctcgcggtctcgcctctccaagacacccaggccgccgccttcgcctacaggcaccttgccgcctccgtccgctgcccgtggcttccgtccacctccacctcactcacccactacatcgccgaccaagcgcagcaccgcgcgtggaccagacaccgcccgtggcttccgtggaccagacgccgcccgtggcttccgtggacgcagcaccgtgcgtggaccagccgctgctacatcgccgaccaggaggaggatgatgatgatgagttattttttgtgttagttccagctatatatgcttccctttattctgaaaagaggccagtacacacttcttgtcgtagtggtgcacaaaaaattagagaaatttctacaagcaggtagctgcgaggactgctatttagttaccaacaatgtgtccgattgttgtggcttagggacgagattcacaagcaggtagttatataaatcactcaatttctacaacattttttacttgcttaaatctgctatttcagtttttttgctagtaaaatctgctatttagttacctctattgtttaattgcttaaatctgctatttcaattttgtttctagtaaaatatgccgctatttgagttcagctatttatgtttacataagcaagtgcttcataaacatctaaatccacacctttgttccagttcagcaatgtcttctctttattacagatgtgctgatccaattcagttttcagagtatgttgacaatctgaatttagttcaagcaataccttctctttattacagatgtttaaccaggtgatacacaagggattttcatcaacaagtggtcgccagaagaactgaaacatcaagatggcgtttgcttttaggtcgtgtatgttgaaactatatgttttattattatgcactgagactatgtttgacattggtcgtgtacactgagactatgttttattatgagactatgttttattatgatgcactgagactatgtttgtgcacacatgttttattatgactatgtttttttatgagactatgttttattatgatgtactgagactatatttgtgtacacatgggctatgttttattgtgagactatgtttgacattggtcttgtaaagtagctgcacacattggttatatgtacactgcacacatgagcagtgtggagttctttgttggctgaaagagttccctgctggccgagtggtgtagagtcccctgctggctgccaaagagcagcagagaaagg

SEQ ID NO: 17766 - DNA, 928 bp, Zea Mays
aggggctatctggcctagcctcacgaggtcgggctggaaaccctcgcctctcgcggtctcgcctctccaagacacccaggccgccgccttcgcctacaggcaccttgccgcctccgtccgctgcccgtggcttccgtccacctccacctcactcacccactacatcgccgaccaagcgcagcaccgcgcgtggaccagacaccgcccgtggcttccgtggaccagacgccgcccgtggcttccgtggacgcagcaccgtgcgtggaccagccgctgctacatcgccgaccagttccagctatatatgcttccctttattctgaaaagaggccagtacacacttcttgtcgtagtggtgcacaaaaaattagagaaatttctacaagcaggtagctgcgaggactgctatttagttaccaacaatgtgtccgattgttgtggcttagggacgagattcacaagcaggtgatacacaagggattttcatcaacaagtggtcgccagaagaactgaaacatcaagatggcgtttgcttttaggtcgtgtatgttgaaactatatgttttattattatgcactgagactatgtttgacattggtcgtgtacactgagactatgttttattatgagactatgttttattatgatgcactgagactatgtttgtgcacacatgttttattatgactatgtttttttatgagactatgttttattatgatgtactgagactatatttgtgtacacatgggctatgttttattgtgagactatgtttgacattggtcttgtaaagtagctgcacacattggttatatgtacactgcacacatgagcagtgtggagttctttgttggctgaaagagttccctgctggccgagtggtgtagagtcccctgctggctgccaaagagcagcagagaaagg

SEQ ID NO: 17767 - DNA, 785 bp, Zea Mays
ggaaggggctatctggcctagcctcacgaggtcgggctggaaaccctcgcctctcgcggtctcgcctctccaagacacccaggccgccgccttcgcctacaggcaccttgccgcctccgtccgctgcccgtggcttccgtccacctccacctcactcacccactacatcgccgaccaagcgcagcaccgcgcgtggaccagacaccgcccgtggcttccgtggaccagacgccgcccgtggcttccgtggacgcagcaccgtgcgtggaccagccgctgctacatcgccgaccagatgtgctgatccaattcagttttcagagtgatacacaagggattttcatcaacaagtggtcgccagaagaactgaaacatcaagatggcgtttgcttttaggtcgtgtatgttgaaactatatgttttattattatgcactgagactatgtttgacattggtcgtgtacactgagactatgttttattatgagactatgttttattatgatgcactgagactatgtttgtgcacacatgttttattatgactatgtttttttatgagactatgttttattatgatgtactgagactatatttgtgtacacatgggctatgttttattgtgagactatgtttgacattggtcttgtaaagtagctgcacacattggttatatgtacactgcacacatgagcagtgtggagttctttgttggctgaaagagttccctgctggccgagtggtgtagagtcccctgctggctgccaaagagcagcagagaaagg

SEQ ID NO: 17768 - DNA, 848 bp, Zea Mays
ggaaggggctatctggcctagcctcacgaggtcgggctggaaaccctcgcctctcgcggtctcgcctctccaagacacccaggccgccgccttcgcctacaggcaccttgccgcctccgtccgctgcccgtggcttccgtccacctccacctcactcacccactacatcgccgaccaagcgcagcaccgcgcgtggaccagacaccgcccgtggcttccgtggaccagacgccgcccgtggcttccgtggacgcagcaccgtgcgtggaccagccgctgctacatcgccgaccagatgtgctgatccaattcagttttcagagtatgttgacaatctgaatttagttcaagcaataccttctctttattacagatgtttaaccaggtgatacacaagggattttcatcaacaagtggtcgccagaagaactgaaacatcaagatggcgtttgcttttaggtcgtgtatgttgaaactatatgttttattattatgcactgagactatgtttgacattggtcgtgtacactgagactatgttttattatgagactatgttttattatgatgcactgagactatgtttgtgcacacatgttttattatgactatgtttttttatgagactatgttttattatgatgtactgagactatatttgtgtacacatgggctatgttttattgtgagactatgtttgacattggtcttgtaaagtagctgcacacattggttatatgtacactgcacacatgagcagtgtggagttctttgttggctgaaagagttccctgctggccgagtggtgtagagtcccctgctggctgccaaagagcagcagagaaagg

SEQ ID NO: 17769 - DNA, 1373 bp, Zea Mays
gggagaggaaggggctatctggcctagcctcacgaggtcgggctggaaaccctcgcctctcgcggtctcgcctctccaagacacccaggccgccgccttcgcctacaggcaccttgccgcctccgtccgctgcccgtggcttccgtccacctccacctcactcacccactacatcgccgaccaagcgcagcaccgcgcgtggaccagacaccgcccgtggcttccgtggaccagacgccgcccgtggcttccgtggacgcagcaccgtgcgtggaccagccgctgctacatcgccgaccagggatactaacaaataggttctaaaattgagttgataaggaaacatttgaaacaggaggaggatgatgatgatgagttattttttgtgttagttccagctatatatgcttccctttattctgaaaagaggccagtacacacttcttgtcgtagtggtgcacaaaaaattagagaaatttctacaagcaggtagctgcgaggactgctatttagttaccaacaatgtgtccgattgttgtggcttagggacgagattcacaagcaggtagttatataaatcactcaatttctacaacattttttacttgcttaaatctgctatttcagtttttttgctagtaaaatctgctatttagttacctctattgtttaattgcttaaatctgctatttcaattttgtttctagtaaaatatgccgctatttgagttcagctatttatgtttacataagcaagtgcttcataaacatctaaatccacacctttgttccagttcagcaatgtcttctctttattacagatgtgctgatccaattcagttttcagagtatgttgacaatctgaatttagttcaagcaataccttctctttattacagatgtttaaccaggtgatacacaagggattttcatcaacaagtggtcgccagaagaactgaaacatcaagatggcgtttgcttttaggtcgtgtatgttgaaactatatgttttattattatgcactgagactatgtttgacattggtcgtgtacactgagactatgttttattatgagactatgttttattatgatgcactgagactatgtttgtgcacacatgttttattatgactatgtttttttatgagactatgttttattatgatgtactgagactatatttgtgtacacatgggctatgttttattgtgagactatgtttgacattggtcttgtaaagtagctgcacacattggttatatgtacactgcacacatgagcagtgtggagttctttgttggctgaaagagttccctgctggccgagtggtgtagagtcccctgctggctgccaaagagcagcagagaaagg

SEQ ID NO: 17770 - DNA, 860 bp, Zea Mays
gcttggcagcccattatcccggccgaatccacgggagaggaaggggctatctggcctagcctcacgaggtcgggctggaaaccctcgcctctcgcggtctcgcctctccaagacacccaggccgccgccttcgcctacaggcaccttgccgcctccgtccgctgcccgtggcttccgtccacctccacctcactcacccactacatcgccgaccaagcgcagcaccgcgcgtggaccagacaccgcccgtggcttccgtggaccagacgccgcccgtggcttccgtggacgcagcaccgtgcgtggaccagccgctgctacatcgccgaccagagtatgttgacaatctgaatttagttcaagcaataccttctctttattacagatgtttaaccaggtgatacacaagggattttcatcaacaagtggtcgccagaagaactgaaacatcaagatggcgtttgcttttaggtcgtgtatgttgaaactatatgttttattattatgcactgagactatgtttgacattggtcgtgtacactgagactatgttttattatgagactatgttttattatgatgcactgagactatgtttgtgcacacatgttttattatgactatgtttttttatgagactatgttttattatgatgtactgagactatatttgtgtacacatgggctatgttttattgtgagactatgtttgacattggtcttgtaaagtagctgcacacattggttatatgtacactgcacacatgagcagtgtggagttctttgttggctgaaagagttccctgctggccgagtggtgtagagtcccctgctggctgccaaagagcagcagagaaagg

SEQ ID NO: 17771 - DNA, 3609 bp, Zea Mays
tcgtcagttgttgtcgactcatccaagcagacccgagatacccaaaccctcgcaccttctcggcggtggcggcggcggcgtacgggacggcagagatggccatggaggcggtggccacggtgagctccgccagtgggctccttgctatgctgcaggagcctgcgccggagctgaagctgcacgcgctcgcccgcctcaactccgtcgtccacctcttctggcccgagatctccaccagcgttcccaccattgagagcttgtacgaagatgaggagtttgagcagaggcagcttgcagcacttgttgtttctaaggtattttactacctgggcgagctaaatgattcactgtcatatgcacttggtgctggacccctatttgatgtttccgacgattctgattatgcccatgctcttttggccaaagcattagacgaatatgccagtatcaaaaccagagccttgaaagctacagaggaggaagagaacattgatcctcgattagaggccatagtggagaggatgcttgaaaagtgtatttttgatgggaaatatcaacaggccatgggtatggctgttgaatgcagaaggctggataagctggaggaagcgattgttgggtgtgataacattcagggggctctatcatattgcatcaatctttctcatcaatacgttaatcaccgtgaatatcgtttcgaggttctccgctgtcttgttaaaatataccaaactttgccaaatccagactatctgagcatttgccagtgtcttatgtttttgggtgagccagaaactgttgcatgcatattggacaagctgctttctggaaacaagtgggccagccgtacaagatgaccaaactgccagtactgtgggtacagacacagaagcagctggagatgttcagatgagagatgatacaagtacaccaaatggaactgctcacagtgtggatccaaatgaggtagcgcatgctgacaggcttgaaaaaattaaagggatactgtcaggggaaacttccattcagctggcattgcaatttctatacagccacaacaggtctgatcttttaattctgaagacaataaaacaggctgtggaaatgaggaatagcgtttgtcacagtgcaacaatatgtgccaatgcaatcatgcatgcgggaactactgtagatacctttctaagagagaacctggagtggttaagcagggcaaccaattgggcaaaattcagtgcaactgctggactaggtgtcattcatagaggtcatcttcaacaagggcgggctttgatggccccctacctacctcaaagtggtgcagttggtggtgggagtccatattcagaaggtggtgccctctacgcactaggtttgattcatgccaatcatggtgaaggaatcaaacaattcctccgtgaaagtcttcgcaactccagtgcagaggtcatccagcatggtgcatgtttggggcttgggcttgcagctttgggaaccgcagatgaggaaatatatgaggacataaagaatgtcctttacacagacagtgctgttgctggtgaggcagctggtattggcatgggcttgctcatggttgggaccgccagtgagaaggctagtgagatgcttgcttatgcacatgatacacagcatgaaaagattataaggggtttgtcactgggaattgcattgacagtatatggcagggaagaggaagcagacaccttgattgaacaaatgactagagatcaagatcccatattacgttatggtgacgtcagtgatgatgttcggaggactgcagttatggctcttggatttgttctatacaacgagcctgagcagactccaagaattgtgtccctgctctctgaatcatacaacccacatgttcgttatggtgcagccttggctgttgggatatcatgtgcaggatctggattaagtgatgcgatttccttgttggagcctcttacatcagatgttgttgacttcgtgcgtcagggagctctcattgccatggcaatggtaatgatccaaactaatgaatcctttgattctcgtgttggagcatttaggcgtcagttggagaagatcattcttgacaaacatgaggacaccatgagcaagatgggtgccatattagcatctggtatcctcgatgctggtggtaggaatgttacaatcaagctcctctcaagaaacaagcatgacaaactcacggctgtgattggtcttgccgttttcagtcagttctggtactggtatcctctcttgtatttcatcagcctggccttctcgccaacagccttcattgggctcaactctgatttgaaagtgccaaagtttgaattcctgtcgcatgctaaaccgtctctctttgagtatcccaaaccgacaactcagcagactacaacttcaacagtgaagctgccagcagccattctgtcaacttatgcgaaggcaaaatctagggcaaagaaggacgcagaaagcaaagctaaccaggagaaggccacagaagaggcttctggttctacctcaagcaagacggctaaagctcaggagaaggatgctgatgcaatgcaggttgacaatgccagtgagaagaaagctcctgaaccagaagcgacttatcagctccttacgaatccagctcgcgtgatccctgcccaggagaagttcatcaagctccttgaaaacagccgatatgtacctgtgaaaccagcgccttctggattcatcctcctccgagacctgcagccgactgaggctgaggatcttgcgctgaccgatgcccccacaacagtcgcaggaagcaccggcaacactgcccctgctgcaggccaacaggggtcaggatcatcagccatggccgtggacgatgagccacagccgccacaaccctttgagtacacctcgtgagcgaccgagcgtcaccttttcttattcgttttttttttgactttttgagtatgtagtgtgcggaaatttgttgttggctggaagaccttttgtagaaacatgagtagagaattttacttgaattgaagctataggatcaacgttgggaatctgggatatagcccaggtcaaaacccgcgctcccgcctgtgatcttttttttcgtgcaatgcaaagtcgagttgacatgagctgaacacggcggtaaaaatacgaaaatgttcggggcaaaccttctcggtgaaattgtaaaaaccctttcgagaaccataactcgaagttctaaatgtctttaaaactatgtagtacattcgtagtgcgtttctagaaaaaagtatatgaaaaatatcaatttcaggcaaatatgcattagaggacgagaaattttgggatttgtcctcacttgatatgtcgtttcaacattaaatttacaaaacgagattttttaaattttgcgctaatgcatatctatagatgcactattggtgtgcagagttccatttttaaaaaaacgcctaaacgttttttttctaaagagtttttaccatttcacagagtaaagggcccgccgagaattcgacgtggcgcagacatcggtcagggagattttacactagtctccaaatggtgcaccgtagggtgaag

SEQ ID NO: 17772 - DNA, 3714 bp, Zea Mays
tcgtcagttgttgtcgactcatccaagcagacccgagatacccaaaccctcgcaccttctcggcggtggcggcggcggcgtacgggacggcagagatggccatggaggcggtggccacggtgagctccgccagtgggctccttgctatgctgcaggagcctgcgccggagctgaagctgcacgcgctcgcccgcctcaactccgtcgtccacctcttctggcccgagatctccaccagcgttcccaccattgagagcttgtacgaagatgaggagtttgagcagaggcagcttgcagcacttgttgtttctaaggtattttactacctgggcgagctaaatgattcactgtcatatgcacttggtgctggacccctatttgatgtttccgacgattctgattatgcccatgctcttttggccaaagcattagacgaatatgccagtatcaaaaccagagccttgaaagctacagaggaggaagagaacattgatcctcgattagaggccatagtggagaggatgcttgaaaagtgtatttttgatgggaaatatcaacaggccatgggtatggctgttgaatgcagaaggctggataagctggaggaagcgattgttgggtgtgataacattcagggggctctatcatattgcatcaatctttctcatcaatacgttaatcaccgttctccgctgtcttgttaaaatataccaaactttgccaaatccagactatctgagcatttgccagtgtcttatgtttttgggtgagccagaaactgttgcatgcatattggacaagctgctttctggaaacaaggatgatgctctccttgcatatcaaattgcctttgatcttgttgagaatgaaaaccaggctttccttttgaatgtgagaaatcgtttgtcctcaccgactcctgtgccatctaaccctgacagtgggccagccgtacaagatgaccaaactgccagtactgtgggtacagacacagaagcagctggagatgttcagatgagagatgatacaagtacaccaaatggaactgctcacagtgtggatccaaatgaggtagcgcatgctgacaggcttgaaaaaattaaagggatactgtcaggggaaacttccattcagctggcattgcaatttctatacagccacaacaggtctgatcttttaattctgaagacaataaaacaggctgtggaaatgaggaatagcgtttgtcacagtgcaacaatatgtgccaatgcaatcatgcatgcgggaactactgtagatacctttctaagagagaacctggagtggttaagcagggcaaccaattgggcaaaattcagtgcaactgctggactaggtgtcattcatagaggtcatcttcaacaagggcgggctttgatggccccctacctacctcaaagtggtgcagttggtggtgggagtccatattcagaaggtggtgccctctacgcactaggtttgattcatgccaatcatggtgaaggaatcaaacaattcctccgtgaaagtcttcgcaactccagtgcagaggtcatccagcatggtgcatgtttggggcttgggcttgcagctttgggaaccgcagatgaggaaatatatgaggacataaagaatgtcctttacacagacagtgctgttgctggtgaggcagctggtattggcatgggcttgctcatggttgggaccgccagtgagaaggctagtgagatgcttgcttatgcacatgatacacagcatgaaaagattataaggggtttgtcactgggaattgcattgacagtatatggcagggaagaggaagcagacaccttgattgaacaaatgactagagatcaagatcccatattacgttatggtgacgtcagtgatgatgttcggaggactgcagttatggctcttggatttgttctatacaacgagcctgagcagactccaagaattgtgtccctgctctctgaatcatacaacccacatgttcgttatggtgcagccttggctgttgggatatcatgtgcaggatctggattaagtgatgcgatttccttgttggagcctcttacatcagatgttgttgacttcgtgcgtcagggagctctcattgccatggcaatggtaatgatccaaactaatgaatcctttgattctcgtgttggagcatttaggcgtcagttggagaagatcattcttgacaaacatgaggacaccatgagcaagatgggtgccatattagcatctggtatcctcgatgctggtggtaggaatgttacaatcaagctcctctcaagaaacaagcatgacaaactcacggctgtgattggtcttgccgttttcagtcagttctggtactggtatcctctcttgtatttcatcagcctggccttctcgccaacagccttcattgggctcaactctgatttgaaagtgccaaagtttgaattcctgtcgcatgctaaaccgtctctctttgagtatcccaaaccgacaactcagcagactacaacttcaacagtgaagctgccagcagccattctgtcaacttatgcgaaggcaaaatctagggcaaagaaggacgcagaaagcaaagctaaccaggagaaggccacagaagaggcttctggttctacctcaagcaagacggctaaagctcaggagaaggatgctgatgcaatgcaggttgacaatgccagtgagaagaaagctcctgaaccagaagcgacttatcagctccttacgaatccagctcgcgtgatccctgcccaggagaagttcatcaagctccttgaaaacagccgatatgtacctgtgaaaccagcgccttctggattcatcctcctccgagacctgcagccgactgaggctgaggatcttgcgctgaccgatgcccccacaacagtcgcaggaagcaccggcaacactgcccctgctgcaggccaacaggggtcaggatcatcagccatggccgtggacgatgagccacagccgccacaaccctttgagtacacctcgtgagcgaccgagcgtcaccttttcttattcgttttttttttgactttttgagtatgtagtgtgcggaaatttgttgttggctggaagaccttttgtagaaacatgagtagagaattttacttgaattgaagctataggatcaacgttgggaatctgggatatagcccaggtcaaaacccgcgctcccgcctgtgatcttttttttcgtgcaatgcaaagtcgagttgacatgagctgaacacggcggtaaaaatacgaaaatgttcggggcaaaccttctcggtgaaattgtaaaaaccctttcgagaaccataactcgaagttctaaatgtctttaaaactatgtagtacattcgtagtgcgtttctagaaaaaagtatatgaaaaatatcaatttcaggcaaatatgcattagaggacgagaaattttgggatttgtcctcacttgatatgtcgtttcaacattaaatttacaaaacgagattttttaaattttgcgctaatgcatatctatagatgcactattggtgtgcagagttccatttttaaaaaaacgcctaaacgttttttttctaaagagtttttaccatttcacagagtaaagggcccgccgagaattcgacgtggcgcagacatcggtcagggagattttacactagtctccaaatggtgcaccgtagggtgaag

SEQ ID NO: 17773 - DNA, 3061 bp, Zea Mays
gttttcgtcagttgttgtcgactcatccaagcagacccgagatacccaaaccctcgcaccttctcggcggtggcggcggcggcgtacgggacggcagagatggccatggaggcggtggccacggtgagctccgccagtgggctccttgctatgctgcaggagcctgcgccggagctgaagctgcacgcgctcgcccgcctcaactccgtcgtccacctcttctggcccgagatctccaccagcgttcccaccattgagagcttgtacgaagatgaggagtttgagcagaggcagcttgcagcacttgttgtttctaaggtattttactacctgggcgagctaaatgattcactgtcatatgcacttggtgctggacccctatttgatgtttccgacgattctgattatgcccatgctcttttggccaaagcattagacgaatatgccagtatcaaaaccagagccttgaaagctacagaggaggaagagaacattgatcctcgattagaggccatagtggagaggatgcttgaaaagtgtatttttgatgggaaatatcaacaggccatgggtatggctgttgaatgcagaaggctggataagctggaggaagcgattgttgggtgtgataacattcagggggctctatcatattgcatcaatctttctcatcaatacgttaatcaccgtgaatatcgtttcgaggttctccgctgtcttgttaaaatataccaaactttgccaaatccagactatctgagcatttgccagtgtcttatgtttttgggtgagccagaaactgttgcatgcatattggacaagctgctttctggaaacaaggatgatgctctccttgcatatcaaattgcctttgatcttgttgagaatgaaaaccaggctttccttttgaatgtgagaaatcgtttgtcctcaccgactcctgtgccatctaaccctgacagtgggccagccgtacaagatgaccaaactgccagtactgtgggtacagacacagaagcagctggagatgttcagatgagagatgatacaagtacaccaaatggaactgctcacagtgtggatccaaatgaggtagcgcatgctgacaggcttgaaaaaattaaagggatactgtcaggggaaacttccattcagctggcattgcaatttctatacagccacaacaggtctgatcttttaattctgaagacaataaaacaggctgtggaaatgaggaatagcgtttgtcacagtgcaacaatatgtgccaatgcaatcatgcatgcgggaactactgtagatacctttctaagagagaacctggagtggttaagcagggcaaccaattgggcaaaattcagtgcaactgctggactaggtgtcattcatagaggtcatcttcaacaagggcgggctttgatggccccctacctacctcaaagtggtgcagttggtggtgggagtccatattcagaaggtggtgccctctacgcactaggtttgattcatgccaatcatggtgaaggaatcaaacaattcctccgtgaaagtcttcgcaactccagtgcagaggtcatccagcatggtgcatgtttggggcttgggcttgcagctttgggaaccgcagatgaggaaatatatgaggacataaagaatgtcctttacacagacagtgctgttgctggtgaggcagctggtattggcatgggcttgctcatggttgggaccgccagtgagaaggctagtgagatgcttgcttatgcacattgggctcaactctgatttgaaagtgccaaagtttgaattcctgtcgcatgctaaaccgtctctctttgagtatcccaaaccgacaactcagcagactacaacttcaacagtgaagctgccagcagccattctgtcaacttatgcgaaggcaaaatctagggcaaagaaggacgcagaaagcaaagctaaccaggagaaggccacagaagaggcttctggttctacctcaagcaagacggctaaagctcaggagaaggatgctgatgcaatgcaggttgacaatgccagtgagaagaaagctcctgaaccagaagcgacttatcagctccttacgaatccagctcgcgtgatccctgcccaggagaagttcatcaagctccttgaaaacagccgatatgtacctgtgaaaccagcgccttctggattcatcctcctccgagacctgcagccgactgaggctgaggatcttgcgctgaccgatgcccccacaacagtcgcaggaagcaccggcaacactgcccctgctgcaggccaacaggggtcaggatcatcagccatggccgtggacgatgagccacagccgccacaaccctttgagtacacctcgtgagcgaccgagcgtcaccttttcttattcgttttttttttgactttttgagtatgtagtgtgcggaaatttgttgttggctggaagaccttttgtagaaacatgagtagagaattttacttgaattgaagctataggatcaacgttgggaatctgggatatagcccaggtcaaaacccgcgctcccgcctgtgatcttttttttcgtgcaatgcaaagtcgagttgacatgagctgaacacggcggtaaaaatacgaaaatgttcggggcaaaccttctcggtgaaattgtaaaaaccctttcgagaaccataactcgaagttctaaatgtctttaaaactatgtagtacattcgtagtgcgtttctagaaaaaagtatatgaaaaatatcaatttcaggcaaatatgcattagaggacgagaaattttgggatttgtcctcacttgatatgtcgtttcaacattaaatttacaaaacgagattttttaaattttgcgctaatgcatatctatagatgcactattggtgtgcagagttccatttttaaaaaaacgcctaaacgttttttttctaaagagtttttaccatttcacagagtaaagggcccgccgagaattcgacgtggcgcagacatcggtcagggagattttacactagtctccaaatggtgcaccgtagggtgaag

SEQ ID NO: 17774 - DNA, 3785 bp, Zea Mays
ggatacaaagtgactgaggtaagcgcgacgaaggccggatccggcttattgttttcgtcagttgttgtcgactcatccaagcagacccgagatacccaaaccctcgcaccttctcggcggtggcggcggcggcgtacgggacggcagagatggccatggaggcggtggccacggtgagctccgccagtgggctccttgctatgctgcaggagcctgcgccggagctgaagctgcacgcgctcgcccgcctcaactccgtcgtccacctcttctggcccgagatctccaccagcgttcccaccattgagagcttgtacgaagatgaggagtttgagcagaggcagcttgcagcacttgttgtttctaaggtattttactacctgggcgagctaaatgattcactgtcatatgcacttggtgctggacccctatttgatgtttccgacgattctgattatgcccatgctcttttggccaaagcattagacgaatatgccagtatcaaaaccagagccttgaaagctacagaggaggaagagaacattgatcctcgattagaggccatagtggagaggatgcttgaaaagtgtatttttgatgggaaatatcaacaggccatgggtatggctgttgaatgcagaaggctggataagctggaggaagcgattgttgggtgtgataacattcagggggctctatcatattgcatcaatctttctcatcaatacgttaatcaccgtgaatatcgtttcgaggttctccgctgtcttgttaaaatataccaaactttgccaaatccagactatctgagcatttgccagtgtcttatgtttttgggtgagccagaaactgttgcatgcatattggacaagctgctttctggaaacaaggatgatgctctccttgcatatcaaattgcctttgatcttgttgagaatgaaaaccaggctttccttttgaatgtgagaaatcgtttgtcctcaccgactcctgtgccatctaaccctgacagtgggccagccgtacaagatgaccaaactgccagtactgtgggtacagacacagaagcagctggagatgttcagatgagagatgatacaagtacaccaaatggaactgctcacagtgtggatccaaatgaggtagcgcatgctgacaggcttgaaaaaattaaagggatactgtcaggggaaacttccattcagctggcattgcaatttctatacagccacaacaggtctgatcttttaattctgaagacaataaaacaggctgtggaaatgaggaatagcgtttgtcacagtgcaacaatatgtgccaatgcaatcatgcatgcgggaactactgtagatacctttctaagagagaacctggagtggttaagcagggcaaccaattgggcaaaattcagtgcaactgctggactaggtgtcattcatagaggtcatcttcaacaagggcgggctttgatggccccctacctacctcaaagtggtgcagttggtggtgggagtccatattcagaaggtggtgccctctacgcactaggtttgattcatgccaatcatggtgaaggaatcaaacaattcctccgtgaaagtcttcgcaactccagtgcagaggtcatccagcatggtgcatgtttggggcttgggcttgcagctttgggaaccgcagatgaggaaatatatgaggacataaagaatgtcctttacacagacagtgctgttgctggtgaggcagctggtattggcatgggcttgctcatggttgggaccgccagtgagaaggctagtgagatgcttgcttatgcacatgatacacagcatgaaaagattataaggggtttgtcactgggaattgcattgacagtatatggcagggaagaggaagcagacaccttgattgaacaaatgactagagatcaagatcccatattacgttatggtgacgtcagtgatgatgttcggaggactgcagttatggctcttggatttgttctatacaacgagcctgagcagactccaagaattgtgtccctgctctctgaatcatacaacccacatgttcgttatggtgcagccttggctgttgggatatcatgtgcaggatctggattaagtgatgcgatttccttgttggagcctcttacatcagatgttgttgacttcgtgcgtcagggagctctcattgccatggcaatggtaatgatccaaactaatgaatcctttgattctcgtgttggagcatttaggcgtcagttggagaagatcattcttgacaaacatgaggacaccatgagcaagatgggtgccatattagcatctggtatcctcgatgctggtggtaggaatgttacaatcaagctcctctcaagaaacaagcatgacaaactcacggctgtgattggtcttgccgttttcagtcagttctggtactggtatcctctcttgtatttcatcagcctggccttctcgccaacagccttcattgggctcaactctgatttgaaagtgccaaagtttgaattcctgtcgcatgctaaaccgtctctctttgagtatcccaaaccgacaactcagcagactacaacttcaacagtgaagctgccagcagccattctgtcaacttatgcgaaggcaaaatctagggcaaagaaggacgcagaaagcaaagctaaccaggagaaggccacagaagaggcttctggttctacctcaagcaagacggctaaagctcaggagaaggatgctgatgcaatgcaggttgacaatgccagtgagaagaaagctcctgaaccagaagcgacttatcagctccttacgaatccagctcgcgtgatccctgcccaggagaagttcatcaagctccttgaaaacagccgatatgtacctgtgaaaccagcgccttctggattcatcctcctccgagacctgcagccgactgaggctgaggatcttgcgctgaccgatgcccccacaacagtcgcaggaagcaccggcaacactgcccctgctgcaggccaacaggggtcaggatcatcagccatggccgtggacgatgagccacagccgccacaaccctttgagtacacctcgtgagcgaccgagcgtcaccttttcttattcgttttttttttgactttttgagtatgtagtgtgcggaaatttgttgttggctggaagaccttttgtagaaacatgagtagagaattttacttgaattgaagctataggatcaacgttgggaatctgggatatagcccaggtcaaaacccgcgctcccgcctgtgatcttttttttcgtgcaatgcaaagtcgagttgacatgagctgaacacggcggtaaaaatacgaaaatgttcggggcaaaccttctcggtgaaattgtaaaaaccctttcgagaaccataactcgaagttctaaatgtctttaaaactatgtagtacattcgtagtgcgtttctagaaaaaagtatatgaaaaatatcaatttcaggcaaatatgcattagaggacgagaaattttgggatttgtcctcacttgatatgtcgtttcaacattaaatttacaaaacgagattttttaaattttgcgctaatgcatatctatagatgcactattggtgtgcagagttccatttttaaaaaaacgcctaaacgttttttttctaaagagtttttaccatttcacagagtaaagggcccgccgagaattcgacgtggcgcagacatcggtcagggagattttacactagtctccaaatggtgcaccgtagggtgaag

SEQ ID NO: 17775 - DNA, 1743 bp, Zea Mays
agcccaccggccgtgctaacccccgcacttaccaagagagagaaaaagcgagaggcgactccacgcgtctcgtctcgtctcgtctcgtctccctctctctcgtccggtcctccctccccttcctgaggcgttccctctctctcctcccctttcctctgctggtctctactctcttgtcatcgcacccgtctccccgctctgactccgtcccgagcggccgactccgcccgcgccgccgccgccgccgcctcgtcccgatcgacccccgaatcgccggaaaccgtggacttcgcgagaaaaaaggaggacatttggttgttgcatgatggtggaaggccccaatttcgctggcctgattggtggtcatgacaatggtgggaatttttgcgacatggcatactaccggaaactcggtgagggctcaaacatgtcgatagatagccttaacagcatgcagaccagcacgcatggcggctccattgcaatgtctgtggacaatagcagtgtagggtcctgcagctcccatactaggatgctcaatcatcctggcctcaagggacctgttgttggcaattactccgtcggtgggcacagtattttccgtcatggacgggtgtctcatgccttgagcgatgatgcgctagcacaggcgttgatggacccaaggtacccgactgagacactcaaagattatgaggagtggacaattgatttagccaagctccacatgggaatgccctttgcacagggcgcctttggaaagctctacaggggtacctacaatggggaagatgttgccattaagcttttggagaggccagaggctgatccagagagagctgggttaatggagcagcagtttgttcaagaagttatgatgcttgcaaccttgaggcaccagaatattgttaaatttattggagcatgcaggaagccagtggtttggtgcattgtgacggagtatgccaagggtggatcagttagacagtttctagcgaagaggcagaataggtcggttccactaaaactggcggttaagcaagcattggatgttgcaagggggatggcctatgttcatggtcttgggttcatccatagggatcttaagtcagataacctcttgatatctggtgataaatctatcaagatagctgactttggagtagctcgcattgaagtaaaaactgaggggatgacacctgaaacgggaacctaccgttggatggcaccagagatgattcagcataggccatatgaccagaaagttgatgtctacagctttggcattgtgctgtgggagctcataactggcatgctcccttttgctaacatgacagcagtgcaagctgcttttgctgtggtgaacaagggtgtccgcccagctataccccaggactgcctgcccaccctcggtgagatcatgaccaggtgctgggatccaaatcctgatgtccgtccgccgttcactgaagttgtgaggatgctggagcatgctgaggtggagatcctgagcactgtccgcaaggcccgatttcggtgttgcatctcccaaccgatgaccaccgactgaatcaaacagaagagagtcgaaaagaactccatgcaagcataattgagtaaatttatcttgtgtccagacttcgctcagctgaagtagaaagcacacctgagtggctgagtgtatggccgtgtgtgtgtatactcaggggtgggagagttaaagaagaaatcagtgaaagtgga

SEQ ID NO: 17776 - DNA, 1198 bp, Zea Mays
agcccaccggccgtgctaacccccgcacttaccaagagagagaaaaagcgagaggcgactccacgcgtctcgtctcgtctcgtctcgtctccctctctctcgtccggtcctccctccccttcctgaggcgttccctctctctcctcccctttcctctgctggtctctactctcttgtcatcgcacccgtctccccgctctgactccgtcccgagcggccgactccgcccgcgccgccgccgccgccgcctcgtcccgatcgacccccgaatcgccggaaaccgtggacttcgcgaggttgtgtctttacctccgagcggtgtagggaatataacagggtgacagctgaattgcagaaaaaaggaggacatttggttgttgcatgatggtggaaggccccaatttcgctggcctgattggtggtcatgacaatggtgggaatttttgcgacatggcatactaccggaaactcgagagatgattcagcataggccatatgaccagaaagttgatgtctacagctttggcattgtgctgtgggagctcataactggcatgctcccttttgctaacatgacagcagtgcaagctgcttttgctgtggtgaacaagggtgtccgcccagctataccccaggactgcctgcccaccctcggtgagatcatgaccaggtgctgggatccaaatcctgatgtccgtccgccgttcactgaagttgtgaggatgctggagcatgctgaggtggagatcctgagcactgtccgcaaggcccgatttcggtgttgcatctcccaaccgatgaccaccgactgaatcaaacagaagagagtcgaaaagaactccatgcaagcataattgagtaaatttatcttgtgtccagacttcgctcagctgaagtagaaagcacacctgagtggctgagtgtatggccgtgtgtgtgtatactcaggtgtaagcatattgtctttgaaatattcctgccattagaaatatacctagttcgcggtttcagactcttgagatgttttagggctagcctatgccctgacgaaacatcatgcaggcttcctattcttgtaatgtcgttgtggccctgctgctttgttcatgttataaccctcctactggattatgcaaacactttgttttgttgcttctgagtatatagcatgtataatttccttgcaaccatttgttcc

SEQ ID NO: 17777 - DNA, 1837 bp, Zea Mays
ccactttccgcggcctctccacaatcatcaaaacagcaaccgccccctttcttctctccctctctctctctctctctctctctctctcccccctcttcacgccacaggccacaccacgccacaggtgtccggatcaacgagcaagcaaccggggccgagagagacgagatgaggcctgcctcttctccctccgtcacacgcgagacggagacgcgtctgaagctgaggcctgtataaaagcgctaaagatccctcgctctcttcccccccgtgcgctgtgtcccgtctctgcgagcaagttctgtcttcgtccatccatccgtccccgtctcactgcctgtggcccgtgggtagcggttgtcgatcagcttacccacgccggcgtgttctccctgacatggtcggccggatggagcggcagaccgcgtcgtcgtcagcgtcatgctcccccgccgccgccgccaccacctcctcctcgtcctgcggcggcaagaagcggcctgatatcctcaacatgatccggggaaggagtaaattgtcgaccaacaaagttacacatggattccacctggtggaaggcaagtccggccatgacatggaagactaccatgtggcagagtacaagtatgtgaagaatcatgagcttggtctctttgccatttttgatggccatttaggagataaggtgccaagttacttgaaagctaacctttttagcaacataatgaaagagcctctcttctggtctagccctcaagaagcaataaagaatgcatactgctctacaaacaagtatattctagaaaataccaaacaacttggaccaggtggttcgacagcagttactgctattgtagttgatggtaaggacatgtggatagcaaatgtaggcgactctagagctgttgtgtgtgaaagaggctctgctaagcagctcactgttgaccatgagccccatgaaactaatgaaagacagaggattgaaaagcacggtggctttgtgacgacatttcctggtgatgttcctcgggtgaatggtcagctcgctgttgctagggcatttggtgaccaaagcctcaaggcccacttgagctctgaacctgatattagtcatgtaccaataaactcaagtatagagtttgtcatacttgccagtgatggattgtggaaggtaatgaagaaccaggaagccgtcgatctcgtgaagtcaatcaaggatccacaggcagcagcgaaacgattgaccactgaagcgttggcaaggaagagcaaggatgatatctcttgcattgtcatccgtttccgctgctgagttaccctctctccacggcactgatatccagtcttcacctcatgatttagattgagacaatttgtctttgccgaattttctgatagaatatgctgtacctatcatagctgtcgacaggcctggaactaattagggtagtgaagacttgagagctggttggtgagtgtgtgcagggtgcctattcgcctgtgcatatgttgactctgcatccgttgatccggacttgggcgactgtcaggaccttagtgcttgtgtgcttgtgatggtaatggacctaatggctaatggtggtaagggaacttgttgataccaaatttggttaatttagttttttttcatggctcgcatttcgtagggtagatgcatctgatttcaaggaaacatattattagttcaaagtgttatcgatgtttcttacgttggtattctattattgatgccttacttgtccgcttaactgtcagttcaattgacatcagttgtggcagttcaattgacatcaatttcatgttcagttgatctttt

SEQ ID NO: 17778 - DNA, 860 bp, Zea Mays
ctggaaagaagaatctcgtgttaagctcaactgaaggaatgtacaaaataatccggcctgctattggtgaagcattgagggagatgccttcaagtgaactgaaaagcaagtacaggaaggtgtcatcaatagacaaagttagtaaaggatggcaggaagagtacgatgcttcatcgaagcagtgtatgcatggatctaaatgtaaaattgggagctactgtactgtaggaagaaggttgcaagagcttaatatattgggtggcctcatacttccagtttggggtacaatagaaaaggccctggccaagcaggaacgcctcattcacaagagaatacgggttgtccgtttagtcacaacaaatgacagtcagcgaatcgttgggctgctgattccgaattcagcggtagagtcagtactaacaggtttgcaatgggtgggacattgatgactgacatggaaaggcttgaattttgtttctcagctgcattcagtttgctgggctttttttaacttcgtggcactgttctgatattagatgcagcagcatctagggcacacttgattttgtttgtagggagatagcaaggtaacttacccgaagcgatgaaattcttagcttacaggtcaggcaggtatatgctgacaacttttgtatgtaaaatacgcggtgcggtgtggtgcggctgtaagacatgtaatgtaaagctactaaaaaagctcaggttaatctcaaaagaaagtcgcacctcacaatctggtgctgccacaatgataatgtttcatgtggagttactgcttatgtcggactgaactgcacaagaaaaactaaggcttatttatattatagccaaattatcta

SEQ ID NO: 17779 - DNA, 1606 bp, Zea Mays
agaacatgaacattgtcaacaatcgaatgcttctttttacaaatcttggtggtgaaaagcgatttgcatcaattgtggcaaaaaggctagagtctcttggtgctttaacacaaggagatcgcagggctgggccttctttgagtgcttttaactatgatagcaactatgggaaaaaggcattaaccatgatgtataggggaataatggaacaggtgatcaggattcttttccagttgttcctccggggtgttctgatgatgaaactagcatccaagaattcatcaatgaagcaaaagctgctctagtatcagttggaattattagggatgctttcatatgcaatggaaaagatccagggaagctttctggtcggattgtagattcagatatgcatgatgttgctcgttttctcaaccgccttttggggttgtctccaaacatccaaaacaggttgtttgatctttttacaagtatacttgatattgtccttcacaatgcaaggatagaagggcagctagattctggaattgttgatatcaaagctaagaatgttgaaatgacagaatcacctaggactgttcacactgatagcttgtctggtgctttgacggtactatttactttcaccattgaccggggagttacttgggagtcggcaaaaacgatgcttgaggaaagggagaaatttggtgctggtacttccattgatggcttttacgagtccagaagggaatggatggggagaaggcacttcattctatctttggaaggctcaactgaaggaatgtacaaaataatccggcctgctattggtgaagcattgagggagatgccttcaagtgaactgaaaagcaagtacaggaaggtgtcatcaatagacaaagttagtaaaggatggcaggaagagtacgatgcttcatcgaagcagtgtatgcatggatctaaatgtaaaattgggagctactgtactgtaggaagaaggttgcaagagcttaatatattgggtggcctcatacttccagtttggggtacaatagaaaaggccctggccaagcaggaacgcctcattcacaagagaatacgggttgtccgtttagtcacaacaaatgacagtcagcgaatcgttgggctgctgattccgaattcagcggtagagtcagtactaacaggtttgcaatgggtgggacattgatgactgacatggaaaggcttgaattttgtttctcagctgcattcagtttgctgggctttttttaacttcgtggcactgttctgatattagatgcagcagcatctagggcacacttgattttgtttgtagggagatagcaaggtaacttacccgaagcgatgaaattcttagcttacaggtcaggcaggtatatgctgacaacttttgtatgtaaaatacgcggtgcggtgtggtgcggctgtaagacatgtaatgtaaagctactaaaaaagctcaggttaatctcaaaagaaagtcgcacctcacaatctggtgctgccacaatgataatgtttcatgtggagttactgcttatgtcggactgaactgcacaagaaaaactaaggcttatttatattatagccaaattatcta

SEQ ID NO: 17780 - DNA, 1605 bp, Zea Mays
agaagttagaacatgaacattgtcaacaatcgaatgcttctttttacaaatcttggtggtgaaaagcgatttgcatcaattgtggcaaaaaggctagagtctcttggtgctttaacacaaggagatcgcagggctgggccttctttgagtgcttttaactatgatagcaactatgggaaaaaggcattaaccatgatgtataggggaataatggaacaggattcttttccagttgttcctccggggtgttctgatgatgaaactagcatccaagaattcatcaatgaagcaaaagctgctctagtatcagttggaattattagggatgctttcatatgcaatggaaaagatccagggaagctttctggtcggattgtagattcagatatgcatgatgttgctcgttttctcaaccgccttttggggttgtctccaaacatccaaaacaggttgtttgatctttttacaagtatacttgatattgtccttcacaatgcaaggatagaagggcagctagattctggaattgttgatatcaaagctaagaatgttgaaatgacagaatcacctaggactgttcacactgatagcttgtctggtgctttgacggtactatttactttcaccattgaccggggagttacttgggagtcggcaaaaacgatgcttgaggaaagggagaaatttggtgctggtacttccattgatggcttttacgagtccagaagggaatggatggggagaaggcacttcattctatctttggaaggctcaactgaaggaatgtacaaaataatccggcctgctattggtgaagcattgagggagatgccttcaagtgaactgaaaagcaagtacaggaaggtgtcatcaatagacaaagttagtaaaggatggcaggaagagtacgatgcttcatcgaagcagtgtatgcatggatctaaatgtaaaattgggagctactgtactgtaggaagaaggttgcaagagcttaatatattgggtggcctcatacttccagtttggggtacaatagaaaaggccctggccaagcaggaacgcctcattcacaagagaatacgggttgtccgtttagtcacaacaaatgacagtcagcgaatcgttgggctgctgattccgaattcagcggtagagtcagtactaacaggtttgcaatgggtgggacattgatgactgacatggaaaggcttgaattttgtttctcagctgcattcagtttgctgggctttttttaacttcgtggcactgttctgatattagatgcagcagcatctagggcacacttgattttgtttgtagggagatagcaaggtaacttacccgaagcgatgaaattcttagcttacaggtcaggcaggtatatgctgacaacttttgtatgtaaaatacgcggtgcggtgtggtgcggctgtaagacatgtaatgtaaagctactaaaaaagctcaggttaatctcaaaagaaagtcgcacctcacaatctggtgctgccacaatgataatgtttcatgtggagttactgcttatgtcggactgaactgcacaagaaaaactaaggcttatttatattatagccaaattatcta

SEQ ID NO: 17781 - DNA, 1872 bp, Zea Mays
tgctagtaagagctttggatgggaaaggcgtggtttatcaggcgcggaacggaaagaagtctcgatggagatgattaatatgcacgaaaagcagcagtttatggatgacaaaaaactaattgcaattatatctgaagcagggtcagctggtgtttctctccatgctgatagaagggcaaaaaaccagagaagaagagtacacataacacttgaactcccttggagtgcagatcgtgcaatacagcagtttgggaggacccatcgttctaatcaaacttctgcccctcaatataggcttctttttacaaatcttggtggtgaaaagcgatttgcatcaattgtggcaaaaaggctagagtctcttggtgctttaacacaaggagatcgcagggctgggccttctttgagtgcttttaactatgatagcaactatgggaaaaaggcattaaccatgatgtataggggaataatggaacaggtgatcaggattcttttccagttgttcctccggggtgttctgatgatgaaactagcatccaagaattcatcaatgaagcaaaagctgctctagtatcagttggaattattagggatgctttcatatgcaatggaaaagatccagggaagctttctggtcggattgtagattcagatatgcatgatgttgctcgttttctcaaccgccttttggggttgtctccaaacatccaaaacaggttgtttgatctttttacaagtatacttgatattgtccttcacaatgcaaggatagaagggcagctagattctggaattgttgatatcaaagctaagaatgttgaaatgacagaatcacctaggactgttcacactgatagcttgtctggtgctttgacggtactatttactttcaccattgaccggggagttacttgggagtcggcaaaaacgatgcttgaggaaagggagaaatttggtgctggtacttccattgatggcttttacgagtccagaagggaatggatggggagaaggcacttcattctatctttggaaggctcaactgaaggaatgtacaaaataatccggcctgctattggtgaagcattgagggagatgccttcaagtgaactgaaaagcaagtacaggaaggtgtcatcaatagacaaagttagtaaaggatggcaggaagagtacgatgcttcatcgaagcagtgtatgcatggatctaaatgtaaaattgggagctactgtactgtaggaagaaggttgcaagagcttaatatattgggtggcctcatacttccagtttggggtacaatagaaaaggccctggccaagcaggaacgcctcattcacaagagaatacgggttgtccgtttagtcacaacaaatgacagtcagcgaatcgttgggctgctgattccgaattcagcggtagagtcagtactaacaggtttgcaatgggtgggacattgatgactgacatggaaaggcttgaattttgtttctcagctgcattcagtttgctgggctttttttaacttcgtggcactgttctgatattagatgcagcagcatctagggcacacttgattttgtttgtagggagatagcaaggtaacttacccgaagcgatgaaattcttagcttacaggtcaggcaggtatatgctgacaacttttgtatgtaaaatacgcggtgcggtgtggtgcggctgtaagacatgtaatgtaaagctactaaaaaagctcaggttaatctcaaaagaaagtcgcacctcacaatctggtgctgccacaatgataatgtttcatgtggagttactgcttatgtcggactgaactgcacaagaaaaactaaggcttatttatattatagccaaattatcta

SEQ ID NO: 17782 - DNA, 1846 bp, Zea Mays
cctgacaatgttgctgaaataactgggcgtcgtggcatgctagtaagagctttggatgggaaaggcgtggtttatcaggcgcggaacgcgaaagaagtctcgatggagatgattaatatgcacgaaaagcagcagtttatggatgacaaaaaactaattgcaattatatctgaagcagggtcagctggtgtttctctccatgctgatagaagggcaaaaaaccagagaagaagagtacacataacacttgaactcccttggagtgcagatcgtgcaatacagcagtttgggaggacccatcgttctaatcaaacttctgcccctcaatataggcttctttttacaaatcttggtggtgaaaagcgatttgcatcaattgtggcaaaaaggctagagtctcttggtgctttaacacaaggagatcgcagggctgggccttctttgagtgcttttaactatgatagcaactatgggaaaaaggcattaaccatgatgtataggggaataatggaacaggattcttttccagttgttcctccggggtgttctgatgatgaaactagcatccaagaattcatcaatgaagcaaaagctgctctagtatcagttggaattattagggatgctttcatatgcaatggaaaagatccagggaagctttctggtcggattgtagattcagatatgcatgatgttgctcgttttctcaaccgccttttggggttgtctccaaacatccaaaacagaagggcagctagattctggaattgttgatatcaaagctaagaatgttgaaatgacagaatcacctaggactgttcacactgatagcttgtctggtgctttgacggtactatttactttcaccattgaccggggagttacttgggagtcggcaaaaacgatgcttgaggaaagggagaaatttggtgctggtacttccattgatggcttttacgagtccagaagggaatggatggggagaaggcacttcattctatctttggaaggctcaactgaaggaatgtacaaaataatccggcctgctattggtgaagcattgagggagatgccttcaagtgaactgaaaagcaagtacaggaaggtgtcatcaatagacaaagttagtaaaggatggcaggaagagtacgatgcttcatcgaagcagtgtatgcatggatctaaatgtaaaattgggagctactgtactgtaggaagaaggttgcaagagcttaatatattgggtggcctcatacttccagtttggggtacaatagaaaaggccctggccaagcaggaacgcctcattcacaagagaatacgggttgtccgtttagtcacaacaaatgacagtcagcgaatcgttgggctgctgattccgaattcagcggtagagtcagtactaacaggtttgcaatgggtgggacattgatgactgacatggaaaggcttgaattttgtttctcagctgcattcagtttgctgggctttttttaacttcgtggcactgttctgatattagatgcagcagcatctagggcacacttgattttgtttgtagggagatagcaaggtaacttacccgaagcgatgaaattcttagcttacaggtcaggcaggtatatgctgacaacttttgtatgtaaaatacgcggtgcggtgtggtgcggctgtaagacatgtaatgtaaagctactaaaaaagctcaggttaatctcaaaagaaagtcgcacctcacaatctggtgctgccacaatgataatgtttcatgtggagttactgcttatgtcggactgaactgcacaagaaaaactaaggcttatttatattatagccaaattatcta

SEQ ID NO: 17783 - DNA, 1248 bp, Zea Mays
tgctagtaagagctttggatgggaaaggcgtggtttatcaggcgcggaacgcgaaagaagtctcgatggagatgattaatatgcacgaaaagcagcagtttatggatgacaaaaaactaattgcaattatatctgaagcagggtcagctggtgtttctctccatgctgatagaagggcaaaaaaccagagaagaagagtacacataacacttgaactcccttggagtgcagatcgtgcaatacagcagtttgggaggacccatcgttctaatcaaacttctgcccctcaatataggcttctttttacaaatcttggtggtgaaaagcgatttgcatcaattgtggcaaaaaggctagagtctcttggtgctttaacacaaggagatcgcagggctgggccttctttgagtgcttttaactatgatagcaactatgggaaaaaggcattaaccatgatgtataggggaataatggaacaggattcttttccagttgttcctccggggtgttctgatgatgaaactagcatccaagaattcatcaatgaagcaaaagctgctctagtatcagttggaattattagggatgctttcatatgcaatggaaaagatccagggaagctttctggtcggattgtagattcagatatgcatgatgttgctcgttttctcaaccgccttttggggttgtctccaaacatccaaaacaggttgtttgatctttttacaagtatacttgatattgtccttcacaatgcaaggatagaagggcagctagattctggaattgttgatatcaaagctaagaatgttgaaatgacagaatcacctaggactgttcacactgatagcttgtctggtgctttgacggtactatttactttcaccattgaccggggagttacttgggagtcggcaaaaacgatgcttgaggaaagggagaaatttggtgctggtacttccattgatggcttttacgagtccagaagggaatggatggggagaaggcacttcattctatctttggaaggctcaactgaaggaatgtacaaaataatccggcctgctattggtgaagcattgagggagatgccttcaagtgaactgaaaagcaagtacaggaaggtgtcatcaatagacaaagttagtaaaggatggcaggaagagtacgatgcttcatcgaagcaggtactcgtatgccaccaccacccccaccggtggccccttcgccggctgtgcccctcgtctc

SEQ ID NO: 17784 - DNA, 2439 bp, Zea Mays
ccgctccgctgctccggaaccctcgccgtgaggtcaccgccgatggccggggactcgtccccttccccggcctccgcacctgtccaggtgcgctgcgctggttgccgtagcatcctcgctgtcggcctcggtgtaactgaattcatctgccccaagtgccgcatggcgcagcgcctcccgccacagctcatggccaagtccacctcgccctcgtcgcctctgcccaaagccccctcgaagccttctctgcctcctacgcagccccggatgggtgcgccgtcggctcagggggtggaccccacgaagatccagctcccctgtgcgggctgccaggccgtcctcaacgtgccccacggtctcgcccgcttccgctgtccgcagtgtggcgtcgaccttgccgtggaccacgccaagctacaaaacttcctcgccgcctccaacagcgccacgtcatcaggccatgccccgacctcggtgaggacgcagccgcctctggcgacattcctctccgtgttgccgctgcagctagtgcctggtgcaacaatttccatggtgctgcctgccgctgaaccacatgaggagatcaatgaggttgccattgatgttgagcgtgatgaagatgaaggtggcactgttggagaaacttttactgactataggccttccaagctatcacttggtctatctcatccagatccagttgtagaaacttcttctctgtcagctgtacaacctcctgaaccaacttactgcttgaatatcatggacgaattagatgagacaaatgcattgtcttgtttgcaaattgaaacaatagtttatgcttgtcagaggcatcttcatcatctccctactggccatagagcaggttttttcattggtgatggggctggcgttggtaagggccgaacaattgctgggttaatctgggaaaattggcagcagggaaggcataaagcagtgtgggtatctgttggttctgacttaaagtatgatgctcgaagagatttggatgatgttggtgctaagtgtgtccaagcaattggttcaatggtgtgggcaagagtttgatggtcttcttgtatttgatgagtgccacaaggccaaaaatctgattcctgatgccggaagccagcccactcgcactggtaaaacagttcttgagatccaggaaaagttgcacgaggctcgggttgtttactgttcagcaactggtgcatcagaaccacgaaatttgggctatatggttcgtcttggactttggggtgaaggaacatcatttcaaacttttccacaatttttaggtgctcttgagaaaggtggtgtgggagcacttgaacttgttgccatggacatgaaagctaggggtatgtatgtatgccgtacattaagttacaaaggggctgatttttatatagtggaggctccacttgaggaaagaatgatgaagagcagctgaattctgggctgaactgcgccttgaacttttatcagcaagtgaattatttgctgatggcaattcaaatcaaatatggcgattgtattgggccagccatcagcgtttcttcaggcacatgtgcatgtctgcaaaggtacctgctgttgtgaggttagctaaagaggccttggcagagaacaaatgtgtggtgattggccttcagagcactggagaagctagaactgaagaagctgtcacaaaatatggagttgaaatggaagactttgtttctggccctcgggagcttcttcttaagttggtagaagaaaactaccctttacctccaaaacctgattcttttcagcaaggtgaagaaacagtcacagagattcagcgtaaacgtgcactggatgtatcatttaaagggcgagttaggaaagtagcgaaagtggtagatgtgagcgatgacgacaccgatgattattctccatctgagtcagatcatgaatcaacagaatctgatgaggagttccacatgtgtcaaatttgcaacacagaggaggagcagagcctgttgcttcattgttctggttgttctcggcatgttcaccctcattgtctaacaccaccatggactgggacgattacggatgattgggcatgctacacgtgcaagatagtagaagacgaggaaaagaagcaagatgcccatgtagctgattgtttaaagagaatttcactcctcatgtctatgaagagaataccatgctctggtggaaaagatgtagtgatcagttgcatggaattgccagaaaaggactaaactcgcttatcagtctcagcctctggatattgtggaaacactgaaacgtctgtgtttttgacggccttgctccctgccttaatgaagccatcaagagaactgacgaggaaagggacctgtgggtgttaggaggggctacaaacttagatctcttaacagccccatcccaggtcttagg

SEQ ID NO: 17785 - DNA, 2573 bp, Zea Mays
cccgctccgctgctccggaaccctcgccgtgaggtcaccgccgatggccggggactcgtccccttccccggcctccgcacctgtccaggtgcgctgcgctggttgccgtagcatcctcgctgtcggcctcggtgtaactgaattcatctgccccaagtgccgcatggcgcagcgcctcccgccacagctcatggccaagtccacctcgccctcgtcgcctctgcccaaagccccctcgaagccttctctgcctcctacgcagccccggatgggtgcgccgtcggctcagggggtggaccccacgaagatccagctcccctgtgcgggctgccaggccgtcctcaacgtgccccacggtctcgcccgcttccgctgtccgcagtgtggcgtcgaccttgccgtggaccacgccaagctacaaaacttcctcgccgcctccaacagcgccacgtcatcaggccatgccccgacctcggtgaggacgcagccgcctctggcgacattcctctccgtgttgccgctgcagctagtgcctggtgcaacaatttccatggtgctgcctgccgctgaaccacatgaggagatcaatgaggttgccattgatgttgagcgtgatgaagatgaaggtggcactgttggagaaacttttactgactataggccttccaagctatcacttggtctatctcatccagatccagttgtagaaacttcttctctgtcagctgtacaacctcctgaaccaacttactgcttgaatatcatggacgaattagatgagacaaatgcattgtcttgtttgcaaattgaaacaatagtttatgcttgtcagaggcatcttcatcatctccctactggccatagagcaggttttttcattggtgatggggctggcgttggtaagggccgaacaattgctgggttaatctgggaaaattggcagcagggaaggcataaagcagtgtgggtatctgttggttctgacttaaagtatgatgctcgaagagatttggatgatgttggtgctaagtgtgtccaagtgcaccctttaaataagttaccttattctaagctagattcgaaggccattggaattaagaatggagtaatttttgtaacttatagtagcctaatagcatcgtctgagagaggccgctcccgtttgcagcaattggttcaatggtgtgggcaagagtttgatggtcttcttgtatttgatgagtgccacaaggccaaaaatctgattcctgatgccggaagccagcccactcgcactggtaaaacagttcttgagatccaggaaaagttgcacgaggctcgggttgtttactgttcagcaactggtgcatcagaaccacgaaatttgggctatatggttcgtcttggactttggggtgaaggaacatcatttcaaacttttccacaatttttaggtgctcttgagaaaggtggtgtgggagcacttgaacttgttgccatggacatgaaagctaggggtatgtatgtatgccgtacattaagttacaaaggggctgatttttatatagtggaggctccacttgaggaaagaatgatgaacatgtacagaagagcagctgaattctgggctgaactgcgccttgaacttttatcagcaagtgaattatttgctgatggcaattcaaatcaaatatggcgattgtattgggccagccatcagcgtttcttcaggcacatgtgcatgtctgcaaaggtacctgctgttgtgaggttagctaaagaggccttggcagagaacaaatgtgtggtgattggccttcagagcactggagaagctagaactgaagaagctgtcacaaaatatggagttgaaatggaagactttgtttctggccctcgggagcttcttcttaagttggtagaagaaaactaccctttacctccaaaacctgattcttttcagcaaggtgaagaaacagtcacagagattcagcgtaaacgtgcactggatgtatcatttaaagggcgagttaggaaagtagcgaaagtggtagatgtgagcgatgacgacaccgatgattattctccatctgagtcagatcatgaatcaacagaatctgatgaggagttccacatgtgtcaaatttgcaacacagaggagagcctgttgcttcattgttctggttgttctcggcatgttcaccctcattgtctaacaccaccatggactgggacgattacggatgattgggcatgctacacgtgcaagatagtagaagacgaggaaaagaagcaagatgcccatgtagctgattgtttaaagagaatttcactcctcatgtctatgaagagaataccatgctctggtggaaaagatgtagtgatcagttgcatggaattgccagaaaaggactaaactcgcttatcagtctcagcctctggatattgtggaaacactgaaacgtctgtgtttttgacggccttgctccctgccttaatgaagccatcaagagaactgacgaggaaagggacctgtgggtgttaggaggggctacaaacttagatctcttaacagccccatcccaggtcttagg

SEQ ID NO: 17786 - DNA, 2459 bp, Zea Mays
catacccccccgctccgctgctccggaaccctcgccgtgaggtcaccgccgatggccggggactcgtccccttccccggcctccgcacctgtccaggtgcgctgcgctggttgccgtagcatcctcgctgtcggcctcggtgtaactgaattcatctgccccaagtgccgcatggcgcagcgcctcccgccacagctcatggccaagtccacctcgccctcgtcgcctctgcccaaagccccctcgaagccttctctgcctcctacgcagccccggatgggtgcgccgtcggctcagggggtggaccccacgaagatccagctcccctgtgcgggctgccaggccgtcctcaacgtgccccacggtctcgcccgcttccgctgtccgcagtgtggcgtcgaccttgccgtggaccacgccaagctacaaaacttcctcgccgcctccaacagcgccacgtcatcaggccatgccccgacctcggtgaggacgcagccgcctctggcgacattcctctccgtgttgccgctgcagctagtgcctggtgcaacaatttccatggtgctgcctgccgctgaaccacatgaggagatcaatgaggttgccattgatgttgagcgtgatgaagatgaaggtggcactgttggagaaacttttactgactataggccttccaagctatcacttggtctatctcatccagatccagttgtagaaacttcttctctgtcagctgtacaacctcctgaaccaacttactgcttgaatatcatggacgaattagatgagacaaatgcattgtcttgtttgcaaattgaaacaatagtttatgcttgtcagaggcatcttcatcatctccctactggccatagagcaggttttttcattggtgatggggctggcgttggtaagggccgaacaattgctgggttaatctgggaaaattggcagcagggaaggcataaagcagtgtgggtatctgttggttctgacttaaagtatgatgctcgaagagatttggatgatgttggtgctaagtgtgtccaagcaattggttcaatggtgtgggcaagagtttgatggtcttcttgtatttgatgagtgccacaaggccaaaaatctgattcctgatgccggaagccagcccactcgcactggtaaaacagttcttgagatccaggaaaagttgcacgaggctcgggttgtttactgttcagcaactggtgcatcagaaccacgaaatttgggctatatggttcgtcttggactttggggtgaaggaacatcatttcaaacttttccacaatttttaggtgctcttgagaaaggtggtgtgggagcacttgaacttgttgccatggacatgaaagctaggggtatgtatgtatgccgtacattaagttacaaaggggctgatttttatatagtggaggctccacttgaggaaagaatgatgaacatgtacagaagagcagctgaattctgggctgaactgcgccttgaacttttatcagcaagtgaattatttgctgatggcaattcaaatcaaatatggcgattgtattgggccagccatcagcgtttcttcaggcacatgtgcatgtctgcaaaggtacctgctgttgtgaggttagctaaagaggccttggcagagaacaaatgtgtggtgattggccttcagagcactggagaagctagaactgaagaagctgtcacaaaatatggagttgaaatggaagactttgtttctggccctcgggagcttcttcttaagttggtagaagaaaactaccctttacctccaaaacctgattcttttcagcaaggtgaagaaacagtcacagagattcagcgtaaacgtgcactggatgtatcatttaaagggcgagttaggaaagtagcgaaagtggtagatgtgagcgatgacgacaccgatgattattctccatctgagtcagatcatgaatcaacagaatctgatgaggagttccacatgtgtcaaatttgcaacacagaggaggagcagagcctgttgcttcattgttctggttgttctcggcatgttcaccctcattgtctaacaccaccatggactgggacgattacggatgattgggcatgctacacgtgcaagatagtagaagacgaggaaaagaagcaagatgcccatgtagctgattgtttaaagagaatttcactcctcatgtctatgaagagaataccatgctctggtggaaaagatgtagtgatcagttgcatggaattgccagaaaaggactaaactcgcttatcagtctcagcctctggatattgtggaaacactgaaacgtctgtgtttttgacggccttgctccctgccttaatgaagccatcaagagaactgacgaggaaagggacctgtgggtgttaggaggggctacaaacttagatctcttaacagccccatcccaggtcttagg

SEQ ID NO: 17787 - DNA, 2590 bp, Zea Mays
ccaccatacccccccgctccgctgctccggaaccctcgccgtgaggtcaccgccgatggccggggactcgtccccttccccggcctccgcacctgtccaggtgcgctgcgctggttgccgtagcatcctcgctgtcggcctcggtgtaactgaattcatctgccccaagtgccgcatggcgcagcgcctcccgccacagctcatggccaagtccacctcgccctcgtcgcctctgcccaaagccccctcgaagccttctctgcctcctacgcagccccggatgggtgcgccgtcggctcagggggtggaccccacgaagatccagctcccctgtgcgggctgccaggccgtcctcaacgtgccccacggtctcgcccgcttccgctgtccgcagtgtggcgtcgaccttgccgtggaccacgccaagctacaaaacttcctcgccgcctccaacagcgccacgtcatcaggccatgccccgacctcggtgaggacgcagccgcctctggcgacattcctctccgtgttgccgctgcagctagtgcctggtgcaacaatttccatggtgctgcctgccgctgaaccacatgaggagatcaatgaggttgccattgatgttgagcgtgatgaagatgaaggtggcactgttggagaaacttttactgactataggccttccaagctatcacttggtctatctcatccagatccagttgtagaaacttcttctctgtcagctgtacaacctcctgaaccaacttactgcttgaatatcatggacgaattagatgagacaaatgcattgtcttgtttgcaaattgaaacaatagtttatgcttgtcagaggcatcttcatcatctccctactggccatagagcaggttttttcattggtgatggggctggcgttggtaagggccgaacaattgctgggttaatctgggaaaattggcagcagggaaggcataaagcagtgtgggtatctgttggttctgacttaaagtatgatgctcgaagagatttggatgatgttggtgctaagtgtgtccaagtgcaccctttaaataagttaccttattctaagctagattcgaaggccattggaattaagaatggagtaatttttgtaacttatagtagcctaatagcatcgtctgagagaggccgctcccgtttgcagcaattggttcaatggtgtgggcaagagtttgatggtcttcttgtatttgatgagtgccacaaggccaaaaatctgattcctgatgccggaagccagcccactcgcactggtaaaacagttcttgagatccaggaaaagttgcacgaggctcgggttgtttactgttcagcaactggtgcatcagaaccacgaaatttgggctatatggttcgtcttggactttggggtgaaggaacatcatttcaaacttttccacaatttttaggtgctcttgagaaaggtggtgtgggagcacttgaacttgttgccatggacatgaaagctaggggtatgtatgtatgccgtacattaagttacaaaggggctgatttttatatagtggaggctccacttgaggaaagaatgataacatgtacagaagagcagctgaattctgggctgaactgcgccttgaacttttatcagcaagtgaattatttgctgatggcaattcaaatcaaatatggcgattgtattgggccagccatcagcgtttcttcaggcacatgtgcatgtctgcaaaggtacctgctgttgtgaggttagctaaagaggccttggcagagaacaaatgtgtggtgattggccttcagagcactggagaagctagaactgaagaagctgtcacaaaatatggagttgaaatggaagactttgtttctggccctcgggagcttcttcttaagttggtagaagaaaactaccctttacctccaaaacctgattcttttcagcaaggtgaagaaacagtcacagagattcagcgtaaacgtgcactggatgtatcatttaaagggcgagttaggaaagtagcgaaagtggtagatgtgagcgatgacgacaccgatgattattctccatctgagtcagatcatgaatcaacagaatctgatgaggagttccacatgtgtcaaatttgcaacacagaggaggagcagagcctgttgcttcattgttctggttgttctcggcatgttcaccctcattgtctaacaccaccatggactgggacgattacggatgattgggcatgctacacgtgcaagatagtagaagacgaggaaaagaagcaagatgcccatgtagctgattgtttaaagagaatttcactcctcatgtctatgaagagaataccatgctctggtggaaaagatgtagtgatcagttgcatggaattgccagaaaaggactaaactcgcttatcagtctcagcctctggatattgtggaaacactgaaacgtctgtgtttttgacggccttgctccctgccttaatgaagccatcaagagaactgacgaggaaagggacctgtgggtgttaggaggggctacaaacttagatctcttaacagccccatcccaggtcttagg

SEQ ID NO: 17788 - DNA, 2574 bp, Zea Mays
agcgtgaaaggaaaccgagaccaccatacccccccgctccgctgctccggaaccctcgccgtgaggtcaccgccgatggccggggactcgtccccttccccggcctccgcacctgtccaggtgcgctgcgctggttgccgtagcatcctcgctgtcggcctcggtgtaactgaattcatctgccccaagtgccgcatggcgcagcgcctcccgccacagctcatggccaagtccacctcgccctcgtcgcctctgcccaaagccccctcgaagccttctctgcctcctacgcagccccggatgggtgcgccgtcggctcagggggtggaccccacgaagatccagctcccctgtgcgggctgccaggccgtcctcaacgtgccccacggtctcgcccgcttccgctgtccgcagtgtggcgtcgaccttgccgtggaccacgccaagctacaaaacttcctcgccgcctccaacagcgccacgtcatcaggccatgccccgacctcggtgaggacgcagccgcctctggcgacattcctctccgtgttgccgctgcagctagtgcctggtgcaacaatttccatggtgctgcctgccgctgaaccacatgaggagatcaatgaggttgccattgatgttgagcgtgatgaagatgaaggtggcactgttggagaaacttttactgactataggccttccaagctatcacttggtctatctcatccagatccagttgtagaaacttcttctctgtcagctgtacaacctcctgaaccaacttactgcttgaatatcatggacgaattagatgagacaaatgcattgtcttgtttgcaaattgaaacaatagtttatgcttgtcaggttttttcattggtgatggggctggcgttggtaagggccgaacaattgctgggttaatctgggaaaattggcagcagggaaggcataaagcagtgtgggtatctgttggttctgacttaaagtatgatgctcgaagagatttggatgatgttggtgctaagtgtgtccaagtgcaccctttaaataagttaccttattctaagctagattcgaaggccattggaattaagaatggagtaatttttgtaacttatagtagcctaatagcatcgtctgagagaggccgctcccgtttgcagcaattggttcaatggtgtgggcaagagtttgatggtcttcttgtatttgatgagtgccacaaggccaaaaatctgattcctgatgccggaagccagcccactcgcactggtaaaacagttcttgagatccaggaaaagttgcacgaggctcgggttgtttactgttcagcaactggtgcatcagaaccacgaaatttgggctatatggttcgtcttggactttggggtgaaggaacatcatttcaaacttttccacaatttttaggtgctcttgagaaaggtggtgtgggagcacttgaacttgttgccatggacatgaaagctaggggtatgtatgtatgccgtacattaagttacaaaggggctgatttttatatagtggaggctccacttgaggaaagaatgatgaacatgtacagaagagcagctgaattctgggctgaactgcgccttgaacttttatcagcaagtgaattatttgctgatggcaattcaaatcaaatatggcgattgtattgggccagccatcagcgtttcttcaggcacatgtgcatgtctgcaaaggtacctgctgttgtgaggttagctaaagaggccttggcagagaacaaatgtgtggtgattggccttcagagcactggagaagctagaactgaagaagctgtcacaaaatatggagttgaaatggaagactttgtttctggccctcgggagcttcttcttaagttggtagaagaaaactaccctttacctccaaaacctgattcttttcagcaaggtgaagaaacagtcacagagattcagcgtaaacgtgcactggatgtatcatttaaagggcgagttaggaaagtagcgaaagtggtagatgtgagcgatgacgacaccgatgattattctccatctgagtcagatcatgaatcaacagaatctgatgaggagttccacatgtgtcaaatttgcaacacagaggaggagcagagcctgttgcttcattgttctggttgttctcggcatgttcaccctcattgtctaacaccaccatggactgggacgattacggatgattgggcatgctacacgtgcaagatagtagaagacgaggaaaagaagcaagatgcccatgtagctgattgtttaaagagaatttcactcctcatgtctatgaagagaataccatgctctggtggaaaagatgtagtgatcagttgcatggaattgccagaaaaggactaaactcgcttatcagtctcagcctctggatattgtggaaacactgaaacgtctgtgtttttgacggccttgctccctgccttaatgaagccatcaagagaactgacgaggaaagggacctgtgggtgttaggaggggctacaaacttagatctcttaacagccccatcccaggtcttagg

SEQ ID NO: 17789 - DNA, 3065 bp, Zea Mays
cttgactaattttagcaactagctattagttataaagttttagaacaagactttatactatctaaaactttgattttttctacacttaatactaaataatcattagtcataaaaggatgtacaaaactgagaggggggcatgacccactttacctctcccttggatccgcctctggtgaggaggtgttgccatacccctgtaaatggtatgacccggagcatggtcttatacttgttgtttgacttgtgaccgtttgatttcggttgagagccaagaccaggatcgagggctgtacctttttaagcactattttgagccacgttgttggaaatcctcttagaccgtctctaatgaacaacgtaaaatatgagacacagaaccgtaaataacatgtttgataatgtttttaaaataaagtttgggacattgcgataaaatagcgttgaagatagccttgcatcgtgtttcactttcccatttgccacccaacaattatcgaaatcttcaaataccggcccagaccgaccatcccactggctgtaccgtttcggcttctttctgctcttcccgagcgtgaaaggaaaccgagaccaccatacccccccgctccgctgctccggaaccctcgccgtgaggtcaccgccgatggccggggactcgtccccttccccggcctccgcacctgtccaggtgcgctgcgctggttgccgtagcatcctcgctgtcggcctcggtgtaactgaattcatctgccccaagtgccgcatggcgcagcgcctcccgccacagctcatggccaagtccacctcgccctcgtcgcctctgcccaaagccccctcgaagccttctctgcctcctacgcagccccggatgggtgcgccgtcggctcagggggtggaccccacgaagatccagctcccctgtgcgggctgccaggccgtcctcaacgtgccccacggtctcgcccgcttccgctgtccgcagtgtggcgtcgaccttgccgtggaccacgccaagctacaaaacttcctcgccgcctccaacagcgccacgtcatcaggccatgccccgacctcggttgccattgatgttgagcgtgatgaagatgaaggtggcactgttggagaaacttttactgactataggccttccaagctatcacttggtctatctcatccagatccagttgtagaaacttcttctctgtcagctgtacaacctcctgaaccaacttactgcttgaatatcatggacgaattagatgagacaaatgcattgtcttgtttgcaaattgaaacaatagtttatgcttgtcagaggcatcttcatcatctccctactggccatagagcaggttttttcattggtgatggggctggcgttggtaagggccgaacaattgctgggttaatctgggaaaattggcagcagggaaggcataaagcagtgtgggtatctgttggttctgacttaaagtatgatgctcgaagagatttggatgatgttggtgctaagtgtgtccaagtgcaccctttaaataagttaccttattctaagctagattcgaaggccattggaattaagaatggagtaatttttgtaacttatagtagcctaatagcatcgtctgagagaggccgctcccgtttgcagcaattggttcaatggtgtgggcaagagtttgatggtcttcttgtatttgatgagtgccacaaggccaaaaatctgattcctgatgccggaagccagcccactcgcactggtaaaacagttcttgagatccaggaaaagttgcacgaggctcgggttgtttactgttcagcaactggtgcatcagaaccacgaaatttgggctatatggttcgtcttggactttggggtgaaggaacatcatttcaaacttttccacaatttttaggtgctcttgagaaaggtggtgtgggagcacttgaacttgttgccatggacatgaaagctaggggtatgtatgtatgccgtacattaagttacaaaggggctgatttttatatagtggaggctccacttgaggaaagaatgatgaacatgtacagaagagcagctgaattctgggctgaactgcgccttgaacttttatcagcaagtgaattatttgctgatggcaattcaaatcaaatatggcgattgtattgggccagccatcagcgtttcttcaggcacatgtgcatgtctgcaaaggtacctgctgttgtgaggttagctaaagaggccttggcagagaacaaatgtgtggtgattggccttcagagcactggagaagctagaactgaagaagctgtcacaaaatatggagttgaaatggaagactttgtttctggccctcgggagcttcttcttaagttggtagaagaaaactaccctttacctccaaaacctgattcttttcagcaaggtgaagaaacagtcacagagattcagcgtaaacgtgcactggatgtatcatttaaagggcgagttaggaaagtagcgaaagtggtagatgtgagcgatgacgacaccgatgattattctccatctgagtcagatcatgaatcaacagaatctgatgaggagttccacatgtgtcaaatttgcaacacagaggaggagcagagcctgttgcttcattgttctggttgttctcggcatgttcaccctcattgtctaacaccaccatggactgggacgattacggatgattgggcatgctacacgtgcaagatagtagaagacgaggaaaagaagcaagatgcccatgtagctgattgtttaaagagaatttcactcctcatgtctatgaagagaataccatgctctggtggaaaagatgtagtgatcagttgcatggaattgccagaaaaggactaaactcgcttatcagtctcagcctctggatattgtggaaacactgaaacgtctgtgtttttgacggccttgctccctgccttaatgaagccatcaagagaactgacgaggaaagggacctgtgggtgttaggaggggctacaaacttagatctcttaacagccccatcccaggtcttagg

SEQ ID NO: 17790 - DNA, 352 bp, Zea Mays
atcggcccaccacatcggcactaagacagagcagaccgcacacggtagtacgacacaccacacagacacagcgtggagccgccacttctcttctcagcgctcccaatccagcggcggcggcggcacgccggcacccacccggtagaaactgtgatctgctctaatggctaccgaaggtgaagcttcacctccacggaagcgtatgttgttggagttgccttgtgatgaagaaggtgttaatgtgagtcaaactgttggtgtgtctgcatcatcagccacacctgccagagcttctcaagaactcgtgaactttatgatgaacttgttatattgtgtacttgtgttctttgtg

SEQ ID NO: 17791 - DNA, 3198 bp, Zea Mays
ccaacagagccgtggctccttctcgctcgctctctttctctcgcgactcccaccgccgcctggcgccgccacactcggccgcactgctcgcctgcccgttcggttgcgccgctcacccgcccgctcagctgcgtcgtcgctgaccgccccgctcggacactccacgtccatcccccgtcggtccgtcgcggcgccgccacaactgctttgcgaatcggcgacctgttgccggcgacaggacgcgggaaggcagccagccatccagcctcttcctacgtctgaatctgagagacgttggctgagatccatctatcttgccgtttcctggcggtgagcaacgctagcgcgcatgtcgtcgcggctgtgcgtgaagaacctgcccaagggcgccgacgagaggcggctgcgggatgtgttctcgcggaagggcgaggtcaccgacgccaaggtcatccgaacaaaggatggcaagagtcggcagtttgcattcattggttacagaaccaatgaagaggcagatgaggcactcaagtatttcaacaatacatacatcgacacttgtaagatcacctgcgaggttgcccgaaaaattggtgaccctgatgctcctcgcccttggagccgccattctttaaagaagtctgaatatggtagtaaagacaagaataatgctggagctgttgatgcaccacctaaaggttccaacgcacaaggaacatcggctcatgctagtggttctaaaggcagtgtagctaatgatcccaagtttctagagttccttgaagctatgcagccccgttctaaagccaagatgtgggcaaatgatacagctgctactcttgacactgctgcaaaagatagtgtagtagccgctaaagaatctaagggacctctaaaaaatgttctgacctctgagaacgattcatcttctgaagacacttctgatgagaaagtggcaaatgatttgtcttccgaaaatgcttcggagcagctaaagacagagaataaacaagacaagaatatgactgatgcagatttcttcaagagtaaagtcaagaaaaattggtcagattctgaatctgatgacgaaggttctgctcaccagtcaaataccaccactgatgatgaagactcgtcagatgaatcacaagattcagataaccagttggcagatactaagggcgatcctgacaagagaaacattgtggacaaggacactcttgtggagaatactgacttgcaagagccggaggatcttgacaacaaagagagtgaagatcttgatggcagaccaagaggaactgaaattcatgaagatcaagaaagggcagatgaaaacggtgctccaattactgatgaaaagaagttggccctggagactggtcgtctatatatctgcaaccttccatatgcaaccagatgatttagtggagctgtgccgccaatatggtgatgtggaacaggcacatattgttgtcaataaagccacaaagatctcaactggtagaggctatgtgctttttagccttccggactcagcagtcagggcacttgatgaactagataactcaagctttcagggacgagtgttacgtgttaaggctgctaaaccgctaaataagttggagtcttttcatgaaactgctgtggagaaagtaagtctcaagcagaaaaggttggaacaaaagaaagcttctgagatcagtggggatacaagagcatggaacagcttttatatgcgtcaagatactgttgttgaaaacattgcaaggaagaatggtatcagtaagagtgagttactcgatagagaagcagatgatcttgctgttcgtattgctcttggtgagacacacgtcattgcagagactaagaaatttctatcaaggtctggagttaatgttgctgcattggaagaacatgcttctaaacgaaatgagaagttcaaaagaagcaattatgtgatattagtaaagaacttgccatttaattctactgaggaagaactcgcgacactgtttcagaaacatggtagtttggataaaatcattctacctccaacgagagtgtttgccttggtagtctttgttgaagcaactgaagcccaatacgcattcaaaaaactactatatacacgatataaggatactcctctgtatttggagtgggcacctgaaaacatattgtctcctacctcagcaccggtggatgaggaagtaaaaaacgaagttggcgagcgtattcttactaaagctaatatagatcaaactgtagaaggagtaagcgctgaagagattgatccagatagagtggagtcacgatctgtgtttgtcaagaacttaaatttcaagacaacagatgaatcattgaagcagcatttcagtacaaagctaaagagtggcagtcttaaaagtgcaacggtgaagaagcatgttaagaagggcaagaatgtttcaatgggatttggttttgttgagtttgactctgttgaaactgctaccggtgtgtgcaaggatctacagggaacggttctggatggacatgctttgatcttgcaactgtgtcatgtgaagaaagatggtcaagcggcaaagaagaatggcaaggataaaagttcaacaaaactgctcgtgcgaaatgtagcatttgaagcaactgagaaggacttgaggcagttatttagtccgtttggccagatcaaaagcctcaggttgcctatgaagtttggtagccacagaggttttgcgtttgtggaatacgtcacaaaacaagaggcccagaacgctctacaagccctcgcaagcactcatctctatggtcgacacctggtgattgagcgagcaaaggaaggagagactctcgaagaactgcgggagagaactgccgcacagtttgtggacgaaagcagcggtttccagagcttgtccagtaagaggaaacggagcattctcgtggacgaaggctccgttaaagtttcaagaatagcagagtgattatcttgagcgagcacctgaaatttttgaccaatgttatgcaatagtaccagttcgttagggggggaaatgggttatcttaggttgtttaatgtttgtgtgctgttttagagctgaggaaaagaaatgctgaaaagaatctcacatcttaatgcaagagctgtctaaatgcaagcatatttctacagcctaagacaccaaaaagaaa

SEQ ID NO: 17792 - DNA, 3514 bp, Zea Mays
gttcagtccaacagagccgtggctccttctcgctcgctctctttctctcgcgactcccaccgccgcctggcgccgccacactcggccgcactgctcgcctgcccgttcggttgcgccgctcacccgcccgctcagctgcgtcgtcgctgaccgccccgctcggacactccacgtccatcccccgtcggtccgtcgcggcgccgccacaactgctttgcgaatcggcgacctgttgccggcgacaggacgcgggaaggcagccagccatccagcctcttcctacgtctgaatctgagagacgttggctgagatccatctatcttgccgtttcctggcggtgagcaacgctagcgcgcatgtcgtcgcggctgtgcgtgaagaacctgcccaagggcgccgacgagaggcggctgcgggatgtgttctcgcggaagggcgaggtcaccgacgccaaggtcatccgaacaaaggatggcaagagtcggcagtttgcattcattggttacagaaccaatgaagaggcagatgaggcactcaagtatttcaacaatacatacatcgacacttgtaagatcacctgcgaggttgcccgaaaaattggtgaccctgatgctcctcgcccttggagccgccattctttaaagaagtctgaatatggtagtaaagacaagaataatgctggagctgttgatgcaccacctaaaggttccaacgcacaaggaacatcggctcatgctagtggttctaaaggcagtgtagctaatgatcccaagtttctagagttccttgaagctatgcagccccgttctaaagccaagatgtgggcaaatgatacagctgctactcttgacactgctgcaaaagatagtgtagtagccgctaaagaatctaagggacctctaaaaaatgttctgacctctgagaacgattcatcttctgaagacacttctgatgagaaagtggcaaatgatttgtcttccgaaaatgcttcggagcagctaaagacagagaataaacaagacaagaatatgactgatgcagatttcttcaagagtaaagtcaagaaaaattggtcagattctgaatctgatgacgaaggttctgctcaccagtcaaataccaccactgatgatgaagactcgtcagatgaatcacaagattcagataaccagttggcagatactaagggcgatcctgacaagagaaacattgtggacaaggacactcttgtggagaatactgacttgcaagagccggaggatcttgacaacaaagagagtgaagatcttgatggcagaccaagaggaactgaaattcatgaagatcaagaaagggcagatgaaaacggtgctccaattactgatgaaaagaagttggccctggagactggtcgtctatatatctgcaaccttccatatgcaaccagcgaagatgatttagtggagctgtgccgccaatatggtgatgtggaacaggcacatattgttgtcaataaagccacaaagatctcaactggtagaggctatgtgctttttagccttccggactcagcagtcagggcacttgatgaactagataactcaagctttcagggacgagtgttacgtgttaaggctgctaaaccgctaaataagttggagtcttttcatgaaactgctgtggagaaagtaagtctcaagcagaaaaggttggaacaaaagaaagcttctgagatcagtggggatacaagagcatggaacagcttttatatgcgtcaagatactgttgttgaaaacattgcaaggaagaatggtatcagtaagagtgagttactcgatagagaagcagatgatcttgctgttcgtattgctcttggtgagacacacgtcattgcagagactaagaaatttctatcaaggtctggagttaatgttgctgcattggaagaacatgcttctaaacgaaatgagaagttcaaaagaagcaattatgtgatattagtaaagaacttgccatttaattctactgaggaagaactcgcgacactgtttcagaaacatggtagtttggataaaatcattctacctccaacgagagtgtttgccttggtagtctttgttgaagcaactgaagcccaatacgcattcaaaaaactactatatacacgatataagtaagttcctgcaatatatttagttttttatttatttcagtgactatcacagctcacaaacttttgcatttgcaagtgatttatcctttttccctctatgaagatataccagctccgattcttttggcagttggtgtatctacagttatttatataattttatcaactacttaattgagcttaagataagttgctgtgattatttggttctttcttatggttatatcatgttatttggtcgcttgctagcttgattttttattttcacagatgcatgtctgtatcttagtctcttgtggtgcagggatactcctctgtatttggagtgggcacctgaaaacatattgtctcctacctcagcaccggtggatgaggaagtaaaaaacgaagttggcgagcgtattcttactaaagctaatatagatcaaactgtagaaggagtaagcgctgaagagattgatccagatagagtggagtcacgatctgtgtttgtcaagaacttaaatttcaagacaacagatgaatcattgaagcagcatttcagtacaaagctaaagagtggcagtcttaaaagtgcaacggtgaagaagcatgttaagaagggcaagaatgtttcaatgggatttggttttgttgagtttgactctgttgaaactgctaccggtgtgtgcaaggatctacagggaacggttctggatggacatgctttgatcttgcaactgtgtcatgtgaagaaagatggtcaagcggcaaagaagaatggcaaggataaaagttcaacaaaactgctcgtgcgaaatgtagcatttgaagcaactgagaaggacttgaggcagttatttagtccgtttggccagatcaaaagcctcaggttgcctatgaagtttggtagccacagaggttttgcgtttgtggaatacgtcacaaaacaagaggcccagaacgctctacaagccctcgcaagcactcatctctatggtcgacacctggtgattgagcgagcaaaggaaggagagactctcgaagaactgcgggagagaactgccgcacagtttgtggacgaaagcagcggtttccagagcttgtccagtaagaggaaacggagcattctcgtggacgaaggctccgttaaagtttcaagaatagcagagtgattatcttgagcgagcacctgaaatttttgaccaatgttatgcaatagtaccagttcgttagggggggaaatgggttatcttaggttgtttaatgtttgtgtgctgttttagagctgaggaaaagaaatgctgaaaagaatctcacatcttaatgcaagagctgtctaaatgcaagcatatttctacagcctaagacaccaaaaagaaa

SEQ ID NO: 17793 - DNA, 3247 bp, Zea Mays
gtaatttctggcccaattcacagttcagtccaacagagccgtggctccttctcgctcgctctctttctctcgcgactcccaccgccgcctggcgccgccacactcggccgcactgctcgcctgcccgttcggttgcgccgctcacccgcccgctcagctgcgtcgtcgctgaccgccccgctcggacactccacgtccatcccccgtcggtccgtcgcggcgccgccacaactgctttgcgaatcggcgacctgttgccggcgacaggacgcgggaaggcagccagccatccagcctcttcctacgtctgaatctgagagacgttggctgagatccatctatcttgccgtttcctggcggtgagcaacgctagcgcgcatgtcgtcgcggctgtgcgtgaagaacctgcccaagggcgccgacgagaggcggctgcgggatgtgttctcgcggaagggcgaggtcaccgacgccaaggtcatccgaacaaaggatggcaagagtcggcagtttgcattcattggttacagaaccaatgaagaggcagatgaggcactcaagtatttcaacaatacatacatcgacacttgtaagatcacctgcgaggttgcccgaaaaattggtgaccctgatgctcctcgcccttggagccgccattctttaaagaagtctgaatatggtagtaaagacaagaataatgctggagctgttgatgcaccacctaaaggttccaacgcacaaggaacatcggctcatgctagtggttctaaaggcagtgtagctaatgatcccaagtttctagagttccttgaagctatgcagccccgttctaaagccaagatgtgggcaaatgatacagctgctactcttgacactgctgcaaaagatagtgtagtagccgctaaagaatctaagggacctctaaaaaatgttctgacctctgagaacgattcatcttctgaagacacttctgatgagaaagtggcaaatgatttgtcttccgaaaatgcttcggagcagctaaagacagagaataaacaagacaagaatatgactgatgcagatttcttcaagagtaaagtcaagaaaaattggtcagattctgaatctgatgacgaaggttctgctcaccagtcaaataccaccactgatgatgaagactcgtcagatgaatcacaagattcagataaccagttggcagatactaagggcgatcctgacaagagaaacattgtggacaaggacactcttgtggagaatactgacttgcaagagccggaggatcttgacaacaaagagagtgaagatcttgatggcagaccaagaggaactgaaattcatgaagatcaagaaagggcagatgaaaacggtgctccaattactgatgaaaagaagttggccctggagactggtcgtctatatatctgcaaccttccatatgcaaccagcgaagatgatttagtggagctgtgccgccaatatggtgatgtggaacaggcacatattgttgtcaataaagccacaaagatctcaactggtagaggctatgtgctttttagccttccggactcagcagtcagggcacttgatgaactagataactcaagctttcagggacgagtgttacgtgttaaggctgctaaaccgctaaataagttggagtcttttcatgaaactgctgtggagaaagtaagtctcaagcagaaaaggttggaacaaaagaaagcttctgagatcagtggggatacaagagcatggaacagcttttatatgcgtcaagatactgttgttgaaaacattgcaaggaagaatggtatcagtaagagtgagttactcgatagagaagcagatgatcttgctgttcgtattgctcttggtgagacacacgtcattgcagagactaagaaatttctatcaaggtctggagttaatgttgctgcattggaagaacatgcttctaaacgaaatgagaagttcaaaagaagcaattatgtgatattagtaaagaacttgccatttaattctactgaggaagaactcgcgacactgtttcagaaacatggtagtttggataaaatcattctacctccaacgagagtgtttgccttggtagtctttgttgaagcaactgaagcccaatacgcattcaaaaaactactatatacacgatataatctcttgtggtgcagggatactcctctgtatttggagtgggcacctgaaaacatattgtctcctacctcagcaccggtggatgaggaagtaaaaaacgaagttggcgagcgtattcttactaaagctaatatagatcaaactgtagaaggagtaagcgctgaagagattgatccagatagagtggagtcacgatctgtgtttgtcaagaacttaaatttcaagacaacagatgaatcattgaagcagcatttcagtacaaagctaaagagtggcagtcttaaaagtgcaacggtgaagaagcatgttaagaagggcaagaatgtttcaatgggatttggttttgttgagtttgactctgttgaaactgctaccggtgtgtgcaaggatctacagggaacggttctggatggacatgctttgatcttgcaactgtgtcatgtgaagaaagatggtcaagcggcaaagaagaatggcaaggataaaagttcaacaaaactgctcgtgcgaaatgtagcatttgaagcaactgagaaggacttgaggcagttatttagtccgtttggccagatcaaaagcctcaggttgcctatgaagtttggtagccacagaggttttgcgtttgtggaatacgtcacaaaacaagaggcccagaacgctctacaagccctcgcaagcactcatctctatggtcgacacctggtgattgagcgagcaaaggaaggagagactctcgaagaactgcgggagagaactgccgcacagtttgtggacgaaagcagcggtttccagagcttgtccagtaagaggaaacggagcattctcgtggacgaaggctccgttaaagtttcaagaatagcagagtgattatcttgagcgagcacctgaaatttttgaccaatgttatgcaatagtaccagttcgttagggggggaaatgggttatcttaggttgtttaatgtttgtgtgctgttttagagctgaggaaaagaaatgctgaaaagaatctcacatcttaatgcaagagctgtctaaatgcaagcatatttctacagcctaagacaccaaaaagaaa

SEQ ID NO: 17794 - DNA, 3228 bp, Zea Mays
gtaatttctggcccaattcacagttcagtccaacagagccgtggctccttctcgctcgctctctttctctcgcgactcccaccgccgcctggcgccgccacactcggccgcactgctcgcctgcccgttcggttgcgccgctcacccgcccgctcagctgcgtcgtcgctgaccgccccgctcggacactccacgtccatcccccgtcggtccgtcgcggcgccgccacaactgctttgcgaatcggcgacctgttgccggcgacaggacgcgggaaggcagccagccatccagcctcttcctacgtctgaatctgagagacgttggctgagatccatctatcttgccgtttcctggcggtgagcaacgctagcgcgcatgtcgtcgcggctgtgcgtgaagaacctgcccaagggcgccgacgagaggcggctgcgggatgtgttctcgcggaagggcgaggtcaccgacgccaaggtcatccgaacaaaggatggcaagagtcggcagtttgcattcattggttacagaaccaatgaagaggcagatgaggcactcaagtatttcaacaatacatacatcgacacttgtaagatcacctgcgaggttgcccgaaaaattggtgaccctgatgctcctcgcccttggagccgccattctttaaagaagtctgaatatggtagtaaagacaagaataatgctggagctgttgatgcaccacctaaaggttccaacgcacaaggaacatcggctcatgctagtggttctaaaggcagtgtagctaatgatcccaagtttctagagttccttgaagctatgcagccccgttctaaagccaagatgtgggcaaatgatacagctgctactcttgacactgctgcaaaagatagtgtagtagccgctaaagaatctaagggacctctaaaaaatgttctgacctctgagaacgattcatcttctgaagacacttctgatgagaaagtggcaaatgatttgtcttccgaaaatgcttcggagcagctaaagacagagaataaacaagacaagaatatgactgatgcagatttcttcaagagtaaagtcaagaaaaattggtcagattctgaatctgatgacgaaggttctgctcaccagtcaaataccaccactgatgatgaagactcgtcagatgaatcacaagattcagataaccagttggcagatactaagggcgatcctgacaagagaaacattgtggacaaggacactcttgtggagaatactgacttgcaagagccggaggatcttgacaacaaagagagtgaagatcttgatggcagaccaagaggaactgaaattcatgaagatcaagaaagggcagatgaaaacggtgctccaattactgatgaaaagaagttggccctggagactggtcgtctatatatctgcaaccttccatatgcaaccagcgaagatgatttagtggagctgtgccgccaatatggtgatgtggaacaggcacatattgttgtcaataaagccacaaagatctcaactggtagaggctatgtgctttttagccttccggactcagcagtcagggcacttgatgaactagataactcaagctttcagggacgagtgttacgtgttaaggctgctaaaccgctaaataagttggagtcttttcatgaaactgctgtggagaaagtaagtctcaagcagaaaaggttggaacaaaagaaagcttctgagatcagtggggatacaagagcatggaacagcttttatatgcgtcaagatactgttgttgaaaacattgcaaggaagaatggtatcagtaagagtgagttactcgatagagaagcagatgatcttgctgttcgtattgctcttggtgagacacacgtcattgcagagactaagaaatttctatcaaggtctggagttaatgttgctgcattggaagaacatgcttctaaacgaaatgagaagttcaaaagaagcaattatgtgatattagtaaagaacttgccatttaattctactgaggaagaactcgcgacactgtttcagaaacatggtagtttggataaaatcattctacctccaacgagagtgtttgccttgtctttgttgaagcaactgaagcccaatacgcattcaaaaaactactatatacacgatataaggatactcctctgtatttggagtgggcacctgaaaacatattgtctcctacctcagcaccggtggatgaggaagtaaaaaacgaagttggcgagcgtattcttactaaagctaatatagatcaaactgtagaaggagtaagcgctgaagagattgatccagatagagtggagtcacgatctgtgtttgtcaagaacttaaatttcaagacaacagatgaatcattgaagcagcatttcagtacaaagctaaagagtggcagtcttaaaagtgcaacggtgaagaagcatgttaagaagggcaagaatgtttcaatgggatttggttttgttgagtttgactctgttgaaactgctaccggtgtgtgcaaggatctacagggaacggttctggatggacatgctttgatcttgcaactgtgtcatgtgaagaaagatggtcaagcggcaaagaagaatggcaaggataaaagttcaacaaaactgctcgtgcgaaatgtagcatttgaagcaactgagaaggacttgaggcagttatttagtccgtttggccagatcaaaagcctcaggttgcctatgaagtttggtagccacagaggttttgcgtttgtggaatacgtcacaaaacaagaggcccagaacgctctacaagccctcgcaagcactcatctctatggtcgacacctggtgattgagcgagcaaaggaaggagagactctcgaagaactgcgggagagaactgccgcacagtttgtggacgaaagcagcggtttccagagcttgtccagtaagaggaaacggagcattctcgtggacgaaggctccgttaaagtttcaagaatagcagagtgattatcttgagcgagcacctgaaatttttgaccaatgttatgcaatagtaccagttcgttagggggggaaatgggttatcttaggttgtttaatgtttgtgtgctgttttagagctgaggaaaagaaatgctgaaaagaatctcacatcttaatgcaagagctgtctaaatgcaagcatatttctacagcctaagacaccaaaaagaaa

SEQ ID NO: 17795 - DNA, 916 bp, Zea Mays
gctcagccgcctcctcgacaacatccaggaggttttggtcgccaccaggctcaccctcctcttccccgtcgtcctactcgcgtttgccgcgtgaatcttccacttcagctaggatgttgcaactgggggtatcgatacaaatgcagtaatctttgatcggtcatctggtcaaatcttgtgcacgcttactggtcactcaaagaagataaccactttgaagtttgttccacgggatcaactctttgtaactggatcagcagataaggcaatttccatttaccataggtttaagtaaccactggaataatatggggatgcgagggattgctcgtggttttgctcgtgcatctctagcgtagtccgcatctcgtgctactacctacctgtttctgttgatgcatctctatgtgattgtaacaaccaagaagcatatgtggcctctatttaatccaccataaaagaagtatttggcgcgttggccctatttcttttccggtgatcaagtacacttgcaatatcagaaatggtgctttcaactgttcccttttaaaatttatgtcctattttttttgttacaaaatcatgttcctgttttcattttactcaatcggattgcaactaatacatttttttgttcaaactcattatgttttcatgtttgcattttcctatattttttgcctttgtagaacagatactatggaattgagatgtttggttctacatatatagtgtaggcattgaataaaatcaggtctgcatacttatttttgtgcaatcaaagtagctgttagtgggttcctacttcctagaatgacaatgttggtttggttgagaaggatcttggaaatcagaaagtcttgctctcaggcatcaatctcgatgaggatgcaaaaccaagaggggacaactgtga

SEQ ID NO: 17796 - DNA, 2553 bp, Zea Mays
atacttttcccgctgccgcgtgatgctattttgagccggtcaatgtatgcgtaatacagggcgtaattatggattcttttgagggctctgatcatataactcaaagaaaggttgttcctgcaaaacatattgcattggttgatggaaagaatgagcctgctgtagaggggttgcctaatggttggctgaaagaatgcaggcctagaaagaaccgatatggatccagagtcaagagtgacacgttctatattgatccaatcaatggatacgaatttcactctctcaaggatgtacaccgctatcttgaatctggagacatcagtaaatgtattagattgccaaacaagagaaaaattgaggacctgcatactaaagaggaccaatctcatcatgtaagtttcatcttcaagttttggcccacatctgaatttgccctcgatcttgtgttagctgctacattggattgacaattggattcaaatcaacaaggagttaattcttaaggtagtatgattctttttaaggcaaaggtttatgaatttcatttgaactattttaccatccccccgagaagtactaagaggttacacaaattgtaatttgggagataccaaatccctagttgtaattttggtctttccccaaggactgtaaaaagcctcatttctggtctcatttcttctttaaatgaactgcggcgattctcttgtcgccctttcggaaaaaaatatctactattataaagcaccaatttttctggtttccacactcgtcacttttgtaaaaaaaacccttatatttcatagcacgggcaaaccatcctttcccatccttatgtgcaaaaaaaaacctatatgcacctgaacacaagcactgttcttgatagacacttgttcggagtctatccaatgcgtatttgcaatgcacctccgttatagttgacgtaagatgcatcttgtattgatgtaggctgtcatgctgaattatgatgcatttttatattctaactgagtgaactggaaggaattcttttcttgttgttattgctctttcagaaatacccaaactgttgatttgttttgtaaaatccagacaggaaaactatcagatcatacccagctggatactgctgatgagtctaatcgatatgatctaccggaaggtaccaatgcactgggatatgctctgcaaaatccagaaagcggagagaataatgaaaacattgcactgtccaagcctgacaatataagctcaatccaaattgaagctggtcaggttgaagctacagaagataagagcatccaatcaggctctatagaatacactccaggggaagctaaatctgtcactaggaaaggaatagatgtgaaggagaaaccgaaggggaaaaagtacaaaactaaacatgccaaagggattgctatacctcttagatcgtcacctcgtttagctgcactgaagattagccaggaagcaaataatgcaaccagagatggacatattggcacacagacagacaccaataacgtgccagaaccaaagcaagtcgaaaaacccaggcgaaagacgaattcttctgtaattcctgagaggaaagatggggaacctaccaggagttgtgcagaaacccttccttcacttcccaatcagatacagggagcatcattcccacagtcttcaggagatgctggatgccaggatgcaccagccgaggcacctgttctgcgacaacaagcaggagcaggacaaggcgaaacatctgatggtttgcctggatctgccctgacgtcgctgtttcaacatgtctggtcagacccgtgccttgtgttcgcgttcaggactctcctgggtgatatccctgttcttgatgacgctcgagcatatcggtcttcggcttatgatggtaacagagactactaccttccaccacagaacatgaataaaaatgctgcagccaactggtccgctctggcttatgatagtaacagaaaccacgcgcaagtcgaccatgttatgccgaggacatcagatacgttctacagcagtggttggttccctccccagtgaattcaatctaggaaatatgaaagcaatttcttacctggcaaaggacaaatcagaagcaaggatgcatgttgcaagcaagactgcagctcgttgtaattgtgtagacgatccataactaatagtctaatgtagctatcacatgctaccgtgcgccatcagcatcagtctaattcacaggaagctgtctggtggtagacttggcaatactttctgttgtttgtgtttttgtagtaccaacttgatcatgcattcacttgttgcattgttacgtgttagagcagcctcaatagtcaatatcccaggaagtgatctgggctgtactttgtctatgagcatccacttgtgtattactacttgtaacttggtagactttcaacgtgcatcgtggcatcggactaagttgtaccaatgtgtttgtttcgaaataaggtagtccatcatctttctactcctcacttttttatttggtttataaaataaaataag

SEQ ID NO: 17797 - DNA, 2164 bp, Zea Mays
cgcacgcagagagagagataggacagtgtcacagtcggcatatgacaccacgcccacgcagcacctcatcgtatgattgatgattctgaggagagcggacaaaagtcgcgggctcgcggcggcatcagcaccagggcgctggccacaggtaaaagaaagctgcggccttttctgctactcctgcctgccagcggcctgcctgcctgcctactagtgcggcgtggaggtggagcagtgggcgctacagcctccatcagctagctgccttgccgtgtcctcctcttcctcctgtcggtggcgatctctgcggaaacccgagcttcgtccaagccgggcagtagtgcgcgccgcctgggcgtaattatggattcttttgagggctctgatcatataactcaaagaaaggttgttcctgcaaaacatattgcattggtatgtagatttgaaggttgatggaaagaatgagcctgctgtagaggggttgcctaatggttggctgaaagaatgcaggcctagaaagaaccgatatggatccagagtcaagagtgacacgttctatattgatccaatcaatggatacgaatttcactctctcaaggatgtacaccgctatcttgaatctggagacatcagtaaatgtattagattgccaaacaagagaaaaattgaggacctgcatactaaagaggaccaatctcatcatacaggaaaactatcagatcatacccagctggatactgctgatgagtctaatcgatatgatctaccggaaggtaccaatgcactgggatatgctctgcaaaatccagaaagcggagagaataatgaaaacattgcactgtccaagcctgacaatataagctcaatccaaattgaagctggtcaggttgaagctacagaagataagagcatccaatcaggctctatagaatacactccaggggaagctaaatctgtcactaggaaaggaatagatgtgaaggagaaaccgaaggggaaaaagtacaaaactaaacatgccaaagggattgctatacctcttagatcgtcacctcgtttagctgcactgaagattagccaggaagcaaataatgcaaccagagatggacatattggcacacagacagacaccaataacgtgccagaaccaaagcaagtcgaaaaacccaggcgaaagacgaattcttctgtaattcctgagaggaaagatggggaacctaccaggagttgtgcagaaacccttccttcacttcccaatcagatacagggagcatcattcccacagtcttcaggagatgctggatgccaggatgcaccagccgaggcacctgttctgcgacaacaagcaggagcaggacaaggcgaaacatctgatggtttgcctggatctgccctgacgtcgctgtttcaacatgtctggtcagacccgtgccttgtgttcgcgttcaggactctcctgggtgatatccctgttcttgatgacgctcgagcatatcggtcttcggcttatgatggtaacagagactactaccttccaccacagaacatgaataaaaatgctgcagccaactggtccgctctggcttatgatagtaacagaaaccacgcgcaagtcgaccatgttatgccgaggacatcagatacgttctacagcagtggttggttccctccccagtgaattcaatctaggaaatatgaaagcaatttcttacctggcaaaggacaaatcagaagcaaggatgcatgttgcaagcaagactgcagctcgttgtaattgtgtagacgatccataactaatagtctaatgtagctatcacatgctaccgtgcgccatcagcatcagtctaattcacaggaagctgtctggtggtagacttggcaatactttctgttgtttgtgtttttgtagtaccaacttgatcatgcattcacttgttgcattgttacgtgttagagcagcctcaatagtcaatatcccaggaagtgatctgggctgtactttgtctatgagcatccacttgtgtattactacttgtaacttggtagactttcaacgtgcatcgtggcatcggactaagttgtaccaatgtgtttgtttcgaaataaggtagtccatcatctttctactcctcacttttttatttggtttataaaataaaataag

SEQ ID NO: 17798 - DNA, 2144 bp, Zea Mays
cgcacgcagagagagagataggacagtgtcacagtcggcatatgacaccacgcccacgcagcacctcatcgtatgattgatgattctgaggagagcggacaaaagtcgcgggctcgcggcggcatcagcaccagggcgctggccacaggtaaaagaaagctgcggccttttctgctactcctgcctgccagcggcctgcctgcctgcctactagtgcggcgtggaggtggagcagtgggcgctacagcctccatcagctagctgccttgccgtgtcctcctcttcctcctgtcggtggcgatctctgcggaaacccgagcttcgtccaagccgggcagtagtgcgcgccgcctgggcgtaattatggattcttttgagggctctgatcatataactcaaagaaaggttgttcctgcaaaacatattgcattggttgatggaaagaatgagcctgctgtagaggggttgcctaatggttggctgaaagaatgcaggcctagaaagaaccgatatggatccagagtcaagagtgacacgttctatattgatccaatcaatggatacgaatttcactctctcaaggatgtacaccgctatcttgaatctggagacatcagtaaatgtattagattgccaaacaagagaaaaattgaggacctgcatactaaagaggaccaatctcatcatgaaaactatcagatcatacccagctggatactgctgatgagtctaatcgatatgatctaccggaaggtaccaatgcactgggatatgctctgcaaaatccagaaagcggagagaataatgaaaacattgcactgtccaagcctgacaatataagctcaatccaaattgaagctggtcaggttgaagctacagaagataagagcatccaatcaggctctatagaatacactccaggggaagctaaatctgtcactaggaaaggaatagatgtgaaggagaaaccgaaggggaaaaagtacaaaactaaacatgccaaagggattgctatacctcttagatcgtcacctcgtttagctgcactgaagattagccaggaagcaaataatgcaaccagagatggacatattggcacacagacagacaccaataacgtgccagaaccaaagcaagtcgaaaaacccaggcgaaagacgaattcttctgtaattcctgagaggaaagatggggaacctaccaggagttgtgcagaaacccttccttcacttcccaatcagatacagggagcatcattcccacagtcttcaggagatgctggatgccaggatgcaccagccgaggcacctgttctgcgacaacaagcaggagcaggacaaggcgaaacatctgatggtttgcctggatctgccctgacgtcgctgtttcaacatgtctggtcagacccgtgccttgtgttcgcgttcaggactctcctgggtgatatccctgttcttgatgacgctcgagcatatcggtcttcggcttatgatggtaacagagactactaccttccaccacagaacatgaataaaaatgctgcagccaactggtccgctctggcttatgatagtaacagaaaccacgcgcaagtcgaccatgttatgccgaggacatcagatacgttctacagcagtggttggttccctccccagtgaattcaatctaggaaatatgaaagcaatttcttacctggcaaaggacaaatcagaagcaaggatgcatgttgcaagcaagactgcagctcgttgtaattgtgtagacgatccataactaatagtctaatgtagctatcacatgctaccgtgcgccatcagcatcagtctaattcacaggaagctgtctggtggtagacttggcaatactttctgttgtttgtgtttttgtagtaccaacttgatcatgcattcacttgttgcattgttacgtgttagagcagcctcaatagtcaatatcccaggaagtgatctgggctgtactttgtctatgagcatccacttgtgtattactacttgtaacttggtagactttcaacgtgcatcgtggcatcggactaagttgtaccaatgtgtttgtttcgaaataaggtagtccatcatctttctactcctcacttttttatttggtttataaaataaaataag

SEQ ID NO: 17799 - DNA, 2276 bp, Zea Mays
cgcacgcagagagagagataggacagtgtcacagtcggcatatgacaccacgcccacgcagcacctcatcgtatgattgatgattctgaggagagcggacaaaagtcgcgggctcgcggcggcatcagcaccagggcgctggccacaggtaaaagaaagctgcggccttttctgctactcctgcctgccagcggcctgcctgcctgcctactagtgcggcgtggaggtggagcagtgggcgctacagcctccatcagctagctgccttgccgtgtcctcctcttcctcctgtcggtggcgatctctgcggaaacccgagcttcgtccaagccgggcagtagtgcgcgccgcctgggcgtaattatggattcttttgagggctctgatcatataactcaaagaaaggttgttcctgcaaaacatattgcattggtatgtagatttgaaggttgatggaaagaatgagcctgctgtagaggggttgcctaatggttggctgaaagaatgcaggcctagaaagaaccgatatggatccagagtcaagagtgacacgttctatattgatccaatcaatggatacgaatttcactctctcaaggatgtacaccgctatcttgaatctggagacatcagtaaatgtattagattgccaaacaagagaaaaattgaggacctgcatactaaagaggaccaatctcatcatgtaagtttcatcttcaagttttggcccacatctgaatttgccctcgatcttgtgttagctgctacattggattgacaattggattcaaatcaacaaggagttaattcttaagacaggaaaactatcagatcatacccagctggatactgctgatgagtctaatcgatatgatctaccggaaggtaccaatgcactgggatatgctctgcaaaatccagaaagcggagagaataatgaaaacattgcactgtccaagcctgacaatataagctcaatccaaattgaagctggtcaggttgaagctacagaagataagagcatccaatcaggctctatagaatacactccaggggaagctaaatctgtcactaggaaaggaatagatgtgaaggagaaaccgaaggggaaaaagtacaaaactaaacatgccaaagggattgctatacctcttagatcgtcacctcgtttagctgcactgaagattagccaggaagcaaataatgcaaccagagatggacatattggcacacagacagacaccaataacgtgccagaaccaaagcaagtcgaaaaacccaggcgaaagacgaattcttctgtaattcctgagaggaaagatggggaacctaccaggagttgtgcagaaacccttccttcacttcccaatcagatacagggagcatcattcccacagtcttcaggagatgctggatgccaggatgcaccagccgaggcacctgttctgcgacaacaagcaggagcaggacaaggcgaaacatctgatggtttgcctggatctgccctgacgtcgctgtttcaacatgtctggtcagacccgtgccttgtgttcgcgttcaggactctcctgggtgatatccctgttcttgatgacgctcgagcatatcggtcttcggcttatgatggtaacagagactactaccttccaccacagaacatgaataaaaatgctgcagccaactggtccgctctggcttatgatagtaacagaaaccacgcgcaagtcgaccatgttatgccgaggacatcagatacgttctacagcagtggttggttccctccccagtgaattcaatctaggaaatatgaaagcaatttcttacctggcaaaggacaaatcagaagcaaggatgcatgttgcaagcaagactgcagctcgttgtaattgtgtagacgatccataactaatagtctaatgtagctatcacatgctaccgtgcgccatcagcatcagtctaattcacaggaagctgtctggtggtagacttggcaatactttctgttgtttgtgtttttgtagtaccaacttgatcatgcattcacttgttgcattgttacgtgttagagcagcctcaatagtcaatatcccaggaagtgatctgggctgtactttgtctatgagcatccacttgtgtattactacttgtaacttggtagactttcaacgtgcatcgtggcatcggactaagttgtaccaatgtgtttgtttcgaaataaggtagtccatcatctttctactcctcacttttttatttggtttataaaataaaataag

SEQ ID NO: 17800 - DNA, 2260 bp, Zea Mays
cgcacgcagagagagagataggacagtgtcacagtcggcatatgacaccacgcccacgcagcacctcatcgtatgattgatgattctgaggagagcggacaaaagtcgcgggctcgcggcggcatcagcaccagggcgctggccacaggtaaaagaaagctgcggccttttctgctactcctgcctgccagcggcctgcctgcctgcctactagtgcggcgtggaggtggagcagtgggcgctacagcctccatcagctagctgccttgccgtgtcctcctcttcctcctgtcggtggcgatctctgcggaaacccgagcttcgtccaagccgggcagtagtgcgcgccgcctgggcgtaattatggattcttttgagggctctgatcatataactcaaagaaaggttgttcctgcaaaacatattgcattggttgatggaaagaatgagcctgctgtagaggggttgcctaatggttggctgaaagaatgcaggcctagaaagaaccgatatggatccagagtcaagagtgacacgttctatattgatccaatcaatggatacgaatttcactctctcaaggatgtacaccgctatcttgaatctggagacatcagtaaatgtattagattgccaaacaagagaaaaattgaggacctgcatactaaagaggaccaatctcatcatgtaagtttcatcttcaagttttggcccacatctgaatttgccctcgatcttgtgttagctgctacattggattgacaattggattcaaatcaacaaggagttaattcttaagacaggaaaactatcagatcatacccagctggatactgctgatgagtctaatcgatatgatctaccggaaggtaccaatgcactgggatatgctctgcaaaatccagaaagcggagagaataatgaaaacattgcactgtccaagcctgacaatataagctcaatccaaattgaagctggtcaggttgaagctacagaagataagagcatccaatcaggctctatagaatacactccaggggaagctaaatctgtcactaggaaaggaatagatgtgaaggagaaaccgaaggggaaaaagtacaaaactaaacatgccaaagggattgctatacctcttagatcgtcacctcgtttagctgcactgaagattagccaggaagcaaataatgcaaccagagatggacatattggcacacagacagacaccaataacgtgccagaaccaaagcaagtcgaaaaacccaggcgaaagacgaattcttctgtaattcctgagaggaaagatggggaacctaccaggagttgtgcagaaacccttccttcacttcccaatcagatacagggagcatcattcccacagtcttcaggagatgctggatgccaggatgcaccagccgaggcacctgttctgcgacaacaagcaggagcaggacaaggcgaaacatctgatggtttgcctggatctgccctgacgtcgctgtttcaacatgtctggtcagacccgtgccttgtgttcgcgttcaggactctcctgggtgatatccctgttcttgatgacgctcgagcatatcggtcttcggcttatgatggtaacagagactactaccttccaccacagaacatgaataaaaatgctgcagccaactggtccgctctggcttatgatagtaacagaaaccacgcgcaagtcgaccatgttatgccgaggacatcagatacgttctacagcagtggttggttccctccccagtgaattcaatctaggaaatatgaaagcaatttcttacctggcaaaggacaaatcagaagcaaggatgcatgttgcaagcaagactgcagctcgttgtaattgtgtagacgatccataactaatagtctaatgtagctatcacatgctaccgtgcgccatcagcatcagtctaattcacaggaagctgtctggtggtagacttggcaatactttctgttgtttgtgtttttgtagtaccaacttgatcatgcattcacttgttgcattgttacgtgttagagcagcctcaatagtcaatatcccaggaagtgatctgggctgtactttgtctatgagcatccacttgtgtattactacttgtaacttggtagactttcaacgtgcatcgtggcatcggactaagttgtaccaatgtgtttgtttcgaaataaggtagtccatcatctttctactcctcacttttttatttggtttataaaataaaataag

SEQ ID NO: 17801 - DNA, 2071 bp, Zea Mays
gccctcgtcctcccctattgtctgtaagtagtggcaaacctggctgcaatcattcataaccgaattcttcgtgggggcgccccacctgcctgcctgcctgcctccgctcctcgcagtgcctagacatctgctgcttctgctcctggcactagttcctgccttcttttgctccgctcggttggttattgctgctctgctgctgcgtcctcctgcagtctccacctcaacttctccgccttcctccttttcctcctccccctcctcgcgcagctctcgtgcttcgcctgttcgttcggggacggtcgtgcgtggcgccagcggcgtcggagttcgatttccggtgagcgcttttcgcaggaaaggttgggtcttgtcggttgggattactcgaccgtcgctacgggaaaccgtgccccatctctgcagcggattgatttctgtccgtgctgcgaggttggtgtggtggtttgtctgtgcttccactgtcggaccgaagattccgtcatcgtttcgtgcagtaaccggagcggtgtttagtggggagaagatttggctggaaggcttggtgcttgcaaataaacaccacacaagaatcgaatgcgccgcaccagtgccgattgacgagattcgagtctggatttcgagcgtgatatggtttcatcaggcacctttggactctaaataccggttccaaggacaaggttttccattcgaagaactgtcgctgagggaagaagaaggaaaagaagaagaggtcaatggcatcgctgtcagaaagtgagctgacaaaccggggaaccatgtgggagctagatcagaaccttgatcaacccatggatgaggaggcgggcaggctgaagaatatgtacagagaaaagaagttctcatcagctttgttactacggctggcatttcagagccttggggtggtctttggtgacttgggcacgtcacctttgtatgtgttctataatatatttcctcgcggaataggtggtacatttgctctttattccctattatgccgtcacgcaaagatcaacaccatacctaatcaacacaggaccgacgaggaattgacgacgtatagtcggcaaacctatgaagagaattcagttgcagcgaaaataaagagatggatagagtcacatgcatataagagaaacattcttcttattcttgttttaattggtacttgtacagcaattggagatggaatccttacgcccgctatatctgttctttctgcatcaggtggcattaaggtccagaaccagaacatgagtactgatgtcgttgtgctcgtcgctgtggtcatcttaatcggattgtttagcatgcagcactacggaacagacaaagtgggatggctcttcgcgccaatagtcctcctctggttcatcctgattggaagcgtcggggctataaacatacacaagtatgatagctctgtgctaaaagcatacaacccgatgtatatataccgttttttccgacggagaaagaattctgacgtctggacgtctctgggaggaatcatgcttagcatcacgggaactgaagcattgtttgctgatctctgtcactttcctgtgctggcaattcagatcgctttcaccttgattgtgtttccatgccttctactggcgtacacagggcaggccgcctacataatttccaacaaaacacatgtggctgacgccttctaccgatcaattccagctgccatatactggccggcctttatcatagcaactgctgcagcgattgttgccagtcaagccaccatatccgcaacctactcgatcataaagcaggctcttgcgctgggttgcttcccccgcgtgaagatcgtccacacctcgaagaaattccttggacagatctacatccctgacatcaactggatccttctggttctctgcattgctgtgactgctggattcaagaaccaaagccagataggaaacgcatacggtactgcggtggttatagtcatgctagtcacgacattcctcatggtgccaataatgctgctggtatggaagagccactggatcctcgtggtgac

SEQ ID NO: 17802 - DNA, 2019 bp, Zea Mays
gtctctctggccctcgtcctcccctattgtctgtaagtagtggcaaacctggctgcaatcattcataaccgaattcttcgtgggggcgccccacctgcctgcctgcctgcctccgctcctcgcagtgcctagacatctgctgcttctgctcctggcactagttcctgccttcttttgctccgctcggttggttattgctgctctgctgctgcgtcctcctgcagtctccacctcaacttctccgccttcctccttttcctcctccccctcctcgcgcagctctcgtgcttcgcctgttcgttcggggacggtcgtgcgtggcgccagcggcgtcggagttcgatttccgtaaccggagcggtgtttagtggggagaagatttggctggaaggcttggtgcttgcaaataaacaccacacaagaatcgaatgcgccgcaccagtgccgattgacgagattcgagtctggatttcgagcgtgatatggtttcatcaggcacctttggactctaaataccggttccaaggacaaggttttccattcgaagaactgtcgctgagggaagaagaaggaaaagaagaagaggtcaatggcatcgctgtcagaaagtgagctgacaaaccggggaaccatgtgggagctagatcagaaccttgatcaacccatggatgaggaggcgggcaggctgaagaatatgtacagagaaaagaagttctcatcagctttgttactacggctggcatttcagagccttggggtggtctttggtgacttgggcacgtcacctttgtatgtgttctataatatatttcctcgcggaataggtgagggcgaggatgaggatgttattggagctctttccttgattatttacaccctcactctcataccgcttctcaagtatgtttttgttgtcttgagggcaaatgacaatggtcaaggtggtacatttgctctttattccctattatgccgtcacgcaaagatcaacaccatacctaatcaacacaggaccgacgaggaattgacgacgtatagtcggcaaacctatgaagagaattcagttgcagcgaaaataaagagatggatagagtcacatgcatataagagaaacattcttcttattcttgttttaattggtacttgtacagcaattggagatggaatccttacgcccgctatatctgttctttctgcatcaggtggcattaaggtccagaaccagaacatgagtactgatgtcgttgtgctcgtcgctgtggtcatcttaatcggattgtttagcatgcagcactacggaacagacaaagtgggatggctcttcgcgccaatagtcctcctctggttcatcctgattggaagcgtcggggctataaacatacacaagtatgatagctctgtgctaaaagcatacaacccgatgtatatataccgttttttccgacggagaaagaattctgacgtctggacgtctctgggaggaatcatgcttagcatcacgggaactgaagcattgtttgctgatctctgtcactttcctgtgctggcaattcagatcgctttcaccttgattgtgtttccatgccttctactggcgtacacagggcaggccgcctacataatttccaacaaaacacatgtggctgacgccttctaccgatcaattccagctgccatatactggccggcctttatcatagcaactgctgcagcgattgttgccagtcaagccaccatatccgcaacctactcgatcataaagcaggctcttgcgctgggttgcttcccccgcgtgaagatcgtccacacctcgaagaaattccttggacagatctacatccctgacatcaactggatccttctggttctctgcattgctgtgactgctggattcaagaaccaaagccagataggaaacgcatacggtactgcggtggttatagtcatgctagtcacgacattcctcatggtgccaataatgctgctggtatggaagagccactggatcctcgtggtgac

SEQ ID NO: 17803 - DNA, 2148 bp, Zea Mays
gtctctctggccctcgtcctcccctattgtctgtaagtagtggcaaacctggctgcaatcattcataaccgaattcttcgtgggggcgccccacctgcctgcctgcctgcctccgctcctcgcagtgcctagacatctgctgcttctgctcctggcactagttcctgccttcttttgctccgctcggttggttattgctgctctgctgctgcgtcctcctgcagtctccacctcaacttctccgccttcctccttttcctcctccccctcctcgcgcagctctcgtgcttcgcctgttcgttcggggacggtcgtgcgtggcgccagcggcgtcggagttcgatttccggtgagcgcttttcgcaggaaaggttgggtcttgtcggttgggattactcgaccgtcgctacgggaaaccgtgccccatctctgcagcggattgatttctgtccgtgctgcgaggttggtgtggtggtttgtctgtgcttccactgtcggaccgaagattccgtcatcgtttcgtgcagtaaccggagcggtgtttagtggggagaagatttggctggaaggcttggtgcttgcaaataaacaccacacaagaatcgaatgcgccgcaccagtgccgattgacgagattcgagtctggatttcgagcgtgatatggtttcatcaggcacctttggactctaaataccggttccaaggacaaggttttccattcgaagaactgtcgctgagggaagaagaaggaaaagaagaagaggtcaatggcatcgctgtcagaaagtgagctgacaaaccggggaaccatgtgggagctagatcagaaccttgatcaacccatggatgaggaggcgggcaggctgaagaatatgtacagagaaaagaagttctcatcagctttgttactacggctggcatttcagagccttggggtggtctttggtgacttgggcacgtcacctttgtatgtgttctataatatatttcctcgcggaataggtgagggcgaggatgaggatgttattggagctctttccttgattatttacaccctcactctcataccgcttctcaagtatgtttttgttgtcttgagggcaaatgacaatggtcaaggtggtacatttgctctttattccctattatgccgtcacgcaaagatcaacaccatacctaatcaacacaggaccgacgaggaattgacgacgtatagtcggcaaacctatgaagagaattcagttgcagcgaaaataaagagatggatagagtcacatgcatataagagaaacattcttcttattcttgttttaattggtacttgtacagcaattggagatggaatccttacgcccgctatatctgttctttctgcatcaggtggcattaaggtccagaaccagaacatgagtactgatgtcgttgtgctcgtcgctgtggtcatcttaatcggattgtttagcatgcagcactacggaacagacaaagtgggatggctcttcgcgccaatagtcctcctctggttcatcctgattggaagcgtcggggctataaacatacacaagtatgatagctctgtgctaaaagcatacaacccgatgtatatataccgttttttccgacggagaaagaattctgacgtctggacgtctctgggaggaatcatgcttagcatcacgggaactgaagcattgtttgctgatctctgtcactttcctgtgctggcaattcagggcaggccgcctacataatttccaacaaaacacatgtggctgacgccttctaccgatcaattccagctgccatatactggccggcctttatcatagcaactgctgcagcgattgttgccagtcaagccaccatatccgcaacctactcgatcataaagcaggctcttgcgctgggttgcttcccccgcgtgaagatcgtccacacctcgaagaaattccttggacagatctacatccctgacatcaactggatccttctggttctctgcattgctgtgactgctggattcaagaaccaaagccagataggaaacgcatacggtactgcggtggttatagtcatgctagtcacgacattcctcatggtgccaataatgctgctggtatggaagagccactggatcctcgtggtgac

SEQ ID NO: 17804 - DNA, 2021 bp, Zea Mays
gccctcgtcctcccctattgtctgtaagtagtggcaaacctggctgcaatcattcataaccgaattcttcgtgggggcgccccacctgcctgcctgcctgcctccgctcctcgcagtgcctagacatctgctgcttctgctcctggcactagttcctgccttcttttgctccgctcggttggttattgctgctctgctgctgcgtcctcctgcagtctccacctcaacttctccgccttcctccttttcctcctccccctcctcgcgcagctctcgtgcttcgcctgttcgttcggggacggtcgtgcgtggcgccagcggcgtcggagttcgatttccggtgagcgcttttcgcaggaaaggttgggtcttgtcggttgggattactcgaccgtcgctacgggaaaccgtgccccatctctgcagcggattgatttctgtccgtgctgcgaggttggtgtggtggtttgtctgtgcttccactgtcggaccgaagattccgtcatcgtttcgtgcagtaaccggagcggtgtttagtggggagaagatttggctggaaggcttggtgcttgcaaataaacaccacacaagaatcgaatgcgccgcaccagtgccgattgacgagattcgagtctggatttcgagcgtgatatggtttcatcaggcacctttggactctaaataccggttccaaggacaaggttttccattcgaagaactgtcgctgagggaagaagaaggaaaagaagaagaggtcaatggcatcgctgtcagaaagtgagctgacaaaccggggaaccatgtgggagctagatcagaaccttgatcaacccatggatgaggaggcgggcaggctgaagaatatgtacagagaaaagaagttctcatcagctttgttactacggctggcatttcagagccttggggtggtctttggtgacttgggcacgtcacctttgtatgtgttctataatatatttcctcgcggaataggtgagggcgaggatgaggatgttattggagctctttccttgattatttacaccctcactctcataccgcttctcaagtatgtttttgttgtcttgagggcaaatgacaatggtcaaggtggtacatttgctctttattccctattatgccgtcacgcaaagatcaacaccatacctaatcaacacaggaccgacgaggaattgacgacgtatagtcggcaaacctatgaagagaattcagttgcagcgaaaataaagagatggatagagtcacatgcatataagagaaacattcttcttattcttgttttaattggtacttgtacagcaattggagatggaatccttacgcccgctatatctgttctttctgcatcaggtggcattaaggtccagaaccagaacatgagtactgatgtcgttgtgctcgtcgctgtggtcatcttaatcggattgtttagcatgcagcactacggaacagacaaagtgggatggctcttcgcgccaatagtcctcctctggttcatcctgattggaagcgtcggggctataaacatacacaagaactgaagcattgtttgctgatctctgtcactttcctgtgctggcaattcagatcgctttcaccttgattgtgtttccatgccttctactggcgtacacagggcaggccgcctacataatttccaacaaaacacatgtggctgacgccttctaccgatcaattccagctgccatatactggccggcctttatcatagcaactgctgcagcgattgttgccagtcaagccaccatatccgcaacctactcgatcataaagcaggctcttgcgctgggttgcttcccccgcgtgaagatcgtccacacctcgaagaaattccttggacagatctacatccctgacatcaactggatccttctggttctctgcattgctgtgactgctggattcaagaaccaaagccagataggaaacgcatacggtaaggtttcctctgagaactaaaatacatagttttctctctc

SEQ ID NO: 17805 - DNA, 3798 bp, Zea Mays
attcgatttctacacctccagagcactcactctcctggcaaaccccttcgtctcccaaccctagagagcagcagcagctaccgcagcccctgccatggcgccgagctccccgtcacccgccgcgcccacacgcgtctctgggcggaagcgcgccgccaaggccgaggagatccaccagaacaaggaggaggaggaggaggaggaggaggtcgtggcggcgtcctccgccaagcgcagccgcaaggcggcatcttctgggaagaagcccaagtcgccccccaagcaggccaagccggggaggaagaagaagggggatgccgagatgaaggagcccgtggaggacgacgtgtgcgccgaggagcccgacgaggaggagttggccatgggcgaggaggaggccgaggagcaggccatgcgggaggaggtggttgcggtcgcggcggggtcacccgggaagaagagggtggggagaaggaacgccgccgccgccgccggcgaccacgagccggagttcatcggcagccctgttgccgcggacgaggcgcgcagcaactggcccaagcgctacggccgcagcactgccgcaaagaaaccggatgaggaggaagagctcaaggccagatgtcactaccggagcgctaaggtggacaacgtcgtctactgccttggggatgacgtctatgtcaaggctggagaaaacgaggcagattacattggccgcattactgaattttttgaggggactgaccagtgtcactattttacttgccgttggttcttccgagcagaggacacggttatcaattctttggtgtccataagtgtggatggccacaagcatgaccctagacgtgtttttctttctgaggaaaagaacgacaatgtgcttgattgcattatctccaaggtcaagatagtccatgttgatccaaatatggatccaaaagccaaggctcagctgatagagagttgcgacctatactatgacatgtcttactctgttgcatattctacatttgctaatatctcgtctgtcagacagtgataccgcttcgggtatttcttctgatgatgtggatctggagacgtcatctagtatgccaacgaggacagcaacccttcttgatctgtattctggctgtgggggcatgtctactggtctttgcttgggtgcagctctttctggcttgaaacttgaaactcgatgggctgttgatttcaacagttttgcgtgccaaagtttaaaatataatcatccacagactgaggtgcgaaatgagaaagccgatgagtttcttgccctccttaaggaatgggcagttctatgcaaaaaatatgtccaagatgtggattcaaatttagcaagctcagaggatcaagcggatgaagacagccctcttgacaaggacgaatttgttgtagagaagcttgtcgggatatgttatggtggcagtgacagggaaaatggcatctattttaaggtccagtgggaaggatacggccctgaggaggatacatgggaaccgattgataacttgagtgactgcccgcagaaaattagagattttgtacaagaagggcacaaaagaaagattctcccactgcctggtgatgttgatgtcatttgtggaggcccaccatgccaaggtatcagtgggtttaatcggtacagaaaccgtgatgagccactcaaagatgagaaaaacaaacaaatggtgactttcatggatattgtggcgtacttgaagcccaagtatgttctcatggaaaatgtggtggacatactcaaatttgcggatggttacctaggaaaatatgctttgagctgccttgttgctatgaagtaccaagcgcggcttggaatgatggtggctggttgctatggtctgccacagttcaggatgcgtgtgttcctctggggtgctctttcttccatggtgctccctaagtatcctctgcccacctatgatgttgtagtacgtggaggagcccctaatgccttttcgcaatgtatggttgcatatgacgagacacaaaaaccatccctgaaaaaagccttgcttcttggcgatgcaatttcagatttaccaaaggttcaaaatcaccagcctaacgatgtgatggagtatggtggttcccccaagaccgaattccagcgctacattcgactcagtcgtaaagacatgttggattggtccttcggtgagggggctggtccagatgaaggcaagctcttggatcaccagcctttacggcttaacaacgatgattatgagcgggttcaacagattcctgtcaagaagggagccaacttccgcgacctaaagggcgtgagggttggagcaaacaatattgttgagtgggatccagaaatcgagcgtgtgaaactttcatctgggaaaccactggttcctgactatgcaatgtcattcatcaagggcaaatcactcaagccgtttgggcgcctgtggtgggacgagacagttcctacagttgtaaccagagcagagcctcacaaccaggttataattcatccgactcaagcaagggtcctcactatccgggagaacgcaaggttacagggcttccccgattactaccgattgtttggcccgatcaaggagaagtacattcaagtcgggaacgcagtggctgtccctgttgcccgggcactgggctactgtctggggcaagcctacctgggtgaatctgaggggagtgaccctctgtaccagctgcctccaagtttcacctctgttggaggacgcactgcggggcaggcgagggcctctcctgttggcacccctgcaggggaggtagttgagcagtaaaaggatgacagatctgagctgagctgggcaacatccagcggcaggagcatttctggttcggttcgattcgggctcacgagcgcattgtgctgattcgcagggtgcactcgagctcgagtgcggagttgttgtaatgtaggttgaggtttcaaaacatccatccatccatcggccccgcctatttgtggatggtgtttctcgtgccattttagttcagctgtattgatgcttcgtcatgtatgtgtattgtaccattcgttcttgttacctactagtaaggcaacatttgatccatgttcaacgcgagcaaaattccatccactttaggtactgagatgctcaagtagttcagtcatcaggtaacatttacaacctattattttgcctggtattatctgaaaacgatttgctgaggatgttttttttttgaagtaaaggtactgtaggaaggtcctacagtaatattattaaatcaaaagaactaagtttagggagacagaagaatattacaaagaaataaaagggagagtgaggagggggaagaattctggatacatgtatttactctatttcacataaacatatggacatcaacatagatgtgaaggtatctaatctaaataagcgccgacatgctttacaagatagtttgatctataaggtgagggatgttgtggatgaagattgtgaccaactagctcatgtgtagttttgtttgtagtacctgtcctaaaaaatatgtaattctaagtttaatttgaatcagccttgttttttaaaatttttttgaccaagtccgttaaaaagtaataacattttttacttcaaatagatttactatgaaattttgtcttatggttatctaatgacatttatttaaaactgtaacaaaaactggtttggttaggggactgagggagtagtgcttaaaatggaagacgataggagagatcacattagtggtggc

SEQ ID NO: 17806 - DNA, 3807 bp, Zea Mays
cctgtttccagatttgaccgatccccttcgattcgatttctacacctccagagcactcactctcctggcaaaccccttcgtctcccaaccctagagagcagcagcagctaccgcagcccctgccatggcgccgagctccccgtcacccgccgcgcccacacgcgtctctgggcggaagcgcgccgccaaggccgaggagatccaccagaacaaggaggaggaggaggaggaggaggaggtcgtggcggcgtcctccgccaagcgcagccgcaaggcggcatcttctgggaagaagcccaagtcgccccccaagcaggccaagccggggaggaagaagaagggggatgccgagatgaaggagcccgtggaggacgacgtgtgcgccgaggagcccgacgaggaggagttggccatgggcgaggaggaggccgaggagcaggccatgcgggaggaggtggttgcggtcgcggcggggtcacccgggaagaagagggtggggagaaggaacgccgccgccgccgccggcgaccacgagccggagttcatcggcagccctgttgccgcggacgaggcgcgcagcaactggcccaagcgctacggccgcagcactgccgcaaagaaaccggatgaggaggaagagctcaaggccagatgtcactaccggagcgctaaggtggacaacgtcgtctactgccttggggatgacgtctatgtcaaggctggagaaaacgaggcagattacattggccgcattactgaattttttgaggggactgaccagtgtcactattttacttgccgttggttcttccgagcagaggacacggttatcaattctttggtgtccataagtgtggatggccacaagcatgaccctagacgtgtttttctttctgaggaaaagaacgacaatgtgcttgattgcattatctccaaggtcaagatagtccatgttgatccaaatatggatccaaaagccaaggctcagctgatagagagttgcgacctatactatgacatgtcttactctgttgcatattctacatttgctaatatctcgtctgaaaatgggcagtcagacagtgataccgcttcgggtatttcttctgatgatgtggatctggagacgtcatctagtatgccaacgaggacagcaacccttcttgatctgtattctggctgtgggggcatgtctactggtctttgcttggcgatgggctgttgatttcaacagttttgcgtgccaaagtttaaaatataatcatccacagactgaggtgcgaaatgagaaagccgatgagtttcttgccctccttaaggaatgggcagttctatgcaaaaaatatgtccaagatgtggattcaaatttagcaagctcagaggatcaagcggatgaagacagccctcttgacaaggacgaatttgttgtagagaagcttgtcgggatatgttatggtggcagtgacagggaaaatggcatctattttaaggtccagtgggaaggatacggccctgaggaggatacatgggaaccgattgataacttgagtgactgcccgcagaaaattagagattttgtacaagaagggcacaaaagaaagattctcccactgcctggtgatgttgatgtcatttgtggaggcccaccatgccaaggtatcagtgggtttaatcggtacagaaaccgtgatgagccactcaaagatgagaaaaacaaacaaatggtgactttcatggatattgtggcgtacttgaagcccaagtatgttctcatggaaaatgtggtggacatactcaaatttgcggatggttacctaggaaaatatgctttgagctgccttgttgctatgaagtaccaagcgcggcttggaatgatggtggctggttgctatggtctgccacagttcaggatgcgtgtgttcctctggggtgctctttcttccatggtgctccctaagtatcctctgcccacctatgatgttgtagtacgtggaggagcccctaatgccttttcgcaatgtatggttgcatatgacgagacacaaaaaccatccctgaaaaaagccttgcttcttggcgatgcaatttcagatttaccaaaggttcaaaatcaccagcctaacgatgtgatggagtatggtggttcccccaagaccgaattccagcgctacattcgactcagtcgtaaagacatgttggattggtccttcggtgagggggctggtccagatgaaggcaagctcttggatcaccagcctttacggcttaacaacgatgattatgagcgggttcaacagattcctgtcaagaagggagccaacttccgcgacctaaagggcgtgagggttggagcaaacaatattgttgagtgggatccagaaatcgagcgtgtgaaactttcatctgggaaaccactggttcctgactatgcaatgtcattcatcaagggcaaatcactcaagccgtttgggcgcctgtggtgggacgagacagttcctacagttgtaaccagagcagagcctcacaaccaggttataattcatccgactcaagcaagggtcctcactatccgggagaacgcaaggttacagggcttccccgattactaccgattgtttggcccgatcaaggagaagtacattcaagtcgggaacgcagtggctgtccctgttgcccgggcactgggctactgtctggggcaagcctacctgggtgaatctgaggggagtgaccctctgtaccagctgcctccaagtttcacctctgttggaggacgcactgcggggcaggcgagggcctctcctgttggcacccctgcaggggaggtagttgagcagtaaaaggatgacagatctgagctgagctgggcaacatccagcggcaggagcatttctggttcggttcgattcgggctcacgagcgcattgtgctgattcgcagggtgcactcgagctcgagtgcggagttgttgtaatgtaggttgaggtttcaaaacatccatccatccatcggccccgcctatttgtggatggtgtttctcgtgccattttagttcagctgtattgatgcttcgtcatgtatgtgtattgtaccattcgttcttgttacctactagtaaggcaacatttgatccatgttcaacgcgagcaaaattccatccactttaggtactgagatgctcaagtagttcagtcatcaggtaacatttacaacctattattttgcctggtattatctgaaaacgatttgctgaggatgttttttttttgaagtaaaggtactgtaggaaggtcctacagtaatattattaaatcaaaagaactaagtttagggagacagaagaatattacaaagaaataaaagggagagtgaggagggggaagaattctggatacatgtatttactctatttcacataaacatatggacatcaacatagatgtgaaggtatctaatctaaataagcgccgacatgctttacaagatagtttgatctataaggtgagggatgttgtggatgaagattgtgaccaactagctcatgtgtagttttgtttgtagtacctgtcctaaaaaatatgtaattctaagtttaatttgaatcagccttgttttttaaaatttttttgaccaagtccgttaaaaagtaataacattttttacttcaaatagatttactatgaaattttgtcttatggttatctaatgacatttatttaaaactgtaacaaaaactggtttggttaggggactgagggagtagtgcttaaaatggaagacgataggagagatcacattagtggtggc

SEQ ID NO: 17807 - DNA, 3712 bp, Zea Mays
ctcgatcttttgggtttcgttttcccagttcccaccctctcttccaccctgccctgtttccagatttgaccgatccccttcgattcgatttctacacctccagagcactcactctcctggcaaaccccttcgtctcccaaccctagagagcagcagcagctaccgcagcccctgccatggcgccgagctccccgtcacccgccgcgcccacacgcgtctctgggcggaagcgcgccgccaaggccgaggagatccaccagaacaaggaggaggaggaggaggaggaggaggtcgtggcggcgtcctccgccaagcgcagccgcaaggcggcatcttctgggaagaagcccaagtcgccccccaagcaggccaagccggggaggaagaagaagggggatgccgagatgaaggagcccgtggaggacgacgtgtgcgccgaggagcccgacgaggaggagttggccatgggcgaggaggaggccgaggagcaggccatgcgggaggaggtggttgcggtcgcggcggggtcacccgggaagaagagggtggggagaaggaacgccgccgccgccgccggcgaccacgagccggagttcatcggcagccctgttgccgcggacgaggcgcgcagcaactggcccaagcgctacggccgcagcactgccgcaaagaaaccggatgaggaggaagagctcaaggccagatgtcactaccggagcgctaaggtggacaacgtcgtctactgccttggggatgacgtctatgtcaaggctggagaaaacgaggcagattacattggccgcattactgaattttttgaggggactgaccagtgtcactattttacttgccgttggttcttccgagcagaggacacggttatcaattctttggtgtccataagtgtggatggccacaagcatgaccctagacgtgtttttctttctgaggaaaagaacgacaatgtgcttgattgcattatctccaaggtcaagatagtccatgttgatccaaatatggatccaaaagccaaggctcagctgatagagagttgcgacctatactatgacatgtcttactctgttgcatattctacatttgctaatatctcgtctgcgatgggctgttgatttcaacagttttgcgtgccaaagtttaaaatataatcatccacagactgaggtgcgaaatgagaaagccgatgagtttcttgccctccttaaggaatgggcagttctatgcaaaaaatatgtccaagatgtggattcaaatttagcaagctcagaggatcaagcggatgaagacagccctcttgacaaggacgaatttgttgtagagaagcttgtcgggatatgttatggtggcagtgacagggaaaatggcatctattttaaggtccagtgggaaggatacggccctgaggaggatacatgggaaccgattgataacttgagtgactgcccgcagaaaattagagattttgtacaagaagggcacaaaagaaagattctcccactgcctggtgatgttgatgtcatttgtggaggcccaccatgccaaggtatcagtgggtttaatcggtacagaaaccgtgatgagccactcaaagatgagaaaaacaaacaaatggtgactttcatggatattgtggcgtacttgaagcccaagtatgttctcatggaaaatgtggtggacatactcaaatttgcggatggttacctaggaaaatatgctttgagctgccttgttgctatgaagtaccaagcgcggcttggaatgatggtggctggttgctatggtctgccacagttcaggatgcgtgtgttcctctggggtgctctttcttccatggtgctccctaagtatcctctgcccacctatgatgttgtagtacgtggaggagcccctaatgccttttcgcaatgtatggttgcatatgacgagacacaaaaaccatccctgaaaaaagccttgcttcttggcgatgcaatttcagatttaccaaaggttcaaaatcaccagcctaacgatgtgatggagtatggtggttcccccaagaccgaattccagcgctacattcgactcagtcgtaaagacatgttggattggtccttcggtgagggggctggtccagatgaaggcaagctcttggatcaccagcctttacggcttaacaacgatgattatgagcgggttcaacagattcctgtcaagaagggagccaacttccgcgacctaaagggcgtgagggttggagcaaacaatattgttgagtgggatccagaaatcgagcgtgtgaaactttcatctgggaaaccactggttcctgactatgcaatgtcattcatcaagggcaaatcactcaagccgtttgggcgcctgtggtgggacgagacagttcctacagttgtaaccagagcagagcctcacaaccaggttataattcatccgactcaagcaagggtcctcactatccgggagaacgcaaggttacagggcttccccgattactaccgattgtttggcccgatcaaggagaagtacattcaagtcgggaacgcagtggctgtccctgttgcccgggcactgggctactgtctggggcaagcctacctgggtgaatctgaggggagtgaccctctgtaccagctgcctccaagtttcacctctgttggaggacgcactgcggggcaggcgagggcctctcctgttggcacccctgcaggggaggtagttgagcagtaaaaggatgacagatctgagctgagctgggcaacatccagcggcaggagcatttctggttcggttcgattcgggctcacgagcgcattgtgctgattcgcagggtgcactcgagctcgagtgcggagttgttgtaatgtaggttgaggtttcaaaacatccatccatccatcggccccgcctatttgtggatggtgtttctcgtgccattttagttcagctgtattgatgcttcgtcatgtatgtgtattgtaccattcgttcttgttacctactagtaaggcaacatttgatccatgttcaacgcgagcaaaattccatccactttaggtactgagatgctcaagtagttcagtcatcaggtaacatttacaacctattattttgcctggtattatctgaaaacgatttgctgaggatgttttttttttgaagtaaaggtactgtaggaaggtcctacagtaatattattaaatcaaaagaactaagtttagggagacagaagaatattacaaagaaataaaagggagagtgaggagggggaagaattctggatacatgtatttactctatttcacataaacatatggacatcaacatagatgtgaaggtatctaatctaaataagcgccgacatgctttacaagatagtttgatctataaggtgagggatgttgtggatgaagattgtgaccaactagctcatgtgtagttttgtttgtagtacctgtcctaaaaaatatgtaattctaagtttaatttgaatcagccttgttttttaaaatttttttgaccaagtccgttaaaaagtaataacattttttacttcaaatagatttactatgaaattttgtcttatggttatctaatgacatttatttaaaactgtaacaaaaactggtttggttaggggactgagggagtagtgcttaaaatggaagacgataggagagatcacattagtggtggc

SEQ ID NO: 17808 - DNA, 4042 bp, Zea Mays
ccctacagctgggtcatctggcacgggtggaggggccaacggccgaaagcgccgcgcacttccggcgggcaccctcgcggagtcgcgggtgacagcgaaatttcaaatccataccctcccgctgcagacgggtcccacgccgtcaaaatttggacgctcccgctccctcgatcttttgggtttcgttttcccagttcccaccctctcttccaccctgccctgtttccagatttgaccgatccccttcgattcgatttctacacctccagagcactcactctcctggcaaaccccttcgtctcccaaccctagagagcagcagcagctaccgcagcccctgccatggcgccgagctccccgtcacccgccgcgcccacacgcgtctctgggcggaagcgcgccgccaaggccgaggagatccaccagaacaaggaggaggaggaggaggaggaggaggtcgtggcggcgtcctccgccaagcgcagccgcaaggcggcatcttctgggaagaagcccaagtcgccccccaagcaggccaagccggggaggaagaagaagggggatgccgagatgaaggagcccgtggaggacgacgtgtgcgccgaggagcccgacgaggaggagttggccatgggcgaggaggaggccgaggagcaggccatgcgggaggaggtggttgcggtcgcggcggggtcacccgggaagaagagggtggggagaaggaacgccgccgccgccgccggcgaccacgagccggagttcatcggcagccctgttgccgcggacgaggcgcgcagcaactggcccaagcgctacggccgcagcactgccgcaaagaaaccggatgaggaggaagagctcaaggccagatgtcactaccggagcgctaaggtggacaacgtcgtctactgccttggggatgacgtctatgtcaaggctggagaaaacgaggcagattacattggccgcattactgaattttttgaggggactgaccagtgtcactattttacttgccgttggttcttccgagcagaggacacggttatcaattctttggtgtccataagtgtggatggccacaagcatgaccctagacgtgtttttctttctgaggaaaagaacgacaatgtgcttgattgcattatctccaaggtcaagatagtccatgttgatccaaatatggatccaaaagccaaggctcagctgatagagagttgcgacctatactatgacatgtcttactctgttgcatattctacatttgctaatatctcgtctgacagtgataccgcttcgggtatttcttctgatgatgtggatctggagacgtcatctagtatgccaacgaggacagcaacccttcttgatctgtattctggctgtgggggcatgtctactggtctttgcttgggtgcagctctttctggcttgaaacttgaaactcgatgggctgttgatttcaacagttttgcgtgccaaagtttaaaatataatcatccacagactgaggtgcgaaatgagaaagccgatgagtttcttgccctccttaaggaatgggcagttctatgcaaaaaatatgtccaagatgtggattcaaatttagcaagctcagaggatcaagcggatgaagacagccctcttgacaaggacgaatttgttgtagagaagcttgtcgggatatgttatggtggcagtgacagggaaaatggcatctattttaaggtccagtgggaaggatacggccctgaggaggatacatgggaaccgattgataacttgagtgactgcccgcagaaaattagagattttgtacaagaagggcacaaaagaaagattctcccactgcctggtgatgttgatgtcatttgtggaggcccaccatgccaaggtatcagtgggtttaatcggtacagaaaccgtgatgagccactcaaagatgagaaaaacaaacaaatggtgactttcatggatattgtggcgtacttgaagcccaagtatgttctcatggaaaatgtggtggacatactcaaatttgcggatggttacctaggaaaatatgctttgagctgccttgttgctatgaagtaccaagcgcggcttggaatgatggtggctggttgctatggtctgccacagttcaggatgcgtgtgttcctctggggtgctctttcttccatggtgctccctaagtatcctctgcccacctatgatgttgtagtacgtggaggagcccctaatgccttttcgcaatgtatggttgcatatgacgagacacaaaaaccatccctgaaaaaagccttgcttcttggcgatgcaatttcagatttaccaaaggttcaaaatcaccagcctaacgatgtgatggagtatggtggttcccccaagaccgaattccagcgctacattcgactcagtcgtaaagacatgttggattggtccttcggtgagggggctggtccagatgaaggcaagctcttggatcaccagcctttacggcttaacaacgatgattatgagcgggttcaacagattcctgtcaagaagggagccaacttccgcgacctaaagggcgtgagggttggagcaaacaatattgttgagtgggatccagaaatcgagcgtgtgaaactttcatctgggaaaccactggttcctgactatgcaatgtcattcatcaagggcaaatcactcaagccgtttgggcgcctgtggtgggacgagacagttcctacagttgtaaccagagcagagcctcacaaccaggttataattcatccgactcaagcaagggtcctcactatccgggagaacgcaaggttacagggcttccccgattactaccgattgtttggcccgatcaaggagaagtacattcaagtcgggaacgcagtggctgtccctgttgcccgggcactgggctactgtctggggcaagcctacctgggtgaatctgaggggagtgaccctctgtaccagctgcctccaagtttcacctctgttggaggacgcactgcggggcaggcgagggcctctcctgttggcacccctgcaggggaggtagttgagcagtaaaaggatgacagatctgagctgagctgggcaacatccagcggcaggagcatttctggttcggttcgattcgggctcacgagcgcattgtgctgattcgcagggtgcactcgagctcgagtgcggagttgttgtaatgtaggttgaggtttcaaaacatccatccatccatcggccccgcctatttgtggatggtgtttctcgtgccattttagttcagctgtattgatgcttcgtcatgtatgtgtattgtaccattcgttcttgttacctactagtaaggcaacatttgatccatgttcaacgcgagcaaaattccatccactttaggtactgagatgctcaagtagttcagtcatcaggtaacatttacaacctattattttgcctggtattatctgaaaacgatttgctgaggatgttttttttttgaagtaaaggtactgtaggaaggtcctacagtaatattattaaatcaaaagaactaagtttagggagacagaagaatattacaaagaaataaaagggagagtgaggagggggaagaattctggatacatgtatttactctatttcacataaacatatggacatcaacatagatgtgaaggtatctaatctaaataagcgccgacatgctttacaagatagtttgatctataaggtgagggatgttgtggatgaagattgtgaccaactagctcatgtgtagttttgtttgtagtacctgtcctaaaaaatatgtaattctaagtttaatttgaatcagccttgttttttaaaatttttttgaccaagtccgttaaaaagtaataacattttttacttcaaatagatttactatgaaattttgtcttatggttatctaatgacatttatttaaaactgtaacaaaaactggtttggttaggggactgagggagtagtgcttaaaatggaagacgataggagagatcacattagtggtggc

SEQ ID NO: 17809 - DNA, 2201 bp, Zea Mays
attcgatttctacacctccagagcactcactctcctggcaaaccccttcgtctcccaaccctagagagcagcagcagctaccgcagcccctgccatggcgccgagctccccgtcacccgccgcgcccacacgcgtctctgggcggaagcgcgccgccaaggccgaggagatccaccagaacaaggaggaggaggaggaggaggaggaggtcgtggcggcgtcctccgccaagcgcagccgcaaggcggcatcttctgggaagaagcccaagtcgccccccaagcaggccaagccggggaggaagaagaagggggatgccgagatgaaggagcccgtggaggacgacgtgtgcgccgaggagcccgacgaggaggagttggccatgggcgaggaggaggccgaggagcaggccatgcgggaggaggtggttgcggtcgcggcggggtcacccgggaagaagagggtggggagaaggaacgccgccgccgccgccggcgaccacgagccggagttcatcggcagccctgttgccgcggacgaggcgcgcagcaactggcccaagcgctacggccgcagcactgccgcaaagaaaccggatgaggaggaagagctcaaggccagatgtcactaccggagcgctaaggtggacaacgtcgtctactgccttggggatgacgtctatgtcaaggctggagaaaacgaggcagattacattggccgcattactgaattttttgaggggactgaccagtgtcactattttacttgccgttggttcttccgagcagaggacacggttatcaattctttggtgtccataagtgtggatggccacaagcatgaccctagacgtgtttttctttctgaggaaaagaacgacaatgtgcttgattgcattatctccaaggtcaagatagtccatgttgatccaaatatggatccaaaagccaaggctcagctgatagagagttgcgacctatactatgacatgtcttactctgttgcatattctacatttgctaatatctcgtctgaaaatgggcagtcagacagtgataccgcttcgggtatttcttctgatgatgtggatctggagacgtcatctagtatgccaacgaggacagcaacccttcttgatctgtattctggctgtgggggcatgtctactggtctttgcttgggtgcagctctttctggcttgaaacttgaaactcgatgggctgttgatttcaacagttttgcgtgccaaagtttaaaatataatcatccacagactgaggtgcgaaatgagaaagccgatgagtttcttgccctccttaaggaatgggcagttctatgcaaaaaatatgtccaagatgtggattcaaatttagcaagctcagaggatcaagcggatgaagacagccctcttgacaaggacgaatttgttgtagagaagcttgtcgggatatgttatggtggcagtgacagggaaaatggcatctattttaaggtccagtgggaaggatacggccctgaggaggatacatgggaaccgattgataacttgagtgactgcccgcagaaaattagagattttgtacaagaagggcacaaaagaaagattctcccactgcctggtgatgttgatgtcatttgtggaggcccaccatgccaaggtatcagtgggtttaatcggtacagaaaccgtgatgagccactcaaagatgagaaaaacaaacaaatggtgactttcatggatattgtggcgtacttgaagcccaagtatgttctcatggaaaatgtggtggacatactcaaatttgcggatggttacctaggaaaatatgctttgagctgccttgttgctatgaagtaccaagcgcggcttggaatgatggtggctggttgctatggtctgccacagttcaggatgcgtgtgttcctctggggtgctctttcttccatggtgctccctaagtatcctctgcccacctatgatgttgtagtacgtggaggagcccctaatgccttttcgcaatgtatggttgcatatgacgagacacaaaaaccatccctgaaaaaagccttgcttcttggcgatgcaatttcagatttaccaaagcctaacgatgtgatggagtatggtggttcccccaagaccgaattccagcgctacattcgactcagtcgtaaagacatgttggattggtccttcggtg

SEQ ID NO: 17810 - DNA, 974 bp, Zea Mays
aaaaacggccggcctctcctactatgattgcatccgccatcgggcctcgtcgatcgccgcctcctgctcggcttcttcccacctgcggttgcaccgatcacccagggagggacagggcagctcgccggtccaactccgacgaccggccggccatgagctaccaggctcctcctcccggcaccgcagcctacccgccgccgggcacggcctacccgccgccaggccagcaggcgtacccgccgcctgcctacggtgcgccgccacccatggccgccggcgggtacccgcccccgccgcctccgcagccgcaggactccaagcgcagcaacgacggcttcttgaaaggatgcttggccgcgctctgctgctgctgcatgctcgacatgtgcttctgagactgagttgccgtcagggatggggtggcgctggcgccgcgtccagatccatcctgcagtcgcggcgaatgcatgaggatgttttcggagtcatcactagtcatgaactcacgatgatacatctgtttttttttctcccattccgtgtatgttctccagttctatgaatttcactagttaggccagaacagaaccagcagggattatttttctggcattcatgtgcgtgtgttcttaccatccattcttttaaacattacccacctacgaatgtttaataggatcgaaaagttttcttttatgttcggagacctctcatctgactcgtcactcgactcccatctcacagcacctcccaacgacggctcaggttgccaccgcctccttgtgcctgactctgacggtcagcaacgcggctcggtcgtcgctgaaccatcacaactcttctctatcgacccttcaatgctgctcaccatcccattcatgcagtccatccccgtctttttatcgttgcacctccctagctcccacttcgatgtgatagtgaggttccatccctatagacagatgataataaac

SEQ ID NO: 17811 - DNA, 767 bp, Zea Mays
aacgcttcaaaccagttcatcccagaccaattgatgcaggggacattatgtgcttggccacaatttcgggccaggtagctcacataaccttcacgacaatctgaaccagttcgatcaggcttcctcggctcctaccttgcaacaacagccgtttaccgggaatggtcaactgacccagggatatcctggtgatatgcatgcgttgcagtttgtggagccaaccccccagattgaccatcagaatggcgatgagggtcagtcgtcaataccagtgtgggattttctttgagctgcctgcctctggcactttgccatcctcccctccacgcgagaggccgcgtttcaccctagttgaaagggcatgtggctcgcgagaagagagattcagatataccggaccgtggttacctattaattagttgtgcatcccaaaagggcattcgtttttatttgtgtcgatatagtactccatccgtttctttttattagtcgctggatagtgcaaaattgcactatccagtgactaataaaaagaaacggagggagtacgtatctgtaaatactagtttagtctgctttgctcgcccggtagatggaaggcattgtaaagtttagaaattacaaagttttgtacctaggagtacaaggtttataatgtgatcattgcatgaagtttctaagttcattttttttgtctaggagtagaacgtttggaacgtgctaagcacaaagcacaaaattatttaacttagagtccatagtttttg

SEQ ID NO: 17812 - DNA, 967 bp, Zea Mays
gaagagagctgaatatcggacaagcaagtttccattcagaaccgagcaacgcttcaaaccagttcatcccagaccaattgatgcaggtgaattcattcttaagcaggacggcaactattactatacctcccttgtttagtctggaaagctggtacgtcagccaggggcggaggggcggcgggtggtccatatgggccacggcacaccctaaaatcacataagagtagttagtatagtggtggacattatgtgcttggccacaatttcgggccaggtagctcacataaccttcacgacaatctgaaccagttcgatcaggcttcctcggctcctaccttgcaacaacagccgtttaccgggaatggtcaactgacccagggatatcctggtgatatgcatgcgttgcagtttgtggagccaaccccccagattgaccatcagaatggcgatgagggtcagtcgtcaataccagtgtgggattttctttgagctgcctgcctctggcactttgccatcctcccctccacgcgagaggccgcgtttcaccctagttgaaagggcatgtggctcgcgagaagagagattcagatataccggaccgtggttacctattaattagttgtgcatcccaaaagggcattcgtttttatttgtgtcgatatagtactccatccgtttctttttattagtcgctggatagtgcaaaattgcactatccagtgactaataaaaagaaacggagggagtacgtatctgtaaatactagtttagtctgctttgctcgcccggtagatggaaggcattgtaaagtttagaaattacaaagttttgtacctaggagtacaaggtttataatgtgatcattgcatgaagtttctaagttcattttttttgtctaggagtagaacgtttggaacgtgctaagcacaaagcacaaaattatttaacttagagtccatagtttttg

SEQ ID NO: 17813 - DNA, 852 bp, Zea Mays
caaaagggcaacctgatgcaacagatggtgggccaacaggaagagagctgaatatcggacaagcaagtttccattcagaaccgagcaacgcttcaaaccagttcatcccagaccaattgatgcagggacattatgtgcttggccacaatttcgggccaggtagctcacataaccttcacgacaatctgaaccagttcgatcaggcttcctcggctcctaccttgcaacaacagccgtttaccgggaatggtcaactgacccagggatatcctggtgatatgcatgcgttgcagtttgtggagccaaccccccagattgaccatcagaatggcgatgagggtcagtcgtcaataccagtgtgggattttctttgagctgcctgcctctggcactttgccatcctcccctccacgcgagaggccgcgtttcaccctagttgaaagggcatgtggctcgcgagaagagagattcagatataccggaccgtggttacctattaattagttgtgcatcccaaaagggcattcgtttttatttgtgtcgatatagtactccatccgtttctttttattagtcgctggatagtgcaaaattgcactatccagtgactaataaaaagaaacggagggagtacgtatctgtaaatactagtttagtctgctttgctcgcccggtagatggaaggcattgtaaagtttagaaattacaaagttttgtacctaggagtacaaggtttataatgtgatcattgcatgaagtttctaagttcattttttttgtctaggagtagaacgtttggaacgtgctaagcacaaagcacaaaattatttaacttagagtccatagtttttg

SEQ ID NO: 17814 - DNA, 2432 bp, Zea Mays
  misc_feature (2432)..(2432): n is a, c, g, or t
atttcttacttgctatgtatgatggaaaaaatacaatttgtgatttgttcttgatgatttggacaacacagtatatttttttagtttgaccagatggttcagctttggctgggtacaaaattgtgaccactgcaggcgtttttctatctttcagtcttagttaaggattttgtatggaaaatagataattttgctgcaaacattgaaactgtgacaaatttaattaatgatagtttagagaagcccgcccatattaaataattttgaacgcaatgttattagtaccagattgtcaagccaatgtcagttactttactttgcagtttcaggcacagtgttccagaaactataataatttgtctgtgactctggtcattgatgattcataaactagttatttgctatttcattgaatgatgtcacatgcatgagcctggcaaagaattctaaccagcatgaagtttgtcaaactctacttctgttcaatatgaactcccaaattgtaccagacattgtttgttctgtgcagttggaggcttttaagaaacaattgatgaaatcattgagtgaagataatctattgcaactgtctgaaaccagtcaagatcacaacgcagaagatttgacagctcgagtcccattttggaaagatgaagtttcgagcagtaacacttcttcagatgcctccagcagatctacaattactgaatccgtccatgacggaggataccagttctcgatcacaccatatatgcctccaaaattaactcctggctcaacaactatgatttcgtcctctagtggttctccccgagcttattcaactggcccaccctctcccaagttcttatctggtccgacttcacctgcaaaagctcgatctgagggccaattggcattttcatcatggcaaggatcatcaagtcatcagtattcagcacctacctctcctccccaacgccgctcattcacagggcgaccacgtatagatgggaaggaattcttccgacaagcacggacaagactttcgtatgagcaatttggagcatttttggccaatatcaaggagttcaatgctcagaaacaatcacgggaggacaccctgtcaaaagcagaagagatttttggaacagaacacaatgatctgtacatttctttccagaatatgcttaaccgaaactaatcatgaaaatttgtcagaagtagtattttctctcaaaatcaagcagggtagattctgttggaataaacgatgcccttccgtaggttctcaagatcacattgtagagatatgtatataggccaccttaattcgaggtgttccttctcaataatttggagctgtgacttaaaagcggaaatcgcatagcatacattcactcattccctgaaattcaaggcttcctgcttgtctttctgctgtaaatccggatgcagatctcttgagctattaagattacagataagctagaagaaaaggcagaagaagagccagaattgccaccagaagtcgtctcaaatgctggaggagtacccatagttggtatggtctttgagagtgaagaaaaagcatatgagtattatgttagttatgcaggaaacatgggatttagtgttcgaaaaggatggtgggagaaaactgctaaaaattccaacaggtcaagggtctatgtctgttccagggagggatttcgctcaaagaatgacaccaagaaacctcgctcagagacaagggtgggttgccccgcacggatagcaattaaggtggcacgtggtggtaaatatcgtgtaacagaatttgtggaggatcataatcaccagcttgctgcaccatttgatattgagatgctgaaatcacaaaggatgttgaccaaagttcgacttgggagccaaaatgctagtaacatccctccagggtacaagaattatctccggtccaagtctacaaaagatatgaaaccaggggatctcagaactctgatggattattttcggagaatgaagagtgacaatccatcgttttactatgccattcaagtggatgaaaatgacaaagcagctaatgtcttctgggcggatgcaaagtcaatcatggactatcattacttctgtgatgtagtctgcttagacatgatccacaaaacaaatgattgcagcaggcctttagctttgtttctaggtatgaaccatcatcgccaaatgaccatatttggtgctgcttttttatacgatgaatctgttgagtctttcaagtggcttcttgaaacctttaagagtgccatgtgtgggaaacacccaaagacaattttgactgatggatcttcagctttgaaggaagccctgggtcttacttggcctggtactgttcaccggtcctgtgtggtcaaatataccagagcactgttaagtcattggcacatatgtttagtgcn

SEQ ID NO: 17815 - DNA, 3258 bp, Zea Mays
  misc_feature (3258)..(3258): n is a, c, g, or t
atttcttacttgctatgtatgatggaaaaaatacaatttgtgatttgttcttgatgatttggacaacacagtatatttttttagtttgaccagatggttcagctttggctgggtacaaaattgtgaccactgcaggcgtttttctatctttcagtcttagttaaggattttgtatggaaaatagataattttgctgcaaacattgaaactgtgacaaatttaattaatgatagtttagagaagcccgcccatattaaataattttgaacgcaatgttattagtaccagattgtcaagccaatgtcagttactttactttgcagtttcaggcacagtgttccagaaactataataatttgtctgtgactctggtcattgatgattcataaactagttatttgctatttcattgaatgatgtcacatgcatgagcctggcaaagaattctaaccagcatgaagtttgtcaaactctacttctgttcaatatgaactcccaaattgtaccagacattgtttgttctgtgcagttggaggcttttaagaaacaattgatgaaatcattgagtgaagataatctattgcaactgtctgaaaccagtcaagatcacaacgcagaagatttgacagctcgagtcccattttggaaagatgaagtttcgagcagtaacacttcttcagatgcctccagcagatctacaattactgaatccgtccatgacggaggataccagttctcgatcacaccatatatgcctccaaaattaactcctggctcaacaactatgatttcgtcctctagtggttctccccgagcttattcaactggcccaccctctcccaagttcttatctggtccgacttcacctgcaaaagctcgatctgagggccaattggcattttcatcatggcaaggatcatcaagtcatcagtattcagcacctacctctcctccccaacgccgctcattcacagggcgaccacgtatagatgggaaggaattcttccgacaagcacggacaagactttcgtatgagcaatttggagcatttttggccaatatcaaggagttcaatgctcagaaacaatcacgggaggacaccctgtcaaaagcagaagagatttttggaacagaacacaatgatctgtacatttctttccagaatatgcttaaccgaaactaatcatgaaaatttgtcagaagtagtattttctctcaaaatcaagcagattctgttggaataaacgatgcccttccgtaggttctcaagatcacattgtagagatatgtatataggccaccttaattcgaggtgttccttctcaataatttggagctgtgacttaaaagcggaaatcgcatagcatacattcactcattccctgaaattcaaggcttcctgcttgtctttctgctgtaaatccggatgcagatctcttgagctattaaggtgccttccctagttccctttgtagaaagctgtataaaactgccctttgccgttcttctaactgccaagggtacacggaatggatatatgatcacggtgcattcgttgtattgagatgttcgataaactgtgattgtgattttttattgagctttttcttccaaggctgtgaattttgatataaactacagaagaaaaaaatgaaaagcaagaaatagagaagacagaaaagttccaacacgaaactctcgctggcagatgggtcccacgtaatttccccttaaggactgatttagtagacccacatgtcatgcacacatctttccgcttatccctcaggtttcgtcttccctatcccagcactggtccaccaccatggccaccccatccaccgccggcgaccctgcccctgccggcgaaccagtaccaaccccattgcaaggaccagcccagcgtcgcatctcaacatcccgcatctcccacatcgtgcgcacctacctagacctctccagttccaggaagcgccgttccgctcctaagaaccagcccaaggccggggacaaggaaagggatgcggcggccgccgaaactgacgggtccaaggcggggccgtcctcgtcccacccgtctcggctgctccgggagctgggcatccgcgtctcccgctacacgcatgaggagcgccgggatatcatcctccgctacatgcagaagcggagcggtcgccagatcgtcaaccgcgcggccagtaaggtcccatcgaggcaggctctggcagtcaggcggcggaggggtgctggagggaagttcctcggcaaggatgacgcccagattacagataagctagaagaaaaggcagaagaagagccagaattgccaccagaagtcgtctcaaatgctggaggagtacccatagttggtatggtctttgagagtgaagaaaaagcatatgagtattatgttagttatgcaggaaacatgggatttagtgttcgaaaaggatggtgggagaaaactgctaaaaattccaacaggtcaagggtctatgtctgttccagggagggatttcgctcaaagaatgacaccaagaaacctcgctcagagacaagggtgggttgccccgcacggatagcaattaaggtggcacgtggtggtaaatatcgtgtaacagaatttgtggaggatcataatcaccagcttgctgcaccatttgatattgagatgctgaaatcacaaaggatgttgaccaaagttcgacttgggagccaaaatgctagtaacatccctccagggtacaagaattatctccggtccaagtctacaaaagatatgaaaccaggggatctcagaactctgatggattattttcggagaatgaagagtgacaatccatcgttttactatgccattcaagtggatgaaaatgacaaagcagctaatgtcttctgggcggatgcaaagtcaatcatggactatcattacttctgtgatgtagtctgcttagacatgatccacaaaacaaatgattgcagcaggcctttagctttgtttctaggtatgaaccatcatcgccaaatgaccatatttggtgctgcttttttatacgatgaatctgttgagtctttcaagtggcttcttgaaacctttaagagtgccatgtgtgggaaacacccaaagacaattttgactgatggatcttcagctttgaaggaagccctgggtcttacttggcctggtactgttcaccggtcctgtgtggtcaaatataccagagcactgttaagtcattggcacatatgtttagtgcn

SEQ ID NO: 17816 - DNA, 3184 bp, Zea Mays
  misc_feature (3184)..(3184): n is a, c, g, or t
tactttaatttccactcctattcttcatgtcttccccgatgccggggaccaccgccagcgccaccaagagttgatccacccaggccaggcacccgcccgtcccccggcggcggagatggcgaggaacgagacggcggccgcggccgcgccgggcgtcgacttccaccttcccgacgagatcctggccgtgatccccaccgacccgtacgagcagctggacgtggcgcgcaagatcacctccatggccatcgcctcccgcgtctcccgcctcgaggccgacgctgcgcgcctccgccgtgacctcgccgaccgtgaccgcgccgaggccgacctccgcgcctgcctcgccgactccgacgcgcgccttgccaccgctctcgacgagaacgcgaagctggcgaaggaaagggactcgctcgcggcgacggtcaaaaagctgaccaggaatttggcgaagttggaggcttttaagaaacaattgatgaaatcattgagtgaagataatctattgcaactgtctgaaaccagtcaagatcacaacgcagaagatttgacagctcgagtcccattttggaaagatgaagtttcgagcagtaacacttcttcagatgcctccagcagatctacaattactgaatccgtccatgacggaggataccagttctcgatcacaccatatatgcctccaaaattaactcctggctcaacaactatgatttcgtcctctagtggttctccccgagcttattcaactggcccaccctctcccaagttcttatctggtccgacttcacctgcaaaagctcgatctgagggccaattggcattttcatcatggcaaggatcatcaagtcatcagtattcagcacctacctctcctccccaacgccgctcattcacagggcgaccacgtatagatgggaaggaattcttccgacaagcacggacaagactttcgtatgagcaatttggagcatttttggccaatatcaaggagttcaatgctcagaaacaatcacgggaggacaccctgtcaaaagcagaagagatttttggaacagaacacaatgatctgtacatttctttccagaatatgcttaaccgaaactaatcatgaaaatttgtcagaagtagtattttctctcaaaatcaagcagggtagattctgttggaataaacgatgcccttccgtaggttctcaagatcacattgtagagatatgtatataggccaccttaattcgaggtgttccttctcaataatttggagctgtgacttaaaagcggaaatcgcatagcatacattcactcattccctgaaattcaaggcttcctgcttgtctttctgctgtaaatccggatgcagatctcttgagctattaaggtgccttccctagttccctttgtagaaagctgtataaaactgccctttgccgttcttctaactgccaagggtacacggaatggatatatgatcacggtgcattcgttgtattgagatgttcgataaactgtgattgtgattttttattgagctttttcttccaaggctgtgaattttgatataaactacagaagaaaaaaatgaaaagcaagaaatagagaagacagaaaagttccaacacgaaactctcgctggcagatgggtcccacgtaatttccccttaaggactgatttagtagacccacatgtcatgcacacatctttccgcttatccctcaggtttcgtcttccctatcccagcactggtccaccaccatggccaccccatccaccgccggcgaccctgcccctgccggcgaaccagtaccaaccccattgcaaggaccagcccagcgtcgcatctcaacatcccgcatctcccacatcgtgcgcacctacctagacctctccagttccaggaagcgccgttccgctcctaagaaccagcccaaggccggggacaaggaaagggatgcggcggccgccgaaactgacgggtccaaggcggggccgtcctcgtcccacccgtctcggctgctccgggagctgggcatccgcgtctcccgctacacgcatgaggagcgccgggatatcatcctccgctacatgcagaagcggagcggtcgccagatcgtcaaccgcgcggccagtaaggtcccatcgaggcaggctctggcagtcaggcggcggaggggtgctggagggaagttcctcggcaaggatgacgcccagataagctagaagaaaaggcagaagaagagccagaattgccaccagaagtcgtctcaaatgctggaggagtacccatagttggtatggtctttgagagtgaagaaaaagcatatgagtattatgttagttatgcaggaaacatgggatttagtgttcgaaaaggatggtgggagaaaactgctaaaaattccaacaggtcaagggtctatgtctgttccagggagggatttcgctcaaagaatgacaccaagaaacctcgctcagagacaagggtgggttgccccgcacggatagcaattaaggtggcacgtggtggtaaatatcgtgtaacagaatttgtggaggatcataatcaccagcttgctgcaccatttgatattgagatgctgaaatcacaaaggatgttgaccaaagttcgacttgggagccaaaatgctagtaacatccctccagggtacaagaattatctccggtccaagtctacaaaagatatgaaaccaggggatctcagaactctgatggattattttcggagaatgaagagtgacaatccatcgttttactatgccattcaagtggatgaaaatgacaaagcagctaatgtcttctgggcggatgcaaagtcaatcatggactatcattacttctgtgatgtagtctgcttagacatgatccacaaaacaaatgattgcagcaggcctttagctttgtttctaggtatgaaccatcatcgccaaatgaccatatttggtgctgcttttttatacgatgaatctgttgagtctttcaagtggcttcttgaaacctttaagagtgccatgtgtgggaaacacccaaagacaattttgactgatggatcttcagctttgaaggaagccctgggtcttacttggcctggtactgttcaccggtcctgtgtggtcaaatataccagagcactgttaagtcattggcacatatgtttagtgcn

SEQ ID NO: 17817 - DNA, 3179 bp, Zea Mays
  misc_feature (3179)..(3179): n is a, c, g, or t
tactttaatttccactcctattcttcatgtcttccccgatgccggggaccaccgccagcgccaccaagagttgatccacccaggccaggcacccgcccgtcccccggcggcggagatggcgaggaacgagacggcggccgcggccgcgccgggcgtcgacttccaccttcccgacgagatcctggccgtgatccccaccgacccgtacgagcagctggacgtggcgcgcaagatcacctccatggccatcgcctcccgcgtctcccgcctcgaggccgacgctgcgcgcctccgccgtgacctcgccgaccgtgaccgcgccgaggccgacctccgcgcctgcctcgccgactccgacgcgcgccttgccaccgctctcgacgagaacgcgaagctggcgaaggaaagggactcgctcgcggcgacggtcaaaaagctgaccaggaatttggcgaagttggaggcttttaagaaacaattgatgaaatcattgagtgaagataatctattgcaactgtctgaaaccagtcaagatcacaacgcagaagatttgacagctcgagtcccattttggaaagatgaagtttcgagcagtaacacttcttcagatgcctccagcagatctacaattactgaatccgtccatgacggaggataccagttctcgatcacaccatatatgcctccaaaattaactcctggctcaacaactatgatttcgtcctctagtggttctccccgagcttattcaactggcccaccctctcccaagttcttatctggtccgacttcacctgcaaaagctcgatctgagggccaattggcattttcatcatggcaaggatcatcaagtcatcagtattcagcacctacctctcctccccaacgccgctcattcacagggcgaccacgtatagatgggaaggaattcttccgacaagcacggacaagactttcgtatgagcaatttggagcatttttggccaatatcaaggagttcaatgctcagaaacaatcacgggaggacaccctgtcaaaagcagaagagatttttggaacagaacacaatgatctgtacatttctttccagaatatgcttaaccgaaactaatcatgaaaatttgtcagaagtagtattttctctcaaaatcaagcagattctgttggaataaacgatgcccttccgtaggttctcaagatcacattgtagagatatgtatataggccaccttaattcgaggtgttccttctcaataatttggagctgtgacttaaaagcggaaatcgcatagcatacattcactcattccctgaaattcaaggcttcctgcttgtctttctgctgtaaatccggatgcagatctcttgagctattaaggtgccttccctagttccctttgtagaaagctgtataaaactgccctttgccgttcttctaactgccaagggtacacggaatggatatatgatcacggtgcattcgttgtattgagatgttcgataaactgtgattgtgattttttattgagctttttcttccaaggctgtgaattttgatataaactacagaagaaaaaaatgaaaagcaagaaatagagaagacagaaaagttccaacacgaaactctcgctggcagatgggtcccacgtaatttccccttaaggactgatttagtagacccacatgtcatgcacacatctttccgcttatccctcaggtttcgtcttccctatcccagcactggtccaccaccatggccaccccatccaccgccggcgaccctgcccctgccggcgaaccagtaccaaccccattgcaaggaccagcccagcgtcgcatctcaacatcccgcatctcccacatcgtgcgcacctacctagacctctccagttccaggaagcgccgttccgctcctaagaaccagcccaaggccggggacaaggaaagggatgcggcggccgccgaaactgacgggtccaaggcggggccgtcctcgtcccacccgtctcggctgctccgggagctgggcatccgcgtctcccgctacacgcatgaggagcgccgggatatcatcctccgctacatgcagaagcggagcggtcgccagatcgtcaaccgcgcggccagtaaggtcccatcgaggcaggctctggcagtcaggcggcggaggggtgctggagggaagttcctcggcaaggatgacgcccagataagctagaagaaaaggcagaagaagagccagaattgccaccagaagtcgtctcaaatgctggaggagtacccatagttggtatggtctttgagagtgaagaaaaagcatatgagtattatgttagttatgcaggaaacatgggatttagtgttcgaaaaggatggtgggagaaaactgctaaaaattccaacaggtcaagggtctatgtctgttccagggagggatttcgctcaaagaatgacaccaagaaacctcgctcagagacaagggtgggttgccccgcacggatagcaattaaggtggcacgtggtggtaaatatcgtgtaacagaatttgtggaggatcataatcaccagcttgctgcaccatttgatattgagatgctgaaatcacaaaggatgttgaccaaagttcgacttgggagccaaaatgctagtaacatccctccagggtacaagaattatctccggtccaagtctacaaaagatatgaaaccaggggatctcagaactctgatggattattttcggagaatgaagagtgacaatccatcgttttactatgccattcaagtggatgaaaatgacaaagcagctaatgtcttctgggcggatgcaaagtcaatcatggactatcattacttctgtgatgtagtctgcttagacatgatccacaaaacaaatgattgcagcaggcctttagctttgtttctaggtatgaaccatcatcgccaaatgaccatatttggtgctgcttttttatacgatgaatctgttgagtctttcaagtggcttcttgaaacctttaagagtgccatgtgtgggaaacacccaaagacaattttgactgatggatcttcagctttgaaggaagccctgggtcttacttggcctggtactgttcaccggtcctgtgtggtcaaatataccagagcactgttaagtcattggcacatatgtttagtgcn

SEQ ID NO: 17818 - DNA, 4071 bp, Zea Mays
  misc_feature (4071)..(4071): n is a, c, g, or t
tactttaatttccactcctattcttcatgtcttccccgatgccggggaccaccgccagcgccaccaagagttgatccacccaggccaggcacccgcccgtcccccggcggcggagatggcgaggaacgagacggcggccgcggccgcgccgggcgtcgacttccaccttcccgacgagatcctggccgtgatccccaccgacccgtacgagcagctggacgtggcgcgcaagatcacctccatggccatcgcctcccgcgtctcccgcctcgaggccgacgctgcgcgcctccgccgtgacctcgccgaccgtgaccgcgccgaggccgacctccgcgcctgcctcgccgactccgacgcgcgccttgccaccgctctcgacgagaacgcgaagctggcgaaggaaagggactcgctcgcggcgacggtcaaaaagctgaccaggaatttggcgaaggtgcgtcctttactatctttctaggtccatctgttgtgcgaattctatcaattctgatctgaagttttggctttggcatgaattgttatgtgaaccctgcaacatttgattagaggtgtgtttcaagtgtacagttactggaattgttggggactttgaccagacactgttcttttagtgttgtttgcttgtgtatgtcagaaacgtgcttttcagtgaccatgattttgggcacttggtagagatgggacaaacacacatttgattgttgtgactttgtatgatacgtgtgtctagccttgtttgtagcgtagttgtcatcgcagtggagacaggagagtatgtcttttattttatgatttcttacttgctatgtatgatggaaaaaatacaatttgtgatttgttcttgatgatttggacaacacagtatatttttttagtttgaccagatggttcagctttggctgggtacaaaattgtgaccactgcaggcgtttttctatctttcagtcttagttaaggattttgtatggaaaatagataattttgctgcaaacattgaaactgtgacaaatttaattaatgatagtttagagaagcccgcccatattaaataattttgaacgcaatgttattagtaccagattgtcaagccaatgtcagttactttactttgcagtttcaggcacagtgttccagaaactataataatttgtctgtgactctggtcattgatgattcataaactagttatttgctatttcattgaatgatgtcacatgcatgagcctggcaaagaattctaaccagcatgaagtttgtcaaactctacttctgttcaatatgaactcccaaattgtaccagacattgtttgttctgtgcagttggaggcttttaagaaacaattgatgaaatcattgagtgaagataatctattgcaactgtctgaaaccagtcaagatcacaacgcagaagatttgacagctcgagtcccattttggaaagatgaagtttcgagcagtaacacttcttcagatgcctccagcagatctacaattactgaatccgtccatgacggaggataccagttctcgatcacaccatatatgcctccaaaattaactcctggctcaacaactatgatttcgtcctctagtggttctccccgagcttattcaactggcccaccctctcccaagttcttatctggtccgacttcacctgcaaaagctcgatctgagggccaattggcattttcatcatggcaaggatcatcaagtcatcagtattcagcacctacctctcctccccaacgccgctcattcacagggcgaccacgtatagatgggaaggaattcttccgacaagcacggacaagactttcgtatgagcaatttggagcatttttggccaatatcaaggagttcaatgctcagaaacaatcacgggaggacaccctgtcaaaagcagaagagatttttggaacagaacacaatgatctgtacatttctttccagaatatgcttaaccgaaactaatcatgaaaatttgtcagaagtagtattttctctcaaaatcaagcagggtagattctgttggaataaacgatgcccttccgtaggttctcaagatcacattgtagagatatgtatataggccaccttaattcgaggtgttccttctcaataatttggagctgtgacttaaaagcggaaatcgcatagcatacattcactcattccctgaaattcaaggcttcctgcttgtctttctgctgtaaatccggatgcagatctcttgagctattaaggtgccttccctagttccctttgtagaaagctgtataaaactgccctttgccgttcttctaactgccaagggtacacggaatggatatatgatcacggtgcattcgttgtattgagatgttcgataaactgtgattgtgattttttattgagctttttcttccaaggctgtgaattttgatataaactacagaagaaaaaaatgaaaagcaagaaatagagaagacagaaaagttccaacacgaaactctcgctggcagatgggtcccacgtaatttccccttaaggactgatttagtagacccacatgtcatgcacacatctttccgcttatccctcaggtttcgtcttccctatcccagcactggtccaccaccatggccaccccatccaccgccggcgaccctgcccctgccggcgaaccagtaccaaccccattgcaaggaccagcccagcgtcgcatctcaacatcccgcatctcccacatcgtgcgcacctacctagacctctccagttccaggaagcgccgttccgctcctaagaaccagcccaaggccggggacaaggaaagggatgcggcggccgccgaaactgacgggtccaaggcggggccgtcctcgtcccacccgtctcggctgctccgggagctgggcatccgcgtctcccgctacacgcatgaggagcgccgggatatcatcctccgctacatgcagaagcggagcggtcgccagatcgtcaaccgcgcggccagtaaggtcccatcgaggcaggctctggcagtcaggcggcggaggggtgctggagggaagttcctcggcaaggatgacgcccagataagctagaagaaaaggcagaagaagagccagaattgccaccagaagtcgtctcaaatgctggaggagtacccatagttggtatggtctttgagagtgaagaaaaagcatatgagtattatgttagttatgcaggaaacatgggatttagtgttcgaaaaggatggtgggagaaaactgctaaaaattccaacaggtcaagggtctatgtctgttccagggagggatttcgctcaaagaatgacaccaagaaacctcgctcagagacaagggtgggttgccccgcacggatagcaattaaggtggcacgtggtggtaaatatcgtgtaacagaatttgtggaggatcataatcaccagcttgctgcaccatttgatattgagatgctgaaatcacaaaggatgttgaccaaagttcgacttgggagccaaaatgctagtaacatccctccagggtacaagaattatctccggtccaagtctacaaaagatatgaaaccaggggatctcagaactctgatggattattttcggagaatgaagagtgacaatccatcgttttactatgccattcaagtggatgaaaatgacaaagcagctaatgtcttctgggcggatgcaaagtcaatcatggactatcattacttctgtgatgtagtctgcttagacatgatccacaaaacaaatgattgcagcaggcctttagctttgtttctaggtatgaaccatcatcgccaaatgaccatatttggtgctgcttttttatacgatgaatctgttgagtctttcaagtggcttcttgaaacctttaagagtgccatgtgtgggaaacacccaaagacaattttgactgatggatcttcagctttgaaggaagccctgggtcttacttggcctggtactgttcaccggtcctgtgtggtcaaatataccagagcactgttaagtcattggcacatatgtttagtgcn

SEQ ID NO: 17819 - DNA, 3086 bp, Zea Mays
atataacattgacaccctttaaaggcggtttcaaggcaattcattccaaggtccacttccaagcactcttgctaatcttgttcagctaacaagcttacgaataggtgacattgtaactgggagttcttcgctggcattcatcagtaacatgacatctttgaacttattgtattcccaattaatcattcactttatgaatcaaactgcgccttcatttgctccattgtaaccgagttgttatatacttaaattggtgacattattcattgcagaattttaaggaattgcaggatatttggtactttggcattagtgaacttttcaaaatttacaggattaacattattgtaaggcatttcgtttcttccaaattttttgttaaatctgctttgtgcaagatgcttcctatggatatgcatcgcgagatgtttcctttcacacatattctcgtcttttacttacttatgcagggatttgagttttaataatatcataggtgaagtaccacaagctctactaaatatgaattcactcaccttgttgtatgttttgtatccctttcaatgcttattttgggggcataatgaatttcattgtttatcttgctaattgtagcacatgcattccgatcagatttcttgggaacaatagtcttacaggaggccttccaagctctataggaccttctattaagtacttagacttttcctacaactacctctcaggaaaccttccttcttgggctagtcataatttgcaattaaatttggtggcaaactacttcgtgatcaacaagtccaaagatagtgtcttacctgcggggctggagtgccttcagcgaaacacgtcatgctttcttggctctccacaatcttcctcctttactgtagactgtgggagtagtagatctgtatttgcttcagataattccatgtatcaacctgatgatgccaatcttggtgttgcatcatattatatttcaagcccaccaagatggggtgttagtaatgtcgggagattcatggatacatcaaacgggagttacatagtcaacagttcacgccggtttcagaataccctagattccaaacttttccaaacagcaaggatgtcagcatcaactttaagatactatggttttggacttgaaaatggggactacacagtcacacttcaatttggagaatttgactttgaagatttacaaacttggaagagcgttgggagaagggttttcgatatctatctccagggtgagcgtaaggagcagaactttaacataaagaaggcagcaaaagaagctggcgaagcaagcacatcgtacactgctgtcaagaaacaatatactgtacctgtcacaaaaaacatcctagaaattcatctcttttgggctggaaagggcacttgttgcatccctaatcaaggcgattatgggcctacaatatcagctttgagtgcaactctaaatacaaaaaagaagggtaataaaataggtgtaattattggagtcgtgattggtgcaacagttttaggactagcaatacttgctacactctgtgtgtggaggcacaaaaggagaaaagtatcactagagcagcaagagctctacaatattgttcgaatacctaatgtattctgttacacttatggtgaactaaggaccgctactgaaaattttagttctgctaatcttcttggtgaagggggatatggatcagtttataagggtaaattagttgatggcagtgtggtggcaattaaacaactatctgaaacatctcgccaagggaagaaggaattcgtagctgaaatagaaactatttcccgagtgcagcaccgtaatcttgtgaagttgtttggtttttgccttgagggaaataaaccacttttggtttatgagtacatggagagtggaagccttgataaagcattgtttggaaatggaagattgaacttgaattggtcaacacgatataaaatatgcttggggattgcaagaggcttagcttatctccacgaagagtctagcatccgcattgtgcatagggacataaaggccagcaatgtattacttgatgccactttgaaccctaagatttcggatttcgggctcgccaaactttatgacgataaaaagacacatgttagcacaaaagttgctggtacatttggctatctttcacctgagtacgccatgagaggtcacatgactgagaaagttgatatttttgcttttggtgtggtcatgttggagattattgctggaaggccgaactatgatggtaagcttgaccaagacatggcttatcttttagaatgggtctggcaactttacgaggaagaccatccgctggacattgcggatcccaagctcacagaattcgatagtgtcgagttgctccgtgccatccgcatcgccctcctctgcatccagagctcacctcgtcaaaggccatccatgtcgagagtggtgtcaatgctcacaggagacagcgaggcgcctgaggcagtgtccaagcctagctatgttgccgaatggcagagcaacactgaagggacgtcaagctcagtgtccacagcagaggctgtgtccgtggctccattcctaaaccccgttgtggacgatggccggtgatgatggccatcgctaagatcatcttatgtcaagcactcaagccacagattgttttcttggagatccacctttaaaggccccattatttaggttgaatgtggatgacagatttatgttgttgactggatgagatgtcctagggtttcctcacgttgtagaatacaactctcacaagtataagaatctaggaacatattccttcgatgtaacatacctcttttgtttaatctgttttgtaagagaaaccagaagaacaccttgtatttcggttgatattttgaaacccacagccaattgaatgctgggtgtgtaggcatatatatgaccaataggttgattgtaagctttactacaatagtggggcggtctcgaagtatattgccagatatgttgcagttcattttctaacacgagaaacccttgatatgctcgaacagaaagcaacaactga

SEQ ID NO: 17820 - DNA, 3188 bp, Zea Mays
atttggatatgttgttacaagttatattagttttcatataacattgacaccctttaaaggcggtttcaaggcaattcattccaaggtccacttccaagcactcttgctaatcttgttcagctaacaagcttacgaataggtgacattgtaactgggagttcttcgctggcattcatcagtaacatgacatctttgaacttattaattttaaggaattgcaggatatttggtactttggcattagtgaacttttcaaaatttacaggattaacattattggatttgagttttaataatatcataggtgaagtaccacaagctctactaaatatgaattcactcaccttgttatttcttgggaacaatagtcttacaggaggccttccaagctctataggaccttctattaagtacttagacttttcctacaactacctctcaggaaaccttccttcttgggctagtcataatttgcaattgtaagtattaagttatgtaatttattgttggtcaaccgaacttttagcccaattgtcttttcaaagcataatgtagcccaacttgaaatatatgcttatagtacatgtatttattaaaatatatttttgaatgttcaatacatctaaaaaaacttgtgttgaggcatttagcttatatttctttttagatttgttgcattttgaagcaacctattattctgaatctttgaagaagtagacatacattcccttactgcttaactccaaaaaggcaaaaaaaaagtttgttgctttagtgtatcttgattctaggaaataaacacactgttaatatgctccaagtccaaagacctctcaagttttttgcgtgtctcattatgcatagaaatttggtggcaaactacttcgtgatcaacaagtccaaagatagtgtcttacctgcggggctggagtgccttcagcgaaacacgtcatgctttcttggctctccacaatcttcctcctttactgtagactgtgggagtagtagatctgtatttgcttcagataattccatgtatcaacctgatgatgccaatcttggtgttgcatcatattatatttcaagcccaccaagatggggtgttagtaatgtcgggagattcatggatacatcaaacgggagttacatagtcaacagttcacgccggtttcagaataccctagattccaaacttttccaaacagcaaggatgtcagcatcaactttaagatactatggttttggacttgaaaatggggactacacagtcacacttcaatttggagaatttgactttgaagatttacaaacttggaagagcgttgggagaagggttttcgatatctatctccagggtgagcgtaaggagcagaactttaacataaagaaggcagcaaaagaagctggcgaagcaagcacatcgtacactgctgtcaagaaacaatatactgtacctgtcacaaaaaacatcctagaaattcatctcttttgggctggaaagggcacttgttgcatccctaatcaaggcgattatgggcctacaatatcagctttgagtgcaactctaaatacaaaaaagaagggtaataaaataggtgtaattattggagtcgtgattggtgcaacagttttaggactagcaatacttgctacactctgtgtgtggaggcacaaaaggagaaaagtatcactagagcagcaagagctctacaatattgttcgaatacctaatgtattctgttacacttatggtgaactaaggaccgctactgaaaattttagttctgctaatcttcttggtgaagggggatatggatcagtttataagggtaaattagttgatggcagtgtggtggcaattaaacaactatctgaaacatctcgccaagggaagaaggaattcgtagctgaaatagaaactatttcccgagtgcagcaccgtaatcttgtgaagttgtttggtttttgccttgagggaaataaaccacttttggtttatgagtacatggagagtggaagccttgataaagcattgtttggaaatggaagattgaacttgaattggtcaacacgatataaaatatgcttggggattgcaagaggcttagcttatctccacgaagagtctagcatccgcattgtgcatagggacataaaggccagcaatgtattacttgatgccactttgaaccctaagatttcggatttcgggctcgccaaactttatgacgataaaaagacacatgttagcacaaaagttgctggtacatttggctatctttcacctgagtacgccatgagaggtcacatgactgagaaagttgatatttttgcttttggtgtggtcatgttggagattattgctggaaggccgaactatgatggtaagcttgaccaagacatggcttatcttttagaatgggtctggcaactttacgaggaagaccatccgctggacattgcggatcccaagctcacagaattcgatagtgtcgagttgctccgtgccatccgcatcgccctcctctgcatccagagctcacctcgtcaaaggccatccatgtcgagagtggtgtcaatgctcacaggagacagcgaggcgcctgaggcagtgtccaagcctagctatgttgccgaatggcagagcaacactgaagggacgtcaagctcagtgtccacagcagaggctgtgtccgtggctccattcctaaaccccgttgtggacgatggccggtgatgatggccatcgctaagatcatcttatgtcaagcactcaagccacagattgttttcttggagatccacctttaaaggccccattatttaggttgaatgtggatgacagatttatgttgttgactggatgagatgtcctagggtttcctcacgttgtagaatacaactctcacaagtataagaatctaggaacatattccttcgatgtaacatacctcttttgtttaatctgttttgtaagagaaaccagaagaacaccttgtatttcggttgatattttgaaacccacagccaattgaatgctgggtgtgtaggcatatatatgaccaataggttgattgtaagctttactacaatagtggggcggtctcgaagtatattgccagatatgttgcagttcattttctaacacgagaaacccttgatatgctcgaacagaaagcaacaactga

SEQ ID NO: 17821 - DNA, 4594 bp, Zea Mays
gtaagtgtctgcacggcacgtccacggacggaactgggtattcgatgctttttcccccctcctcctgaggcgttgggtgttcgtgctgagcaaaatcctgacaggcagcattaacgacctgttcgttttaatctcaatccacgtggatcgaaggcaattgaggccttattcgtttgtgtcggattgcacccggaatcgtttcagctaatcaaagtttatataaattagagaatcaattcagttaggaatcgttccgacccaccaatccgacacaaaggaacaaggcctgagtaagttaaagtccctcctgatctcttctaaccccctcccccttccatgaaatgtgaataaccgaataagtcctacaaggcaaagtcttgtaatggttatgaactgcactcttgtgactgcaggaaaatgaacaaactggatgtggttggtcctatacctgaggagctgaggaacctcagccacttgacaactctgaatttacaacagaattacttaacagggcctttgccatcgttccttggagaattaactgctttgcagcagatgtcgctttctggcaatgcattatcaggaactattccaaaggagctggggaaccttgtgaatctcataatcctgagtttaggcacgaacaatttaactggctcccttccttctgaattgggtaacctggttaaactagagcatatgtacattgatagtgctggcttaagtggtcctataccatcatcattttcgaaacttacacgattgaaaacattataatgactttactgggaaaataccagattacattggaagctggagtaatttaacagatttgcggtttcaaggcaattcattccaaggtccacttccaagcactcttgctaatcttgttcagctaacaagcttacgaataggtgacattgtaactgggagttcttcgctggcattcatcagtaacatgacatctttgaacttattgtattcccaattaatcattcactttatgaatcaaactgcgccttcatttgctccattgtaaccgagttgttatatacttaaattggtgacattattcattgcagaattttaaggaattgcaggatatttggtactttggcattagtgaacttttcaaaatttacaggattaacattattgtaaggcatttcgtttcttccaaattttttgttaaatctgctttgtgcaagatgcttcctatggatatgcatcgcgagatgtttcctttcacacatattctcgtcttttacttacttatgcagggatttgagttttaataatatcataggtgaagtaccacaagctctactaaatatgaattcactcaccttgttgtatgttttgtatccctttcaatgcttattttgggggcataatgaatttcattgtttatcttgctaattgtagcacatgcattccgatcagatttcttgggaacaatagtcttacaggaggccttccaagctctataggaccttctattaagtacttagacttttcctacaactacctctcaggaaaccttccttcttgggctagtcataatttgcaattgtaagtattaagttatgtaatttattgttggtcaaccgaacttttagcccaattgtcttttcaaagcataatgtagcccaacttgaaatatatgcttatagtacatgtatttattaaaatatatttttgaatgttcaatacatctaaaaaaacttgtgttgaggcatttagcttatatttctttttagatttgttgcattttgaagcaacctattattctgaatctttgaagaagtagacatacattcccttactgcttaactccaaaaaggcaaaaaaaaagtttgttgctttagtgtatcttgattctaggaaataaacacactgttaatatgctccaagtccaaagacctctcaagttttttgcgtgtctcattatgcatagaaatttggtggcaaactacttcgtgatcaacaagtccaaagatagtgtcttacctgcggggctggagtgccttcagcgaaacacgtcatgctttcttggctctccacaatcttcctcctttactgtagactgtgggagtagtagatctgtatttgcttcagataattccatgtatcaacctgatgatgccaatcttggtgttgcatcatattatatttcaagcccaccaagatggggtgttagtaatgtcgggagattcatggatacatcaaacgggagttacatagtcaacagttcacgccggtttcagaataccctagattccaaacttttccaaacagcaaggatgtcagcatcaactttaagatactatggttttggacttgaaaatggggactacacagtcacacttcaatttggagaatttgactttgaagatttacaaacttggaagagcgttgggagaagggttttcgatatctatctccagggtgagcgtaaggagcagaactttaacataaagaaggcagcaaaagaagctggcgaagcaagcacatcgtacactgctgtcaagaaacaatatactgtacctgtcacaaaaaacatcctagaaattcatctcttttgggctggaaagggcacttgttgcatccctaatcaaggcgattatgggcctacaatatcagctttgagtgcaactctaagtattctcttttgatacaatcatggctttaatattgttcagataatgtccttacgttcaacaatttcattatatacaatttctaccacgagaagtactgaagactaaaaagactggaattttagaaatgcctaacataaaagccaaatattgtttatattgatgtataatcatgctttctaacaaatgcctctcctacagatacaaaaaagaagggtaataaaataggtgtaattattggagtcgtgattggtgcaacagttttaggactagcaatacttgctacactctgtgtgtggaggcacaaaaggagaaaagtatcactagagcagcaaggtaaaatgatatgctagattgctaggctaacgcaatccttaaactcagcaaataggttttttcttacaaactaacagtatgtggtgtttgcagagctctacaatattgttcgaatacctaatgtattctgttacacttatggtgaactaaggaccgctactgaaaattttagttctgctaatcttcttggtgaagggggatatggatcagtttataagaaaaattcaccttctggcagggtaaattagttgatggcagtgtggtggcaattaaacaactatctgaaacatctcgccaagggaagaaggaattcgtagctgaaatagaaactatttcccgagtgcagcaccgtaatcttgtgaagttgtttggtttttgccttgagggaaataaaccacttttggtttatgagtacatggagagtggaagccttgataaagcattgtttggaaatggaagattgaacttgaattggtcaacacgatataaaatatgcttggggattgcaagaggcttagcttatctccacgaagagtctagcatccgcattgtgcatagggacataaaggccagcaatgtattacttgatgccactttgaaccctaagatttcggatttcgggctcgccaaactttatgacgataaaaagacacatgttagcacaaaagttgctggtacatttggctatctttcacctgagtacgccatgagaggtcacatgactgagaaagttgatatttttgcttttggtgtggtcatgttggagattattgctggaaggccgaactatgatggtaagcttgaccaagacatggcttatcttttagaatgggtctggcaactttacgaggaagaccatccgctggacattgcggatcccaagctcacagaattcgatagtgtcgagttgctccgtgccatccgcatcgccctcctctgcatccagagctcacctcgtcaaaggccatccatgtcgagagtggtgtcaatgctcacaggagacagcgaggcgcctgaggcagtgtccaagcctagctatgttgccgaatggcagagcaacactgaagggacgtcaagctcagtgtccacagcagaggctgtgtccgtggctccattcctaaaccccgttgtggacgatggccggtgatgatggccatcgctaagatcatcttatgtcaagcactcaagccacagattgttttcttggagatccacctttaaaggccccattatttaggttgaatgtggatgacagatttatgttgttgactggatgagatgtcctagggtttcctcacgttgtagaatacaactctcacaagtataagaatctaggaacatattccttcgatgtaacatacctcttttgtttaatctgttttgtaagagaaaccagaagaacaccttgtatttcggttgatattttgaaacccacagccaattgaatgctgggtgtgtaggcatatatatgaccaataggttgattgtaagctttactacaatagtggggcggtctcgaagtatattgccagatatgttgcagttcattttctaacacgagaaacccttgatatgctcgaacagaaagcaacaactga

SEQ ID NO: 17822 - DNA, 4841 bp, Zea Mays
gcgacgcttcgtctctcctcacctgcactcgcgatttcaagaaccgactgtattttctatcctcgcactttctggaaccggatgggcagctacttttcgatggccggctagggttccacacaccaaccatgatgttcccctcaacctctgtcaacatttgagactggttcaactcgcttgtgtgccgaagttcccctgcggcggccgtcatcaccatggtctcccctcgtgtggctctggtcttatcgtggtgaccatcatgggtcgagaggagtgcgacgacctggggttcactgtctcacccttagctttagtgcaaagttccctcccagctcatcgcagaccaaggtacgatagtgtggaggcctacatcgtgcaacctgggcttcaccctctgcaccgcctgcaacaatatctaatttcgtcttagatcaagcttttggatccccacgctcccccacccattcttctgtaatgcggtgttctccaagctcgggctgcaggtgtggtcgccatggttcaaaggcgacccgtgcgtcggcgcggccacggacggcacgtccatctacgccgacaaaatgaacccgggcatcaagtgcgactgctccgaccacaacaacaccatctgccacattaccgagctgaaaatgaacaaactggatgtggttggtcctatacctgaggagctgaggaacctcagccacttgacaactctgaatttacaacagaattacttaacagggcctttgccatcgttccttggagaattaactgctttgcagcagatgtcgctttctggcaatgcattatcaggaactattccaaaggagctggggaaccttgtgaatctcataatcctgagtttaggcacgaacaatttaactggctcccttccttctgaattgggtaacctggttaaactagagcatatgtacattgatagtgctggcttaagtggtcctataccatcatcattttcgaaacttacacgattgaaaacattgtgcgcatcagataatgactttactgggaaaataccagattacattggaagctggagtaatttaacagatttgcggtttcaaggcaattcattccaaggtccacttccaagcactcttgctaatcttgttcagctaacaagcttacgaataggtgacattgtaactgggagttcttcgctggcattcatcagtaacatgacatctttgaacttattgtattcccaattaatcattcactttatgaatcaaactgcgccttcatttgctccattgtaaccgagttgttatatacttaaattggtgacattattcattgcagaattttaaggaattgcaggatatttggtactttggcattagtgaacttttcaaaatttacaggattaacattattggatttgagttttaataatatcataggtgaagtaccacaagctctactaaatatgaattcactcaccttgttatttcttgggaacaatagtcttacaggaggccttccaagctctataggaccttctattaagtacttagacttttcctacaactacctctcaggaaaccttccttcttgggctagtcataatttgcaattgtaagtattaagttatgtaatttattgttggtcaaccgaacttttagcccaattgtcttttcaaagcataatgtagcccaacttgaaatatatgcttatagtacatgtatttattaaaatatatttttgaatgttcaatacatctaaaaaaacttgtgttgaggcatttagcttatatttctttttagatttgttgcattttgaagcaacctattattctgaatctttgaagaagtagacatacattcccttactgcttaactccaaaaaggcaaaaaaaaagtttgttgctttagtgtatcttgattctaggaaataaacacactgttaatatgctccaagtccaaagacctctcaagttttttgcgtgtctcattatgcatagaaatttggtggcaaactacttcgtgatcaacaagtccaaagatagtgtcttacctgcggggctggagtgccttcagcgaaacacgtcatgctttcttggctctccacaatcttcctcctttactgtagactgtgggagtagtagatctgtatttgcttcagataattccatgtatcaacctgatgatgccaatcttggtgttgcatcatattatatttcaagcccaccaagatggggtgttagtaatgtcgggagattcatggatacatcaaacgggagttacatagtcaacagttcacgccggtttcagaataccctagattccaaacttttccaaacagcaaggatgtcagcatcaactttaagatactatggttttggacttgaaaatggggactacacagtcacacttcaatttggagaatttgactttgaagatttacaaacttggaagagcgttgggagaagggttttcgatatctatctccagggtgagcgtaaggagcagaactttaacataaagaaggcagcaaaagaagctggcgaagcaagcacatcgtacactgctgtcaagaaacaatatactgtacctgtcacaaaaaacatcctagaaattcatctcttttgggctggaaagggcacttgttgcatccctaatcaaggcgattatgggcctacaatatcagctttgagtgcaactctaagtattctcttttgatacaatcatggctttaatattgttcagataatgtccttacgttcaacaatttcattatatacaatttctaccacgagaagtactgaagactaaaaagactggaattttagaaatgcctaacataaaagccaaatattgtttatattgatgtataatcatgctttctaacaaatgcctctcctacagatacaaaaaagaagggtaataaaataggtgtaattattggagtcgtgattggtgcaacagttttaggactagcaatacttgctacactctgtgtgtggaggcacaaaaggagaaaagtatcactagagcagcaagagctctacaatattgttcgaatacctaatgtattctgttacacttatggtgaactaaggaccgctactgaaaattttagttctgctaatcttcttggtgaagggggatatggatcagtttataaggtttgttcatttgtagtacacaatgcatgatttgaatctgctagggatcttttgtggcactgtaggttaatagtgaacaacgaatttgttttcattgtgcaaatttggctagagttgtgttgtttaattctactttgttcaatgaaaattccttttatcatttactcatttaacgtacttctccaattatcttactaacatcagtgcataataaatctgggatattccctgttattttccttttccccctgttttgcacgtggtcagtaaaatgagattgattgggtactctagtgcatttactctattacatgatattgattttacttggtgcttataactcttttttagaaaaattcaccttctggcagggtaaattagttgatggcagtgtggtggcaattaaacaactatctgaaacatctcgccaagggaagaaggaattcgtagctgaaatagaaactatttcccgagtgcagcaccgtaatcttgtgaagttgtttggtttttgccttgagggaaataaaccacttttggtttatgagtacatggagagtggaagccttgataaagcattgtttggaaatggaagattgaacttgaattggtcaacacgatataaaatatgcttggggattgcaagaggcttagcttatctccacgaagagtctagcatccgcattgtgcatagggacataaaggccagcaatgtattacttgatgccactttgaaccctaagatttcggatttcgggctcgccaaactttatgacgataaaaagacacatgttagcacaaaagttgctggtacatttggctatctttcacctgagtacgccatgagaggtcacatgactgagaaagttgatatttttgcttttggtgtggtcatgttggagattattgctggaaggccgaactatgatggtctggcaactttacgaggaagaccatccgctggacattgcggatcccaagctcacagaattcgatagtgtcgagttgctccgtgccatccgcatcgccctcctctgcatccagagctcacctcgtcaaaggccatccatgtcgagagtggtgtcaatgctcacaggagacagcgaggcgcctgaggcagtgtccaagcctagctatgttgccgaatggcagagcaacactgaagggacgtcaagctcagtgtccacagcagaggctgtgtccgtggctccattcctaaaccccgttgtggacgatggccggtgatgatggccatcgctaagatcatcttatgtcaagcactcaagccacagattgttttcttggagatccacctttaaaggccccattatttaggttgaatgtggatgacagatttatgttgttgactggatgagatgtcctagggtttcctcacgttgtagaatacaactctcacaagtataagaatctaggaacatattccttcgatgtaacatacctcttttgtttaatctgttttgtaagagaaaccagaagaacaccttgtatttcggttgatattttgaaacccacagccaattgaatgctgggtgtgtaggcatatatatgaccaataggttgattgtaagctttactacaatagtggggcggtctcgaagtatattgccagatatgttgcagttcattttctaacacgagaaacccttgatatgctcgaacagaaagcaacaactga

SEQ ID NO: 17823 - DNA, 4324 bp, Zea Mays
cggagacctccacgcgacgcttcgtctctcctcacctgcactcgcgatttcaagaaccgactgtattttctatcctcgcactttctggaaccggatgggcagctacttttcgatggccggctagggttccacacaccaaccatgatgttcccctcaacctctgtcaacatttgagactggttcaactcgcttgtgtgccgaagttcccctgcggcggccgtcatcaccatggtctcccctcgtgtggctctggtcttatcgtggtgaccatcatgggtcgagaggagtgcgacgacctggggttcactgtctcacccttagctttagtgcaaagttccctcccagctcatcgcagaccaaggtacgatagtgtggaggcctacatcgtgcaacctgggcttcaccctctgcaccgcctgcaacaatatctaatttcgtcttagatcaagcttttggatccccacgctcccccacccattcttctgtaatgcggtgttctccaagctcgggctgcaggtgtggtcgccatggttcaaaggcgacccgtgcgtcggcgcggccacggacggcacgtccatctacgccgacaaaatgaacccgggcatcaagtgcgactgctccgaccacaacaacaccatctgccacattaccgagctgcagcattaacgacctgttcgttttaatctcaatccacgtggatcgaaggcaattgaggccttattcgtttgtgtcggattgcacccggaatcgtttcagctaatcaaagtttatataaattagagaatcaattcagttaggaatcgttccgacccaccaatccgacacaaaggaacaaggcctgagtaagttaaagtccctcctgatctcttctaaccccctcccccttccatgaaatgtgaataaccgaataagtcctacaaggcaaagtcttgtaatggttatgaactgcactcttgtgactgcaggaaaatgaacaaactggatgtggttggtcctatacctgaggagctgaggaacctcagccacttgacaactctgaatttacaacagaattacttaacagggcctttgccatcgttccttggagaattaactgctttgcagcagatgtcgctttctggcaatgcattatcaggaactattccaaaggagctggggaaccttgtgaatctcataatcctgagtttaggcacgaacaatttaactggctcccttccttctgaattgggtaacctggttaaactagagcatatgtacattgatagtgctggcttaagtggtcctataccatcatcattttcgaaacttacacgattgaaaacattgtatatccattagacacattttttcaatagtattgttctatgccactcaacgttatatgttattccactttttgtttaggtgcgcatcagataatgactttactgggaaaataccagattacattggaagctggagtaatttaacagatttgcggtttcaaggcaattcattccaaggtccacttccaagcactcttgctaatcttgttcagctaacaagcttacgaataggtgacattgtaactgggagttcttcgctggcattcatcagtaacatgacatctttgaacttattgtattcccaattaatcattcactttatgaatcaaactgcgccttcatttgctccattgtaaccgagttgttatatacttaaattggtgacattattcattgcagaattttaaggaattgcaggatatttggtactttggcattagtgaacttttcaaaatttacaggattaacattattggatttgagttttaataatatcataggtgaagtaccacaagctctactaaatatgaattcactcaccttgttatttcttgggaacaatagtcttacaggaggccttccaagctctataggaccttctattaagtacttagacttttcctacaactacctctcaggaaaccttccttcttgggctagtcataatttgcaattaaatttggtggcaaactacttcgtgatcaacaagtccaaagatagtgtcttacctgcggggctggagtgccttcagcgaaacacgtcatgctttcttggctctccacaatcttcctcctttactgtagactgtgggagtagtagatctgtatttgcttcagataattccatgtatcaacctgatgatgccaatcttggtgttgcatcatattatatttcaagcccaccaagatggggtgttagtaatgtcgggagattcatggatacatcaaacgggagttacatagtcaacagttcacgccggtttcagaataccctagattccaaacttttccaaacagcaaggatgtcagcatcaactttaagatactatggttttggacttgaaaatggggactacacagtcacacttcaatttggagaatttgactttgaagatttacaaacttggaagagcgttgggagaagggttttcgatatctatctccagggtgagcgtaaggagcagaactttaacataaagaaggcagcaaaagaagctggcgaagcaagcacatcgtacactgctgtcaagaaacaatatactgtacctgtcacaaaaaacatcctagaaattcatctcttttgggctggaaagggcacttgttgcatccctaatcaaggcgattatgggcctacaatatcagctttgagtgcaactctaaatacaaaaaagaagggtaataaaataggtgtaattattggagtcgtgattggtgcaacagttttaggactagcaatacttgctacactctgtgtgtggaggcacaaaaggagaaaagtatcactagagcagcaagagctctacaatattgttcgaatacctaatgtattctgttacacttatggtgaactaaggaccgctactgaaaattttagttctgctaatcttcttggtgaagggggatatggatcagtttataagggtaaattagttgatggcagtgtggtggcaattaaacaactatctgaaacatctcgccaagggaagaaggaattcgtagctgaaatagaaactatttcccgagtgcagcaccgtaatcttgtgaagttgtttggtttttgccttgagggaaataaaccacttttggtttatgagtacatggagagtggaagccttgataaagcattgtttggaaatggaagattgaacttgaattggtcaacacgatataaaatatgcttggggattgcaagaggcttagcttatctccacgaagagtctagcatccgcattgtgcatagggacataaaggccagcaatgtattacttgatgccactttgaaccctaagatttcggatttcgggctcgccaaactttatgacgataaaaagacacatgttagcacaaaagttgctggtacatttggctatctttcacctgagtacgccatgagaggtcacatgactgagaaagttgatatttttgcttttggtgtggtcatgttggagattattgctggaaggccgaactatgatggtaagcttgaccaagacatggcttatcttttagaatgggtctggcaactttacgaggaagaccatccgctggacattgcggatcccaagctcacagaattcgatagtgtcgagttgctccgtgccatccgcatcgccctcctctgcatccagagctcacctcgtcaaaggccatccatgtcgagagtggtgtcaatgctcacaggagacagcgaggcgcctgaggcagtgtccaagcctagctatgttgccgaatggcagagcaacactgaagggacgtcaagctcagtgtccacagcagaggctgtgtccgtggctccattcctaaaccccgttgtggacgatggccggtgatgatggccatcgctaagatcatcttatgtcaagcactcaagccacagattgttttcttggagatccacctttaaaggccccattatttaggttgaatgtggatgacagatttatgttgttgactggatgagatgtcctagggtttcctcacgttgtagaatacaactctcacaagtataagaatctaggaacatattccttcgatgtaacatacctcttttgtttaatctgttttgtaagagaaaccagaagaacaccttgtatttcggttgatattttgaaacccacagccaattgaatgctgggtgtgtaggcatatatatgaccaataggttgattgtaagctttactacaatagtggggcggtctcgaagtatattgccagatatgttgcagttcattttctaacacgagaaacccttgatatgctcgaacagaaagcaacaactga

SEQ ID NO: 17824 - DNA, 4877 bp, Zea Mays
cggagacctccacgcgacgcttcgtctctcctcacctgcactcgcgatttcaagaaccgactgtattttctatcctcgcactttctggaaccggatgggcagctacttttcgatggccggctagggttccacacaccaaccatgatgttcccctcaacctctgtcaacatttgagactggttcaactcgcttgtgtgccgaagttcccctgcggcggccgtcatcaccatggtctcccctcgtgtggctctggtcttatcgtggtgaccatcatgggtcgagaggagtgcgacgacctggggttcactgtctcacccttagctttagtgcaaagttccctcccagctcatcgcagaccaaggtacgatagtgtggaggcctacatcgtgcaacctgggcttcaccctctgcaccgcctgcaacaatatctaatttcgtcttagatcaagcttttggatccccacgctcccccacccattcttctgtaatgcggtgttctccaagctcgggctgcaggtgtggtcgccatggttcaaaggcgacccgtgcgtcggcgcggccacggacggcacgtccatctacgccgacaaaatgaacccgggcatcaagtgcgactgctccgaccacaacaacaccatctgccacattaccgagctgaaaatgaacaaactggatgtggttggtcctatacctgaggagctgaggaacctcagccacttgacaactctgaatttacaacagaattacttaacagggcctttgccatcgttccttggagaattaactgctttgcagcagatgtcgctttctggcaatgcattatcaggaactattccaaaggagctggggaaccttgtgaatctcataatcctgagtttaggcacgaacaatttaactggctcccttccttctgaattgggtaacctggttaaactagagcatatgtacattgatagtgctggcttaagtggtcctataccatcatcattttcgaaacttacacgattgaaaacattgtgcgcatcagataatgactttactgggaaaataccagattacattggaagctggagtaatttaacagatttgcggtttcaaggcaattcattccaaggtccacttccaagcactcttgctaatcttgttcagctaacaagcttacgaataggtgacattgtaactgggagttcttcgctggcattcatcagtaacatgacatctttgaacttattaattttaaggaattgcaggatatttggtactttggcattagtgaacttttcaaaatttacaggattaacattattggatttgagttttaataatatcataggtgaagtaccacaagctctactaaatatgaattcactcaccttgttatttcttgggaacaatagtcttacaggaggccttccaagctctataggaccttctattaagtacttagacttttcctacaactacctctcaggaaaccttccttcttgggctagtcataatttgcaattgtaagtattaagttatgtaatttattgttggtcaaccgaacttttagcccaattgtcttttcaaagcataatgtagcccaacttgaaatatatgcttatagtacatgtatttattaaaatatatttttgaatgttcaatacatctaaaaaaacttgtgttgaggcatttagcttatatttctttttagatttgttgcattttgaagcaacctattattctgaatctttgaagaagtagacatacattcccttactgcttaactccaaaaaggcaaaaaaaaagtttgttgctttagtgtatcttgattctaggaaataaacacactgttaatatgctccaagtccaaagacctctcaagttttttgcgtgtctcattatgcatagaaatttggtggcaaactacttcgtgatcaacaagtccaaagatagtgtcttacctgcggggctggagtgccttcagcgaaacacgtcatgctttcttggctctccacaatcttcctcctttactgtagactgtgggagtagtagatctgtatttgcttcagataattccatgtatcaacctgatgatgccaatcttggtgttgcatcatattatatttcaagcccaccaagatggggtgttagtaatgtcgggagattcatggatacatcaaacgggagttacatagtcaacagttcacgccggtttcagaataccctagattccaaacttttccaaacagcaaggatgtcagcatcaactttaagatactatggttttggacttgaaaatggggactacacagtcacacttcaatttggagaatttgactttgaagatttacaaacttggaagagcgttgggagaagggttttcgatatctatctccagggtgagcgtaaggagcagaactttaacataaagaaggcagcaaaagaagctggcgaagcaagcacatcgtacactgctgtcaagaaacaatatactgtacctgtcacaaaaaacatcctagaaattcatctcttttgggctggaaagggcacttgttgcatccctaatcaaggcgattatgggcctacaatatcagctttgagtgcaactctaagtattctcttttgatacaatcatggctttaatattgttcagataatgtccttacgttcaacaatttcattatatacaatttctaccacgagaagtactgaagactaaaaagactggaattttagaaatgcctaacataaaagccaaatattgtttatattgatgtataatcatgctttctaacaaatgcctctcctacagatacaaaaaagaagggtaataaaataggtgtaattattggagtcgtgattggtgcaacagttttaggactagcaatacttgctacactctgtgtgtggaggcacaaaaggagaaaagtatcactagagcagcaagagctctacaatattgttcgaatacctaatgtattctgttacacttatggtgaactaaggaccgctactgaaaattttagttctgctaatcttcttggtgaagggggatatggatcagtttataaggtttgttcatttgtagtacacaatgcatgatttgaatctgctagggatcttttgtggcactgtaggttaatagtgaacaacgaatttgttttcattgtgcaaatttggctagagttgtgttgtttaattctactttgttcaatgaaaattccttttatcatttactcatttaacgtacttctccaattatcttactaacatcagtgcataataaatctgggatattccctgttattttccttttccccctgttttgcacgtggtcagtaaaatgagattgattgggtactctagtgcatttactctattacatgatattgattttacttggtgcttataactcttttttagaaaaattcaccttctggcagggtaaattagttgatggcagtgtggtggcaattaaacaactatctgaaacatctcgccaagggaagaaggaattcgtagctgaaatagaaactatttcccgagtgcagcaccgtaatcttgtgaagttgtttggtttttgccttgagggaaataaaccacttttggtttatgagtacatggagagtggaagccttgataaagcattgtttggtatcaaccatttcattcagtttatccagcggcgactagtctaggactcttatataaatctgacatctgaaatgttcattggcatgcaggaaatggaagattgaacttgaattggtcaacacgatataaaatatgcttggggattgcaagaggcttagcttatctccacgaagagtctagcatccgcattgtgcatagggacataaaggccagcaatgtattacttgatgccactttgaaccctaagatttcggatttcgggctcgccaaactttatgacgataaaaagacacatgttagcacaaaagttgctggtacatttggctatctttcacctgagtacgccatgagaggtcacatgactgagaaagttgatatttttgcttttggtgtggtcatgttggagattattgctggaaggccgaactatgatggtaagcttgaccaagacatggcttatcttttagaatgggtctggcaactttacgaggaagaccatccgctggacattgcggatcccaagctcacagaattcgatagtgtcgagttgctccgtgccatccgcatcgccctcctctgcatccagagctcacctcgtcaaaggccatccatgtcgagagtggtgtcaatgctcacaggagacagcgaggcgcctgaggcagtgtccaagcctagctatgttgccgaatggcagagcaacactgaagggacgtcaagctcagtgtccacagcagaggctgtgtccgtggctccattcctaaaccccgttgtggacgatggccggtgatgatggccatcgctaagatcatcttatgtcaagcactcaagccacagattgttttcttggagatccacctttaaaggccccattatttaggttgaatgtggatgacagatttatgttgttgactggatgagatgtcctagggtttcctcacgttgtagaatacaactctcacaagtataagaatctaggaacatattccttcgatgtaacatacctcttttgtttaatctgttttgtaagagaaaccagaagaacaccttgtatttcggttgatattttgaaacccacagccaattgaatgctgggtgtgtaggcatatatatgaccaataggttgattgtaagctttactacaatagtggggcggtctcgaagtatattgccagatatgttgcagttcattttctaacacgagaaacccttgatatgctcgaacagaaagcaacaactga

SEQ ID NO: 17825 - DNA, 4304 bp, Zea Mays
cggagacctccacgcgacgcttcgtctctcctcacctgcactcgcgatttcaagaaccgactgtattttctatcctcgcactttctggaaccggatgggcagctacttttcgatggccggctagggttccacacaccaaccatgatgttcccctcaacctctgtcaacatttgagactggttcaactcgcttgtgtgccgaagttcccctgcggcggccgtcatcaccatggtctcccctcgtgtggctctggtcttatcgtggtgaccatcatgggtcgagaggagtgcgacgacctggggttcactgtctcacccttagctttagtgcaaagttccctcccagctcatcgcagaccaaggtacgatagtgtggaggcctacatcgtgcaacctgggcttcaccctctgcaccgcctgcaacaatatctaatttcgtcttagatcaagcttttggatccccacgctcccccacccattcttctgtaatgcggtgttctccaagctcgggctgcaggtgtggtcgccatggttcaaaggcgacccgtgcgtcggcgcggccacggacggcacgtccatctacgccgacaaaatgaacccgggcatcaagtgcgactgctccgaccacaacaacaccatctgccacattaccgagctgaaaatgaacaaactggatgtggttggtcctatacctgaggagctgaggaacctcagccacttgacaactctgaatttacaacagaattacttaacagggcctttgccatcgttccttggagaattaactgctttgcagcagatgtcgctttctggcaatgcattatcaggaactattccaaaggagctggggaaccttgtgaatctcataatcctgagtttaggcacgaacaatttaactggctcccttccttctgaattgggtaacctggttaaactagagcatatgtacattgatagtgctggcttaagtggtcctataccatcatcattttcgaaacttacacgattgaaaacattgtgcgcatcagataatgactttactgggaaaataccagattacattggaagctggagtaatttaacagatttgcggtttcaaggcaattcattccaaggtccacttccaagcactcttgctaatcttgttcagctaacaagcttacgaataggtgacattgtaactgggagttcttcgctggcattcatcagtaacatgacatctttgaacttattgtattcccaattaatcattcactttatgaatcaaactgcgccttcatttgctccattgtaaccgagttgttatatacttaaattggtgacattattcattgcagaattttaaggaattgcaggatatttggtactttggcattagtgaacttttcaaaatttacaggattaacattattgtaaggcatttcgtttcttccaaattttttgttaaatctgctttgtgcaagatgcttcctatggatatgcatcgcgagatgtttcctttcacacatattctcgtcttttacttacttatgcagggatttgagttttaataatatcatagcacatgcattccgatcagatttcttgggaacaatagtcttacaggaggccttccaagctctataggaccttctattaagtacttagacttttcctacaactacctctcaggaaaccttccttcttgggctagtcataatttgcaattgaaataaacacactgttaatatgctccaagtccaaagacctctcaagttttttgcgtgtctcattatgcatagaaatttggtggcaaactacttcgtgatcaacaagtccaaagatagtgtcttacctgcggggctggagtgccttcagcgaaacacgtcatgctttcttggctctccacaatcttcctcctttactgtagactgtgggagtagtagatctgtatttgcttcagataattccatgtatcaacctgatgatgccaatcttggtgttgcatcatattatatttcaagcccaccaagatggggtgttagtaatgtcgggagattcatggatacatcaaacgggagttacatagtcaacagttcacgccggtttcagaataccctagattccaaacttttccaaacagcaaggatgtcagcatcaactttaagatactatggttttggacttgaaaatggggactacacagtcacacttcaatttggagaatttgactttgaagatttacaaacttggaagagcgttgggagaagggttttcgatatctatctccagggtgagcgtaaggagcagaactttaacataaagaaggcagcaaaagaagctggcgaagcaagcacatcgtacactgctgtcaagaaacaatatactgtacctgtcacaaaaaacatcctagaaattcatctcttttgggctggaaagggcacttgttgcatccctaatcaaggcgattatgggcctacaatatcagctttgagtgcaactctaagtattctcttttgatacaatcatggctttaatattgttcagataatgtccttacgttcaacaatttcattatatacaatttctaccacgagaagtactgaagactaaaaagactggaattttagaaatgcctaacataaaagccaaatattgtttatattgatgtataatcatgctttctaacaaatgcctctcctacagatacaaaaaagaagggtaataaaataggtgtaattattggagtcgtgattggtgcaacagttttaggactagcaatacttgctacactctgtgtgtggaggcacaaaaggagaaaagtatcactagagcagcaagagctctacaatattgttcgaatacctaatgtattctgttacacttatggtgaactaaggaccgctactgaaaattttagttctgctaatcttcttggtgaagggggatatggatcagtttataagggtaaattagttgatggcagtgtggtggcaattaaacaactatctgaaacatctcgccaagggaagaaggaattcgtagctgaaatagaaactatttcccgagtgcagcaccgtaatcttgtgaagttgtttggtttttgccttgagggaaataaaccacttttggtttatgagtacatggagagtggaagccttgataaagcattgtttggaaatggaagattgaacttgaattggtcaacacgatataaaatatgcttggggattgcaagaggcttagcttatctccacgaagagtctagcatccgcattgtgcatagggacataaaggccagcaatgtattacttgatgccactttgaaccctaagatttcggatttcgggctcgccaaactttatgacgataaaaagacacatgttagcacaaaagttgctggtacatttggctatctttcacctgagtacgccatgagaggtcacatgactgagaaagttgatatttttgcttttggtgtggtcatgttggagattattgctggaaggccgaactatgatggtaagcttgaccaagacatggcttatcttttagaatgggtctggcaactttacgaggaagaccatccgctggacattgcggatcccaagctcacagaattcgatagtgtcgagttgctccgtgccatccgcatcgccctcctctgcatccagagctcacctcgtcaaaggccatccatgtcgagagtggtgtcaatgctcacaggagacagcgaggcgcctgaggcagtgtccaagcctagctatgttgccgaatggcagagcaacactgaagggacgtcaagctcagtgtccacagcagaggctgtgtccgtggctccattcctaaaccccgttgtggacgatggccggtgatgatggccatcgctaagatcatcttatgtcaagcactcaagccacagattgttttcttggagatccacctttaaaggccccattatttaggttgaatgtggatgacagatttatgttgttgactggatgagatgtcctagggtttcctcacgttgtagaatacaactctcacaagtataagaatctaggaacatattccttcgatgtaacatacctcttttgtttaatctgttttgtaagagaaaccagaagaacaccttgtatttcggttgatattttgaaacccacagccaattgaatgctgggtgtgtaggcatatatatgaccaataggttgattgtaagctttactacaatagtggggcggtctcgaagtatattgccagatatgttgcagttcattttctaacacgagaaacccttgatatgctcgaacagaaagcaacaactga

SEQ ID NO: 17826 - DNA, 5003 bp, Zea Mays
cggagacctccacgcgacgcttcgtctctcctcacctgcactcgcgatttcaagaaccgactgtattttctatcctcgcactttctggaaccggatgggcagctacttttcgatggccggctagggttccacacaccaaccatgatgttcccctcaacctctgtcaacatttgagactggttcaactcgcttgtgtgccgaagttcccctgcggcggccgtcatcaccatggtctcccctcgtgtggctctggtcttatcgtggtgaccatcatgggtcgagaggagtgcgacgacctggggttcactgtctcacccttagctttagtgcaaagttccctcccagctcatcgcagaccaaggtacgatagtgtggaggcctacatcgtgcaacctgggcttcaccctctgcaccgcctgcaacaatatctaatttcgtcttagatcaagcttttggatccccacgctcccccacccattcttctgtaatgcggtgttctccaagctcgggctgcaggtgtggtcgccatggttcaaaggcgacccgtgcgtcggcgcggccacggacggcacgtccatctacgccgacaaaatgaacccgggcatcaagtgcgactgctccgaccacaacaacaccatctgccacattaccgagctgaaaatgaacaaactggatgtggttggtcctatacctgaggagctgaggaacctcagccacttgacaactctgaatttacaacagaattacttaacagggcctttgccatcgttccttggagaattaactgctttgcagcagatgtcgctttctggcaatgcattatcaggaactattccaaaggagctggggaaccttgtgaatctcataatcctgagtttaggcacgaacaatttaactggctcccttccttctgaattgggtaacctggttaaactagagcatatgtacattgatagtgctggcttaagtggtcctataccatcatcattttcgaaacttacacgattgaaaacattgtgcgcatcagataatgactttactgggaaaataccagattacattggaagctggagtaatttaacagatttgcggtttcaaggcaattcattccaaggtccacttccaagcactcttgctaatcttgttcagctaacaagcttacgaataggtgacattgtaactgggagttcttcgctggcattcatcagtaacatgacatctttgaacttattgtattcccaattaatcattcactttatgaatcaaactgcgccttcatttgctccattgtaaccgagttgttatatacttaaattggtgacattattcattgcagaattttaaggaattgcaggatatttggtactttggcattagtgaacttttcaaaatttacaggattaacattattgtaaggcatttcgtttcttccaaattttttgttaaatctgctttgtgcaagatgcttcctatggatatgcatcgcgagatgtttcctttcacacatattctcgtcttttacttacttatgcagggatttgagttttaataatatcataggtgaagtaccacaagctctactaaatatgaattcactcaccttgttgtatgttttgtatccctttcaatgcttattttgggggcataatgaatttcattgtttatcttgctaattgtagcacatgcattccgatcagatttcttgggaacaatagtcttacaggaggccttccaagctctataggaccttctattaagtacttagacttttcctacaactacctctcaggaaaccttccttcttgggctagtcataatttgcaattgtaagtattaagttatgtaatttattgttggtcaaccgaacttttagcccaattgtcttttcaaagcataatgtagcccaacttgaaatatatgcttatagtacatgtatttattaaaatatatttttgaatgttcaatacatctaaaaaaacttgtgttgaggcatttagcttatatttctttttagatttgttgcattttgaagcaacctattattctgaatctttgaagaagtagacatacattcccttactgcttaactccaaaaaggcaaaaaaaaagtttgttgctttagtgtatcttgattctaggaaataaacacactgttaatatgctccaagtccaaagacctctcaagttttttgcgtgtctcattatgcatagaaatttggtggcaaactacttcgtgatcaacaagtccaaagatagtgtcttacctgcggggctggagtgccttcagcgaaacacgtcatgctttcttggctctccacaatcttcctcctttactgtagactgtgggagtagtagatctgtatttgcttcagataattccatgtatcaacctgatgatgccaatcttggtgttgcatcatattatatttcaagcccaccaagatggggtgttagtaatgtcgggagattcatggatacatcaaacgggagttacatagtcaacagttcacgccggtttcagaataccctagattccaaacttttccaaacagcaaggatgtcagcatcaactttaagatactatggttttggacttgaaaatggggactacacagtcacacttcaatttggagaatttgactttgaagatttacaaacttggaagagcgttgggagaagggttttcgatatctatctccagggtgagcgtaaggagcagaactttaacataaagaaggcagcaaaagaagctggcgaagcaagcacatcgtacactgctgtcaagaaacaatatactgtacctgtcacaaaaaacatcctagaaattcatctcttttgggctggaaagggcacttgttgcatccctaatcaaggcgattatgggcctacaatatcagctttgagtgcaactctaaatacaaaaaagaagggtaataaaataggtgtaattattggagtcgtgattggtgcaacagttttaggactagcaatacttgctacactctgtgtgtggaggcacaaaaggagaaaagtatcactagagcagcaaggtaaaatgatatgctagattgctaggctaacgcaatccttaaactcagcaaataggttttttcttacaaactaacagtatgtggtgtttgcagagctctacaatattgttcgaatacctaatgtattctgttacacttatggtgaactaaggaccgctactgaaaattttagttctgctaatcttcttggtgaagggggatatggatcagtttataaggtttgttcatttgtagtacacaatgcatgatttgaatctgctagggatcttttgtggcactgtaggttaatagtgaacaacgaatttgttttcattgtgcaaatttggctagagttgtgttgtttaattctactttgttcaatgaaaattccttttatcatttactcatttaacgtacttctccaattatcttactaacatcagtgcataataaatctgggatattccctgttattttccttttccccctgttttgcacgtggtcagtaaaatgagattgattgggtactctagtgcatttactctattacatgatattgattttacttggtgcttataactcttttttagaaaaattcaccttctggcagggtaaattagttgatggcagtgtggtggcaattaaacaactatctgaaacatctcgccaagggaagaaggaattcgtagctgaaatagaaactatttcccgagtgcagcaccgtaatcttgtgaagttgtttggtttttgccttgagggaaataaaccacttttggtttatgagtacatggagagtggaagccttgataaagcattgtttggtatcaaccatttcattcagtttatccagcggcgactagtctaggactcttatataaatctgacatctgaaatgttcattggcatgcaggaaatggaagattgaacttgaattggtcaacacgatataaaatatgcttggggattgcaagaggcttagcttatctccacgaagagtctagcatccgcattgtgcatagggacataaaggccagcaatgtattacttgatgccactttgaaccctaagatttcggatttcgggctcgccaaactttatgacgataaaaagacacatgttagcacaaaagttgctggtacattattattgctggaaggccgaactatgatggtaagcttgaccaagacatggcttatcttttagaatgggtctggcaactttacgaggaagaccatccgctggacattgcggatcccaagctcacagaattcgatagtgtcgagttgctccgtgccatccgcatcgccctcctctgcatccagagctcacctcgtcaaaggccatccatgtcgagagtggtgtcaatgctcacaggagacagcgaggcgcctgaggcagtgtccaagcctagctatgttgccgaatggcagagcaacactgaagggacgtcaagctcagtgtccacagcagaggctgtgtccgtggctccattcctaaaccccgttgtggacgatggccggtgatgatggccatcgctaagatcatcttatgtcaagcactcaagccacagattgttttcttggagatccacctttaaaggccccattatttaggttgaatgtggatgacagatttatgttgttgactggatgagatgtcctagggtttcctcacgttgtagaatacaactctcacaagtataagaatctaggaacatattccttcgatgtaacatacctcttttgtttaatctgttttgtaagagaaaccagaagaacaccttgtatttcggttgatattttgaaacccacagccaattgaatgctgggtgtgtaggcatatatatgaccaataggttgattgtaagctttactacaatagtggggcggtctcgaagtatattgccagatatgttgcagttcattttctaacacgagaaacccttgatatgctcgaacagaaagcaacaactga

SEQ ID NO: 17827 - DNA, 3748 bp, Zea Mays
cggagacctccacgcgacgcttcgtctctcctcacctgcactcgcgatttcaagaaccgactgtattttctatcctcgcactttctggaaccggatgggcagctacttttcgatggccggctagggttccacacaccaaccatgatgttcccctcaacctctgtcaacatttgagactggttcaactcgcttgtgtgccgaagttcccctgcggcggccgtcatcaccatggtctcccctcgtgtggctctggtcttatcgtggtgaccatcatgggtcgagaggagtgcgacgacctggggttcactgtctcacccttagctttagtgcaaagttccctcccagctcatcgcagaccaaggtacgatagtgtggaggcctacatcgtgcaacctgggcttcaccctctgcaccgcctgcaacaatatctaatttcgtcttagatcaagcttttggatccccacgctcccccacccattcttctgtaatgcggtgttctccaagctcgggctgcaggtgtggtcgccatggttcaaaggcgacccgtgcgtcggcgcggccacggacggcacgtccatctacgccgacaaaatgaacccgggcatcaagtgcgactgctccgaccacaacaacaccatctgccacattaccgagctgaaaatgaacaaactggatgtggttggtcctatacctgaggagctgaggaacctcagccacttgacaactctgaatttacaacagaattacttaacagggcctttgccatcgttccttggagaattaactgctttgcagcagatgtcgctttctggcaatgcattatcaggaactattccaaaggagctggggaaccttgtgaatctcataatcctgagtttaggcacgaacaatttaactggctcccttccttctgaattgggtaacctggttaaactagagcatatgtacattgatagtgctggcttaagtggtcctataccatcatcattttcgaaacttacacgattgaaaacattgtgcgcatcagataatgactttactgggaaaataccagattacattggaagctggagtaatttaacagatttgcggtttcaaggcaattcattccaaggtccacttccaagcactcttgctaatcttgttcagctaacaagcttaattttaaggaattgcaggatatttggtactttggcattagtgaacttttcaaaatttacaggattaacattattggatttgagttttaataatatcatagcacatgcattccgatcagatttcttgggaacaatagtcttacaggaggccttccaagctctataggaccttctattaagtacttagacttttcctacaactacctctcaggaaaccttccttcttgggctagtcataatttgcaattaaatttggtggcaaactacttcgtgatcaacaagtccaaagatagtgtcttacctgcggggctggagtgccttcagcgaaacacgtcatgctttcttggctctccacaatcttcctcctttactgtagactgtgggagtagtagatctgtatttgcttcagataattccatgtatcaacctgatgatgccaatcttggtgttgcatcatattatatttcaagcccaccaagatggggtgttagtaatgtcgggagattcatggatacatcaaacgggagttacatagtcaacagttcacgccggtttcagaataccctagattccaaacttttccaaacagcaaggatgtcagcatcaactttaagatactatggttttggacttgaaaatggggactacacagtcacacttcaatttggagaatttgactttgaagatttacaaacttggaagagcgttgggagaagggttttcgatatctatctccagggtgagcgtaaggagcagaactttaacataaagaaggcagcaaaagaagctggcgaagcaagcacatcgtacactgctgtcaagaaacaatatactgtacctgtcacaaaaaacatcctagaaattcatctcttttgggctggaaagggcacttgttgcatccctaatcaaggcgattatgggcctacaatatcagctttgagtgcaactctaaatacaaaaaagaagggtaataaaataggtgtaattattggagtcgtgattggtgcaacagttttaggactagcaatacttgctacactctgtgtgtggaggcacaaaaggagaaaagtatcactagagcagcaagtatgtggtgtttgcagagctctacaatattgttcgaatacctaatgtattctgttacacttatggtgaactaaggaccgctactgaaaattttagttctgctaatcttcttggtgaagggggatatggatcagtttataagggtaaattagttgatggcagtgtggtggcaattaaacaactatctgaaacatctcgccaagggaagaaggaattcgtagctgaaatagaaactatttcccgagtgcagcaccgtaatcttgtgaagttgtttggtttttgccttgagggaaataaaccacttttggtttatgagtacatggagagtggaagccttgataaagcattgtttggaaatggaagattgaacttgaattggtcaacacgatataaaatatgcttggggattgcaagaggcttagcttatctccacgaagagtctagcatccgcattgtgcatagggacataaaggccagcaatgtattacttgatgccactttgaaccctaagatttcggatttcgggctcgccaaactttatgacgataaaaagacacatgttagcacaaaagttgctggtacatttggctatctttcacctgagtacgccatgagaggtcacatgactgagaaagttgatatttttgcttttggtgtggtcatgttggagattattgctggaaggccgaactatgatggtaagcttgaccaagacatggcttatcttttagaatgggtctggcaactttacgaggaagaccatccgctggacattgcggatcccaagctcacagaattcgatagtgtcgagttgctccgtgccatccgcatcgccctcctctgcatccagagctcacctcgtcaaaggccatccatgtcgagagtggtgtcaatgctcacaggagacagcgaggcgcctgaggcagtgtccaagcctagctatgttgccgaatggcagagcaacactgaagggacgtcaagctcagtgtccacagcagaggctgtgtccgtggctccattcctaaaccccgttgtggacgatggccggtgatgatggccatcgctaagatcatcttatgtcaagcactcaagccacagattgttttcttggagatccacctttaaaggccccattatttaggttgaatgtggatgacagatttatgttgttgactggatgagatgtcctagggtttcctcacgttgtagaatacaactctcacaagtataagaatctaggaacatattccttcgatgtaacatacctcttttgtttaatctgttttgtaagagaaaccagaagaacaccttgtatttcggttgatattttgaaacccacagccaattgaatgctgggtgtgtaggcatatatatgaccaataggttgattgtaagctttactacaatagtggggcggtctcgaagtatattgccagatatgttgcagttcattttctaacacgagaaacccttgatatgctcgaacagaaagcaacaactga

SEQ ID NO: 17828 - DNA, 3663 bp, Zea Mays
gttcttgtcgcctacggagacctccacgcgacgcttcgtctctcctcacctgcactcgcgatttcaagaaccgactgtattttctatcctcgcactttctggaaccggatgggcagctacttttcgatggccggctagggttccacacaccaaccatgatgttcccctcaacctctgtcaacatttgagactggttcaactcgcttgtgtgccgaagttcccctgcggcggccgtcatcaccatggtctcccctcgtgtggctctggtcttatcgtggtgaccatcatgggtcgagaggagtgcgacgacctggggttcactgtctcacccttagctttagtgcaaagttccctcccagctcatcgcagaccaaggtacgatagtgtggaggcctacatcgtgcaacctgggcttcaccctctgcaccgcctgcaacaatatctaatttcgtcttagatcaagcttttggatccccacgctcccccacccattcttctgtaatgcggtgttctccaagctcgggctgcaggtgtggtcgccatggttcaaaggcgacccgtgcgtcggcgcggccacggacggcacgtccatctacgccgacaaaatgaacccgggcatcaagtgcgactgctccgaccacaacaacaccatctgccacattaccgagctgaaaatgaacaaactggatgtggttggtcctatacctgaggagctgaggaacctcagccacttgacaactctgaatttacaacagaattacttaacagggcctttgccatcgttccttggagaattaactgctttgcagcagatgtcgctttctggcaatgcattatcaggaactattccaaaggagctggggaaccttgtgaatctcataatcctgagtttaggcacgaacaatttaactggctcccttccttctgaattgggtaacctggttaaactagagcatatgtacattgatagtgctggcttaagtggtcctataccatcatcattttcgaaacttacacgattgaaaacattgtgcgcatcagataatgactttactgggaaaataccagattacattggaagctggagtaatttaacagatttgcggtttcaaggcaattcattccaaggtccacttccaagcactcttgctaatcttgttcagctaacaagcttaattttaaggaattgcaggatatttggtactttggcattagtgaacttttcaaaatttacaggattaacattattggatttgagttttaataatatcataggtgaagtaccacaagctctactaaatatgaattcactcaccttgttagacttttcctacaactacctctcaggaaaccttccttcttgggctagtcataatttgcaatttgtcttacctgcggggctggagtgccttcagcgaaacacgtcatgctttcttggctctccacaatcttcctcctttactgtagactgtgggagtagtagatctgtatttgcttcagataattccatgtatcaacctgatgatgccaatcttggtgttgcatcatattatatttcaagcccaccaagatggggtgttagtaatgtcgggagattcatggatacatcaaacgggagttacatagtcaacagttcacgccggtttcagaataccctagattccaaacttttccaaacagcaaggatgtcagcatcaactttaagatactatggttttggacttgaaaatggggactacacagtcacacttcaatttggagaatttgactttgaagatttacaaacttggaagagcgttgggagaagggttttcgatatctatctccagggtgagcgtaaggagcagaactttaacataaagaaggcagcaaaagaagctggcgaagcaagcacatcgtacactgctgtcaagaaacaatatactgtacctgtcacaaaaaacatcctagaaattcatctcttttgggctggaaagggcacttgttgcatccctaatcaaggcgattatgggcctacaatatcagctttgagtgcaactctaaatacaaaaaagaagggtaataaaataggtgtaattattggagtcgtgattggtgcaacagttttaggactagcaatacttgctacactctgtgtgtggaggcacaaaaggagaaaagtatcactagagcagcaagagctctacaatattgttcgaatacctaatgtattctgttacacttatggtgaactaaggaccgctactgaaaattttagttctgctaatcttcttggtgaagggggatatggatcagtttataagggtaaattagttgatggcagtgtggtggcaattaaacaactatctgaaacatctcgccaagggaagaaggaattcgtagctgaaatagaaactatttcccgagtgcagcaccgtaatcttgtgaagttgtttggtttttgccttgagggaaataaaccacttttggtttatgagtacatggagagtggaagccttgataaagcattgtttggaaatggaagattgaacttgaattggtcaacacgatataaaatatgcttggggattgcaagaggcttagcttatctccacgaagagtctagcatccgcattgtgcatagggacataaaggccagcaatgtattacttgatgccactttgaaccctaagatttcggatttcgggctcgccaaactttatgacgataaaaagacacatgttagcacaaaagttgctggtacatttggctatctttcacctgagtacgccatgagaggtcacatgactgagaaagttgatatttttgcttttggtgtggtcatgttggagattattgctggaaggccgaactatgatggtaagcttgaccaagacatggcttatcttttagaatgggtctggcaactttacgaggaagaccatccgctggacattgcggatcccaagctcacagaattcgatagtgtcgagttgctccgtgccatccgcatcgccctcctctgcatccagagctcacctcgtcaaaggccatccatgtcgagagtggtgtcaatgctcacaggagacagcgaggcgcctgaggcagtgtccaagcctagctatgttgccgaatggcagagcaacactgaagggacgtcaagctcagtgtccacagcagaggctgtgtccgtggctccattcctaaaccccgttgtggacgatggccggtgatgatggccatcgctaagatcatcttatgtcaagcactcaagccacagattgttttcttggagatccacctttaaaggccccattatttaggttgaatgtggatgacagatttatgttgttgactggatgagatgtcctagggtttcctcacgttgtagaatacaactctcacaagtataagaatctaggaacatattccttcgatgtaacatacctcttttgtttaatctgttttgtaagagaaaccagaagaacaccttgtatttcggttgatattttgaaacccacagccaattgaatgctgggtgtgtaggcatatatatgaccaataggttgattgtaagctttactacaatagtggggcggtctcgaagtatattgccagatatgttgcagttcattttctaacacgagaaacccttgatatgctcgaacagaaagcaacaactga

SEQ ID NO: 17829 - DNA, 3825 bp, Zea Mays
ctcgagtgttcttgtcgcctacggagacctccacgcgacgcttcgtctctcctcacctgcactcgcgatttcaagaaccgactgtattttctatcctcgcactttctggaaccggatgggcagctacttttcgatggccggctagggttccacacaccaaccatgatgttcccctcaacctctgtcaacatttgagactggttcaactcgcttgtgtgccgaagttcccctgcggcggccgtcatcaccatggtctcccctcgtgtggctctggtcttatcgtggtgaccatcatgggtcgagaggagtgcgacgacctggggttcactgtctcacccttagctttagtgcaaagttccctcccagctcatcgcagaccaaggtacgatagtgtggaggcctacatcgtgcaacctgggcttcaccctctgcaccgcctgcaacaatatctaatttcgtcttagatcaagcttttggatccccacgctcccccacccattcttctgtaatgcggtgttctccaagctcgggctgcaggtgtggtcgccatggttcaaaggcgacccgtgcgtcggcgcggccacggacggcacgtccatctacgccgacaaaatgaacccgggcatcaagtgcgactgctccgaccacaacaacaccatctgccacattaccgagctgaaaatgaacaaactggatgtggttggtcctatacctgaggagctgaggaacctcagccacttgacaactctgaatttacaacagaattacttaacagggcctttgccatcgttccttggagaattaactgctttgcagcagatgtcgctttctggcaatgcattatcaggaactattccaaaggagctggggaaccttgtgaatctcataatcctgagtttaggcacgaacaatttaactggctcccttccttctgaattgggtaacctggttaaactagagcatatgtacattgatagtgctggcttaagtggtcctataccatcatcattttcgaaacttacacgattgaaaacattgtgcgcatcagataatgactttactgggaaaataccagattacattggaagctggagtaatttaacagatttgcggtttcaaggcaattcattccaaggtccacttccaagcactcttgctaatcttgttcagctaacaagcttacgaataggtgacattgtaactgggagttcttcgctggcattcatcagtaacatgacatctttgaacttattaattttaaggaattgcaggatatttggtactttggcattagtgaacttttcaaaatttacaggattaacattattggatttgagttttaataatatcatagcacatgcattccgatcagatttcttgggaacaatagtcttacaggaggccttccaagctctataggaccttctattaagtacttagacttttcctacaactacctctcaggaaaccttccttcttgggctagtcataatttgcaattaaatttggtggcaaactacttcgtgatcaacaagtccaaagatagtgtcttacctgcggggctggagtgccttcagcgaaacacgtcatgctttcttggctctccacaatcttcctcctttactgtagactgtgggagtagtagatctgtatttgcttcagataattccatgtatcaacctgatgatgccaatcttggtgttgcatcatattatatttcaagcccaccaagatggggtgttagtaatgtcgggagattcatggatacatcaaacgggagttacatagtcaacagttcacgccggtttcagaataccctagattccaaacttttccaaacagcaaggatgtcagcatcaactttaagatactatggttttggacttgaaaatggggactacacagtcacacttcaatttggagaatttgactttgaagatttacaaacttggaagagcgttgggagaagggttttcgatatctatctccagggtgagcgtaaggagcagaactttaacataaagaaggcagcaaaagaagctggcgaagcaagcacatcgtacactgctgtcaagaaacaatatactgtacctgtcacaaaaaacatcctagaaattcatctcttttgggctggaaagggcacttgttgcatccctaatcaaggcgattatgggcctacaatatcagctttgagtgcaactctaaatacaaaaaagaagggtaataaaataggtgtaattattggagtcgtgattggtgcaacagttttaggactagcaatacttgctacactctgtgtgtggaggcacaaaaggagaaaagtatcactagagcagcaagagctctacaatattgttcgaatacctaatgtattctgttacacttatggtgaactaaggaccgctactgaaaattttagttctgctaatcttcttggtgaagggggatatggatcagtttataagggtaaattagttgatggcagtgtggtggcaattaaacaactatctgaaacatctcgccaagggaagaaggaattcgtagctgaaatagaaactatttcccgagtgcagcaccgtaatcttgtgaagttgtttggtttttgccttgagggaaataaaccacttttggtttatgagtacatggagagtggaagccttgataaagcattgtttggaaatggaagattgaacttgaattggtcaacacgatataaaatatgcttggggattgcaagaggcttagcttatctccacgaagagtctagcatccgcattgtgcatagggacataaaggccagcaatgtattacttgatgccactttgaaccctaagatttcggatttcgggctcgccaaactttatgacgataaaaagacacatgttagcacaaaagttgctggtacatttggctatctttcacctgagtacgccatgagaggtcacatgactgagaaagttgatatttttgcttttggtgtggtcatgttggagattattgctggaaggccgaactatgatggtaagcttgaccaagacatggcttatcttttagaatgggtctggcaactttacgaggaagaccatccgctggacattgcggatcccaagctcacagaattcgatagtgtcgagttgctccgtgccatccgcatcgccctcctctgcatccagagctcacctcgtcaaaggccatccatgtcgagagtggtgtcaatgctcacaggagacagcgaggcgcctgaggcagtgtccaagcctagctatgttgccgaatggcagagcaacactgaagggacgtcaagctcagtgtccacagcagaggctgtgtccgtggctccattcctaaaccccgttgtggacgatggccggtgatgatggccatcgctaagatcatcttatgtcaagcactcaagccacagattgttttcttggagatccacctttaaaggccccattatttaggttgaatgtggatgacagatttatgttgttgactggatgagatgtcctagggtttcctcacgttgtagaatacaactctcacaagtataagaatctaggaacatattccttcgatgtaacatacctcttttgtttaatctgttttgtaagagaaaccagaagaacaccttgtatttcggttgatattttgaaacccacagccaattgaatgctgggtgtgtaggcatatatatgaccaataggttgattgtaagctttactacaatagtggggcggtctcgaagtatattgccagatatgttgcagttcattttctaacacgagaaacccttgatatgctcgaacagaaagcaacaactga

SEQ ID NO: 17830 - DNA, 4212 bp, Zea Mays
ctctcgagtgttcttgtcgcctacggagacctccacgcgacgcttcgtctctcctcacctgcactcgcgatttcaagaaccgactgtattttctatcctcgcactttctggaaccggatgggcagctacttttcgatggccggctagggttccacacaccaaccatgatgttcccctcaacctctgtcaacatttgagactggttcaactcgcttgtgtgccgaagttcccctgcggcggccgtcatcaccatggtctcccctcgtgtggctctggtcttatcgtggtgaccatcatgggtcgagaggagtgcgacgacctggggttcactgtctcacccttagctttagtgcaaagttccctcccagctcatcgcagaccaaggtacgatagtgtggaggcctacatcgtgcaacctgggcttcaccctctgcaccgcctgcaacaatatctaatttcgtcttagatcaagcttttggatccccacgctcccccacccattcttctgtaatgcggtgttctccaagctcgggctgcaggtgtggtcgccatggttcaaaggcgacccgtgcgtcggcgcggccacggacggcacgtccatctacgccgacaaaatgaacccgggcatcaagtgcgactgctccgaccacaacaacaccatctgccacattaccgagctgaaaatgaacaaactggatgtggttggtcctatacctgaggagctgaggaacctcagccacttgacaactctgaatttacaacagaattacttaacagggcctttgccatcgttccttggagaattaactgctttgcagcagatgtcgctttctggcaatgcattatcaggaactattccaaaggagctggggaaccttgtgaatctcataatcctgagtttaggcacgaacaatttaactggctcccttccttctgaattgggtaacctggttaaactagagcatatgtacattgatagtgctggcttaagtggtcctataccatcatcattttcgaaacttacacgattgaaaacattgtgcgcatcagataatgactttactgggaaaataccagattacattggaagctggagtaatttaacagatttgcggtttcaaggcaattcattccaaggtccacttccaagcactcttgctaatcttgttcagctaacaagcttacgaataggtgacattgtaactgggagttcttcgctggcattcatcagtaacatgacatctttgaacttattaattttaaggaattgcaggatatttggtactttggcattagtgaacttttcaaaatttacaggattaacattattggatttgagttttaataatatcatagcacatgcattccgatcagatttcttgggaacaatagtcttacaggaggccttccaagctctataggaccttctattaagtacttagacttttcctacaactacctctcaggaaaccttccttcttgggctagtcataatttgcaattgtaagtattaagttatgtaatttattgttggtcaaccgaacttttagcccaattgtcttttcaaagcataatgtagcccaacttgaaatatatgcttatagtacatgtatttattaaaatatatttttgaatgttcaatacatctaaaaaaacttgtgttgaggcatttagcttatatttctttttagatttgttgcattttgaagcaacctattattctgaatctttgaagaagtagacatacattcccttactgcttaactccaaaaaggcaaaaaaaaagtttgttgctttagtgtatcttgattctaggaaataaacacactgttaatatgctccaagtccaaagacctctcaagttttttgcgtgtctcattatgcatagaaatttggtggcaaactacttcgtgatcaacaagtccaaagatagtgtcttacctgcggggctggagtgccttcagcgaaacacgtcatgctttcttggctctccacaatcttcctcctttactgtagactgtgggagtagtagatctgtatttgcttcagataattccatgtatcaacctgatgatgccaatcttggtgttgcatcatattatatttcaagcccaccaagatggggtgttagtaatgtcgggagattcatggatacatcaaacgggagttacatagtcaacagttcacgccggtttcagaataccctagattccaaacttttccaaacagcaaggatgtcagcatcaactttaagatactatggttttggacttgaaaatggggactacacagtcacacttcaatttggagaatttgactttgaagatttacaaacttggaagagcgttgggagaagggttttcgatatctatctccagggtgagcgtaaggagcagaactttaacataaagaaggcagcaaaagaagctggcgaagcaagcacatcgtacactgctgtcaagaaacaatatactgtacctgtcacaaaaaacatcctagaaattcatctcttttgggctggaaagggcacttgttgcatccctaatcaaggcgattatgggcctacaatatcagctttgagtgcaactctaaatacaaaaaagaagggtaataaaataggtgtaattattggagtcgtgattggtgcaacagttttaggactagcaatacttgctacactctgtgtgtggaggcacaaaaggagaaaagtatcactagagcagcaagagctctacaatattgttcgaatacctaatgtattctgttacacttatggtgaactaaggaccgctactgaaaattttagttctgctaatcttcttggtgaagggggatatggatcagtttataagggtaaattagttgatggcagtgtggtggcaattaaacaactatctgaaacatctcgccaagggaagaaggaattcgtagctgaaatagaaactatttcccgagtgcagcaccgtaatcttgtgaagttgtttggtttttgccttgagggaaataaaccacttttggtttatgagtacatggagagtggaagccttgataaagcattgtttggaaatggaagattgaacttgaattggtcaacacgatataaaatatgcttggggattgcaagaggcttagcttatctccacgaagagtctagcatccgcattgtgcatagggacataaaggccagcaatgtattacttgatgccactttgaaccctaagatttcggatttcgggctcgccaaactttatgacgataaaaagacacatgttagcacaaaagttgctggtacatttggctatctttcacctgagtacgccatgagaggtcacatgactgagaaagttgatatttttgcttttggtgtggtcatgttggagattattgctggaaggccgaactatgatggtaagcttgaccaagacatggcttatcttttagaatgggtctggcaactttacgaggaagaccatccgctggacattgcggatcccaagctcacagaattcgatagtgtcgagttgctccgtgccatccgcatcgccctcctctgcatccagagctcacctcgtcaaaggccatccatgtcgagagtggtgtcaatgctcacaggagacagcgaggcgcctgaggcagtgtccaagcctagctatgttgccgaatggcagagcaacactgaagggacgtcaagctcagtgtccacagcagaggctgtgtccgtggctccattcctaaaccccgttgtggacgatggccggtgatgatggccatcgctaagatcatcttatgtcaagcactcaagccacagattgttttcttggagatccacctttaaaggccccattatttaggttgaatgtggatgacagatttatgttgttgactggatgagatgtcctagggtttcctcacgttgtagaatacaactctcacaagtataagaatctaggaacatattccttcgatgtaacatacctcttttgtttaatctgttttgtaagagaaaccagaagaacaccttgtatttcggttgatattttgaaacccacagccaattgaatgctgggtgtgtaggcatatatatgaccaataggttgattgtaagctttactacaatagtggggcggtctcgaagtatattgccagatatgttgcagttcattttctaacacgagaaacccttgatatgctcgaacagaaagcaacaactga

SEQ ID NO: 17831 - DNA, 4628 bp, Zea Mays
ctctcgagtgttcttgtcgcctacggagacctccacgcgacgcttcgtctctcctcacctgcactcgcgatttcaagaaccgactgtattttctatcctcgcactttctggaaccggatgggcagctacttttcgatggccggctagggttccacacaccaaccatgatgttcccctcaacctctgtcaacatttgagactggttcaactcgcttgtgtgccgaagttcccctgcggcggccgtcatcaccatggtctcccctcgtgtggctctggtcttatcgtggtgaccatcatgggtcgagaggagtgcgacgacctggggttcactgtctcacccttagctttagtgcaaagttccctcccagctcatcgcagaccaaggtacgatagtgtggaggcctacatcgtgcaacctgggcttcaccctctgcaccgcctgcaacaatatctaatttcgtcttagatcaagcttttggatccccacgctcccccacccattcttctgtaatgcggtgttctccaagctcgggctgcaggtgtggtcgccatggttcaaaggcgacccgtgcgtcggcgcggccacggacggcacgtccatctacgccgacaaaatgaacccgggcatcaagtgcgactgctccgaccacaacaacaccatctgccacattaccgagctgaaaatgaacaaactggatgtggttggtcctatacctgaggagctgaggaacctcagccacttgacaactctgaatttacaacagaattacttaacagggcctttgccatcgttccttggagaattaactgctttgcagcagatgtcgctttctggcaatgcattatcaggaactattccaaaggagctggggaaccttgtgaatctcataatcctgagtttaggcacgaacaatttaactggctcccttccttctgaattgggtaacctggttaaactagagcatatgtacattgatagtgctggcttaagtggtcctataccatcatcattttcgaaacttacacgattgaaaacattgtgcgcatcagataatgactttactgggaaaataccagattacattggaagctggagtaatttaacagatttgcggtttcaaggcaattcattccaaggtccacttccaagcactcttgctaatcttgttcagctaacaagcttacgaataggtgacattgtaactgggagttcttcgctggcattcatcagtaacatgacatctttgaacttattaattttaaggaattgcaggatatttggtactttggcattagtgaacttttcaaaatttacaggattaacattattgtaaggcatttcgtttcttccaaattttttgttaaatctgctttgtgcaagatgcttcctatggatatgcatcgcgagatgtttcctttcacacatattctcgtcttttacttacttatgcagggatttgagttttaataatatcataggtgaagtaccacaagctctactaaatatgaattcactcaccttgttgtatgttttgtatccctttcaatgcttattttgggggcataatgaatttcattgtttatcttgctaattgtagcacatgcattccgatcagatttcttgggaacaatagtcttacaggaggccttccaagctctataggaccttctattaagtacttagacttttcctacaactacctctcaggaaaccttccttcttgggctagtcataatttgcaattgtaagtattaagttatgtaatttattgttggtcaaccgaacttttagcccaattgtcttttcaaagcataatgtagcccaacttgaaatatatgcttatagtacatgtatttattaaaatatatttttgaatgttcaatacatctaaaaaaacttgtgttgaggcatttagcttatatttctttttagatttgttgcattttgaagcaacctattattctgaatctttgaagaagtagacatacattcccttactgcttaactccaaaaaggcaaaaaaaaagtttgttgctttagtgtatcttgattctaggaaataaacacactgttaatatgctccaagtccaaagacctctcaagttttttgcgtgtctcattatgcatagaaatttggtggcaaactacttcgtgatcaacaagtccaaagatagtgtcttacctgcggggctggagtgccttcagcgaaacacgtcatgctttcttggctctccacaatcttcctcctttactgtagactgtgggagtagtagatctgtatttgcttcagataattccatgtatcaacctgatgatgccaatcttggtgttgcatcatattatatttcaagcccaccaagatggggtgttagtaatgtcgggagattcatggatacatcaaacgggagttacatagtcaacagttcacgccggtttcagaataccctagattccaaacttttccaaacagcaaggatgtcagcatcaactttaagatactatggttttggacttgaaaatggggactacacagtcacacttcaatttggagaatttgactttgaagatttacaaacttggaagagcgttgggagaagggttttcgatatctatctccagggtgagcgtaaggagcagaactttaacataaagaaggcagcaaaagaagctggcgaagcaagcacatcgtacactgctgtcaagaaacaatatactgtacctgtcacaaaaaacatcctagaaattcatctcttttgggctggaaagggcacttgttgcatccctaatcaaggcgattatgggcctacaatatcagctttgagtgcaactctaagtattctcttttgatacaatcatggctttaatattgttcagataatgtccttacgttcaacaatttcattatatacaatttctaccacgagaagtactgaagactaaaaagactggaattttagaaatgcctaacataaaagccaaatattgtttatattgatgtataatcatgctttctaacaaatgcctctcctacagatacaaaaaagaagggtaataaaataggtgtaattattggagtcgtgattggtgcaacagttttaggactagcaatacttgctacactctgtgtgtggaggcacaaaaggagaaaagtatcactagagcagcaagagctctacaatattgttcgaatacctaatgtattctgttacacttatggtgaactaaggaccgctactgaaaattttagttctgctaatcttcttggtgaagggggatatggatcagtttataagggtaaattagttgatggcagtgtggtggcaattaaacaactatctgaaacatctcgccaagggaagaaggaattcgtagctgaaatagaaactatttcccgagtgcagcaccgtaatcttgtgaagttgtttggtttttgccttgagggaaataaaccacttttggtttatgagtacatggagagtggaagccttgataaagcattgtttggaaatggaagattgaacttgaattggtcaacacgatataaaatatgcttggggattgcaagaggcttagcttatctccacgaagagtctagcatccgcattgtgcatagggacataaaggccagcaatgtattacttgatgccactttgaaccctaagatttcggatttcgggctcgccaaactttatgacgataaaaagacacattggctatctttcacctgagtacgccatgagaggtcacatgactgagaaagttgatatttttgcttttggtgtggtcatgttggagattattgctggaaggccgaactatgatggtaagcttgaccaagacatggcttatcttttagaatgggtctggcaactttacgaggaagaccatccgctggacattgcggatcccaagctcacagaattcgatagtgtcgagttgctccgtgccatccgcatcgccctcctctgcatccagagctcacctcgtcaaaggccatccatgtcgagagtggtgtcaatgctcacaggagacagcgaggcgcctgaggcagtgtccaagcctagctatgttgccgaatggcagagcaacactgaagggacgtcaagctcagtgtccacagcagaggctgtgtccgtggctccattcctaaaccccgttgtggacgatggccggtgatgatggccatcgctaagatcatcttatgtcaagcactcaagccacagattgttttcttggagatccacctttaaaggccccattatttaggttgaatgtggatgacagatttatgttgttgactggatgagatgtcctagggtttcctcacgttgtagaatacaactctcacaagtataagaatctaggaacatattccttcgatgtaacatacctcttttgtttaatctgttttgtaagagaaaccagaagaacaccttgtatttcggttgatattttgaaacccacagccaattgaatgctgggtgtgtaggcatatatatgaccaataggttgattgtaagctttactacaatagtggggcggtctcgaagtatattgccagatatgttgcagttcattttctaacacgagaaacccttgatatgctcgaacagaaagcaacaactga

SEQ ID NO: 17832 - DNA, 3855 bp, Zea Mays
ctctcgagtgttcttgtcgcctacggagacctccacgcgacgcttcgtctctcctcacctgcactcgcgatttcaagaaccgactgtattttctatcctcgcactttctggaaccggatgggcagctacttttcgatggccggctagggttccacacaccaaccatgatgttcccctcaacctctgtcaacatttgagactggttcaactcgcttgtgtgccgaagttcccctgcggcggccgtcatcaccatggtctcccctcgtgtggctctggtcttatcgtggtgaccatcatgggtcgagaggagtgcgacgacctggggttcactgtctcacccttagctttagtgcaaagttccctcccagctcatcgcagaccaaggtacgatagtgtggaggcctacatcgtgcaacctgggcttcaccctctgcaccgcctgcaacaatatctaatttcgtcttagatcaagcttttggatccccacgctcccccacccattcttctgtaatgcggtgttctccaagctcgggctgcaggtgtggtcgccatggttcaaaggcgacccgtgcgtcggcgcggccacggacggcacgtccatctacgccgacaaaatgaacccgggcatcaagtgcgactgctccgaccacaacaacaccatctgccacattaccgagctgaaaatgaacaaactggatgtggttggtcctatacctgaggagctgaggaacctcagccacttgacaactctgaatttacaacagaattacttaacagggcctttgccatcgttccttggagaattaactgctttgcagcagatgtcgctttctggcaatgcattatcaggaactattccaaaggagctggggaaccttgtgaatctcataatcctgagtttaggcacgaacaatttaactggctcccttccttctgaattgggtaacctggttaaactagagcatatgtacattgatagtgctggcttaagtggtcctataccatcatcattttcgaaacttacacgattgaaaacattgtgcgcatcagataatgactttactgggaaaataccagattacattggaagctggagtaatttaacagatttgcggtttcaaggcaattcattccaaggtccacttccaagcactcttgctaatcttgttcagctaacaagcttacgaataggtgacattgtaactgggagttcttcgctggcattcatcagtaacatgacatctttgaacttattaattttaaggaattgcaggatatttggtactttggcattagtgaacttttcaaaatttacaggattaacattattggatttgagttttaataatatcataggtgaagtaccacaagctctactaaatatgaattcactcaccttgttatttcttgggaacaatagtcttacaggaggccttccaagctctataggaccttctattaagtacttagacttttcctacaactacctctcaggaaaccttccttcttgggctagtcataatttgcaattaaatttggtggcaaactacttcgtgatcaacaagtccaaagatagtgtcttacctgcggggctggagtgccttcagcgaaacacgtcatgctttcttggctctccacaatcttcctcctttactgtagactgtgggagtagtagatctgtatttgcttcagataattccatgtatcaacctgatgatgccaatcttggtgttgcatcatattatatttcaagcccaccaagatggggtgttagtaatgtcgggagattcatggatacatcaaacgggagttacatagtcaacagttcacgccggtttcagaataccctagattccaaacttttccaaacagcaaggatgtcagcatcaactttaagatactatggttttggacttgaaaatggggactacacagtcacacttcaatttggagaatttgactttgaagatttacaaacttggaagagcgttgggagaagggttttcgatatctatctccagggtgagcgtaaggagcagaactttaacataaagaaggcagcaaaagaagctggcgaagcaagcacatcgtacactgctgtcaagaaacaatatactgtacctgtcacaaaaaacatcctagaaattcatctcttttgggctggaaagggcacttgttgcatccctaatcaaggcgattatgggcctacaatatcagctttgagtgcaactctaaatacaaaaaagaagggtaataaaataggtgtaattattggagtcgtgattggtgcaacagttttaggactagcaatacttgctacactctgtgtgtggaggcacaaaaggagaaaagtatcactagagcagcaagagctctacaatattgttcgaatacctaatgtattctgttacacttatggtgaactaaggaccgctactgaaaattttagttctgctaatcttcttggtgaagggggatatggatcagtttataagggtaaattagttgatggcagtgtggtggcaattaaacaactatctgaaacatctcgccaagggaagaaggaattcgtagctgaaatagaaactatttcccgagtgcagcaccgtaatcttgtgaagttgtttggtttttgccttgagggaaataaaccacttttggtttatgagtacatggagagtggaagccttgataaagcattgtttggaaatggaagattgaacttgaattggtcaacacgatataaaatatgcttggggattgcaagaggcttagcttatctccacgaagagtctagcatccgcattgtgcatagggacataaaggccagcaatgtattacttgatgccactttgaaccctaagatttcggatttcgggctcgccaaactttatgacgataaaaagacacatgttagcacaaaagttgctggtacatttggctatctttcacctgagtacgccatgagaggtcacatgactgagaaagttgatatttttgcttttggtgtggtcatgttggagattattgctggaaggccgaactatgatggtaagcttgaccaagacatggcttatcttttagaatgggtctggcaactttacgaggaagaccatccgctggacattgcggatcccaagctcacagaattcgatagtgtcgagttgctccgtgccatccgcatcgccctcctctgcatccagagctcacctcgtcaaaggccatccatgtcgagagtggtgtcaatgctcacaggagacagcgaggcgcctgaggcagtgtccaagcctagctatgttgccgaatggcagagcaacactgaagggacgtcaagctcagtgtccacagcagaggctgtgtccgtggctccattcctaaaccccgttgtggacgatggccggtgatgatggccatcgctaagatcatcttatgtcaagcactcaagccacagattgttttcttggagatccacctttaaaggccccattatttaggttgaatgtggatgacagatttatgttgttgactggatgagatgtcctagggtttcctcacgttgtagaatacaactctcacaagtataagaatctaggaacatattccttcgatgtaacatacctcttttgtttaatctgttttgtaagagaaaccagaagaacaccttgtatttcggttgatattttgaaacccacagccaattgaatgctgggtgtgtaggcatatatatgaccaataggttgattgtaagctttactacaatagtggggcggtctcgaagtatattgccagatatgttgcagttcattttctaacacgagaaacccttgatatgctcgaacagaaagcaacaactga

SEQ ID NO: 17833 - DNA, 4187 bp, Zea Mays
ctctcgagtgttcttgtcgcctacggagacctccacgcgacgcttcgtctctcctcacctgcactcgcgatttcaagaaccgactgtattttctatcctcgcactttctggaaccggatgggcagctacttttcgatggccggctagggttccacacaccaaccatgatgttcccctcaacctctgtcaacatttgagactggttcaactcgcttgtgtgccgaagttcccctgcggcggccgtcatcaccatggtctcccctcgtgtggctctggtcttatcgtggtgaccatcatgggtcgagaggagtgcgacgacctggggttcactgtctcacccttagctttagtgcaaagttccctcccagctcatcgcagaccaaggtacgatagtgtggaggcctacatcgtgcaacctgggcttcaccctctgcaccgcctgcaacaatatctaatttcgtcttagatcaagcttttggatccccacgctcccccacccattcttctgtaatgcggtgttctccaagctcgggctgcaggtgtggtcgccatggttcaaaggcgacccgtgcgtcggcgcggccacggacggcacgtccatctacgccgacaaaatgaacccgggcatcaagtgcgactgctccgaccacaacaacaccatctgccacattaccgagctgaaaatgaacaaactggatgtggttggtcctatacctgaggagctgaggaacctcagccacttgacaactctgaatttacaacagaattacttaacagggcctttgccatcgttccttggagaattaactgctttgcagcagatgtcgctttctggcaatgcattatcaggaactattccaaaggagctggggaaccttgtgaatctcataatcctgagtttaggcacgaacaatttaactggctcccttccttctgaattgggtaacctggttaaactagagcatatgtacattgatagtgctggcttaagtggtcctataccatcatcattttcgaaacttacacgattgaaaacattgtgcgcatcagataatgactttactgggaaaataccagattacattggaagctggagtaatttaacagatttgcggtttcaaggcaattcattccaaggtccacttccaagcactcttgctaatcttgttcagctaacaagcttacgaataggtgacattgtaactgggagttcttcgctggcattcatcaaattttaaggaattgcaggatatttggtactttggcattagtgaacttttcaaaatttacaggattaacattattggatttgagttttaataatatcatagcacatgcattccgatcagatttcttgggaacaatagtcttacaggaggccttccaagctctataggaccttctattaagtacttagacttttcctacaactacctctcaggaaaccttccttcttgggctagtcataatttgcaattgtaagtattaagttatgtaatttattgttggtcaaccgaacttttagcccaattgtcttttcaaagcataatgtagcccaacttgaaatatatgcttatagtacatgtatttattaaaatatatttttgaatgttcaatacatctaaaaaaacttgtgttgaggcatttagcttatatttctttttagatttgttgcattttgaagcaacctattattctgaatctttgaagaagtagacatacattcccttactgcttaactccaaaaaggcaaaaaaaaagtttgttgctttagtgtatcttgattctaggaaataaacacactgttaatatgctccaagtccaaagacctctcaagttttttgcgtgtctcattatgcatagaaatttggtggcaaactacttcgtgatcaacaagtccaaagatagtgtcttacctgcggggctggagtgccttcagcgaaacacgtcatgctttcttggctctccacaatcttcctcctttactgtagactgtgggagtagtagatctgtatttgcttcagataattccatgtatcaacctgatgatgccaatcttggtgttgcatcatattatatttcaagcccaccaagatggggtgttagtaatgtcgggagattcatggatacatcaaacgggagttacatagtcaacagttcacgccggtttcagaataccctagattccaaacttttccaaacagcaaggatgtcagcatcaactttaagatactatggttttggacttgaaaatggggactacacagtcacacttcaatttggagaatttgactttgaagatttacaaacttggaagagcgttgggagaagggttttcgatatctatctccagggtgagcgtaaggagcagaactttaacataaagaaggcagcaaaagaagctggcgaagcaagcacatcgtacactgctgtcaagaaacaatatactgtacctgtcacaaaaaacatcctagaaattcatctcttttgggctggaaagggcacttgttgcatccctaatcaaggcgattatgggcctacaatatcagctttgagtgcaactctaaatacaaaaaagaagggtaataaaataggtgtaattattggagtcgtgattggtgcaacagttttaggactagcaatacttgctacactctgtgtgtggaggcacaaaaggagaaaagtatcactagagcagcaagagctctacaatattgttcgaatacctaatgtattctgttacacttatggtgaactaaggaccgctactgaaaattttagttctgctaatcttcttggtgaagggggatatggatcagtttataagggtaaattagttgatggcagtgtggtggcaattaaacaactatctgaaacatctcgccaagggaagaaggaattcgtagctgaaatagaaactatttcccgagtgcagcaccgtaatcttgtgaagttgtttggtttttgccttgagggaaataaaccacttttggtttatgagtacatggagagtggaagccttgataaagcattgtttggaaatggaagattgaacttgaattggtcaacacgatataaaatatgcttggggattgcaagaggcttagcttatctccacgaagagtctagcatccgcattgtgcatagggacataaaggccagcaatgtattacttgatgccactttgaaccctaagatttcggatttcgggctcgccaaactttatgacgataaaaagacacatgttagcacaaaagttgctggtacatttggctatctttcacctgagtacgccatgagaggtcacatgactgagaaagttgatatttttgcttttggtgtggtcatgttggagattattgctggaaggccgaactatgatggtaagcttgaccaagacatggcttatcttttagaatgggtctggcaactttacgaggaagaccatccgctggacattgcggatcccaagctcacagaattcgatagtgtcgagttgctccgtgccatccgcatcgccctcctctgcatccagagctcacctcgtcaaaggccatccatgtcgagagtggtgtcaatgctcacaggagacagcgaggcgcctgaggcagtgtccaagcctagctatgttgccgaatggcagagcaacactgaagggacgtcaagctcagtgtccacagcagaggctgtgtccgtggctccattcctaaaccccgttgtggacgatggccggtgatgatggccatcgctaagatcatcttatgtcaagcactcaagccacagattgttttcttggagatccacctttaaaggccccattatttaggttgaatgtggatgacagatttatgttgttgactggatgagatgtcctagggtttcctcacgttgtagaatacaactctcacaagtataagaatctaggaacatattccttcgatgtaacatacctcttttgtttaatctgttttgtaagagaaaccagaagaacaccttgtatttcggttgatattttgaaacccacagccaattgaatgctgggtgtgtaggcatatatatgaccaataggttgattgtaagctttactacaatagtggggcggtctcgaagtatattgccagatatgttgcagttcattttctaacacgagaaacccttgatatgctcgaacagaaagcaacaactga

SEQ ID NO: 17834 - DNA, 3875 bp, Zea Mays
atggagagtgcttttaagcaaatgaaaggggaatttgttggtttgctaattagaagggaggttatgcagggcaggttctcctcatttctgcttttttgggtcgaaccacgtggagtaatacctctggagctcagtggctgcatcagccagcctgctctctcgagtgttcttgtcgcctacggagacctccacgcgacgcttcgtctctcctcacctgcactcgcgatttcaagaaccgactgtattttctatcctcgcactttctggaaccggatgggcagctacttttcgatggccggctagggttccacacaccaaccatgatgttcccctcaacctctgtcaacatttgagactggttcaactcgcttgtgtgccgaagttcccctgcggcggccgtcatcaccatggtctcccctcgtgtggctctggtcttatcgtggtgaccatcatgggtcgagaggagtgcgacgacctggggttcactgtctcacccttagctttagtgcaaagttccctcccagctcatcgcagaccaaggtacgatagtgtggaggcctacatcgtgcaacctgggcttcaccctctgcaccgcctgcaacaatatctaatttcgtcttagatcaagcttttggatccccacgctcccccacccattcttctgtaatgcggtgttctccaagctcgggctgcaggtgtggtcgccatggttcaaaggcgacccgtgcgtcggcgcggccacggacggcacgtccatctacgccgacaaaatgaacccgggcatcaagtgcgactgctccgaccacaacaacaccatctgccacattaccgagctgaaaatgaacaaactggatgtggttggtcctatacctgaggagctgaggaacctcagccacttgacaactctgaatttacaacagaattacttaacagggcctttgccatcgttccttggagaattaactgctttgcagcagatgtcgctttctggcaatgcattatcaggaactattccaaaggagctggggaaccttgtgaatctcataatcctgagtttaggcacgaacaatttaactggctcccttccttctgaattgggtaacctggttaaactagagcatatgtacattgatagtgctggcttaagtggtcctataccatcatcattttcgaaacttacacgattgaaaacattgtgcgcatcagataatgactttactgggaaaataccagattacattggaagctggagtaatttaacagatttgcggtttcaaggcaattcattccaaggtccacttccaagcactcttgctaatcttgttcagctaacaagcttacgaataggtgacattgtaactgggagttcttcgctggcattcatcaaattttaaggaattgcaggatatttggtactttggcattagtgaacttttcaaaatttacaggattaacattattggatttgagttttaataatatcataggtgaagtaccacaagctctactaaatatgaattcactcaccttgttagacttttcctacaactacctctcaggaaaccttccttcttgggctagtcataatttgcaatttgtcttacctgcggggctggagtgccttcagcgaaacacgtcatgctttcttggctctccacaatcttcctcctttactgtagactgtgggagtagtagatctgtatttgcttcagataattccatgtatcaacctgatgatgccaatcttggtgttgcatcatattatatttcaagcccaccaagatggggtgttagtaatgtcgggagattcatggatacatcaaacgggagttacatagtcaacagttcacgccggtttcagaataccctagattccaaacttttccaaacagcaaggatgtcagcatcaactttaagatactatggttttggacttgaaaatggggactacacagtcacacttcaatttggagaatttgactttgaagatttacaaacttggaagagcgttgggagaagggttttcgatatctatctccagggtgagcgtaaggagcagaactttaacataaagaaggcagcaaaagaagctggcgaagcaagcacatcgtacactgctgtcaagaaacaatatactgtacctgtcacaaaaaacatcctagaaattcatctcttttgggctggaaagggcacttgttgcatccctaatcaaggcgattatgggcctacaatatcagctttgagtgcaactctaaatacaaaaaagaagggtaataaaataggtgtaattattggagtcgtgattggtgcaacagttttaggactagcaatacttgctacactctgtgtgtggaggcacaaaaggagaaaagtatcactagagcagcaagagctctacaatattgttcgaatacctaatgtattctgttacacttatggtgaactaaggaccgctactgaaaattttagttctgctaatcttcttggtgaagggggatatggatcagtttataagggtaaattagttgatggcagtgtggtggcaattaaacaactatctgaaacatctcgccaagggaagaaggaattcgtagctgaaatagaaactatttcccgagtgcagcaccgtaatcttgtgaagttgtttggtttttgccttgagggaaataaaccacttttggtttatgagtacatggagagtggaagccttgataaagcattgtttggaaatggaagattgaacttgaattggtcaacacgatataaaatatgcttggggattgcaagaggcttagcttatctccacgaagagtctagcatccgcattgtgcatagggacataaaggccagcaatgtattacttgatgccactttgaaccctaagatttcggatttcgggctcgccaaactttatgacgataaaaagacacatgttagcacaaaagttgctggtacatttggctatctttcacctgagtacgccatgagaggtcacatgactgagaaagttgatatttttgcttttggtgtggtcatgttggagattattgctggaaggccgaactatgatggtaagcttgaccaagacatggcttatcttttagaatgggtctggcaactttacgaggaagaccatccgctggacattgcggatcccaagctcacagaattcgatagtgtcgagttgctccgtgccatccgcatcgccctcctctgcatccagagctcacctcgtcaaaggccatccatgtcgagagtggtgtcaatgctcacaggagacagcgaggcgcctgaggcagtgtccaagcctagctatgttgccgaatggcagagcaacactgaagggacgtcaagctcagtgtccacagcagaggctgtgtccgtggctccattcctaaaccccgttgtggacgatggccggtgatgatggccatcgctaagatcatcttatgtcaagcactcaagccacagattgttttcttggagatccacctttaaaggccccattatttaggttgaatgtggatgacagatttatgttgttgactggatgagatgtcctagggtttcctcacgttgtagaatacaactctcacaagtataagaatctaggaacatattccttcgatgtaacatacctcttttgtttaatctgttttgtaagagaaaccagaagaacaccttgtatttcggttgatattttgaaacccacagccaattgaatgctgggtgtgtaggcatatatatgaccaataggttgattgtaagctttactacaatagtggggcggtctcgaagtatattgccagatatgttgcagttcattttctaacacgagaaacccttgatatgctcgaacagaaagcaacaactga

SEQ ID NO: 17835 - DNA, 4655 bp, Zea Mays
atggagagtgcttttaagcaaatgaaaggggaatttgttggtttgctaattagaagggaggttatgcagggcaggttctcctcatttctgcttttttgggtcgaaccacgtggagtaatacctctggagctcagtggctgcatcagccaggtgtggtcgccatggttcaaaggcgacccgtgcgtcggcgcggccacggacggcacgtccatctacgccgacaaaatgaacccgggcatcaagtgcgactgctccgaccacaacaacaccatctgccacattaccgagctgaaaatgaacaaactggatgtggttggtcctatacctgaggagctgaggaacctcagccacttgacaactctgaatttacaacagaattacttaacagggcctttgccatcgttccttggagaattaactgctttgcagcagatgtcgctttctggcaatgcattatcaggaactattccaaaggagctggggaaccttgtgaatctcataatcctgagtttaggcacgaacaatttaactggctcccttccttctgaattgggtaacctggttaaactagagcatatgtacattgatagtgctggcttaagtggtcctataccatcatcattttcgaaacttacacgattgaaaacattgtgcgcatcagataatgactttactgggaaaataccagattacattggaagctggagtaatttaacagatttgcggtttcaaggcaattcattccaaggtccacttccaagcactcttgctaatcttgttcagctaacaagcttacgaataggtgacattgtaactgggagttcttcgctggcattcatcagtaacatgacatctttgaacttattgtattcccaattaatcattcactttatgaatcaaactgcgccttcatttgctccattgtaaccgagttgttatatacttaaattggtgacattattcattgcagaattttaaggaattgcaggatatttggtactttggcattagtgaacttttcaaaatttacaggattaacattattgtaaggcatttcgtttcttccaaattttttgttaaatctgctttgtgcaagatgcttcctatggatatgcatcgcgagatgtttcctttcacacatattctcgtcttttacttacttatgcagggatttgagttttaataatatcataggtgaagtaccacaagctctactaaatatgaattcactcaccttgttgtatgttttgtatccctttcaatgcttattttgggggcataatgaatttcattgtttatcttgctaattgtagcacatgcattccgatcagatttcttgggaacaatagtcttacaggaggccttccaagctctataggaccttctattaagtacttagacttttcctacaactacctctcaggaaaccttccttcttgggctagtcataatttgcaattgtaagtattaagttatgtaatttattgttggtcaaccgaacttttagcccaattgtcttttcaaagcataatgtagcccaacttgaaatatatgcttatagtacatgtatttattaaaatatatttttgaatgttcaatacatctaaaaaaacttgtgttgaggcatttagcttatatttctttttagatttgttgcattttgaagcaacctattattctgaatctttgaagaagtagacatacattcccttactgcttaactccaaaaaggcaaaaaaaaagtttgttgctttagtgtatcttgattctaggaaataaacacactgttaatatgctccaagtccaaagacctctcaagttttttgcgtgtctcattatgcatagaaatttggtggcaaactacttcgtgatcaacaagtccaaagatagtgtcttacctgcggggctggagtgccttcagcgaaacacgtcatgctttcttggctctccacaatcttcctcctttactgtagactgtgggagtagtagatctgtatttgcttcagataattccatgtatcaacctgatgatgccaatcttggtgttgcatcatattatatttcaagcccaccaagatggggtgttagtaatgtcgggagattcatggatacatcaaacgggagttacatagtcaacagttcacgccggtttcagaataccctagattccaaacttttccaaacagcaaggatgtcagcatcaactttaagatactatggttttggacttgaaaatggggactacacagtcacacttcaatttggagaatttgactttgaagatttacaaacttggaagagcgttgggagaagggttttcgatatctatctccagggtgagcgtaaggagcagaactttaacataaagaaggcagcaaaagaagctggcgaagcaagcacatcgtacactgctgtcaagaaacaatatactgtacctgtcacaaaaaacatcctagaaattcatctcttttgggctggaaagggcacttgttgcatccctaatcaaggcgattatgggcctacaatatcagctttgagtgcaactctaagtattctcttttgatacaatcatggctttaatattgttcagataatgtccttacgttcaacaatttcattatatacaatttctaccacgagaagtactgaagactaaaaagactggaattttagaaatgcctaacataaaagccaaatattgtttatattgatgtataatcatgctttctaacaaatgcctctcctacagatacaaaaaagaagggtaataaaataggtgtaattattggagtcgtgattggtgcaacagttttaggactagcaatacttgctacactctgtgtgtggaggcacaaaaggagaaaagtatcactagagcagcaagagctctacaatattgttcgaatacctaatgtattctgttacacttatggtgaactaaggaccgctactgaaaattttagttctgctaatcttcttggtgaagggggatatggatcagtttataaggtttgttcatttgtagtacacaatgcatgatttgaatctgctagggatcttttgtggcactgtaggttaatagtgaacaacgaatttgttttcattgtgcaaatttggctagagttgtgttgtttaattctactttgttcaatgaaaattccttttatcatttactcatttaacgtacttctccaattatcttactaacatcagtgcataataaatctgggatattccctgttattttccttttccccctgttttgcacgtggtcagtaaaatgagattgattgggtactctagtgcatttactctattacatgatattgattttacttggtgcttataactcttttttagaaaaattcaccttctggcagggtaaattagttgatggcagtgtggtggcaattaaacaactatctgaaacatctcgccaagggaagaaggaattcgtagctgaaatagaaactatttcccgagtgcagcaccgtaatcttgtgaagttgtttggtttttgccttgagggaaataaaccacttttggtttatgagtacatggagagtggaagccttgataaagcattgtttggaaatggaagattgaacttgaattggtcaacacgatataaaatatgcttggggattgcaagaggcttagcttatctccacgaagagtctagcatccgcattgtgcatagggacataaaggccagcaatgtattacttgatgccactttgaaccctaagatttcggatttcgggctcgccaaactttatgacgataaaaagacacatgttagcacaaaagttgctggtacattattattgctggaaggccgaactatgatggtaagcttgaccaagacatggcttatcttttagaatgggtctggcaactttacgaggaagaccatccgctggacattgcggatcccaagctcacagaattcgatagtgtcgagttgctccgtgccatccgcatcgccctcctctgcatccagagctcacctcgtcaaaggccatccatgtcgagagtggtgtcaatgctcacaggagacagcgaggcgcctgaggcagtgtccaagcctagctatgttgccgaatggcagagcaacactgaagggacgtcaagctcagtgtccacagcagaggctgtgtccgtggctccattcctaaaccccgttgtggacgatggccggtgatgatggccatcgctaagatcatcttatgtcaagcactcaagccacagattgttttcttggagatccacctttaaaggccccattatttaggttgaatgtggatgacagatttatgttgttgactggatgagatgtcctagggtttcctcacgttgtagaatacaactctcacaagtataagaatctaggaacatattccttcgatgtaacatacctcttttgtttaatctgttttgtaagagaaaccagaagaacaccttgtatttcggttgatattttgaaacccacagccaattgaatgctgggtgtgtaggcatatatatgaccaataggttgattgtaagctttactacaatagtggggcggtctcgaagtatattgccagatatgttgcagttcattttctaacacgagaaacccttgatatgctcgaacagaaagcaacaactga

SEQ ID NO: 17836 - DNA, 4070 bp, Zea Mays
atggagagtgcttttaagcaaatgaaaggggaatttgttggtttgctaattagaagggaggttatgcagggcaggttctcctcatttctgcttttttgggtcgaaccacgtggagtaatacctctggagctcagtggctgcatcagccaggtgtggtcgccatggttcaaaggcgacccgtgcgtcggcgcggccacggacggcacgtccatctacgccgacaaaatgaacccgggcatcaagtgcgactgctccgaccacaacaacaccatctgccacattaccgagctgaaaatgaacaaactggatgtggttggtcctatacctgaggagctgaggaacctcagccacttgacaactctgaatttacaacagaattacttaacagggcctttgccatcgttccttggagaattaactgctttgcagcagatgtcgctttctggcaatgcattatcaggaactattccaaaggagctggggaaccttgtgaatctcataatcctgagtttaggcacgaacaatttaactggctcccttccttctgaattgggtaacctggttaaactagagcatatgtacattgatagtgctggcttaagtggtcctataccatcatcattttcgaaacttacacgattgaaaacattgtgcgcatcagataatgactttactgggaaaataccagattacattggaagctggagtaatttaacagatttgcggtttcaaggcaattcattccaaggtccacttccaagcactcttgctaatcttgttcagctaacaagcttaattttaaggaattgcaggatatttggtactttggcattagtgaacttttcaaaatttacaggattaacattattggatttgagttttaataatatcataggtgaagtaccacaagctctactaaatatgaattcactcaccttgttgtatgttttgtatccctttcaatgcttattttgggggcataatgaatttcattgtttatcttgctaattgtagcacatgcattccgatcagatttcttgggaacaatagtcttacaggaggccttccaagctctataggaccttctattaagtacttagacttttcctacaactacctctcaggaaaccttccttcttgggctagtcataatttgcaattgtaagtattaagttatgtaatttattgttggtcaaccgaacttttagcccaattgtcttttcaaagcataatgtagcccaacttgaaatatatgcttatagtacatgtatttattaaaatatatttttgaatgttcaatacatctaaaaaaacttgtgttgaggcatttagcttatatttctttttagatttgttgcattttgaagcaacctattattctgaatctttgaagaagtagacatacattcccttactgcttaactccaaaaaggcaaaaaaaaagtttgttgctttagtgtatcttgattctaggaaataaacacactgttaatatgctccaagtccaaagacctctcaagttttttgcgtgtctcattatgcatagaaatttggtggcaaactacttcgtgatcaacaagtccaaagatagtgtcttacctgcggggctggagtgccttcagcgaaacacgtcatgctttcttggctctccacaatcttcctcctttactgtagactgtgggagtagtagatctgtatttgcttcagataattccatgtatcaacctgatgatgccaatcttggtgttgcatcatattatatttcaagcccaccaagatggggtgttagtaatgtcgggagattcatggatacatcaaacgggagttacatagtcaacagttcacgccggtttcagaataccctagattccaaacttttccaaacagcaaggatgtcagcatcaactttaagatactatggttttggacttgaaaatggggactacacagtcacacttcaatttggagaatttgactttgaagatttacaaacttggaagagcgttgggagaagggttttcgatatctatctccagggtgagcgtaaggagcagaactttaacataaagaaggcagcaaaagaagctggcgaagcaagcacatcgtacactgctgtcaagaaacaatatactgtacctgtcacaaaaaacatcctagaaattcatctcttttgggctggaaagggcacttgttgcatccctaatcaaggcgattatgggcctacaatatcagctttgagtgcaactctaagtattctcttttgatacaatcatggctttaatattgttcagataatgtccttacgttcaacaatttcattatatacaatttctaccacgagaagtactgaagactaaaaagactggaattttagaaatgcctaacataaaagccaaatattgtttatattgatgtataatcatgctttctaacaaatgcctctcctacagatacaaaaaagaagggtaataaaataggtgtaattattggagtcgtgattggtgcaacagttttaggactagcaatacttgctacactctgtgtgtggaggcacaaaaggagaaaagtatcactagagcagcaagagctctacaatattgttcgaatacctaatgtattctgttacacttatggtgaactaaggaccgctactgaaaattttagttctgctaatcttcttggtgaagggggatatggatcagtttataagggtaaattagttgatggcagtgtggtggcaattaaacaactatctgaaacatctcgccaagggaagaaggaattcgtagctgaaatagaaactatttcccgagtgcagcaccgtaatcttgtgaagttgtttggtttttgccttgagggaaataaaccacttttggtttatgagtacatggagagtggaagccttgataaagcattgtttggaaatggaagattgaacttgaattggtcaacacgatataaaatatgcttggggattgcaagaggcttagcttatctccacgaagagtctagcatccgcattgtgcatagggacataaaggccagcaatgtattacttgatgccactttgaaccctaagatttcggatttcgggctcgccaaactttatgacgataaaaagacacatgttagcacaaaagttgctggtacatttggctatctttcacctgagtacgccatgagaggtcacatgactgagaaagttgatatttttgcttttggtgtggtcatgttggagattattgctggaaggccgaactatgatggtaagcttgaccaagacatggcttatcttttagaatgggtctggcaactttacgaggaagaccatccgctggacattgcggatcccaagctcacagaattcgatagtgtcgagttgctccgtgccatccgcatcgccctcctctgcatccagagctcacctcgtcaaaggccatccatgtcgagagtggtgtcaatgctcacaggagacagcgaggcgcctgaggcagtgtccaagcctagctatgttgccgaatggcagagcaacactgaagggacgtcaagctcagtgtccacagcagaggctgtgtccgtggctccattcctaaaccccgttgtggacgatggccggtgatgatggccatcgctaagatcatcttatgtcaagcactcaagccacagattgttttcttggagatccacctttaaaggccccattatttaggttgaatgtggatgacagatttatgttgttgactggatgagatgtcctagggtttcctcacgttgtagaatacaactctcacaagtataagaatctaggaacatattccttcgatgtaacatacctcttttgtttaatctgttttgtaagagaaaccagaagaacaccttgtatttcggttgatattttgaaacccacagccaattgaatgctgggtgtgtaggcatatatatgaccaataggttgattgtaagctttactacaatagtggggcggtctcgaagtatattgccagatatgttgcagttcattttctaacacgagaaacccttgatatgctcgaacagaaagcaacaactga

SEQ ID NO: 17837 - DNA, 3777 bp, Zea Mays
atggagagtgcttttaagcaaatgaaaggggaatttgttggtttgctaattagaagggaggttatgcagggcaggttctcctcatttctgcttttttgggtcgaaccacgtggagtaatacctctggagctcagtggctgcatcagccaggtgtggtcgccatggttcaaaggcgacccgtgcgtcggcgcggccacggacggcacgtccatctacgccgacaaaatgaacccgggcatcaagtgcgactgctccgaccacaacaacaccatctgccacattaccgagctgaaaatgaacaaactggatgtggttggtcctatacctgaggagctgaggaacctcagccacttgacaactctgaatttacaacagaattacttaacagggcctttgccatcgttccttggagaattaactgctttgcagcagatgtcgctttctggcaatgcattatcaggaactattccaaaggagctggggaaccttgtgaatctcataatcctgagtttaggcacgaacaatttaactggctcccttccttctgaattgggtaacctggttaaactagagcatatgtacattgatagtgctggcttaagtggtcctataccatcatcattttcgaaacttacacgattgaaaacattgtgcgcatcagataatgactttactgggaaaataccagattacattggaagctggagtaatttaacagatttgcggtttcaaggcaattcattccaaggtccacttccaagcactcttgctaatcttgttcagctaacaagcttacgaataggtgacattgtaactgggagttcttcgctggcattcatcagtaacatgacatctttgaacttattaattttaaggaattgcaggatatttggtactttggcattagtgaacttttcaaaatttacaggattaacattattggatttgagttttaataatatcataggtgaagtaccacaagctctactaaatatgaattcactcaccttgttgtatgttttgtatccctttcaatgcttattttgggggcataatgaatttcattgtttatcttgctaattgtagcacatgcattccgatcagatttcttgggaacaatagtcttacaggaggccttccaagctctataggaccttctattaagtacttagacttttcctacaactacctctcaggaaaccttccttcttgggctagtcataatttgcaattaaatttggtggcaaactacttcgtgatcaacaagtccaaagatagtgtcttacctgcggggctggagtgccttcagcgaaacacgtcatgctttcttggctctccacaatcttcctcctttactgtagactgtgggagtagtagatctgtatttgcttcagataattccatgtatcaacctgatgatgccaatcttggtgttgcatcatattatatttcaagcccaccaagatggggtgttagtaatgtcgggagattcatggatacatcaaacgggagttacatagtcaacagttcacgccggtttcagaataccctagattccaaacttttccaaacagcaaggatgtcagcatcaactttaagatactatggttttggacttgaaaatggggactacacagtcacacttcaatttggagaatttgactttgaagatttacaaacttggaagagcgttgggagaagggttttcgatatctatctccagggtgagcgtaaggagcagaactttaacataaagaaggcagcaaaagaagctggcgaagcaagcacatcgtacactgctgtcaagaaacaatatactgtacctgtcacaaaaaacatcctagaaattcatctcttttgggctggaaagggcacttgttgcatccctaatcaaggcgattatgggcctacaatatcagctttgagtgcaactctaagtattctcttttgatacaatcatggctttaatattgttcagataatgtccttacgttcaacaatttcattatatacaatttctaccacgagaagtactgaagactaaaaagactggaattttagaaatgcctaacataaaagccaaatattgtttatattgatgtataatcatgctttctaacaaatgcctctcctacagatacaaaaaagaagggtaataaaataggtgtaattattggagtcgtgattggtgcaacagttttaggactagcaatacttgctacactctgtgtgtggaggcacaaaaggagaaaagtatcactagagcagcaagagctctacaatattgttcgaatacctaatgtattctgttacacttatggtgaactaaggaccgctactgaaaattttagttctgctaatcttcttggtgaagggggatatggatcagtttataagaaaaattcaccttctggcagggtaaattagttgatggcagtgtggtggcaattaaacaactatctgaaacatctcgccaagggaagaaggaattcgtagctgaaatagaaactatttcccgagtgcagcaccgtaatcttgtgaagttgtttggtttttgccttgagggaaataaaccacttttggtttatgagtacatggagagtggaagccttgataaagcattgtttggaaatggaagattgaacttgaattggtcaacacgatataaaatatgcttggggattgcaagaggcttagcttatctccacgaagagtctagcatccgcattgtgcatagggacataaaggccagcaatgtattacttgatgccactttgaaccctaagatttcggatttcgggctcgccaaactttatgacgataaaaagacacatgttagcacaaaagttgctggtacatttggctatctttcacctgagtacgccatgagaggtcacatgactgagaaagttgatatttttgcttttggtgtggtcatgttggagattattgctggaaggccgaactatgatggtaagcttgaccaagacatggcttatcttttagaatgggtctggcaactttacgaggaagaccatccgctggacattgcggatcccaagctcacagaattcgatagtgtcgagttgctccgtgccatccgcatcgccctcctctgcatccagagctcacctcgtcaaaggccatccatgtcgagagtggtgtcaatgctcacaggagacagcgaggcgcctgaggcagtgtccaagcctagctatgttgccgaatggcagagcaacactgaagggacgtcaagctcagtgtccacagcagaggctgtgtccgtggctccattcctaaaccccgttgtggacgatggccggtgatgatggccatcgctaagatcatcttatgtcaagcactcaagccacagattgttttcttggagatccacctttaaaggccccattatttaggttgaatgtggatgacagatttatgttgttgactggatgagatgtcctagggtttcctcacgttgtagaatacaactctcacaagtataagaatctaggaacatattccttcgatgtaacatacctcttttgtttaatctgttttgtaagagaaaccagaagaacaccttgtatttcggttgatattttgaaacccacagccaattgaatgctgggtgtgtaggcatatatatgaccaataggttgattgtaagctttactacaatagtggggcggtctcgaagtatattgccagatatgttgcagttcattttctaacacgagaaacccttgatatgctcgaacagaaagcaacaactga

SEQ ID NO: 17838 - DNA, 3661 bp, Zea Mays
atggagagtgcttttaagcaaatgaaaggggaatttgttggtttgctaattagaagggaggttatgcagggcaggttctcctcatttctgcttttttgggtcgaaccacgtggagtaatacctctggagctcagtggctgcatcagccagcttttggatccccacgctcccccacccattcttctgtaatgcggtgttctccaagctcgggctgcaggtgtggtcgccatggttcaaaggcgacccgtgcgtcggcgcggccacggacggcacgtccatctacgccgacaaaatgaacccgggcatcaagtgcgactgctccgaccacaacaacaccatctgccacattaccgagctgaaaatgaacaaactggatgtggttggtcctatacctgaggagctgaggaacctcagccacttgacaactctgaatttacaacagaattacttaacagggcctttgccatcgttccttggagaattaactgctttgcagcagatgtcgctttctggcaatgcattatcaggaactattccaaaggagctggggaaccttgtgaatctcataatcctgagtttaggcacgaacaatttaactggctcccttccttctgaattgggtaacctggttaaactagagcatatgtacattgatagtgctggcttaagtggtcctataccatcatcattttcgaaacttacacgattgaaaacattgtgcgcatcagataatgactttactgggaaaataccagattacattggaagctggagtaatttaacagatttgcggtttcaaggcaattcattccaaggtccacttccaagcactcttgctaatcttgttcagctaacaagcttaattttaaggaattgcaggatatttggtactttggcattagtgaacttttcaaaatttacaggattaacattattggatttgagttttaataatatcataggtgaagtaccacaagctctactaaatatgaattcactcaccttgttatttcttgggaacaatagtcttacaggaggccttccaagctctataggaccttctattaagtacttagacttttcctacaactacctctcaggaaaccttccttcttgggctagtcataatttgcaattaaatttggtggcaaactacttcgtgatcaacaagtccaaagatagtgtcttacctgcggggctggagtgccttcagcgaaacacgtcatgctttcttggctctccacaatcttcctcctttactgtagactgtgggagtagtagatctgtatttgcttcagataattccatgtatcaacctgatgatgccaatcttggtgttgcatcatattatatttcaagcccaccaagatggggtgttagtaatgtcgggagattcatggatacatcaaacgggagttacatagtcaacagttcacgccggtttcagaataccctagattccaaacttttccaaacagcaaggatgtcagcatcaactttaagatactatggttttggacttgaaaatggggactacacagtcacacttcaatttggagaatttgactttgaagatttacaaacttggaagagcgttgggagaagggttttcgatatctatctccagggtgagcgtaaggagcagaactttaacataaagaaggcagcaaaagaagctggcgaagcaagcacatcgtacactgctgtcaagaaacaatatactgtacctgtcacaaaaaacatcctagaaattcatctcttttgggctggaaagggcacttgttgcatccctaatcaaggcgattatgggcctacaatatcagctttgagtgcaactctaagtattctcttttgatacaatcatggctttaatattgttcagataatgtccttacgttcaacaatttcattatatacaatttctaccacgagaagtactgaagactaaaaagactggaattttagaaatgcctaacataaaagccaaatattgtttatattgatgtataatcatgctttctaacaaatgcctctcctacagatacaaaaaagaagggtaataaaataggtgtaattattggagtcgtgattggtgcaacagttttaggactagcaatacttgctacactctgtgtgtggaggcacaaaaggagaaaagtatcactagagcagcaagagctctacaatattgttcgaatacctaatgtattctgttacacttatggtgaactaaggaccgctactgaaaattttagttctgctaatcttcttggtgaagggggatatggatcagtttataagggtaaattagttgatggcagtgtggtggcaattaaacaactatctgaaacatctcgccaagggaagaaggaattcgtagctgaaatagaaactatttcccgagtgcagcaccgtaatcttgtgaagttgtttggtttttgccttgagggaaataaaccacttttggtttatgagtacatggagagtggaagccttgataaagcattgtttggaaatggaagattgaacttgaattggtcaacacgatataaaatatgcttggggattgcaagaggcttagcttatctccacgaagagtctagcatccgcattgtgcatagggacataaaggccagcaatgtattacttgatgccactttgaaccctaagatttcggatttcgggctcgccaaactttatgacgataaaaagacacatgttagcacaaaagttgctggtacatttggctatctttcacctgagtacgccatgagaggtcacatgactgagaaagttgatatttttgcttttggtgtggtcatgttggagattattgctggaaggccgaactatgatggtaagcttgaccaagacatggcttatcttttagaatgggtctggcaactttacgaggaagaccatccgctggacattgcggatcccaagctcacagaattcgatagtgtcgagttgctccgtgccatccgcatcgccctcctctgcatccagagctcacctcgtcaaaggccatccatgtcgagagtggtgtcaatgctcacaggagacagcgaggcgcctgaggcagtgtccaagcctagctatgttgccgaatggcagagcaacactgaagggacgtcaagctcagtgtccacagcagaggctgtgtccgtggctccattcctaaaccccgttgtggacgatggccggtgatgatggccatcgctaagatcatcttatgtcaagcactcaagccacagattgttttcttggagatccacctttaaaggccccattatttaggttgaatgtggatgacagatttatgttgttgactggatgagatgtcctagggtttcctcacgttgtagaatacaactctcacaagtataagaatctaggaacatattccttcgatgtaacatacctcttttgtttaatctgttttgtaagagaaaccagaagaacaccttgtatttcggttgatattttgaaacccacagccaattgaatgctgggtgtgtaggcatatatatgaccaataggttgattgtaagctttactacaatagtggggcggtctcgaagtatattgccagatatgttgcagttcattttctaacacgagaaacccttgatatgctcgaacagaaagcaacaactga

SEQ ID NO: 17839 - DNA, 3569 bp, Zea Mays
atggagagtgcttttaagcaaatgaaaggggaatttgttggtttgctaattagaagggaggttatgcagggcaggttctcctcatttctgcttttttgggtcgaaccacgtggagtaatacctctggagctcagtggctgcatcagccaggtgtggtcgccatggttcaaaggcgacccgtgcgtcggcgcggccacggacggcacgtccatctacgccgacaaaatgaacccgggcatcaagtgcgactgctccgaccacaacaacaccatctgccacattaccgagctgaaaatgaacaaactggatgtggttggtcctatacctgaggagctgaggaacctcagccacttgacaactctgaatttacaacagaattacttaacagggcctttgccatcgttccttggagaattaactgctttgcagcagatgtcgctttctggcaatgcattatcaggaactattccaaaggagctggggaaccttgtgaatctcataatcctgagtttaggcacgaacaatttaactggctcccttccttctgaattgggtaacctggttaaactagagcatatgtacattgatagtgctggcttaagtggtcctataccatcatcattttcgaaacttacacgattgaaaacattgtgcgcatcagataatgactttactgggaaaataccagattacattggaagctggagtaatttaacagatttgcggtttcaaggcaattcattccaaggtccacttccaagcactcttgctaatcttgttcagctaacaagcttaattttaaggaattgcaggatatttggtactttggcattagtgaacttttcaaaatttacaggattaacattattggatttgagttttaataatatcataggtgaagtaccacaagctctactaaatatgaattcactcaccttgttagacttttcctacaactacctctcaggaaaccttccttcttgggctagtcataatttgcaatttgtcttacctgcggggctggagtgccttcagcgaaacacgtcatgctttcttggctctccacaatcttcctcctttactgtagactgtgggagtagtagatctgtatttgcttcagataattccatgtatcaacctgatgatgccaatcttggtgttgcatcatattatatttcaagcccaccaagatggggtgttagtaatgtcgggagattcatggatacatcaaacgggagttacatagtcaacagttcacgccggtttcagaataccctagattccaaacttttccaaacagcaaggatgtcagcatcaactttaagatactatggttttggacttgaaaatggggactacacagtcacacttcaatttggagaatttgactttgaagatttacaaacttggaagagcgttgggagaagggttttcgatatctatctccagggtgagcgtaaggagcagaactttaacataaagaaggcagcaaaagaagctggcgaagcaagcacatcgtacactgctgtcaagaaacaatatactgtacctgtcacaaaaaacatcctagaaattcatctcttttgggctggaaagggcacttgttgcatccctaatcaaggcgattatgggcctacaatatcagctttgagtgcaactctaaatacaaaaaagaagggtaataaaataggtgtaattattggagtcgtgattggtgcaacagttttaggactagcaatacttgctacactctgtgtgtggaggcacaaaaggagaaaagtatcactagagcagcaagagctctacaatattgttcgaatacctaatgtattctgttacacttatggtgaactaaggaccgctactgaaaattttagttctgctaatcttcttggtgaagggggatatggatcagtttataaggtttgttcatttgtagtacacaatgcatgatttgaatctgctagggatcttttgtggcactgtaggttaatagtgaacaacgaatttgttttcattgtgcaaatttggctagagttgtgttgtttaattctactttgttcaatgaaaattccttttatcatttactcatttaacgtacttctccaattatcttactaacatcagtgcataataaatctgggatattccctgttattttccttttccccctgttttgcacgtggtcagtaaaatgagattgattgggtactctagtgcatttactctattacatgatattgattttacttggtgcttataactcttttttagaaaaattcaccttctggcagggtaaattagttgatggcagtgtggtggcaattaaacaactatctgaaacatctcgccaagggaagaaggaattcgtagctgaaatagaaactatttcccgagtgcagcaccgtaatcttgtgaagttgtttggtttttgccttgagggaaataaaccacttttggtttatgagtacatggagagtggaagccttgataaagcattgtttggaaatggaagattgaacttgaattggtcaacacgatataaaatatgcttggggattgcaagaggcttagcttatctccacgaagagtctagcatccgcattgtgcatagggacataaaggccagcaatgtattacttgatgccactttgaaccctaagatttcggatttcgggctcgccaaactttatgacgataaaaagacacatgttagcacaaaagttgctggtacattattattgctggaaggccgaactatgatggtaagcttgaccaagacatggcttatcttttagaatgggtctggcaactttacgaggaagaccatccgctggacattgcggatcccaagctcacagaattcgatagtgtcgagttgctccgtgccatccgcatcgccctcctctgcatccagagctcacctcgtcaaaggccatccatgtcgagagtggtgtcaatgctcacaggagacagcgaggcgcctgaggcagtgtccaagcctagctatgttgccgaatggcagagcaacactgaagggacgtcaagctcagtgtccacagcagaggctgtgtccgtggctccattcctaaaccccgttgtggacgatggccggtgatgatggccatcgctaagatcatcttatgtcaagcactcaagccacagattgttttcttggagatccacctttaaaggccccattatttaggttgaatgtggatgacagatttatgttgttgactggatgagatgtcctagggtttcctcacgttgtagaatacaactctcacaagtataagaatctaggaacatattccttcgatgtaacatacctcttttgtttaatctgttttgtaagagaaaccagaagaacaccttgtatttcggttgatattttgaaacccacagccaattgaatgctgggtgtgtaggcatatatatgaccaataggttgattgtaagctttactacaatagtggggcggtctcgaagtatattgccagatatgttgcagttcattttctaacacgagaaacccttgatatgctcgaacagaaagcaacaactga

SEQ ID NO: 17840 - DNA, 3988 bp, Zea Mays
atggagagtgcttttaagcaaatgaaaggggaatttgttggtttgctaattagaagggaggttatgcagggcaggttctcctcatttctgcttttttgggtcgaaccacgtggagtaatacctctggagctcagtggctgcatcagccaggtgtggtcgccatggttcaaaggcgacccgtgcgtcggcgcggccacggacggcacgtccatctacgccgacaaaatgaacccgggcatcaagtgcgactgctccgaccacaacaacaccatctgccacattaccgagctgaaaatgaacaaactggatgtggttggtcctatacctgaggagctgaggaacctcagccacttgacaactctgaatttacaacagaattacttaacagggcctttgccatcgttccttggagaattaactgctttgcagcagatgtcgctttctggcaatgcattatcaggaactattccaaaggagctggggaaccttgtgaatctcataatcctgagtttaggcacgaacaatttaactggctcccttccttctgaattgggtaacctggttaaactagagcatatgtacattgatagtgctggcttaagtggtcctataccatcatcattttcgaaacttacacgattgaaaacattgtgcgcatcagataatgactttactgggaaaataccagattacattggaagctggagtaatttaacagatttgcggtttcaaggcaattcattccaaggtccacttccaagcactcttgctaatcttgttcagctaacaagcttaattttaaggaattgcaggatatttggtactttggcattagtgaacttttcaaaatttacaggattaacattattggatttgagttttaataatatcataggtgaagtaccacaagctctactaaatatgaattcactcaccttgttagacttttcctacaactacctctcaggaaaccttccttcttgggctagtcataatttgcaattaaatttggtggcaaactacttcgtgatcaacaagtccaaagatagtgtcttacctgcggggctggagtgccttcagcgaaacacgtcatgctttcttggctctccacaatcttcctcctttactgtagactgtgggagtagtagatctgtatttgcttcagataattccatgtatcaacctgatgatgccaatcttggtgttgcatcatattatatttcaagcccaccaagatggggtgttagtaatgtcgggagattcatggatacatcaaacgggagttacatagtcaacagttcacgccggtttcagaataccctagattccaaacttttccaaacagcaaggatgtcagcatcaactttaagatactatggttttggacttgaaaatggggactacacagtcacacttcaatttggagaatttgactttgaagatttacaaacttggaagagcgttgggagaagggttttcgatatctatctccagggtgagcgtaaggagcagaactttaacataaagaaggcagcaaaagaagctggcgaagcaagcacatcgtacactgctgtcaagaaacaatatactgtacctgtcacaaaaaacatcctagaaattcatctcttttgggctggaaagggcacttgttgcatccctaatcaaggcgattatgggcctacaatatcagctttgagtgcaactctaagtattctcttttgatacaatcatggctttaatattgttcagataatgtccttacgttcaacaatttcattatatacaatttctaccacgagaagtactgaagactaaaaagactggaattttagaaatgcctaacataaaagccaaatattgtttatattgatgtataatcatgctttctaacaaatgcctctcctacagatacaaaaaagaagggtaataaaataggtgtaattattggagtcgtgattggtgcaacagttttaggactagcaatacttgctacactctgtgtgtggaggcacaaaaggagaaaagtatcactagagcagcaagagctctacaatattgttcgaatacctaatgtattctgttacacttatggtgaactaaggaccgctactgaaaattttagttctgctaatcttcttggtgaagggggatatggatcagtttataaggtttgttcatttgtagtacacaatgcatgatttgaatctgctagggatcttttgtggcactgtaggttaatagtgaacaacgaatttgttttcattgtgcaaatttggctagagttgtgttgtttaattctactttgttcaatgaaaattccttttatcatttactcatttaacgtacttctccaattatcttactaacatcagtgcataataaatctgggatattccctgttattttccttttccccctgttttgcacgtggtcagtaaaatgagattgattgggtactctagtgcatttactctattacatgatattgattttacttggtgcttataactcttttttagaaaaattcaccttctggcagggtaaattagttgatggcagtgtggtggcaattaaacaactatctgaaacatctcgccaagggaagaaggaattcgtagctgaaatagaaactatttcccgagtgcagcaccgtaatcttgtgaagttgtttggtttttgccttgagggaaataaaccacttttggtttatgagtacatggagagtggaagccttgataaagcattgtttggtatcaaccatttcattcagtttatccagcggcgactagtctaggactcttatataaatctgacatctgaaatgttcattggcatgcaggaaatggaagattgaacttgaattggtcaacacgatataaaatatgcttggggattgcaagaggcttagcttatctccacgaagagtctagcatccgcattgtgcatagggacataaaggccagcaatgtattacttgatgccactttgaaccctaagatttcggatttcgggctcgccaaactttatgacgataaaaagacacatgttagcacaaaagttgctggtacatttggctatctttcacctgagtacgccatgagaggtcacatgactgagaaagttgatatttttgcttttggtgtggtcatgttggagattattgctggaaggccgaactatgatggtaagcttgaccaagacatggcttatcttttagaatgggtctggcaactttacgaggaagaccatccgctggacattgcggatcccaagctcacagaattcgatagtgtcgagttgctccgtgccatccgcatcgccctcctctgcatccagagctcacctcgtcaaaggccatccatgtcgagagtggtgtcaatgctcacaggagacagcgaggcgcctgaggcagtgtccaagcctagctatgttgccgaatggcagagcaacactgaagggacgtcaagctcagtgtccacagcagaggctgtgtccgtggctccattcctaaaccccgttgtggacgatggccggtgatgatggccatcgctaagatcatcttatgtcaagcactcaagccacagattgttttcttggagatccacctttaaaggccccattatttaggttgaatgtggatgacagatttatgttgttgactggatgagatgtcctagggtttcctcacgttgtagaatacaactctcacaagtataagaatctaggaacatattccttcgatgtaacatacctcttttgtttaatctgttttgtaagagaaaccagaagaacaccttgtatttcggttgatattttgaaacccacagccaattgaatgctgggtgtgtaggcatatatatgaccaataggttgattgtaagctttactacaatagtggggcggtctcgaagtatattgccagatatgttgcagttcattttctaacacgagaaacccttgatatgctcgaacagaaagcaacaactga

SEQ ID NO: 17841 - DNA, 3531 bp, Zea Mays
atggagagtgcttttaagcaaatgaaaggggaatttgttggtttgctaattagaagggaggttatgcagggcaggttctcctcatttctgcttttttgggtcgaaccacgtggagtaatacctctggagctcagtggctgcatcagccaggtgtggtcgccatggttcaaaggcgacccgtgcgtcggcgcggccacggacggcacgtccatctacgccgacaaaatgaacccgggcatcaagtgcgactgctccgaccacaacaacaccatctgccacattaccgagctgaaaatgaacaaactggatgtggttggtcctatacctgaggagctgaggaacctcagccacttgacaactctgaatttacaacagaattacttaacagggcctttgccatcgttccttggagaattaactgctttgcagcagatgtcgctttctggcaatgcattatcaggaactattccaaaggagctggggaaccttgtgaatctcataatcctgagtttaggcacgaacaatttaactggctcccttccttctgaattgggtaacctggttaaactagagcatatgtacattgatagtgctggcttaagtggtcctataccatcatcattttcgaaacttacacgattgaaaacattataatgactttactgggaaaataccagattacattggaagctggagtaatttaacagatttgcggtttcaaggcaattcattccaaggtccacttccaagcactcttgctaatcttgttcagctaacaagcttacgaataggtgacattgtaactgggagttcttcgctggcattcatcagtaacatgacatctttgaacttattgtattcccaattaatcattcactttatgaatcaaactgcgccttcatttgctccattgtaaccgagttgttatatacttaaattggtgacattattcattgcagaattttaaggaattgcaggatatttggtactttggcattagtgaacttttcaaaatttacaggattaacattattggatttgagttttaataatatcatagcacatgcattccgatcagatttcttgggaacaatagtcttacaggaggccttccaagctctataggaccttctattaagtacttagacttttcctacaactacctctcaggaaaccttccttcttgggctagtcataatttgcaattaaatttggtggcaaactacttcgtgatcaacaagtccaaagatagtgtcttacctgcggggctggagtgccttcagcgaaacacgtcatgctttcttggctctccacaatcttcctcctttactgtagactgtgggagtagtagatctgtatttgcttcagataattccatgtatcaacctgatgatgccaatcttggtgttgcatcatattatatttcaagcccaccaagatggggtgttagtaatgtcgggagattcatggatacatcaaacgggagttacatagtcaacagttcacgccggtttcagaataccctagattccaaacttttccaaacagcaaggatgtcagcatcaactttaagatactatggttttggacttgaaaatggggactacacagtcacacttcaatttggagaatttgactttgaagatttacaaacttggaagagcgttgggagaagggttttcgatatctatctccagggtgagcgtaaggagcagaactttaacataaagaaggcagcaaaagaagctggcgaagcaagcacatcgtacactgctgtcaagaaacaatatactgtacctgtcacaaaaaacatcctagaaattcatctcttttgggctggaaagggcacttgttgcatccctaatcaaggcgattatgggcctacaatatcagctttgagtgcaactctaaatacaaaaaagaagggtaataaaataggtgtaattattggagtcgtgattggtgcaacagttttaggactagcaatacttgctacactctgtgtgtggaggcacaaaaggagaaaagtatcactagagcagcaagagctctacaatattgttcgaatacctaatgtattctgttacacttatggtgaactaaggaccgctactgaaaattttagttctgctaatcttcttggtgaagggggatatggatcagtttataagggtaaattagttgatggcagtgtggtggcaattaaacaactatctgaaacatctcgccaagggaagaaggaattcgtagctgaaatagaaactatttcccgagtgcagcaccgtaatcttgtgaagttgtttggtttttgccttgagggaaataaaccacttttggtttatgagtacatggagagtggaagccttgataaagcattgtttggaaatggaagattgaacttgaattggtcaacacgatataaaatatgcttggggattgcaagaggcttagcttatctccacgaagagtctagcatccgcattgtgcatagggacataaaggccagcaatgtattacttgatgccactttgaaccctaagatttcggatttcgggctcgccaaactttatgacgataaaaagacacatgttagcacaaaagttgctggtacatttggctatctttcacctgagtacgccatgagaggtcacatgactgagaaagttgatatttttgcttttggtgtggtcatgttggagattattgctggaaggccgaactatgatggtaagcttgaccaagacatggcttatcttttagaatgggtctggcaactttacgaggaagaccatccgctggacattgcggatcccaagctcacagaattcgatagtgtcgagttgctccgtgccatccgcatcgccctcctctgcatccagagctcacctcgtcaaaggccatccatgtcgagagtggtgtcaatgctcacaggagacagcgaggcgcctgaggcagtgtccaagcctagctatgttgccgaatggcagagcaacactgaagggacgtcaagctcagtgtccacagcagaggctgtgtccgtggctccattcctaaaccccgttgtggacgatggccggtgatgatggccatcgctaagatcatcttatgtcaagcactcaagccacagattgttttcttggagatccacctttaaaggccccattatttaggttgaatgtggatgacagatttatgttgttgactggatgagatgtcctagggtttcctcacgttgtagaatacaactctcacaagtataagaatctaggaacatattccttcgatgtaacatacctcttttgtttaatctgttttgtaagagaaaccagaagaacaccttgtatttcggttgatattttgaaacccacagccaattgaatgctgggtgtgtaggcatatatatgaccaataggttgattgtaagctttactacaatagtggggcggtctcgaagtatattgccagatatgttgcagttcattttctaacacgagaaacccttgatatgctcgaacagaaagcaacaactga

SEQ ID NO: 17842 - DNA, 3955 bp, Zea Mays
atggagagtgcttttaagcaaatgaaaggggaatttgttggtttgctaattagaagggaggttatgcagggcaggttctcctcatttctgcttttttgggtcgaaccacgtggagtaatacctctggagctcagtggctgcatcagccaggtgtggtcgccatggttcaaaggcgacccgtgcgtcggcgcggccacggacggcacgtccatctacgccgacaaaatgaacccgggcatcaagtgcgactgctccgaccacaacaacaccatctgccacattaccgagctgaaaatgaacaaactggatgtggttggtcctatacctgaggagctgaggaacctcagccacttgacaactctgaatttacaacagaattacttaacagggcctttgccatcgttccttggagaattaactgctttgcagcagatgtcgctttctggcaatgcattatcaggaactattccaaaggagctggggaaccttgtgaatctcataatcctgagtttaggcacgaacaatttaactggctcccttccttctgaattgggtaacctggttaaactagagcatatgtacattgatagtgctggcttaagtggtcctataccatcatcattttcgaaacttacacgattgaaaacattgtgcgcatcagataatgactttactgggaaaataccagattacattggaagctggagtaatttaacagatttgcggtttcaaggcaattcattccaaggtccacttccaagcactcttgctaatcttgttcagctaacaagcttacgaataggtgacattgtaactgggagttcttcgctggcattcatcagtaacatgacatctttgaacttattgtattcccaattaatcattcactttatgaatcaaactgcgccttcatttgctccattgtaaccgagttgttatatacttaaattggtgacattattcattgcagaattttaaggaattgcaggatatttggtactttggcattagtgaacttttcaaaatttacaggattaacattattggatttgagttttaataatatcataggtgaagtaccacaagctctactaaatatgaattcactcaccttgttatttcttgggaacaatagtcttacaggaggccttccaagctctataggaccttctattaagtacttagacttttcctacaactacctctcaggaaaccttccttcttgggctagtcataatttgcaattgtaagtattaagttatgtaatttattgttggtcaaccgaacttttagcccaattgtcttttcaaagcataatgtagcccaacttgaaatatatgcttatagtacatgtatttattaaaatatatttttgaatgttcaatacatctaaaaaaacttgtgttgaggcatttagcttatatttctttttagatttgttgcattttgaagcaacctattattctgaatctttgaagaagtagacatacattcccttactgcttaactccaaaaaggcaaaaaaaaagtttgttgctttagtgtatcttgattctaggaaataaacacactgttaatatgctccaagtccaaagacctctcaagttttttgcgtgtctcattatgcatagaaatttggtggcaaactacttcgtgatcaacaagtccaaagatagtgtcttacctgcggggctggagtgccttcagcgaaacacgtcatgctttcttggctctccacaatcttcctcctttactgtagactgtgggagtagtagatctgtatttgcttcagataattccatgtatcaacctgatgatgccaatcttggtgttgcatcatattatatttcaagcccaccaagatggggtgttagtaatgtcgggagattcatggatacatcaaacgggagttacatagtcaacagttcacgccggtttcagaataccctagattccaaacttttccaaacagcaaggatgtcagcatcaactttaagatactatggttttggacttgaaaatggggactacacagtcacacttcaatttggagaatttgactttgaagatttacaaacttggaagagcgttgggagaagggttttcgatatctatctccagggtgagcgtaaggagcagaactttaacataaagaaggcagcaaaagaagctggcgaagcaagcacatcgtacactgctgtcaagaaacaatatactgtacctgtcacaaaaaacatcctagaaattcatctcttttgggctggaaagggcacttgttgcatccctaatcaaggcgattatgggcctacaatatcagctttgagtgcaactctaaatacaaaaaagaagggtaataaaataggtgtaattattggagtcgtgattggtgcaacagttttaggactagcaatacttgctacactctgtgtgtggaggcacaaaaggagaaaagtatcactagagcagcaagagctctacaatattgttcgaatacctaatgtattctgttacacttatggtgaactaaggaccgctactgaaaattttagttctgctaatcttcttggtgaagggggatatggatcagtttataagggtaaattagttgatggcagtgtggtggcaattaaacaactatctgaaacatctcgccaagggaagaaggaattcgtagctgaaatagaaactatttcccgagtgcagcaccgtaatcttgtgaagttgtttggtttttgccttgagggaaataaaccacttttggtttatgagtacatggagagtggaagccttgataaagcattgtttggaaatggaagattgaacttgaattggtcaacacgatataaaatatgcttggggattgcaagaggcttagcttatctccacgaagagtctagcatccgcattgtgcatagggacataaaggccagcaatgtattacttgatgccactttgaaccctaagatttcggatttcgggctcgccaaactttatgacgataaaaagacacatgttagcacaaaagttgctggtacatttggctatctttcacctgagtacgccatgagaggtcacatgactgagaaagttgatatttttgcttttggtgtggtcatgttggagattattgctggaaggccgaactatgatggtaagcttgaccaagacatggcttatcttttagaatgggtctggcaactttacgaggaagaccatccgctggacattgcggatcccaagctcacagaattcgatagtgtcgagttgctccgtgccatccgcatcgccctcctctgcatccagagctcacctcgtcaaaggccatccatgtcgagagtggtgtcaatgctcacaggagacagcgaggcgcctgaggcagtgtccaagcctagctatgttgccgaatggcagagcaacactgaagggacgtcaagctcagtgtccacagcagaggctgtgtccgtggctccattcctaaaccccgttgtggacgatggccggtgatgatggccatcgctaagatcatcttatgtcaagcactcaagccacagattgttttcttggagatccacctttaaaggccccattatttaggttgaatgtggatgacagatttatgttgttgactggatgagatgtcctagggtttcctcacgttgtagaatacaactctcacaagtataagaatctaggaacatattccttcgatgtaacatacctcttttgtttaatctgttttgtaagagaaaccagaagaacaccttgtatttcggttgatattttgaaacccacagccaattgaatgctgggtgtgtaggcatatatatgaccaataggttgattgtaagctttactacaatagtggggcggtctcgaagtatattgccagatatgttgcagttcattttctaacacgagaaacccttgatatgctcgaacagaaagcaacaactga

SEQ ID NO: 17843 - DNA, 3895 bp, Zea Mays
gctttggactccggctccctccaccagcgctccaaaggacaagctcactcatatgcttcatcaacgttgtgcttgattcacaatgcaaaagcttctgcgtggtagcctgatagccagagttctcctcatttctgcttttttgggtcgaaccacgtggagtaatacctctggagctcagtggctgcatcagccagcttttggatccccacgctcccccacccattcttctgtaatgcggtgttctccaagctcgggctgcaggtgtggtcgccatggttcaaaggcgacccgtgcgtcggcgcggccacggacggcacgtccatctacgccgacaaaatgaacccgggcatcaagtgcgactgctccgaccacaacaacaccatctgccacattaccgagctgaaaatgaacaaactggatgtggttggtcctatacctgaggagctgaggaacctcagccacttgacaactctgaatttacaacagaattacttaacagggcctttgccatcgttccttggagaattaactgctttgcagcagatgtcgctttctggcaatgcattatcaggaactattccaaaggagctggggaaccttgtgaatctcataatcctgagtttaggcacgaacaatttaactggctcccttccttctgaattgggtaacctggttaaactagagcatatgtacattgatagtgctggcttaagtggtcctataccatcatcattttcgaaacttacacgattgaaaacattgtgcgcatcagataatgactttactgggaaaataccagattacattggaagctggagtaatttaacagatttgcggtttcaaggcaattcattccaaggtccacttccaagcactcttgctaatcttgttcagctaacaagcttacgaataggtgacattgtaactgggagttcttcgctggcattcatcagtaacatgacatctttgaacttattgtattcccaattaatcattcactttatgaatcaaactgcgccttcatttgctccattgtaaccgagttgttatatacttaaattggtgacattattcattgcagaattttaaggaattgcaggatatttggtactttggcattagtgaacttttcaaaatttacaggattaacattattgtaaggcatttcgtttcttccaaattttttgttaaatctgctttgtgcaagatgcttcctatggatatgcatcgcgagatgtttcctttcacacatattctcgtcttttacttacttatgcagggatttgagttttaataatatcataggtgaagtaccacaagctctactaaatatgaattcactcaccttgttgtatgttttgtatccctttcaatgcttattttgggggcataatgaatttcattgtttatcttgctaattgtagcacatgcattccgatcagatttcttgggaacaatagtcttacaggaggccttccaagctctataggaccttctattaagtacttagacttttcctacaactacctctcaggaaaccttccttcttgggctagtcataatttgcaattaaatttggtggcaaactacttcgtgatcaacaagtccaaagatagtgtcttacctgcggggctggagtgccttcagcgaaacacgtcatgctttcttggctctccacaatcttcctcctttactgtagactgtgggagtagtagatctgtatttgcttcagataattccatgtatcaacctgatgatgccaatcttggtgttgcatcatattatatttcaagcccaccaagatggggtgttagtaatgtcgggagattcatggatacatcaaacgggagttacatagtcaacagttcacgccggtttcagaataccctagattccaaacttttccaaacagcaaggatgtcagcatcaactttaagatactatggttttggacttgaaaatggggactacacagtcacacttcaatttggagaatttgactttgaagatttacaaacttggaagagcgttgggagaagggttttcgatatctatctccagggtgagcgtaaggagcagaactttaacataaagaaggcagcaaaagaagctggcgaagcaagcacatcgtacactgctgtcaagaaacaatatactgtacctgtcacaaaaaacatcctagaaattcatctcttttgggctggaaagggcacttgttgcatccctaatcaaggcgattatgggcctacaatatcagctttgagtgcaactctaaatacaaaaaagaagggtaataaaataggtgtaattattggagtcgtgattggtgcaacagttttaggactagcaatacttgctacactctgtgtgtggaggcacaaaaggagaaaagtatcactagagcagcaagagctctacaatattgttcgaatacctaatgtattctgttacacttatggtgaactaaggaccgctactgaaaattttagttctgctaatcttcttggtgaagggggatatggatcagtttataagggtaaattagttgatggcagtgtggtggcaattaaacaactatctgaaacatctcgccaagggaagaaggaattcgtagctgaaatagaaactatttcccgagtgcagcaccgtaatcttgtgaagttgtttggtttttgccttgagggaaataaaccacttttggtttatgagtacatggagagtggaagccttgataaagcattgtttggaaatggaagattgaacttgaattggtcaacacgatataaaatatgcttggggattgcaagaggcttagcttatctccacgaagagtctagcatccgcattgtgcatagggacataaaggccagcaatgtattacttgatgccactttgaaccctaagatttcggatttcgggctcgccaaactttatgacgataaaaagacacatgttagcacaaaagttgctggtacatttggctatctttcacctgagtacgccatgagaggtcacatgactgagaaagttgatatttttgcttttggtgtggtcatgttggagattattgctggaaggccgaactatgatggtaagcttgaccaagacatggcttatcttttagaatgggtctggcaactttacgaggaagaccatccgctggacattgcggatcccaagctcacagaattcgatagtgtcgagttgctccgtgccatccgcatcgccctcctctgcatccagagctcacctcgtcaaaggccatccatgtcgagagtggtgtcaatgctcacaggagacagcgaggcgcctgaggcagtgtccaagcctagctatgttgccgaatggcagagcaacactgaagggacgtcaagctcagtgtccacagcagaggctgtgtccgtggctccattcctaaaccccgttgtggacgatggccggtgatgatggccatcgctaagatcatcttatgtcaagcactcaagccacagattgttttcttggagatccacctttaaaggccccattatttaggttgaatgtggatgacagatttatgttgttgactggatgagatgtcctagggtttcctcacgttgtagaatacaactctcacaagtataagaatctaggaacatattccttcgatgtaacatacctcttttgtttaatctgttttgtaagagaaaccagaagaacaccttgtatttcggttgatattttgaaacccacagccaattgaatgctgggtgtgtaggcatatatatgaccaataggttgattgtaagctttactacaatagtggggcggtctcgaagtatattgccagatatgttgcagttcattttctaacacgagaaacccttgatatgctcgaacagaaagcaacaactga

SEQ ID NO: 17844 - DNA, 3698 bp, Zea Mays
ctcggggctccgacgacagccgctttggactccggctccctccaccagcgctccaaaggacaagctcactcatatgcttcatcaacgttgtgcttgattcacaatgcaaaagcttctgcgtggtagcctgatagccagagttctcctcatttctgcttttttgggtcgaaccacgtggagtaatacctctggagctcagtggctgcatcagccagcttttggatccccacgctcccccacccattcttctgtaatgcggtgttctccaagctcgggctgcaggtgtggtcgccatggttcaaaggcgacccgtgcgtcggcgcggccacggacggcacgtccatctacgccgacaaaatgaacccgggcatcaagtgcgactgctccgaccacaacaacaccatctgccacattaccgagctgaaaatgaacaaactggatgtggttggtcctatacctgaggagctgaggaacctcagccacttgacaactctgaatttacaacagaattacttaacagggcctttgccatcgttccttggagaattaactgctttgcagcagatgtcgctttctggcaatgcattatcaggaactattccaaaggagctggggaaccttgtgaatctcataatcctgagtttaggcacgaacaatttaactggctcccttccttctgaattgggtaacctggttaaactagagcatatgtacattgatagtgctggcttaagtggtcctataccatcatcattttcgaaacttacacgattgaaaacattgtgcgcatcagataatgactttactgggaaaataccagattacattggaagctggagtaatttaacagatttgcggtttcaaggcaattcattccaaggtccacttccaagcactcttgctaatcttgttcagctaacaagcttaattttaaggaattgcaggatatttggtactttggcattagtgaacttttcaaaatttacaggattaacattattggatttgagttttaataatatcatagcacatgcattccgatcagatttcttgggaacaatagtcttacaggaggccttccaagctctataggaccttctattaagtacttagacttttcctacaactacctctcaggaaaccttccttcttgggctagtcataatttgcaattaaatttggtggcaaactacttcgtgatcaacaagtccaaagatagtgtcttacctgcggggctggagtgccttcagcgaaacacgtcatgctttcttggctctccacaatcttcctcctttactgtagactgtgggagtagtagatctgtatttgcttcagataattccatgtatcaacctgatgatgccaatcttggtgttgcatcatattatatttcaagcccaccaagatggggtgttagtaatgtcgggagattcatggatacatcaaacgggagttacatagtcaacagttcacgccggtttcagaataccctagattccaaacttttccaaacagcaaggatgtcagcatcaactttaagatactatggttttggacttgaaaatggggactacacagtcacacttcaatttggagaatttgactttgaagatttacaaacttggaagagcgttgggagaagggttttcgatatctatctccagggtgagcgtaaggagcagaactttaacataaagaaggcagcaaaagaagctggcgaagcaagcacatcgtacactgctgtcaagaaacaatatactgtacctgtcacaaaaaacatcctagaaattcatctcttttgggctggaaagggcacttgttgcatccctaatcaaggcgattatgggcctacaatatcagctttgagtgcaactctaagtattctcttttgatacaatcatggctttaatattgttcagataatgtccttacgttcaacaatttcattatatacaatttctaccacgagaagtactgaagactaaaaagactggaattttagaaatgcctaacataaaagccaaatattgtttatattgatgtataatcatgctttctaacaaatgcctctcctacagatacaaaaaagaagggtaataaaataggtgtaattattggagtcgtgattggtgcaacagttttaggactagcaatacttgctacactctgtgtgtggaggcacaaaaggagaaaagtatcactagagcagcaagagctctacaatattgttcgaatacctaatgtattctgttacacttatggtgaactaaggaccgctactgaaaattttagttctgctaatcttcttggtgaagggggatatggatcagtttataagggtaaattagttgatggcagtgtggtggcaattaaacaactatctgaaacatctcgccaagggaagaaggaattcgtagctgaaatagaaactatttcccgagtgcagcaccgtaatcttgtgaagttgtttggtttttgccttgagggaaataaaccacttttggtttatgagtacatggagagtggaagccttgataaagcattgtttggaaatggaagattgaacttgaattggtcaacacgatataaaatatgcttggggattgcaagaggcttagcttatctccacgaagagtctagcatccgcattgtgcatagggacataaaggccagcaatgtattacttgatgccactttgaaccctaagatttcggatttcgggctcgccaaactttatgacgataaaaagacacatgttagcacaaaagttgctggtacatttggctatctttcacctgagtacgccatgagaggtcacatgactgagaaagttgatatttttgcttttggtgtggtcatgttggagattattgctggaaggccgaactatgatggtaagcttgaccaagacatggcttatcttttagaatgggtctggcaactttacgaggaagaccatccgctggacattgcggatcccaagctcacagaattcgatagtgtcgagttgctccgtgccatccgcatcgccctcctctgcatccagagctcacctcgtcaaaggccatccatgtcgagagtggtgtcaatgctcacaggagacagcgaggcgcctgaggcagtgtccaagcctagctatgttgccgaatggcagagcaacactgaagggacgtcaagctcagtgtccacagcagaggctgtgtccgtggctccattcctaaaccccgttgtggacgatggccggtgatgatggccatcgctaagatcatcttatgtcaagcactcaagccacagattgttttcttggagatccacctttaaaggccccattatttaggttgaatgtggatgacagatttatgttgttgactggatgagatgtcctagggtttcctcacgttgtagaatacaactctcacaagtataagaatctaggaacatattccttcgatgtaacatacctcttttgtttaatctgttttgtaagagaaaccagaagaacaccttgtatttcggttgatattttgaaacccacagccaattgaatgctgggtgtgtaggcatatatatgaccaataggttgattgtaagctttactacaatagtggggcggtctcgaagtatattgccagatatgttgcagttcattttctaacacgagaaacccttgatatgctcgaacagaaagcaacaactga

SEQ ID NO: 17845 - DNA, 4101 bp, Zea Mays
cccgctcgctcggggctccgacgacagccgctttggactccggctccctccaccagcgctccaaaggacaagctcactcatatgcttcatcaacgttgtgcttgattcacaatgcaaaagcttctgcgtggtagcctgatagccagagttctcctcatttctgcttttttgggtcgaaccacgtggagtaatacctctggagctcagtggctgcatcagccaggtgtggtcgccatggttcaaaggcgacccgtgcgtcggcgcggccacggacggcacgtccatctacgccgacaaaatgaacccgggcatcaagtgcgactgctccgaccacaacaacaccatctgccacattaccgagctgaaaatgaacaaactggatgtggttggtcctatacctgaggagctgaggaacctcagccacttgacaactctgaatttacaacagaattacttaacagggcctttgccatcgttccttggagaattaactgctttgcagcagatgtcgctttctggcaatgcattatcaggaactattccaaaggagctggggaaccttgtgaatctcataatcctgagtttaggcacgaacaatttaactggctcccttccttctgaattgggtaacctggttaaactagagcatatgtacattgatagtgctggcttaagtggtcctataccatcatcattttcgaaacttacacgattgaaaacattgtgcgcatcagataatgactttactgggaaaataccagattacattggaagctggagtaatttaacagatttgcggtttcaaggcaattcattccaaggtccacttccaagcactcttgctaatcttgttcagctaacaagcttacgaataggtgacattgtaactgggagttcttcgctggcattcatcagtaacatgacatctttgaacttattgtattcccaattaatcattcactttatgaatcaaactgcgccttcatttgctccattgtaaccgagttgttatatacttaaattggtgacattattcattgcagaattttaaggaattgcaggatatttggtactttggcattagtgaacttttcaaaatttacaggattaacattattggatttgagttttaataatatcatagcacatgcattccgatcagatttcttgggaacaatagtcttacaggaggccttccaagctctataggaccttctattaagtacttagacttttcctacaactacctctcaggaaaccttccttcttgggctagtcataatttgcaattaaatttggtggcaaactacttcgtgatcaacaagtccaaagatagtgtcttacctgcggggctggagtgccttcagcgaaacacgtcatgctttcttggctctccacaatcttcctcctttactgtagactgtgggagtagtagatctgtatttgcttcagataattccatgtatcaacctgatgatgccaatcttggtgttgcatcatattatatttcaagcccaccaagatggggtgttagtaatgtcgggagattcatggatacatcaaacgggagttacatagtcaacagttcacgccggtttcagaataccctagattccaaacttttccaaacagcaaggatgtcagcatcaactttaagatactatggttttggacttgaaaatggggactacacagtcacacttcaatttggagaatttgactttgaagatttacaaacttggaagagcgttgggagaagggttttcgatatctatctccagggtgagcgtaaggagcagaactttaacataaagaaggcagcaaaagaagctggcgaagcaagcacatcgtacactgctgtcaagaaacaatatactgtacctgtcacaaaaaacatcctagaaattcatctcttttgggctggaaagggcacttgttgcatccctaatcaaggcgattatgggcctacaatatcagctttgagtgcaactctaagtattctcttttgatacaatcatggctttaatattgttcagataatgtccttacgttcaacaatttcattatatacaatttctaccacgagaagtactgaagactaaaaagactggaattttagaaatgcctaacataaaagccaaatattgtttatattgatgtataatcatgctttctaacaaatgcctctcctacagatacaaaaaagaagggtaataaaataggtgtaattattggagtcgtgattggtgcaacagttttaggactagcaatacttgctacactctgtgtgtggaggcacaaaaggagaaaagtatcactagagcagcaagagctctacaatattgttcgaatacctaatgtattctgttacacttatggtgaactaaggaccgctactgaaaattttagttctgctaatcttcttggtgaagggggatatggatcagtttataaggtttgttcatttgtagtacacaatgcatgatttgaatctgctagggatcttttgtggcactgtaggttaatagtgaacaacgaatttgttttcattgtgcaaatttggctagagttgtgttgtttaattctactttgttcaatgaaaattccttttatcatttactcatttaacgtacttctccaattatcttactaacatcagtgcataataaatctgggatattccctgttattttccttttccccctgttttgcacgtggtcagtaaaatgagattgattgggtactctagtgcatttactctattacatgatattgattttacttggtgcttataactcttttttagaaaaattcaccttctggcagggtaaattagttgatggcagtgtggtggcaattaaacaactatctgaaacatctcgccaagggaagaaggaattcgtagctgaaatagaaactatttcccgagtgcagcaccgtaatcttgtgaagttgtttggtttttgccttgagggaaataaaccacttttggtttatgagtacatggagagtggaagccttgataaagcattgtttggaaatggaagattgaacttgaattggtcaacacgatataaaatatgcttggggattgcaagaggcttagcttatctccacgaagagtctagcatccgcattgtgcatagggacataaaggccagcaatgtattacttgatgccactttgaaccctaagatttcggatttcgggctcgccaaactttatgacgataaaaagacacatgttagcacaaaagttgctggtacattattattgctggaaggccgaactatgatggtaagcttgaccaagacatggcttatcttttagaatgggtctggcaactttacgaggaagaccatccgctggacattgcggatcccaagctcacagaattcgatagtgtcgagttgctccgtgccatccgcatcgccctcctctgcatccagagctcacctcgtcaaaggccatccatgtcgagagtggtgtcaatgctcacaggagacagcgaggcgcctgaggcagtgtccaagcctagctatgttgccgaatggcagagcaacactgaagggacgtcaagctcagtgtccacagcagaggctgtgtccgtggctccattcctaaaccccgttgtggacgatggccggtgatgatggccatcgctaagatcatcttatgtcaagcactcaagccacagattgttttcttggagatccacctttaaaggccccattatttaggttgaatgtggatgacagatttatgttgttgactggatgagatgtcctagggtttcctcacgttgtagaatacaactctcacaagtataagaatctaggaacatattccttcgatgtaacatacctcttttgtttaatctgttttgtaagagaaaccagaagaacaccttgtatttcggttgatattttgaaacccacagccaattgaatgctgggtgtgtaggcatatatatgaccaataggttgattgtaagctttactacaatagtggggcggtctcgaagtatattgccagatatgttgcagttcattttctaacacgagaaacccttgatatgctcgaacagaaagcaacaactga

SEQ ID NO: 17846 - DNA, 4391 bp, Zea Mays
cgagcgagtacggatactcgtgtctgcgctgcgcaccgagctgagacacgtcgtattcaaagggagaggccgcaaggcaccgagtcgagccgctgctcgagcagacagggacgcaaacgcaaggagacgatgaggcctggatcgacccccggaccatcttcgcgccggtgcatccatggctccgccgccgcgctcccaacgctgctgctgctgcttcttcttcttctggctgcatcgtccgcgcaagctcagcaaacgtcaaggatgaagaccgatccagtcgaaggaagatatacgcactcaatgcatttggccccataccacaggaactgcagaacctcacgcgcttgaccaatctgaatttagcacaaaattacttaaccgggcctttgccatctttcctcgggaatttgactgctatgcagtacatgagtttgggcatcaatgcattgtctggatctgttccaaaggagcttgggaaccttgtgaatcttgtatctctaggcattggctcgaactacttaaatggttcccttccttcggagttgggaaacctggcaaaacttgagcaattgtatattgacagtgccggcctaagtggtcccctaccgtcatcgttttctagactaacaagaatgaagacactgtgggcatcagataatgattttactggggaaataccagattatattgggagctggactaatttaacagaactaattttgaggaattgcaggatatctgatagcctggcatcagtgaacttttcacagtttgcaaagttaaacttattggatttgagttttaacaatatcacaggccaagttccagaagcccttgtgaaattgaattcactcagcttcttatttctcggtaataatagtctttcaggaagcctgccgagctctataggaacttctcttaaaaatttagatttttcttacaaccagctgtcaggcaactttccttcttggactactcagaacaatttgcaactgtgagtattgatttctgaaacttcaaatgaccaccttgtattaccttcagggctgtcgtgtcttcagagagacacaccctgttttcttggctctccacaatctgcctctcttgctgtggactgtgggagcagtagatctatatctgggtatcaacctgatgctgccagtcttggtgctgcatcctattatgttacaggagcacaaacgtggggtgttagcaatgtaggcaagttcatggaagcatcaaatggaagttacataatttacagcttacaccaatttcagaacactctagattcagaactattccagacagcaaggatgtcgccatcatctttgagatactacggtattggactcgagaatggaaactacacagtcacacttcaatttgcagagtttgactttgaagattcacaaacttggaagagtgttgggagaagggttttcgatatctatctccagggcgagcgtaaggagaagaactttgacataaggaaggcatcaggggggaaatcttacactgctgtcgagaagcagtatattgttcctgtcactagaaactttcttgagattcatcttttctgggctggcaagggcacttgttgcattcctgctcaaggctactacgggcctgcaatctcagctttgagtgcaactccaaattttacccctacagtgcgtaattctgcacagaagaagaacagtagtaaaacaggtgtaattgttggggttgtgattggtgcagcagttttaggagtactagcacttgctggaatctgtatgtggaggcagaaaaggagaaaactattattggagcaacaagagctttacagtattgttggaagacccaatgtatttgtttatggtgagctaaggaccgctactgaaaattttagttccaataaccttcttggtgaaggaggatatgggtcagtttataagggtaaattagctgatggaagggtggtggctgtaaaacagttatctgaaacatctcatcagggaaaacagcaatttgcagccgaaatagaaactatttctcgagtgcaacaccgtaatcttgtgaagttgtatggttgctgtcttgaaggaaataaaccactgttagtttatgagtacctagagaatggaagccttgataaagcattgtttggaaacgggaaactgaacctagactggccaacacgctttgagatatgcttaggcattgcaagaggcctcgcttatctccatgaagagtctagcatccgtgttgtgcatagggacataaaggctagcaatgtcttgcttgatgcaaatctcaaccctaagatctcggatttcgggctcgccaaactttacgatgacaagaagactcatgtcagcaccaaagttgcgggtacatttggttatcttgcacccgagtacgccatgaggggtcatatgaccgagaaagttgatgtgtttgcatttggagtggtcatattggagactctagctggaaggccaaactttgacaatacgcttgatgaagacaaggtttacattttagaatgggtctggcaactgtacgaagaaaaccaccctctggacatgctcgacccgaagctcgcagaattcaacagcgacgaggtgctccgtgccatccacgtggccctcctctgcacccagggctcgccgcaccagcgcccgtccatgtcacgggccgtgtcgattctggcgggagacgtggaggtgggccaggtggcgaacaaacccagctacatcaccgagtggcagatcaagggcggcaacaccagcagcttcatgagcagcaacgtcagtgggcagtcgggcgtggcgccgaggtcggcctcgcacgcctcgtcgcagttcctgggctctgtcatcgaagaaggccggtgatgatgagtagcaagttttctcaagcgacggactgttccttgtaattaaacgcacgcacgttacaaaaggctctcggattatctggttttgacctttttcgttttccttttgaaaattttcggtttgatttcgatttgtgcagttggaatttgtatgcaaatgatgatattggatggttaagtctatttgtaattttggatgttttgaggtgtgtgtgtatatatatgatgtgatctgcaagaactaagtcacaattagatattgttgttatattaattttcggtcacgcatagtattcatactgtagttagcgggaaaatcccaatttatacagttaaaatgcgcgttacatatttttttttgtgtgtggatggacaacacacaactgaccgaccgacagactgaagatcagctttatttgaacggtcgagctgagtgaggtactgaggtaggactaggagggtggaagcggaagatagagagagatgatgacgatgacgaggtgctcttgctgcgtccatggcgctgctgtgtcgacgtccatgccgctgctgttgtttcttgtactagtcgcattcgcaaccgccggggctcagcaagtatcaaccaagaggacagatccaaccgaaggtaatcgataagtccgtttcatcattcgttttcttttggttgcaaatgtaggagggagaggagaaagggcgaaaatataacaacgcgccagtgaaaggctttgatctaaatcaaagtttttaagaccttaaggactagtttggaaacctcaatttttcaagtaatttctatttttctacgagaaaatgaaataatttctcatagaaaataaaaatcacttgaaaatttgtggttcccaaatcccaaactagccctaaaaatacttcctctatagtaaaatatagttatgtatagttatcttttttgtcatatatatatatatatatatatatatatatatatatatatatatatatatatatatatatattacattcgtcagttaacagttaattaatatatatatatactaggtaaatactcgtgcgttgcaacagggtaaaaatagtgcaactataacatatgtatggacatgtgttgtgcagaaaacaagcaaatcactgtgataaactcataatgacttgtcaccttgttcgaagaggaaaaggtgatccttagtcttacagctttaagaagagaaccatacatgtagcaccgcattactccaataatgaaacaggtgtaggattatgttgtctctgtctgggaaagacatgtgcaaagattaaaaacttcatttcatcactaagaaaaagcataaaagtgattaagaacactaccatcatagatctcttgattttcaagatcactgaggacctcgtaagcctgagttagctcctagaactaaaacaaattcatgagttcttagttttcatcacaatcataaaccaacagccccaatcgaccatttatacaaccttacaactaaacattgtc

SEQ ID NO: 17847 - DNA, 4585 bp, Zea Mays
ggttgagcgagcgagtacggatactcgtgtctgcgctgcgcaccgagctgagacacgtcgtattcaaagggagaggccgcaaggcaccgagtcgagccgctgctcgagcagacagggacgcaaacgcaaggagacgatgaggcctggatcgacccccggaccatcttcgcgccggtgcatccatggctccgccgccgcgctcccaacgctgctgctgctgcttcttcttcttctggctgcatcgtccgcgcaagctcagcaaacgtcaaggatgaagaccgatccagtcgaagcggcggcggtgaacgcggtgttcgccaagctcggccaggcggctacgtcggcatggaacatcagtggcgacccctgcacaggcgccgccacggacggcacgaacatcgacaacgaccccactttcaacccggccatcaagtgcgagtgctccgtccagaacaaccgcaccgtctgccacgtcaccaagctgaagatatacgcactcaatgcatttggccccataccacaggaactgcagaacctcacgcgcttgaccaatctgaatttagcacaaaattacttaaccgggcctttgccatctttcctcgggaatttgactgctatgcagtacatgagtttgggcatcaatgcattgtctggatctgttccaaaggagcttgggaaccttgtgaatcttgtatctctaggcattggctcgaactacttaaatggttcccttccttcggagttgggaaacctggcaaaacttgagcaattgtatattgacagtgccggcctaagtggtcccctaccgtcatcgttttctagactaacaagaatgaagacactgtgggcatcagataatgattttactggggaaataccagattatattgggagctggactaatttaacagaactaattttgaggaattgcaggatatctgatagcctggcatcagtgaacttttcacagtttgcaaagttaaacttattggatttgagttttaacaatatcacaggccaagttccagaagcccttgtgaaattgaattcactcagcttcttatttctcggtaataatagtctttcaggaagcctgccgagctctataggaacttctcttaaaaatttagatttttcttacaaccagctgtcaggcaactttccttcttggactactcagaacaatttgcaactgaacttggtggcaaacaatttcgagacgaatagtgtattaccttcagggctgtcgtgtcttcagagagacacaccctgttttcttggctctccacaatctgcctctcttgctgtggactgtgggagcagtagatctatatctgggtatcaacctgatgctgccagtcttggtgctgcatcctattatgttacaggagcacaaacgtggggtgttagcaatgtaggcaagttcatggaagcatcaaatggaagttacataatttacagcttacaccaatttcagaacactctagattcagaactattccagacagcaaggatgtcgccatcatctttgagatactacggtattggactcgagaatggaaactacacagtcacacttcaatttgcagagtttgactttgaagattcacaaacttggaagagtgttgggagaagggttttcgatatctatctccagggcgagcgtaaggagaagaactttgacataaggaaggcatcaggggggaaatcttacactgctgtcgagaagcagtatattgttcctgtcactagaaactttcttgagattcatcttttctgggctggcaagggcacttgttgcattcctgctcaaggctactacgggcctgcaatctcagctttgagtgcaactccaaattttacccctacagtgcgtaattctgcacagaagaagaacagtagtaaaacaggtgtaattgttggggttgtgattggtgcagcagttttaggagtactagcacttgctggaatctgtatgtggaggcagaaaaggagaaaactattattggagcaacaagagctttacagtattgttggaagacccaatgtatttgtttatggtgagctaaggaccgctactgaaaattttagttccaataaccttcttggtgaaggaggatatgggtcagtttataagggtaaattagctgatggaagggtggtggctgtaaaacagttatctgaaacatctcatcagggaaaacagcaatttgcagccgaaatagaaactatttctcgagtgcaacaccgtaatcttgtgaagttgtatggttgctgtcttgaaggaaataaaccactgttagtttatgagtacctagagaatggaagccttgataaagcattgtttggaaacgggaaactgaacctagactggccaacacgctttgagatatgcttaggcattgcaagaggcctcgcttatctccatgaagagtctagcatccgtgttgtgcatagggacataaaggctagcaatgtcttgcttgatgcaaatctcaaccctaagatctcggatttcgggctcgccaaactttacgatgacaagaagactcatgtcagcaccaaagttgcgggtacatttggttatcttgcacccgagtacgccatgaggggtcatatgaccgagaaagttgatgtgtttgcatttggagtggtcatattggagactctagctggaaggccaaactttgacaatacgcttgatgaagacaaggtttacattttagaatgggtctggcaactgtacgaagaaaaccaccctctggacatgctcgacccgaagctcgcagaattcaacagcgacgaggtgctccgtgccatccacgtggccctcctctgcacccagggctcgccgcaccagcgcccgtccatgtcacgggccgtgtcgattctggcgggagacgtggaggtgggccaggtggcgaacaaacccagctacatcaccgagtggcagatcaagggcggcaacaccagcagcttcatgagcagcaacgtcagtgggcagtcgggcgtggcgccgaggtcggcctcgcacgcctcgtcgcagttcctgggctctgtcatcgaagaaggccggtgatgatgagtagcaagttttctcaagcgacggactgttccttgtaattaaacgcacgcacgttacaaaaggctctcggattatctggttttgacctttttcgttttccttttgaaaattttcggtttgatttcgatttgtgcagttggaatttgtatgcaaatgatgatattggatggttaagtctatttgtaattttggatgttttgaggtgtgtgtgtatatatatgatgtgatctgcaagaactaagtcacaattagatattgttgttatattaattttcggtcacgcatagtattcatactgtagttagcgggaaaatcccaatttatacagttaaaatgcgcgttacatatttttttttgtgtgtggatggacaacacacaactgaccgaccgacagactgaagatcagctttatttgaacggtcgagctgagtgaggtactgaggtaggactaggagggtggaagcggaagatagagagagatgatgacgatgacgaggtgctcttgctgcgtccatggcgctgctgtgtcgacgtccatgccgctgctgttgtttcttgtactagtcgcattcgcaaccgccggggctcagcaagtatcaaccaagaggacagatccaaccgaaggtaatcgataagtccgtttcatcattcgttttcttttggttgcaaatgtaggagggagaggagaaagggcgaaaatataacaacgcgccagtgaaaggctttgatctaaatcaaagtttttaagaccttaaggactagtttggaaacctcaatttttcaagtaatttctatttttctacgagaaaatgaaataatttctcatagaaaataaaaatcacttgaaaatttgtggttcccaaatcccaaactagccctaaaaatacttcctctatagtaaaatatagttatgtatagttatcttttttgtcatatatatatatatatatatatatatatatatatatatatatatatatatatatatatatattacattcgtcagttaacagttaattaatatatatatatactaggtaaatactcgtgcgttgcaacagggtaaaaatagtgcaactataacatatgtatggacatgtgttgtgcagaaaacaagcaaatcactgtgataaactcataatgacttgtcaccttgttcgaagaggaaaaggtgatccttagtcttacagctttaagaagagaaccatacatgtagcaccgcattactccaataatgaaacaggtgtaggattatgttgtctctgtctgggaaagacatgtgcaaagattaaaaacttcatttcatcactaagaaaaagcataaaagtgattaagaacactaccatcatagatctcttgattttcaagatcactgaggacctcgtaagcctgagttagctcctagaactaaaacaaattcatgagttcttagttttcatcacaatcataaaccaacagccccaatcgaccatttatacaaccttacaactaaacattgtc

SEQ ID NO: 17848 - DNA, 4764 bp, Zea Mays
tggtggtaccacttgcaattgcaacgttcggtggttgagcgagcgagtacggatactcgtgtctgcgctgcgcaccgagctgagacacgtcgtattcaaagggagaggccgcaaggcaccgagtcgagccgctgctcgagcagacagggacgcaaacgcaaggagacgatgaggcctggatcgacccccggaccatcttcgcgccggtgcatccatggctccgccgccgcgctcccaacgctgctgctgctgcttcttcttcttctggctgcatcgtccgcgcaagctcagcaaacgtcaaggatgaagaccgatccagtcgaagcggcggcggtgaacgcggtgttcgccaagctcggccaggcggctacgtcggcatggaacatcagtggcgacccctgcacaggcgccgccacggacggcacgaacatcgacaacgaccccactttcaacccggccatcaagtgcgagtgctccgtccagaacaaccgcaccgtctgccacgtcaccaagctgaagatatacgcactcaatgcatttggccccataccacaggaactgcagaacctcacgcgcttgaccaatctgaatttagcacaaaattacttaaccgggcctttgccatctttcctcgggaatttgactgctatgcagtacatgagtttgggcatcaatgcattgtctggatctgttccaaaggagcttgggaaccttgtgaatcttgtatctctaggcattggctcgaactacttaaatggttcccttccttcggagttgggaaacctggcaaaacttgagcaattgtatattgacagtgccggcctaagtggtcccctaccgtcatcgttttctagactaacaagaatgaagacactgtgggcatcagataatgattttactggggaaataccagattatattgggagctggactaatttaacagaactgcggtttcaaggcaattcatttcaaggtccacttccagccactctttctaatctcgtccaactaacaagcttacgaataggtgacattgtaaatggaagttcttcaatgatattcatcagtaacatgacatctttgaacacattaattttgaggaattgcaggatatctgatagcctggcatcagtgaacttttcacagtttgcaaagttaaacttattggatttgagttttaacaatatcacaggccaagttccagaagcccttgtgaaattgaattcactcagcttcttatttctcggtaataatagtctttcaggaagcctgccgagctctataggaacttctcttaaaaatttagatttttcttacaaccagctgtcaggcaactttccttcttggactactcagaacaatttgcaactgtgagtattgatttctgaaacttcaaatgaccaccttgtattaccttcagggctgtcgtgtcttcagagagacacaccctgttttcttggctctccacaatctgcctctcttgctgtggactgtgggagcagtagatctatatctgggtatcaacctgatgctgccagtcttggtgctgcatcctattatgttacaggagcacaaacgtggggtgttagcaatgtaggcaagttcatggaagcatcaaatggaagttacataatttacagcttacaccaatttcagaacactctagattcagaactattccagacagcaaggatgtcgccatcatctttgagatactacggtattggactcgagaatggaaactacacagtcacacttcaatttgcagagtttgactttgaagattcacaaacttggaagagtgttgggagaagggttttcgatatctatctccagggcgagcgtaaggagaagaactttgacataaggaaggcatcaggggggaaatcttacactgctgtcgagaagcagtatattgttcctgtcactagaaactttcttgagattcatcttttctgggctggcaagggcacttgttgcattcctgctcaaggctactacgggcctgcaatctcagctttgagtgcaactccaaattttacccctacagtgcgtaattctgcacagaagaagaacagtagtaaaacaggtgtaattgttggggttgtgattggtgcagcagttttaggagtactagcacttgctggaatctgtatgtggaggcagaaaaggagaaaactattattggagcaacaagagctttacagtattgttggaagacccaatgtatttgtttatggtgagctaaggaccgctactgaaaattttagttccaataaccttcttggtgaaggaggatatgggtcagtttataagggtaaattagctgatggaagggtggtggctgtaaaacagttatctgaaacatctcatcagggaaaacagcaatttgcagccgaaatagaaactatttctcgagtgcaacaccgtaatcttgtgaagttgtatggttgctgtcttgaaggaaataaaccactgttagtttatgagtacctagagaatggaagccttgataaagcattgtttggaaacgggaaactgaacctagactggccaacacgctttgagatatgcttaggcattgcaagaggcctcgcttatctccatgaagagtctagcatccgtgttgtgcatagggacataaaggctagcaatgtcttgcttgatgcaaatctcaaccctaagatctcggatttcgggctcgccaaactttacgatgacaagaagactcatgtcagcaccaaagttgcgggtacatttggttatcttgcacccgagtacgccatgaggggtcatatgaccgagaaagttgatgtgtttgcatttggagtggtcatattggagactctagctggaaggccaaactttgacaatacgcttgatgaagacaaggtttacattttagaatgggtctggcaactgtacgaagaaaaccaccctctggacatgctcgacccgaagctcgcagaattcaacagcgacgaggtgctccgtgccatccacgtggccctcctctgcacccagggctcgccgcaccagcgcccgtccatgtcacgggccgtgtcgattctggcgggagacgtggaggtgggccaggtggcgaacaaacccagctacatcaccgagtggcagatcaagggcggcaacaccagcagcttcatgagcagcaacgtcagtgggcagtcgggcgtggcgccgaggtcggcctcgcacgcctcgtcgcagttcctgggctctgtcatcgaagaaggccggtgatgatgagtagcaagttttctcaagcgacggactgttccttgtaattaaacgcacgcacgttacaaaaggctctcggattatctggttttgacctttttcgttttccttttgaaaattttcggtttgatttcgatttgtgcagttggaatttgtatgcaaatgatgatattggatggttaagtctatttgtaattttggatgttttgaggtgtgtgtgtatatatatgatgtgatctgcaagaactaagtcacaattagatattgttgttatattaattttcggtcacgcatagtattcatactgtagttagcgggaaaatcccaatttatacagttaaaatgcgcgttacatatttttttttgtgtgtggatggacaacacacaactgaccgaccgacagactgaagatcagctttatttgaacggtcgagctgagtgaggtactgaggtaggactaggagggtggaagcggaagatagagagagatgatgacgatgacgaggtgctcttgctgcgtccatggcgctgctgtgtcgacgtccatgccgctgctgttgtttcttgtactagtcgcattcgcaaccgccggggctcagcaagtatcaaccaagaggacagatccaaccgaaggtaatcgataagtccgtttcatcattcgttttcttttggttgcaaatgtaggagggagaggagaaagggcgaaaatataacaacgcgccagtgaaaggctttgatctaaatcaaagtttttaagaccttaaggactagtttggaaacctcaatttttcaagtaatttctatttttctacgagaaaatgaaataatttctcatagaaaataaaaatcacttgaaaatttgtggttcccaaatcccaaactagccctaaaaatacttcctctatagtaaaatatagttatgtatagttatcttttttgtcatatatatatatatatatatatatatatatatatatatatatatatatatatatatatatattacattcgtcagttaacagttaattaatatatatatatactaggtaaatactcgtgcgttgcaacagggtaaaaatagtgcaactataacatatgtatggacatgtgttgtgcagaaaacaagcaaatcactgtgataaactcataatgacttgtcaccttgttcgaagaggaaaaggtgatccttagtcttacagctttaagaagagaaccatacatgtagcaccgcattactccaataatgaaacaggtgtaggattatgttgtctctgtctgggaaagacatgtgcaaagattaaaaacttcatttcatcactaagaaaaagcataaaagtgattaagaacactaccatcatagatctcttgattttcaagatcactgaggacctcgtaagcctgagttagctcctagaactaaaacaaattcatgagttcttagttttcatcacaatcataaaccaacagccccaatcgaccatttatacaaccttacaactaaacattgtc

SEQ ID NO: 17849 - DNA, 4794 bp, Zea Mays
gcatgcctcgttgaccgaacagcattgtagatagaaaaatagaggtggtggtaccacttgcaattgcaacgttcggtggttgagcgagcgagtacggatactcgtgtctgcgctgcgcaccgagctgagacacgtcgtattcaaagggagaggccgcaaggcaccgagtcgagccgctgctcgagcagacagggacgcaaacgcaaggagacgatgaggcctggatcgacccccggaccatcttcgcgccggtgcatccatggctccgccgccgcgctcccaacgctgctgctgctgcttcttcttcttctggctgcatcgtccgcgcaagctcagcaaacgtcaaggatgaagaccgatccagtcgaagcggcggcggtgaacgcggtgttcgccaagctcggccaggcggctacgtcggcatggaacatcagtggcgacccctgcacaggcgccgccacggacggcacgaacatcgacaacgaccccactttcaacccggccatcaagtgcgagtgctccgtccagaacaaccgcaccgtctgccacgtcaccaagctgaagatatacgcactcaatgcatttggccccataccacaggaactgcagaacctcacgcgcttgaccaatctgaatttagcacaaaattacttaaccgggcctttgccatctttcctcgggaatttgactgctatgcagtacatgagtttgggcatcaatgcattgtctggatctgttccaaaggagcttgggaaccttgtgaatcttgtatctctaggcattggctcgaactacttaaatggttcccttccttcggagttgggaaacctggcaaaacttgagcaattgtatattgacagtgccggcctaagtggtcccctaccgtcatcgttttctagactaacaagaatgaagacactgtgggcatcagataatgattttactggggaaataccagattatattgggagctggactaatttaacagaactgcggtttcaaggcaattcatttcaaggtccacttccagccactctttctaatctcgtccaactaacaagcttacgaataggtgacattgtaaatggaagttcttcaatgatattcatcagtaacatgacatctttgaacacattaattttgaggaattgcaggatatctgatagcctggcatcagtgaacttttcacagtttgcaaaggatttgagttttaacaatatcacaggccaagttccagaagcccttgtgaaattgaattcactcagcttcttatttctcggtaataatagtctttcaggaagcctgccgagctctataggaacttctcttaaaaatttagatttttcttacaaccagctgtcaggcaactttccttcttggactactcagaacaatttgcaactgaacttggtggcaaacaatttcgagacgaatagtgtattaccttcagggctgtcgtgtcttcagagagacacaccctgttttcttggctctccacaatctgcctctcttgctgtggactgtgggagcagtagatctatatctgggtatcaacctgatgctgccagtcttggtgctgcatcctattatgttacaggagcacaaacgtggggtgttagcaatgtaggcaagttcatggaagcatcaaatggaagttacataatttacagcttacaccaatttcagaacactctagattcagaactattccagacagcaaggatgtcgccatcatctttgagatactacggtattggactcgagaatggaaactacacagtcacacttcaatttgcagagtttgactttgaagattcacaaacttggaagagtgttgggagaagggttttcgatatctatctccagggcgagcgtaaggagaagaactttgacataaggaaggcatcaggggggaaatcttacactgctgtcgagaagcagtatattgttcctgtcactagaaactttcttgagattcatcttttctgggctggcaagggcacttgttgcattcctgctcaaggctactacgggcctgcaatctcagctttgagtgcaactccaaattttacccctacagtgcgtaattctgcacagaagaagaacagtagtaaaacaggtgtaattgttggggttgtgattggtgcagcagttttaggagtactagcacttgctggaatctgtatgtggaggcagaaaaggagaaaactattattggagcaacaagagctttacagtattgttggaagacccaatgtatttgtttatggtgagctaaggaccgctactgaaaattttagttccaataaccttcttggtgaaggaggatatgggtcagtttataagggtaaattagctgatggaagggtggtggctgtaaaacagttatctgaaacatctcatcagggaaaacagcaatttgcagccgaaatagaaactatttctcgagtgcaacaccgtaatcttgtgaagttgtatggttgctgtcttgaaggaaataaaccactgttagtttatgagtacctagagaatggaagccttgataaagcattgtttggaaacgggaaactgaacctagactggccaacacgctttgagatatgcttaggcattgcaagaggcctcgcttatctccatgaagagtctagcatccgtgttgtgcatagggacataaaggctagcaatgtcttgcttgatgcaaatctcaaccctaagatctcggatttcgggctcgccaaactttacgatgacaagaagactcatgtcagcaccaaagttgcgggtacatttggttatcttgcacccgagtacgccatgaggggtcatatgaccgagaaagttgatgtgtttgcatttggagtggtcatattggagactctagctggaaggccaaactttgacaatacgcttgatgaagacaaggtttacattttagaatgggtctggcaactgtacgaagaaaaccaccctctggacatgctcgacccgaagctcgcagaattcaacagcgacgaggtgctccgtgccatccacgtggccctcctctgcacccagggctcgccgcaccagcgcccgtccatgtcacgggccgtgtcgattctggcgggagacgtggaggtgggccaggtggcgaacaaacccagctacatcaccgagtggcagatcaagggcggcaacaccagcagcttcatgagcagcaacgtcagtgggcagtcgggcgtggcgccgaggtcggcctcgcacgcctcgtcgcagttcctgggctctgtcatcgaagaaggccggtgatgatgagtagcaagttttctcaagcgacggactgttccttgtaattaaacgcacgcacgttacaaaaggctctcggattatctggttttgacctttttcgttttccttttgaaaattttcggtttgatttcgatttgtgcagttggaatttgtatgcaaatgatgatattggatggttaagtctatttgtaattttggatgttttgaggtgtgtgtgtatatatatgatgtgatctgcaagaactaagtcacaattagatattgttgttatattaattttcggtcacgcatagtattcatactgtagttagcgggaaaatcccaatttatacagttaaaatgcgcgttacatatttttttttgtgtgtggatggacaacacacaactgaccgaccgacagactgaagatcagctttatttgaacggtcgagctgagtgaggtactgaggtaggactaggagggtggaagcggaagatagagagagatgatgacgatgacgaggtgctcttgctgcgtccatggcgctgctgtgtcgacgtccatgccgctgctgttgtttcttgtactagtcgcattcgcaaccgccggggctcagcaagtatcaaccaagaggacagatccaaccgaaggtaatcgataagtccgtttcatcattcgttttcttttggttgcaaatgtaggagggagaggagaaagggcgaaaatataacaacgcgccagtgaaaggctttgatctaaatcaaagtttttaagaccttaaggactagtttggaaacctcaatttttcaagtaatttctatttttctacgagaaaatgaaataatttctcatagaaaataaaaatcacttgaaaatttgtggttcccaaatcccaaactagccctaaaaatacttcctctatagtaaaatatagttatgtatagttatcttttttgtcatatatatatatatatatatatatatatatatatatatatatatatatatatatatatatattacattcgtcagttaacagttaattaatatatatatatactaggtaaatactcgtgcgttgcaacagggtaaaaatagtgcaactataacatatgtatggacatgtgttgtgcagaaaacaagcaaatcactgtgataaactcataatgacttgtcaccttgttcgaagaggaaaaggtgatccttagtcttacagctttaagaagagaaccatacatgtagcaccgcattactccaataatgaaacaggtgtaggattatgttgtctctgtctgggaaagacatgtgcaaagattaaaaacttcatttcatcactaagaaaaagcataaaagtgattaagaacactaccatcatagatctcttgattttcaagatcactgaggacctcgtaagcctgagttagctcctagaactaaaacaaattcatgagttcttagttttcatcacaatcataaaccaacagccccaatcgaccatttatacaaccttacaactaaacattgtc

SEQ ID NO: 17850 - DNA, 4839 bp, Zea Mays
attaaaaccacaacaattcgcagcgaatatggcgcatgcctcgttgaccgaacagcattgtagatagaaaaatagaggtggtggtaccacttgcaattgcaacgttcggtggttgagcgagcgagtacggatactcgtgtctgcgctgcgcaccgagctgagacacgtcgtattcaaagggagaggccgcaaggcaccgagtcgagccgctgctcgagcagacagggacgcaaacgcaaggagacgatgaggcctggatcgacccccggaccatcttcgcgccggtgcatccatggctccgccgccgcgctcccaacgctgctgctgctgcttcttcttcttctggctgcatcgtccgcgcaagctcagcaaacgtcaaggatgaagaccgatccagtcgaagcggcggcggtgaacgcggtgttcgccaagctcggccaggcggctacgtcggcatggaacatcagtggcgacccctgcacaggcgccgccacggacggcacgaacatcgacaacgaccccactttcaacccggccatcaagtgcgagtgctccgtccagaacaaccgcaccgtctgccacgtcaccaagctgaagatatacgcactcaatgcatttggccccataccacaggaactgcagaacctcacgcgcttgaccaatctgaatttagcacaaaattacttaaccgggcctttgccatctttcctcgggaatttgactgctatgcagtacatgagtttgggcatcaatgcattgtctggatctgttccaaaggagcttgggaaccttgtgaatcttgtatctctaggcattggctcgaactacttaaatggttcccttccttcggagttgggaaacctggcaaaacttgagcaattgtatattgacagtgccggcctaagtggtcccctaccgtcatcgttttctagactaacaagaatgaagacactgtgggcatcagataatgattttactggggaaataccagattatattgggagctggactaatttaacagaactgcggtttcaaggcaattcatttcaaggtccacttccagccactctttctaatctcgtccaactaacaagcttacgaataggtgacattgtaaatggaagttcttcaatgatattcatcagtaacatgacatctttgaacacattaattttgaggaattgcaggatatctgatagcctggcatcagtgaacttttcacagtttgcaaagttaaacttattggatttgagttttaacaatatcacaggccaagttccagaagcccttgtgaaattgaattcactcagcttcttatttctcggtaataatagtctttcaggaagcctgccgagctctataggaacttctcttaaaaatttagatttttcttacaaccagctgtcaggcaactttccttcttggactactcagaacaatttgcaactgaacttggtggcaaacaatttcgagacgaatagtgtattaccttcagggctgtcgtgtcttcagagagacacaccctgttttcttggctctccacaatctgcctctcttgctgtggactgtgggagcagtagatctatatctgggtatcaacctgatgctgccagtcttggtgctgcatcctattatgttacaggagcacaaacgtggggtgttagcaatgtaggcaagttcatggaagcatcaaatggaagttacataatttacagcttacaccaatttcagaacactctagattcagaactattccagacagcaaggatgtcgccatcatctttgagatactacggtattggactcgagaatggaaactacacagtcacacttcaatttgcagagtttgactttgaagattcacaaacttggaagagtgttgggagaagggttttcgatatctatctccagggcgagcgtaaggagaagaactttgacataaggaaggcatcaggggggaaatcttacactgctgtcgagaagcagtatattgttcctgtcactagaaactttcttgagattcatcttttctgggctggcaagggcacttgttgcattcctgctcaaggctactacgggcctgcaatctcagctttgagtgcaactccaaattttacccctacagtgcgtaattctgcacagaagaagaacagtagtaaaacaggtgtaattgttggggttgtgattggtgcagcagttttaggagtactagcacttgctggaatctgtatgtggaggcagaaaaggagaaaactattattggagcaacaagagctttacagtattgttggaagacccaatgtatttgtttatggtgagctaaggaccgctactgaaaattttagttccaataaccttcttggtgaaggaggatatgggtcagtttataagggtaaattagctgatggaagggtggtggctgtaaaacagttatctgaaacatctcatcagggaaaacagcaatttgcagccgaaatagaaactatttctcgagtgcaacaccgtaatcttgtgaagttgtatggttgctgtcttgaaggaaataaaccactgttagtttatgagtacctagagaatggaagccttgataaagcattgtttggaaacgggaaactgaacctagactggccaacacgctttgagatatgcttaggcattgcaagaggcctcgcttatctccatgaagagtctagcatccgtgttgtgcatagggacataaaggctagcaatgtcttgcttgatgcaaatctcaaccctaagatctcggatttcgggctcgccaaactttacgatgacaagaagactcatgtcagcaccaaagttgcgggtacatttggttatcttgcacccgagtacgccatgaggggtcatatgaccgagaaagttgatgtgtttgcatttggagtggtcatattggagactctagctggaaggccaaactttgacaatacgcttgatgaagacaaggtttacattttagaatgggtctggcaactgtacgaagaaaaccaccctctggacatgctcgacccgaagctcgcagaattcaacagcgacgaggtgctccgtgccatccacgtggccctcctctgcacccagggctcgccgcaccagcgcccgtccatgtcacgggccgtgtcgattctggcgggagacgtggaggtgggccaggtggcgaacaaacccagctacatcaccgagtggcagatcaagggcggcaacaccagcagcttcatgagcagcaacgtcagtgggcagtcgggcgtggcgccgaggtcggcctcgcacgcctcgtcgcagttcctgggctctgtcatcgaagaaggccggtgatgatgagtagcaagttttctcaagcgacggactgttccttgtaattaaacgcacgcacgttacaaaaggctctcggattatctggttttgacctttttcgttttccttttgaaaattttcggtttgatttcgatttgtgcagttggaatttgtatgcaaatgatgatattggatggttaagtctatttgtaattttggatgttttgaggtgtgtgtgtatatatatgatgtgatctgcaagaactaagtcacaattagatattgttgttatattaattttcggtcacgcatagtattcatactgtagttagcgggaaaatcccaatttatacagttaaaatgcgcgttacatatttttttttgtgtgtggatggacaacacacaactgaccgaccgacagactgaagatcagctttatttgaacggtcgagctgagtgaggtactgaggtaggactaggagggtggaagcggaagatagagagagatgatgacgatgacgaggtgctcttgctgcgtccatggcgctgctgtgtcgacgtccatgccgctgctgttgtttcttgtactagtcgcattcgcaaccgccggggctcagcaagtatcaaccaagaggacagatccaaccgaaggtaatcgataagtccgtttcatcattcgttttcttttggttgcaaatgtaggagggagaggagaaagggcgaaaatataacaacgcgccagtgaaaggctttgatctaaatcaaagtttttaagaccttaaggactagtttggaaacctcaatttttcaagtaatttctatttttctacgagaaaatgaaataatttctcatagaaaataaaaatcacttgaaaatttgtggttcccaaatcccaaactagccctaaaaatacttcctctatagtaaaatatagttatgtatagttatcttttttgtcatatatatatatatatatatatatatatatatatatatatatatatatatatatatatatattacattcgtcagttaacagttaattaatatatatatatactaggtaaatactcgtgcgttgcaacagggtaaaaatagtgcaactataacatatgtatggacatgtgttgtgcagaaaacaagcaaatcactgtgataaactcataatgacttgtcaccttgttcgaagaggaaaaggtgatccttagtcttacagctttaagaagagaaccatacatgtagcaccgcattactccaataatgaaacaggtgtaggattatgttgtctctgtctgggaaagacatgtgcaaagattaaaaacttcatttcatcactaagaaaaagcataaaagtgattaagaacactaccatcatagatctcttgattttcaagatcactgaggacctcgtaagcctgagttagctcctagaactaaaacaaattcatgagttcttagttttcatcacaatcataaaccaacagccccaatcgaccatttatacaaccttacaactaaacattgtc

SEQ ID NO: 17851 - DNA, 906 bp, Zea Mays
gtttggttcatcgatctatctctgttgtgcacgacactgctgcaccagtatcctattcatctatctctctttatatatatataattcagtgtgttggttggttgtcactttgtcaaattaaaaaaataaagggaaaaacaaagaaagaaagaaaagaagccgggcgcgcaggcagcgctctgctgatgctgcgtcgtggagtggaggagacactatcacggactagtgggcatcatgtcgcttcctctgttttctgctgcctgttggtgtgaggaggaagcaaagaagaagatctactcagtgtgcacttcaacatacacaggatttggtgcattaatttcagaggagttatcatacaaagttaaaggattgccgggagttctatgggtgttacctgattcgtatctggatgttcctaacaaggactacggaggtgatctattcgtagatggtaaggtcatacacagacctcagttccgattcaatgagaggcagcaggtaaggagcaggcctcgtcctcgttacgacagacgacgcgagattgcccaagtggagccgagggagacgatgcaaagaggcccttcgacgacgcagcaacagaggccgccatgtccacaggaggccgctacacagaatcaggagcagcactgaaaccatgctggcaggagtaggaaagcggcatcaatatgggaagacttgtatggtttttgccggcagttgcttatttatatataaactaagttggttcagaactatctgagctaaatctcgtgactatacatgtcctcttgggtctggagcgtgtaggttgaggttgacatgtaagctgtgtttcagcattgctgactgaatcattgctgtcctgaaatttcggcgaagtatggaagattcctcttcgcttgcaaa

SEQ ID NO: 17852 - DNA, 1369 bp, Zea Mays
cgcgtttgggttctccgccaggccggcgcgttcgacccggtagcccgaaaccgcccatatatcttgccaactttctgcgacacggtggaggcgtggagctaactacccccacgctggctcgccaccgccgccgcagcaggcgtgggaatctgggcagcgccccgcggagaagaggaggcagcgcgctctccgtccgccatggcgggctcttccgaccccgacaagctcatgagcaaagccgacaaactaacaaaattgagttttacaagatggaatgctgattggaaaagcgctacctccttgtatgagcaagctgcaattgcgtataggttcagaaaggataatgagaaagcaaaagatgcttttgagaaggcctcaaaaggacaggaaatgatctcctcaccatgggacgctgctaagcatatggaatctgctgctgctttagcaaaggagcttgggcgctggaatgaagtatctgatttctatcacagagcttcagaattataccgtgaatgtggaaggccacaacctgcatctgatgctctagcaaagggtgccagtgcattggaggagaaatctccagaagaagctatcaaaatgtatgatgaggcttgttcagttctagaagaagatgggaaggaacagatggcttttgacttgtaccgtgccgcagcagctttgtatatcaagatggagaaatattcagatgccgctgctttgtttttaagacttggttcagctgctgataagtgcaatgccatcaatagccaatgcaaggcctatctgagtgcgatcatcatctatctttacacacatgattttcagcaagctcaaaaatgctacaatgactgctcagaggttcaagccttcctcaatagcgaccagaatcgatgcgcaacgaagttattgtctgcttatgaggaaggtgatgctgaagaaatcaaacgcatggctcaatcaagtgccttcaatcaccttgaccatgtggtaattaggcttgcacggaagctaccaacagatgatctgcaggccatcaagaaagctgacgatggcgaggaatccttggacgaggatgacctgacttaaaacgatctcccgagccaaaaggtgcatagagcaaacgtcatagtttgccataggtgggggaaccgctgtaaaaagaagttatgcgagttacatactaaaaacttgggcagcattcccagatctataaacatgaaatttgtagggcccaattatgttgtatccgtactggtggtttggtgttaccgaaacagcgaaactttagtggtataggcaaaaaaaaaaaaaaaaacgggggaaaacagagaggagcgtaaagcagggaaggaattgacgtacctgacaa

SEQ ID NO: 17853 - DNA, 1348 bp, Zea Mays
cgcgtttgggttctccgccaggccggcgcgttcgacccggtagcccgaaaccgcccatatatcttgccaactttctgcgacacggtggaggcgtggagctaactacccccacgctggctcgccaccgccgccgcagcaggcgtgggaatctgggcagcgccccgcggagaagaggaggcagcgcgctctccgtccgccatggcgggctcttccgaccccgacaagctcatgagcaaagccgacaaactaacaaaattgagttttacaagatggaatgctgattggaaaagcgctacctccttgtatgagcaagctgcaattgcgtataggttcagaaaggataatgagaaagcaaaagatgcttttgagaaggcctcaaaaggacaggaaatgatctcctcaccatgggacgctgctaagcatatggaatctgctgctgctttagcaaaggagcttgggcgctggaatgaagtatctgatttctatcacagagcttcagaattataccgtgaatgtggaaggccacaacctgcatctgatgctctagcaaagggtgccagtgcattggaggagaaatctccagaagaagctatcaaaatgtatgatgaggcttgttcagttctagaagaagatgggaaggaacagatggcttttgacttgtaccgtgccgcagcagctttgtatatcaagatggagaaatattcagatgccgctgctttgtttttaagacttggttcagctgctgataagtgcaatgccatcaatagccaatgcaaggcctatctgagtgcgatcatcatctatctttacacacatgattttcagcaagctcaaaaatgctacaatgactgctcagacgaccagaatcgatgcgcaacgaagttattgtctgcttatgaggaaggtgatgctgaagaaatcaaacgcatggctcaatcaagtgccttcaatcaccttgaccatgtggtaattaggcttgcacggaagctaccaacagatgatctgcaggccatcaagaaagctgacgatggcgaggaatccttggacgaggatgacctgacttaaaacgatctcccgagccaaaaggtgcatagagcaaacgtcatagtttgccataggtgggggaaccgctgtaaaaagaagttatgcgagttacatactaaaaacttgggcagcattcccagatctataaacatgaaatttgtagggcccaattatgttgtatccgtactggtggtttggtgttaccgaaacagcgaaactttagtggtataggcaaaaaaaaaaaaaaaaacgggggaaaacagagaggagcgtaaagcagggaaggaattgacgtacctgacaa

SEQ ID NO: 17854 - DNA, 1461 bp, Zea Mays
cgcaaacgcgcaagcggtaatcggatgctggatcgctgttcatcacccattaccgtaccgtacctcgtcgcgcaagcctcgtatactctgttcccgcgtttgggttctccgccaggccggcgcgttcgacccggtagcccgaaaccgcccatatatcttgccaactttctgcgacacggtggaggcgtggagctaactacccccacgctggctcgccaccgccgccgcagcaggcgtgggaatctgggcagcgccccgcggagaagaggaggcagcgcgctctccgtccgccatggcgggctcttccgaccccgacaagctcatgagcaaagccgacaaactaacaaaattgagttttacaagatggaatgctgattggaaaagcgctacctccttgtatgagcaagctgcaattgcgtataggttcagaaaggataatgagaaagcaaaagatgcttttgagaaggcctcaaaaggacaggaaatgatctcctcaccatgggacgctgctaagcatatggaatctgctgctgctttagcaaaggagcttgggcgctggaatgaagtatctgatttctatcacagagcttcagaattataccgtgaatgtggaaggccacaacctgcatctgatgctctagcaaagggtgccagtgcattggaggagaaatctccagaagaagctatcaaaatgtatgatgaggcttgttcagttctagaagaagatgggaaggaacagatggcttttgacttgtaccgtgccgcagcagctttgtatatcaagatggagaaatattcagatgccgctgctttgtttttaagacttggttcagctgctgataagtgcaatgccatcaatagccaatgcaaggcctatctgagtgcgatcatcatctatctttacacacatgattttcagcaagctcaaaaatgctacaatgactgctcagaggttcaagccttcctcaatagcgaccagaatcgatgcgcaacgaagttattgtctgcttatgaggaaggtgatgctgaagaaatcaaacgcatggctcaatcaagtgccttcaatcaccttgaccatgtggtaattaggcttgcacggaagctaccaacagatgatctgcaggccatcaagaaagctgacgatggcgaggaatccttggacgaggatgacctgacttaaaacgatctcccgagccaaaaggtgcatagagcaaacgtcatagtttgccataggtgggggaaccgctgtaaaaagaagttatgcgagttacatactaaaaacttgggcagcattcccagatctataaacatgaaatttgtagggcccaattatgttgtatccgtactggtggtttggtgttaccgaaacagcgaaactttagtggtatgcaaaaaaaaaaaaaaaaacgggggaaaacagagaggagcgtaaagcagggaaggaattgacgtacctgacaa

SEQ ID NO: 17855 - DNA, 4034 bp, Zea Mays
atggcgagcgggggaggggggattcgggcgacgacttcggggaggatgaagtcgcgagggtggggagattcaagcgacgactttgggacaccggctattgcgctgaggcgtgggggcgactgtagtggcacggcgagttcagactccagcgccgtcttcttcgcggtcgccttttgcgctccatcccctgggctttccgtcacggcggccgcagccatggtggagatgcggcagcggaggaagccgctggtgctcgcctccacgcaggcgctcctcgactcgcttccgggggatcgcccgccgccaccgccgcagaagccggtgcgccttaaggccggcgtcctccgattcccctccggaggtggtggcgccgagttcggggagctcgcgtctttcgtcggcatccctgcccctgctctccgacggctcgcggtcgtcacgggtactcctgtgcttgtcaagaatactgacaataatgttgggaggattgtcaaagcagtattgtttggtaacccgtcccttgacaagtcctgctcagaacatactgaccaagtggtctctgcctctctctctggtcatgcaatgggcttcttaccttgtcgcacgttccctgctattggttttacatccatggatgaagatgttggttatgttagcccacttttggcattcaacttgggattgcatgtttcttgccttaaacttcttattcaaagagaagggcagcctttcaagttctgttctcgagctgaagagattgatgcaactgccagttctggaagtgatctttctcttcacttagaccttcttccatgccctcaagtgcctaaatatgcattgcatttacgagtttctgttgtgaggattcctgattgtggtgtgcttgcttctttaaagatatattcatcctttggaggaagtgagtaccaagacatggtagatcaagctttgaacgagtactttaagtttgataggttcctagcaagaggagatgtttttggtatacaaaacagttggaagtgtggctcaagctgctgcctggcatgcaataagcaggataataaactgaatccccgtaatatgatctactttaaggtgactggcatggaaccatcagatgaacctatacttcgtgttaattgcaatgaaacagcccttgtacttggtggagctgcttctgctgcaatccccccttattccttttttgcttcttctggtaattcagtaccattgcacagtgaagtagtggagcatttagcatctgtcattgcaccagcattgtgcccttcggatattttaccaaaaataaagttttccacttttttatatggcccgccaggatgtggaaagcgcacagtggttaggcatgttgctaaccatcttggtctgcatgtggtcgagtgtagctgtcatgatctgatgacatcatcagaaagtggggcacctgctgcacttgcaactgcctttaaagaagctcagaagtattctccttgtataatacttcttcgccactttgatgcaattgggaatgcatcctcaaacgaaggtccacagtctgagcaatctgggattgcatcgaacattgaatctgtcattaagcagtacattggacaacgttgggttgctaaggattcactgccaggaaaagatgtaaatgggagctcatacctcgtggagcctgaatgtgtaagctctcttcaaatcatactagttgcaactgcggacagttctgaaggaatgcaacagtcaattagaagatgcttccgctatgagatcgacatgaagactatgaatgaagaacagagaaacgaactgatatctgagacacttcaaggcattcctaaagttgctgatgagagtatttgtgacaagttcataaaagatttagcagcgcaaacgtcaggtttcatgcccagggacatacttgcattggtcgcagatgctggtgtgtcttttgcgcataaaattgcagcagggaaagatagcaaagcaatcagtaagcatacggaggtccttccagaaagctcttctgccactcaaaatgaggaacaccatttcagcaaagaagatattatgtcttccttggaacgagccaagaaacggaatcgtgctgcactgggcacacccaaagttcctaatgtcaaatgggaagatgttggtgggctagaggatgtgaaaaaggttattctagatactattcagttgcctctgatgtacaagcacctgttttcttctaaattgcgcaagcgatcaggtgtcctgctatatggacctccaggaacagggaagcgtcaaaggtccagaactgataaacatgtatgttggagaatcagagaaaaatgttcgggatatttttgagaagcagattctggcggtgtcatggacagggttgtttcccagttacttgtggagatcgatgggttgagtgacaacagccaggaccttttcattattggggctaccaataggcctgaccttcttgattctgcccttcttcgccctggtcggttcgacaagcttctttatgtcggtgtaaatactgaggcatcatacagggaaaggatccttaaagcacagacacgcaagtataagctgcacaagaacgtttctctcttgtcagttgcgcagcgttgtccaccaaacttcactggtgctgatatttacgcgctgtgtgcggatgcatggtttcatgcagcaaagcgatcagttgaaacattcgaaatcgatccttcaagaagtaatgaagccagtgccgaagaagtcatcgtcgagatcgacgattttatcacggtgttaggagatatcgcaccgtcgctctctctggacgagctacaaaactacgaacagttgaggcagaagatcgaaggaccttctagatgaagttgggtttccactccctgctgacattcttaaactgctaacacaccaaaacattccctgtcttacattttcgttcgtacacaagttttcctccctgaaaacttgggcacttctatatccattcctgatttatacaatcacatccttgtagcagcatctgtattgacatcagaatgacattttctctgaagagaaacatcctgtcattctttgttagcagctccgcaactattctgaatgagcccgtgaagtcaagcactcaaagccttacctgggaaacaaaatgctattcctgacctgaaggaagcatccaccaatacagctagtttgggtacacacgctgaaccagctagttcgcctgggagaggcctctgtctcgtttagatgccatcgtctagaagttgtatcggaaaaattataagcgaatgttgcaatgaacagagttccttgtactgctgtgatttgtcattggtcaaagagaactaactgcagcgtttgtctacctacaatacttgtttttttgttgttgctatcttgtagtgccagcagcgatgcctccttgttggtgctcggcaagtcggctggtgtgagcaaaatccgtacgtcgtcgtctccagtggtgtcattctaaactggatctgctgctctcgagaccgaacaactgcaacaaactcaggcagggactcagcatctacacatcctgttctacggtgatgctgaagaaatcaaacgcatggctcaatcaagtgccttcaatcaccttgaccatgtggtaattaggcttgcacggaagctaccaacagatgatctgcaggccatcaagaaagctgacgatggcgaggaatccttggacgaggatgacctgacttaaaacgatctcccgagccaaaaggtgcatagagcaaacgtcatagtttgccataggtgggggaaccgctgtaaaaagaagttatgcgagttacatactaaaaacttgggcagcattcccagatctataaacatgaaatttgtagggcccaattatgttgtatccgtactggtggtttggtgttaccgaaacagcgaaactttagtggtataggcaaaaaaaaaaaaaaaaacgggggaaaacagagaggagcgtaaagcagggaaggaattgacgtacctgacaa

SEQ ID NO: 17856 - DNA, 4082 bp, Zea Mays
atggcgagcgggggaggggggattcgggcgacgacttcggggaggatgaagtcgcgagggtggggagattcaagcgacgactttgggacaccggctattgcgctgaggcgtgggggcgactgtagtggcacggcgagttcagactccagcgccgtcttcttcgcggtcgccttttgcgctccatcccctgggctttccgtcacggcggccgcagccatggtggagatgcggcagcggaggaagccgctggtgctcgcctccacgcaggcgctcctcgactcgcttccgggggatcgcccgccgccaccgccgcagaagccggtgcgccttaaggccggcgtcctccgattcccctccggaggtggtggcgccgagttcggggagctcgcgtctttcgtcggcatccctgcccctgctctccgacggctcgcggtcgtcacgggtactcctgtgcttgtcaagaatactgacaataatgttgggaggattgtcaaagcagtattgtttggtaacccgtcccttgacaagtcctgctcagaacatactgaccaagtggtctctgcctctctctctggtcatgcaatgggcttcttaccttgtcgcacgttccctgctattggttttacatccatggatgaagatgttggttatgttagcccacttttggcattcaacttgggattgcatgtttcttgccttaaacttcttattcaaagagaagggcagcctttcaagttctgttctcgagctgaagagattgatgcaactgccagttctggaagtgatctttctcttcacttagaccttcttccatgccctcaagtgcctaaatatgcattgcatttacgagtttctgttgtgaggattcctgattgtggtgtgcttgcttctttaaagatatattcatcctttggaggaagtgagtaccaagacatggtagatcaagctttgaacgagtactttaagtttgataggttcctagcaagaggagatgtttttggtatacaaaacagttggaagtgtggctcaagctgctgcctggcatgcaataagcaggataataaactgaatccccgtaatatgatctactttaaggtgactggcatggaaccatcagatgaacctatacttcgtgttaattgcaatgaaacagcccttgtacttggtggagctgcttctgctgcaatccccccttattccttttttgcttcttctggtaattcagtaccattgcacagtgaagtagtggagcatttagcatctgtcattgcaccagcattgtgcccttcggatattttaccaaaaataaagttttccacttttttatatggcccgccaggatgtggaaagcgcacagtggttaggcatgttgctaaccatcttggtctgcatgtggtcgagtgtagctgtcatgatctgatgacatcatcagaaagtggggcacctgctgcacttgcaactgcctttaaagaagctcagaagtattctccttgtataatacttcttcgccactttgatgcaattgggaatgcatcctcaaacgaaggtccacagtctgagcaatctgggattgcatcgaacattgaatctgtcattaagcagtacattggacaacgttgggttgctaaggattcactgccaggaaaagatgtaaatgggagctcatacctcgtggagcctgaatgtgtaagctctcttcaaatcatactagttgcaactgcggacagttctgaaggaatgcaacagtcaattagaagatgcttccgctatgagatcgacatgaagactatgaatgaagaacagagaaacgaactgatatctgagacacttcaaggcattcctaaagttgctgatgagagtatttgtgacaagttcataaaagatttagcagcgcaaacgtcaggtttcatgcccagggacatacttgcattggtcgcagatgctggtgtgtcttttgcgcataaaattgcagcagggaaagatagcaaagcaatcagtaagcatacggaggtccttccagaaagctcttctgccactcaaaatgaggaacaccatttcagcaaagaagatattatgtcttccttggaacgagccaagaaacggaatcgtgctgcactgggcacacccaaagttcctaatgtcaaatgggaagatgttggtgggctagaggatgtgaaaaaggttattctagatactattcagttgcctctgatgtacaagcacctgttttcttctaaattgcgcaagcgatcaggtgtcctgctatatggacctccaggaacagggaagactttactcgcgaaagcagtagcaactgaatgctcattgaactttcttagcgtcaaaggtccagaactgataaacatgtatgttggagaatcagagaaaaatgttcgggatatttttgagaaggctaggtctgcacgcccatgtgtcattttctttgatgagcttgattcccttgctcctgcacgaggatcctcagcagattctggcggtgtcatggacagggttgtttcccagttacttgtggagatcgatgggttgagtgacaacagccaggaccttttcattattggggctaccaataggcctgaccttcttgattctgcccttcttcgccctggtcggttcgacaagcttctttatgtcggtgtaaatactgaggcatcatacagggaaaggatccttaaagcacagacacgcaagtataagctgcacaagaacgtttctctcttgtcagttgcgcagcgttgtccaccaaacttcactggtgctgatatttacgcgctgtgtgcggatgcatggtttcatgcagcaaagcgatcagttgaaacattcgaaatcgatccttcaagaagtaatgaagccagtgccgaagaagtcatcgtcgagatcgacgattttatcacggtgttaggagatatcgcaccgtcgctctctctggacgagctacaaaactacgaacagttgaggcagaagatcgaaggaccttctagatgaagttgggtttccactccctgctgacattcttaaactgctaacacaccaaaacattccctgtcttacattttcgttcgtacacaagttttcctccctgaaaacttgggcacttctatatccattcctgatttatacaatcacatccttgtagcagcatctgtattgacatcagaatgacattttctctgaagagaaacatcctgtcattctttgttagcagctccgcaactattctgaatgagcccgtgaagtcaagcactcaaagccttacctgggaaacaaaatgctattcctgacctgaaggaagcatccaccaatacagctagtttggtgccagcagcgatgcctccttgttggtgctcggcaagtcggctggtgtgagcaaaatccgtacgtcgtcgtctccagtggtgtcattctaaactggatctgctgctctcgagaccgaacaactgcaacaaactcaggcagggactcagcatctacacatcctgttctacggtgattgtgacacaaatcggctgcatgggaaccatactagctgccaagaaagatgaaagtgttttctccgacccaacctacaatgtgtctgttctttttgggaagagagatgagccactcctactagcttgcgcacgtcaacttattgagcacataagtggctcagcccggtcattggtgatttctctgggtctgaaagatcattctcagggaacgctgaaggatattactgtagctgtgatgattgaatagctgatgagctgggcatggggttggctcgatggttggcatattcagccccatcgataaagatactgtttagcattgcgcaagaggagccatcgtttataccatgcactaaattctggtagttttgtagttggaccttctatctacttggattaacaaaaggtggttttaagctggtgtcaaaatttgagtgtcaactttcacgctaaacaaaaggcactgtacactggtaaagcacttctgaggcgaatcatgcttttcgaggacaatttcggctatccgtgctggggctgccactgtggagctctgtgcgtactcctttgccgtct

SEQ ID NO: 17857 - DNA, 4075 bp, Zea Mays
atggcgagcgggggaggggggattcgggcgacgacttcggggaggatgaagtcgcgagggtggggagattcaagcgacgactttgggacaccggctattgcgctgaggcgtgggggcgactgtagtggcacggcgagttcagactccagcgccgtcttcttcgcggtcgccttttgcgctccatcccctgggctttccgtcacggcggccgcagccatggtggagatgcggcagcggaggaagccgctggtgctcgcctccacgcaggcgctcctcgactcgcttccgggggatcgcccgccgccaccgccgcagaagccggtgcgccttaaggccggcgtcctccgattcccctccggaggtggtggcgccgagttcggggagctcgcgtctttcgtcggcatccctgcccctgctctccgacggctcgcggtcgtcacgggtactcctgtgcttgtcaagaatactgacaataatgttgggaggattgtcaaagcagtattgtttggtaacccgtcccttgacaagtcctgctcagaacatactgaccaagtggtctctgcctctctctctggtcatgcaatgggcttcttaccttgtcgcacgttccctgctattggttttacatccatggatgaagatgttggttatgttagcccacttttggcattcaacttgggattgcatgtttcttgccttaaacttcttattcaaagagaagggcagcctttcaagttctgttctcgagctgaagagattgatgcaactgccagttctggaagtgatctttctcttcacttagaccttcttccatgccctcaagtgcctaaatatgcattgcatttacgagtttctgttgtgaggattcctgattgtggtgtgcttgcttctttaaagatatattcatcctttggaggaagtgagtaccaagacatggtagatcaagctttgaacgagtactttaagtttgataggttcctagcaagaggagatgtttttggtatacaaaacagttggaagtgtggctcaagctgctgcctggcatgcaataagcaggataataaactgaatccccgtaatatgatctactttaaggtgactggcatggaaccatcagatgaacctatacttcgtgttaattgcaatgaaacagcccttgtacttggtggagctgcttctgctgcaatccccccttattccttttttgcttcttctggtaattcagtaccattgcacagtgaagtagtggagcatttagcatctgtcattgcaccagcattgtgcccttcggatattttaccaaaaataaagttttccacttttttatatggcccgccaggatgtggaaagcgcacagtggttaggcatgttgctaaccatcttggtctgcatgtggtcgagtgtagctgtcatgatctgatgacatcatcagaaagtggggcacctgctgcacttgcaactgcctttaaagaagctcagaagtattctccttgtataatacttcttcgccactttgatgcaattgggaatgcatcctcaaacgaaggtccacagtctgagcaatctgggattgcatcgaacattgaatctgtcattaagcagtacattggacaacgttgggttgctaaggattcactgccaggaaaagatgtaaatgggagctcatacctcgtggagcctgaatgtgtaagctctcttcaaatcatactagttgcaactgcggacagttctgaaggaatgcaacagtcaattagaagatgcttccgctatgagatcgacatgaagactatgaatgaagaacagagaaacgaactgatatctgagacacttcaaggcattcctaaagttgctgatgagagtatttgtgacaagttcataaaagatttagcagcgcaaacgtcaggtttcatgcccagggacatacttgcattggtcgcagatgctggtgtgtcttttgcgcataaaattgcagcagggaaagatagcaaagcaatcagtaagcatacggaggtccttccagaaagctcttctgccactcaaaatgaggaacaccatttcagcaaagaagatattatgtcttccttggaacgagccaagaaacggaatcgtgctgcactgggcacacccaaagttcctaatgtcaaatgggaagatgttggtgggctagaggatgtgaaaaaggttattctagatactattcagttgcctctgatgtacaagcacctgttttcttctaaattgcgcaagcgatcaggtgtcctgctatatggacctccaggaacagggaagggttgtttcccagttacttgtggagatcgatgggttgagtgacaacagccaggaccttttcattattggggctaccaataggcctgaccttcttgattctgcccttcttcgccctggtcggttcgacaagcttctttatgtcggtgtaaatactgaggcatcatacagggaaaggatccttaaagcacagacacgcaagtataagctgcacaagaacgtttctctcttgtcagttgcgcagcgttgtccaccaaacttcactggtgctgatatttacgcgctgtgtgcggatgcatggtttcatgcagcaaagcgatcagttgaaacattcgaaatcgatccttcaagaagtaatgaagccagtgccgaagaagtcatcgtcgagatcgacgattttatcacggtgttaggagatatcgcaccgtcgctctctctggacgagctacaaaactacgaacagttgaggcagaagatcgaaggaccttctagatgaagttgggtttccactccctgctgacattcttaaactgctaacacaccaaaacattccctgtcttacattttcgttcgtacacaagttttcctccctgaaaacttgggcacttctatatccattcctgatttatacaatcacatccttgtagcagcatctgtattgacatcagaatgacattttctctgaagagaaacatcctgtcattctttgttagcagctccgcaactattctgaatgagcccgtgaagtcaagcactcaaagccttacctgggaaacaaaatgctattcctgacctgaaggaagcatccaccaatacagctagtttgggtacacacgctgaaccagctagttcgcctgggagaggcctctgtctcgtttagatgccatcgtctagaagttgtatcggaaaaattataagcgaatgttgcaatgaacagagttccttgtactgctgtgatttgtcattggtcaaagagaactaactgcagcgtttgtctacctacaatacttgtttttttgttgttgctatcttgtagtgccagcagcgatgcctccttgttggtgctcggcaagtcggctggtgtgagcaaaatccgtacgtcgtcgtctccagtggtgtcattctaaactggatctgctgctctcgagaccgaacaactgcaacaaactcaggcagggactcagcatctacacatcctgttctacggtacggtgattgtgacacaaatcggctgcatgggaaccatactagctgccaagaaagatgaaagtgttttctccgacccaacctacaatgtgtctgttctttttgggaagagagatgagccactcctactagcttgcgcacgtcaacttattgagcacataagtggctcagcccggtcattggtgatttctctgggtctgaaagatcattctcagggaacgctgaaggatattactgtagctgtgatgattgaatagctgatgagctgggcatggggttggctcgatggttggcatattcagccccatcgataaagatactgtttagcattgcgcaagaggagccatcgtttataccatgcactaaattctggtagttttgtagttggaccttctatctacttggattaacaaaaggtggttttaagctggtgtcaaaatttgagtgtcaactttcacgctaaacaaaaggcactgtacactggtaaagcacttctgaggcgaatcatgcttttcgaggacaatttcggctatccgtgctggggctgccactgtggagctctgtgcgtactcctttgccgtct

SEQ ID NO: 17858 - DNA, 4227 bp, Zea Mays
atggcgagcgggggaggggggattcgggcgacgacttcggggaggatgaagtcgcgagggtggggagattcaagcgacgactttgggacaccggctattgcgctgaggcgtgggggcgactgtagtggcacggcgagttcagactccagcgccgtcttcttcgcggtcgccttttgcgctccatcccctgggctttccgtcacggcggccgcagccatggtggagatgcggcagcggaggaagccgctggtgctcgcctccacgcaggcgctcctcgactcgcttccgggggatcgcccgccgccaccgccgcagaagccggtgcgccttaaggccggcgtcctccgattcccctccggaggtggtggcgccgagttcggggagctcgcgtctttcgtcggcatccctgcccctgctctccgacggctcgcggtcgtcacgggtactcctgtgcttgtcaagaatactgacaataatgttgggaggattgtcaaagcagtattgtttggtaacccgtcccttgacaagtcctgctcagaacatactgaccaagtggtctctgcctctctctctggtcatgcaatgggcttcttaccttgtcgcacgttccctgctattggttttacatccatggatgaagatgttggttatgttagcccacttttggcattcaacttgggattgcatgtttcttgccttaaacttcttattcaaagagaagggcagcctttcaagttctgttctcgagctgaagagattgatgcaactgccagttctggaagtgatctttctcttcacttagaccttcttccatgccctcaagtgcctaaatatgcattgcatttacgagtttctgttgtgaggattcctgattgtggtgtgcttgcttctttaaagatatattcatcctttggaggaagtgagtaccaagacatggtagatcaagctttgaacgagtactttaagtttgataggttcctagcaagaggagatgtttttggtatacaaaacagttggaagtgtggctcaagctgctgcctggcatgcaataagcaggataataaactgaatccccgtaatatgatctactttaaggtgactggcatggaaccatcagatgaacctatacttcgtgttaattgcaatgaaacagcccttgtacttggtggagctgcttctgctgcaatccccccttattccttttttgcttcttctggtaattcagtaccattgcacagtgaagtagtggagcatttagcatctgtcattgcaccagcattgtgcccttcggatattttaccaaaaataaagttttccacttttttatatggcccgccaggatgtggaaagcgcacagtggttaggcatgttgctaaccatcttggtctgcatgtggtcgagtgtagctgtcatgatctgatgacatcatcagaaagtggggcacctgctgcacttgcaactgcctttaaagaagctcagaagtattctccttgtataatacttcttcgccactttgatgcaattgggaatgcatcctcaaacgaaggtccacagtctgagcaatctgggattgcatcgaacattgaatctgtcattaagcagtacattggacaacgttgggttgctaaggattcactgccaggaaaagatgtaaatgggagctcatacctcgtggagcctgaatgtgtaagctctcttcaaatcatactagttgcaactgcggacagttctgaaggaatgcaacagtcaattagaagatgcttccgctatgagatcgacatgaagactatgaatgaagaacagagaaacgaactgatatctgagacacttcaaggcattcctaaagttgctgatgagagtatttgtgacaagttcataaaagatttagcagcgcaaacgtcaggtttcatgcccagggacatacttgcattggtcgcagatgctggtgtgtcttttgcgcataaaattgcagcagggaaagatagcaaagcaatcagtaagcatacggaggtccttccagaaagctcttctgccactcaaaatgaggaacaccatttcagcaaagaagatattatgtcttccttggaacgagccaagaaacggaatcgtgctgcactgggcacacccaaagttcctaatgtcaaatgggaagatgttggtgggctagaggatgtgaaaaaggttattctagatactattcagttgcctctgatgtacaagcacctgttttcttctaaattgcgcaagcgatcaggtgtcctgctatatggacctccaggaacagggaagaactgataaacatgtatgttggagaatcagagaaaaatgttcgggatatttttgagaaggctaggtctgcacgcccatgtgtcattttctttgatgagcttgattcccttgctcctgcacgaggatcctcagcagattctggcggtgtcatggacagggttgtttcccagttacttgtggagatcgatgggttgagtgacaacagccaggaccttttcattattggggctaccaataggcctgaccttcttgattctgcccttcttcgccctggtcggttcgacaagcttctttatgtcggtgtaaatactgaggcatcatacagggaaaggatccttaaagcacagacacgcaagtataagctgcacaagaacgtttctctcttgtcagttgcgcagcgttgtccaccaaacttcactggtgctgatatttacgcgctgtgtgcggatgcatggtttcatgcagcaaagcgatcagttgaaacattcgaaatcgatccttcaagaagtaatgaagccagtgccgaagaagtcatcgtcgagatcgacgattttatcacggtgttaggagatatcgcaccgtcgctctctctggacgagctacaaaactacgaacagttgaggcagaagatcgaaggaccttctagatgaagttgggtttccactccctgctgacattcttaaactgctaacacaccaaaacattccctgtcttacattttcgttcgtacacaagttttcctccctgaaaacttgggcacttctatatccattcctgatttatacaatcacatccttgtagcagcatctgtattgacatcagaatgacattttctctgaagagaaacatcctgtcattctttgttagcagctccgcaactattctgaatgagcccgtgaagtcaagcactcaaagccttacctgggaaacaaaatgctattcctgacctgaaggaagcatccaccaatacagctagtttgggtacacacgctgaaccagctagttcgcctgggagaggcctctgtctcgtttagatgccatcgtctagaagttgtatcggaaaaattataagcgaatgttgcaatgaacagagttccttgtactgctgtgatttgtcattggtcaaagagaactaactgcagcgtttgtctacctacaatacttgtttttttgttgttgctatcttgtagtgccagcagcgatgcctccttgttggtgctcggcaagtcggctggtgtgagcaaaatccgtacgtcgtcgtctccagtggtgtcattctaaactggatctgctgctctcgagaccgaacaactgcaacaaactcaggcagggactcagcatctacacatcctgttctacggtgattgtgacacaaatcggctgcatgggaaccatactagctgccaagaaagatgaaagtgttttctccgacccaacctacaatgtgtctgttctttttgggaagagagatgagccactcctactagcttgcgcacgtcaacttattgagcacataagtggctcagcccggtcattggtgatttctctgggtctgaaagatcattctcagggaacgctgaaggatattactgtagctgtgatgattgaatagctgatgagctgggcatggggttggctcgatggttggcatattcagccccatcgataaagatactgtttagcattgcgcaagaggagccatcgtttataccatgcactaaattctggtagttttgtagttggaccttctatctacttggattaacaaaaggtggttttaagctggtgtcaaaatttgagtgtcaactttcacgctaaacaaaaggcactgtacactggtaaagcacttctgaggcgaatcatgcttttcgaggacaatttcggctatccgtgctggggctgccactgtggagctctgtgcgtactcctttgccgtct

SEQ ID NO: 17859 - DNA, 3757 bp, Zea Mays
atggcgagcgggggaggggggattcgggcgacgacttcggggaggatgaagtcgcgagggtggggagattcaagcgacgactttgggacaccggctattgcgctgaggcgtgggggcgactgtagtggcacggcgagttcagactccagcgccgtcttcttcgcggtcgccttttgcgctccatcccctgggctttccgtcacggcggccgcagccatggtggagatgcggcagcggaggaagccgctggtgctcgcctccacgcaggcgctcctcgactcgcttccgggggatcgcccgccgccaccgccgcagaagccggtgcgccttaaggccggcgtcctccgattcccctccggaggtggtggcgccgagttcggggagctcgcgtctttcgtcggcatccctgcccctgctctccgacggctcgcggtcgtcacgggtactcctgtgcttgtcaagaatactgacaataatgttgggaggattgtcaaagcagtattgtttggtaacccgtcccttgacaagtcctgctcagaacatactgaccaagtggtctctgcctctctctctggtcatgcaatgggcttcttaccttgtcgcacgttccctgctattggttttacatccatggatgaagatgttggttatgttagcccacttttggcattcaacttgggattgcatgtttcttgccttaaacttcttattcaaagagaagggcagcctttcaagttctgttctcgagctgaagagattgatgcaactgccagttctggaagtgatctttctcttcacttagaccttcttccatgccctcaagtgcctaaatatgcattgcatttacgagtttctgttgtgaggattcctgattgtggtgtgcttgcttctttaaagatatattcatcctttggaggaagtgagtaccaagacatggtagatcaagctttgaacgagtactttaagtttgataggttcctagcaagaggagatgtttttggtatacaaaacagttggaagtgtggctcaagctgctgcctggcatgcaataagcaggataataaactgaatccccgtaatatgatctactttaaggtgactggcatggaaccatcagatgaacctatacttcgtgttaattgcaatgaaacagcccttgtacttggtggagctgcttctgctgcaatccccccttattccttttttgcttcttctggtaattcagtaccattgcacagtgaagtagtggagcatttagcatctgtcattgcaccagcattgtgcccttcggatattttaccaaaaataaagttttccacttttttatatggcccgccaggatgtggaaagcgcacagtggttaggcatgttgctaaccatcttggtctgcatgtggtcgagtgtagctgtcatgatctgatgacatcatcagaaagtggggcacctgctgcacttgcaactgcctttaaagaagctcagaagtattctccttgtataatacttcttcgccactttgatgcaattgggaatgcatcctcaaacgaaggtccacagtctgagcaatctgggattgcatcgaacattgaatctgtcattaagcagtacattggacaacgttgggttgctaaggattcactgccaggaaaagatgtaaatgggagctcatacctcgtggagcctgaatgtgtaagctctcttcaaatcatactagttgcaactgcggacagttctgaaggaatgcaacagtcaattagaagatgcttccgctatgagatcgacatgaagactatgaatgaagaacagagaaacgaactgatatctgagacacttcaaggcattcctaaagttgctgatgagagtatttgtgacaagttcataaaagatttagcagcgcaaacgtcaggtttcatgcccagggacatacttgcattggtcgcagatgctggtgtgtcttttgcgcataaaattgcagcagggaaagatagcaaagcaatcagtaagcatacggaggtccttccagaaagctcttctgccactcaaaatgaggaacaccatttcagcaaagaagatattatgtcttccttggaacgagccaagaaacggaatcgtgctgcactgggcacacccaaagttcctaatgtcaaatgggaagatgttggtgggctagaggatgtgaaaaaggttattctagatactattcagttgcctctgatgtacaagcacctgttttcttctaaattgcgcaagcgatcaggtgtcctgctatatggacctccaggaacagggaagactttactcgcgaaagcagtagcaactgaatgctcattgaactttcttagcgtcaaaggtccagaactgataaacatgtatgttggagaatcagagaaaaatgttcgggatatttttgagaaggctaggtctgcacgcccatgtgtcattttctttgatgagcttgattcccttgctcctgcacgaggatcctcagcagattctggcggtgtcatggacagggttgtttcccagttacttgtggagatcgatgggttgagtgacaacagccaggaccttttcattattggggctaccaataggcctgaccttcttgattctgcccttcttcgccctggtcggttcgacaagcttctttatgtcggtgtaaatactgaggcatcatacagggaaaggatccttaaagcacagacacgcaagtataagctgcacaagaacgtttctctcttgtcagttgcgcagcgttgtccaccaaacttcactggtgctgatatttacgcgctgtgtgcggatgcatggtttcatgcagcaaagcgatcagttgaaacattcgaaatcgatccttcaagaagtaatgaagccagtgccgaagaagtcatcgtcgagatcgacgattttatcacggtgttaggagatatcgcaccgtcgctctctctggacgagctacaaaactacgaacagttgaggcagaagatcgaaggaccttctagatgaatgccagcagcgatgcctccttgttggtgctcggcaagtcggctggtgtgagcaaaatccgtacgtcgtcgtctccagtggtgtcattctaaactggatctgctgctctcgagaccgaacaactgcaacaaactcaggcagggactcagcatctacacatcctgttctacggtacggtgattgtgacacaaatcggctgcatgggaaccatactagctgccaagaaagatgaaagtgttttctccgacccaacctacaatgtgtctgttctttttgggaagagagatgagccactcctactagcttgcgcacgtcaacttattgagcacataagtggctcagcccggtcattggtgatttctctgggtctgaaagatcattctcagggaacgctgaaggatattactgtagctgtgatgattgaatagctgatgagctgggcatggggttggctcgatggttggcatattcagccccatcgataaagatactgtttagcattgcgcaagaggagccatcgtttataccatgcactaaattctggtagttttgtagttggaccttctatctacttggattaacaaaaggtggttttaagctggtgtcaaaatttgagtgtcaactttcacgctaaacaaaaggcactgtacactggtaaagcacttctgaggcgaatcatgcttttcgaggacaatttcggctatccgtgctggggctgccactgtggagctctgtgcgtactcctttgccgtct

SEQ ID NO: 17860 - DNA, 3759 bp, Zea Mays
atggcgagcgggggaggggggattcgggcgacgacttcggggaggatgaagtcgcgagggtggggagattcaagcgacgactttgggacaccggctattgcgctgaggcgtgggggcgactgtagtggcacggcgagttcagactccagcgccgtcttcttcgcggtcgccttttgcgctccatcccctgggctttccgtcacggcggccgcagccatggtggagatgcggcagcggaggaagccgctggtgctcgcctccacgcaggcgctcctcgactcgcttccgggggatcgcccgccgccaccgccgcagaagccggtgcgccttaaggccggcgtcctccgattcccctccggaggtggtggcgccgagttcggggagctcgcgtctttcgtcggcatccctgcccctgctctccgacggctcgcggtcgtcacgggtactcctgtgcttgtcaagaatactgacaataatgttgggaggattgtcaaagcagtattgtttggtaacccgtcccttgacaagtcctgctcagaacatactgaccaagtggtctctgcctctctctctggtcatgcaatgggcttcttaccttgtcgcacgttccctgctattggttttacatccatggatgaagatgttggttatgttagcccacttttggcattcaacttgggattgcatgtttcttgccttaaacttcttattcaaagagaagggcagcctttcaagttctgttctcgagctgaagagattgatgcaactgccagttctggaagtgatctttctcttcacttagaccttcttccatgccctcaagtgcctaaatatgcattgcatttacgagtttctgttgtgaggattcctgattgtggtgtgcttgcttctttaaagatatattcatcctttggaggaagtgagtaccaagacatggtagatcaagctttgaacgagtactttaagtttgataggttcctagcaagaggagatgtttttggtatacaaaacagttggaagtgtggctcaagctgctgcctggcatgcaataagcaggataataaactgaatccccgtaatatgatctactttaaggtgactggcatggaaccatcagatgaacctatacttcgtgttaattgcaatgaaacagcccttgtacttggtggagctgcttctgctgcaatccccccttattccttttttgcttcttctggtaattcagtaccattgcacagtgaagtagtggagcatttagcatctgtcattgcaccagcattgtgcccttcggatattttaccaaaaataaagttttccacttttttatatggcccgccaggatgtggaaagcgcacagtggttaggcatgttgctaaccatcttggtctgcatgtggtcgagtgtagctgtcatgatctgatgacatcatcagaaagtggggcacctgctgcacttgcaactgcctttaaagaagctcagaagtattctccttgtataatacttcttcgccactttgatgcaattgggaatgcatcctcaaacgaaggtccacagtctgagcaatctgggattgcatcgaacattgaatctgtcattaagcagtacattggacaacgttgggttgctaaggattcactgccaggaaaagatgtaaatgggagctcatacctcgtggagcctgaatgtgtaagctctcttcaaatcatactagttgcaactgcggacagttctgaaggaatgcaacagtcaattagaagatgcttccgctatgagatcgacatgaagactatgaatgaagaacagagaaacgaactgatatctgagacacttcaaggcattcctaaagttgctgatgagagtatttgtgacaagttcataaaagatttagcagcgcaaacgtcaggtttcatgcccagggacatacttgcattggtcgcagatgctggtgtgtcttttgcgcataaaattgcagcagggaaagatagcaaagcaatcagtaagcatacggaggtccttccagaaagctcttctgccactcaaaatgaggaacaccatttcagcaaagaagatattatgtcttccttggaacgagccaagaaacggaatcgtgctgcactgggcacacccaaagttcctaatgtcaaatgggaagatgttggtgggctagaggatgtgaaaaaggttattctagatactattcagttgcctctgatgtacaagcacctgttttcttctaaattgcgcaagcgatcaggtgtcctgctatatggacctccaggaacagggaagactttactcgcgaaagcagtagcaactgaatgctcattgaactttcttagcgtcaaaggtccagaactgataaacatgtatgttggagaatcagagaaaaatgttcgggatatttttgagaagggttgtttcccaggtatcattagcttcgtccctgaggcggtgtcacaacttctcacaagtcttctgttaaattactgggccagtgtcttctcacttccccccttttcgtgtctactagttacttgtggagatcgatgggttgagtgacaacagccaggaccttttcattattggggctaccaataggcctgaccttcttgattctgcccttcttcgccctggtcggttcgacaagcttctttatgtcggtgtaaatactgaggcatcatacagggaaaggatccttaaagcacagacacgcaagtataagctgcacaagaacgtttctctcttgtcagttgcgcagcgttgtccaccaaacttcactggtgctgatatttacgcgctgtgtgcggatgcatggtttcatgcagcaaagcgatcagttgaaacattcgaaatcgatccttcaagaagtaatgaagccagtgccgaagaagtcatcgtcgagatcgacgattttatcacggtgttaggagatatcgcaccgtcgctctctctggacgagctacaaaactacgaacagttgaggcagaagatcgaaggaccttctagatgaatgccagcagcgatgcctccttgttggtgctcggcaagtcggctggtgtgagcaaaatccgtacgtcgtcgtctccagtggtgtcattctaaactggatctgctgctctcgagaccgaacaactgcaacaaactcaggcagggactcagcatctacacatcctgttctacggtgattgtgacacaaatcggctgcatgggaaccatactagctgccaagaaagatgaaagtgttttctccgacccaacctacaatgtgtctgttctttttgggaagagagatgagccactcctactagcttgcgcacgtcaacttattgagcacataagtggctcagcccggtcattggtgatttctctgggtctgaaagatcattctcagggaacgctgaaggatattactgtagctgtgatgattgaatagctgatgagctgggcatggggttggctcgatggttggcatattcagccccatcgataaagatactgtttagcattgcgcaagaggagccatcgtttataccatgcactaaattctggtagttttgtagttggaccttctatctacttggattaacaaaaggtggttttaagctggtgtcaaaatttgagtgtcaactttcacgctaaacaaaaggcactgtacactggtaaagcacttctgaggcgaatcatgcttttcgaggacaatttcggctatccgtgctggggctgccactgtggagctctgtgcgtactcctttgccgtct

SEQ ID NO: 17861 - DNA, 4246 bp, Zea Mays
atggcgagcgggggaggggggattcgggcgacgacttcggggaggatgaagtcgcgagggtggggagattcaagcgacgactttgggacaccggctattgcgctgaggcgtgggggcgactgtagtggcacggcgagttcagactccagcgccgtcttcttcgcggtcgccttttgcgctccatcccctgggctttccgtcacggcggccgcagccatggtggagatgcggcagcggaggaagccgctggtgctcgcctccacgcaggcgctcctcgactcgcttccgggggatcgcccgccgccaccgccgcagaagccggtgcgccttaaggccggcgtcctccgattcccctccggaggtggtggcgccgagttcggggagctcgcgtctttcgtcggcatccctgcccctgctctccgacggctcgcggtcgtcacgggtactcctgtgcttgtcaagaatactgacaataatgttgggaggattgtcaaagcagtattgtttggtaacccgtcccttgacaagtcctgctcagaacatactgaccaagtggtctctgcctctctctctggtcatgcaatgggcttcttaccttgtcgcacgttccctgctattggttttacatccatggatgaagatgttggttatgttagcccacttttggcattcaacttgggattgcatgtttcttgccttaaacttcttattcaaagagaagggcagcctttcaagttctgttctcgagctgaagagattgatgcaactgccagttctggaagtgatctttctcttcacttagaccttcttccatgccctcaagtgcctaaatatgcattgcatttacgagtttctgttgtgaggattcctgattgtggtgtgcttgcttctttaaagatatattcatcctttggaggaagtgagtaccaagacatggtagatcaagctttgaacgagtactttaagtttgataggttcctagcaagaggagatgtttttggtatacaaaacagttggaagtgtggctcaagctgctgcctggcatgcaataagcaggataataaactgaatccccgtaatatgatctactttaaggtgactggcatggaaccatcagatgaacctatacttcgtgttaattgcaatgaaacagcccttgtacttggtggagctgcttctgctgcaatccccccttattccttttttgcttcttctggtaattcagtaccattgcacagtgaagtagtggagcatttagcatctgtcattgcaccagcattgtgcccttcggatattttaccaaaaataaagttttccacttttttatatggcccgccaggatgtggaaagcgcacagtggttaggcatgttgctaaccatcttggtctgcatgtggtcgagtgtagctgtcatgatctgatgacatcatcagaaagtggggcacctgctgcacttgcaactgcctttaaagaagctcagaagtattctccttgtataatacttcttcgccactttgatgcaattgggaatgcatcctcaaacgaaggtccacagtctgagcaatctgggattgcatcgaacattgaatctgtcattaagcagtacattggacaacgttgggttgctaaggattcactgccaggaaaagatgtaaatgggagctcatacctcgtggagcctgaatgtgtaagctctcttcaaatcatactagttgcaactgcggacagttctgaaggaatgcaacagtcaattagaagatgcttccgctatgagatcgacatgaagactatgaatgaagaacagagaaacgaactgatatctgagacacttcaaggcattcctaaagttgctgatgagagtatttgtgacaagttcataaaagatttagcagcgcaaacgtcaggtttcatgcccagggacatacttgcattggtcgcagatgctggtgtgtcttttgcgcataaaattgcagcagggaaagatagcaaagcaatcagtaagcatacggaggtccttccagaaagctcttctgccactcaaaatgaggaacaccatttcagcaaagaagatattatgtcttccttggaacgagccaagaaacggaatcgtgctgcactgggcacacccaaagttcctaatgtcaaatgggaagatgttggtgggctagaggatgtgaaaaaggttattctagatactattcagttgcctctgatgtacaagcacctgttttcttctaaattgcgcaagcgatcaggtgtcctgctatatggacctccaggaacagggaagcgtcaaaggtccagaactgataaacatgtatgttggagaatcagagaaaaatgttcgggatatttttgagaaggctaggtctgcacgcccatgtgtcattttctttgatgagcttgattcccttgctcctgcacgaggatcctcagcagattctggcggtgtcatggacagggttgtttcccagttacttgtggagatcgatgggttgagtgacaacagccaggaccttttcattattggggctaccaataggcctgaccttcttgattctgcccttcttcgccctggtcggttcgacaagcttctttatgtcggtgtaaatactgaggcatcatacagggaaaggatccttaaagcacagacacgcaagtataagctgcacaagaacgtttctctcttgtcagttgcgcagcgttgtccaccaaacttcactggtgctgatatttacgcgctgtgtgcggatgcatggtttcatgcagcaaagcgatcagttgaaacattcgaaatcgatccttcaagaagtaatgaagccagtgccgaagaagtcatcgtcgagatcgacgattttatcacggtgttaggagatatcgcaccgtcgctctctctggacgagctacaaaactacgaacagttgaggcagaagatcgaaggaccttctagatgaagttgggtttccactccctgctgacattcttaaactgctaacacaccaaaacattccctgtcttacattttcgttcgtacacaagttttcctccctgaaaacttgggcacttctatatccattcctgatttatacaatcacatccttgtagcagcatctgtattgacatcagaatgacattttctctgaagagaaacatcctgtcattctttgttagcagctccgcaactattctgaatgagcccgtgaagtcaagcactcaaagccttacctgggaaacaaaatgctattcctgacctgaaggaagcatccaccaatacagctagtttgggtacacacgctgaaccagctagttcgcctgggagaggcctctgtctcgtttagatgccatcgtctagaagttgtatcggaaaaattataagcgaatgttgcaatgaacagagttccttgtactgctgtgatttgtcattggtcaaagagaactaactgcagcgtttgtctacctacaatacttgtttttttgttgttgctatcttgtagtgccagcagcgatgcctccttgttggtgctcggcaagtcggctggtgtgagcaaaatccgtacgtcgtcgtctccagtggtgtcattctaaactggatctgctgctctcgagaccgaacaactgcaacaaactcaggcagggactcagcatctacacatcctgttctacggtacggtgattgtgacacaaatcggctgcatgggaaccatactagctgccaagaaagatgaaagtgttttctccgacccaacctacaatgtgtctgttctttttgggaagagagatgagccactcctactagcttgcgcacgtcaacttattgagcacataagtggctcagcccggtcattggtgatttctctgggtctgaaagatcattctcagggaacgctgaaggatattactgtagctgtgatgattgaatagctgatgagctgggcatggggttggctcgatggttggcatattcagccccatcgataaagatactgtttagcattgcgcaagaggagccatcgtttataccatgcactaaattctggtagttttgtagttggaccttctatctacttggattaacaaaaggtggttttaagctggtgtcaaaatttgagtgtcaactttcacgctaaacaaaaggcactgtacactggtaaagcacttctgaggcgaatcatgcttttcgaggacaatttcggctatccgtgctggggctgccactgtggagctctgtgcgtactcctttgccgtct

SEQ ID NO: 17862 - DNA, 4339 bp, Zea Mays
atggcgagcgggggaggggggattcgggcgacgacttcggggaggatgaagtcgcgagggtggggagattcaagcgacgactttgggacaccggctattgcgctgaggcgtgggggcgactgtagtggcacggcgagttcagactccagcgccgtcttcttcgcggtcgccttttgcgctccatcccctgggctttccgtcacggcggccgcagccatggtggagatgcggcagcggaggaagccgctggtgctcgcctccacgcaggcgctcctcgactcgcttccgggggatcgcccgccgccaccgccgcagaagccggtgcgccttaaggccggcgtcctccgattcccctccggaggtggtggcgccgagttcggggagctcgcgtctttcgtcggcatccctgcccctgctctccgacggctcgcggtcgtcacgggtactcctgtgcttgtcaagaatactgacaataatgttgggaggattgtcaaagcagtattgtttggtaacccgtcccttgacaagtcctgctcagaacatactgaccaagtggtctctgcctctctctctggtcatgcaatgggcttcttaccttgtcgcacgttccctgctattggttttacatccatggatgaagatgttggttatgttagcccacttttggcattcaacttgggattgcatgtttcttgccttaaacttcttattcaaagagaagggcagcctttcaagttctgttctcgagctgaagagattgatgcaactgccagttctggaagtgatctttctcttcacttagaccttcttccatgccctcaagtgcctaaatatgcattgcatttacgagtttctgttgtgaggattcctgattgtggtgtgcttgcttctttaaagatatattcatcctttggaggaagtgagtaccaagacatggtagatcaagctttgaacgagtactttaagtttgataggttcctagcaagaggagatgtttttggtatacaaaacagttggaagtgtggctcaagctgctgcctggcatgcaataagcaggataataaactgaatccccgtaatatgatctactttaaggtgactggcatggaaccatcagatgaacctatacttcgtgttaattgcaatgaaacagcccttgtacttggtggagctgcttctgctgcaatccccccttattccttttttgcttcttctggtaattcagtaccattgcacagtgaagtagtggagcatttagcatctgtcattgcaccagcattgtgcccttcggatattttaccaaaaataaagttttccacttttttatatggcccgccaggatgtggaaagcgcacagtggttaggcatgttgctaaccatcttggtctgcatgtggtcgagtgtagctgtcatgatctgatgacatcatcagaaagtggggcacctgctgcacttgcaactgcctttaaagaagctcagaagtattctccttgtataatacttcttcgccactttgatgcaattgggaatgcatcctcaaacgaaggtccacagtctgagcaatctgggattgcatcgaacattgaatctgtcattaagcagtacattggacaacgttgggttgctaaggattcactgccaggaaaagatgtaaatgggagctcatacctcgtggagcctgaatgtgtaagctctcttcaaatcatactagttgcaactgcggacagttctgaaggaatgcaacagtcaattagaagatgcttccgctatgagatcgacatgaagactatgaatgaagaacagagaaacgaactgatatctgagacacttcaaggcattcctaaagttgctgatgagagtatttgtgacaagttcataaaagatttagcagcgcaaacgtcaggtttcatgcccagggacatacttgcattggtcgcagatgctggtgtgtcttttgcgcataaaattgcagcagggaaagatagcaaagcaatcagtaagcatacggaggtccttccagaaagctcttctgccactcaaaatgaggaacaccatttcagcaaagaagatattatgtcttccttggaacgagccaagaaacggaatcgtgctgcactgggcacacccaaagttcctaatgtcaaatgggaagatgttggtgggctagaggatgtgaaaaaggttattctagatactattcagttgcctctgatgtacaagcacctgttttcttctaaattgcgcaagcgatcaggtgtcctgctatatggacctccaggaacagggaagactttactcgcgaaagcagtagcaactgaatgctcattgaactttcttagcgtcaaaggtccagaactgataaacatgtatgttggagaatcagagaaaaatgttcgggatatttttgagaaggctaggtctgcacgcccatgtgtcattttctttgatgagcttgattcccttgctcctgcacgaggatcctcagcagattctggcggtgtcatggacagggttgtttcccagttacttgtggagatcgatgggttgagtgacaacagccaggaccttttcattattggggctaccaataggcctgaccttcttgattctgcccttcttcgccctggtcggttcgacaagcttctttatgtcggtgtaaatactgaggcatcatacagggaaaggatccttaaagcacagacacgcaagtataagctgcacaagaacgtttctctcttgtcagttgcgcagcgttgtccaccaaacttcactggtgctgatatttacgcgctgtgtgcggatgcatggtttcatgcagcaaagcgatcagttgaaacattcgaaatcgatccttcaagaagtaatgaagccagtgccgaagaagtcatcgtcgagatcgacgattttatcacggtgttaggagatatcgcaccgtcgctctctctggacgagctacaaaactacgaacagttgaggcagaagatcgaaggaccttctagatgaagttgggtttccactccctgctgacattcttaaactgctaacacaccaaaacattccctgtcttacattttcgttcgtacacaagttttcctccctgaaaacttgggcacttctatatccattcctgatttatacaatcacatccttgtagcagcatctgtattgacatcagaatgacattttctctgaagagaaacatcctgtcattctttgttagcagctccgcaactattctgaatgagcccgtgaagtcaagcactcaaagccttacctgggaaacaaaatgctattcctgacctgaaggaagcatccaccaatacagctagtttgggtacacacgctgaaccagctagttcgcctgggagaggcctctgtctcgtttagatgccatcgtctagaagttgtatcggaaaaattataagcgaatgttgcaatgaacagagttccttgtactgctgtgatttgtcattggtcaaagagaactaactgcagcgtttgtctacctacaatacttgtttttttgttgttgctatcttgtagtgccagcagcgatgcctccttgttggtgctcggcaagtcggctggtgtgagcaaaatccgtacgtcgtcgtctccagtggtgtcattctaaactggatctgctgctctcgagaccgaacaactgcaacaaactcaggcagggactcagcatctacacatcctgttctacggtacggtacgaactgaactaaactacccccatgcatatgatgatacctttctggtgattgtgacacaaatcggctgcatgggaaccatactagctgccaaatgaaagtgttttctccgacccaacctacaatgtgtctgttctttttgggaagagagatgagccactcctactagcttgcgcacgtcaacttattgagcacataagtggctcagcccggtcattggtgatttctctgggtctgaaagatcattctcagggaacgctgaaggatattactgtagctgtgatgattgaatagctgatgagctgggcatggggttggctcgatggttggcatattcagccccatcgataaagatactgtttagcattgcgcaagaggagccatcgtttataccatgcactaaattctggtagttttgtagttggaccttctatctacttggattaacaaaaggtggttttaagctggtgtcaaaatttgagtgtcaactttcacgctaaacaaaaggcactgtacactggtaaagcacttctgaggcgaatcatgcttttcgaggacaatttcggctatccgtgctggggctgccactgtggagctctgtgcgtactcctttgccgtct

SEQ ID NO: 17863 - DNA, 4215 bp, Zea Mays
atggcgagcgggggaggggggattcgggcgacgacttcggggaggatgaagtcgcgagggtggggagattcaagcgacgactttgggacaccggctattgcgctgaggcgtgggggcgactgtagtggcacggcgagttcagactccagcgccgtcttcttcgcggtcgccttttgcgctccatcccctgggctttccgtcacggcggccgcagccatggtggagatgcggcagcggaggaagccgctggtgctcgcctccacgcaggcgctcctcgactcgcttccgggggatcgcccgccgccaccgccgcagaagccggtgcgccttaaggccggcgtcctccgattcccctccggaggtggtggcgccgagttcggggagctcgcgtctttcgtcggcatccctgcccctgctctccgacggctcgcggtcgtcacgggtactcctgtgcttgtcaagaatactgacaataatgttgggaggattgtcaaagcagtattgtttggtaacccgtcccttgacaagtcctgctcagaacatactgaccaagtggtctctgcctctctctctggtcatgcaatgggcttcttaccttgtcgcacgttccctgctattggttttacatccatggatgaagatgttggttatgttagcccacttttggcattcaacttgggattgcatgtttcttgccttaaacttcttattcaaagagaagggcagcctttcaagttctgttctcgagctgaagagattgatgcaactgccagttctggaagtgatctttctcttcacttagaccttcttccatgccctcaagtgcctaaatatgcattgcatttacgagtttctgttgtgaggattcctgattgtggtgtgcttgcttctttaaagatatattcatcctttggaggaagtgagtaccaagacatggtagatcaagctttgaacgagtactttaagtttgataggttcctagcaagaggagatgtttttggtatacaaaacagttggaagtgtggctcaagctgctgcctggcatgcaataagcaggataataaactgaatccccgtaatatgatctactttaaggtgactggcatggaaccatcagatgaacctatacttcgtgttaattgcaatgaaacagcccttgtacttggtggagctgcttctgctgcaatccccccttattccttttttgcttcttctggtaattcagtaccattgcacagtgaagtagtggagcatttagcatctgtcattgcaccagcattgtgcccttcggatattttaccaaaaataaagttttccacttttttatatggcccgccaggatgtggaaagcgcacagtggttaggcatgttgctaaccatcttggtctgcatgtggtcgagtgtagctgtcatgatctgatgacatcatcagaaagtggggcacctgctgcacttgcaactgcctttaaagaagctcagaagtattctccttgtataatacttcttcgccactttgatgcaattgggaatgcatcctcaaacgaaggtccacagtctgagcaatctgggattgcatcgaacattgaatctgtcattaagcagtacattggacaacgttgggttgctaaggattcactgccaggaaaagatgtaaatgggagctcatacctcgtggagcctgaatgtgtaagctctcttcaaatcatactagttgcaactgcggacagttctgaaggaatgcaacagtcaattagaagatgcttccgctatgagatcgacatgaagactatgaatgaagaacagagaaacgaactgatatctgagacacttcaaggcattcctaaagttgctgatgagagtatttgtgacaagttcataaaagatttagcagcgcaaacgtcaggtttcatgcccagggacatacttgcattggtcgcagatgctggtgtgtcttttgcgcataaaattgcagcagggaaagatagcaaagcaatcagtaagcatacggaggtccttccagaaagctcttctgccactcaaaatgaggaacaccatttcagcaaagaagatattatgtcttccttggaacgagccaagaaacggaatcgtgctgcactgggcacacccaaagttcctaatgtcaaatgggaagatgttggtgggctagaggatgtgaaaaaggttattctagatactattcagttgcctctgatgtacaagcacctgttttcttctaaattgcgcaagcgatcaggtgtcctgctatatggacctccaggaacagggaagactttactcgcgaaagcagtagcaactgaatgctcattgaactttcttagcgtcaaaggtccagaactgataaacatgtatgttggagaatcagagaaaaatgttcgggatatttttgagaagattctggcggtgtcatggacagggttgtttcccagttacttgtggagatcgatgggttgagtgacaacagccaggaccttttcattattggggctaccaataggcctgaccttcttgattctgcccttcttcgccctggtcggttcgacaagcttctttatgtcggtgtaaatactgaggcatcatacagggaaaggatccttaaagcacagacacgcaagtataagctgcacaagaacgtttctctcttgtcagttgcgcagcgttgtccaccaaacttcactggtgctgatatttacgcgctgtgtgcggatgcatggtttcatgcagcaaagcgatcagttgaaacattcgaaatcgatccttcaagaagtaatgaagccagtgccgaagaagtcatcgtcgagatcgacgattttatcacggtgttaggagatatcgcaccgtcgctctctctggacgagctacaaaactacgaacagttgaggcagaagatcgaaggaccttctagatgaagttgggtttccactccctgctgacattcttaaactgctaacacaccaaaacattccctgtcttacattttcgttcgtacacaagttttcctccctgaaaacttgggcacttctatatccattcctgatttatacaatcacatccttgtagcagcatctgtattgacatcagaatgacattttctctgaagagaaacatcctgtcattctttgttagcagctccgcaactattctgaatgagcccgtgaagtcaagcactcaaagccttacctgggaaacaaaatgctattcctgacctgaaggaagcatccaccaatacagctagtttgggtacacacgctgaaccagctagttcgcctgggagaggcctctgtctcgtttagatgccatcgtctagaagttgtatcggaaaaattataagcgaatgttgcaatgaacagagttccttgtactgctgtgatttgtcattggtcaaagagaactaactgcagcgtttgtctacctacaatacttgtttttttgttgttgctatcttgtagtgccagcagcgatgcctccttgttggtgctcggcaagtcggctggtgtgagcaaaatccgtacgtcgtcgtctccagtggtgtcattctaaactggatctgctgctctcgagaccgaacaactgcaacaaactcaggcagggactcagcatctacacatcctgttctacggtgattgtgacacaaatcggctgcatgggaaccatactagctgccaagaaagatgaaagtgttttctccgacccaacctacaatgtgtctgttctttttgggaagagagatgagccactcctactagcttgcgcacgtcaacttattgagcacataagtggctcagcccggtcattggtgatttctctgggtctgaaagatcattctcagggaacgctgaaggatattactgtagctgtgatgattgaatagctgatgagctgggcatggggttggctcgatggttggcatattcagccccatcgataaagatactgtttagcattgcgcaagaggagccatcgtttataccatgcactaaattctggtagttttgtagttggaccttctatctacttggattaacaaaaggtggttttaagctggtgtcaaaatttgagtgtcaactttcacgctaaacaaaaggcactgtacactggtaaagcacttctgaggcgaatcatgcttttcgaggacaatttcggctatccgtgctggggctgccactgtggagctctgtgcgtactcctttgccgtct

SEQ ID NO: 17864 - DNA, 4286 bp, Zea Mays
atggcgagcgggggaggggggattcgggcgacgacttcggggaggatgaagtcgcgagggtggggagattcaagcgacgactttgggacaccggctattgcgctgaggcgtgggggcgactgtagtggcacggcgagttcagactccagcgccgtcttcttcgcggtcgccttttgcgctccatcccctgggctttccgtcacggcggccgcagccatggtggagatgcggcagcggaggaagccgctggtgctcgcctccacgcaggcgctcctcgactcgcttccgggggatcgcccgccgccaccgccgcagaagccggtgcgccttaaggccggcgtcctccgattcccctccggaggtggtggcgccgagttcggggagctcgcgtctttcgtcggcatccctgcccctgctctccgacggctcgcggtcgtcacgggtactcctgtgcttgtcaagaatactgacaataatgttgggaggattgtcaaagcagtattgtttggtaacccgtcccttgacaagtcctgctcagaacatactgaccaagtggtctctgcctctctctctggtcatgcaatgggcttcttaccttgtcgcacgttccctgctattggttttacatccatggatgaagatgttggttatgttagcccacttttggcattcaacttgggattgcatgtttcttgccttaaacttcttattcaaagagaagggcagcctttcaagttctgttctcgagctgaagagattgatgcaactgccagttctggaagtgatctttctcttcacttagaccttcttccatgccctcaagtgcctaaatatgcattgcatttacgagtttctgttgtgaggattcctgattgtggtgtgcttgcttctttaaagatatattcatcctttggaggaagtgagtaccaagacatggtagatcaagctttgaacgagtactttaagtttgataggttcctagcaagaggagatgtttttggtatacaaaacagttggaagtgtggctcaagctgctgcctggcatgcaataagcaggataataaactgaatccccgtaatatgatctactttaaggtgactggcatggaaccatcagatgaacctatacttcgtgttaattgcaatgaaacagcccttgtacttggtggagctgcttctgctgcaatccccccttattccttttttgcttcttctggtaattcagtaccattgcacagtgaagtagtggagcatttagcatctgtcattgcaccagcattgtgcccttcggatattttaccaaaaataaagttttccacttttttatatggcccgccaggatgtggaaagcgcacagtggttaggcatgttgctaaccatcttggtctgcatgtggtcgagtgtagctgtcatgatctgatgacatcatcagaaagtggggcacctgctgcacttgcaactgcctttaaagaagctcagaagtattctccttgtataatacttcttcgccactttgatgcaattgggaatgcatcctcaaacgaaggtccacagtctgagcaatctgggattgcatcgaacattgaatctgtcattaagcagtacattggacaacgttgggttgctaaggattcactgccaggaaaagatgtaaatgggagctcatacctcgtggagcctgaatgtgtaagctctcttcaaatcatactagttgcaactgcggacagttctgaaggaatgcaacagtcaattagaagatgcttccgctatgagatcgacatgaagactatgaatgaagaacagagaaacgaactgatatctgagacacttcaaggcattcctaaagttgctgatgagagtatttgtgacaagttcataaaagatttagcagcgcaaacgtcaggtttcatgcccagggacatacttgcattggtcgcagatgctggtgtgtcttttgcgcataaaattgcagcagggaaagatagcaaagcaatcagtaagcatacggaggtccttccagaaagctcttctgccactcaaaatgaggaacaccatttcagcaaagaagatattatgtcttccttggaacgagccaagaaacggaatcgtgctgcactgggcacacccaaagttcctaatgtcaaatgggaagatgttggtgggctagaggatgtgaaaaaggttattctagatactattcagttgcctctgatgtacaagcacctgttttcttctaaattgcgcaagcgatcaggtgtcctgctatatggacctccaggaacagggaagactttactcgcgaaagcagtagcaactgaatgctcattgaactttcttagcgtcaaaggtccagaactgataaacatgtatgttggagaatcagagaaaaatgttcgggatatttttgagaaggctaggtctgcacgcccatgtgtcattttctttgatgagcttgattcccttgctcctgcacgaggatcctcagcagattctggcggtgtcatggacagggttgtttcccagttacttgtggagatcgatgggttgagtgacaacagccaggaccttttcattattggggctaccaataggcctgaccttcttgattctgcccttcttcgccctggtcggttcgacaagcttctttatgtcggtgtaaatactgaggcatcatacagggaaaggatccttaaagcacagacacgcaagtataagctgcacaagaacgtttctctcttgtcagttgcgcagcgttgtccaccaaacttcactggtgctgatatttacgcgctgtgtgcggatgcatggtttcatgcagcaaagcgatcagttgaaacattcgaaatcgatccttcaagaagtaatgaagccagtgccgaagaagtcatcgtcgagatcgacgattttatcacggtgttaggagatatcgcaccgtcgctctctctggacgagctacaaaactacgaacagttgaggcagaagatcgaaggaccttctagatgaagttgggtttccactccctgctgacattcttaaactgctaacacaccaaaacattccctgtcttacattttcgttcgtacacaagttttcctccctgaaaacttgggcacttctatatccattcctgatttatacaatcacatccttgtagcagcatctgtattgacatcagaatgacattttctctgaagagaaacatcctgtcattctttgttagcagctccgcaactattctgaatgagcccgtgaagtcaagcactcaaagccttacctgggaaacaaaatgctattcctgacctgaaggaagcatccaccaatacagctagtttgggtacacacgctgaaccagctagttcgcctgggagaggcctctgtctcgtttagatgccatcgtctagaagttgtatcggaaaaattataagcgaatgttgcaatgaacagagttccttgtactgctgtgatttgtcattggtcaaagagaactaactgcagcgtttgtctacctacaatacttgtttttttgttgttgctatcttgtagtgccagcagcgatgcctccttgttggtgctcggcaagtcggctggtgtgagcaaaatccgtacgtcgtcgtctccagtggtgtcattctaaactggatctgctgctctcgagaccgaacaactgcaacaaactcaggcagggactcagcatctacacatcctgttctacggtgattgtgacacaaatcggctgcatgggaaccatactagctgccaaatgaaagtgttttctccgacccaacctacaatgtgtctgttctttttgggaagagagatgagccactcctactagcttgcgcacgtcaacttattgagcacataagtggctcagcccggtcattggtgatttctctgggtctgaaagatcattctcagggaacgctgaaggatattactgtagctgtgatgattgaatagctgatgagctgggcatggggttggctcgatggttggcatattcagccccatcgataaagatactgtttagcattgcgcaagaggagccatcgtttataccatgcactaaattctggtagttttgtagttggaccttctatctacttggattaacaaaaggtggttttaagctggtgtcaaaatttgagtgtcaactttcacgctaaacaaaaggcactgtacactggtaaagcacttctgaggcgaatcatgcttttcgaggacaatttcggctatccgtgctggggctgccactgtggagctctgtgcgtactcctttgccgtct

SEQ ID NO: 17865 - DNA, 3663 bp, Zea Mays
atggcgagcgggggaggggggattcgggcgacgacttcggggaggatgaagtcgcgagggtggggagattcaagcgacgactttgggacaccggctattgcgctgaggcgtgggggcgactgtagtggcacggcgagttcagactccagcgccgtcttcttcgcggtcgccttttgcgctccatcccctgggctttccgtcacggcggccgcagccatggtggagatgcggcagcggaggaagccgctggtgctcgcctccacgcaggcgctcctcgactcgcttccgggggatcgcccgccgccaccgccgcagaagccggtgcgccttaaggccggcgtcctccgattcccctccggaggtggtggcgccgagttcggggagctcgcgtctttcgtcggcatccctgcccctgctctccgacggctcgcggtcgtcacgggtactcctgtgcttgtcaagaatactgacaataatgttgggaggattgtcaaagcagtattgtttggtaacccgtcccttgacaagtcctgctcagaacatactgaccaagtggtctctgcctctctctctggtcatgcaatgggcttcttaccttgtcgcacgttccctgctattggttttacatccatggatgaagatgttggttatgttagcccacttttggcattcaacttgggattgcatgtttcttgccttaaacttcttattcaaagagaagggcagcctttcaagttctgttctcgagctgaagagattgatgcaactgccagttctggaagtgatctttctcttcacttagaccttcttccatgccctcaagtgcctaaatatgcattgcatttacgagtttctgttgtgaggattcctgattgtggtgtgcttgcttctttaaagatatattcatcctttggaggaagtgagtaccaagacatggtagatcaagctttgaacgagtactttaagtttgataggttcctagcaagaggagatgtttttggtatacaaaacagttggaagtgtggctcaagctgctgcctggcatgcaataagcaggataataaactgaatccccgtaatatgatctactttaaggtgactggcatggaaccatcagatgaacctatacttcgtgttaattgcaatgaaacagcccttgtacttggtggagctgcttctgctgcaatccccccttattccttttttgcttcttctggtaattcagtaccattgcacagtgaagtagtggagcatttagcatctgtcattgcaccagcattgtgcccttcggatattttaccaaaaataaagttttccacttttttatatggcccgccaggatgtggaaagcgcacagtggttaggcatgttgctaaccatcttggtctgcatgtggtcgagtgtagctgtcatgatctgatgacatcatcagaaagtggggcacctgctgcacttgcaactgcctttaaagaagctcagaagtattctccttgtataatacttcttcgccactttgatgcaattgggaatgcatcctcaaacgaaggtccacagtctgagcaatctgggattgcatcgaacattgaatctgtcattaagcagtacattggacaacgttgggttgctaaggattcactgccaggaaaagatgtaaatgggagctcatacctcgtggagcctgaatgtgtaagctctcttcaaatcatactagttgcaactgcggacagttctgaaggaatgcaacagtcaattagaagatgcttccgctatgagatcgacatgaagactatgaatgaagaacagagaaacgaactgatatctgagacacttcaaggcattcctaaagttgctgatgagagtatttgtgacaagttcataaaagatttagcagcgcaaacgtcaggtttcatgcccagggacatacttgcattggtcgcagatgctggtgtgtcttttgcgcataaaattgcagcagggaaagatagcaaagcaatcagtaagcatacggaggtccttccagaaagctcttctgccactcaaaatgaggaacaccatttcagcaaagaagatattatgtcttccttggaacgagccaagaaacggaatcgtgctgcactgggcacacccaaagttcctaatgtcaaatgggaagatgttggtgggctagaggatgtgaaaaaggttattctagatactattcaggtaaattggacttgattcaactttgcctctgatgtacaagcacctgttttcttctaaattgcgcaagcgatcaggtgtcctgctatatggacctccaggaacagggaagggttgtttcccaggtatcattagcttcgtccctgaggcggtgtcacaacttctcacaagtcttctgttaaattactgggccagtgtcttctcacttccccccttttcgtgtctactagttacttgtggagatcgatgggttgagtgacaacagccaggaccttttcattattggggctaccaataggcctgaccttcttgattctgcccttcttcgccctggtcggttcgacaagcttctttatgtcggtgtaaatactgaggcatcatacagggaaaggatccttaaagcacagacacgcaagtataagctgcacaagaacgtttctctcttgtcagttgcgcagcgttgtccaccaaacttcactggtgctgatatttacgcgctgtgtgcggatgcatggtttcatgcagcaaagcgatcagttgaaacattcgaaatcgatccttcaagaagtaatgaagccagtgccgaagaagtcatcgtcgagatcgacgattttatcacggtgttaggagatatcgcaccgtcgctctctctggacgagctacaaaactacgaacagttgaggcagaagatcgaaggaccttctagatgaatgccagcagcgatgcctccttgttggtgctcggcaagtcggctggtgtgagcaaaatccgtacgtcgtcgtctccagtggtgtcattctaaactggatctgctgctctcgagaccgaacaactgcaacaaactcaggcagggactcagcatctacacatcctgttctacggtacggtgattgtgacacaaatcggctgcatgggaaccatactagctgccaagaaagatgaaagtgttttctccgacccaacctacaatgtgtctgttctttttgggaagagagatgagccactcctactagcttgcgcacgtcaacttattgagcacataagtggctcagcccggtcattggtgatttctctgggtctgaaagatcattctcagggaacgctgaaggatattactgtagctgtgatgattgaatagctgatgagctgggcatggggttggctcgatggttggcatattcagccccatcgataaagatactgtttagcattgcgcaagaggagccatcgtttataccatgcactaaattctggtagttttgtagttggaccttctatctacttggattaacaaaaggtggttttaagctggtgtcaaaatttgagtgtcaactttcacgctaaacaaaaggcactgtacactggtaaagcacttctgaggcgaatcatgcttttcgaggacaatttcggctatccgtgctggggctgccactgtggagctctgtgcgtactcctttgccgtct

SEQ ID NO: 17866 - DNA, 3752 bp, Zea Mays
atggcgagcgggggaggggggattcgggcgacgacttcggggaggatgaagtcgcgagggtggggagattcaagcgacgactttgggacaccggctattgcgctgaggcgtgggggcgactgtagtggcacggcgagttcagactccagcgccgtcttcttcgcggtcgccttttgcgctccatcccctgggctttccgtcacggcggccgcagccatggtggagatgcggcagcggaggaagccgctggtgctcgcctccacgcaggcgctcctcgactcgcttccgggggatcgcccgccgccaccgccgcagaagccggtgcgccttaaggccggcgtcctccgattcccctccggaggtggtggcgccgagttcggggagctcgcgtctttcgtcggcatccctgcccctgctctccgacggctcgcggtcgtcacgggtactcctgtgcttgtcaagaatactgacaataatgttgggaggattgtcaaagcagtattgtttggtaacccgtcccttgacaagtcctgctcagaacatactgaccaagtggtctctgcctctctctctggtcatgcaatgggcttcttaccttgtcgcacgttccctgctattggttttacatccatggatgaagatgttggttatgttagcccacttttggcattcaacttgggattgcatgtttcttgccttaaacttcttattcaaagagaagggcagcctttcaagttctgttctcgagctgaagagattgatgcaactgccagttctggaagtgatctttctcttcacttagaccttcttccatgccctcaagtgcctaaatatgcattgcatttacgagtttctgttgtgaggattcctgattgtggtgtgcttgcttctttaaagatatattcatcctttggaggaagtgagtaccaagacatggtagatcaagctttgaacgagtactttaagtttgataggttcctagcaagaggagatgtttttggtatacaaaacagttggaagtgtggctcaagctgctgcctggcatgcaataagcaggataataaactgaatccccgtaatatgatctactttaaggtgactggcatggaaccatcagatgaacctatacttcgtgttaattgcaatgaaacagcccttgtacttggtggagctgcttctgctgcaatccccccttattccttttttgcttcttctggtaattcagtaccattgcacagtgaagtagtggagcatttagcatctgtcattgcaccagcattgtgcccttcggatattttaccaaaaataaagttttccacttttttatatggcccgccaggatgtggaaagcgcacagtggttaggcatgttgctaaccatcttggtctgcatgtggtcgagtgtagctgtcatgatctgatgacatcatcagaaagtggggcacctgctgcacttgcaactgcctttaaagaagctcagaagtattctccttgtataatacttcttcgccactttgatgcaattgggaatgcatcctcaaacgaaggtccacagtctgagcaatctgggattgcatcgaacattgaatctgtcattaagcagtacattggacaacgttgggttgctaaggattcactgccaggaaaagatgtaaatgggagctcatacctcgtggagcctgaatgtgtaagctctcttcaaatcatactagttgcaactgcggacagttctgaaggaatgcaacagtcaattagaagatgcttccgctatgagatcgacatgaagactatgaatgaagaacagagaaacgaactgatatctgagacacttcaaggcattcctaaagttgctgatgagagtatttgtgacaagttcataaaagatttagcagcgcaaacgtcaggtttcatgcccagggacatacttgcattggtcgcagatgctggtgtgtcttttgcgcataaaattgcagcagggaaagatagcaaagcaatcagtaagcatacggaggtccttccagaaagctcttctgccactcaaaatgaggaacaccatttcagcaaagaagatattatgtcttccttggaacgagccaagaaacggaatcgtgctgcactgggcacacccaaagttcctaatgtcaaatgggaagatgttggtgggctagaggatgtgaaaaaggttattctagatactattcagttgcctctgatgtacaagcacctgttttcttctaaattgcgcaagcgatcaggtgtcctgctatatggacctccaggaacagggaagactttactcgcgaaagcagtagcaactgaatgctcattgaactttcttagcgtcaaaggtccagaactgataaacatgtatgttggagaatcagagaaaaatgttcgggatatttttgagaaggctaggtctgcacgcccatgtgtcattttctttgatgagcttgattcccttgctcctgcacgaggatcctcagcagattctggcggtgtcatggacagggttgtttcccagttacttgtggagatcgatgggttgagtgacaacagccaggaccttttcattattggggctaccaataggcctgaccttcttgattctgcccttcttcgccctggtcggttcgacaagcttctttatgtcggtgtaaatactgaggcatcatacagggaaaggatccttaaagcacagacacgcaagtataagctgcacaagaacgtttctctcttgtcagttgcgcagcgttgtccaccaaacttcactggtgctgatatttacgcgctgtgtgcggatgcatggtttcatgcagcaaagcgatcagttgaaacattcgaaatcgatccttcaagaagtaatgaagccagtgccgaagaagtcatcgtcgagatcgacgattttatcacggtgttaggagatatcgcaccgtcgctctctctggacgagctacaaaactacgaacagttgaggcagaagatcgaaggaccttctagatgaatgccagcagcgatgcctccttgttggtgctcggcaagtcggctggtgtgagcaaaatccgtacgtcgtcgtctccagtggtgtcattctaaactggatctgctgctctcgagaccgaacaactgcaacaaactcaggcagggactcagcatctacacatcctgttctacggtgattgtgacacaaatcggctgcatgggaaccatactagctgccaagaaagatgaaagtgttttctccgacccaacctacaatgtgtctgttctttttgggaagagagatgagccactcctactagcttgcgcacgtcaacttattgagcacataagtggctcagcccggtcattggtgatttctctgggtctgaaagatcattctcagggaacgctgaaggatattactgtagctgtgatgattgaatagctgatgagctgggcatggggttggctcgatggttggcatattcagccccatcgataaagatactgtttagcattgcgcaagaggagccatcgtttataccatgcactaaattctggtagttttgtagttggaccttctatctacttggattaacaaaaggtggttttaagctggtgtcaaaatttgagtgtcaactttcacgctaaacaaaaggcactgtacactggtaaagcacttctgaggcgaatcatgcttttcgaggacaatttcggctatccgtgctggggctgccactgtggagctctgtgcgtactcctttgccgtct

SEQ ID NO: 17867 - DNA, 4296 bp, Zea Mays
atggcgagcgggggaggggggattcgggcgacgacttcggggaggatgaagtcgcgagggtggggagattcaagcgacgactttgggacaccggctattgcgctgaggcgtgggggcgactgtagtggcacggcgagttcagactccagcgccgtcttcttcgcggtcgccttttgcgctccatcccctgggctttccgtcacggcggccgcagccatggtggagatgcggcagcggaggaagccgctggtgctcgcctccacgcaggcgctcctcgactcgcttccgggggatcgcccgccgccaccgccgcagaagccggtgcgccttaaggccggcgtcctccgattcccctccggaggtggtggcgccgagttcggggagctcgcgtctttcgtcggcatccctgcccctgctctccgacggctcgcggtcgtcacgggtactcctgtgcttgtcaagaatactgacaataatgttgggaggattgtcaaagcagtattgtttggtaacccgtcccttgacaagtcctgctcagaacatactgaccaagtggtctctgcctctctctctggtcatgcaatgggcttcttaccttgtcgcacgttccctgctattggttttacatccatggatgaagatgttggttatgttagcccacttttggcattcaacttgggattgcatgtttcttgccttaaacttcttattcaaagagaagggcagcctttcaagttctgttctcgagctgaagagattgatgcaactgccagttctggaagtgatctttctcttcacttagaccttcttccatgccctcaagtgcctaaatatgcattgcatttacgagtttctgttgtgaggattcctgattgtggtgtgcttgcttctttaaagatatattcatcctttggaggaagtgagtaccaagacatggtagatcaagctttgaacgagtactttaagtttgataggttcctagcaagaggagatgtttttggtatacaaaacagttggaagtgtggctcaagctgctgcctggcatgcaataagcaggataataaactgaatccccgtaatatgatctactttaaggtgactggcatggaaccatcagatgaacctatacttcgtgttaattgcaatgaaacagcccttgtacttggtggagctgcttctgctgcaatccccccttattccttttttgcttcttctggtaattcagtaccattgcacagtgaagtagtggagcatttagcatctgtcattgcaccagcattgtgcccttcggatattttaccaaaaataaagttttccacttttttatatggcccgccaggatgtggaaagcgcacagtggttaggcatgttgctaaccatcttggtctgcatgtggtcgagtgtagctgtcatgatctgatgacatcatcagaaagtggggcacctgctgcacttgcaactgcctttaaagaagctcagaagtattctccttgtataatacttcttcgccactttgatgcaattgggaatgcatcctcaaacgaaggtccacagtctgagcaatctgggattgcatcgaacattgaatctgtcattaagcagtacattggacaacgttgggttgctaaggattcactgccaggaaaagatgtaaatgggagctcatacctcgtggagcctgaatgtgtaagctctcttcaaatcatactagttgcaactgcggacagttctgaaggaatgcaacagtcaattagaagatgcttccgctatgagatcgacatgaagactatgaatgaagaacagagaaacgaactgatatctgagacacttcaaggcattcctaaagttgctgatgagagtatttgtgacaagttcataaaagatttagcagcgcaaacgtcaggtttcatgcccagggacatacttgcattggtcgcagatgctggtgtgtcttttgcgcataaaattgcagcagggaaagatagcaaagcaatcagtaagcatacggaggtccttccagaaagctcttctgccactcaaaatgaggaacaccatttcagcaaagaagatattatgtcttccttggaacgagccaagaaacggaatcgtgctgcactgggcacacccaaagttcctaatgtcaaatgggaagatgttggtgggctagaggatgtgaaaaaggttattctagatactattcagttgcctctgatgtacaagcacctgttttcttctaaattgcgcaagcgatcaggtgtcctgctatatggacctccaggaacagggaagactttactcgcgaaagcagtagcaactgaatgctcattgaactttcttagcgtcaaaggtccagaactgataaacatgtatgttggagaatcagagaaaaatgttcgggatatttttgagaaggctaggtctgcacgcccatgtgtcattttctttgatgagcttgattcccttgctcctgcacgaggatcctcagcagattctggcggtgtcatggacagggttgtttcccagttacttgtggagatcgatgggttgagtgacaacagccaggaccttttcattattggggctaccaataggcctgaccttcttgattctgcccttcttcgccctggtcggttcgacaagcttctttatgtcggtgtaaatactgaggcatcatacagggaaaggatccttaaagcacagacacgcaagtataagctgcacaagaacgtttctctcttgtcagttgcgcagcgttgtccaccaaacttcactggtgctgatatttacgcgctgtgtgcggatgcatggtttcatgcagcaaagcgatcagttgaaacattcgaaatcgatccttcaagaagtaatgaagccagtgccgaagaagtcatcgtcgagatcgacgattttatcacggtgttaggagatatcgcaccgtcgctctctctggacgagctacaaaactacgaacagttgaggcagaagatcgaaggaccttctagatgaagttgggtttccactccctgctgacattcttaaactgctaacacaccaaaacattccctgtcttacattttcgttcgtacacaagttttcctccctgaaaacttgggcacttctatatccattcctgatttatacaatcacatccttgtagcagcatctgtattgacatcagaatgacattttctctgaagagaaacatcctgtcattctttgttagcagctccgcaactattctgaatgagcccgtgaagtcaagcactcaaagccttacctgggaaacaaaatgctattcctgacctgaaggaagcatccaccaatacagctagtttgggtacacacgctgaaccagctagttcgcctgggagaggcctctgtctcgtttagatgccatcgtctagaagttgtatcggaaaaattataagcgaatgttgcaatgaacagagttccttgtactgctgtgatttgtcattggtcaaagagaactaactgcagcgtttgtctacctacaatacttgtttttttgttgttgctatcttgtagtgccagcagcgatgcctccttgttggtgctcggcaagtcggctggtgtgagcaaaatccgtacgtcgtcgtctccagtggtgtcattctaaactggatctgctgctctcgagaccgaacaactgcaacaaactcaggcagggactcagcatctacacatcctgttctacggtacggtgattgtgacacaaatcggctgcatgggaaccatactagctgccaagaaagatgaaagtgttttctccgacccaacctacaatgtgtctgttctttttgggaagagagatgagccactcctactagcttgcgcacgtcaacttattgagcacataagtggctcagcccggtcattggtgatttctctgggtctgaaagatcattctcagggaacgctgaaggatattactgtagctgtgatgattgaatagctgatgagctgggcatggggttggctcgatggttggcatattcagccccatcgataaagatactgtttagcattgcgcaagaggagccatcgtttataccatgcactaaattctggtagttttgtagttggaccttctatctacttggattaacaaaaggtggttttaagctggtgtcaaaatttgagtgtcaactttcacgctaaacaaaaggcactgtacactggtaaagcacttctgaggcgaatcatgcttttcgaggacaatttcggctatccgtgctggggctgccactgtggagctctgtgcgtactcctttgccgtct

SEQ ID NO: 17868 - DNA, 4291 bp, Zea Mays
atggcgagcgggggaggggggattcgggcgacgacttcggggaggatgaagtcgcgagggtggggagattcaagcgacgactttgggacaccggctattgcgctgaggcgtgggggcgactgtagtggcacggcgagttcagactccagcgccgtcttcttcgcggtcgccttttgcgctccatcccctgggctttccgtcacggcggccgcagccatggtggagatgcggcagcggaggaagccgctggtgctcgcctccacgcaggcgctcctcgactcgcttccgggggatcgcccgccgccaccgccgcagaagccggtgcgccttaaggccggcgtcctccgattcccctccggaggtggtggcgccgagttcggggagctcgcgtctttcgtcggcatccctgcccctgctctccgacggctcgcggtcgtcacgggtactcctgtgcttgtcaagaatactgacaataatgttgggaggattgtcaaagcagtattgtttggtaacccgtcccttgacaagtcctgctcagaacatactgaccaagtggtctctgcctctctctctggtcatgcaatgggcttcttaccttgtcgcacgttccctgctattggttttacatccatggatgaagatgttggttatgttagcccacttttggcattcaacttgggattgcatgtttcttgccttaaacttcttattcaaagagaagggcagcctttcaagttctgttctcgagctgaagagattgatgcaactgccagttctggaagtgatctttctcttcacttagaccttcttccatgccctcaagtgcctaaatatgcattgcatttacgagtttctgttgtgaggattcctgattgtggtgtgcttgcttctttaaagatatattcatcctttggaggaagtgagtaccaagacatggtagatcaagctttgaacgagtactttaagtttgataggttcctagcaagaggagatgtttttggtatacaaaacagttggaagtgtggctcaagctgctgcctggcatgcaataagcaggataataaactgaatccccgtaatatgatctactttaaggtgactggcatggaaccatcagatgaacctatacttcgtgttaattgcaatgaaacagcccttgtacttggtggagctgcttctgctgcaatccccccttattccttttttgcttcttctggtaattcagtaccattgcacagtgaagtagtggagcatttagcatctgtcattgcaccagcattgtgcccttcggatattttaccaaaaataaagttttccacttttttatatggcccgccaggatgtggaaagcgcacagtggttaggcatgttgctaaccatcttggtctgcatgtggtcgagtgtagctgtcatgatctgatgacatcatcagaaagtggggcacctgctgcacttgcaactgcctttaaagaagctcagaagtattctccttgtataatacttcttcgccactttgatgcaattgggaatgcatcctcaaacgaaggtccacagtctgagcaatctgggattgcatcgaacattgaatctgtcattaagcagtacattggacaacgttgggttgctaaggattcactgccaggaaaagatgtaaatgggagctcatacctcgtggagcctgaatgtgtaagctctcttcaaatcatactagttgcaactgcggacagttctgaaggaatgcaacagtcaattagaagatgcttccgctatgagatcgacatgaagactatgaatgaagaacagagaaacgaactgatatctgagacacttcaaggcattcctaaagttgctgatgagagtatttgtgacaagttcataaaagatttagcagcgcaaacgtcaggtttcatgcccagggacatacttgcattggtcgcagatgctggtgtgtcttttgcgcataaaattgcagcagggaaagatagcaaagcaatcagtaagcatacggaggtccttccagaaagctcttctgccactcaaaatgaggaacaccatttcagcaaagaagatattatgtcttccttggaacgagccaagaaacggaatcgtgctgcactgggcacacccaaagttcctaatgtcaaatgggaagatgttggtgggctagaggatgtgaaaaaggttattctagatactattcagttgcctctgatgtacaagcacctgttttcttctaaattgcgcaagcgatcaggtgtcctgctatatggacctccaggaacagggaagactttactcgcgaaagcagtagcaactgaatgctcattgaactttcttagcgtcaaaggtccagaactgataaacatgtatgttggagaatcagagaaaaatgttcgggatatttttgagaaggctaggtctgcacgcccatgtgtcattttctttgatgagcttgattcccttgctcctgcacgaggatcctcagcagattctggcggtgtcatggacagggttgtttcccagttacttgtggagatcgatgggttgagtgacaacagccaggaccttttcattattggggctaccaataggcctgaccttcttgattctgcccttcttcgccctggtcggttcgacaagcttctttatgtcggtgtaaatactgaggcatcatacagggaaaggatccttaaagcacagacacgcaagtataagctgcacaagaacgtttctctcttgtcagttgcgcagcgttgtccaccaaacttcactggtgctgatatttacgcgctgtgtgcggatgcatggtttcatgcagcaaagcgatcagttgaaacattcgaaatcgatccttcaagaagtaatgaagccagtgccgaagaagtcatcgtcgagatcgacgattttatcacggtgttaggagatatcgcaccgtcgctctctctggacgagctacaaaactacgaacagttgaggcagaagatcgaaggaccttctagatgaagttgggtttccactccctgctgacattcttaaactgctaacacaccaaaacattccctgtcttacattttcgttcgtacacaagttttcctccctgaaaacttgggcacttctatatccattcctgatttatacaatcacatccttgtagcagcatctgtattgacatcagaatgacattttctctgaagagaaacatcctgtcattctttgttagcagctccgcaactattctgaatgagcccgtgaagtcaagcactcaaagccttacctgggaaacaaaatgctattcctgacctgaaggaagcatccaccaatacagctagtttgggtacacacgctgaaccagctagttcgcctgggagaggcctctgtctcgtttagatgccatcgtctagaagttgtatcggaaaaattataagcgaatgttgcaatgaacagagttccttgtactgctgtgatttgtcattggtcaaagagaactaactgcagcgtttgtctacctacaatacttgtttttttgttgttgctatcttgtagtgccagcagcgatgcctccttgttggtgctcggcaagtcggctggtgtgagcaaaatccgtacgtcgtcgtctccagtggtgtcattctaaactggatctgctgctctcgagaccgaacaactgcaacaaactcaggcagggactcagcatctacacatcctgttctacggtacggtgattgtgacacaaatcggctgcatgggaaccatactagctgccaaatgaaagtgttttctccgacccaacctacaatgtgtctgttctttttgggaagagagatgagccactcctactagcttgcgcacgtcaacttattgagcacataagtggctcagcccggtcattggtgatttctctgggtctgaaagatcattctcagggaacgctgaaggatattactgtagctgtgatgattgaatagctgatgagctgggcatggggttggctcgatggttggcatattcagccccatcgataaagatactgtttagcattgcgcaagaggagccatcgtttataccatgcactaaattctggtagttttgtagttggaccttctatctacttggattaacaaaaggtggttttaagctggtgtcaaaatttgagtgtcaactttcacgctaaacaaaaggcactgtacactggtaaagcacttctgaggcgaatcatgcttttcgaggacaatttcggctatccgtgctggggctgccactgtggagctctgtgcgtactcctttgccgtct

SEQ ID NO: 17869 - DNA, 3933 bp, Zea Mays
atggcgagcgggggaggggggattcgggcgacgacttcggggaggatgaagtcgcgagggtggggagattcaagcgacgactttgggacaccggctattgcgctgaggcgtgggggcgactgtagtggcacggcgagttcagactccagcgccgtcttcttcgcggtcgccttttgcgctccatcccctgggctttccgtcacggcggccgcagccatggtggagatgcggcagcggaggaagccgctggtgctcgcctccacgcaggcgctcctcgactcgcttccgggggatcgcccgccgccaccgccgcagaagccggtgcgccttaaggccggcgtcctccgattcccctccggaggtggtggcgccgagttcggggagctcgcgtctttcgtcggcatccctgcccctgctctccgacggctcgcggtcgtcacgggtactcctgtgcttgtcaagaatactgacaataatgttgggaggattgtcaaagcagtattgtttggtaacccgtcccttgacaagtcctgctcagaacatactgaccaagtggtctctgcctctctctctggtcatgcaatgggcttcttaccttgtcgcacgttccctgctattggttttacatccatggatgaagatgttggttatgttagcccacttttggcattcaacttgggattgcatgtttcttgccttaaacttcttattcaaagagaagggcagcctttcaagttctgttctcgagctgaagagattgatgcaactgccagttctggaagtgatctttctcttcacttagaccttcttccatgccctcaagtgcctaaatatgcattgcatttacgagtttctgttgtgaggattcctgattgtggtgtgcttgcttctttaaagatatattcatcctttggaggaagtgagtaccaagacatggtagatcaagctttgaacgagtactttaagtttgataggttcctagcaagaggagatgtttttggtatacaaaacagttggaagtgtggctcaagctgctgcctggcatgcaataagcaggataataaactgaatccccgtaatatgatctactttaaggtgactggcatggaaccatcagatgaacctatacttcgtgttaattgcaatgaaacagcccttgtacttggtggagctgcttctgctgcaatccccccttattccttttttgcttcttctggtaattcagtaccattgcacagtgaagtagtggagcatttagcatctgtcattgcaccagcattgtgcccttcggatattttaccaaaaataaagttttccacttttttatatggcccgccaggatgtggaaagcgcacagtggttaggcatgttgctaaccatcttggtctgcatgtggtcgagtgtagctgtcatgatctgatgacatcatcagaaagtggggcacctgctgcacttgcaactgcctttaaagaagctcagaagtattctccttgtataatacttcttcgccactttgatgcaattgggaatgcatcctcaaacgaaggtccacagtctgagcaatctgggattgcatcgaacattgaatctgtcattaagcagtacattggacaacgttgggttgctaaggattcactgccaggaaaagatgtaaatgggagctcatacctcgtggagcctgaatgtgtaagctctcttcaaatcatactagttgcaactgcggacagttctgaaggaatgcaacagtcaattagaagatgcttccgctatgagatcgacatgaagactatgaatgaagaacagagaaacgaactgatatctgagacacttcaaggcattcctaaagttgctgatgagagtatttgtgacaagttcataaaagatttagcagcgcaaacgtcaggtttcatgcccagggacatacttgcattggtcgcagatgctggtgtgtcttttgcgcataaaattgcagcagggaaagatagcaaagcaatcagtaagcatacggaggtccttccagaaagctcttctgccactcaaaatgaggaacaccatttcagcaaagaagatattatgtcttccttggaacgagccaagaaacggaatcgtgctgcactgggcacacccaaagttcctaatgtcaaatgggaagatgttggtgggctagaggatgtgaaaaaggttattctagatactattcagttgcctctgatgtacaagcacctgttttcttctaaattgcgcaagcgatcaggtgtcctgctatatggacctccaggaacagggaagactttactcgcgaaagcagtagcaactgaatgctcattgaactttcttagcgtcaaaggtccagaactgataaacatgtatgttggagaatcagagaaaaatgttcgggatatttttgagaaggctaggtctgcacgcccatgtgtcattttctttgatgagcttgattcccttgctcctgcacgaggatcctcagcagattctggcggtgtcatggacagggttgtttcccagttacttgtggagatcgatgggttgagtgacaacagccaggaccttttcattattggggctaccaataggcctgaccttcttgattctgcccttcttcgccctggtcggttcgacaagcttctttatgtcggtgtaaatactgaggcatcatacagggaaaggatccttaaagcacagacacgcaagtataagctgcacaagaacgtttctctcttgtcagttgcgcagcgttgtccaccaaacttcactggtgctgatatttacgcgctgtgtgcggatgcatggtttcatgcagcaaagcgatcagttgaaacattcgaaatcgatccttcaagaagtaatgaagccagtgccgaagaagtcatcgtcgagatcgacgattttatcacggtgttaggagatatcgcaccgtcgctctctctggacgagctacaaaactacgaacagttgaggcagaagatcgaaggaccttctagatgaagttgggtttccactccctgctgacattcttaaactgctaacacaccaaaacattccctgtcttacattttcgttcgtacacaagttttcctccctgaaaacttgggcacttctatatccattcctgatttatacaatcacatccttgtagcagcatctgtattgacatcagaatgacattttctctgaagagaaacatcctgtcattctttgttagcagctccgcaactattctgaatgagcccgtgaagtcaagcactcaaagccttacctgggaaacaaaatgctattcctgacctgaaggaagcatccaccaatacagctagtttgggtacacacgctgaaccagctagttcgcctgggagaggcctctgtctcgtttagatgccatcgtctagaagttgtatcggaaaaattataagcgaatgttgcaatgaacagagttccttgtactgctgtgatttgtcattggtcaaagagaactaactgcagcgtttgtctacctacaatacttgtttttttgttgttgctatcttgtagtgccagcagcgatgcctccttgttggtgctcggcaagtcggctggtgtgagcaaaatccgtacgtcgtcgtctccagtggtgtcattctaaactggatctgctgctctcgagaccgaacaactgcaacaaactcaggcagggactcagcatctacacatcctgttctacggtgattgtgacacaaatcggctgcatgggaaccatactagctgccaaatgaaagtgttttctccgacccaacctacaatgtgtctgttctttttgggaagagagatgagccactcctactagcttgcgcacgtcaacttattgagcacataagtggctcagcccggtcattggtgatttctctgggtctgaaagatcattctcagttttgaactttgcag

SEQ ID NO: 17870 - DNA, 3654 bp, Zea Mays
atggcgagcgggggaggggggattcgggcgacgacttcggggaggatgaagtcgcgagggtggggagattcaagcgacgactttgggacaccggctattgcgctgaggcgtgggggcgactgtagtggcacggcgagttcagactccagcgccgtcttcttcgcggtcgccttttgcgctccatcccctgggctttccgtcacggcggccgcagccatggtggagatgcggcagcggaggaagccgctggtgctcgcctccacgcaggcgctcctcgactcgcttccgggggatcgcccgccgccaccgccgcagaagccggtgcgccttaaggccggcgtcctccgattcccctccggaggtggtggcgccgagttcggggagctcgcgtctttcgtcggcatccctgcccctgctctccgacggctcgcggtcgtcacgggtactcctgtgcttgtcaagaatactgacaataatgttgggaggattgtcaaagcagtattgtttggtaacccgtcccttgacaagtcctgctcagaacatactgaccaagtggtctctgcctctctctctggtcatgcaatgggcttcttaccttgtcgcacgttccctgctattggttttacatccatggatgaagatgttggttatgttagcccacttttggcattcaacttgggattgcatgtttcttgccttaaacttcttattcaaagagaagggcagcctttcaagttctgttctcgagctgaagagattgatgcaactgccagttctggaagtgatctttctcttcacttagaccttcttccatgccctcaagtgcctaaatatgcattgcatttacgagtttctgttgtgaggattcctgattgtggtgtgcttgcttctttaaagatatattcatcctttggaggaagtgagtaccaagacatggtagatcaagctttgaacgagtactttaagtttgataggttcctagcaagaggagatgtttttggtatacaaaacagttggaagtgtggctcaagctgctgcctggcatgcaataagcaggataataaactgaatccccgtaatatgatctactttaaggtgactggcatggaaccatcagatgaacctatacttcgtgttaattgcaatgaaacagcccttgtacttggtggagctgcttctgctgcaatccccccttattccttttttgcttcttctggtaattcagtaccattgcacagtgaagtagtggagcatttagcatctgtcattgcaccagcattgtgcccttcggatattttaccaaaaataaagttttccacttttttatatggcccgccaggatgtggaaagcgcacagtggttaggcatgttgctaaccatcttggtctgcatgtggtcgagtgtagctgtcatgatctgatgacatcatcagaaagtggggcacctgctgcacttgcaactgcctttaaagaagctcagaagtattctccttgtataatacttcttcgccactttgatgcaattgggaatgcatcctcaaacgaaggtccacagtctgagcaatctgggattgcatcgaacattgaatctgtcattaagcagtacattggacaacgttgggttgctaaggattcactgccaggaaaagatgtaaatgggagctcatacctcgtggagcctgaatgtgtaagctctcttcaaatcatactagttgcaactgcggacagttctgaaggaatgcaacagtcaattagaagatgcttccgctatgagatcgacatgaagactatgaatgaagaacagagaaacgaactgatatctgagacacttcaaggcattcctaaagttgctgatgagagtatttgtgacaagttcataaaagatttagcagcgcaaacgtcaggtttcatgcccagggacatacttgcattggtcgcagatgctggtgtgtcttttgcgcataaaattgcagcagggaaagatagcaaagcaatcagtaagcatacggaggtccttccagaaagctcttctgccactcaaaatgaggaacaccatttcagcaaagaagatattatgtcttccttggaacgagccaagaaacggaatcgtgctgcactgggcacacccaaagttcctaatgtcaaatgggaagatgttggtgggctagaggatgtgaaaaaggttattctagatactattcagttgcctctgatgtacaagcacctgttttcttctaaattgcgcaagcgatcaggtgtcctgctatatggacctccaggaacagggaagcgtcaaaggtccagaactgataaacatgtatgttggagaatcagagaaaaatgttcgggatatttttgagaagggttgtttcccaggtatcattagcttcgtccctgaggcggtgtcacaacttctcacaagtcttctgttaaattactgggccagtgtcttctcacttccccccttttcgtgtctactagttacttgtggagatcgatgggttgagtgacaacagccaggaccttttcattattggggctaccaataggcctgaccttcttgattctgcccttcttcgccctggtcggttcgacaagcttctttatgtcggtgtaaatactgaggcatcatacagggaaaggatccttaaagcacagacacgcaagtataagctgcacaagaacgtttctctcttgtcagttgcgcagcgttgtccaccaaacttcactggtgctgatatttacgcgctgtgtgcggatgcatggtttcatgcagcaaagcgatcagttgaaacattcgaaatcgatccttcaagaagtaatgaagccagtgccgaagaagtcatcgtcgagatcgacgattttatcacggtgttaggagatatcgcaccgtcgctctctctggacgagctacaaaactacgaacagttgaggcagaagatcgaaggaccttctagatgaagttgggtttccactccctgctgacattcttaaactgctaacacaccaaaacattccctgtcttacattttcgttcgtacacaagttttcctccctgaaaacttgggcacttctatatccattcctgatttatacaatcacatccttgtagcagcatctgtattgacatcagaatgacattttctctgaagagaaacatcctgtcattctttgttagcagctccgcaactattctgaatgagcccgtgaagtcaagcactcaaagccttacctgggaaacaaaatgctattcctgacctgaaggaagcatccaccaatacagctagtttggtgccagcagcgatgcctccttgttggtgctcggcaagtcggctggtgtgagcaaaatccgtacgtcgtcgtctccagtggtgtcattctaaactggatctgctgctctcgagaccgaacaactgcaacaaactcaggcagggactcagcatctacacatcctgttctacggtgattgtgacacaaatcggctgcatgggaaccatactagctgccaagaaagatgaaagtgttttctccgacccaacctacaatgtgtctgttctttttgggaagagagatgagccactcctactagcttgcgcacgtcaacttattgagcacataagatacatcattttttgtacgtttgtgtcccacaaag

SEQ ID NO: 17871 - DNA, 3213 bp, Zea Mays
atggcgagcgggggaggggggattcgggcgacgacttcggggaggatgaagtcgcgagggtggggagattcaagcgacgactttgggacaccggctattgcgctgaggcgtgggggcgactgtagtggcacggcgagttcagactccagcgccgtcttcttcgcggtcgccttttgcgctccatcccctgggctttccgtcacggcggccgcagccatggtggagatgcggcagcggaggaagccgctggtgctcgcctccacgcaggcgctcctcgactcgcttccgggggatcgcccgccgccaccgccgcagaagccggtgcgccttaaggccggcgtcctccgattcccctccggaggtggtggcgccgagttcggggagctcgcgtctttcgtcggcatccctgcccctgctctccgacggctcgcggtcgtcacgggtactcctgtgcttgtcaagaatactgacaataatgttgggaggattgtcaaagcagtattgtttggtaacccgtcccttgacaagtcctgctcagaacatactgaccaagtggtctctgcctctctctctggtcatgcaatgggcttcttaccttgtcgcacgttccctgctattggttttacatccatggatgaagatgttggttatgttagcccacttttggcattcaacttgggattgcatgtttcttgccttaaacttcttattcaaagagaagggcagcctttcaagttctgttctcgagctgaagagattgatgcaactgccagttctggaagtgatctttctcttcacttagaccttcttccatgccctcaagtgcctaaatatgcattgcatttacgagtttctgttgtgaggattcctgattgtggtgtgcttgcttctttaaagatatattcatcctttggaggaagtgagtaccaagacatggtagatcaagctttgaacgagtactttaagtttgataggttcctagcaagaggagatgtttttggtatacaaaacagttggaagtgtggctcaagctgctgcctggcatgcaataagcaggataataaactgaatccccgtaatatgatctactttaaggtgactggcatggaaccatcagatgaacctatacttcgtgttaattgcaatgaaacagcccttgtacttggtggagctgcttctgctgcaatccccccttattccttttttgcttcttctggtaattcagtaccattgcacagtgaagtagtggagcatttagcatctgtcattgcaccagcattgtgcccttcggatattttaccaaaaataaagttttccacttttttatatggcccgccaggatgtggaaagcgcacagtggttaggcatgttgctaaccatcttggtctgcatgtggtcgagtgtagctgtcatgatctgatgacatcatcagaaagtggggcacctgctgcacttgcaactgcctttaaagaagctcagaagtattctccttgtataatacttcttcgccactttgatgcaattgggaatgcatcctcaaacgaaggtccacagtctgagcaatctgggattgcatcgaacattgaatctgtcattaagcagtacattggacaacgttgggttgctaaggattcactgccaggaaaagatgtaaatgggagctcatacctcgtggagcctgaatgtgtaagctctcttcaaatcatactagttgcaactgcggacagttctgaaggaatgcaacagtcaattagaagatgcttccgctatgagatcgacatgaagactatgaatgaagaacagagaaacgaactgatatctgagacacttcaaggcattcctaaagttgctgatgagagtatttgtgacaagttcataaaagatttagcagcgcaaacgtcaggtttcatgcccagggacatacttgcattggtcgcagatgctggtgtgtcttttgcgcataaaattgcagcagggaaagatagcaaagcaatcagtaagcatacggaggtccttccagaaagctcttctgccactcaaaatgaggaacaccatttcagcaaagaagatattatgtcttccttggaacgagccaagaaacggaatcgtgctgcactgggcacacccaaagttcctaatgtcaaatgggaagatgttggtgggctagaggatgtgaaaaaggttattctagatactattcagttgcctctgatgtacaagcacctgttttcttctaaattgcgcaagcgatcaggtgtcctgctatatggacctccaggaacagggaagactttactcgcgaaagcagtagcaactgaatgctcattgaactttcttagcgtcaaaggtccagaactgataaacatgtatgttggagaatcagagaaaaatgttcgggatatttttgagaagcagattctggcggtgtcatggacagggttgtttcccagttacttgtggagatcgatgggttgagtgacaacagccaggaccttttcattattggggctaccaataggcctgaccttcttgattctgcccttcttcgccctggtcggttcgacaagcttctttatgtcggtgtaaatactgaggcatcatacagggaaaggatccttaaagcacagacacgcaagtataagctgcacaagaacgtttctctcttgtcagttgcgcagcgttgtccaccaaacttcactggtgctgatatttacgcgctgtgtgcggatgcatggtttcatgcagcaaagcgatcagttgaaacattcgaaatcgatccttcaagaagtaatgaagccagtgccgaagaagtcatcgtcgagatcgacgattttatcacggtgttaggagatatcgcaccgtcgctctctctggacgagctacaaaactacgaacagttgaggcagaagatcgaaggaccttctagatgaatgccagcagcgatgcctccttgttggtgctcggcaagtcggctggtgtgagcaaaatccgtacgtcgtcgtctccagtggtgtcattctaaactggatctgctgctctcgagaccgaacaactgcaacaaactcaggcagggactcagcatctacacatcctgttctacggtacggtgattgtgacacaaatcggctgcatgggaaccatactagctgccaaatgaaagtgttttctccgacccaacctacaatgtgtctgttctttttgggaagagagatg

SEQ ID NO: 17872 - DNA, 3702 bp, Zea Mays
atggcgagcgggggaggggggattcgggcgacgacttcggggaggatgaagtcgcgagggtggggagattcaagcgacgactttgggacaccggctattgcgctgaggcgtgggggcgactgtagtggcacggcgagttcagactccagcgccgtcttcttcgcggtcgccttttgcgctccatcccctgggctttccgtcacggcggccgcagccatggtggagatgcggcagcggaggaagccgctggtgctcgcctccacgcaggcgctcctcgactcgcttccgggggatcgcccgccgccaccgccgcagaagccggtgcgccttaaggccggcgtcctccgattcccctccggaggtggtggcgccgagttcggggagctcgcgtctttcgtcggcatccctgcccctgctctccgacggctcgcggtcgtcacgggtactcctgtgcttgtcaagaatactgacaataatgttgggaggattgtcaaagcagtattgtttggtaacccgtcccttgacaagtcctgctcagaacatactgaccaagtggtctctgcctctctctctggtcatgcaatgggcttcttaccttgtcgcacgttccctgctattggttttacatccatggatgaagatgttggttatgttagcccacttttggcattcaacttgggattgcatgtttcttgccttaaacttcttattcaaagagaagggcagcctttcaagttctgttctcgagctgaagagattgatgcaactgccagttctggaagtgatctttctcttcacttagaccttcttccatgccctcaagtgcctaaatatgcattgcatttacgagtttctgttgtgaggattcctgattgtggtgtgcttgcttctttaaagatatattcatcctttggaggaagtgagtaccaagacatggtagatcaagctttgaacgagtactttaagtttgataggttcctagcaagaggagatgtttttggtatacaaaacagttggaagtgtggctcaagctgctgcctggcatgcaataagcaggataataaactgaatccccgtaatatgatctactttaaggtgactggcatggaaccatcagatgaacctatacttcgtgttaattgcaatgaaacagcccttgtacttggtggagctgcttctgctgcaatccccccttattccttttttgcttcttctggtaattcagtaccattgcacagtgaagtagtggagcatttagcatctgtcattgcaccagcattgtgcccttcggatattttaccaaaaataaagttttccacttttttatatggcccgccaggatgtggaaagcgcacagtggttaggcatgttgctaaccatcttggtctgcatgtggtcgagtgtagctgtcatgatctgatgacatcatcagaaagtggggcacctgctgcacttgcaactgcctttaaagaagctcagaagtattctccttgtataatacttcttcgccactttgatgcaattgggaatgcatcctcaaacgaaggtccacagtctgagcaatctgggattgcatcgaacattgaatctgtcattaagcagtacattggacaacgttgggttgctaaggattcactgccaggaaaagatgtaaatgggagctcatacctcgtggagcctgaatgtgtaagctctcttcaaatcatactagttgcaactgcggacagttctgaaggaatgcaacagtcaattagaagatgcttccgctatgagatcgacatgaagactatgaatgaagaacagagaaacgaactgatatctgagacacttcaaggcattcctaaagttgctgatgagagtatttgtgacaagttcataaaagatttagcagcgcaaacgtcaggtttcatgcccagggacatacttgcattggtcgcagatgctggtgtgtcttttgcgcataaaattgcagcagggaaagatagcaaagcaatcagtaagcatacggaggtccttccagaaagctcttctgccactcaaaatgaggaacaccatttcagcaaagaagatattatgtcttccttggaacgagccaagaaacggaatcgtgctgcactgggcacacccaaagttcctaatgtcaaatgggaagatgttggtgggctagaggatgtgaaaaaggttattctagatactattcagttgcctctgatgtacaagcacctgttttcttctaaattgcgcaagcgatcaggtgtcctgctatatggacctccaggaacagggaaggctaggtctgcacgcccatgtgtcattttctttgatgagcttgattcccttgctcctgcacgaggatcctcagcagattctggcggtgtcatggacagggttgtttcccagttacttgtggagatcgatgggttgagtgacaacagccaggaccttttcattattggggctaccaataggcctgaccttcttgattctgcccttcttcgccctggtcggttcgacaagcttctttatgtcggtgtaaatactgaggcatcatacagggaaaggatccttaaagcacagacacgcaagtataagctgcacaagaacgtttctctcttgtcagttgcgcagcgttgtccaccaaacttcactggtgctgatatttacgcgctgtgtgcggatgcatggtttcatgcagcaaagcgatcagttgaaacattcgaaatcgatccttcaagaagtaatgaagccagtgccgaagaagtcatcgtcgagatcgacgattttatcacggtgttaggagatatcgcaccgtcgctctctctggacgagctacaaaactacgaacagttgaggcagaagatcgaaggaccttctagatgaagttgggtttccactccctgctgacattcttaaactgctaacacaccaaaacattccctgtcttacattttcgttcgtacacaagttttcctccctgaaaacttgggcacttctatatccattcctgatttatacaatcacatccttgtagcagcatctgtattgacatcagaatgacattttctctgaagagaaacatcctgtcattctttgttagcagctccgcaactattctgaatgagcccgtgaagtcaagcactcaaagccttacctgggaaacaaaatgctattcctgacctgaaggaagcatccaccaatacagctagtttgggtacacacgctgaaccagctagttcgcctgggagaggcctctgtctcgtttagatgccatcgtctagaagttgtatcggaaaaattataagcgaatgttgcaatgaacagagttccttgtactgctgtgatttgtcattggtcaaagagaactaactgcagcgtttgtctacctacaatacttgtttttttgttgttgctatcttgtagtgccagcagcgatgcctccttgttggtgctcggcaagtcggctggtgtgagcaaaatccgtacgtcgtcgtctccagtggtgtcattctaaactggatctgctgctctcgagaccgaacaactgcaacaaactcaggcagggactcagcatctacacatcctgttctacggtgattgtgacacaaatcggctgcatgggaaccatactagctgccaagaaagatgaaagtgttttctccgacccaacctacaatgtgtctgttctttttgggaagagagatg

SEQ ID NO: 17873 - DNA, 3820 bp, Zea Mays
atggcgagcgggggaggggggattcgggcgacgacttcggggaggatgaagtcgcgagggtggggagattcaagcgacgactttgggacaccggctattgcgctgaggcgtgggggcgactgtagtggcacggcgagttcagactccagcgccgtcttcttcgcggtcgccttttgcgctccatcccctgggctttccgtcacggcggccgcagccatggtggagatgcggcagcggaggaagccgctggtgctcgcctccacgcaggcgctcctcgactcgcttccgggggatcgcccgccgccaccgccgcagaagccggtgcgccttaaggccggcgtcctccgattcccctccggaggtggtggcgccgagttcggggagctcgcgtctttcgtcggcatccctgcccctgctctccgacggctcgcggtcgtcacgggtactcctgtgcttgtcaagaatactgacaataatgttgggaggattgtcaaagcagtattgtttggtaacccgtcccttgacaagtcctgctcagaacatactgaccaagtggtctctgcctctctctctggtcatgcaatgggcttcttaccttgtcgcacgttccctgctattggttttacatccatggatgaagatgttggttatgttagcccacttttggcattcaacttgggattgcatgtttcttgccttaaacttcttattcaaagagaagggcagcctttcaagttctgttctcgagctgaagagattgatgcaactgccagttctggaagtgatctttctcttcacttagaccttcttccatgccctcaagtgcctaaatatgcattgcatttacgagtttctgttgtgaggattcctgattgtggtgtgcttgcttctttaaagatatattcatcctttggaggaagtgagtaccaagacatggtagatcaagctttgaacgagtactttaagtttgataggttcctagcaagaggagatgtttttggtatacaaaacagttggaagtgtggctcaagctgctgcctggcatgcaataagcaggataataaactgaatccccgtaatatgatctactttaaggtgactggcatggaaccatcagatgaacctatacttcgtgttaattgcaatgaaacagcccttgtacttggtggagctgcttctgctgcaatccccccttattccttttttgcttcttctggtaattcagtaccattgcacagtgaagtagtggagcatttagcatctgtcattgcaccagcattgtgcccttcggatattttaccaaaaataaagttttccacttttttatatggcccgccaggatgtggaaagcgcacagtggttaggcatgttgctaaccatcttggtctgcatgtggtcgagtgtagctgtcatgatctgatgacatcatcagaaagtggggcacctgctgcacttgcaactgcctttaaagaagctcagaagtattctccttgtataatacttcttcgccactttgatgcaattgggaatgcatcctcaaacgaaggtccacagtctgagcaatctgggattgcatcgaacattgaatctgtcattaagcagtacattggacaacgttgggttgctaaggattcactgccaggaaaagatgtaaatgggagctcatacctcgtggagcctgaatgtgtaagctctcttcaaatcatactagttgcaactgcggacagttctgaaggaatgcaacagtcaattagaagatgcttccgctatgagatcgacatgaagactatgaatgaagaacagagaaacgaactgatatctgagacacttcaaggcattcctaaagttgctgatgagagtatttgtgacaagttcataaaagatttagcagcgcaaacgtcaggtttcatgcccagggacatacttgcattggtcgcagatgctggtgtgtcttttgcgcataaaattgcagcagggaaagatagcaaagcaatcagtaagcatacggaggtccttccagaaagctcttctgccactcaaaatgaggaacaccatttcagcaaagaagatattatgtcttccttggaacgagccaagaaacggaatcgtgctgcactgggcacacccaaagttcctaatgtcaaatgggaagatgttggtgggctagaggatgtgaaaaaggttattctagatactattcagttgcctctgatgtacaagcacctgttttcttctaaattgcgcaagcgatcaggtgtcctgctatatggacctccaggaacagggaagactttactcgcgaaagcagtagcaactgaatgctcattgaactttcttagcgtcaaaggtccagaactgataaacatgtatgttggagaatcagagaaaaatgttcgggatatttttgagaaggtctgcacgcccatgtgtcattttctttgatgagcttgattcccttgctcctgcacgaggatcctcagcagattctggcggtgtcatggacagggttgtttcccagttacttgtggagatcgatgggttgagtgacaacagccaggaccttttcattattggggctaccaataggcctgaccttcttgattctgcccttcttcgccctggtcggttcgacaagcttctttatgtcggtgtaaatactgaggcatcatacagggaaaggatccttaaagcacagacacgcaagtataagctgcacaagaacgtttctctcttgtcagttgcgcagcgttgtccaccaaacttcactggtgctgatatttacgcgctgtgtgcggatgcatggtttcatgcagcaaagcgatcagttgaaacattcgaaatcgatccttcaagaagtaatgaagccagtgccgaagaagtcatcgtcgagatcgacgattttatcacggtgttaggagatatcgcaccgtcgctctctctggacgagctacaaaactacgaacagttgaggcagaagatcgaaggaccttctagatgaagttgggtttccactccctgctgacattcttaaactgctaacacaccaaaacattccctgtcttacattttcgttcgtacacaagttttcctccctgaaaacttgggcacttctatatccattcctgatttatacaatcacatccttgtagcagcatctgtattgacatcagaatgacattttctctgaagagaaacatcctgtcattctttgttagcagctccgcaactattctgaatgagcccgtgaagtcaagcactcaaagccttacctgggaaacaaaatgctattcctgacctgaaggaagcatccaccaatacagctagtttgggtacacacgctgaaccagctagttcgcctgggagaggcctctgtctcgtttagatgccatcgtctagaagttgtatcggaaaaattataagcgaatgttgcaatgaacagagttccttgtactgctgtgatttgtcattggtcaaagagaactaactgcagcgtttgtctacctacaatacttgtttttttgttgttgctatcttgtagtgccagcagcgatgcctccttgttggtgctcggcaagtcggctggtgtgagcaaaatccgtacgtcgtcgtctccagtggtgtcattctaaactggatctgctgctctcgagaccgaacaactgcaacaaactcaggcagggactcagcatctacacatcctgttctacggtgattgtgacacaaatcggctgcatgggaaccatactagctgccaagaaagatgaaagtgttttctccgacccaacctacaatgtgtctgttctttttgggaagagagatg

SEQ ID NO: 17874 - DNA, 3770 bp, Zea Mays
atggcgagcgggggaggggggattcgggcgacgacttcggggaggatgaagtcgcgagggtggggagattcaagcgacgactttgggacaccggctattgcgctgaggcgtgggggcgactgtagtggcacggcgagttcagactccagcgccgtcttcttcgcggtcgccttttgcgctccatcccctgggctttccgtcacggcggccgcagccatggtggagatgcggcagcggaggaagccgctggtgctcgcctccacgcaggcgctcctcgactcgcttccgggggatcgcccgccgccaccgccgcagaagccggtgcgccttaaggccggcgtcctccgattcccctccggaggtggtggcgccgagttcggggagctcgcgtctttcgtcggcatccctgcccctgctctccgacggctcgcggtcgtcacgggtactcctgtgcttgtcaagaatactgacaataatgttgggaggattgtcaaagcagtattgtttggtaacccgtcccttgacaagtcctgctcagaacatactgaccaagtggtctctgcctctctctctggtcatgcaatgggcttcttaccttgtcgcacgttccctgctattggttttacatccatggatgaagatgttggttatgttagcccacttttggcattcaacttgggattgcatgtttcttgccttaaacttcttattcaaagagaagggcagcctttcaagttctgttctcgagctgaagagattgatgcaactgccagttctggaagtgatctttctcttcacttagaccttcttccatgccctcaagtgcctaaatatgcattgcatttacgagtttctgttgtgaggattcctgattgtggtgtgcttgcttctttaaagatatattcatcctttggaggaagtgagtaccaagacatggtagatcaagctttgaacgagtactttaagtttgataggttcctagcaagaggagatgtttttggtatacaaaacagttggaagtgtggctcaagctgctgcctggcatgcaataagcaggataataaactgaatccccgtaatatgatctactttaaggtgactggcatggaaccatcagatgaacctatacttcgtgttaattgcaatgaaacagcccttgtacttggtggagctgcttctgctgcaatccccccttattccttttttgcttcttctggtaattcagtaccattgcacagtgaagtagtggagcatttagcatctgtcattgcaccagcattgtgcccttcggatattttaccaaaaataaagttttccacttttttatatggcccgccaggatgtggaaagcgcacagtggttaggcatgttgctaaccatcttggtctgcatgtggtcgagtgtagctgtcatgatctgatgacatcatcagaaagtggggcacctgctgcacttgcaactgcctttaaagaagctcagaagtattctccttgtataatacttcttcgccactttgatgcaattgggaatgcatcctcaaacgaaggtccacagtctgagcaatctgggattgcatcgaacattgaatctgtcattaagcagtacattggacaacgttgggttgctaaggattcactgccaggaaaagatgtaaatgggagctcatacctcgtggagcctgaatgtgtaagctctcttcaaatcatactagttgcaactgcggacagttctgaaggaatgcaacagtcaattagaagatgcttccgctatgagatcgacatgaagactatgaatgaagaacagagaaacgaactgatatctgagacacttcaaggcattcctaaagttgctgatgagagtatttgtgacaagttcataaaagatttagcagcgcaaacgtcaggtttcatgcccagggacatacttgcattggtcgcagatgctggtgtgtcttttgcgcataaaattgcagcagggaaagatagcaaagcaatcagtaagcatacggaggtccttccagaaagctcttctgccactcaaaatgaggaacaccatttcagcaaagaagatattatgtcttccttggaacgagccaagaaacggaatcgtgctgcactgggcacacccaaagttcctaatgtcaaatgggaagatgttggtgggctagaggatgtgaaaaaggttattctagatactattcagttgcctctgatgtacaagcacctgttttcttctaaattgcgcaagcgatcaggtgtcctgctatatggacctccaggaacagggaagcgtcaaaggtccagaactgataaacatgtatgttggagaatcagagaaaaatgttcgggatatttttgagaaggctaggtctgcacgcccatgtgtcattttctttgatgagcttgattcccttgctcctgcacgaggatcctcagcagattctggcggtgtcatggacagggttgtttcccagttacttgtggagatcgatgggttgagtgacaacagccaggaccttttcattattggggctaccaataggcctgaccttcttgattctgcccttcttcgccctggtcggttcgacaagcttctttatgtcggtgtaaatactgaggcatcatacagggaaaggatccttaaagcacagacacgcaagtataagctgcacaagaacgtttctctcttgtcagttgcgcagcgttgtccaccaaacttcactggtgctgatatttacgcgctgtgtgcggatgcatggtttcatgcagcaaagcgatcagttgaaacattcgaaatcgatccttcaagaagtaatgaagccagtgccgaagaagtcatcgtcgagatcgacgattttatcacggtgttaggagatatcgcaccgtcgctctctctggacgagctacaaaactacgaacagttgaggcagaagatcgaaggaccttctagatgaagttgggtttccactccctgctgacattcttaaactgctaacacaccaaaacattccctgtcttacattttcgttcgtacacaagttttcctccctgaaaacttgggcacttctatatccattcctgatttatacaatcacatccttgtagcagcatctgtattgacatcagaatgacattttctctgaagagaaacatcctgtcattctttgttagcagctccgcaactattctgaatgagcccgtgaagtcaagcactcaaagccttacctgggaaacaaaatgctattcctgacctgaaggaagcatccaccaatacagctagtttgggtacacacgctgaaccagctagttcgcctgggagaggcctctgtctcgtttagatgccatcgtctagaagttgtatcggaaaaattataagcgaatgttgcaatgaacagagttccttgtactgctgtgatttgtcattggtcaaagagaactaactgcagcgtttgtctacctacaatacttgtttttttgttgttgctatcttgtagtgccagcagcgatgcctccttgttggtgctcggcaagtcggctggtgtgagcaaaatccgtacgtcgtcgtctccagtggtgtcattctaaactggatctgctgctctcgagaccgaacaactgcaacaaactcaggcagggactcagcatctacacatcctgttctacggtgattgtgacacaaatcggctgcatgggaaccatactagctgccaaatgaaagtgttttctccgacccaacctacaatgtgtctgttctttttgggaagagagatg

SEQ ID NO: 17875 - DNA, 3989 bp, Zea Mays
atggcgagcgggggaggggggattcgggcgacgacttcggggaggatgaagtcgcgagggtggggagattcaagcgacgactttgggacaccggctattgcgctgaggcgtgggggcgactgtagtggcacggcgagttcagactccagcgccgtcttcttcgcggtcgccttttgcgctccatcccctgggctttccgtcacggcggccgcagccatggtggagatgcggcagcggaggaagccgctggtgctcgcctccacgcaggcgctcctcgactcgcttccgggggatcgcccgccgccaccgccgcagaagccggtgcgccttaaggccggcgtcctccgattcccctccggaggtggtggcgccgagttcggggagctcgcgtctttcgtcggcatccctgcccctgctctccgacggctcgcggtcgtcacgggtgcttgtcaagaatactgacaataatgttgggaggattgtcaaagcagtattgtttggtaacccgtcccttgacaagtcctgctcagaacatactgaccaagtggtctctgcctctctctctggtcatgcaatgggcttcttaccttgtcgcacgttccctgctattggttttacatccatggatgaagatgttggttatgttagcccacttttggcattcaacttgggattgcatgtttcttgccttaaacttcttattcaaagagaagggcagcctttcaagttctgttctcgagctgaagagattgatgcaactgccagttctggaagtgatctttctcttcacttagaccttcttccatgccctcaagtgcctaaatatgcattgcatttacgagtttctgttgtgaggattcctgattgtggtgtgcttgcttctttaaagatatattcatcctttggaggaagtgagtaccaagacatggtagatcaagctttgaacgagtactttaagtttgataggttcctagcaagaggagatgtttttggtatacaaaacagttggaagtgtggctcaagctgctgcctggcatgcaataagcaggataataaactgaatccccgtaatatgatctactttaaggtgactggcatggaaccatcagatgaacctatacttcgtgttaattgcaatgaaacagcccttgtacttggtggagctgcttctgctgcaatccccccttattccttttttgcttcttctggtaattcagtaccattgcacagtgaagtagtggagcatttagcatctgtcattgcaccagcattgtgcccttcggatattttaccaaaaataaagttttccacttttttatatggcccgccaggatgtggaaagcgcacagtggttaggcatgttgctaaccatcttggtctgcatgtggtcgagtgtagctgtcatgatctgatgacatcatcagaaagtggggcacctgctgcacttgcaactgcctttaaagaagctcagaagtattctccttgtataatacttcttcgccactttgatgcaattgggaatgcatcctcaaacgaaggtccacagtctgagcaatctgggattgcatcgaacattgaatctgtcattaagcagtacattggacaacgttgggttgctaaggattcactgccaggaaaagatgtaaatgggagctcatacctcgtggagcctgaatgtgtaagctctcttcaaatcatactagttgcaactgcggacagttctgaaggaatgcaacagtcaattagaagatgcttccgctatgagatcgacatgaagactatgaatgaagaacagagaaacgaactgatatctgagacacttcaaggcattcctaaagttgctgatgagagtatttgtgacaagttcataaaagatttagcagcgcaaacgtcaggtttcatgcccagggacatacttgcattggtcgcagatgctggtgtgtcttttgcgcataaaattgcagcagggaaagatagcaaagcaatcagtaagcatacggaggtccttccagaaagctcttctgccactcaaaatgaggaacaccatttcagcaaagaagatattatgtcttccttggaacgagccaagaaacggaatcgtgctgcactgggcacacccaaagttcctaatgtcaaatgggaagatgttggtgggctagaggatgtgaaaaaggttattctagatactattcaggtaaattggacttgattcaactgtaaatatcgacagcctcaatagtactcgcaattatgggtgaaaacaagtttttccccctacagtagtttcagcactagaagctggctcgtcaattttggccttttgcaggatattgaccttttcttttatacttgatatttcagttgcctctgatgtacaagcacctgttttcttctaaattgcgcaagcgatcaggtgtcctgctatatggacctccaggaacagggaagactttactcgcgaaagcagtagcaactgaatgctcattgaactttcttagcgtcaaaggtccagaactgataaacatgtatgttggagaatcagagaaaaatgttcgggatatttttgagaaggctaggtctgcacgcccatgtgtcattttctttgatgagcttgattcccttgctcctgcacgaggatcctcagcagattctggcggtgtcatggacagggttgtttcccagttacttgtggagatcgatgggttgagtgacaacagccaggaccttttcattattggggctaccaataggcctgaccttcttgattctgcccttcttcgccctggtcggttcgacaagcttctttatgtcggtgtaaatactgaggcatcatacagggaaaggatccttaaagcacagacacgcaagtataagctgcacaagaacgtttctctcttgtcagttgcgcagcgttgtccaccaaacttcactggtgctgatatttacgcgctgtgtgcggatgcatggtttcatgcagcaaagcgatcagttgaaacattcgaaatcgatccttcaagaagtaatgaagccagtgccgaagaagtcatcgtcgagatcgacgattttatcacggtgttaggagatatcgcaccgtcgctctctctggacgagctacaaaactacgaacagttgaggcagaagatcgaaggaccttctagatgaagttgggtttccactccctgctgacattcttaaactgctaacacaccaaaacattccctgtcttacattttcgttcgtacacaagttttcctccctgaaaacttgggcacttctatatccattcctgatttatacaatcacatccttgtagcagcatctgtattgacatcagaatgacattttctctgaagagaaacatcctgtcattctttgttagcagctccgcaactattctgaatgagcccgtgaagtcaagcactcaaagccttacctgggaaacaaaatgctattcctgacctgaaggaagcatccaccaatacagctagtttgggtacacacgctgaaccagctagttcgcctgggagaggcctctgtctcgtttagatgccatcgtctagaagttgtatcggaaaaattataagcgaatgttgcaatgaacagagttccttgtactgctgtgatttgtcattggtcaaagagaactaactgcagcgtttgtctacctacaatacttgtttttttgttgttgctatcttgtagtgccagcagcgatgcctccttgttggtgctcggcaagtcggctggtgtgagcaaaatccgtacgtcgtcgtctccagtggtgtcattctaaactggatctgctgctctcgagaccgaacaactgcaacaaactcaggcagggactcagcatctacacatcctgttctacggtacggtgattgtgacacaaatcggctgcatgggaaccatactagctgccaagaaagatgaaagtgttttctccgacccaacctacaatgtgtctgttctttttgggaagagagatg

SEQ ID NO: 17876 - DNA, 3767 bp, Zea Mays
atggcgagcgggggaggggggattcgggcgacgacttcggggaggatgaagtcgcgagggtggggagattcaagcgacgactttgggacaccggctattgcgctgaggcgtgggggcgactgtagtggcacggcgagttcagactccagcgccgtcttcttcgcggtcgccttttgcgctccatcccctgggctttccgtcacggcggccgcagccatggtggagatgcggcagcggaggaagccgctggtgctcgcctccacgcaggcgctcctcgactcgcttccgggggatcgcccgccgccaccgccgcagaagccggtgcgccttaaggccggcgtcctccgattcccctccggaggtggtggcgccgagttcggggagctcgcgtctttcgtcggcatccctgcccctgctctccgacggctcgcggtcgtcacgggtactcctgtgcttgtcaagaatactgacaataatgttgggaggattgtcaaagcagtattgtttggtaacccgtcccttgacaagtcctgctcagaacatactgaccaagtggtctctgcctctctctctggtcatgcaatgggcttcttaccttgtcgcacgttccctgctattggttttacatccatggatgaagatgttggttatgttagcccacttttggcattcaacttgggattgcatgtttcttgccttaaacttcttattcaaagagaagggcagcctttcaagttctgttctcgagctgaagagattgatgcaactgccagttctggaagtgatctttctcttcacttagaccttcttccatgccctcaagtgcctaaatatgcattgcatttacgagtttctgttgtgaggattcctgattgtggtgtgcttgcttctttaaagatatattcatcctttggaggaagtgagtaccaagacatggtagatcaagctttgaacgagtactttaagtttgataggttcctagcaagaggagatgtttttggtatacaaaacagttggaagtgtggctcaagctgctgcctggcatgcaataagcaggataataaactgaatccccgtaatatgatctactttaaggtgactggcatggaaccatcagatgaacctatacttcgtgttaattgcaatgaaacagcccttgtacttggtggagctgcttctgctgcaatccccccttattccttttttgcttcttctggtaattcagtaccattgcacagtgaagtagtggagcatttagcatctgtcattgcaccagcattgtgcccttcggatattttaccaaaaataaagttttccacttttttatatggcccgccaggatgtggaaagcgcacagtggttaggcatgttgctaaccatcttggtctgcatgtggtcgagtgtagctgtcatgatctgatgacatcatcagaaagtggggcacctgctgcacttgcaactgcctttaaagaagctcagaagtattctccttgtataatacttcttcgccactttgatgcaattgggaatgcatcctcaaacgaaggtccacagtctgagcaatctgggattgcatcgaacattgaatctgtcattaagcagtacattggacaacgttgggttgctaaggattcactgccaggaaaagatgtaaatgggagctcatacctcgtggagcctgaatgtgtaagctctcttcaaatcatactagttgcaactgcggacagttctgaaggaatgcaacagtcaattagaagatgcttccgctatgagatcgacatgaagactatgaatgaagaacagagaaacgaactgatatctgagacacttcaaggcattcctaaagttgctgatgagagtatttgtgacaagttcataaaagatttagcagcgcaaacgtcaggtttcatgcccagggacatacttgcattggtcgcagatgctggtgtgtcttttgcgcataaaattgcagcagggaaagatagcaaagcaatcagtaagcatacggaggtccttccagaaagctcttctgccactcaaaatgaggaacaccatttcagcaaagaagatattatgtcttccttggaacgagccaagaaacggaatcgtgctgcactgggcacacccaaagttcctaatgtcaaatgggaagatgttggtgggctagaggatgtgaaaaaggttattctagatactattcagttgcctctgatgtacaagcacctgttttcttctaaattgcgcaagcgatcaggtgtcctgctatatggacctccaggaacagggaaggtccagaactgataaacatgtatgttggagaatcagagaaaaatgttcgggatatttttgagaaggctaggtctgcacgcccatgtgtcattttctttgatgagcttgattcccttgctcctgcacgaggatcctcagcagattctggcggtgtcatggacagggttgtttcccagttacttgtggagatcgatgggttgagtgacaacagccaggaccttttcattattggggctaccaataggcctgaccttcttgattctgcccttcttcgccctggtcggttcgacaagcttctttatgtcggtgtaaatactgaggcatcatacagggaaaggatccttaaagcacagacacgcaagtataagctgcacaagaacgtttctctcttgtcagttgcgcagcgttgtccaccaaacttcactggtgctgatatttacgcgctgtgtgcggatgcatggtttcatgcagcaaagcgatcagttgaaacattcgaaatcgatccttcaagaagtaatgaagccagtgccgaagaagtcatcgtcgagatcgacgattttatcacggtgttaggagatatcgcaccgtcgctctctctggacgagctacaaaactacgaacagttgaggcagaagatcgaaggaccttctagatgaagttgggtttccactccctgctgacattcttaaactgctaacacaccaaaacattccctgtcttacattttcgttcgtacacaagttttcctccctgaaaacttgggcacttctatatccattcctgatttatacaatcacatccttgtagcagcatctgtattgacatcagaatgacattttctctgaagagaaacatcctgtcattctttgttagcagctccgcaactattctgaatgagcccgtgaagtcaagcactcaaagccttacctgggaaacaaaatgctattcctgacctgaaggaagcatccaccaatacagctagtttgggtacacacgctgaaccagctagttcgcctgggagaggcctctgtctcgtttagatgccatcgtctagaagttgtatcggaaaaattataagcgaatgttgcaatgaacagagttccttgtactgctgtgatttgtcattggtcaaagagaactaactgcagcgtttgtctacctacaatacttgtttttttgttgttgctatcttgtagtgccagcagcgatgcctccttgttggtgctcggcaagtcggctggtgtgagcaaaatccgtacgtcgtcgtctccagtggtgtcattctaaactggatctgctgctctcgagaccgaacaactgcaacaaactcaggcagggactcagcatctacacatcctgttctacggtgattgtgacacaaatcggctgcatgggaaccatactagctgccaagaaagatgaaagtgttttctccgacccaacctacaatgtgtctgttctttttgggaagagagatg

SEQ ID NO: 17877 - DNA, 3399 bp, Zea Mays
atggcgagcgggggaggggggattcgggcgacgacttcggggaggatgaagtcgcgagggtggggagattcaagcgacgactttgggacaccggctattgcgctgaggcgtgggggcgactgtagtggcacggcgagttcagactccagcgccgtcttcttcgcggtcgccttttgcgctccatcccctgggctttccgtcacggcggccgcagccatggtggagatgcggcagcggaggaagccgctggtgctcgcctccacgcaggcgctcctcgactcgcttccgggggatcgcccgccgccaccgccgcagaagccggtgcgccttaaggccggcgtcctccgattcccctccggaggtggtggcgccgagttcggggagctcgcgtctttcgtcggcatccctgcccctgctctccgacggctcgcggtcgtcacgggtactcctaatactgacaataatgttgggaggattgtcaaagcagtattgtttggtaacccgtcccttgacaagtcctgctcagaacatactgaccaagtggtctctgcctctctctctggtcatgcaatgggcttcttaccttgtcgcacgttccctgctattggttttacatccatggatgaagatgttggttatgttagcccacttttggcattcaacttgggattgcatgtttcttgccttaaacttcttattcaaagagaagggcagcctttcaagttctgttctcgagctgaagagattgatgcaactgccagttctggaagtgatctttctcttcacttagaccttcttccatgccctcaagtgcctaaatatgcattgcatttacgagtttctgttgtgaggattcctgattgtggtgtgcttgcttctttaaagatatattcatcctttggaggaagtgagtaccaagacatggtagatcaagctttgaacgagtactttaagtttttggtatacaaaacagttggaagtgtggctcaagctgctgcctggcatgcaataagcaggataataaactgaatccccgtaatatgatctactttaaggtattctccttgtataatacttcttcgccactttgatgcaattgggaatgcatcctcaaacgaaggtccacagtctgagcaatctgggattgcatcgaacattgaatctgtcattaagcagtacattggacaacgttgggttgctaaggattcactgccaggaaaagatgtaaatgggagctcatacctcgtggagcctgaatgtgtaagctctcttcaaatcatactagttgcaactgcggacagttctgaaggaatgcaacagtcaattagaagatgcttccgctatgagatcgacatgaagactatgaatgaagaacagagaaacgaactgatatctgagacacttcaaggcattcctaaagttgctgatgagagtatttgtgacaagttcataaaagatttagcagcgcaaacgtcaggtttcatgcccagggacatacttgcattggtcgcagatgctggtgtgtcttttgcgcataaaattgcagcagggaaagatagcaaagcaatcagtaagcatacggaggtccttccagaaagctcttctgccactcaaaatgaggaacaccatttcagcaaagaagatattatgtcttccttggaacgagccaagaaacggaatcgtgctgcactgggcacacccaaagttcctaatgtcaaatgggaagatgttggtgggctagaggatgtgaaaaaggttattctagatactattcagttgcctctgatgtacaagcacctgttttcttctaaattgcgcaagcgatcaggtgtcctgctatatggacctccaggaacagggaagactttactcgcgaaagcagtagcaactgaatgctcattgaactttcttagcgtcaaaggtccagaactgataaacatgtatgttggagaatcagagaaaaatgttcgggatatttttgagaaggctaggtctgcacgcccatgtgtcattttctttgatgagcttgattcccttgctcctgcacgaggatcctcagcagattctggcggtgtcatggacagggttgtttcccagttacttgtggagatcgatgggttgagtgacaacagccaggaccttttcattattggggctaccaataggcctgaccttcttgattctgcccttcttcgccctggtcggttcgacaagcttctttatgtcggtgtaaatactgaggcatcatacagggaaaggatccttaaagcacagacacgcaagtataagctgcacaagaacgtttctctcttgtcagttgcgcagcgttgtccaccaaacttcactggtgctgatatttacgcgctgtgtgcggatgcatggtttcatgcagcaaagcgatcagttgaaacattcgaaatcgatccttcaagaagtaatgaagccagtgccgaagaagtcatcgtcgagatcgacgattttatcacggtgttaggagatatcgcaccgtcgctctctctggacgagctacaaaactacgaacagttgaggcagaagatcgaaggaccttctagatgaagttgggtttccactccctgctgacattcttaaactgctaacacaccaaaacattccctgtcttacattttcgttcgtacacaagttttcctccctgaaaacttgggcacttctatatccattcctgatttatacaatcacatccttgtagcagcatctgtattgacatcagaatgacattttctctgaagagaaacatcctgtcattctttgttagcagctccgcaactattctgaatgagcccgtgaagtcaagcactcaaagccttacctgggaaacaaaatgctattcctgacctgaaggaagcatccaccaatacagctagtttgggtacacacgctgaaccagctagttcgcctgggagaggcctctgtctcgtttagatgccatcgtctagaagttgtatcggaaaaattataagcgaatgttgcaatgaacagagttccttgtactgctgtgatttgtcattggtcaaagagaactaactgcagcgtttgtctacctacaatacttgtttttttgttgttgctatcttgtagtgccagcagcgatgcctccttgttggtgctcggcaagtcggctggtgtgagcaaaatccgtacgtcgtcgtctccagtggtgtcattctaaactggatctgctgctctcgagaccgaacaactgcaacaaactcaggcagggactcagcatctacacatcctgttctacggtgattgtgacacaaatcggctgcatgggaaccatactagctgccaagaaagatgaaagtgttttctccgacccaacctacaatgtgtctgttctttttgggaagagagatg

SEQ ID NO: 17878 - DNA, 3749 bp, Zea Mays
atggcgagcgggggaggggggattcgggcgacgacttcggggaggatgaagtcgcgagggtggggagattcaagcgacgactttgggacaccggctattgcgctgaggcgtgggggcgactgtagtggcacggcgagttcagactccagcgccgtcttcttcgcggtcgccttttgcgctccatcccctgggctttccgtcacggcggccgcagccatggtggagatgcggcagcggaggaagccgctggtgctcgcctccacgcaggcgctcctcgactcgcttccgggggatcgcccgccgccaccgccgcagaagccggtgcgccttaaggccggcgtcctccgattcccctccggaggtggtggcgccgagttcggggagctcgcgtctttcgtcggcatccctgcccctgctctccgacggctcgcggtcgtcacgggtactcctaatactgacaataatgttgggaggattgtcaaagcagtattgtttggtaacccgtcccttgacaagtcctgctcagaacatactgaccaagtggtctctgcctctctctctggtcatgcaatgggcttcttaccttgtcgcacgttccctgctattggttttacatccatggatgaagatgttggttatgttagcccacttttggcattcaacttgggattgcatgtttcttgccttaaacttcttattcaaagagaagggcagcctttcaagttctgttctcgagctgaagagattgatgcaactgccagttctggaagtgatctttctcttcacttagaccttcttccatgccctcaagtgcctaaatatgcattgcatttacgagtttctgttgtgaggattcctgattgtggtgtgcttgcttctttaaagatatattcatcctttggaggaagtgagtaccaagacatggtagatcaagctttgaacgagtactttaagtttgataggttcctagcaagaggagatgtttttggtatacaaaacagttggaagtgtggctcaagctgctgcctggcatgcaataagcaggataataaactgaatccccgtaatatgatctactttaaggtgactggcatggaaccatcagatgaacctatacttcgtgttaattgcaatgaaacagcccttgtacttggtggagctgcttctgctgcaatccccccttattccttttttgcttcttctggtaattcagtaccattgcacagtgaagtagtggagcatttagcatctgtcattgcaccagcattgtgcccttcggatattttaccaaaaataaagttttccacttttttatatggcccgccaggatgtggaaagcgcacagtggttaggcatgttgctaaccatcttggtctgcatgtggtcgagtgtagctgtcatgatctgatgacatcatcagaaagtggggcacctgctgcacttgcaactgcctttaaagaagctcagaagtattctccttgtataatacttcttcgccactttgatgcaattgggaatgcatcctcaaacgaaggtccacagtctgagcaatctgggattgcatcgaacattgaatctgtcattaagcagtacattggacaacgttgggttgctaaggattcactgccaggaaaagatgtaaatgggagctcatacctcgtggagcctgaatgtgtaagctctcttcaaatcatactagttgcaactgcggacagttctgaaggaatgcaacagtcaattagaagatgcttccgctatgagatcgacatgaagactatgaatgaagaacagagaaacgaactgatatctgagacacttcaaggcattcctaaagttgctgatgagagtatttgtgacaagttcataaaagatttagcagcgcaaacgtcaggtttcatgcccagggacatacttgcattggtcgcagatgctggtgtgtcttttgcgcataaaattgcagcagggaaagatagcaaagcaatcagtaagcatacggaggtccttccagaaagctcttctgccactcaaaatgaggaacaccatttcagcaaagaagatattatgtcttccttggaacgagccaagaaacggaatcgtgctgcactgggcacacccaaagttcctaatgtcaaatgggaagatgttggtgggctagaggatgtgaaaaaggttattctagatactattcagttgcctctgatgtacaagcacctgttttcttctaaattgcgcaagcgatcaggtgtcctgctatatggacctccaggaacagggaagactttactcgcgaaagcagtagcaactgaatgctcattgaactttcttagcgtcaaaggtccagaactgataaacatgtatgttggagaatcagagaaaaatgttcgggatatttttgagaaggctaggtctgcacgcccatgtgtcattttctttgatgagcttgattcccttgctcctgcacgaggatcctcagcagattctggcggtgtcatggacagggttgtttcccagttacttgtggagatcgatgggttgagtgacaacagccaggaccttttcattattggggctaccaataggcctgaccttcttgattctgcccttcttcgccctggtcggttcgacaagcttctttatgtcggtgtaaatactgaggcatcatacagggaaaggatccttaaagcacagacacgcaagtataagctgcacaagaacgtttctctcttgtcagttgcgcagcgttgtccaccaaacttcactggtgctgatatttacgcgctgtgtgcggatgcatggtttcatgcagcaaagcgatcagttgaaacattcgaaatcgatccttcaagaagtaatgaagccagtgccgaagaagtcatcgtcgagatcgacgattttatcacggtgttaggagatatcgcaccgtcgctctctctggacgagctacaaaactacgaacagttgaggcagaagatcgaaggaccttctagatgaagttgggtttccactccctgctgacattcttaaactgctaacacaccaaaacattccctgtcttacattttcgttcgtacacaagttttcctccctgaaaacttgggcacttctatatccattcctgatttatacaatcacatccttgtagcagcatctgtattgacatcagaatgacattttctctgaagagaaacatcctgtcattctttgttagcagctccgcaactattctgaatgagcccgtgaagtcaagcactcaaagccttacctgggaaacaaaatgctattcctgacctgaaggaagcatccaccaatacagctagtttgggtacacacgctgaaccagctagttcgcctgggagaggcctctgtctcgtttagatgccatcgtctagaagttgtatcggaaaaattataagcgaatgttgcaatgaacagagttccttgtactgctgtgatttgtcattggtcaaagagaactaactgcagcgtttgtctacctacaatacttgtttttttgttgttgctatcttgtagtgccagcagcgatgcctccttgttggtgctcggcaagtcggctggtgtgagcaaaatccgtacgtcgtcgtctccagtggtgtcattctaaactggatctgctgctctcgagaccgaacaactgcaacaaactcaggcagggactcagcatctacacatcctgttctacggtacggtgattgtgacacaaatcggctgcatgggaaccatactagctg

SEQ ID NO: 17879 - DNA, 3726 bp, Zea Mays
atggcgagcgggggaggggggattcgggcgacgacttcggggaggatgaagtcgcgagggtggggagattcaagcgacgactttgggacaccggctattgcgctgaggcgtgggggcgactgtagtggcacggcgagttcagactccagcgccgtcttcttcgcggtcgccttttgcgctccatcccctgggctttccgtcacggcggccgcagccatggtggagatgcggcagcggaggaagccgctggtgctcgcctccacgcaggcgctcctcgactcgcttccgggggatcgcccgccgccaccgccgcagaagccggtgcgccttaaggccggcgtcctccgattcccctccggaggtggtggcgccgagttcggggagctcgcgtctttcgtcggcatccctgcccctgctctccgacggctcgcggtcgtcacgggtactcctgtgcttgtcaagaatactgacaataatgttgggaggattgtcaaagcagtattgtttggtaacccgtcccttgacaagtcctgctcagaacatactgaccaagtggtctctgcctctctctctggtcatgcaatgggcttcttaccttgtcgcacgttccctgctattggttttacatccatggatgaagatgttggttatgttagcccacttttggcattcaacttgggattgcatgtttcttgccttaaacttcttattcaaagagaagggcagcctttcaagttctgttctcgagctgaagagattgatgcaactgccagttctggaagtgatctttctcttcacttagaccttcttccatgccctcaagtgcctaaatatgcattgcatttacgagtttctgttgtgaggattcctgattgtggtgtgcttgcttctttaaagatatattcatcctttggaggaagtgagtaccaagacatggtagatcaagctttgaacgagtactttaagtttgataggttcctagcaagaggagatgtttttggtatacaaaacagttggaagtgtggctcaagctgctgcctggcatgcaataagcaggataataaactgaatccccgtaatatgatctactttaaggtgactggcatggaaccatcagatgaacctatacttcgtgttaattgcaatgaaacagcccttgtacttggtggagctgcttctgctgcaatccccccttattccttttttgcttcttctggtaattcagtaccattgcacagtgaagtagtggagcatttagcatctgtcattgcaccagcattgtgcccttcggatattttaccaaaaataaagttttccacttttttatatggcccgccaggatgtggaaagcgcacagtggttaggcatgttgctaaccatcttggtctgcatgtggtcgagtgtagctgtcatgatctgatgacatcatcagaaagtggggcacctgctgcacttgcaactgcctttaaagaagctcagaagtattctccttgtataatacttcttcgccactttgatgcaattgggaatgcatcctcaaacgaaggtccacagtctgagcaatctgggattgcatcgaacattgaatctgtcattaagcagtacattggacaacgttgggttgctaaggattcactgccaggaaaagatgtaaatgggagctcatacctcgtggagcctgaatgtgtaagctctcttcaaatcatactagttgcaactgcggacagttctgaaggaatgcaacagtcaattagaagatgcttccgctatgagatcgacatgaagactatgaatgaagaacagagaaacgaactgatatctgagacacttcaaggcattcctaaagttgctgatgagagtatttgtgacaagttcataaaagatttagcagcgcaaacgtcaggtttcatgcccagggacatacttgcattggtcgcagatgctggtgtgtcttttgcgcataaaattgcagcagggaaagatagcaaagcaatcagtaagcatacggaggtccttccagaaagctcttctgccactcaaaatgaggaacaccatttcagcaaagaagatattatgtcttccttggaacgagccaagaaacggaatcgtgctgcactgggcacacccaaagttcctaatgtcaaatgggaagatgttggtgggctagaggatgtgaaaaaggttattctagatactattcagttgcctctgatgtacaagcacctgttttcttctaaattgcgcaagcgatcaggtgtcctgctatatggacctccaggaacagggaagcgtcaaaggtccagaactgataaacatgtatgttggagaatcagagaaaaatgttcgggatatttttgagaagttttccactgtcaatctcaggctaggtctgcacgcccatgtgtcattttctttgatgagcttgattcccttgctcctgcacgaggatcctcagcagattctggcggtgtcatggacagggttgtttcccagttacttgtggagatcgatgggttgagtgacaacagccaggaccttttcattattggggctaccaataggcctgaccttcttgattctgcccttcttcgccctggtcggttcgacaagcttctttatgtcggtgtaaatactgaggcatcatacagggaaaggatccttaaagcacagacacgcaagtataagctgcacaagaacgtttctctcttgtcagttgcgcagcgttgtccaccaaacttcactggtgctgatatttacgcgctgtgtgcggatgcatggtttcatgcagcaaagcgatcagttgaaacattcgaaatcgatccttcaagaagtaatgaagccagtgccgaagaagtcatcgtcgagatcgacgattttatcacggtgttaggagatatcgcaccgtcgctctctctggacgagctacaaaactacgaacagttgaggcagaagatcgaaggaccttctagatgaagttgggtttccactccctgctgacattcttaaactgctaacacaccaaaacattccctgtcttacattttcgttcgtacacaagttttcctccctgaaaacttgggcacttctatatccattcctgatttatacaatcacatccttgtagcagcatctgtattgacatcagaatgacattttctctgaagagaaacatcctgtcattctttgttagcagctccgcaactattctgaatgagcccgtgaagtcaagcactcaaagccttacctgggaaacaaaatgctattcctgacctgaaggaagcatccaccaatacagctagtttgggtacacacgctgaaccagctagttcgcctgggagaggcctctgtctcgtttagatgccatcgtctagaagttgtatcggaaaaattataagcgaatgttgcaatgaacagagttccttgtactgctgtgatttgtcattggtcaaagagaactaactgcagcgtttgtctacctacaatacttgtttttttgttgttgctatcttgtagtgccagcagcgatgcctccttgttggtgctcggcaagtcggctggtgtgagcaaaatccgtacgtcgtcgtctccagtggtgtcattctaaactggatctgctgctctcgagaccgaacaactgcaacaaactcaggcagggactcagcatctacacatcctgttctacggtgattgtgacacaaatcggctgcatgggaaccatactagctg

SEQ ID NO: 17880 - DNA, 2976 bp, Zea Mays
atggcgagcgggggaggggggattcgggcgacgacttcggggaggatgaagtcgcgagggtggggagattcaagcgacgactttgggacaccggctattgcgctgaggcgtgggggcgactgtagtggcacggcgagttcagactccagcgccgtcttcttcgcggtcgccttttgcgctccatcccctgggctttccgtcacggcggccgcagccatggtggagatgcggcagcggaggaagccgctggtgctcgcctccacgcaggcgctcctcgactcgcttccgggggatcgcccgccgccaccgccgcagaagccggtgcgccttaaggccggcgtcctccgattcccctccggaggtggtggcgccgagttcggggagctcgcgtctttcgtcggcatccctgcccctgctctccgacggctcgcggtcgtcacgggtactcctgtgcttgtcaagaatactgacaataatgttgggaggattgtcaaagcagtattgtttggtaacccgtcccttgacaagtcctgctcagaacatactgaccaagtggtctctgcctctctctctggtcatgcaatgggcttcttaccttgtcgcacgttccctgctattggttttacatccatggatgaagatgttggttatgttagcccacttttggcattcaacttgggattgcatgtttcttgccttaaacttcttattcaaagagaagggcagcctttcaagttctgttctcgagctgaagagattgatgcaactgccagttctggaagtgatctttctcttcacttagaccttcttccatgccctcaagtgcctaaatatgcattgcatttacgagtttctgttgtgaggattcctgattgtggtgtgcttgcttctttaaagatatattcatcctttggaggaagtgagtaccaagacatggtagatcaagctttgaacgagtactttaagtttgataggttcctagcaagaggagatgtttttggtatacaaaacagttggaagtgtggctcaagctgctgcctggcatgcaataagcaggataataaactgaatccccgtaatatgatctactttaaggtgactggcatggaaccatcagatgaacctatacttcgtgttaattgcaatgaaacagcccttgtacttggtggagctgcttctgctgcaatccccccttattccttttttgcttcttctggtaattcagtaccattgcacagtgaagtagtggagcatttagcatctgtcattgcaccagcattgtgcccttcggatattttaccaaaaataaagttttccacttttttatatggcccgccaggatgtggaaagcgcacagtggttaggcatgttgctaaccatcttggtctgcatgtggtcgagtgtagctgtcatgatctgatgacatcatcagaaagtggggcacctgctgcacttgcaactgcctttaaagaagctcagaagtattctccttgtataatacttcttcgccactttgatgcaattgggaatgcatcctcaaacgaaggtccacagtctgagcaatctgggattgcatcgaacattgaatctgtcattaagcagtacattggacaacgttgggttgctaaggattcactgccaggaaaagatgtaaatgggagctcatacctcgtggagcctgaatgtgtaagctctcttcaaatcatactagttgcaactgcggacagttctgaaggaatgcaacagtcaattagaagatgcttccgctatgagatcgacatgaagactatgaatgaagaacagagaaacgaactgatatctgagacacttcaaggcattcctaaagttgctgatgagagtatttgtgacaagttcataaaagatttagcagcgcaaacgtcaggtttcatgcccagggacatacttgcattggtcgcagatgctggtgtgtcttttgcgcataaaattgcagcagggaaagatagcaaagcaatcagtaagcatacggaggtccttccagaaagctcttctgccactcaaaatgaggaacaccatttcagcaaagaagatattatgtcttccttggaacgagccaagaaacggaatcgtgctgcactgggcacacccaaagttcctaatgtcaaatgggaagatgttggtgggctagaggatgtgaaaaaggttattctagatactattcagttgcctctgatgtacaagcacctgttttcttctaaattgcgcaagcgatcaggtgtcctgctatatggacctccaggaacagggaagggttgtttcccagttacttgtggagatcgatgggttgagtgacaacagccaggaccttttcattattggggctaccaataggcctgaccttcttgattctgcccttcttcgccctggtcggttcgacaagcttctttatgtcggtgtaaatactgaggcatcatacagggaaaggatccttaaagcacagacacgcaagtataagctgcacaagaacgtttctctcttgtcagttgcgcagcgttgtccaccaaacttcactggtgctgatatttacgcgctgtgtgcggatgcatggtttcatgcagcaaagcgatcagttgaaacattcgaaatcgatccttcaagaagtaatgaagccagtgccgaagaagtcatcgtcgagatcgacgattttatcacggtgttaggagatatcgcaccgtcgctctctctggacgagctacaaaactacgaacagttgaggcagaagatcgaaggaccttctagatgaatgccagcagcgatgcctccttgttggtgctcggcaagtcggctggtgtgagcaaaatccgtacgtcgtcgtctccagtggtgtcattctaaactggatctgctgctctcgagaccgaacaactgcaacaaactcaggcagggactcagcatctacacatcctgttctacgatgttcatttttattaaatctgc

SEQ ID NO: 17881 - DNA, 3736 bp, Zea Mays
atggcgagcgggggaggggggattcgggcgacgacttcggggaggatgaagtcgcgagggtggggagattcaagcgacgactttgggacaccggctattgcgctgaggcgtgggggcgactgtagtggcacggcgagttcagactccagcgccgtcttcttcgcggtcgccttttgcgctccatcccctgggctttccgtcacggcggccgcagccatggtggagatgcggcagcggaggaagccgctggtgctcgcctccacgcaggcgctcctcgactcgcttccgggggatcgcccgccgccaccgccgcagaagccggtgcgccttaaggccggcgtcctccgattcccctccggaggtggtggcgccgagttcggggagctcgcgtctttcgtcggcatccctgcccctgctctccgacggctcgcggtcgtcacgggtactcctgtgcttgtcaagaatactgacaataatgttgggaggattgtcaaagcagtattgtttggtaacccgtcccttgacaagtcctgctcagaacatactgaccaagtggtctctgcctctctctctggtcatgcaatgggcttcttaccttgtcgcacgttccctgctattggttttacatccatggatgaagatgttggttatgttagcccacttttggcattcaacttgggattgcatgtttcttgccttaaacttcttattcaaagagaagggcagcctttcaagttctgttctcgagctgaagagattgatgcaactgccagttctggaagtgatctttctcttcacttagaccttcttccatgccctcaagtgcctaaatatgcattgcatttacgagtttctgttgtgaggattcctgattgtggtgtgcttgcttctttaaagatatattcatcctttggaggaagtgagtaccaagacatggtagatcaagctttgaacgagtactttaagtttgataggttcctagcaagaggagatgtttttggtatacaaaacagttggaagtgtggctcaagctgctgcctggcatgcaataagcaggataataaactgaatccccgtaatatgatctactttaaggtgactggcatggaaccatcagatgaacctatacttcgtgttaattgcaatgaaacagcccttgtacttggtggagctgcttctgctgcaatccccccttattccttttttgcttcttctggtaattcagtaccattgcacagtgaagtagtggagcatttagcatctgtcattgcaccagcattgtgcccttcggatattttaccaaaaataaagttttccacttttttatatggcccgccaggatgtggaaagcgcacagtggttaggcatgttgctaaccatcttggtctgcatgtggtcgagtgtagctgtcatgatctgatgacatcatcagaaagtggggcacctgctgcacttgcaactgcctttaaagaagctcagaagtattctccttgtataatacttcttcgccactttgatgcaattgggaatgcatcctcaaacgaaggtccacagtctgagcaatctgggattgcatcgaacattgaatctgtcattaagcagtacattggacaacgttgggttgctaaggattcactgccaggaaaagatgtaaatgggagctcatacctcgtggagcctgaatgtgtaagctctcttcaaatcatactagttgcaactgcggacagttctgaaggaatgcaacagtcaattagaagatgcttccgctatgagatcgacatgaagactatgaatgaagaacagagaaacgaactgatatctgagacacttcaaggcattcctaaagttgctgatgagagtatttgtgacaagttcataaaagatttagcagcgcaaacgtcaggtttcatgcccagggacatacttgcattggtcgcagatgctggtgtgtcttttgcgcataaaattgcagcagggaaagatagcaaagcaatcagtaagcatacggaggtccttccagaaagctcttctgccactcaaaatgaggaacaccatttcagcaaagaagatattatgtcttccttggaacgagccaagaaacggaatcgtgctgcactgggcacacccaaagttcctaatgtcaaatgggaagatgttggtgggctagaggatgtgaaaaaggttattctagatactattcagttgcctctgatgtacaagcacctgttttcttctaaattgcgcaagcgatcaggtgtcctgctatatggacctccaggaacagggaagactttactcgcgaaagcagtagcaactgaatgctcattgaactttcttagcgtcaaaggtccagaactgataaacatgtatgttggagaatcagagaaaaatgttcgggatatttttgagaaggctaggtctgcacgcccatgtgtcattttctttgatgagcttgattcccttgctcctgcacgaggatcctcagcagattctggcggtgtcatggacagggttgtttcccagttacttgtggagatcgatgggttgagtgacaacagccaggaccttttcattattggggctaccaataggcctgaccttcttgattctgcccttcttcgccctggtcggttcgacaagcttctttatgtcggtgtaaatactgaggcatcatacagggaaaggatccttaaagcacagacacgcaagtataagctgcacaagaacgtttctctcttgtcagttgcgcagcgttgtccaccaaacttcactggtgctgatatttacgcgctgtgtgcggatgcatggtttcatgcagcaaagcgatcagttgaaacattcgaaatcgatccttcaagaagtaatgaagccagtgccgaagaagtcatcgtcgagatcgacgattttatcacggtgttaggagatatcgcaccgtcgctctctctggacgagctacaaaactacgaacagttgaggcagaagatcgaaggaccttctagatgaagttgggtttccactccctgctgacattcttaaactgctaacacaccaaaacattccctgtcttacattttcgttcgtacacaagttttcctccctgaaaacttgggcacttctatatccattcctgatttatacaatcacatccttgtagcagcatctgtattgacatcagaatgacattttctctgaagagaaacatcctgtcattctttgttagcagctccgcaactattctgaatgagcccgtgaagtcaagcactcaaagccttacctgggaaacaaaatgctattcctgacctgaaggaagcatccaccaatacagctagtttgggtacacacgctgaaccagctagttcgcctgggagaggcctctgtctcgtttagatgccatcgtctagaagttgtatcggaaaaattataagcgaatgttgcaatgaacagagttccttgtactgctgtgatttgtcattggtcaaagagaactaactgcagcgtttgtctacctacaatacttgtttttttgttgttgctatcttgtagtgccagcagcgatgcctccttgttggtgctcggcaagtcggctggtgtgagcaaaatccgtacgtcgtcgtctccagtggtgtcattctaaactggatctgctgctctcgagaccgaacaactgcaacaaactcaggcagggactcagcatctacacatcctgttctacgatgttcatttttattaaatctgc

SEQ ID NO: 17882 - DNA, 3612 bp, Zea Mays
atggcgagcgggggaggggggattcgggcgacgacttcggggaggatgaagtcgcgagggtggggagattcaagcgacgactttgggacaccggctattgcgctgaggcgtgggggcgactgtagtggcacggcgagttcagactccagcgccgtcttcttcgcggtcgccttttgcgctccatcccctgggctttccgtcacggcggccgcagccatggtggagatgcggcagcggaggaagccgctggtgctcgcctccacgcaggcgctcctcgactcgcttccgggggatcgcccgccgccaccgccgcagaagccggtgcgccttaaggccggcgtcctccgattcccctccggaggtggtggcgccgagttcggggagctcgcgtctttcgtcggcatccctgcccctgctctccgacggctcgcggtcgtcacgggtactcctgtgcttgtcaagaatactgacaataatgttgggaggattgtcaaagcagtattgtttggtaacccgtcccttgacaagtcctgctcagaacatactgaccaagtggtctctgcctctctctctggtcatgcaatgggcttcttaccttgtcgcacgttccctgctattggttttacatccatggatgaagatgttggttatgttagcccacttttggcattcaacttgggattgcatgtttcttgccttaaacttcttattcaaagagaagggcagcctttcaagttctgttctcgagctgaagagattgatgcaactgccagttctggaagtgatctttctcttcacttagaccttcttccatgccctcaagtgcctaaatatgcattgcatttacgagtttctgttgtgaggattcctgattgtggtgtgcttgcttctttaaagatatattcatcctttggaggaagtgagtaccaagacatggtagatcaagctttgaacgagtactttaagtttgataggttcctagcaagaggagatgtttttggtatacaaaacagttggaagtgtggctcaagctgctgcctggcatgcaataagcaggataataaactgaatccccgtaatatgatctactttaaggtgactggcatggaaccatcagatgaacctatacttcgtgttaattgcaatgaaacagcccttgtacttggtggagctgcttctgctgcaatccccccttattccttttttgcttcttctggtaattcagtaccattgcacagtgaagtagtggagcatttagcatctgtcattgcaccagcattgtgcccttcggatattttaccaaaaataaagttttccacttttttatatggcccgccaggatgtggaaagcgcacagtggttaggcatgttgctaaccatcttggtctgcatgtggtcgagtgtagctgtcatgatctgatgacatcatcagaaagtggggcacctgctgcacttgcaactgcctttaaagaagctcagaagtattctccttgtataatacttcttcgccactttgatgcaattgggaatgcatcctcaaacgaaggtccacagtctgagcaatctgggattgcatcgaacattgaatctgtcattaagcagtacattggacaacgttgggttgctaaggattcactgccaggaaaagatgtaaatgggagctcatacctcgtggagcctgaatgtgtaagctctcttcaaatcatactagttgcaactgcggacagttctgaaggaatgcaacagtcaattagaagatgcttccgctatgagatcgacatgaagactatgaatgaagaacagagaaacgaactgatatctgagacacttcaaggcattcctaaagttgctgatgagagtatttgtgacaagttcataaaagatttagcagcgcaaacgtcaggtttcatgcccagggacatacttgcattggtcgcagatgctggtgtgtcttttgcgcataaaattgcagcagggaaagatagcaaagcaatcagtaagcatacggaggtccttccagaaagctcttctgccactcaaaatgaggaacaccatttcagcaaagaagatattatgtcttccttggaacgagccaagaaacggaatcgtgctgcactgggcacacccaaagttcctaatgtcaaatgggaagatgttggtgggctagaggatgtgaaaaaggttattctagatactattcagttgcctctgatgtacaagcacctgttttcttctaaattgcgcaagcgatcaggtgtcctgctatatggacctccaggaacagggaagagaaaaatgttcgggatatttttgagaaggctaggtctgcacgcccatgtgtcattttctttgatgagcttgattcccttgctcctgcacgaggatcctcagcagattctggcggtgtcatggacagggttgtttcccagttacttgtggagatcgatgggttgagtgacaacagccaggaccttttcattattggggctaccaataggcctgaccttcttgattctgcccttcttcgccctggtcggttcgacaagcttctttatgtcggtgtaaatactgaggcatcatacagggaaaggatccttaaagcacagacacgcaagtataagctgcacaagaacgtttctctcttgtcagttgcgcagcgttgtccaccaaacttcactggtgctgatatttacgcgctgtgtgcggatgcatggtttcatgcagcaaagcgatcagttgaaacattcgaaatcgatccttcaagaagtaatgaagccagtgccgaagaagtcatcgtcgagatcgacgattttatcacggtgttaggagatatcgcaccgtcgctctctctggacgagctacaaaactacgaacagttgaggcagaagatcgaaggaccttctagatgaagttgggtttccactccctgctgacattcttaaactgctaacacaccaaaacattccctgtcttacattttcgttcgtacacaagttttcctccctgaaaacttgggcacttctatatccattcctgatttatacaatcacatccttgtagcagcatctgtattgacatcagaatgacattttctctgaagagaaacatcctgtcattctttgttagcagctccgcaactattctgaatgagcccgtgaagtcaagcactcaaagccttacctgggaaacaaaatgctattcctgacctgaaggaagcatccaccaatacagctagtttgggtacacacgctgaaccagctagttcgcctgggagaggcctctgtctcgtttagatgccatcgtctagaagttgtatcggaaaaattataagcgaatgttgcaatgaacagagttccttgtactgctgtgatttgtcattggtcaaagagaactaactgcagcgtttgtctacctacaatacttgtttttttgttgttgctatcttgtagtgccagcagcgatgcctccttgttggtgctcggcaagtcggctggtgtgagcaaaatccgtacgtcgtcgtctccagtggtgtcattctaaactggatctgctgctctcgagaccgaacaactgcaacaaactcaggcagggactcagcatctacacatcctg

SEQ ID NO: 17883 - DNA, 3490 bp, Zea Mays
atggcgagcgggggaggggggattcgggcgacgacttcggggaggatgaagtcgcgagggtggggagattcaagcgacgactttgggacaccggctattgcgctgaggcgtgggggcgactgtagtggcacggcgagttcagactccagcgccgtcttcttcgcggtcgccttttgcgctccatcccctgggctttccgtcacggcggccgcagccatggtggagatgcggcagcggaggaagccgctggtgctcgcctccacgcaggcgctcctcgactcgcttccgggggatcgcccgccgccaccgccgcagaagccggtgcgccttaaggccggcgtcctccgattcccctccggaggtggtggcgccgagttcggggagctcgcgtctttcgtcggcatccctgcccctgctctccgacggctcgcggtcgtcacgggtactcctgtgcttgtcaagaatactgacaataatgttgggaggattgtcaaagcagtattgtttggtaacccgtcccttgacaagtcctgctcagaacatactgaccaagtggtctctgcctctctctctggtcatgcaatgggcttcttaccttgtcgcacgttccctgctattggttttacatccatggatgaagatgttggttatgttagcccacttttggcattcaacttgggattgcatgtttcttgccttaaacttcttattcaaagagaagggcagcctttcaagttctgttctcgagctgaagagattgatgcaactgccagttctggaagtgatctttctcttcacttagaccttcttccatgccctcaagtgcctaaatatgcattgcatttacgagtttctgttgtgaggattcctgattgtggtgtgcttgcttctttaaagatatattcatcctttggaggaagtgagtaccaagacatggtagatcaagctttgaacgagtactttaagtttgataggttcctagcaagaggagatgtttttggtatacaaaacagttggaagtgtggctcaagctgctgcctggcatgcaataagcaggataataaactgaatccccgtaatatgatctactttaaggtgactggcatggaaccatcagatgaacctatacttcgtgttaattgcaatgaaacagcccttgtacttggtggagctgcttctgctgcaatccccccttattccttttttgcttcttctggtaattcagtaccattgcacagtgaagtagtggagcatttagcatctgtcattgcaccagcattgtgcccttcggatattttaccaaaaataaagttttccacttttttatatggcccgccaggatgtggaaagcgcacagtggttaggcatgttgctaaccatcttggtctgcatgtggtcgagtgtagctgtcatgatctgatgacatcatcagaaagtggggcacctgctgcacttgcaactgcctttaaagaagctcagaagtattctccttgtataatacttcttcgccactttgatgcaattgggaatgcatcctcaaacgaaggtccacagtctgagcaatctgggattgcatcgaacattgaatctgtcattaagcagtacattggacaacgttgggttgctaaggattcactgccaggaaaagatgtaaatgggagctcatacctcgtggagcctgaatgtgtaagctctcttcaaatcatactagttgcaactgcggacagttctgaaggaatgcaacagtcaattagaagatgcttccgctatgagatcgacatgaagactatgaatgaagaacagagaaacgaactgatatctgagacacttcaaggcattcctaaagttgctgatgagagtatttgtgacaagttcataaaagatttagcagcgcaaacgtcaggtttcatgcccagggacatacttgcattggtcgcagatgctggtgtgtcttttgcgcataaaattgcagcagggaaagatagcaaagcaatcagtaagcatacggaggtccttccagaaagctcttctgccactcaaaatgaggaacaccatttcagcaaagaagatattatgtcttccttggaacgagccaagaaacggaatcgtgctgcactgggcacacccaaagttcctaatgtcaaatgggaagatgttggtgggctagaggatgtgaaaaaggttattctagatactattcagttcagttgcctctgatgtacaagcacctgttttcttctaaattgcgcaagcgatcaggtgtcctgctatatggacctccaggaacagggaagggttgtttcccagttacttgtggagatcgatgggttgagtgacaacagccaggaccttttcattattggggctaccaataggcctgaccttcttgattctgcccttcttcgccctggtcggttcgacaagcttctttatgtcggtgtaaatactgaggcatcatacagggaaaggatccttaaagcacagacacgcaagtataagctgcacaagaacgtttctctcttgtcagttgcgcagcgttgtccaccaaacttcactggtgctgatatttacgcgctgtgtgcggatgcatggtttcatgcagcaaagcgatcagttgaaacattcgaaatcgatccttcaagaagtaatgaagccagtgccgaagaagtcatcgtcgagatcgacgattttatcacggtgttaggagatatcgcaccgtcgctctctctggacgagctacaaaactacgaacagttgaggcagaagatcgaaggaccttctagatgaagttgggtttccactccctgctgacattcttaaactgctaacacaccaaaacattccctgtcttacattttcgttcgtacacaagttttcctccctgaaaacttgggcacttctatatccattcctgatttatacaatcacatccttgtagcagcatctgtattgacatcagaatgacattttctctgaagagaaacatcctgtcattctttgttagcagctccgcaactattctgaatgagcccgtgaagtcaagcactcaaagccttacctgggaaacaaaatgctattcctgacctgaaggaagcatccaccaatacagctagtttgggtacacacgctgaaccagctagttcgcctgggagaggcctctgtctcgtttagatgccatcgtctagaagttgtatcggaaaaattataagcgaatgttgcaatgaacagagttccttgtactgctgtgatttgtcattggtcaaagagaactaactgcagcgtttgtctacctacaatacttgtttttttgttgttgctatcttgtagtgccagcagcgatgcctccttgttggtgctcggcaagtcggctggtgtgagcaaaatccgtacgtcgtcgtctccagtggtgtcattctaaactggatctgctgctctcgagaccgaacaactgcaacaaactcaggcagggactcagcatctacacatcctg

SEQ ID NO: 17884 - DNA, 2307 bp, Zea Mays
atggcgagcgggggaggggggattcgggcgacgacttcggggaggatgaagtcgcgagggtggggagattcaagcgacgactttgggacaccggctattgcgctgaggcgtgggggcgactgtagtggcacggcgagttcagactccagcgccgtcttcttcgcggtcgccttttgcgctccatcccctgggctttccgtcacggcggccgcagccatggtggagatgcggcagcggaggaagccgctggtgctcgcctccacgcaggcgctcctcgactcgcttccgggggatcgcccgccgccaccgccgcagaagccggtgcgccttaaggccggcgtcctccgattcccctccggaggtggtggcgccgagttcggggagctcgcgtctttcgtcggcatccctgcccctgctctccgacggctcgcggtcgtcacgggtactcctgtgcttgtcaagaatactgacaataatgttgggaggattgtcaaagcagtattgtttggtaacccgtcccttgacaagtcctgctcagaacatactgaccaagtggtctctgcctctctctctggtcatgcaatgggcttcttaccttgtcgcacgttccctgctattggttttacatccatggatgaagatgttggttatgttagcccacttttggcattcaacttgggattgcatgtttcttgccttaaacttcttattcaaagagaagggcagcctttcaagttctgttctcgagctgaagagattgatgcaactgccagttctggaagtgatctttctcttcacttagaccttcttccatgccctcaagtgcctaaatatgcattgcatttacgagtttctgttgtgaggattcctgattgtggtgtgcttgcttctttaaagatatattcatcctttggaggaagtgagtaccaagacatggtagatcaagctttgaacgagtactttaagtttgataggttcctagcaagaggagatgtttttggtatacaaaacagttggaagtgtggctcaagctgctgcctggcatgcaataagcaggataataaactgaatccccgtaatatgatctactttaaggtgactggcatggaaccatcagatgaacctatacttcgtgttaattgcaatgaaacagcccttgtacttggtggagctgcttctgctgcaatccccccttattccttttttgcttcttctggtaattcagtaccattgcacagtgaagtagtggagcatttagcatctgtcattgcaccagcattgtgcccttcggatattttaccaaaaataaagttttccacttttttatatggcccgccaggatgtggaaagcgcacagtggttaggcatgttgctaaccatcttggtctgcatgtggtcgagtgtagctgtcatgatctgatgacatcatcagaaagtggggcacctgctgcacttgcaactgcctttaaagaagctcagaagtattctccttgtataatacttcttcgccactttgatgcaattgggaatgcatcctcaaacgaaggtccacagtctgagcaatctgggattgcatcgaacattgaatctgtcattaagcagtacattggacaacgttgggttgctaaggattcactgccaggaaaagatgtaaatgggagctcatacctcgtggagcctgaatgtgtaagctctcttcaaatcatactagttgcaactgcggacagttctgaaggaatgcaacagtcaattagaagatgcttccgctatgagatcgacatgaagactatgaatgaagaacagagaaacgaactgatatctgagacacttcaaggcattcctaaagttgctgatgagagtatttgtgacaagttcataaaagatttagcagcgcaaacgtcaggtttcatgcccagggacatacttgcattggtcgcagatgctggtgtgtcttttgcgcataaaattgcagcagggaaagatagcaaagcaatcagtaagcatacggaggtccttccagaaagctcttctgccactcaaaatgaggaacaccatttcagcaaagaagatattatgtcttccttggaacgagccaagaaacggaatcgtgctgcactgggcacacccaaagttcctaatgtcaaatgggaagatgttggtgggctagaggatgtgaaaaaggttattctagatactattcagttgcctctgatgtacaagcacctgttttcttctaaattgcgcaagcgatcaggtgtcctgctatatggacctccaggaacagggaagttttccactgtcaatctc

SEQ ID NO: 17885 - DNA, 727 bp, Zea Mays
ctttgagaggcccaatactctaaagcgcctgaaattggcagtggctcagcccggtcattggtgatttctctgggtctgaaagatcattctcagggaacgctgaaggatattactgtagctgtgatcgagaatcgcctttggtgatgattgaatagctgagctgggcatgggaacgctgaaagatactgtttagcattgcgcaataggagccatcgtttataccatgcactaaattctggtacttttgtagttagaccttctatctactgggattaacaaaaggtgggtttaagctgctgtcaaaattggagtgtcaactttaacgctaaacaaaaggcaatgtacactggtaaagcacttctgagtcgaatcatgattttcgaggctatctgacaatttcagctatccgtgctggggctgtcaccgtggagctctgtgcgtactcctttgccgtctaggactagctaggagagctactgtactcgccactcacatcacggcttaatagcctagtctcgctcactgtattcaaggagctgttgttgttgttggtctaagggccatctccaacaatttctcctatacatttttctttatctatactttctaatttattttacaatctcctctttaaagattctcccctatgcatacagtatgtctctaacgttttccttcacccaactccccctatactatagcaattatctcaaaacaaaaaccctat

SEQ ID NO: 17886 - DNA, 856 bp, Zea Mays
tgcgtcgtatcttactatttgtaaggccttgttgaatgacatttctacaaaaggaaagatgaaagtgttttctccgacccaacctacaacgtgtctgttctttttgggaagagagatgagccactcctactagcttgcgcacgtcaacttattgagcacataagtggcagtggctcagcccggtcattggtgatttctctgggtctgaaagatcattctcagggaacgctgaaggatattactgtagctgtgatcgagaatcgcctttggtgatgattgaatagctgagctgggcatgggaacgctgaaagatactgtttagcattgcgcaataggagccatcgtttataccatgcactaaattctggtacttttgtagttagaccttctatctactgggattaacaaaaggtgggtttaagctgctgtcaaaattggagtgtcaactttaacgctaaacaaaaggcaatgtacactggtaaagcacttctgagtcgaatcatgattttcgaggctatctgacaatttcagctatccgtgctggggctgtcaccgtggagctctgtgcgtactcctttgccgtctaggactagctaggagagctactgtactcgccactcacatcacggcttaatagcctagtctcgctcactgtattcaaggagctgttgttgttgttggtctaagggccatctccaacaatttctcctatacatttttctttatctatactttctaatttattttacaatctcctctttaaagattctcccctatgcatacagtatgtctctaacgttttccttcacccaactccccctatactatagcaattatctcaaaacaaaaaccctat

SEQ ID NO: 17887 - DNA, 1484 bp, Zea Mays
agttttcgaacttagaaattaaaattgaataaaatcgaggaactaaaaaaccaaacacccgtagcctccgccgagagtcgcagccgccgacacccagtcgcccaccgaggcaccgacccgaccccaaccttggagctgctgtgccccggcggtccgtctctggccagagctccgccaccgcccgccgatcagagctccgcctccgagacgacgcgcctccccccagtggctcaggccgcctgcccgcctggcaggacgccgcgccgagctctttcccggcagctgctcgcccgcgccgatcttttcttcggcaaccgcgcgcccgcgtcgagctcctccccgtccccggcagccgcgcgccagcgccgagctcctccccgcggatccgcctctgctcagtctgagctccggccagccgcgagctccgtcgaggcgtcgacgccgaggcccagctccgcccgtgagtgcctgtgccggattcagcaaacagaaatttgctctgctggttagatagatggaggtgccaatgaacaccacgcaatctggtcctcacttccctgtgcagcatcggtccctctcgttagacatcaagggaaataaaacagatattgttatcaataaatacgaagatacctttctggtgattgtgacccaaatcggctgcatgggaaccatactagctgccaagaaagatgaaagtgttttctccgacccaacctacaacgtgtctgttctttttgggaagagagatgagccactcctactagcttgcgcacgtcaacttattgagcacataagtggctcagcccggtcattggtgatttctctgggtctgaaagatcattctcagggaacgctgaaggatattactgtagctgtgatcgagaatcgcctttggtgatgattgaatagctgagctgggcatgggaacgctgaaagatactgtttagcattgcgcaataggagccatcgtttataccatgcactaaattctggtacttttgtagttagaccttctatctactgggattaacaaaaggtgggtttaagctgctgtcaaaattggagtgtcaactttaacgctaaacaaaaggcaatgtacactggtaaagcacttctgagtcgaatcatgattttcgaggctatctgacaatttcagctatccgtgctggggctgtcaccgtggagctctgtgcgtactcctttgccgtctaggactagctaggagagctactgtactcgccactcacatcacggcttaatagcctagtctcgctcactgtattcaaggagctgttgttgttgttggtctaagggccatctccaacaatttctcctatacatttttctttatctatactttctaatttattttacaatctcctctttaaagattctcccctatgcatacagtatgtctctaacgttttccttcacccaactccccctatactatagcaattatctcaaaacaaaaaccctat

SEQ ID NO: 17888 - DNA, 1649 bp, Zea Mays
gtcgtttacgcaggattgccatgtgcatccagtggctgcttgccaatgctagttgtaaccaaactgcttttcctctctgcgggcgcatctgcgactgcgattgcgttggtaaagatggcctgctgctttctgtttggaaagaaagcgaaacaaaccactgaaggcgatgaagatctacatagcgtcaaggtattctcttacagcgagttgagaaaggctacgcaggatttcagcggcgcgaataagattggcgagggcggtttcggttctgtcttcagggtaaatatgcgcgaaaatttttccagcactccgtcagtgtattgcgcagacggtatgggaggggaggggggaaagaaaatccttggctcacattttagtctttgactaaacacagggagtgcttaaagatgggacagtggtggcggtgaaagttttatctgctacttcaaggcaaggcatccgcgagtttttgactgagcttacggcgatatccgacatcaagcatgagaatctggtcactctgatcggttgctgcgccgaaggatctcgcaggatccttgtctacaactacctcgagaacaacagccttgcgcagacattgctaggatccaggcacagcaacatccggttcaactggcacgcccgcgccagaatcgctgtcggcgttgcccgtgggctcgcgtttctccacgaggagatccgtccccccatcatccacagggacataaaggcgagcaacattcttctcgacaaggacctcacccccaagatctccgacttcgggctggcaaggctcctgccgcccaacgcgacccatgtcagcacccgagtggcaggaacattagggtacttggctcctgaatacgcgatccgaggccaagtgacgaagaagtccgatatctatagctatggggttcttcttttagagattgtaagtgggagatgcaacaccaacacgagattacctagcgaggaccagttcctccttgagaggacatgggcactctacgagcaaggacgtctagaggacatcgtggacatggacatcggcggcgaccgggacgtcgaggaggcgtgccggttcctgaagatcggcctgctgtgcacgcaagacgcgatggcgcgccgtcccaacatgaccaacgtcgtccggatgctctcgggggagaggaggatcagcgtagagaagatcactaggcccgccatgatctccgatttcgcggagctcaaggtcagcagcaaggagcgaaggccgggcgaggcacgctcgcccacgacggctcccaccacgaaatcgttcaccaccacggagccgttctcgtcgtcggagacgcccacgcagtcgtccatgtgaagtcgtgggcgtacgacgcatttttttttttggtttagtttgtatagtgtgtggacgtgttaggtgggcagggttacaggttttttttttgagtttcttgtttgttttgctgtgaggaaagatctcgtaggcctcttattgcatctttgatcatgtaaatatctgtaaacgaagatgatcaagataagctttgcacgacggttctcattgtcgaactactttggactgctgcaactcggtgattatttggatcagttcaccttacatcttttgggtttttgtcccacagaatacg

SEQ ID NO: 17889 - DNA, 2565 bp, Zea Mays
atgccagtccaaacgaacctgagaccgagactgcgacctgctcgtcttcgtttcaaagtgacgggggacgggaggcaccaggcgtgctttgctaagtttcagaagcccaaaatgtggataatccccccgatttattccacaaacttgggccccctccctgttcaggaggagtttggttccacagcgacggcgcagatcgcaaagcaccagggcgatctcgccgcccagcacgggcggttcaggtcaagcctcgcgtcagccgtcaggtctcctccgggcagcgccgcgtgcgtccccccatcccccccattcgacgagagagagattgccccccacccattcgacgagatctcggaggcagcctcgaggggaggatctaggtccagggagattaatctcgaggttggacctcacatttttatggcctttgactgcaacaaggaaagaggagtttcttcgcctgacagttgctcccgcatttgcaccgagggcactctcgtccaggcaaatcccttatctcactactggaagcctaaacgtttggagaacttcaacaagttggagaaccagaagtccagttatgaatctgctccgagtggctctgatccaaaacaggatgctgaagcgagtgatgaggcaactgcctcactgtgtggcttcaggtgcttcactgatctgccagcttcgttggtctgcgaggtccttgcacgtctcgatgcgaaggaccttggaattgtatcctgtgtctccaccctcctgcacgccttagccacagatcatcagggatggaagaagttatactgcgaaaggtgggggcttccagacctccccaccaccctgaatgggcccttgctgccgggtgtccccctagatgggaagttttggaaaacatttttcgtggagcgggagtttaggagcaaatccttcatgggaagattcaatctggatattctccgtggccacaatgaggatgtgcgtgctgtgtcccttttggtatcagcaaatctgatattcacaggcggccgcgattctgtggttaggatgtggaagatggaggaagggttattgattgatacatcccgtgcacttggtggcaccatccgggcgattgcagctgactcgaggcttttagtgagtggaggaactaatgcctatattcagtgttggagggccgttgaaggcaatggtcaattatttcacatctctggaagtggtaccgaccagaatgcggagtttcgcctctggggtcatgaaggtcctgtgacttgtcttgccctggattcactgaggatttatagtggttcttgggacatgactgttcgtgtttgggacagagaccagatggagtgtgtgcaaaagttcatgcatgcagactgggtttgggatcttgctctgcgtggaaatactgttgccagtactgctggtagagatgcatatgtatgggatatcagggctggcgagttaacaagcttaatttccaatgcccatgttggtagcgcatattcaattgcttggacacacctgccagatgtgctgtttactggtggagaggatggtgctattcgattgttcaatgtttctgatgtctgtgatgatgagggtgacattaaaccagtggcaacttgggtgccacattcaggtcctgttcattctcttgcttttgagtatccatggcttgtgtcagcctcgagtgatggcaggattgcacttattgatttgaggaagcttctgtcctccaaaagttcatcaaagggtctgcgtgttaagagagttgatggaagcgcaatagagcctccacagaggatgcttcatggcgttggatgtgatctcttctccatcgctattggtgcagataggattgtatgtgccggtgaggatggttctgttagagtctggaacttctcagaagcattggagattgagaggagggcacaggctctaaggagtttgaggcaggagaaccgcatcaggcggaggaaatcacaagcggagatgaatacaaatactagaaggcctgaccagtgttcaatagccatgaaaaagaaccaactgaagggtgataagagcgcaacttggcacaacaagcgtgccattaatgagaaggccaagtcttagattaggattgtcattggtagccgttcactgagttgcagtctatcgtggccatacattgccatcactgggtactttcttgttggtcgtacttgagattttattttcactgaagccgggtctagtaacacgttttcaacattgacacattcaaatgttcaactttatgtggttatacaattaccaacttaatatatgcaaatcttctatgcctagcatatattgatcaaaagaaagataagttcctcaaacctttcgagttctgaaagcttttggtcttttagctttcatgttactgtaaaagaatatttagttttcagtgtccgggtatttgtactgaaggcccttctcccttctataaattagtgttcttcatcaagaaaaatcatgtggttgtacgccaccatcattgtcaatggtaggtttgcatttcatagtaaactgctaatcgga

SEQ ID NO: 17890 - DNA, 2384 bp, Zea Mays
cagcgacggcgcagatcgcaaagcaccagggcgatctcggcgcccagcacgggcggttcaggtcaagcctcgcgtcagccgtcaggtctcctccgggcagcggcgcgtgcgtccccccatcccccccattcgacgagagagagtttgccccccacccattcgacgagatctcggaggcagcctcgaggggaggatctaggtccagggagattaatctcgaggttggacctcacatttttatggcctttgactgcaacaaggaaagaggagtttcttcgcctgacagttgctcccgcatttgcaccgagggcactctcgtccaggcaaatcccttatctcactactggaagcctaaacgtttggagaacttcaacaagttggagaaccagaagtccagttatgaatctgctccgagtggctctgatccaaaacaggatgctgaagcgagtgatgaggcaactgcctcactgtgtggcttcaggtgcttcactgatctgccagcttcgttggtctgcgaggtccttgcacgtctcgatgcgaaggaccttggaattgtatcctgtgtctccaccctcctgcacgccttagccacagatcatcagggatggaagaagttatactgcgaaaggtgggggcttccagacctccccaccaccctgaatgggcccttgctgccgggtgtccccctagatgggaagttttggaaaacatttttcgtggagcgggagtttaggagcaaatccttcatgggaagattcaatctggatattctccgtggccacaatgaggatgtgcgtgctgtgtcccttttggtatcagcaaatctgatattcacaggcggccgcgattctgtggttaggatgtggaagatggaggaagggttattgattgatacatcccgtgcacttggtggcaccatccgggcgattgcagctgactcgaggcttttagtgagtggaggaactaatgcctatattcagtgttggagggccgttgaaggcaatggtcaattatttcacatctctggaagtggtaccgaccagaatgcggagtttcgcctctggggtcatgaaggtcctgtgacttgtcttgccctggattcactgaggatttatagtggttcttgggacatgactgttcgtgtttgggacagagaccagatggagtgtgtgcaaaagttcatgcatgcagactgggtttgggatcttgctctgcgtggaaatactgttgccagtactgctggtagagatgcatatgtatgggatatcagggctggcgagttaacaagcttaatttccaatgcccatgttggtagcgcatattcaattgcttggacacacctgccagatgtgctgtttactggtggagaggatggtgctattcgattgttcaatgtttctgatgtctgtgatgatgagggtgacattaaaccagtggcaacttgggtgccacattcaggtcctgttcattctcttgcttttgagtatccatggcttgtgtcagcctcgagtgatggcaggattgcacttattgatttgaggaagcttctgtcctccaaaagttcatcaaagggtctgcgtgttaagagagttgatggaagcgcaatagagcctccacagaggatgcttcatggcgttggatgtgatctcttctccatcgctattggtgcagataggattgtatgtgccggtgaggatggttctgttagagtctggaacttctcagaagcattggagattgagaggagggcacaggctctaaggagtttgaggcaggagaaccgcatcaggcggaggaaatcacaagcggagatgaatacaaatactagaaggcctgaccagtgttcaatagccatgaaaaagaaccaactgaagggtgataagagcgcaacttggcacaacaagcgtgccattaatgagaaggccaagtcttagattaggattgtcattggtagccgttcactgagttgcagtctatcgtggccatacattgccatcactgggtactttcttgttggtcgtacttgagattttattttcactgaagccgggtctagtaacacgttttcaacattgacacattcaaatgttcaactttatgtggttatacaattaccaacttaatatatgcaaatcttctatgcctagcatatattgatcaaaagaaagataagttcctcaaacctttcgagttctgaaagcttttggtcttttagctttcatgttactgtaaaagaatatttagttttcagtgtccgggtatttgtactgaaggcccttctcccttctataaattagtgttcttcatcaagaaaaatcatgtggttgtacgccaccatcattgtcaatggtaggtttgcatttcatagtaaactgctaatcgga

SEQ ID NO: 17891 - DNA, 630 bp, Zea Mays
aaagggccttgcatctccagcgtcggcgtccacgacgccggggaccagcgaccatgcggccactttcctgttgcgctctcgtccgtctccacaatttgtgcagtggatctagaaagaagcatttaacgactggccgcaccagaccaaaccgtagcagaactcaactgaaggcaactgcgggcccgcggccgcaatgagtcaacagatgaagtgtttgagaagacaaattattattctttggggagagtgcataaatcttcgataagcgaaggaatgcagtctatcagatgatgaaaagcagaaggaatcccttctcagagagtgaaatccaaaactggtgctttcaaatatttcaagatctgatttacatgcattcgcatggatatttccaatgcgaccttaatcctgatatgtggttttgcattttttttacaaacaatattgcaatggttgatctatgattcctgtttgttgtgaaacaagtttctagccccaaccattttcacatgacattttagataagaaaatagttctccatatagctcaatcttcatgtttaaaatatcatgtgtatttgactggagggactatcagttataagcccaagaatagctgccttgcaattttcct

SEQ ID NO: 17892 - DNA, 639 bp, Zea Mays
ctcaaagggccttgcatctccagcgtcggcgtccacgacgccggggaccagcgaccatgcggccactttcctgttgcgctctcgtccgtctccacaatttgtgcagaccaaagacaaagtaagagtgtgctgaaagaagaaattgacctacttaaggtggaaccaaacgaaagcgaagtggatctagaaagaagcatttaacgactggccgcaccagaccaaaccgtagcagaactcaactgaaggcaactgcgggcccgcggccgcaatgagtcaacaggaatgcagtctatcagatgatgaaaagcagaaggaatcccttctcagagagtgaaatccaaaactggtgctttcaaatatttcaagatctgatttacatgcattcgcatggatatttccaatgcgaccttaatcctgatatgtggttttgcattttttttacaaacaatattgcaatggttgatctatgattcctgtttgttgtgaaacaagtttctagccccaaccattttcacatgacattttagataagaaaatagttctccatatagctcaatcttcatgtttaaaatatcatgtgtatttgactggagggactatcagttataagcccaagaatagctgccttgcaattttcct

SEQ ID NO: 17893 - DNA, 567 bp, Zea Mays
ctcaaagggccttgcatctccagcgtcggcgtccacgacgccggggaccagcgaccatgcggccactttcctgttgcgctctcgtccgtctccacaatttgtgcagtggatctagaaagaagcatttaacgactggccgcaccagaccaaaccgtagcagaactcaactgaaggcaactgcgggcccgcggccgcaatgagtcaacaggaatgcagtctatcagatgatgaaaagcagaaggaatcccttctcagagagtgaaatccaaaactggtgctttcaaatatttcaagatctgatttacatgcattcgcatggatatttccaatgcgaccttaatcctgatatgtggttttgcattttttttacaaacaatattgcaatggttgatctatgattcctgtttgttgtgaaacaagtttctagccccaaccattttcacatgacattttagataagaaaatagttctccatatagctcaatcttcatgtttaaaatatcatgtgtatttgactggagggactatcagttataagcccaagaatagctgccttgcaattttcct

SEQ ID NO: 17894 - DNA, 707 bp, Zea Mays
aaaaggggctctcaaagggccttgcatctccagcgtcggcgtccacgacgccggggaccagcgaccatgcggccactttcctgttgcgctctcgtccgtctccacaatttgtgcagaccaaagacaaagtaagagtgtgctgaaagaagaaattgacctacttaaggtggaaccaaacgaaagcgaagtggatctagaaagaagcatttaacgactggccgcaccagaccaaaccgtagcagaactcaactgaaggcaactgcgggcccgcggccgcaatgagtcaacagatgaagtgtttgagaagacaaattattattctttggggagagtgcataaatcttcgataagcgaagtctatcagatgatgaaaagcagaaggaatcccttctcagagagtgaaatccaaaactggtgctttcaaatatttcaagatctgatttacatgcattcgcatggatatttccaatgcgaccttaatcctgatatgtggttttgcattttttttacaaacaatattgcaatggttgatctatgattcctgtttgttgtgaaacaagtttctagccccaaccattttcacatgacattttagataagaaaatagttctccatatagctcaatcttcatgtttaaaatatcatgtgtatttgactggagggactatcagttataagcccaagaatagctgccttgcaattttcct

SEQ ID NO: 17895 - DNA, 1877 bp, Zea Mays
ctcaaattcagtgcctcaccttaggcatgtctaaaaaaatcttgccacttttatgagtcattgacgagcggggcctatacagaaggagaaaaatcttgccacaactgtagctacaaaccaaacgcatgtctaacttggtcaaacctacctaaccaggggcggaggagccattatggttaggtatagcccaagccatacctacatatgaaaacaaaatttaatagaccagcattagaaacacaaggttagcacaatttaagatgataaggagaaaaaacacaagaaaatcacaaactcgtagatttgaatagttattttagtcgggcatctagtagcacaaacacaagtatttatgggaatggagttggccaggaggacaatccaccaatagtggaggaagctattggatctcaattagaggacgatgaaaaggttcgatgtgaagaagatgccaatggtaaagtcgaccaacatcactacaggatcgtggtagggatagtgatgatgaagacttccgagatagggactacgatgtggctgcacttgctagtaatttaagccaggcatttaaatatggtatctacagtaacgatgacattgacgaggctcaagcatcacttgagcgggatgatgaggatgtatattttgatgatgaatctgcagaggtagtaatctcctcccttcgccttggagacgaccaagaaagtggctcgctctttacaaattccaactggtttgcatttgacgaggacaaggcactgaatgatggtttggttagcccagaagcttccccatctccaaattcagaaatatccgcactaaaagaggatgatgaagtcattcttggcgaagtaatagatgacacagaaggttctgaaccaactctaccagtctccaacaaagacgcaaacgaagagtctggtcacaccgtcttggcaaatggtaccattgacaaacaggaagatgatatcaggccactgactccggatgtaaaagagagtcaacccgagtttgtggaatggaaggaggaagaagctgaacctggtgatgttgctgagaaggatactgcagttcctggtattgaggttgaaagtgagaagcagctgaattccatggacgatgttatgctttgtgatgccgagttaggagaggaaaagaagagtggtggtatgcttggatcttcagcacctgaggcagaagcagcatcgcctgtttcatctgacatcgattcaatcaagcacccggaacaagctgctgacagtgctgtatcagagtatccaatgggcgaacaaaatcctgagatatgaaatgaatttgagggcagcagagttccgctcacgtgatggcggatgatgatggacgtgcaggaagcacttggaactggttggaccattactgtacaagcagtttgaggatcatgtgtgggttttctgttctactctcttggaggaaggtggtcccggaacatgcatctgatggagcctcaaaggttccacttagtctcatggagatgcttaggttcgatgtgtaacatattcatggagacgcaaaattcagaaagttgacttccctgcccttttccttaatcagtggggttctggttgtgtcactctggtaaatagccgataattgaataggtgatatctggtctggctacatgtccattactgtagttggtgctatttgtacgaaagttttggctcaaatgcagtcagttgattcttgtcatatttagaacttgtttgaaatttgtgtaaacgaaaaaaatatagcttctatttttcccaggtgcttggtgcttaattcatctgttataaatatagattttattttcccctcttgttctttgttttccccagcagaacagaaaaagaaaa

SEQ ID NO: 17896 - DNA, 2424 bp, Zea Mays
ctctaaaactatactataactgttttgattcgcttaatcggtgcagatgaaactatgtattcaagccatgcagattctatgcaatggttagatgacatacaagtccttgagatgattgttgacaagttcagcacatcagattctgctgaggttcacgcaaatgctgctgaaatcctttgtgcagtaaccagatacgcccctccagcacttgctgcaaagatttccagtccaagcttcgtagggaggttatttcaacatgcttttgaagattcaaggcctaaatcggtgctggtccactcattatcagtgtgcatatctttgttagatcctaagagacttgtatcggcttcctaccaagctttccgtagccagttgagccatggaacacttgtcactgcaagtccagagacagtaaatggcatgctggatagcctaggggatttgttgaagctgctggatgtttcatctgccgaaaatgttctgccaacaacatatggaagcttacaacctccactcgggaaacatcgcttaaagattgttgagttcatctctgttctactatcaattggtagtgaagttgccgaaacgcgactgattcaactaggagcaatccagcacgctatagatctattttttgagtacccgtttaacaacttcttgcaccaccatgtcgagaatatcattgggtcatgtctggagagtaagcaggatcacctgattggccatgtccttgatgagtgtaaacttgttacaagaattctggaagcggagaagaactctgctctgtcgtcagatttaactaagcatacattgtctacagagggaagatgtccaccaaggataggaattgttggtcatatgacacgaatagctaacaagctccttcagctggccaataccaacatcatggtccaatcatatttgcagcaaaattctgattggattgagtggcacaccagtaccctaacgaagcgtaatgcattagaaaatgtttaccagtgggcatgtggtcgaccaacatcactacaggatcgtggtagggatagtgatgatgaagacttccgagatagggactacgatgtggctgcacttgctagtaatttaagccaggcatttaaatatggtatctacagtaacgatgacattgacgaggctcaagcatcacttgagcgggatgatgaggatgtatattttgatgatgaatctgcagaggtagtaatctcctcccttcgccttggagacgaccaagaaagtggctcgctctttacaaattccaactggtttgcatttgacgaggacaaggcactgaatgatggtttggttagcccagaagcttccccatctccaaattcagaaatatccgcactaaaagaggatgatgaagtcattcttggcgaagtaatagatgacacagaaggttctgaaccaactctaccagtctccaacaaagacgcaaacgaagagtctggtcacaccgtcttggcaaatggtaccattgacaaacaggaagatgatatcaggccactgactccggatgtaaaagagagtcaacccgagtttgtggaatggaaggaggaagaagctgaacctggtgatgttgctgagaaggatactgcagttcctggtattgaggttgaaagtgagaagcagctgaattccatggacgatgttatgctttgtgatgccgagttaggagaggaaaagaagagtggtggtatgcttggatcttcagcacctgaggcagaagcagcatcgcctgtttcatctgacatcgattcaatcaagcacccggaacaagctgctgacagtgctgtatcagagtatccaatgggcgaacaaaatcctgagatatgaaatgaatttgagggcagcagagttccgctcacgtgatggcggatgatgatggacgtgcaggaagcacttggaactggttggaccattactgtacaagcagtttgaggatcatgtgtgggttttctgttctactctcttggaggaaggtggtcccggaacatgcatctgatggagcctcaaaggttccacttagtctcatggagatgcttaggttcgatgtgtaacatattcatggagacgcaaaattcagaaagttgacttccctgcccttttccttaatcagtggggttctggttgtgtcactctggtaaatagccgataattgaataggtgatatctggtctggctacatgtccattactgtagttggtgctatttgtacgaaagttttggctcaaatgcagtcagttgattcttgtcatatttagaacttgtttgaaatttgtgtaaacgaaaaaaatatagcttctatttttcccaggtgcttggtgcttaattcatctgttataaatatagattttattttcccctcttgttctttgttttccccagcagaacagaaaaagaaaa

SEQ ID NO: 17897 - DNA, 3267 bp, Zea Mays
ccgcctcgccctgctgcttcccttcttccgcctccgcctccactccacctccgcctccgcgcccttccgacctcccagtcctcctcatctcgcgattggcgaattatagggtttcgcggcggccacccggatccagctcggcttggtgagcgcctccaaagcttcggatcgcgagagggcgctgtgctcactcgctgttccgccgccgccgcgacgacgacgacgagcttctgtgcgcctgtgcctgggttcggagcccccgtcgcccctccgctggccaccgctcatgatgtggaaatctcagctctaaatccgcttaggttgtgataccgtgacagtgtgggactgacataattgtcactgtgcaagatgttttggcacgtgccaggattctccgctgcatcacctgtggatactattttggacaaggaaaattttaagttggaggatcttcttgatgaggatgaaataattcaggagtgcaaagcactgaatacccgcttaatcaattttttgcgggataaggttcaagtggagcaattgctccgctacattgtagaggaggctcctgaagatgcagaaaagaaacggatatttagatttccatttatagcttgtgaaatatttacatgtgacgtggatgtcatcatgaagacattagtggaggatgaagatcttatgaatttgcttttctccttcctaaaacctgaccaccctcatgggacattgttggctggttactttgctaaggtagtaatttgtttggcgatgaggaagacacttcaactagttcattatgtgcagggccatcctgaaatagttagccagcttgttgatcttattgggattacttctatcatggaggttttgattcgcttaatcggtgcagatgaaactatgtattcaagccatgcagattctatgcaatggttagatgacatacaagtccttgagatgattgttgacaagttcagcacatcagattctgctgaggttcacgcaaatgctgctgaaatcctttgtgcagtaaccagatacgcccctccagcacttgctgcaaagatttccagtccaagcttcgtagggaggttatttcaacatgcttttgaagattcaaggcctaaatcggtgctggtccactcattatcagtgtgcatatctttgttagatcctaagagacttgtatcggcttcctaccaagctttccgtagccagttgagccatggaacacttgtcactgcaagtccagagacagtaaatggcatgctggatagcctaggggatttgttgaagctgctggatgtttcatctgccgaaaatgttctgccaacaacatatggaagcttacaacctccactcgggaaacatcgcttaaagattgttgagttcatctctgttctactatcaattggtagtgaagttgccgaaacgcgactgattcaactaggagcaatccagcacgctatagatctattttttgagtacccgtttaacaacttcttgcaccaccatgtcgagaatatcattgggtcatgtctggagagtaagcaggatcacctgattggccatgtccttgatgagtgtaaacttgttacaagaattctggaagcggagaagaactctgctctgtcgtcagatttaactaagcatacattgtctacagagggaagatgtccaccaaggataggaattgttggtcatatgacacgaatagctaacaagctccttcagctggccaataccaacatcatggtccaatcatatttgcagcaaaattctgattggattgagtggcacaccagtaccctaacgaagcgtaatgcattagaaaatgtttaccagtgggcatgtggtcgaccaacatcactacaggatcgtggtagggatagtgatgatgaagacttccgagatagggactacgatgtggctgcacttgctagtaatttaagccaggcatttaaatatggtatctacagtaacgatgacattgacgaggctcaagcatcacttgagcgggatgatgaggatgtatattttgatgatgaatctgcagaggtagtaatctcctcccttcgccttggagacgaccaagaaagtggctcgctctttacaaattccaactggtttgcatttgacgaggacaaggcactgaatgatggtttggttagcccagaagcttccccatctccaaattcagaaatatccgcactaaaagaggatgatgaagtcattcttggcgaagtaatagatgacacagaaggttctgaaccaactctaccagtctccaacaaagacgcaaacgaagagtctggtcacaccgtcttggcaaatggtaccattgacaaacaggaagatgatatcaggccactgactccggatgtaaaagagagtcaacccgagtttgtggaatggaaggaggaagaagctgaacctggtgatgttgctgagaaggatactgcagttcctggtattgaggttgaaagtgagaagcagctgaattccatggacgatgttatgctttgtgatgccgagttaggagaggaaaagaagagtggtggtatgcttggatcttcagcacctgaggcagaagcagcatcgcctgtttcatctgacatcgattcaatcaagcacccggaacaagctgctgacagtgctgtatcagagtatccaatgggcgaacaaaatcctgagatatgaaatgaatttgagggcagcagagttccgctcacgtgatggcggatgatgatggacgtgcaggaagcacttggaactggttggaccattactgtacaagcagtttgaggatcatgtgtgggttttctgttctactctcttggaggaaggtggtcccggaacatgcatctgatggagcctcaaaggttccacttagtctcatggagatgcttaggttcgatgtgtaacatattcatggagacgcaaaattcagaaagttgacttccctgcccttttccttaatcagtggggttctggttgtgtcactctggtaaatagccgataattgaataggtgatatctggtctggctacatgtccattactgtagttggtgctatttgtacgaaagttttggctcaaatgcagtcagttgattcttgtcatatttagaacttgtttgaaatttgtgtaaacgaaaaaaatatagcttctatttttcccaggtgcttggtgcttaattcatctgttataaatatagattttattttcccctcttgttctttgttttccccagcagaacagaaaaagaaaa

SEQ ID NO: 17898 - DNA, 3400 bp, Zea Mays
cggcctctcctccacccccacctccgcctcgccctgctgcttcccttcttccgcctccgcctccactccacctccgcctccgcgcccttccgacctcccagtcctcctcatctcgcgattggcgaattatagggtttcgcggcggccacccggatccagctcggcttggtgagcgcctccaaagcttcggatcgcgagagggcgctgtgctcactcgctgttccgccgccgccgcgacgacgacgacgagcttctgtgcgcctgtgcctgggttcggagcccccgtcgcccctccgctggccaccggataccagctcatgatgtggaaatctcagctctaaatccgcttaggttgtgataccgtgacagtgtgggactgacataattgtcactgtgcaagatgttttggcacgtgccaggattctccgctgcatcacctgtggatactattttggacaaggaaaattttaagttggaggatcttcttgatgaggatgaaataattcaggagtgcaaagcactgaatacccgcttaatcaattttttgcgggataaggttcaagtggagcaattgctccgctacattgtagaggaggctcctgaagatgcagaaaagaaacggatatttagtaccactgtgcagatttccatttatagcttgtgaaatatttacatgtgacgtggatgtcatcatgaagacattagtggaggatgaagatcttatgaatttgcttttctccttcctaaaacctgaccaccctcatgggacattgttggctggttactttgctaaggtagtaatttgtttggcgatgaggaagacacttcaactagttcattatgtgcagggccatcctgaaatagttagccagcttgttgatcttattgggattacttctatcatggaggttttgattcgcttaatcggtgcagatgaaactatgtattcaagccatgcagattctatgcaatggttagatgacatacaagtccttgagatgattgttgacaagttcagcacatcagattctgctgaggttcacgcaaatgctgctgaaatcctttgtgcagtaaccagatacgcccctccagcacttgctgcaaagatttccagtccaagcttcgtagggaggttatttcaacatgcttttgaagattcaaggcctaaatcggtgctggtccactcattatcagtgtgcatatctttgttagatcctaagagacttgtatcggcttcctaccaagctttccgtagccagttgagccatggaacacttgtcactgcaagtccagagacagtaaatggcatgctggatagcctaggggatttgttgaagctgctggatgtttcatctgccgaaaatgttctgccaacaacatatggaagcttacaacctccactcgggaaacatcgcttaaagattgttgagttcatctctgttctactatcaattggtagtgaagttgccgaaacgcgactgattcaactaggagcaatccagcacgctatagatctattttttgagtacccgtttaacaacttcttgcaccaccatgtcgagaatatcattgggtcatgtctggagagtaagcaggatcacctgattggccatgtccttgatgagtgtaaacttgttacaagaattctggaagcggagaagaactctgctctgtcgtcagatttaactaagcatacattgtctacagagggaagatgtccaccaaggataggaattgttggtcatatgacacgaatagctaacaagctccttcagctggccaataccaacatcatggtccaatcatatttgcaggttgtattgagcttcatgttaagtcagagtttgatcaatatcatccctgaagttctttgatggaagttctgttcctaggaaatcttgatcaaaattctgattggattgagtggcacaccagtaccctaacgaagcgtaatgcattagaaaatgtttaccagtgggcatgtggtcgaccaacatcactacaggatcgtggtagggatagtgatgatgaagacttccgagatagggactacgatgtggctgcacttgctagtaatttaagccaggcatttaaatatggtatctacagtaacgatgacattgacgaggctcaagcatcacttgagcgggatgatgaggatgtatattttgatgatgaatctgcagaggtagtaatctcctcccttcgccttggagacgaccaagaaagtggctcgctctttacaaattccaactggtttgcatttgacgaggacaaggcactgaatgatggtttggttagcccagaagcttccccatctccaaattcagaaatatccgcactaaaagaggatgatgaagtcattcttggcgaagtaatagatgacacagaaggttctgaaccaactctaccagtctccaacaaagacgcaaacgaagagtctggtcacaccgtcttggcaaatggtaccattgacaaacaggaagatgatatcaggccactgactccggatgtaaaagagagtcaacccgagtttgtggaatggaaggaggaagaagctgaacctggtgatgttgctgagaaggatactgcagttcctggtattgaggttgaaagtgagaagcagctgaattccatggacgatgttatgctttgtgatgccgagttaggagaggaaaagaagagtggtggtatgcttggatcttcagcacctgaggcagaagcagcatcgcctgtttcatctgacatcgattcaatcaagcacccggaacaagctgctgacagtgctgtatcagagtatccaatgggcgaacaaaatcctgagatatgaaatgaatttgagggcagcagagttccgctcacgtgatggcggatgatgatggacgtgcaggaagcacttggaactggttggaccattactgtacaagcagtttgaggatcatgtgtgggttttctgttctactctcttggaggaaggtggtcccggaacatgcatctgatggagcctcaaaggttccacttagtctcatggagatgcttaggttcgatgtgtaacatattcatggagacgcaaaattcagaaagttgacttccctgcccttttccttaatcagtggggttctggttgtgtcactctggtaaatagccgataattgaataggtgatatctggtctggctacatgtccattactgtagttggtgctatttgtacgaaagttttggctcaaatgcagtcagttgattcttgtcatatttagaacttgtttgaaatttgtgtaaacgaaaaaaatatagcttctatttttcccaggtgcttggtgcttaattcatctgttataaatatagattttattttcccctcttgttctttgttttccccagcagaacagaaaaagaaaa

SEQ ID NO: 17899 - DNA, 3296 bp, Zea Mays
attattctccccaaagtttcttccggcctctcctccacccccacctccgcctcgccctgctgcttcccttcttccgcctccgcctccactccacctccgcctccgcgcccttccgacctcccagtcctcctcatctcgcgattggcgaattatagggtttcgcggcggccacccggatccagctcggcttggtgagcgcctccaaagcttcggatcgcgagagggcgctgtgctcactcgctgttccgccgccgccgcgacgacgacgacgagcttctgtgcgcctgtgcctgggttcggagcccccgtcgcccctccgctggccaccggataccagctcatgatgtggaaatctcagctctaaatccgcttaggttgtgataccgtgacagtgtgggactgacataattgtcactgtgcaagatgttttggcacgtgccaggattctccgctgcatcacctgtggatactattttggacaaggaaaattttaagttggaggatcttcttgatgaggatgaaataattcaggagtgcaaagcactgaatacccgcttaatcaattttttgcgggataaggttcaagtggagcaattgctccgctacattgtagaggaggctcctgaagatgcagaaaagaaacggatatttagatttccatttatagcttgtgaaatatttacatgtgacgtggatgtcatcatgaagacattagtggaggatgaagatcttatgaatttgcttttctccttcctaaaacctgaccaccctcatgggacattgttggctggttactttgctaaggtagtaatttgtttggcgatgaggaagacacttcaactagttcattatgtgcagggccatcctgaaatagttagccagcttgttgatcttattgggattacttctatcatggagatgaaactatgtattcaagccatgcagattctatgcaatggttagatgacatacaagtccttgagatgattgttgacaagttcagcacatcagattctgctgaggttcacgcaaatgctgctgaaatcctttgtgcagtaaccagatacgcccctccagcacttgctgcaaagatttccagtccaagcttcgtagggaggttatttcaacatgcttttgaagattcaaggcctaaatcggtgctggtccactcattatcagtgtgcatatctttgttagatcctaagagacttgtatcggcttcctaccaagctttccgtagccagttgagccatggaacacttgtcactgcaagtccagagacagtaaatggcatgctggatagcctaggggatttgttgaagctgctggatgtttcatctgccgaaaatgttctgccaacaacatatggaagcttacaacctccactcgggaaacatcgcttaaagattgttgagttcatctctgttctactatcaattggtagtgaagttgccgaaacgcgactgattcaactaggagcaatccagcacgctatagatctattttttgagtacccgtttaacaacttcttgcaccaccatgtcgagaatatcattgggtcatgtctggagagtaagcaggatcacctgattggccatgtccttgatgagtgtaaacttgttacaagaattctggaagcggagaagaactctgctctgtcgtcagatttaactaagcatacattgtctacagagggaagatgtccaccaaggataggaattgttggtcatatgacacgaatagctaacaagctccttcagctggccaataccaacatcatggtccaatcatatttgcagcaaaattctgattggattgagtggcacaccagtaccctaacgaagcgtaatgcattagaaaatgtttaccagtgggcatgtggtcgaccaacatcactacaggatcgtggtagggatagtgatgatgaagacttccgagatagggactacgatgtggctgcacttgctagtaatttaagccaggcatttaaatatggtatctacagtaacgatgacattgacgaggctcaagcatcacttgagcgggatgatgaggatgtatattttgatgatgaatctgcagaggtagtaatctcctcccttcgccttggagacgaccaagaaagtggctcgctctttacaaattccaactggtttgcatttgacgaggacaaggcactgaatgatggtttggttagcccagaagcttccccatctccaaattcagaaatatccgcactaaaagaggatgatgaagtcattcttggcgaagtaatagatgacacagaaggttctgaaccaactctaccagtctccaacaaagacgcaaacgaagagtctggtcacaccgtcttggcaaatggtaccattgacaaacaggaagatgatatcaggccactgactccggatgtaaaagagagtcaacccgagtttgtggaatggaaggaggaagaagctgaacctggtgatgttgctgagaaggatactgcagttcctggtattgaggttgaaagtgagaagcagctgaattccatggacgatgttatgctttgtgatgccgagttaggagaggaaaagaagagtggtggtatgcttggatcttcagcacctgaggcagaagcagcatcgcctgtttcatctgacatcgattcaatcaagcacccggaacaagctgctgacagtgctgtatcagagtatccaatgggcgaacaaaatcctgagatatgaaatgaatttgagggcagcagagttccgctcacgtgatggcggatgatgatggacgtgcaggaagcacttggaactggttggaccattactgtacaagcagtttgaggatcatgtgtgggttttctgttctactctcttggaggaaggtggtcccggaacatgcatctgatggagcctcaaaggttccacttagtctcatggagatgcttaggttcgatgtgtaacatattcatggagacgcaaaattcagaaagttgacttccctgcccttttccttaatcagtggggttctggttgtgtcactctggtaaatagccgataattgaataggtgatatctggtctggctacatgtccattactgtagttggtgctatttgtacgaaagttttggctcaaatgcagtcagttgattcttgtcatatttagaacttgtttgaaatttgtgtaaacgaaaaaaatatagcttctatttttcccaggtgcttggtgcttaattcatctgttataaatatagattttattttcccctcttgttctttgttttccccagcagaacagaaaaagaaaa

SEQ ID NO: 17900 - DNA, 3348 bp, Zea Mays
cgagacgaagcctttcgtttagattattctccccaaagtttcttccggcctctcctccacccccacctccgcctcgccctgctgcttcccttcttccgcctccgcctccactccacctccgcctccgcgcccttccgacctcccagtcctcctcatctcgcgattggcgaattatagggtttcgcggcggccacccggatccagctcggcttggtgagcgcctccaaagcttcggatcgcgagagggcgctgtgctcactcgctgttccgccgccgccgcgacgacgacgacgagcttctgtgcgcctgtgcctgggttcggagcccccgtcgcccctccgctggccaccggataccagctcatgatgtggaaatctcagctctaaatccgcttaggttgtgataccgtgacagtgtgggactgacataattgtcactgtgcaagatgttttggcacgtgccaggattctccgctgcatcacctgtggatactattttggacaaggaaaattttaagttggaggatcttcttgatgaggatgaaataattcaggagtgcaaagcactgaatacccgcttaatcaattttgcagtttgcgggataaggttcaagtggagcaattgctccgctacattgtagaggaggctcctgaagatgcagaaaagaaacggatatttagatttccatttatagcttgtgaaatatttacatgtgacgtggatgtcatcatgaagacattagtggaggatgaagatcttatgaatttgcttttctccttcctaaaacctgaccaccctcatgggacattgttggctggttactttgctaaggtagtaatttgtttggcgatgaggaagacacttcaactagttcattatgtgcagggccatcctgaaatagttagccagcttgttgatcttattgggattacttctatcatggaggttttgattcgcttaatcggtgcagatgaaactatgtattcaagccatgcagattctatgcaatggttagatgacatacaagtccttgagatgattgttgacaagttcagcacatcagattctgctgaggttcacgcaaatgctgctgaaatcctttgtgcagtaaccagatacgcccctccagcacttgctgcaaagatttccagtccaagcttcgtagggaggttatttcaacatgcttttgaagattcaaggcctaaatcggtgctggtccactcattatcagtgtgcatatctttgttagatcctaagagacttgtatcggcttcctaccaagctttccgtagccagttgagccatggaacacttgtcactgcaagtccagagacagtaaatggcatgctggatagcctaggggatttgttgaagctgctggatgtttcatctgccgaaaatgttctgccaacaacatatggaagcttacaacctccactcgggaaacatcgcttaaagattgttgagttcatctctgttctactatcaattggtagtgaagttgccgaaacgcgactgattcaactaggagcaatccagcacgctatagatctattttttgagtacccgtttaacaacttcttgcaccaccatgtcgagaatatcattgggtcatgtctggagagtaagcaggatcacctgattggccatgtccttgatgagtgtaaacttgttacaagaattctggaagcggagaagaactctgctctgtcgtcagatttaactaagcatacattgtctacagagggaagatgtccaccaaggataggaattgttggtcatatgacacgaatagctaacaagctccttcagctggccaataccaacatcatggtccaatcatatttgcagcaaaattctgattggattgagtggcacaccagtaccctaacgaagcgtaatgcattagaaaatgtttaccagtgggcatgtggtcgaccaacatcactacaggatcgtggtagggatagtgatgatgaagacttccgagatagggactacgatgtggctgcacttgctagtaatttaagccaggcatttaaatatggtatctacagtaacgatgacattgacgaggctcaagcatcacttgagcgggatgatgaggatgtatattttgatgatgaatctgcagaggtagtaatctcctcccttcgccttggagacgaccaagaaagtggctcgctctttacaaattccaactggtttgcatttgacgaggacaaggcactgaatgatggtttggttagcccagaagcttccccatctccaaattcagaaatatccgcactaaaagaggatgatgaagtcattcttggcgaagtaatagatgacacagaaggttctgaaccaactctaccagtctccaacaaagacgcaaacgaagagtctggtcacaccgtcttggcaaatggtaccattgacaaacaggaagatgatatcaggccactgactccggatgtaaaagagagtcaacccgagtttgtggaatggaaggaggaagaagctgaacctggtgatgttgctgagaaggatactgcagttcctggtattgaggttgaaagtgagaagcagctgaattccatggacgatgttatgctttgtgatgccgagttaggagaggaaaagaagagtggtggtatgcttggatcttcagcacctgaggcagaagcagcatcgcctgtttcatctgacatcgattcaatcaagcacccggaacaagctgctgacagtgctgtatcagagtatccaatgggcgaacaaaatcctgagatatgaaatgaatttgagggcagcagagttccgctcacgtgatggcggatgatgatggacgtgcaggaagcacttggaactggttggaccattactgtacaagcagtttgaggatcatgtgtgggttttctgttctactctcttggaggaaggtggtcccggaacatgcatctgatggagcctcaaaggttccacttagtctcatggagatgcttaggttcgatgtgtaacatattcatggagacgcaaaattcagaaagttgacttccctgcccttttccttaatcagtggggttctggttgtgtcactctggtaaatagccgataattgaataggtgatatctggtctggctacatgtccattactgtagttggtgctatttgtacgaaagttttggctcaaatgcagtcagttgattcttgtcatatttagaacttgtttgaaatttgtgtaaacgaaaaaaatatagcttctatttttcccaggtgcttggtgcttaattcatctgttataaatatagattttattttcccctcttgttctttgttttccccagcagaacagaaaaagaaaa

SEQ ID NO: 17901 - DNA, 3338 bp, Zea Mays
gtcgcatcgagacgaagcctttcgtttagattattctccccaaagtttcttccggcctctcctccacccccacctccgcctcgccctgctgcttcccttcttccgcctccgcctccactccacctccgcctccgcgcccttccgacctcccagtcctcctcatctcgcgattggcgaattatagggtttcgcggcggccacccggatccagctcggcttggtgagcgcctccaaagcttcggatcgcgagagggcgctgtgctcactcgctgttccgccgccgccgcgacgacgacgacgagcttctgtgcgcctgtgcctgggttcggagcccccgtcgcccctccgctggccaccggataccagctcatgatgtggaaatctcagctctaaatccgcttaggttgtgataccgtgacagtgtgggactgacataattgtcactgtgcaagatgttttggcacgtgccaggattctccgctgcatcacctgtggatactattttggacaaggaaaattttaagttggaggatcttcttgatgaggatgaaataattcaggagtgcaaagcactgaatacccgcttaatcaattttttgcgggataaggttcaagtggagcaattgctccgctacattgtagaggaggctcctgaagatgcagaaaagaaacggatatttaggtacagcatgggtaactaagattacataaactcaactttttacaatatcctaatgtggaatttattcaaaaccatggagtaccactgtgcagatttccatttatagcttgtgaaatatttacatgtgacgtggatgtcatcatgaagacattagtggaggatgaagatcttatgaatttgcttttctccttcctaaaacctgaccaccctcatgggacattgttggctggttactttgctaaggtagtaatttgtttggcgatgaggaagacacttcaactagttcattatgtgcagggccatcctgaaatagttagccagcttgttgatcttattgggattacttctatcatggaggttttgattcgcttaatcggtgcagatgaaactatgtattcaagccatgcagattctatgcaatggttagatgacatacaagtccttgagatgattgttgacaagttcagcacatcagattctgctgaggttcacgcaaatgctgctgaaatcctttgtgcagtaaccagatacgcccctccagcacttgctgcaaagatttccagtccaagcttcgtagggaggttatttcaacatgcttttgaagattcaaggcctaaatcggtgctggtccactcattatcagtgtgcatatctttgttagatcctaagagacttgtatcggcttcctaccaagctttccgtagccagttgagccatggaacacttgtcactgcaagtccagagacagtaaatggcatgctggatagcctaggggatttgttgaagctgctggatgtttcatctgccgaaaatgttctgccaacaacatatggaagcttacaacctccactcgggaaacatcgcttaaaggtacccgtttaacaacttcttgcaccaccatgtcgagaatatcattgggtcatgtctggagagtaagcaggatcacctgattggccatgtccttgatgagtgtaaacttgttacaagaattctggaagcggagaagaactctgctctgtcgtcagatttaactaagcatacattgtctacagagggaagatgtccaccaaggataggaattgttggtcatatgacacgaatagctaacaagctccttcagctggccaataccaacatcatggtccaatcatatttgcagcaaaattctgattggattgagtggcacaccagtaccctaacgaagcgtaatgcattagaaaatgtttaccagtgggcatgtggtcgaccaacatcactacaggatcgtggtagggatagtgatgatgaagacttccgagatagggactacgatgtggctgcacttgctagtaatttaagccaggcatttaaatatggtatctacagtaacgatgacattgacgaggctcaagcatcacttgagcgggatgatgaggatgtatattttgatgatgaatctgcagaggtagtaatctcctcccttcgccttggagacgaccaagaaagtggctcgctctttacaaattccaactggtttgcatttgacgaggacaaggcactgaatgatggtttggttagcccagaagcttccccatctccaaattcagaaatatccgcactaaaagaggatgatgaagtcattcttggcgaagtaatagatgacacagaaggttctgaaccaactctaccagtctccaacaaagacgcaaacgaagagtctggtcacaccgtcttggcaaatggtaccattgacaaacaggaagatgatatcaggccactgactccggatgtaaaagagagtcaacccgagtttgtggaatggaaggaggaagaagctgaacctggtgatgttgctgagaaggatactgcagttcctggtattgaggttgaaagtgagaagcagctgaattccatggacgatgttatgctttgtgatgccgagttaggagaggaaaagaagagtggtggtatgcttggatcttcagcacctgaggcagaagcagcatcgcctgtttcatctgacatcgattcaatcaagcacccggaacaagctgctgacagtgctgtatcagagtatccaatgggcgaacaaaatcctgagatatgaaatgaatttgagggcagcagagttccgctcacgtgatggcggatgatgatggacgtgcaggaagcacttggaactggttggaccattactgtacaagcagtttgaggatcatgtgtgggttttctgttctactctcttggaggaaggtggtcccggaacatgcatctgatggagcctcaaaggttccacttagtctcatggagatgcttaggttcgatgtgtaacatattcatggagacgcaaaattcagaaagttgacttccctgcccttttccttaatcagtggggttctggttgtgtcactctggtaaatagccgataattgaataggtgatatctggtctggctacatgtccattactgtagttggtgctatttgtacgaaagttttggctcaaatgcagtcagttgattcttgtcatatttagaacttgtttgaaatttgtgtaaacgaaaaaaatatagcttctatttttcccaggtgcttggtgcttaattcatctgttataaatatagattttattttcccctcttgttctttgttttccccagcagaacagaaaaagaaaa

SEQ ID NO: 17902 - DNA, 3258 bp, Zea Mays
gtcgcatcgagacgaagcctttcgtttagattattctccccaaagtttcttccggcctctcctccacccccacctccgcctcgccctgctgcttcccttcttccgcctccgcctccactccacctccgcctccgcgcccttccgacctcccagtcctcctcatctcgcgattggcgaattatagggtttcgcggcggccacccggatccagctcggcttggtgagcgcctccaaagcttcggatcgcgagagggcgctgtgctcactcgctgttccgccgccgccgcgacgacgacgacgagcttctgtgcgcctgtgcctgggttcggagcccccgtcgcccctccgctggccaccggataccagctcatgatgtggaaatctcagctctaaatccgcttaggttgtgataccgtgacagtgtgggactgacataattgtcactgtgcaagatgttttggcacgtgccaggattctccgctgcatcacctgtggatactattttggacaaggaaaattttaagttggaggatcttcttgatgaggatgaaataattcaggagtgcaaagcactgaatacccgcttaatcaattttttgcgggataaggttcaagtggagcaattgctccgctacattgtagaggaggctcctgaagatgcagaaaagaaacggatatttagatttccatttatagcttgtgaaatatttacatgtgacgtggatgtcatcatgaagacattagtggaggatgaagatcttatgaatttgcttttctccttcctaaaacctgaccaccctcatgggacattgttggctggttactttgctaaggtagtaatttgtttggcgatgaggaagacacttcaactagttcattatgtgcagggccatcctgaaatagttagccagcttgttgatcttattgggattacttctatcatggaggttttgattcgcttaatcggtgcagatgaaactatgtattcaagccatgcagattctatgcaatggttagatgacatacaagtccttgagatgattgttgacaagttcagcacatcagattctgctgaggttcacgcaaatgctgctgaaatcctttgtgcagtaaccagatacgcccctccagcacttgctgcaaagatttccagtccaagatcctaagagacttgtatcggcttcctaccaagctttccgtagccagttgagccatggaacacttgtcactgcaagtccagagacagtaaatggcatgctggatagcctaggggatttgttgaagctgctggatgtttcatctgccgaaaatgttctgccaacaacatatggaagcttacaacctccactcgggaaacatcgcttaaagattgttgagttcatctctgttctactatcaattggtagtgaagttgccgaaacgcgactgattcaactaggagcaatccagcacgctatagatctattttttgagtacccgtttaacaacttcttgcaccaccatgtcgagaatatcattgggtcatgtctggagagtaagcaggatcacctgattggccatgtccttgatgagtgtaaacttgttacaagaattctggaagcggagaagaactctgctctgtcgtcagatttaactaagcatacattgtctacagagggaagatgtccaccaaggataggaattgttggtcatatgacacgaatagctaacaagctccttcagctggccaataccaacatcatggtccaatcatatttgcagcaaaattctgattggattgagtggcacaccagtaccctaacgaagcgtaatgcattagaaaatgtttaccagtgggcatgtggtcgaccaacatcactacaggatcgtggtagggatagtgatgatgaagacttccgagatagggactacgatgtggctgcacttgctagtaatttaagccaggcatttaaatatggtatctacagtaacgatgacattgacgaggctcaagcatcacttgagcgggatgatgaggatgtatattttgatgatgaatctgcagaggtagtaatctcctcccttcgccttggagacgaccaagaaagtggctcgctctttacaaattccaactggtttgcatttgacgaggacaaggcactgaatgatggtttggttagcccagaagcttccccatctccaaattcagaaatatccgcactaaaagaggatgatgaagtcattcttggcgaagtaatagatgacacagaaggttctgaaccaactctaccagtctccaacaaagacgcaaacgaagagtctggtcacaccgtcttggcaaatggtaccattgacaaacaggaagatgatatcaggccactgactccggatgtaaaagagagtcaacccgagtttgtggaatggaaggaggaagaagctgaacctggtgatgttgctgagaaggatactgcagttcctggtattgaggttgaaagtgagaagcagctgaattccatggacgatgttatgctttgtgatgccgagttaggagaggaaaagaagagtggtggtatgcttggatcttcagcacctgaggcagaagcagcatcgcctgtttcatctgacatcgattcaatcaagcacccggaacaagctgctgacagtgctgtatcagagtatccaatgggcgaacaaaatcctgagatatgaaatgaatttgagggcagcagagttccgctcacgtgatggcggatgatgatggacgtgcaggaagcacttggaactggttggaccattactgtacaagcagtttgaggatcatgtgtgggttttctgttctactctcttggaggaaggtggtcccggaacatgcatctgatggagcctcaaaggttccacttagtctcatggagatgcttaggttcgatgtgtaacatattcatggagacgcaaaattcagaaagttgacttccctgcccttttccttaatcagtggggttctggttgtgtcactctggtaaatagccgataattgaataggtgatatctggtctggctacatgtccattactgtagttggtgctatttgtacgaaagttttggctcaaatgcagtcagttgattcttgtcatatttagaacttgtttgaaatttgtgtaaacgaaaaaaatatagcttctatttttcccaggtgcttggtgcttaattcatctgttataaatatagattttattttcccctcttgttctttgttttccccagcagaacagaaaaagaaaa

SEQ ID NO: 17903 - DNA, 3371 bp, Zea Mays
ctccccatgtcgcatcgagacgaagcctttcgtttagattattctccccaaagtttcttccggcctctcctccacccccacctccgcctcgccctgctgcttcccttcttccgcctccgcctccactccacctccgcctccgcgcccttccgacctcccagtcctcctcatctcgcgattggcgaattatagggtttcgcggcggccacccggatccagctcggcttggtgagcgcctccaaagcttcggatcgcgagagggcgctgtgctcactcgctgttccgccgccgccgcgacgacgacgacgagcttctgtgcgcctgtgcctgggttcggagcccccgtcgcccctccgctggccaccggataccagctcatgatgtggaaatctcagctctaaatccgcttaggttgtgataccgtgacagtgtgggactgacataattgtcactgtgcaagatgttttggcacgtgccaggattctccgctgcatcacctgtggatactattttggacaaggaaaattttaagttggaggatcttcttgatgaggatgaaataattcaggagtgcaaagcactgaatacccgcttaatcaattttttgcgggataaggttcaagtggagcaattgctccgctacattgtagaggaggctcctgaagatgcagaaaagaaacggatatttagtaccactgtgcagatttccatttatagcttgtgaaatatttacatgtgacgtggatgtcatcatgaagacattagtggaggatgaagatcttatgaatttgcttttctccttcctaaaacctgaccaccctcatgggacattgttggctggttactttgctaaggtagtaatttgtttggcgatgaggaagacacttcaactagttcattatgtgcagggccatcctgaaatagttagccagcttgttgatcttattgggattacttctatcatggaggttttgattcgcttaatcggtgcagatgaaactatgtattcaagccatgcagattctatgcaatggttagatgacatacaagtccttgagatgattgttgacaagttcagcacatcagattctgctgaggttcacgcaaatgctgctgaaatcctttgtgcagtaaccagatacgcccctccagcacttgctgcaaagatttccagtccaagcttcgtagggaggttatttcaacatgcttttgaagattcaaggcctaaatcggtgctggtccactcattatcagtgtgcatatctttgttagatcctaagagacttgtatcggcttcctaccaagctttccgtagccagttgagccatggaacacttgtcactgcaagtccagagacagtaaatggcatgctggatagcctaggggatttgttgaagctgctggatgtttcatctgccgaaaatgttctgccaacaacatatggaagcttacaacctccactcgggaaacatcgcttaaagattgttgagttcatctctgttctactatcaattggtagtgaagttgccgaaacgcgactgattcaactaggagcaatccagcacgctatagatctattttttgagtacccgtttaacaacttcttgcaccaccatgtcgagaatatcattgggtcatgtctggagagtaagcaggatcacctgattggccatgtccttgatgagtgtaaacttgttacaagaattctggaagcggagaagaactctgctctgtcgtcagatttaactaagcatacattgtctacagagggaagatgtccaccaaggataggaattgttggtcatatgacacgaatagctaacaagctccttcagctggccaataccaacatcatggtccaatcatatttgcagcaaaattctgattggattgagtggcacaccagtaccctaacgaagcgtaatgcattagaaaatgtttaccagtgggcatgtggtcgaccaacatcactacaggatcgtggtagggatagtgatgatgaagacttccgagatagggactacgatgtggctgcacttgctagtaatttaagccaggcatttaaatatggtatctacagtaacgatgacattgacgaggctcaagcatcacttgagcgggatgatgaggatgtatattttgatgatgaatctgcagaggtagtaatctcctcccttcgccttggagacgaccaagaaagtggctcgctctttacaaattccaactggtttgcatttgacgaggacaaggcactgaatgatggtttggttagcccagaagcttccccatctccaaattcagaaatatccgcactaaaagaggatgatgaagtcattcttggcgaagtaatagatgacacagaaggttctgaaccaactctaccagtctccaacaaagacgcaaacgaagagtctggtcacaccgtcttggcaaatggtaccattgacaaacaggaagatgatatcaggccactgactccggatgtaaaagagagtcaacccgagtttgtggaatggaaggaggaagaagctgaacctggtgatgttgctgagaaggatactgcagttcctggtattgaggttgaaagtgagaagcagctgaattccatggacgatgttatgctttgtgatgccgagttaggagaggaaaagaagagtggtggtatgcttggatcttcagcacctgaggcagaagcagcatcgcctgtttcatctgacatcgattcaatcaagcacccggaacaagctgctgacagtgctgtatcagagtatccaatgggcgaacaaaatcctgagatatgaaatgaatttgagggcagcagagttccgctcacgtgatggcggatgatgatggacgtgcaggaagcacttggaactggttggaccattactgtacaagcagtttgaggatcatgtgtgggttttctgttctactctcttggaggaaggtggtcccggaacatgcatctgatggagcctcaaaggttccacttagtctcatggagatgcttaggttcgatgtgtaacatattcatggagacgcaaaattcagaaagttgacttccctgcccttttccttaatcagtggggttctggttgtgtcactctggtaaatagccgataattgaataggtgatatctggtctggctacatgtccattactgtagttggtgctatttgtacgaaagttttggctcaaatgcagtcagttgattcttgtcatatttagaacttgtttgaaatttgtgtaaacgaaaaaaatatagcttctatttttcccaggtgcttggtgcttaattcatctgttataaatatagattttattttcccctcttgttctttgttttccccagcagaacagaaaaagaaaa

SEQ ID NO: 17904 - DNA, 3317 bp, Zea Mays
ctccccatgtcgcatcgagacgaagcctttcgtttagattattctccccaaagtttcttccggcctctcctccacccccacctccgcctcgccctgctgcttcccttcttccgcctccgcctccactccacctccgcctccgcgcccttccgacctcccagtcctcctcatctcgcgattggcgaattatagggtttcgcggcggccacccggatccagctcggcttggtgagcgcctccaaagcttcggatcgcgagagggcgctgtgctcactcgctgttccgccgccgccgcgacgacgacgacgagcttctgtgcgcctgtgcctgggttcggagcccccgtcgcccctccgctggccaccggataccagctcatgatgtggaaatctcagctctaaatccgcttaggttgtgataccgtgacagtgtgggactgacataattgtcactgtgcaagatgttttggcacgtgccaggattctccgctgcatcacctgtggatactattttggacaaggaaaattttaagttggaggatcttcttgatgaggatgaaataattcaggagtgcaaagcactgaatacccgcttaatcaattttttgcgggataaggttcaagtggagcaattgctccgctacattgtagaggaggctcctgaagatgcagaaaagaaacggatatttagatttccatttatagcttgtgaaatatttacatgtgacgtggatgtcatcatgaagacattagtggaggatgaagatcttatgaatttgcttttctccttcctaaaacctgaccaccctcatgggacattgttggctggttactttgctaaggtagtaatttgtttggcgatgaggaagacacttcaactagttcattatgtgcagggccatcctgaaatagttagccagcttgttgatcttattgggattacttctatcatggaggttttgattcgcttaatcggtgcagatgaaactatgtattcaagccatgcagattctatgcaatggttagatgacatacaagtccttgagatgattgttgacaagttcagcacatcagattctgctgaggttcacgcaaatgctgctgaaatcctttgtgcagtaaccagatacgcccctccagcacttgctgcaaagatttccagtccaagcttcgtagggaggttatttcaacatgcttttgaagattcaaggcctaaatcggtgctggtccactcattatcagtgtgcatatctttgttagatcctaagagacttgtatcggcttcctaccaagctttccgtagccagttgagccatggaacacttgtcactgcaagtccagagacagtaaatggcatgctggatagcctaggggatttgttgaagctgctggatgtttcatctgccgaaaatgttctgccaacaacatatggaagcttacaacctccactcgggaaacatcgcttaaagattgttgagttcatctctgttctactatcaattggtagtgaagttgccgaaacgcgactgattcaactaggagcaatccagcacgctatagatctattttttgagtacccgtttaacaacttcttgcaccaccatgtcgagaatatcattgggtcatgtctggagagtaagcaggatcacctgattggccatgtccttgatgagtgtaaacttgttacaagaattctggaagcggagaagaactctgctctgtcgtcagatttaactaagcatacattgtctacagagggaagatgtccaccaaggataggaattgttggtcatatgacacgaatagctaacaagctccttcagctggccaataccaacatcatggtccaatcatatttgcagcaaaattctgattggattgagtggcacaccagtaccctaacgaagcgtaatgcattagaaaatgtttaccagtgggcatgtggtcgaccaacatcactacaggatcgtggtagggatagtgatgatgaagacttccgagatagggactacgatgtggctgcacttgctagtaatttaagccaggcatttaaatatggtatctacagtaacgatgacattgacgaggctcaagcatcacttgagcgggatgatgaggatgtatattttgatgatgaatctgcagagtggctcgctctttacaaattccaactggtttgcatttgacgaggacaaggcactgaatgatggtttggttagcccagaagcttccccatctccaaattcagaaatatccgcactaaaagaggatgatgaagtcattcttggcgaagtaatagatgacacagaaggttctgaaccaactctaccagtctccaacaaagacgcaaacgaagagtctggtcacaccgtcttggcaaatggtaccattgacaaacaggaagatgatatcaggccactgactccggatgtaaaagagagtcaacccgagtttgtggaatggaaggaggaagaagctgaacctggtgatgttgctgagaaggatactgcagttcctggtattgaggttgaaagtgagaagcagctgaattccatggacgatgttatgctttgtgatgccgagttaggagaggaaaagaagagtggtggtatgcttggatcttcagcacctgaggcagaagcagcatcgcctgtttcatctgacatcgattcaatcaagcacccggaacaagctgctgacagtgctgtatcagagtatccaatgggcgaacaaaatcctgagatatgaaatgaatttgagggcagcagagttccgctcacgtgatggcggatgatgatggacgtgcaggaagcacttggaactggttggaccattactgtacaagcagtttgaggatcatgtgtgggttttctgttctactctcttggaggaaggtggtcccggaacatgcatctgatggagcctcaaaggttccacttagtctcatggagatgcttaggttcgatgtgtaacatattcatggagacgcaaaattcagaaagttgacttccctgcccttttccttaatcagtggggttctggttgtgtcactctggtaaatagccgataattgaataggtgatatctggtctggctacatgtccattactgtagttggtgctatttgtacgaaagttttggctcaaatgcagtcagttgattcttgtcatatttagaacttgtttgaaatttgtgtaaacgaaaaaaatatagcttctatttttcccaggtgcttggtgcttaattcatctgttataaatatagattttattttcccctcttgttctttgttttccccagcagaacagaaaaagaaaa

SEQ ID NO: 17905 - DNA, 2201 bp, Zea Mays
atgtttaatcatcaaacgttcattcatcatatcccaaggcatctacaagtccagcttctgaagcagaacacttcaggtcatcaccagagtttgaagaatgaggtttcaagccccatatctgttctggagcggaagagtggagagctccacaaggtacaacttcacgctacctctgccatgcttcctgtcgctaccatggagaaggcaacgaaatgggagcctggggacataaagggaatggagtcacatgatgcgtatctgatagccagccagctaaatcttcttgatgaacagcaagacacagtgtatgttgctggcctccagatggagctccagcaagcacgtgataggataagtgagctggaaaccgagcggcggtcggctaggaagaagcttgatcacttgttcaagaaacttgcagaggagaaagcagcttggagaaacagagagcatgaaaaggtgcgtgctatcctcgaagatatgaaggcagaccttgaccatgagaagaaaaacaggaggcggctggagatgatcaacttgaaactcgtcaatgagctgaaggaggccaagatgtcagcaaaacagctgttacaagattatgagacagagaggaaggcgcgtgagctcaccgaggaggtatgcaacgagctagcaagagaggtgggggaagacaaagctgagattgaggccttgaaacgggactccctgaggttgcgagaggagctagacgaggaacggaagatgctccagatggctgaggtgtggcgtgaagaacgggtgcagatgaagctcgtcgatgcaaaacttactcttgacgccaaatacacacagctgagcagactgcaacatgttgttgaggcgtttattgccgcacgcagtactgcaaatggagacataacagtagtagaggaagcagagaacataattcaggcaatcaagtcagtcagagcccaaggcgctgaattcagatatgagccaccggcggcatcggaagacatattttccatctttgaagagctgcgtccaagtgaggagcctgtcattaaggagattgagccatgctacacgaatagctctgccaaatgtgaatcggaaattcaacaggttagcccaatgaccgatatattcctcgaaacgaaagccaaagtttactcaaacaaaagccctaaagatgaaagcgacgccgaagatggcagcagctgggagacaataagccatgaagacatgcggggttcgagcggttcgcctgatggaagcgaaccttcagtcagcaataagataagcatttcttggaacagcagaaatggtttcgagtacagggagaacgagaagctggaagatgacttagctgatgcctacctggcaagcatgaaccaacccaagaagaaagaatcggccatttcaaagctctggaagtcgtcccgcccaaagaacagtgaggtatgcaagaaagatgcagtcgttgaaacggtgaatgcaagaccgtctaatgcacggcactcagtggggacttattccactgttgaaagtggcatccaagaaactggactcagtccaccgagcgtcgagcagtggagctcgccggactcgatgaatatccaattcaaccggggcttcaagggctgtatagagtacccacggacgtcccagaagcacagtttgaaggcaaagctcatggaggcacggatggagagccagaagatccagctccgccaggtcctcaagcagaagatctagtgcaggccagaaccagaggacgaaatattgtaaacctagattttaatccaaggaataatggcaaggagtacctagatgcttcatttttttctcctgttttagagtaacctgtaatgcatgtacaacaagggctagagagaaaaaaaaggacagggatggccttggtgggctgtccggactccggagcctttgctgcttctgtatcttactttagttttggtgttatggtcggatctggtaggctatggtgagatctagcatgatgtataatacagacacaaacaagcagcaacgttgagacaaattgcatccctttgtaaacagttctccggtgttttccataaccattttttgtgtgtgaaactcttattataacgactccttattttccacatgttaggctgtattcggtggacgtgatattgtagataacattgtttaaagagtaaagtttggaatacgag

SEQ ID NO: 17906 - DNA, 2356 bp, Zea Mays
caacaaacgtgacgatattaccgatgctatagatgtaggttctctgtatatgactcggtttgataggggtctccacgtgatgattgtttgggcccctatagattctttgagaatgtctaccggaaattcacccctttttgtttaacatgtctgtgaatctgtgttgttcctttcaaatcacgcatatcccaaggcatctacaagtccagcttctgaagcagaacacttcaggtcatcaccagagtttgaagaatgaggtttcaagccccatatctgttctggagcggaagagtggagagctccacaaggtacaacttcacgctacctctgccatgcttcctgtcgctaccatggagaaggcaacgaaatgggagcctggggacataaagggaatggagtcacatgatgcgtatctgatagccagccagctaaatcttcttgatgaacagcaagacacagtgtatgttgctggcctccagatggagctccagcaagcacgtgataggataagtgagctggaaaccgagcggcggtcggctaggaagaagcttgatcacttgttcaagaaacttgcagaggagaaagcagcttggagaaacagagagcatgaaaaggtgcgtgctatcctcgaagatatgaaggcagaccttgaccatgagaagaaaaacaggaggcggctggagatgatcaacttgaaactcgtcaatgagctgaaggaggccaagatgtcagcaaaacagctgttacaagattatgagacagagaggaaggcgcgtgagctcaccgaggaggtatgcaacgagctagcaagagaggtgggggaagacaaagctgagattgaggccttgaaacgggactccctgaggttgcgagaggagctagacgaggaacggaagatgctccagatggctgaggtgtggcgtgaagaacgggtgcagatgaagctcgtcgatgcaaaacttactcttgacgccaaatacacacagctgagcagactgcaacatgttgttgaggcgtttattgccgcacgcagtactgcaaatggagacataacagtagtagaggaagcagagaacataattcaggcaatcaagtcagtcagagcccaaggcgctgaattcagatatgagccaccggcggcatcggaagacatattttccatctttgaagagctgcgtccaagtgaggagcctgtcattaaggagattgagccatgctacacgaatagctctgccaaatgtgaatcggaaattcaacaggttagcccaatgaccgatatattcctcgaaacgaaagccaaagtttactcaaacaaaagccctaaagatgaaagcgacgccgaagatggcagcagctgggagacaataagccatgaagacatgcggggttcgagcggttcgcctgatggaagcgaaccttcagtcagcaataagataagcatttcttggaacagcagaaatggtttcgagtacagggagaacgagaagctggaagatgacttagctgatgcctacctggcaagcatgaaccaacccaagaagaaagaatcggccatttcaaagctctggaagtcgtcccgcccaaagaacagtgaggtatgcaagaaagatgcagtcgttgaaacggtgaatgcaagaccgtctaatgcacggcactcagtggggacttattccactgttgaaagtggcatccaagaaactggactcagtccaccgagcgtcgagcagtggagctcgccggactcgatgaatatccaattcaaccggggcttcaagggctgtatagagtacccacggacgtcccagaagcacagtttgaaggcaaagctcatggaggcacggatggagagccagaagatccagctccgccaggtcctcaagcagaagatctagtgcaggccagaaccagaggacgaaatattgtaaacctagattttaatccaaggaataatggcaaggagtacctagatgcttcatttttttctcctgttttagagtaacctgtaatgcatgtacaacaagggctagagagaaaaaaaaggacagggatggccttggtgggctgtccggactccggagcctttgctgcttctgtatcttactttagttttggtgttatggtcggatctggtaggctatggtgagatctagcatgatgtataatacagacacaaacaagcagcaacgttgagacaaattgcatccctttgtaaacagttctccggtgttttccataaccattttttgtgtgtgaaactcttattataacgactccttattttccacatgttaggctgtattcggtggacgtgatattgtagataacattgtttaaagagtaaagtttggaatacgag

SEQ ID NO: 17907 - DNA, 2234 bp, Zea Mays
cttcccagctacatcagcctctcctagcggcattttttttattgatacacaggtgctgagcatatcccaaggcatctacaagtccagcttctgaagcagaacacttcaggtcatcaccagagtttgaagaatgaggtttcaagccccatatctgttctggagcggaagagtggagagctccacaaggtacaacttcacgctacctctgccatgcttcctgtcgctaccatggagaaggcaacgaaatgggagcctggggacataaagggaatggagtcacatgatgcgtatctgatagccagccagctaaatcttcttgatgaacagcaagacacagtgtatgttgctggcctccagatggagctccagcaagcacgtgataggataagtgagctggaaaccgagcggcggtcggctaggaagaagcttgatcacttgttcaagaaacttgcagaggagaaagcagcttggagaaacagagagcatgaaaaggtgcgtgctatcctcgaagatatgaaggcagaccttgaccatgagaagaaaaacaggaggcggctggagatgatcaacttgaaactcgtcaatgagctgaaggaggccaagatgtcagcaaaacagctgttacaagattatgagacagagaggaaggcgcgtgagctcaccgaggaggtatgcaacgagctagcaagagaggtgggggaagacaaagctgagattgaggccttgaaacgggactccctgaggttgcgagaggagctagacgaggaacggaagatgctccagatggctgaggtgtggcgtgaagaacgggtgcagatgaagctcgtcgatgcaaaacttactcttgacgccaaatacacacagctgagcagactgcaacatgttgttgaggcgtttattgccgcacgcagtactgcaaatggagacataacagtagtagaggaagcagagaacataattcaggcaatcaagtcagtcagagcccaaggcgctgaattcagatatgagccaccggcggcatcggaagacatattttccatctttgaagagctgcgtccaagtgaggagcctgtcattaaggagattgagccatgctacacgaatagctctgccaaatgtgaatcggaaattcaacaggttagcccaatgaccgatatattcctcgaaacgaaagccaaagtttactcaaacaaaagccctaaagatgaaagcgacgccgaagatggcagcagctgggagacaataagccatgaagacatgcggggttcgagcggttcgcctgatggaagcgaaccttcagtcagcaataagataagcatttcttggaacagcagaaatggtttcgagtacagggagaacgagaagctggaagatgacttagctgatgcctacctggcaagcatgaaccaacccaagaagaaagaatcggccatttcaaagctctggaagtcgtcccgcccaaagaacagtgaggtatgcaagaaagatgcagtcgttgaaacggtgaatgcaagaccgtctaatgcacggcactcagtggggacttattccactgttgaaagtggcatccaagaaactggactcagtccaccgagcgtcgagcagtggagctcgccggactcgatgaatatccaattcaaccggggcttcaagggctgtatagagtacccacggacgtcccagaagcacagtttgaaggcaaagctcatggaggcacggatggagagccagaagatccagctccgccaggtcctcaagcagaagatctagtgcaggccagaaccagaggacgaaatattgtaaacctagattttaatccaaggaataatggcaaggagtacctagatgcttcatttttttctcctgttttagagtaacctgtaatgcatgtacaacaagggctagagagaaaaaaaaggacagggatggccttggtgggctgtccggactccggagcctttgctgcttctgtatcttactttagttttggtgttatggtcggatctggtaggctatggtgagatctagcatgatgtataatacagacacaaacaagcagcaacgttgagacaaattgcatccctttgtaaacagttctccggtgttttccataaccattttttgtgtgtgaaactcttattataacgactccttattttccacatgttaggctgtattcggtggacgtgatattgtagataacattgtttaaagagtaaagtttggaatacgag

SEQ ID NO: 17908 - DNA, 2292 bp, Zea Mays
aattttccctcattttcctggggctgctgcgccgcgcttctctctctcgccttctccctcttcgcggcgatccgggttccgctgcaacggcccctgtcgactgtcgtcttctcttctccctcacggcgctcgatccctccggattgccgcgtagcgggatcagtgattcagctggttgaacagaactagtaaagatgtcatcagaagggaacaaagatgtgcctaatgaagctttgtccgtggatctgtcatcgatttctggtgcaaagcgcaagcgtggccgcccaaggaaatatgagcatcctgcatatgaactaccacagaaggtacagcccctccaaagcgccccgcctcttcactgctcacaagatggctcaagtatggccagccatacatcaggcggctatgctcatggtagttggtccgcacaacctaggaattcggttaatgcttctattcaaggtaattctggcaaggatgacgttctcggcaagcattttgttggcaagctgaccaagaaaatccctgggttttccctcattacggtaaaagtgaaggacaatcaggtgctcaaaggttgggttccagatgaaattaatctccgtccaataacacctaaggatgaccttgccccagagctacccatgcttcgaccgagtcatgttcggaagcgagcatcagcaatccacatgcaaacagctcttactgtgccattgcacttggaggatattacacttgcaaagcctctgcagatgaggaggcctgtcgaggaaactattgctaagcactctgtgcctcttgctcctaggccttacatgggttctggtgttgttgcgccagtacctatatcagttgcacttgcacccaataatcctgaattgacaagtttgaccaggcaggatgctgaacttgtcatcccacaatcatcagttgctgcagtgccaattacatctgttcctccatgcaagcaactggctaatcaaaacgagtttactgaaaagaattatgttgatgagtttcagaaagattcagaatctcgaaatgtaaccaaggagttaccagctggaaaaaacaaacattgttcttgtggatggagttgccaaggattctccaggtcaaatctagtttaggtgctaccttttatataaaattaaaatgaagaatgtctttgggttgaaagagacttcaactaaacgtaacctgatctcattccctttttttggtccctacaggggaaaggcaacagcttaatgatcaagtgacagatgtggttacagaatcttctggtaagatctagaattttatgtttgaagtgtaataattggcatagtgcatgtagacggaagtctccatagctctttctcctggcaggtcaaatccagaatactgatgcaacagtgtctgataagatcaagataacatcaggcacaatataattttatactcctgatttctgattccatattattttgttaaaacttaaaagtgaccattaagtgggggttttcttcaggcgccagagatcagccaaatcctgcaaatagtgagcagcatgagcagcagagttctaaggaaccatcagatgaagacagagaccgatgtccaaaaaggagttgatgcctcaaagtcagatgcctcagatgacattcagcctgcgtgtgatgaacaagaaatcaaggttggctgtaaatgaaagtagagatcaagattcaagaaacacaacacagatcatgatgtttctgtcaggcgtattgggatgtggagctggagttttactgaatggcccaatgctttaggtgtaggcccatttttttacattttagattaagtagagatacatatttttttaaaaaaaaccaacaaacagcagtgtagcacagatagaatcgcaaacgagaaaaaaggagacagaaacatacttggtcttttcaattttaggaagatggcatgccttaaaagttaattttgaactcctaatcttgtaatataactttgggcccgtttggttcctttagttctgagactaaagtttagttatgagactagagtttagttttggttttatggactaaaagtattcaaaacgcattaaatgaatcataagaccgtctgtagcagtctactcatagtttacctaaaattactgttttacactttctgcactgtagactgtaccattcgtagagtagagtttgaatatgagtatgaggatatgtaagctgttggagatagtctaagaggactaaaatacccttaagcattcttttgatacatcatttggtcaattatttc

SEQ ID NO: 17909 - DNA, 2335 bp, Zea Mays
aattttccctcattttcctggggctgctgcgccgcgcttctctctctcgccttctccctcttcgcggcgatccgggttccgctgcaacggcccctgtcgactgtcgtcttctcttctccctcacggcgctcgatccctccggattgccgcgtagcgggatcagtggtttagaggagaggaagcgctgattgacgctaaccgggtgttcttaccatttttagattcagctggttgaacagaactagtaaagatgtcatcagaagggaacaaagatgtgcctaatgaagctttgtccgtggatctgtcatcgatttctggtgcaaagcgcaagcgtggccgcccaaggaaatatgagcatcctgcatatgaactaccacagaaggtacagcccctccaaagcgccccgcctcttcactgctcacaagatggctcaagtatggccagccatacatcaggcggctatgctcatggtagttggtccgcacaacctaggaattcggttaatgcttctattcaaggtaattctggcaaggatgacgttctcggcaagcattttgttggcaagctgaccaagaaaatccctgggttttccctcattacggtaaaagtgaaggacaatcaggtgctcaaaggttgggttccagatgaaattaatctccgtccaataacacctaaggatgaccttgccccagagctacccatgcttcgaccgagtcatgttcggaagcgagcatcagcaatccacatgcaaacagctcttactgtgccattgcacttggaggatattacacttgcaaagcctctgcagatgaggaggcctgtcgaggaaactattgctaagcactctgtgcctcttgctcctaggccttacatgggttctggtgttgttgcgccagtacctatatcagttgcacttgcacccaataatcctgaattgacaagtttgaccaggcaggatgctgaacttgtcatcccacaatcatcagttgctgcagtgccaattacatctgttcctccatgcaagcaactggctaatcaaaacgagtttactgaaaagaattatgttgatgagtttcagaaagattcagaatctcgaaatgtaaccaaggagttaccaggtaagttttgctggattggtgttctgttgtgtttcagatcattgacttgaatctcgaaactgttgtcccgcagactgtatctcccgtctgatttttcaatctcatgagtcttaatgacttccatattaatgcttgtaaatttgtccttatgtaatgaaagctggaaaaaacaaacattgttcttgtggatggagttgccaaggattctccaggtcaaatctagtttaggtgctaccttttatataaaattaaaatgaagaatgtctttgggttgaaagagacttcaactaaacgtaacctgatctcattccctttttttggtccctacaggggaaaggcaacagcttaatgatcaagtgacagatgtggttacagaatcttctggtcaaatccagaatactgatgcaacagtgtctgataagatcaagataacatcaggcgccagagatcagccaaatcctgcaaatagtgagcagcatgagcagcagagttctaaggaaccatcagatgaagacagagaccgatgtccaaaaaggagttgatgcctcaaagtcagatgcctcagatgacattcagcctgcgtgtgatgaacaagaaatcaaggttggctgtaaatgaaagtagagatcaagattcaagaaacacaacacagatcatgatgtttctgtcaggcgtattgggatgtggagctggagttttactgaatggcccaatgctttaggtgtaggcccatttttttacattttagattaagtagagatacatatttttttaaaaaaaaccaacaaacagcagtgtagcacagatagaatcgcaaacgagaaaaaaggagacagaaacatacttggtcttttcaattttaggaagatggcatgccttaaaagttaattttgaactcctaatcttgtaatataactttgggcccgtttggttcctttagttctgagactaaagtttagttatgagactagagtttagttttggttttatggactaaaagtattcaaaacgcattaaatgaatcataagaccgtctgtagcagtctactcatagtttacctaaaattactgttttacactttctgcactgtagactgtaccattcgtagagtagagtttgaatatgagtatgaggatatgtaagctgttggagatagtctaagaggactaaaatacccttaagcattcttttgatacatcatttggtcaattatttc

SEQ ID NO: 17910 - DNA, 2313 bp, Zea Mays
gcgccgcggcgtatgggtcctcgtcggcgctttcgctcggccagccaaacctcctgctggacaaccagcagctccagctactgcagcagcaacacctgctggaccagatcccggcgacgacggcggagagcggcgacaacatggggcgcggcggcggcggggtgtccgacccgctgctgggcgacgagttcgagagcaagtccggcagcgagaacgtggacggcggcgtctccgtggacgagctgcaggaccccaaccagcggcccagcaagaagaagcgctaccaccgccacacccagcaccagatccaggagttggaagctttcttcaaggagtgcccgcacccggacgacaagcagcgcaaggagctgagccgggagctggggctggagcccctccaggtcaagttctggttccagaacaagcgcacgcaaatgaagaaccagtatgcggccgtgttctcgagtatcgtgtcgagagccgcgacgctggaggtgctatcaaccggcgtggctgggaactacaatggtgcattgcaagtgatgtcggtggagtttcaggtgccttccccactggtgccgaccagggaaagctacttcgtgaggtactgcaagcagaacgccgacggaacatgggccgtcgtcgacgtctcgctggacggcctgcgccccggcgcagtcctcaagtgccggcgccggccgtcgggatgcctgatccaggaaatgcccaatggctactcgaaggtgacctgggtggagcacgtcgaggtggacgacaggtcggtgcacagcatctacaagctgctggtgagctcggggctggccttcggtgcacgccgatgggttgggacgctggaccgccagtgcgagcgccttgccagtgtcatggccagcaacatcccgaccagcgacatcggtgtgatcactagcgcggaggggaggaagagcatgctgaagctggcggagaggatggtgatgagcttctgcggcggcgtgacggcctctgcggcgcaccagtggacaacgctgtccggcagcggcgctgaggacgtccgcgtcatgaccaggaagagcgtcgacgaccctggcaggccgcccggcatagtcctcaacgctgccacctcgttctggctccccgtcccgcccaagcgtgtcttcgacttcctccgtgacgaaagctctcgcagcgagtgggacatcctctccaatggcggcgttgttcaagagatggctcacatcgccaacggccgcgaccatggaaactgcgtctcgcttcttcgtgtcaatagcacgaactcgaaccaaagcagcatgctgatcctccaggagagctgcaccgacatgtcgggctcgtacgtcatctacgccccggtggatgtggtcgccatgaacgtggtcctcaacggcggcgaccctgactacgtggcgctcctgccctctggcttcgcgatcctgcccgacggcccatcgtcagggagcagcagcatgctgcaaggcgacggcggcgtcggctcaggtgggtcgctcctgacggtggccttccagatactcgtcgactctgtccccaccgccaagatctcgctggggtcggtggccacggtgaacagcctcatcgcctgcaccgtggagcgcatcaaggcggcggtgatctccggccagagcaatccccagcagcagtagcttcgttgaatccaacagtgttcttatcctttgcattgaaggtatgcgagatttcatcttattgtttagtccgagtactgatgaaatctgatcatcgttgcctttttttgcaggagcagcaaaattttagagctttcgtcagtgggaagtcaagaacgcacctcagactctcctgcttgccatgtggtgctcatagttccctttactttttcgcctagtttcccccaaaatttctggggttatttcaagaaacacttcagtcgccgaaggaaacgagtcaccacgacgcaagggtagttggttcgggtattgacttcctcttcatgttggcctctcggatgctgcttcctctgaatttaggcttcttctcttgtggtgtacaaaaccgttatttagcatgtaatttgtgctgctgctgctgctgcacctgttcagacttgttcagtatccaggattcccccaatagagatttgtgtcccttaatacctctgcacagtgcttgtgtctagccgccatttcagtcccaaaaatgtgcctgtgtaacgcggttgcatgcttgcattattgttcaatgtcttcgttgctattttgcagctttaagttcacaattaatttatggtgtgtttggtttgat

SEQ ID NO: 17911 - DNA, 2965 bp, Zea Mays
atcccggcgaggcacatgccgccgatgatcgtccggaacagcgccgcggcgtatgggtcctcgtcggcgctttcgctcggccagccaaacctcctgctggacaaccagcagctccagctactgcagcagcaacacctgctggaccagatcccggcgacgacggcggagagcggcgacaacatggggcgcggcggcggcggggtgtccgacccgctgctgggcgacgagttcgagagcaagtccggcagcgagaacgtggacggcggcgtctccgtggacgagctgcaggaccccaaccagcggcccagcaagaagaagcgctaccaccgccacacccagcaccagatccaggagttggaagctttcttcaaggagtgcccgcacccggacgacaagcagcgcaaggagctgagccgggagctggggctggagcccctccaggtcaagttctggttccagaacaagcgcacgcaaatgaagaaccatcacgagcggcaggagaactcgcagctgaggtccgagaacgagaagctgcgcgccgagaacatgcggtacaaggaggccctgagcagcgcgtcgtgccccagctgcggcgggccggccgcgctcggcgagatgtccttcgacgagcaccacctccgcgtggagaacgcgcggctgcgggaggaggtcgacaggatctcctccatcgccgccaagtacgtgggcaggcccatggtgcccttccccgtgctgtccagcccgctggccggggccggggcacgcgcccccgcgttgccgccgctggacatggcgccgccgtatggcgctgccgctgacatgttcggcggcggcggtgtcgtcgctgctgctggtgctgccggtgccggggacctgctgctgaggggcgccgccgtgcagtcggacgccgacaagcctatgatcgtggagctggccgtggcggccatggaggagctggttcggatggcgcagctggacgagccgctgtggaacgcgcccgcggggctcgatgggtccgctgaggaggagacgcttaacgaggaggagtacgcgcgcttgttccccggcgggctcgggcccaagccgtacgggctcaactcggaggcgtcgcgtgacagcgccgtcgtcatcatgacccatgccaacctcgtcgaaatcctcatggacgtgaaccagtatgcggccgtgttctcgagtatcgtgtcgagagccgcgacgctggaggtgctatcaaccggcgtggctgggaactacaatggtgcattgcaagtgatgtcggtggagtttcaggtgccttccccactggtgccgaccagggaaagctacttcgtgaggtactgcaagcagaacgccgacggaacatgggccgtcgtcgacgtctcgctggacggcctgcgccccggcgcagtcctcaagtgccggcgccggccgtcgggatgcctgatccaggaaatgcccaatggctactcgaaggtgacctgggtggagcacgtcgaggtggacgacaggtcggtgcacagcatctacaagctgctggtgagctcggggctggccttcggtgcacgccgatgggttgggacgctggaccgccagtgcgagcgccttgccagtgtcatggccagcaacatcccgaccagcgacatcggtgtgatcactagcgcggaggggaggaagagcatgctgaagctggcggagaggatggtgatgagcttctgcggcggcgtgacggcctctgcggcgcaccagtggacaacgctgtccggcagcggcgctgaggacgtccgcgtcatgaccaggaagagcgtcgacgaccctggcaggccgcccggcatagtcctcaacgctgccacctcgttctggctccccgtcccgcccaagcgtgtcttcgacttcctccgtgacgaaagctctcgcagcgagtgggacatcctctccaatggcggcgttgttcaagagatggctcacatcgccaacggccgcgaccatggaaactgcgtctcgcttcttcgtgtcaatagcacgaactcgaaccaaagcagcatgctgatcctccaggagagctgcaccgacatgtcgggctcgtacgtcatctacgccccggtggatgtggtcgccatgaacgtggtcctcaacggcggcgaccctgactacgtggcgctcctgccctctggcttcgcgatcctgcccgacggcccatcgtcagggagcagcagcatgctgcaaggcgacggcggcgtcggctcaggtgggtcgctcctgacggtggccttccagatactcgtcgactctgtccccaccgccaagatctcgctggggtcggtggccacggtgaacagcctcatcgcctgcaccgtggagcgcatcaaggcggcggtgatctccggccagagcaatccccagcagcagtagcttcgttgaatccaacagtgttcttatcctttgcattgaagcaaaattttagagctttcgtcagtgggaagtcaagaacgcacctcagactctcctgcttgccatgtggtgctcatagttccctttactttttcgcctagtttcccccaaaatttctggggttatttcaagaaacacttcagtcgccgaaggaaacgagtcaccacgacgcaagggtagttggttcgggtattgacttcctcttcatgttggcctctcggatgctgcttcctctgaatttaggcttcttctcttgtggtgtacaaaaccgttatttagcatgtaatttgtgctgctgctgctgctgcacctgttcagacttgttcagtatccaggattcccccaatagagatttgtgtcccttaatacctctgcacagtgcttgtgtctagccgccatttcagtcccaaaaatgtgcctgtgtaacgcggttgcatgcttgcattattgttcaatgtcttcgttgctattttgcagctttaagttcacaattaatttatggtgtgtttggtttgat

SEQ ID NO: 17912 - DNA, 2983 bp, Zea Mays
ggagaaatgatgatcccggcgaggcacatgccgccgatgatcgtccggaacagcgccgcggcgtatgggtcctcgtcggcgctttcgctcggccagccaaacctcctgctggacaaccagcagctccagctactgcagcagcaacacctgctggaccagatcccggcgacgacggcggagagcggcgacaacatggggcgcggcggcggcggggtgtccgacccgctgctgggcgacgagttcgagagcaagtccggcagcgagaacgtggacggcggcgtctccgtggacgagctgcaggaccccaaccagcggcccagcaagaagaagcgctaccaccgccacacccagcaccagatccaggagttggaagctttcttcaaggagtgcccgcacccggacgacaagcagcgcaaggagctgagccgggagctggggctggagcccctccaggtcaagttctggttccagaacaagcgcacgcaaatgaagaaccatcacgagcggcaggagaactcgcagctgaggtccgagaacgagaagctgcgcgccgagaacatgcggtacaaggaggccctgagcagcgcgtcgtgccccagctgcggcgggccggccgcgctcggcgagatgtccttcgacgagcaccacctccgcgtggagaacgcgcggctgcgggaggaggtcgacaggatctcctccatcgccgccaagtacgtgggcaggcccatggtgcccttccccgtgctgtccagcccgctggccggggccggggcacgcgcccccgcgttgccgccgctggacatggcgccgccgtatggcgctgccgctgacatgttcggcggcggcggtgtcgtcgctgctgctggtgctgccggtgccggggacctgctgctgaggggcgccgccgtgcagtcggacgccgacaagcctatgatcgtggagctggccgtggcggccatggaggagctggttcggatggcgcagctggacgagccgctgtggaacgcgcccgcggggctcgatgggtccgctgaggaggagacgcttaacgaggaggagtacgcgcgcttgttccccggcgggctcgggcccaagccgtacgggctcaactcggaggcgtcgcgtgacagcgccgtcgtcatcatgacccatgccaacctcgtcgaaatcctcatggacgtgaaccagtatgcggccgtgttctcgagtatcgtgtcgagagccgcgacgctggaggtgctatcaaccggcgtggctgggaactacaatggtgcattgcaagtgatgtcggtggagtttcaggtgccttccccactggtgccgaccagggaaagctacttcgtgaggtactgcaagcagaacgccgacggaacatgggccgtcgtcgacgtctcgctggacggcctgcgccccggcgcagtcctcaagtgccggcgccggccgtcgggatgcctgatccaggaaatgcccaatggctactcgaaggtgacctgggtggagcacgtcgaggtggacgacaggtcggtgcacagcatctacaagctgctggtgagctcggggctggccttcggtgcacgccgatgggttgggacgctggaccgccagtgcgagcgccttgccagtgtcatggccagcaacatcccgaccagcgacatcggtgtgatcactagcgcggaggggaggaagagcatgctgaagctggcggagaggatggtgatgagcttctgcggcggcgtgacggcctctgcggcgcaccagtggacaacgctgtccggcagcggcgctgaggacgtccgcgtcatgaccaggaagagcgtcgacgaccctggcaggccgcccggcatagtcctcaacgctgccacctcgttctggctccccgtcccgcccaagcgtgtcttcgacttcctccgtgacgaaagctctcgcagcgagtgggacatcctctccaatggcggcgttgttcaagagatggctcacatcgccaacggccgcgaccatggaaactgcgtctcgcttcttcgtgtcaatagcacgaactcgaaccaaagcagcatgctgatcctccaggagagctgcaccgacatgtcgggctcgtacgtcatctacgccccggtggatgtggtcgccatgaacgtggtcctcaacggcggcgaccctgactacgtggcgctcctgccctctggcttcgcgatcctgcccgacggcccatcgtcagggagcagcagcatgctgcaaggcgacggcggcgtcggctcaggtgggtcgctcctgacggtggccttccagatactcgtcgactctgtccccaccgccaagatctcgctggggtcggtggccacggtgaacagcctcatcgcctgcaccgtggagcgcatcaaggcggcggtgatctccggccagagcaatccccagcagcagtagcttcgttgaatccaacagtgttcttatcctttgcattgaaggagcagcaaaattttagagctttcgtcagtgggaagtcaagaacgcacctcagactctcctgcttgccatgtggtgctcatagttccctttactttttcgcctagtttcccccaaaatttctggggttatttcaagaaacacttcagtcgccgaaggaaacgagtcaccacgacgcaagggtagttggttcgggtattgacttcctcttcatgttggcctctcggatgctgcttcctctgaatttaggcttcttctcttgtggtgtacaaaaccgttatttagcatgtaatttgtgctgctgctgctgctgcacctgttcagacttgttcagtatccaggattcccccaatagagatttgtgtcccttaatacctctgcacagtgcttgtgtctagccgccatttcagtcccaaaaatgtgcctgtgtaacgcggttgcatgcttgcattattgttcaatgtcttcgttgctattttgcagctttaagttcacaattaatttatggtgtgtttggtttgat

SEQ ID NO: 17913 - DNA, 1506 bp, Zea Mays
cctaaatcctccctgtgcctgcgcccctctcaagtttatgtcctctgccggcggctgctgctctagcctccaggtctctccagtctccaccgtccaccatcgccggcggctgcccctctcaaggtcgtccctgccccctgctcatctacaaggcacaagatgagctcgtcatccgaagaaagatggaaaataggtttcgaacaataagagagctgggatccaagggaaaaagaagcaacccactggtgcttgaagagtttatgtgggaaaatgaatgggttgaagaaaataatgaagctgatggtgatagcagcatatggcatgctgtggatgaggcgttaggggcaactcatgctctccaaggcagaaatttgccaagattagctgctgcaggtgctgcttcaagttctcggcctcaacgaacctatgttaggacaaggaagcgttcaagaaatgcagcagcacaagatattggagaagatgatagtgatgctcaagaagatggtaatgctacaacagatgcagaagaacaacaagaacaaccactagaagcaactagagatatggaccaagatgaatctgaatctggaggagggaaagctgctgctaatgctttttgcttggatgctgatctgctctaggtagcagactagcaggacttgtagaaaacacttgcatccaaggaaagacagcgaggggtgatgggaaaggactttggaagcatggcccgtgctgctctgaacaagaggaatgtgaaaaagaaaaggaagatcacaataagcaggctctctcatagcaacagtcaacaaagagaagggaaccctcgcgcaaggactctccggtccgacgggcgcagctggacggggccctgcattgttaaatgtgtgcttgtctcgttgctcagatggtcagtatatgggtccatgcacacatgcccgaagattgatgcagtgttgacggtgaccagtgacagtgagccccccagcgcgcaggcaggcaggcaggcgtgcagcgtctttgaagtgaggaattgaaatggaggagaggagaagccgggtgtcactggcactgggcatgcaggcgaggcgatcttgtggaagcacgttcgggtgtgtgtactggagatctggagagaaggcgaaccaactgatgaactgaatttgcggacaaatctggaggccaaaaggcgccattggggtcccgattggttggaagacgacggcagctttctgtggattggtgtgttccttcttgcccaggggtgtttgttggttgttacaggcggcacggtgcgtgaccgagtctggtctgatgtgctctggcgtgcaggagggtgtgagatgaccgaccgtcggaaggaagggcctctctctctggtcactgcagcatctcctctgtactaaaatgatatagttctagatttggattgagtcaaaccttttaaattttaactaaatttaaaattattattattatttatgaatataagggtattgtttggtatat

SEQ ID NO: 17914 - DNA, 2838 bp, Zea Mays
ctgccctcctcgggtccttccaacctcggcctctccgcgcccgccgccacattgccatcgccatcgccgccgcatccacccacgggcccaccaaacgacctcgctgcgcccacccgtccgcccccatctagctcagcggtcccgcacaaccgaccactcggcagaatgccgccgcttcggcctccgccgccgcggctcctgctcaacaacgtctcgtgcatgcggaacgcgcagacggtgctccgcgacatcaacctcagcgtccacgacggcacagccctcgtcctgaccggtgcgaacggctccggcaagaccaccctcctccgcatgctggcgggcttttcgcgtccctcggcgggggagatcctctggaatggtcacgacatcacctccccgggcgttttccagcagtacaagctgcagctcaactggatgtcgctcaaggacgccgtcaaagagaagctcacggtgctcgagaacgtccagtggttcgagctcctcgaggggaaggacggcagcaggtcgggcccagccatcgagctcatgggcctcggcaggctcatgaacgagaaggccaggatgctctccatggggcagaggaagcggctgcagctcgccaggctgctcgctatcgaccgacccatctggctgctggacgagccctcagtcgcgctggacgcagagggtaccaggctgcttgaatacattatcgcagagcatcggaagaagggtggcatcgtgtttgtggccacacatctgcccattcagattgaggattctatgtcgcttcggcttccgcagaggtttccccggaggaagacgctggttgatcttgtccgctgatgtcaatgtgagattgtgagcacaggaatttagctgtatctctctaattcctctccagctatctgtctgattgctgttggagcaattactctggtgctgcatttgtcatcctatttttgacaacatggcaacacattgtcgatgttgataatctgtaggggtctttgtgatcaccgattcgatgcattggcccatgtatttggggacactagaaagcatttgccatggctgatatatgtatggctgttctttgtgatcatggttttgatgcattgacccacttatatatatggcacttgcttgcagaaactctgttagctgttcaatgtcttgcaggttttctcatgccttgcatatccatgtgaagcttcaagtgttggagactgggaaacttgaccaaatatggggagacctctggacaggatcagaattagatgtctgagtagagtgtctgttttctcacattattgtgcattgactaaggatgttagagtggacgcactaaccagttcgatacaaaagcttaagctgatgagagaagatagtttatccacctatacacttcaacacccccactcacgtgcaaccggagagaaaggcgcaagcgcaaacgtggaaataaatgggtggaagcacaaataaagactctgccggaatttgaacttgagacctctggttttgataccatgttagagtggacgcattaaccagttcaacgcaaaagtttaagctgttgggaaaaggtagtcaatccatttatacacttcaacataggccatattgacaaagtttggagcccactggacagaactagatatacattatgcaagagaaaagaaagccaaagaacaagataaatcctacagaacattgcatattcattgctgtgtttctgtgatttccacctgaaattctttacgtggttactgccttgctgattgctgtaagaaaagagcagtgaatgcagcagaagtctctagggaccattggaggtgctctatgaccccattctggtggtagctggtccactattcaagacaaggatatttaccttaattatgttttttgtggaagaaagagagagaactcgtttgatcggaaagggaaattccaagatccaaagatatacaagtattagatagcaggacttgtagaaaacacttgcatccaaggaaagacagcgaggggtgatgggaaaggactttggaagcatggcccgtgctgctctgaacaagaggaatgtgaaaaagaaaaggaagatcacaataagcaggctctctcatagcaacagtcaacaaagagaagggaaccctcgcgcaaggactctccggtccgacgggcgcagctggacggggccctgcattgttaaatgtgtgcttgtctcgttgctcagatggtcagtatatgggtccatgcacacatgcccgaagattgatgcagtgttgacggtgaccagtgacagtgagccccccagcgcgcaggcaggcaggcaggcgtgcagcgtctttgaagtgaggaattgaaatggaggagaggagaagccgggtgtcactggcactgggcatgcaggcgaggcgatcttgtggaagcacgttcgggtgtgtgtactggagatctggagagaaggcgaaccaactgatgaactgaatttgcggacaaatctggaggccaaaaggcgccattggggtcccgattggttggaagacgacggcagctttctgtggattggtgtgttccttcttgcccaggggtgtttgttggttgttacaggcggcacggtgcgtgaccgagtctggtctgatgtgctctggcgtgcaggagggtgtgagatgaccgaccgtcggaaggaagggcctctctctctggtcactgcagcatctcctctgtactaaaatgatatagttctagatttggattgagtcaaaccttttaaattttaactaaatttaaaattattattattatttatgaatataagggtattgtttggtatat

SEQ ID NO: 17915 - DNA, 2507 bp, Zea Mays
ctgccctcctcgggtccttccaacctcggcctctccgcgcccgccgccacattgccatcgccatcgccgccgcatccacccacgggcccaccaaacgacctcgctgcgcccacccgtccgcccccatctagctcagcggtcccgcacaaccgaccactcggcagaatgccgccgcttcggcctccgccgccgcggctcctgctcaacaacgtctcgtgcatgcggaacgcgcagacggtgctccgcgacatcaacctcagcgtccacgacggcacagccctcgtcctgaccggtgcgaacggctccggcaagaccaccctcctccgcatgctggcgggcttttcgcgtccctcggcgggggagatcctctggaatggtcacgacatcacctccccgggcgttttccagcagtacaagctgcagctcaactggatgtcgctcaaggacgccgtcaaagagaagctcacggtgctcgagaacgtccagtggttcgagctcctcgaggggaaggacggcagcaggtcgggcccagccatcgagctcatgggcctcggcaggctcatgaacgagaaggccaggatgctctccatggggcagaggaagcggctgcagctcgccaggctgctcgctatcgaccgacccatctggctgctggacgagccctcagtcgcgctggacgcagagggtaccaggctgcttgaatacattatcgcagagcatcggaagaagggtggcatcgtgtttgtggccacacatctgcccattcagattgaggattctatgtcgcttcggcttccgcagaggtttccccggaggaagacgctggttgatcttgtccgctgatgtcaatgtgagattgtgagcacaggaatttagctgtatctctctaattcctctccagctatctgtctgattgctgttggagcaattactctggtgctgcatttgtcatcctatttttgacaacatggcaacacattgtcgatgttgataatctgtaggggtctttgtgatcaccgattcgatgcattggcccatgtatttggggacactagaaagcatttgccatggctgatatatgtatggctgttctttgtgatcatggttttgatgcattgacccacttatatatatggcacttgcttgcagaaactctgttagctgttcaatgtcttgcaggttttctcatgccttgcatatccatgtgaagcttcaagtgttggagactgggaaacttgaccaaatatggggagacctctggacaggatcagaattagatgtctgagtagagtgtctgttttctcacattattgtgcattgactaagatatacattatgcaagagaaaagaaagccaaagaacaagataaatcctacagaacattgcatattcattgctgtgtttctgtgatttccacctgaaattctttacgtggttactgccttgctgattgctgtaagaaaagagcagtgaatgcagcagaagtctctagggaccattggaggtgctctatgaccccattctggtggtagctggtccactattcaagacaaggatatttaccttaattatgttttttgtggaagaaagagagagaactcgtttgatcggaaagggaaattccaagatccaaagatatacaagtattagatagcaggacttgtagaaaacacttgcatccaaggaaagacagcgaggggtgatgggaaaggactttggaagcatggcccgtgctgctctgaacaagaggaatgtgaaaaagaaaaggaagatcacaataagcaggctctctcatagcaacagtcaacaaagagaagggaaccctcgcgcaaggactctccggtccgacgggcgcagctggacggggccctgcattgttaaatgtgtgcttgtctcgttgctcagatggtcagtatatgggtccatgcacacatgcccgaagattgatgcagtgttgacggtgaccagtgacagtgagccccccagcgcgcaggcaggcaggcaggcgtgcagcgtctttgaagtgaggaattgaaatggaggagaggagaagccgggtgtcactggcactgggcatgcaggcgaggcgatcttgtggaagcacgttcgggtgtgtgtactggagatctggagagaaggcgaaccaactgatgaactgaatttgcggacaaatctggaggccaaaaggcgccattggggtcccgattggttggaagacgacggcagctttctgtggattggtgtgttccttcttgcccaggggtgtttgttggttgttacaggcggcacggtgcgtgaccgagtctggtctgatgtgctctggcgtgcaggagggtgtgagatgaccgaccgtcggaaggaagggcctctctctctggtcactgcagcatctcctctgtactaaaatgatatagttctagatttggattgagtcaaaccttttaaattttaactaaatttaaaattattattattatttatgaatataagggtattgtttggtatat

SEQ ID NO: 17916 - DNA, 2735 bp, Zea Mays
ctgccctcctcgggtccttccaacctcggcctctccgcgcccgccgccacattgccatcgccatcgccgccgcatccacccacgggcccaccaaacgacctcgctgcgcccacccgtccgcccccatctagctcagcggtcccgcacaaccgaccactcggcagaatgccgccgcttcggcctccgccgccgcggctcctgctcaacaacgtctcgtgcatgcggaacgcgcagacggtgctccgcgacatcaacctcagcgtccacgacggcacagccctcgtcctgaccggtgcgaacggctccggcaagaccaccctcctccgcatgctggcgggcttttcgcgtccctcggcgggggagatcctctggaatggtcacgacatcacctccccgggcgttttccagcagtacaagctgcagctcaactggatgtcgctcaaggacgccgtcaaagagaagctcacggtgctcgagaacgtccagtggttcgagctcctcgaggggaaggacggcagcaggtcgggcccagccatcgagctcatgggcctcggcaggctcatgaacgagaaggccaggatgctctccatggggcagaggaagcggctgcagctcgccaggctgctcgctatcgaccgacccatctggctgctggacgagccctcagtcgcgctggacgcagagggtaccaggctgcttgaatacattatcgcagagcatcggaagaagggtggcatcgtgtttgtggccacacatctgcccattcagattgaggattctatgtcgcttcggcttccgcagaggtttccccggaggaagacgctggttgatcttgtccgctgatgtcaatgtgagattgtgagcacaggaatttagctgtatctctctaattcctctccagctatctgtctgattgctgttggagcaattactctggtgctgcatttgtcatcctatttttgacaacatggcaacacattgtcgatgttgataatctgtaggggtctttgtgatcaccgattcgatgcattggcccatgtatttggggacactagaaagcatttgccatggctgatatatgtatggctgttctttgtgatcatggttttgatgcattgacccacttatatatatggcacttgcttgcagaaactctgttagctgttcaatgtcttgcaggttttctcatgccttgcatatccatgtgaagcttcaagtgttggagactgggaaacttgaccaaatatggggagacctctggacaggatcagaattagatgtctgagtagagtgtctgttttctcacattattgtgcattgactaaggatgttagagtggacgcactaaccagttcgatacaaaagcttaagctgatgagagaagatagtttatccacctatacacttcaacacccccactcacgtgcaaccggagagaaaggcgcaagcgcaaacgtggaaataaatgggtggaagcacaaataaagactctgccggaatttgaacttgagacctctggttttgataccatgttagagtggacgcattaaccagttcaacgcaaaagtttaagctgttgggaaaaggtagtcaatccatttatacacttcaacataggccatattgacaaagtttggagcccactggacagaactagatatacattatgcaagagaaaagaaagccaaagaacaagataaatcctacagaacattgcatattcattgctgtgtttctgtgatttccacctgaaattctttacgtggttactgccttgctgattgctgtaagaaaagagcagtgaatgcagcagaagtctctagggaccattggaggtgctctatgaccccattctggtggtagctggtccactattcaagacaaggacttgtagaaaacacttgcatccaaggaaagacagcgaggggtgatgggaaaggactttggaagcatggcccgtgctgctctgaacaagaggaatgtgaaaaagaaaaggaagatcacaataagcaggctctctcatagcaacagtcaacaaagagaagggaaccctcgcgcaaggactctccggtccgacgggcgcagctggacggggccctgcattgttaaatgtgtgcttgtctcgttgctcagatggtcagtatatgggtccatgcacacatgcccgaagattgatgcagtgttgacggtgaccagtgacagtgagccccccagcgcgcaggcaggcaggcaggcgtgcagcgtctttgaagtgaggaattgaaatggaggagaggagaagccgggtgtcactggcactgggcatgcaggcgaggcgatcttgtggaagcacgttcgggtgtgtgtactggagatctggagagaaggcgaaccaactgatgaactgaatttgcggacaaatctggaggccaaaaggcgccattggggtcccgattggttggaagacgacggcagctttctgtggattggtgtgttccttcttgcccaggggtgtttgttggttgttacaggcggcacggtgcgtgaccgagtctggtctgatgtgctctggcgtgcaggagggtgtgagatgaccgaccgtcggaaggaagggcctctctctctggtcactgcagcatctcctctgtactaaaatgatatagttctagatttggattgagtcaaaccttttaaattttaactaaatttaaaattattattattatttatgaatataagggtattgtttggtatat

SEQ ID NO: 17917 - DNA, 2830 bp, Zea Mays
ctgccctcctcgggtccttccaacctcggcctctccgcgcccgccgccacattgccatcgccatcgccgccgcatccacccacgggcccaccaaacgacctcgctgcgcccacccgtccgcccccatctagctcagcggtcccgcacaaccgaccactcggcagaatgccgccgcttcggcctccgccgccgcggctcctgctcaacaacgtctcgtgcatgcggaacgcgcagacggtgctccgcgacatcaacctcagcgtccacgacggcacagccctcgtcctgaccggtgcgaacggctccggcaagaccaccctcctccgcatgctggcgggcttttcgcgtccctcggcgggggagatcctctggaatggtcacgacatcacctccccgggcgttttccagcagtacaagctgcagctcaactggatgtcgctcaaggacgccgtcaaagagaagctcacggtgctcgagaacgtccagtggttcgagctcctcgaggggaaggacggcagcaggtcgggcccagccatcgagctcatgggcctcggcaggctcatgaacgagaaggccaggatgctctccatggggcagaggaagcggctgcagctcgccaggctgctcgctatcgaccgacccatctggctgctggacgagccctcagtcgcgctggacgcagagggtaccaggctgcttgaatacattatcgcagagcatcggaagaagggtggcatcgtgtttgtggccacacatctgcccattcagattgaggattctatgtcgcttcggcttccgcagaggtttccccggaggaagacgctggttgatcttgtccgctgatgtcaatgtgagattgtgagcacaggaatttagctgtatctctctaattcctctccagctatctgtctgattgctgttggagcaattactctggtgctgcatttgtcatcctatttttgacaacatggcaacacattgtcgatgttgataatctgtaggggtctttgtgatcaccgattcgatgcattggcccatgtatttggggacactagaaagcatttgccatggctgatatatgtatggctgttctttgtgatcatggttttgatgcattgacccacttatatatatggcacttgcttgcagaaactctgttagctgttcaatgtcttgcaggttttctcatgccttgcatatccatgtgaagcttcaagtgttggagactgggaaacttgaccaaatatggggagacctctggacaggatcagaattagatgtctgagtagagtgtctgttttctcacattattgtgcattgactaagagtggacgcactaaccagttcgatacaaaagcttaagctgatgagagaagatagtttatccacctatacacttcaacacccccactcacgtgcaaccggagagaaaggcgcaagcgcaaacgtggaaataaatgggtggaagcacaaataaagactctgccggaatttgaacttgagacctctggttttgataccatgttagagtggacgcattaaccagttcaacgcaaaagtttaagctgttgggaaaaggtagtcaatccatttatacacttcaacataggccatattgacaaagtttggagcccactggacagaactagatatacattatgcaagagaaaagaaagccaaagaacaagataaatcctacagaacattgcatattcattgctgtgtttctgtgatttccacctgaaattctttacgtggttactgccttgctgattgctgtaagaaaagagcagtgaatgcagcagaagtctctagggaccattggaggtgctctatgaccccattctggtggtagctggtccactattcaagacaaggatatttaccttaattatgttttttgtggaagaaagagagagaactcgtttgatcggaaagggaaattccaagatccaaagatatacaagtattagatagcaggacttgtagaaaacacttgcatccaaggaaagacagcgaggggtgatgggaaaggactttggaagcatggcccgtgctgctctgaacaagaggaatgtgaaaaagaaaaggaagatcacaataagcaggctctctcatagcaacagtcaacaaagagaagggaaccctcgcgcaaggactctccggtccgacgggcgcagctggacggggccctgcattgttaaatgtgtgcttgtctcgttgctcagatggtcagtatatgggtccatgcacacatgcccgaagattgatgcagtgttgacggtgaccagtgacagtgagccccccagcgcgcaggcaggcaggcaggcgtgcagcgtctttgaagtgaggaattgaaatggaggagaggagaagccgggtgtcactggcactgggcatgcaggcgaggcgatcttgtggaagcacgttcgggtgtgtgtactggagatctggagagaaggcgaaccaactgatgaactgaatttgcggacaaatctggaggccaaaaggcgccattggggtcccgattggttggaagacgacggcagctttctgtggattggtgtgttccttcttgcccaggggtgtttgttggttgttacaggcggcacggtgcgtgaccgagtctggtctgatgtgctctggcgtgcaggagggtgtgagatgaccgaccgtcggaaggaagggcctctctctctggtcactgcagcatctcctctgtactaaaatgatatagttctagatttggattgagtcaaaccttttaaattttaactaaatttaaaattattattattatttatgaatataagggtattgtttggtatat

SEQ ID NO: 17918 - DNA, 2509 bp, Zea Mays
ctgccctcctcgggtccttccaacctcggcctctccgcgcccgccgccacattgccatcgccatcgccgccgcatccacccacgggcccaccaaacgacctcgctgcgcccacccgtccgcccccatctagctcagcggtcccgcacaaccgaccactcggcagaatgccgccgcttcggcctccgccgccgcggctcctgctcaacaacgtctcgtgcatgcggaacgcgcagacggtgctccgcgacatcaacctcagcgtccacgacggcacagccctcgtcctgaccggtgcgaacggctccggcaagaccaccctcctccgcatgctggcgggcttttcgcgtccctcggcgggggagatcctctggaatggtcacgacatcacctccccgggcgttttccagcagtacaagctgcagctcaactggatgtcgctcaaggacgccgtcaaagagaagctcacggtgctcgagaacgtccagtggttcgagctcctcgaggggaaggacggcagcaggtcgggcccagccatcgagctcatgggcctcggcaggctcatgaacgagaaggccaggatgctctccatggggcagaggaagcggctgcagctcgccaggctgctcgctatcgaccgacccatctggctgctggacgagccctcagtcgcgctggacgcagagggtaccaggctgcttgaatacattatcgcagagcatcggaagaagggtggcatcgtgtttgtggccacacatctgcccattcagattgaggattctatgtcgcttcggcttccgcagaggtttccccggaggaagacgctggttgatcttgtccgctgatgtcaatgttttctcatgccttgcatatccatgtgaagcttcaagtgttggagactgggaaacttgaccaaatatggggagacctctggacaggatcagaattagatgtctgagtagagtgtctgttttctcacattattgtgcattgactaaggatgttagagtggacgcactaaccagttcgatacaaaagcttaagctgatgagagaagatagtttatccacctatacacttcaacacccccactcacgtgcaaccggagagaaaggcgcaagcgcaaacgtggaaataaatgggtggaagcacaaataaagactctgccggaatttgaacttgagacctctggttttgataccatgttagagtggacgcattaaccagttcaacgcaaaagtttaagctgttgggaaaaggtagtcaatccatttatacacttcaacataggccatattgacaaagtttggagcccactggacagaactagatatacattatgcaagagaaaagaaagccaaagaacaagataaatcctacagaacattgcatattcattgctgtgtttctgtgatttccacctgaaattctttacgtggttactgccttgctgattgctgtaagaaaagagcagtgaatgcagcagaagtctctagggaccattggaggtgctctatgaccccattctggtggtagctggtccactattcaagacaaggatatttaccttaattatgttttttgtggaagaaagagagagaactcgtttgatcggaaagggaaattccaagatccaaagatatacaagtattagatagcaggacttgtagaaaacacttgcatccaaggaaagacagcgaggggtgatgggaaaggactttggaagcatggcccgtgctgctctgaacaagaggaatgtgaaaaagaaaaggaagatcacaataagcaggctctctcatagcaacagtcaacaaagagaagggaaccctcgcgcaaggactctccggtccgacgggcgcagctggacggggccctgcattgttaaatgtgtgcttgtctcgttgctcagatggtcagtatatgggtccatgcacacatgcccgaagattgatgcagtgttgacggtgaccagtgacagtgagccccccagcgcgcaggcaggcaggcaggcgtgcagcgtctttgaagtgaggaattgaaatggaggagaggagaagccgggtgtcactggcactgggcatgcaggcgaggcgatcttgtggaagcacgttcgggtgtgtgtactggagatctggagagaaggcgaaccaactgatgaactgaatttgcggacaaatctggaggccaaaaggcgccattggggtcccgattggttggaagacgacggcagctttctgtggattggtgtgttccttcttgcccaggggtgtttgttggttgttacaggcggcacggtgcgtgaccgagtctggtctgatgtgctctggcgtgcaggagggtgtgagatgaccgaccgtcggaaggaagggcctctctctctggtcactgcagcatctcctctgtactaaaatgatatagttctagatttggattgagtcaaaccttttaaattttaactaaatttaaaattattattattatttatgaatataagggtattgtttggtatat

SEQ ID NO: 17919 - DNA, 3413 bp, Zea Mays
ctgccctcctcgggtccttccaacctcggcctctccgcgcccgccgccacattgccatcgccatcgccgccgcatccacccacgggcccaccaaacgacctcgctgcgcccacccgtccgcccccatctagctcagcggtcccgcacaaccgaccactcggcagaatgccgccgcttcggcctccgccgccgcggctcctgctcaacaacgtctcgtgcatgcggaacgcgcagacggtgctccgcgacatcaacctcagcgtccacgacggcacagccctcgtcctgaccggtgcgaacggctccggcaagaccaccctcctccgcatgctggcgggcttttcgcgtccctcggcgggggagatcctctggaatggtcacgacatcacctccccgggcgttttccagcagtacaagctgcagctcaactggatgtcgctcaaggacgccgtcaaagagaagctcacggtgctcgagaacgtccagtggttcgagctcctcgaggggaaggacggcagcaggtcgggcccagccatcgagctcatgggcctcggcaggctcatgaacgagaaggccaggatgctctccatggggcagaggaagcggctgcagctcgccaggctgctcgctatcgaccgacccatctggctgctggacgagccctcagtcgcgctggacgcagagggtaccaggctgcttgaatacattatcgcagagcatcggaagaagggtggcatcgtgtttgtggccacacatctgcccattcagattgaggattctatgtcgcttcggcttccgcagaggtttccccggaggaagacgctggttgatcttgtccgctgatgtcaatgtgagattgtgagcacaggaatttagctgtatctctctaattcctctccagctatctgtctgattgctgttggagcaattactctggtgctgcatttgtcatcctatttttgacaacatggcaacacattgtcgatgttgataatctgtaggggtctttgtgatcaccgattcgatgcattggcccatgtatttggggacactagaaagcatttgccatggctgatatatgtatggctgttctttgtgatcatggttttgatgcattgacccacttatatatatggcacttgcttgcagaaactctgttagctgttcaatgtcttgcaggttttctcatgccttgcatatccatgtgaagcttcaagtgttggagactgggaaacttgaccaaatatggggagacctctggacaggatcagaattagatgtctgagtagagtgtctgttttctcacattattgtgcattgactaaggttgatttcttctctaacaatcttgttgtagtctgaatatgtttgtagttttacaaattacatatatttgtgtagctattattgtcatctgaatatgttcagcagaagtggctgattttacaattttagcatatgctattgtatttaacccacaaacatttttttttactacattcaataactactacaatttggtttaggatgttagagtggacgcactaaccagttcgatacaaaagcttaagctgatgagagaagatagtttatccacctatacacttcaacacccccactcacgtgcaaccggagagaaaggcgcaagcgcaaacgtggaaataaatgggtggaagcacaaataaagactctgccggaatttgaacttgagacctctggttttgataccatgttagagtggacgcattaaccagttcaacgcaaaagtttaagctgttgggaaaaggtagtcaatccatttatacacttcaacataggccatattgacaaagtttggagcccactggacagaactagatatacattatgcaagagaaaagaaagccaaagaacaagataaatcctacagaacattgcatattcattgctgtgtttctgtgatttccacctgaaattctttacgtggttactgccttgctgattgctgtaagaaaagagcagtgaatgcagcagaagtctctagggaccattggaggtgctctatgaccccattctggtggtagctggtccactattcaagacaagaaagatggaaaataggtttcgaacaataagagagctgggatccaagggaaaaagaagcaacccactggtgcttgaagagtttatgtgggaaaatgaatgggttgaagaaaataatgaagctgatggtgatagcagcatatggcatgctgtggatgaggcgttaggggcaactcatgctctccaaggcagaaatttgccaagattagctgctgcaggtgctgcttcaagttctcggcctcaacgaacctatgttaggacaaggaagcgttcaagaaatgcagcagcacaagatattggagaagatgatagtgatgctcaagaagatggtaatgctacaacagatgcagaagaacaacaagaacaaccactagaagcaactagagatatggaccaagatgaatctgaatctggaggagggaaagctgctgctaatgctttttgcttggatgctgatctgctctaggtagcagactagcaggacttgtagaaaacacttgcatccaaggaaagacagcgaggggtgatgggaaaggactttggaagcatggcccgtgctgctctgaacaagaggaatgtgaaaaagaaaaggaagatcacaataagcaggctctctcatagcaacagtcaacaaagagaagggaaccctcgcgcaaggactctccggtccgacgggcgcagctggacggggccctgcattgttaaatgtgtgcttgtctcgttgctcagatggtcagtatatgggtccatgcacacatgcccgaagattgatgcagtgttgacggtgaccagtgacagtgagccccccagcgcgcaggcaggcaggcaggcgtgcagcgtctttgaagtgaggaattgaaatggaggagaggagaagccgggtgtcactggcactgggcatgcaggcgaggcgatcttgtggaagcacgttcgggtgtgtgtactggagatctggagagaaggcgaaccaactgatgaactgaatttgcggacaaatctggaggccaaaaggcgccattggggtcccgattggttggaagacgacggcagctttctgtggattggtgtgttccttcttgcccaggggtgtttgttggttgttacaggcggcacggtgcgtgaccgagtctggtctgatgtgctctggcgtgcaggagggtgtgagatgaccgaccgtcggaaggaagggcctctctctctggtcactgcagcatctcctctgtactaaaatgatatagttctagatttggattgagtcaaaccttttaaattttaactaaatttaaaattattattattatttatgaatataagggtattgtttggtatat

SEQ ID NO: 17920 - DNA, 3316 bp, Zea Mays
ctgccctcctcgggtccttccaacctcggcctctccgcgcccgccgccacattgccatcgccatcgccgccgcatccacccacgggcccaccaaacgacctcgctgcgcccacccgtccgcccccatctagctcagcggtcccgcacaaccgaccactcggcagaatgccgccgcttcggcctccgccgccgcggctcctgctcaacaacgtctcgtgcatgcggaacgcgcagacggtgctccgcgacatcaacctcagcgtccacgacggcacagccctcgtcctgaccggtgcgaacggctccggcaagaccaccctcctccgcatgctggcgggcttttcgcgtccctcggcgggggagatcctctggaatggtcacgacatcacctccccgggcgttttccagcagtacaagctgcagctcaactggatgtcgctcaaggacgccgtcaaagagaagctcacggtgctcgagaacgtccagtggttcgagctcctcgaggggaaggacggcagcaggtcgggcccagccatcgagctcatgggcctcggcaggctcatgaacgagaaggccaggatgctctccatggggcagaggaagcggctgcagctcgccaggctgctcgctatcgaccgacccatctggctgctggacgagccctcagtcgcgctggacgcagagggtaccaggctgcttgaatacattatcgcagagcatcggaagaagggtggcatcgtgtttgtggccacacatctgcccattcagattgaggattctatgtcgcttcggcttccgcagaggtttccccggaggaagacgctggttgatcttgtccgctgatgtcaatgtgagattgtgagcacaggaatttagctgtatctctctaattcctctccagctatctgtctgattgctgttggagcaattactctggtgctgcatttgtcatcctatttttgacaacatggcaacacattgtcgatgttgataatctgtaggggtctttgtgatcaccgattcgatgcattggcccatgtatttggggacactagaaagcatttgccatggctgatatatgtatggctgttctttgtgatcatggttttgatgcattgacccacttatatatatggcacttgcttgcagaaactctgttagctgttcaatgtcttgcaggttttctcatgccttgcatatccatgtgaagcttcaagtgttggagactgggaaacttgaccaaatatggggagacctctggacaggatcagaattagatgtctgagtagagtgtctgttttctcacattattgtgcattgactaaggatgttagagtggacgcactaaccagttcgatacaaaagcttaagctgatgagagaagatagtttatccacctatacacttcaacacccccactcacgtgcaaccggagagaaaggcgcaagcgcaaacgtggaaataaatgggtggaagcacaaataaagactctgccggaatttgaacttgagacctctggttttgataccatgttagagtggacgcattaaccagttcaacgcaaaagtttaagctgttgggaaaaggtagtcaatccatttatacacttcaacataggccatattgacaaagtttggagcccactggacagaactagatatacattatgcaagagaaaagaaagccaaagaacaagataaatcctacagaacattgcatattcattgctgtgtttctgtgatttccacctgaaattctttacgtggttactgccttgctgattgctgtaagaaaagagcagtgaatgcagcagaagtctctagggaccattggaggtgctctatgaccccattctggtggtagctggtccactattcaagacaaggatatttaccttaattatgttttttgtggaagaaagagagagaactcgtttgatcggaaagggaaattccaagatccaaagatatacaagtattagatagcagaaagatggaaaataggtttcgaacaataagagagctgggatccaagggaaaaagaagcaacccactggtgcttgaagagtttatgtgggaaaatgaatgggttgaagaaaataatgaagctgatggtgatagcagcatatggcatgctgtggatgaggcgttaggggcaactcatgctctccaaggcagaaatttgccaagattagctgctgcaggtgctgcttcaagttctcggcctcaacgaacctatgttaggacaaggaagcgttcaagaaatgcagcagcacaagatattggagaagatgatagtgatgctcaagaagatggtaatgctacaacagatgcagaagaacaacaagaacaaccactagaagcaactagagatatggaccaagatgaatctgaatctggaggagggaaagctgctgctaatgctttttgcttggatgctgatctgctctaggtagcagactagcaggacttgtagaaaacacttgcatccaaggaaagacagcgaggggtgatgggaaaggactttggaagcatggcccgtgctgctctgaacaagaggaatgtgaaaaagaaaaggaagatcacaataagcaggctctctcatagcaacagtcaacaaagagaagggaaccctcgcgcaaggactctccggtccgacgggcgcagctggacggggccctgcattgttaaatgtgtgcttgtctcgttgctcagatggtcagtatatgggtccatgcacacatgcccgaagattgatgcagtgttgacggtgaccagtgacagtgagccccccagcgcgcaggcaggcaggcaggcgtgcagcgtctttgaagtgaggaattgaaatggaggagaggagaagccgggtgtcactggcactgggcatgcaggcgaggcgatcttgtggaagcacgttcgggtgtgtgtactggagatctggagagaaggcgaaccaactgatgaactgaatttgcggacaaatctggaggccaaaaggcgccattggggtcccgattggttggaagacgacggcagctttctgtggattggtgtgttccttcttgcccaggggtgtttgttggttgttacaggcggcacggtgcgtgaccgagtctggtctgatgtgctctggcgtgcaggagggtgtgagatgaccgaccgtcggaaggaagggcctctctctctggtcactgcagcatctcctctgtactaaaatgatatagttctagatttggattgagtcaaaccttttaaattttaactaaatttaaaattattattattatttatgaatataagggtattgtttggtatat

SEQ ID NO: 17921 - DNA, 2519 bp, Zea Mays
gggatatatactcatgtgccagcgcgtatggtcgcgcgtcggcggcaggctccagcggtgcgcggcgcccccagaaaagtacaaagcctggagcaacttgcgaggggatcgagattcgttcaaacgatgcacaagcacaaggttacgaagttctaactactgcaaggctttcttcctttgttttatgcgcatgattttgcagcagttccaacacatataggtgataggtccttgtctgtttcggagctgctgatccgtatagccgttgcccactccaaatgcttctggttggcccggaactgccgcattctgtgaacctgccctcctccgtatatcatactactgttgtctggaatattatggtggtctgtcgccaggttaactagaagaaggaagtaggtaaacctttttcctatttgatcgattatgcgaggaaattttgcaacggctgttcgacatcgtcagctgtcactgccctgtactgtaattattaattagattctcacttgcatgttcatcaaggtcacctagtagtaatactattccattacccaaccagtagtaatgtggcaatgaaccatgaattctattgagatggagaagaatcatatgcatgatgttctacaacttggaactagccaatagttcgagtctaacttggcatgtgccctgaataatttttcagttaaaggaaacatagttaccttcttttccttgcccatttatcattttcctcatttttgaacgatacatttccactttattaaatatctcctaaacttcacaatattcgtatatttggaactttaagttcagttctaagccggttattaccatgtacattttggaggtggttatgtattactctctccaaaattgtaggtcgttttagcttttcttgatacatatatactccatctattcaaagttataagacactctggattttatatatacaaagcatttttttgctatgcacttatatttacactctggattttatatatacaaagcatttttttgctatgcacttatatttacactatgtctagatacatttaggatagagtgcccaacggctgtggtgtttaaacttatgcttggttgtcactgaaaagttccatcgaatagatggaatactgaggataagggtcagacatgccaagtggccttttattaataaagacttattatccaatgagttcctctatggagagtgactatttggaaacactagggagtagggctatataatgaaatagaaaaatagtcacgacttgacaaataaaataaccgtgccttttccagccagctacagtcagtattataagcatcttgtgcattgacagatcacaaatgcacagaaatgtgccatgtatttgtcttcacaatccatgccgcactaaaatgttaaagagatgcacttgtttgctatattttgagctaattttcagtagttagtatactgtacacacacattcctttcaggaaaaaaaagctcaatgttttttcaaagacctcaaaaaacggaaaatacatcgtgagcataggtgcagatggccagttgcccaccctcattctgagccatcagagattcggaaatattgtaaattctcaaataattaaggttaatgtgaagcgtgtctctactgcactcacgtcctataaaatgagaaatgcaccatacggttcaggagcactgagcagaatattcttgcactgtccagaattccaggtccactcggtggatgctaactgtctccctgtgatagcacatgcaaatatcttattctgctacagaagtacgtacgttggctagttgcaacctctgcagaaggacttagtatttctggaaggtcagcgatgccccttgtgcttattctgactgattgagcgggttttttggcatcagccactcattaaagaactgctagcttcctcgtgacatgagctgcagaagagcaggcggtgtcctgtagggactcgtcgtcgtcgccgccgcacatgagctgagacgtgataaaggaggaggcgtcggcgtcgccaaaggaatcgaaggaagaagagaagctgccgccgccgccagagaccgccgcttgcggatcatccgtcgttgcgatgtcgtcttgcggcatggaggccaggaagttcgcgatgtgcacggcccagctgctctcgccgccggctgatgacatggtggacgtggccgccggggtgatgacgcacgaggaggaggctgatttgttatccattgttctgaccggtagtgcccggccggaagaaacagtaggagttgcagcggcagctcttgctatcgatctgttgtgctggtgctgctttgttttccggatgggaatatgggatgggagtgaagaacgttcgctagagtctgtggatatatatacaggtcctattactcctatagtggatgaaccgactagtcggtagcagcggcagcagcacatgagtatgtatatttaaactgtttgcgagtagaatacagttgagaaatccctccc

SEQ ID NO: 17922 - DNA, 1208 bp, Zea Mays
gttggcgttgcggcagtgggatatatactcatgtgccagcgcgtatggtcgcgcgtcggcggcaggctccagcggtgcgcggcgcccccagaaaagtacaaagcctggagcaacttgcgaggggatcgagattcgttcaaacgatgcacaagcacaaggttacgaagttctaactactgcaaggctttcttcctttgttttatgcgcatgattttgcagcagttccaacacatataggtgataggtccttgtctgtttcggagctgctgatccgtatagccgttgcccactccaaatgcttctggttggcccggaactgccgcattctgtgaacctgccctcctccgtatatcatactactgttgtctggaatattatggtggtctgtcgccaggttaactagaagaaggaagtagaattccaggtccactcggtggatgctaactgtctccctgtgatagcacatgcaaatatcttattctgctacagaagtacgtacgttggctagttgcaacctctgcagaaggacttagtatttctggaaggtcagcgatgccccttgtgcttattctgactgattgagcgggttttttggcatcagccactcattaaagaactgctagcttcctcgtgacatgagctgcagaagagcaggcggtgtcctgtagggactcgtcgtcgtcgccgccgcacatgagctgagacgtgataaaggaggaggcgtcggcgtcgccaaaggaatcgaaggaagaagagaagctgccgccgccgccagagaccgccgcttgcggatcatccgtcgttgcgatgtcgtcttgcggcatggaggccaggaagttcgcgatgtgcacggcccagctgctctcgccgccggctgatgacatggtggacgtggccgccggggtgatgacgcacgaggaggaggctgatttgttatccattgttctgaccggtagtgcccggccggaagaaacagtaggagttgcagcggcagctcttgctatcgatctgttgtgctggtgctgctttgttttccggatgggaatatgggatgggagtgaagaacgttcgctagagtctgtggatatatatacaggtcctattactcctatagtggatgaaccgactagtcggtagcagcggcagcagcacatgagtatgtatatttaaactgtttgcgagtagaatacagttgagaaatccctccc

SEQ ID NO: 17923 - DNA, 4134 bp, Zea Mays
cggagtctcgttcccctccgaccgaggacccaagccccaaggttctccatctccaggtgacccctccgcctcgatcccgtaggatttttcagctgatttcttcgccaagcggcatgtatacccgtgtttgtgaacgatttgggcttgccgcccgccgcttgtgatgcgatccggtatttttttggtgaatattgcggagtgctatgcgtacgcagatcttgctgttcctctaactgtctagtgtgtttcgttcgagatttcttgctctgctatggacgttcagtagctattctcatgctggcgatgatatccacttacttcatacttcgatgttgcactgtgttcagctatggagcaccatataattcagcaagtcggagagcatgagggggaggaggaggaggatggcatgggaacagaagcggcattcgagggggtgcacaatcacgacactttcaggtacaagcacaagaagaggtccaaggtgtgggaggagtacaaacccatcttcctgaacgggaaggttcagtttgcagagtgcctgtactgccacagccgcatgagctgcaaggactccaatggaacgagccatctctggcggcaccagaagatctgccctggcaagagggacgtggtgtttcggcggctcaaggattcctacttcccatgtggtatgcttcgcttttgcatattcagaagtcgtgcattagttcctagatgattcatgacgttctccttagtgatttgagtctattataggacgtttggtttgaggaatgagttagtccagcatctccttactcctccctttttatttggattgtggaatgggatgggttgatccgttatcaccttattcctcacatgctattaactggtactagtacgaggaatggagtcattccaccaaatttgaggaatggatttaagatgcaccacatcatctagtatgttgtttcagttagcatggtgtagctttaacatgtactagttgcatagatacttaaaaacaatttacttgtcgcatgtctgtaagcatctagattttttatgcagttttggtgaatcagagtgaaccggttacaccaggtgattcggtgaatcagattatttcagagacacttgacgacataagttcagtaattcccaatagattcaaatccaaggtgtggagagagttttcacctatctatgttgagggtaagctccaggctgctgactgcgtgcattgccgcaaacgcctcagtgcaaataagtttgggggaagaagccatctgagtcgacatctgcagacctgtcaggcacgaaggggctacaataatcagaagggaacgctttacccttctagtgttcctgatttgaagtccattgggcaagatgagctctcacctgccttggcaaatgggaaggttcacatagcaggatactccagcaaacatctctggtctagtagctctgctgacacttcccctattgtccggcccattcaagtgtcggcgcatcaacctctgccatcacaagattttccaagcctggggaaacagagaacctcatttacaaccacaactagtgacataaggaaggttgaccaaggaacagcttatcaagaactagccaggatgatagtttcgcatggttatcctttatcaattgtagagcatgaagaaatgagaagatttgtaaagagcctcaaccctatgattcatgcagatgcagtctcacacaatgatatagaaggacattgctgtgctctatttgagaaggaaaaggcaaaacttaaagatcaattgaccctttcctcccggcgtgtctctttgtcagcaagcatatggactcctgagggagccgaaccaacagtaaattacctttgtttgacagcacattttattgataaaaactggaaagttcaccgaatgataatcaagtttggcatgtttcggtcctcacctactgatgtggaaaggatggtacatcataaggaggcttgtgtaccagagtctgaatgtggagcatataatgtcatatgggatgccattagagattggaatcttgatcagaagattttgagcttgacttctgttggtgaggttaggaatgctttaagttcctcaaagctgaaggaaatacttgtggagaaaaaatgccttcctatcagaggcaagctatatgatgttgcttgtgttgatgatgtccttaacactattgcttccaaagtgcagcaaaatatcattcaccttgtcggtgacatggtaacagagttttttgttgcacatacatcttcatcgttgaatcaacaacagcttatggaagtcatttcacagatgagtctgaagtgtccacaagaagatgctaagtggtggtacaaattttattttcggcttgaagtttttttgcatttcaataagccatttccttttgaagaagcagcatctccagagcatgtcatagttgctgagtctatttgcaagattttgaggacgttttatcgtgttattgaagtcatttctgcctctagttctccgacagcaaacatgtacttcaatgagatatggaaagtgagaacagtcttgcaagaagaagcatcaagtgagcatgcagaaatcactgcgatggtcgcagagatgcaggaaacattcaatgagtactggcaacattcatacttatggttatgcatacctgttatcctagaccctagattcaagttcggtttcattgagttccgtctgaaacgagcttttggattaaaatcagcaagctacttatctggcatacgtgaaacactccaggaactcttcaatgaatactgcagtccagtggatcagccgaatgtgcgtgtgccaaaaagcgaatcttttagtctagatgacaacgactcatttgaagattgggaccagcacctcaatgagcaagcgagcagtcagaaatccacggaactcgataactaccttgcggacggtttggttccaaggaaggatgacttcgataacctgaactggtggatgtgtcacgccacaaagtacccgacactggcggctatcgtgcaggacatcctggcgatgccagcatctgctgttccatcagaagcagcgttcacaagcagtggaccagtaattccaaagcaccacagcatgctaagcatcaagaccattgaggcacttgtttgcactcgagattggatgagataaagcgattgtgtaccctgaactctgaacaaccaatgatgggatgcagttttgttcaggggatggtcctggctcccaaccagtgggatccagtccccagccaggattgggtggtggatcctgtgaaattcctgcgttagaaacaggccctcagaggtttggtaggtgtacctgacttggttccatgtgtgtacagttgctcgatgtagttgcagatgtagttgcagatctgcggcccaaaacagagctaagctaattgtaatgttgcaggcatgctttattggtgatcttggacacttctggttctggaatagcatccctagtggctataccagttcgttgcaaatggactcgcggttgaaagaataaactgagctactacttcagtccaatgttgcataggaaacatatatggctggtttggtggccagggatcatcaggccagacaatctttctctaacaccataataccatcgccacaattatgtgtagtagcacatcttatcttgtactaccattattcatggtggcgtccacagcgaaaagtaaccgtacgcgtcgaattgccgatggattactggatgtatgttagcaagaaaaaacaggctggaaagtgcaacacagctggggagagtgcgaggcaaggttgagcagttgaccattggacgcatatgcatgtgtacgtaacgtgttcttatatgcatgcttcatccccatcagaattcagaaagcacatttcatcctcaggttttccctactcttgcacgcagccggtcaatcgacatttttaaacacgctgatacagatgctcgatcagtagctaaaattaaacacctgagattaacttggactgatataaaatatactatatcattcactgagtgtctggattaatttggacgaatcaaaaaagtttatttgatttgattccatggaaatattgtaaacgag

SEQ ID NO: 17924 - DNA, 3318 bp, Zea Mays
ccgcacgcagacccagctcgatgccctaaccgtgcccaccggagtctcgttcccctccgaccgaggacccaagccccaaggttctccatctccagctatggagcaccatataattcagcaagtcggagagcatgagggggaggaggaggaggatggcatgggaacagaagcggcattcgagggggtgcacaatcacgacactttcagtttgcagagtgcctgtactgccacagccgcatgagctgcaaggactccaatggaacgagccatctctggcggcaccagaagatctgccctggcaagagggacgtggtgtttcggcggctcaaggattcctacttcccatgtgttttggtgaatcagagtgaaccggttacaccaggtgattcggtgaatcagattatttcagagacacttgacgacataagttcagtaattcccaatagattcaaatccaaggtgtggagagagttttcacctatctatgttgagggtaagctccaggctgctgactgcgtgcattgccgcaaacgcctcagtgcaaataagtttgggggaagaagccatctgagtcgacatctgcagacctgtcaggcacgaaggggctacaataatcagaagggaacgctttacccttctagtgttcctgatttgaagtccattgggcaagatgagctctcacctgccttggcaaatgggaaggttcacatagcaggatactccagcaaacatctctggtctagtagctctgctgacacttcccctattgtccggcccattcaagtgtcggcgcatcaacctctgccatcacaagattttccaagcctggggaaacagagaacctcatttacaaccacaactagtgacataaggaaggttgaccaaggaacagcttatcaagaactagccaggatgatagtttcgcatggttatcctttatcaattgtagagcatgaagaaatgagaagatttgtaaagagcctcaaccctatgattcatgcagatgcagtctcacacaatgatatagaaggacattgctgtgctctatttgagaaggaaaaggcaaaacttaaagatcaattgaccctttcctcccggcgtgtctctttgtcagcaagcatatggactcctgagggagccgaaccaacagtaaattacctttgtttgacagcacattttattgataaaaactggaaagttcaccgaatgataatcaagtttggcatgtttcggtcctcacctactgatgtggaaaggatggtacatcataaggaggcttgtgtaccagagtctgaatgtggagcatataatgtcatatgggatgccattagagattggaatcttgatcagaagattttgagcttgacttctgttggtgaggttaggaatgctttaagttcctcaaagctgaaggaaatacttgtggagaaaaaatgccttcctatcagaggcaagctatatgatgttgcttgtgttgatgatgtccttaacactattgcttccaaagtgcagcaaaatatcattcaccttgtcggtgacatggtaacagagttttttgttgcacatacatcttcatcgttgaatcaacaacagcttatggaagtcatttcacagatgagtctgaagtgtccacaagaagatgctaagtggtggtacaaattttattttcggcttgaagtttttttgcatttcaataagccatttccttttgaagaagcagcatctccagagcatgtcatagttgctgagtctatttgcaagattttgaggacgttttatcgtgttattgaagtcatttctgcctctagttctccgacagcaaacatgtacttcaatgagatatggaaagtgagaacagtcttgcaagaagaagcatcaagtgagcatgcagaaatcactgcgatggtcgcagagatgcaggaaacattcaatgagtactggcaacattcatacttatggttatgcatacctgttatcctagaccctagattcaagttcggtttcattgagttccgtctgaaacgagcttttggattaaaatcagcaagctacttatctggcatacgtgaaacactccaggaactcttcaatgaatactgcagtccagtggatcagccgaatgtgcgtgtgccaaaaagcgaatcttttagtctagatgacaacgactcatttgaagattgggaccagcacctcaatgagcaagcgagcagtcagaaatccacggaactcgataactaccttgcggacggtttggttccaaggaaggatgacttcgataacctgaactggtggatgtgtcacgccacaaagtacccgacactggcggctatcgtgcaggacatcctggcgatgccagcatctgctgttccatcagaagcagcgttcacaagcagtggaccagtaattccaaagcaccacagcatgctaagcatcaagaccattgaggcacttgtttgcactcgagattggatgagataaagcgattgtgtaccctgaactctgaacaaccaatgatgggatgcagttttgttcaggggatggtcctggctcccaaccagtgggatccagtccccagccaggattgggtggtggatcctgtgaaattcctgcgttagaaacaggccctcagaggtttggcatgctttattggtgatcttggacacttctggttctggaatagcatccctagtggctataccagttcgttgcaaatggactcgcggttgaaagaataaactgagctactacttcagtccaatgttgcataggaaacatatatggctggtttggtggccagggatcatcaggccagacaatctttctctaacaccataataccatcgccacaattatgtgtagtagcacatcttatcttgtactaccattattcatggtggcgtccacagcgaaaagtaaccgtacgcgtcgaattgccgatggattactggatgtatgttagcaagaaaaaacaggctggaaagtgcaacacagctggggagagtgcgaggcaaggttgagcagttgaccattggacgcatatgcatgtgtacgtaacgtgttcttatatgcatgcttcatccccatcagaattcagaaagcacatttcatcctcaggttttccctactcttgcacgcagccggtcaatcgacatttttaaacacgctgatacagatgctcgatcagtagctaaaattaaacacctgagattaacttggactgatataaaatatactatatcattcactgagtgtctggattaatttggacgaatcaaaaaagtttatttgatttgattccatggaaatattgtaaacgag

SEQ ID NO: 17925 - DNA, 3420 bp, Zea Mays
ccgcacgcagacccagctcgatgccctaaccgtgcccaccggagtctcgttcccctccgaccgaggacccaagccccaaggttctccatctccagctatggagcaccatataattcagcaagtcggagagcatgagggggaggaggaggaggatggcatgggaacagaagcggcattcgagggggtgcacaatcacgacactttcagagtgcctgtactgccacagccgcatgagctgcaaggactccaatggaacgagccatctctggcggcaccagaagatctgccctggcaagagggacgtggtgtttcggcggctcaaggattcctacttcccatgtgttttggtgaatcagagtgaaccggttacaccaggtgattcggtgaatcagattatttcagagacacttgacgacataagttcagtaattcccaatagattcaaatccaaggtgtggagagagttttcacctatctatgttgagggtaagctccaggctgctgactgcgtgcattgccgcaaacgcctcagtgcaaataagtttgggggaagaagccatctgagtcgacatctgcagacctgtcaggcacgaaggggctacaataatcagaagggaacgctttacccttctagtgttcctgatttgaagtccattgggcaagatgagctctcacctgccttggcaaatgggaaggttcacatagcaggatactccagcaaacatctctggtctagtagctctgctgacacttcccctattgtccggcccattcaagtgtcggcgcatcaacctctgccatcacaagattttccaagcctggggaaacagagaacctcatttacaaccacaactagtgacataaggaaggttgaccaaggaacagcttatcaagaactagccaggatgatagtttcgcatggttatcctttatcaattgtagagcatgaagaaatgagaagatttgtaaagagcctcaaccctatgattcatgcagatgcagtctcacacaatgatatagaaggacattgctgtgctctatttgagaaggaaaaggcaaaacttaaagatcaattgaccctttcctcccggcgtgtctctttgtcagcaagcatatggactcctgagggagccgaaccaacagtaaattacctttgtttgacagcacattttattgataaaaactggaaagttcaccgaatgataatcaagtttggcatgtttcggtcctcacctactgatgtggaaaggatggtacatcataaggaggcttgtgtaccagagtctgaatgtggagcatataatgtcatatgggatgccattagagattggaatcttgatcagaagattttgagcttgacttctgttggtgaggttaggaatgctttaagttcctcaaagctgaaggaaatacttgtggagaaaaaatgccttcctatcagaggcaagctatatgatgttgcttgtgttgatgatgtccttaacactattgcttccaaagtgcagcaaaatatcattcaccttgtcggtgacatggtaacagagttttttgttgcacatacatcttcatcgttgaatcaacaacagcttatggaagtcatttcacagatgagtctgaagtgtccacaagaagatgctaagtggtggtacaaattttattttcggcttgaagtttttttgcatttcaataagccatttccttttgaagaagcagcatctccagagcatgtcatagttgctgagtctatttgcaagattttgaggacgttttatcgtgttattgaagtcatttctgcctctagttctccgacagcaaacatgtacttcaatgagatatggaaagtgagaacagtcttgcaagaagaagcatcaagtgagcatgcagaaatcactgcgatggtcgcagagatgcaggaaacattcaatgagtactggcaacattcatacttatggttatgcatacctgttatcctagaccctagattcaagttcggtttcattgagttccgtctgaaacgagcttttggattaaaatcagcaagctacttatctggcatacgtgaaacactccaggaactcttcaatgaatactgcagtccagtggatcagccgaatgtgcgtgtgccaaaaagcgaatcttttagtctagatgacaacgactcatttgaagattgggaccagcacctcaatgagcaagcgagcagtcagaaatccacggaactcgataactaccttgcggacggtttggttccaaggaaggatgacttcgataacctgaactggtggatgtgtcacgccacaaagtacccgacactggcggctatcgtgcaggacatcctggcgatgccagcatctgctgttccatcagaagcagcgttcacaagcagtggaccagtaattccaaagcaccacagcatgctaagcatcaagaccattgaggcacttgtttgcactcgagattggatgagataaagcgattgtgtaccctgaactctgaacaaccaatgatgggatgcagttttgttcaggggatggtcctggctcccaaccagtgggatccagtccccagccaggattgggtggtggatcctgtgaaattcctgcgttagaaacaggccctcagaggtttggtaggtgtacctgacttggttccatgtgtgtacagttgctcgatgtagttgcagatgtagttgcagatctgcggcccaaaacagagctaagctaattgtaatgttgcaggcatgctttattggtgatcttggacacttctggttctggaatagcatccctagtggctataccagttcgttgcaaatggactcgcggttgaaagaataaactgagctactacttcagtccaatgttgcataggaaacatatatggctggtttggtggccagggatcatcaggccagacaatctttctctaacaccataataccatcgccacaattatgtgtagtagcacatcttatcttgtactaccattattcatggtggcgtccacagcgaaaagtaaccgtacgcgtcgaattgccgatggattactggatgtatgttagcaagaaaaaacaggctggaaagtgcaacacagctggggagagtgcgaggcaaggttgagcagttgaccattggacgcatatgcatgtgtacgtaacgtgttcttatatgcatgcttcatccccatcagaattcagaaagcacatttcatcctcaggttttccctactcttgcacgcagccggtcaatcgacatttttaaacacgctgatacagatgctcgatcagtagctaaaattaaacacctgagattaacttggactgatataaaatatactatatcattcactgagtgtctggattaatttggacgaatcaaaaaagtttatttgatttgattccatggaaatattgtaaacgag

SEQ ID NO: 17926 - DNA, 1417 bp, Zea Mays
tggacagcggatcgtcttgccaaacgtggtctccctcacccagagatgaaaggtccaaaattgatgatcacaattcaaagtttgatctcggggtgccagatgatcttgatgtatcaattgaacttagaaattggctatttgcacttgaaggaactgaagaagtaggataccttttttctcctcgtggaggtgatggtatcagtagagaagaaaaatgctggcattcaaccttcaggaatctacatatctctggcaagagcagtgaccgacttaaattgggaggcagaagaaaggtgtcacccgaaaaggcatttccagtggaacgctttacggctggaattgaaggtttgcaggcaataaaacctcgtctgagagatcagtgcactaaaaaaggaccatcaaacaatcatgagatgggcagagattttaatagttcaagttctgttggtgaccatggagttgatgtcgaagctaccatggtcattggcgaagacgagattgagggtgccaaatggacaatggataatgtcaaattttctgtcaaagaaccaatcgaggcggttgcaacaaaagaagaactagagcaccttgtgatgctttgcagatctgaggctgatgcaatggggaggatcactgctggaattcttcgtctccttaaacttgacaaatctcttgggcaaggaactatagaacaactacgtaacctaggaagtggaggcatggacaatatcttttcacccaggaggctcagcaggcagaacagttttggtagcataggcactcctcggactccaactatgcaagccattgcagacgtcatgggttcgaaaaccacactggaagcaactatttcctcattacaaggcgagatttccgaatccaaggccaaatgtatggcactgatttctcaggcaagcagcactgaggatcaaaaccgtgccgaggacatcaggcagcttagcgaaaagctcgagagcatgcaatcgttggtgacacgattgagaactttgatcatttgatctgactatctgagttgtgcatggttttttttgtgtacagtacacaaggtcgttctgttcaaactcggaagtggcaaatgctgcttcctggtggctggttgagttattcttttgtgtacatttatatatcttgggaggcggtgtgtaaagattaaggggggtggaataatcggttgataggcagctggaggaaattttgtaggcagctggtactggcaaatatgctttgtagcacggcatcatatgatcaaacgggtcactaagaagagtgcagtgccatttatatcattgtatgtataaaatgtgcacagaacgtgcttttcgcgcacaaaaactttgttcctcctaagtcactgaagtgtttatatgccacttgtgtcaactatcgaagtgtttct

SEQ ID NO: 17927 - DNA, 2671 bp, Zea Mays
agggcccaccgtctcttctcacatcctcgcagttccacccctgtccccttccacctccctccccagtgcccccctccgctttctccatcccgcctccgatccggccacccgccaccgccgacaccgggcgacccgtcccaccgccgcgccgctccaggggaaccgtccgggcaggcgggggaggatggagtccatcatagcgcgggcgctggagtacacgctcaagtactggctcaagtccttctcccgcgaccagttcaagctccagggccgcaccgcgcagctctccaacctcgatatcaatggcgatgcgctgcacgcgagcctggggctgcctcccgcgctcgccgtcgacacagcgcgtgtcgggaagctccagatcacgttaccatctctatcaaatgtgcaagtagagccaattgaggtgaacattgacaagctcgatctcgtgcttgtagagaaggacgattctgaaaatctttccagccctagcagcactgcatcatctccatcagcaactaagagcagtggatatggttacgctgacaagattgcagacggaatgacagtgcaagtagggattgttaacctgctactggaaacacatggaggggctcaccgtcaaggggatgcaacatggtcaccgccactagcagcaatcacattccgtgatcttgtattgtacacaacaaatgaaaaatggcaggtagtaaacttgaaagaagcaagagatttctccaacaacaaagggttcatttatgtttttaagaaactggagtggcaatcactgtcagttgatctgttgcctcatcctgatatgttcgccgatgcaagatttaactcttctagtagtcaagacgacaaaagagatgatgatggtgcaaaacgaatgttttttggtggtgaaagatttttggaaggaatatctggagaggctaacatcacggtccagcggacagaacagaataatccacttgggcttgaggttcagctacatattacagaagctgtctgtcctgccttaagtgaacctggcttacgggcctttcttcgatttatgactggggtatctgtgtgcctaaacaggggagatatagatccaaaagctcaacagcttgcagaagcagcaggatcttcattggtgtccattatcgtagatcacatattcctctgcattaaagatactgagtttcaacttgaacttctcatgcagtctttgttcttctcacgggcaagcatttcagacggcgaatgctcaaagaacttatcttgcatcaaggtcggcgggatgtttctgagatgaaaggtccaaaattgatgatcacaattcaaagtttgatctcggggtgccagatgatcttgatgtatcaattgaacttagaaattggctatttgcacttgaaggaactgaagaagtaggataccttttttctcctcgtggaggtgatggtatcagtagagaagaaaaatgctggcattcaaccttcaggaatctacatatctctggcaagagcagtgaccgacttaaattgggaggcagaagaaaggtgtcacccgaaaaggcatttccagtggaacgctttacggctggaattgaaggtttgcaggcaataaaacctcgtctgagagatcagtgcactaaaaaaggaccatcaaacaatcatgagatgggcagagattttaatagttcaagttctgttggtgaccatggagttgatgtcgaagctaccatggtcattggcgaagacgagattgagggtgccaaatggacaatggataatgtcaaattttctgtcaaagaaccaatcgaggcggttgcaacaaaagaagaactagagcaccttgtgatgctttgcagatctgaggctgatgcaatggggaggatcactgctggaattcttcgtctccttaaacttgacaaatctcttgggcaaggaactatagaacaactacgtaacctaggaagtggaggcatggacaatatcttttcacccaggaggctcagcaggcagaacagttttggtagcataggcactcctcggactccaactatgcaagccattgcagacgtcatgggttcgaaaaccacactggaagcaactatttcctcattacaaggcgagatttccgaatccaaggccaaatgtatggcactgatttctcaggcaagcagcactgaggatcaaaaccgtgccgaggacatcaggcagcttagcgaaaagctcgagagcatgcaatcgttggtgacacgattgagaactttgatcatttgatctgactatctgagttgtgcatggttttttttgtgtacagtacacaaggtcgttctgttcaaactcggaagtggcaaatgctgcttcctggtggctggttgagttattcttttgtgtacatttatatatcttgggaggcggtgtgtaaagattaaggggggtggaataatcggttgataggcagctggaggaaattttgtaggcagctggtactggcaaatatgctttgtagcacggcatcatatgatcaaacgggtcactaagaagagtgcagtgccatttatatcattgtatgtataaaatgtgcacagaacgtgcttttcgcgcacaaaaactttgttcctcctaagtcactgaagtgtttatatgccacttgtgtcaactatcgaagtgtttct

SEQ ID NO: 17928 - DNA, 4132 bp, Zea Mays
agggcccaccgtctcttctcacatcctcgcagttccacccctgtccccttccacctccctccccagtgcccccctccgctttctccatcccgcctccgatccggccacccgccaccgccgacaccgggcgacccgtcccaccgccgcgccgctccaggggaaccgtccgggcaggcgggggaggatggagtccatcatagcgcgggcgctggagtacacgctcaagtactggctcaagtccttctcccgcgaccagttcaagctccagggccgcaccgcgcagctctccaacctcgatatcaatggcgatgcgctgcacgcgagcctggggctgcctcccgcgctcgccgtcgacacagcgcgtgtcgggaagctccagatcacgttaccatctctatcaaatgtgcaagtagagccaattgaggtgaacattgacaagctcgatctcgtgcttgtagagaaggacgattctgaaaatctttccagccctagcagcactgcatcatctccatcagcaactaagagcagtggatatggttacgctgacaagattgcagacggaatgacagtgcaagtagggattgttaacctgctactggaaacacatggaggggctcaccgtcaaggggatgcaacatggtcaccgccactagcagcaatcacattccgtgatcttgtattgtacacaacaaatgaaaaatggcaggtagtaaacttgaaagaagcaagagatttctccaacaacaaagggttcatttatgtttttaagatcacggtccagcggacagaacagaataatccacttgggcttgaggttcagctacatattacagaagctgtctgtcctgccttaagtgaacctggcttacgggcctttcttcgatttatgactggggtatctgtgtgcctaaacaggggagatatagatccaaaagctcaacagcttgcagaagcagcaggatcttcattggtgtccattatcgtagatcacatattcctctgcattaaagatactggttagtagtagtgccaaacaatttcagatatcaacctttttgtcctgctacggtgacttgtttgttaaatcattggtgcaaacagagtttcaacttgaacttctcatgcagtctttgttcttctcacgggcaagcatttcagacggcgaatgctcaaagaacttatcttgcatcaaggtcggcgggatgtttctgagagacaccttttctcgccctccatgcacattgatacagccgtctatgcaagcagtttcacaagaacctccacctgtgcctgacttcggtcaaaatttttgccctcctatatatccatttggcaatcaactattagactttgctgctggagttcctttgttttccctctattgtcttcagaccaccccttctccatcacctccgaagtttgcttcaaaaacagtcatcacatgccagtctatcatggtaaccctccaggagcaatcgtgcttaagaattgcttcattcttggctgatggagttgtacccaatcgtggtgccatattgccagagtcttcaatcaacagcctgacattttcacttaaagagtttgatctctctgttccattagatactgatgaaatcgcaaggtgcagtggaaccaagaatactaacccccaatcatcattttcgggtgcaagactgcatgtggaagacctatacttctgccagtcaccatcaactaagtgtccattgctaaaccttgacagagatccagcttgcttccttctgtgggaatatcaacctgttgatgcgagtcagatgaagtgggctacttggtcttctcacctaagtctctcacttgaaacttctagcacttcaaatggacagagagcagtcagtgattctaatttgtggaaatgtattgaactagatgatatccgatttgaggtagctatggttacagcagatggtgggcctttgttggatgtaccacctccagagggtgttgtaagaattggtgttgctttccaacagttcaagtccaacacctcagttgagcaattgttttttgtgttaggtttttatacttactttggtcaagtagcagaacgtatctcaaaggtcagcaacgctaacaagtctgagtcagtgaagtcatcggctgacaagtcggagaataaactgccaagtgatacagctgtgagtttaactatgaataatctccagctcaatttcttagaatctttgtcagcaagtgatgtacatatgcccttggttcagtttggcggaggggatctgttcctgaaagtttctcaccgcactctaggtggtgcctttgcagtcacgactaatttgatgtggacaactgtttcggtgaactgtttagaaggagaaagtgctattgtttgtgagcatggcactgcagtgactggtgaacacagcattttagtgcatggaaatgggcaccccaagatgagagctgtcttttgggttgatcataggagcaaacaccaggttaaagaacctcagttccttgatataaacatcactcatgtaatgccttacgatatccaggatatggagtgccatagcttgaatgtatcagctaaggtatctggtgttcgtcttgggggtggaatttcttacactgagtctttactgcatcgatttggtatcctgggtcctgatggcggtccaggggaaggtctcttgaggggtttgaaggatttatcttcaggcccacttgcgaagctgtttaaatcctctcacctcactgaaaaggaagatgaaaggtccaaaattgatgatcacaattcaaagtttgatctcggggtgccagatgatcttgatgtatcaattgaacttagaaattggctatttgcacttgaaggaactgaagaagtaggataccttttttctcctcgtggaggtgatggtatcagtagagaagaaaaatgctggcattcaaccttcaggaatctacatatctctggcaagagcagtgaccgacttaaattgggaggcagaagaaaggtgtcacccgaaaaggcatttccagtggaacgctttacggctggaattgaaggtttgcaggcaataaaacctcgtctgagagatcagtgcactaaaaaaggaccatcaaacaatcatgagatgggcagagattttaatagttcaagttctgttggtgaccatggagttgatgtcgaagctaccatggtcattggcgaagacgagattgagggtgccaaatggacaatggataatgtcaaattttctgtcaaagaaccaatcgaggcggttgcaacaaaagaagaactagagcaccttgtgatgctttgcagatctgaggctgatgcaatggggaggatcactgctggaattcttcgtctccttaaacttgacaaatctcttgggcaaggaactatagaacaactacgtaacctaggaagtggaggcatggacaatatcttttcacccaggaggctcagcaggcagaacagttttggtagcataggcactcctcggactccaactatgcaagccattgcagacgtcatgggttcgaaaaccacactggaagcaactatttcctcattacaaggcgagatttccgaatccaaggccaaatgtatggcactgatttctcaggcaagcagcactgaggatcaaaaccgtgccgaggacatcaggcagcttagcgaaaagctcgagagcatgcaatcgttggtgacacgattgagaactttgatcatttgatctgactatctgagttgtgcatggttttttttgtgtacagtacacaaggtcgttctgttcaaactcggaagtggcaaatgctgcttcctggtggctggttgagttattcttttgtgtacatttatatatcttgggaggcggtgtgtaaagattaaggggggtggaataatcggttgataggcagctggaggaaattttgtaggcagctggtactggcaaatatgctttgtagcacggcatcatatgatcaaacgggtcactaagaagagtgcagtgccatttatatcattgtatgtataaaatgtgcacagaacgtgcttttcgcgcacaaaaactttgttcctcctaagtcactgaagtgtttatatgccacttgtgtcaactatcgaagtgtttct

SEQ ID NO: 17929 - DNA, 4204 bp, Zea Mays
agggcccaccgtctcttctcacatcctcgcagttccacccctgtccccttccacctccctccccagtgcccccctccgctttctccatcccgcctccgatccggccacccgccaccgccgacaccgggcgacccgtcccaccgccgcgccgctccaggggaaccgtccgggcaggcgggggaggatggagtccatcatagcgcgggcgctggagtacacgctcaagtactggctcaagtccttctcccgcgaccagttcaagctccagggccgcaccgcgcagctctccaacctcgatatcaatggcgatgcgctgcacgcgagcctggggctgcctcccgcgctcgccgtcgacacagcgcgtgtcgggaagctccagatcacgttaccatctctatcaaatgtgcaagtagagccaattgaggtgaacattgacaagctcgatctcgtgcttgtagagaaggacgattctgaaaatctttccagccctagcagcactgcatcatctccatcagcaactaagagcagtggatatggttacgctgacaagacggaatgacagtgcaagtagggattgttaacctgctactggaaacacatggaggggctcaccgtcaaggggatgcaacatggtcaccgccactagcagcaatcacattccgtgatcttgtattgtacacaacaaatgaaaaatggcaggtagtaaacttgaaagaagcaagagatttctccaacaacaaagggttcatttatgtttttaagaaactggagtggcaatcactgtcagttgatctgttgcctcatcctgatatgttcgccgatgcaagatttaactcttctagtagtcaagacgacaaaagagatgatgatggtgcaaaacgaatgttttttggtggtgaaagatttttggaaggaatatctggagaggctaacatcacggtccagcggacagaacagaataatccacttgggcttgaggttcagctacatattacagaagctgtctgtcctgccttaagtgaacctggcttacgggcctttcttcgatttatgactggggtatctgtgtgcctaaacaggggagatatagatccaaaagctcaacagaagcagcaggatcttcattggtgtccattatcgtagatcacatattcctctgcattaaagatactgagtttcaacttgaacttctcatgcagtctttgttcttctcacgggcaagcatttcagacggcgaatgctcaaagaacttatcttgcatcaaggtcggcgggatgtttctgagagacaccttttctcgccctccatgcacattgatacagccgtctatgcaagcagtttcacaagaacctccacctgtgcctgacttcggtcaaaatttttgccctcctatatatccatttggcaatcaactattagactttgctgctggagttcctttgttttccctctattgtcttcagaccaccccttctccatcacctccgaagtttgcttcaaaaacagtcatcacatgccagtctatcatggtaaccctccaggagcaatcgtgcttaagaattgcttcattcttggctgatggagttgtacccaatcgtggtgccatattgccagagtcttcaatcaacagcctgacattttcacttaaagagtttgatctctctgttccattagatactgatgaaatcgcaaggtgcagtggaaccaagaatactaacccccaatcatcattttcgggtgcaagactgcatgtggaagacctatacttctgccagtcaccatcaactaagtgtccattgctaaaccttgacagagatccagcttgcttccttctgtgggaatatcaacctgttgatgcgagtcagatgaagtgggctacttggtcttctcacctaagtctctcacttgaaacttctagcacttcaaatggacagagagcagtcagtgattctaatttgtggaaatgtattgaactagatgatatccgatttgaggtagctatggttacagcagatggtgggcctttgttggatgtaccacctccagagggtgttgtaagaattggtgttgctttccaacagttcaagtccaacacctcagttgagcaattgttttttgtgttaggtttttatacttactttggtcaagtagcagaacgtatctcaaaggtcagcaacgctaacaagtctgagtcagtgaagtcatcggctgacaagtcggagaataaactgccaagtgatacagctgtgagtttaactatgaataatctccagctcaatttcttagaatctttgtcagcaagtgatgtacatatgcccttggttcagtttggcggaggggatctgttcctgaaagtttctcaccgcactctaggtggtgcctttgcagtcacgactaatttgatgtggacaactgtttcggtgaactgtttagaaggagaaagtgctattgtttgtgagcatggcactgcagtgactggtgaacacagcattttagtgcatggaaatgggcaccccaagatgagagctgtcttttgggttgatcataggagcaaacaccaggttaaagaacctcagttccttgatataaacatcactcatgtaatgccttacgatatccaggatatggagtgccatagcttgaatgtatcagctaaggtatctggtgttcgtcttgggggtggaatttcttacactgagtctttactgcatcgatttggtatcctgggtcctgatggcggtccaggggaaggtctcttgaggggtttgaaggatttatcttcaggcccacttgcgaagctgtttaaatcctctcacctcactgaaaaggaagatgaaaggtccaaaattgatgatcacaattcaaagtttgatctcggggtgccagatgatcttgatgtatcaattgaacttagaaattggctatttgcacttgaaggaactgaagaagtaggataccttttttctcctcgtggaggtgatggtatcagtagagaagaaaaatgctggcattcaaccttcaggaatctacatatctctggcaagagcagtgaccgacttaaattgggaggcagaagaaaggtgtcacccgaaaaggcatttccagtggaacgctttacggctggaattgaaggtttgcaggcaataaaacctcgtctgagagatcagtgcactaaaaaaggaccatcaaacaatcatgagatgggcagagattttaatagttcaagttctgttggtgaccatggagttgatgtcgaagctaccatggtcattggcgaagacgagattgagggtgccaaatggacaatggataatgtcaaattttctgtcaaagaaccaatcgaggcggttgcaacaaaagaagaactagagcaccttgtgatgctttgcagatctgaggctgatgcaatggggaggatcactgctggaattcttcgtctccttaaacttgacaaatctcttgggcaaggaactatagaacaactacgtaacctaggaagtggaggcatggacaatatcttttcacccaggaggctcagcaggcagaacagttttggtagcataggcactcctcggactccaactatgcaagccattgcagacgtcatgggttcgaaaaccacactggaagcaactatttcctcattacaaggcgagatttccgaatccaaggccaaatgtatggcactgatttctcaggcaagcagcactgaggatcaaaaccgtgccgaggacatcaggcagcttagcgaaaagctcgagagcatgcaatcgttggtgacacgattgagaactttgatcatttgatctgactatctgagttgtgcatggttttttttgtgtacagtacacaaggtcgttctgttcaaactcggaagtggcaaatgctgcttcctggtggctggttgagttattcttttgtgtacatttatatatcttgggaggcggtgtgtaaagattaaggggggtggaataatcggttgataggcagctggaggaaattttgtaggcagctggtactggcaaatatgctttgtagcacggcatcatatgatcaaacgggtcactaagaagagtgcagtgccatttatatcattgtatgtataaaatgtgcacagaacgtgcttttcgcgcacaaaaactttgttcctcctaagtcactgaagtgtttatatgccacttgtgtcaactatcgaagtgtttct

SEQ ID NO: 17930 - DNA, 4211 bp, Zea Mays
agggcccaccgtctcttctcacatcctcgcagttccacccctgtccccttccacctccctccccagtgcccccctccgctttctccatcccgcctccgatccggccacccgccaccgccgacaccgggcgacccgtcccaccgccgcgccgctccaggggaaccgtccgggcaggcgggggaggatggagtccatcatagcgcgggcgctggagtacacgctcaagtactggctcaagtccttctcccgcgaccagttcaagctccagggccgcaccgcgcagctctccaacctcgatatcaatggcgatgcgctgcacgcgagcctggggctgcctcccgcgctcgccgtcgacacagcgcgtgtcgggaagctccagatcacgttaccatctctatcaaatgtgcaagtagagccaattgaggtgaacattgacaagctcgatctcgtgcttgtagagaaggacgattctgaaaatctttccagccctagcagcactgcatcatctccatcagcaactaagagcagtggatatggttacgctgacaagattgcagacggaatgacagtgcaagtagggattgttaacctgctactggaaacacatggaggggctcaccgtcaaggggatgcaacatggtcaccgccactagcagcaatcacattccgtgatcttgtattgtacacaacaaatgaaaaatggcaggtagtaaacttgaaagaagcaagagatttctccaacaacaaagggttcatttatgtttttaagaaactggagtggcaatcactgtcagttgatctgttgcctcatcctgatatgttcgccgatgcaagatttaactcttctagtagtcaagacgacaaaagagatgatgatggtgcaaaacgaatgttttttggtggtgaaagatttttggaaggaatatctggagaggctaacatcacggtccagcggacagaacagaataatccacttgggcttgaggttcagctacatattacagaagctgtctgtcctgccttaagtgaacctggcttacgggcctttcttcgatttatgactggggtatctgtgtgcctaaacaggggagatatagatccaaaagctcaacagaagcagcaggatcttcattggtgtccattatcgtagatcacatattcctctgcattaaagatactgagtttcaacttgaacttctcatgcagtctttgttcttctcacgggcaagcatttcagacggcgaatgctcaaagaacttatcttgcatcaaggtcggcgggatgtttctgagagacaccttttctcgccctccatgcacattgatacagccgtctatgcaagcagtttcacaagaacctccacctgtgcctgacttcggtcaaaatttttgccctcctatatatccatttggcaatcaactattagactttgctgctggagttcctttgttttccctctattgtcttcagaccaccccttctccatcacctccgaagtttgcttcaaaaacagtcatcacatgccagtctatcatggtaaccctccaggagcaatcgtgcttaagaattgcttcattcttggctgatggagttgtacccaatcgtggtgccatattgccagagtcttcaatcaacagcctgacattttcacttaaagagtttgatctctctgttccattagatactgatgaaatcgcaaggtgcagtggaaccaagaatactaacccccaatcatcattttcgggtgcaagactgcatgtggaagacctatacttctgccagtcaccatcaactaagtgtccattgctaaaccttgacagagatccagcttgcttccttctgtgggaatatcaacctgttgatgcgagtcagatgaagtgggctacttggtcttctcacctaagtctctcacttgaaacttctagcacttcaaatggacagagagcagtcagtgattctaatttgtggaaatgtattgaactagatgatatccgatttgaggtagctatggttacagcagatggtgggcctttgttggatgtaccacctccagagggtgttgtaagaattggtgttgctttccaacagttcaagtccaacacctcagttgagcaattgttttttgtgttaggtttttatacttactttggtcaagtagcagaacgtatctcaaaggtcagcaacgctaacaagtctgagtcagtgaagtcatcggctgacaagtcggagaataaactgccaagtgatacagctgtgagtttaactatgaataatctccagctcaatttcttagaatctttgtcagcaagtgatgtacatatgcccttggttcagtttggcggaggggatctgttcctgaaagtttctcaccgcactctaggtggtgcctttgcagtcacgactaatttgatgtggacaactgtttcggtgaactgtttagaaggagaaagtgctattgtttgtgagcatggcactgcagtgactggtgaacacagcattttagtgcatggaaatgggcaccccaagatgagagctgtcttttgggttgatcataggagcaaacaccaggttaaagaacctcagttccttgatataaacatcactcatgtaatgccttacgatatccaggatatggagtgccatagcttgaatgtatcagctaaggtatctggtgttcgtcttgggggtggaatttcttacactgagtctttactgcatcgatttggtatcctgggtcctgatggcggtccaggggaaggtctcttgaggggtttgaaggatttatcttcaggcccacttgcgaagctgtttaaatcctctcacctcactgaaaaggaagatgaaaggtccaaaattgatgatcacaattcaaagtttgatctcggggtgccagatgatcttgatgtatcaattgaacttagaaattggctatttgcacttgaaggaactgaagaagtaggataccttttttctcctcgtggaggtgatggtatcagtagagaagaaaaatgctggcattcaaccttcaggaatctacatatctctggcaagagcagtgaccgacttaaattgggaggcagaagaaaggtgtcacccgaaaaggcatttccagtggaacgctttacggctggaattgaaggtttgcaggcaataaaacctcgtctgagagatcagtgcactaaaaaaggaccatcaaacaatcatgagatgggcagagattttaatagttcaagttctgttggtgaccatggagttgatgtcgaagctaccatggtcattggcgaagacgagattgagggtgccaaatggacaatggataatgtcaaattttctgtcaaagaaccaatcgaggcggttgcaacaaaagaagaactagagcaccttgtgatgctttgcagatctgaggctgatgcaatggggaggatcactgctggaattcttcgtctccttaaacttgacaaatctcttgggcaaggaactatagaacaactacgtaacctaggaagtggaggcatggacaatatcttttcacccaggaggctcagcaggcagaacagttttggtagcataggcactcctcggactccaactatgcaagccattgcagacgtcatgggttcgaaaaccacactggaagcaactatttcctcattacaaggcgagatttccgaatccaaggccaaatgtatggcactgatttctcaggcaagcagcactgaggatcaaaaccgtgccgaggacatcaggcagcttagcgaaaagctcgagagcatgcaatcgttggtgacacgattgagaactttgatcatttgatctgactatctgagttgtgcatggttttttttgtgtacagtacacaaggtcgttctgttcaaactcggaagtggcaaatgctgcttcctggtggctggttgagttattcttttgtgtacatttatatatcttgggaggcggtgtgtaaagattaaggggggtggaataatcggttgataggcagctggaggaaattttgtaggcagctggtactggcaaatatgctttgtagcacggcatcatatgatcaaacgggtcactaagaagagtgcagtgccatttatatcattgtatgtataaaatgtgcacagaacgtgcttttcgcgcacaaaaactttgttcctcctaagtcactgaagtgtttatatgccacttgtgtcaactatcgaagtgtttct

SEQ ID NO: 17931 - DNA, 4113 bp, Zea Mays
agggcccaccgtctcttctcacatcctcgcagttccacccctgtccccttccacctccctccccagtgcccccctccgctttctccatcccgcctccgatccggccacccgccaccgccgacaccgggcgacccgtcccaccgccgcgccgctccaggggaaccgtccgggcaggcgggggaggatggagtccatcatagcgcgggcgctggagtacacgctcaagtactggctcaagtccttctcccgcgaccagttcaagctccagggccgcaccgcgcagctctccaacctcgatatcaatggcgatgcgctgcacgcgagcctggggctgcctcccgcgctcgccgtcgacacagcgcgtgtcgggaagctccagatcacgttaccatctctatcaaatgtgcaagtagagccaattgaggtgaacattgacaagctcgatctcgtgcttgtagagaaggacgattctgaaaatctttccagccctagcagcactgcatcatctccatcagcaactaagagcagtggatatggttacgctgacaagattgcagacggaatgacagtgcaagtagggattgttaacctgctactggaaacacatggaggggctcaccgtcaaggggatgcaacatggtcaccgccactagcagcaatcacattccgtgatcttgtattgtacacaacaaatgaaaaatggcaggtagtaaacttgaaagaagcaagagatttctccaacaacaaagggttcatttatgtttttaagaaactggagtggcaatcactgtcagttgatctgttgcctcatcctgatatgttcgccgatgcaagatttaactcttctagtagtcaagacgacaaaagagatgatgatggtgcaaaacgaatgttttttggtggtgaaagatttttggaaggaatatctggagaggctaacatcacggtccagcggacagaacagaataatccacttgggcttgaggttcagctacatattacagaagctgtctgtcctgccttaagtgaacctggcttacgggcctttcttcgatttatgactggggtatctgtgtgcctaaacaggggagatatagatccaaaagctcaacagcttgcagaagcagcaggatcttcattggtgtccattatcgtagatcacatattcctctgcattaaagatactgagtttcaacttgaacttctcatgcagtctttgttcttctcacgggcaagcatttcagacggcgaatgctcaaagaacttatcttgcatcaaggtcggcgggatgtttctgagagacaccttttctcgccctccatgcacattgatacagccgtctatgcaagcagtttcacaagaacctccacctgtgcctgacttcggtcaaaatttttgccctcctatatatccatttggcaatcaactattagactttgctgctggagttcctttgttttccctctattgtcttcagaccaccccttctccatcacctccgaagtttgcttcaaaaacagtcatcacatgccagtctatcatggtaaccctccaggagcaatcgtgcttaagaattgcttcattcttggctgatggagttgtacccaatcgtggtgccatattgccagagtcttcaatcaacagcctgacattttcacttaaagagtttgatctctctgttccattagatactgatgaaatcgcaaggtgcagtggaaccaagaatactaacccccaatcatcattttcgggtgcaagactgcatgtggaagacctatacttctgccagtcaccatcaactaagtgtccattgctaaaccttgacagagatccagcttgcttccttctgtgggaatatcaacctgttgatgcgagtcagatgaagtgggctacttggtcttctcacctaagtctctcacttgaaacttctagcacttcaaatggacagagagcagtcagtgattctaatttgtggaaatgtattgaactagatgatatccgatttgaggtagctatggttacagcagatggtgggcctttgttggatgtaccacctccagagggtgttgtaagaattggtgttgctttccaacagttcaagtccaacacctcagttgagcaattgttttttgtgttaggtttttatacttactttggtcaagtagcagaacgtatctcaaaggtcagcaacgctaacaagtctgagtcagtgaagtcatcggctgacaagtcggagaataaactgccaagtgatacagctgtgagtttaactatgaataatctccagctcaatttcttagaatctttgtcagcaagtgatgtacatatgcccttggttcagtttggcggaggggatctgttcctgaaagtttctcaccgcactctaggtggtgcctttgcagtcacgactaatttgatgtggacaactgtttcggtgaactgtttagaaggagaaagtgctattgtttgtgagcatggcactgcagtgactggtgaacacagcattttagtgcatggaaatgggcaccccaagatgagagctgtcttttgggttgatcataggagcaaacaccaggttaaagaacctcagttccttgatataaacatcactcatgtaatgccttacgatatccaggatatggagtgccatagcttgaatgtatcagctaaggtatctggtgttcgtcttgggggtggaatttcttacactgagtctttactgcatcgatttggtatcctgggtcctgatggcggtccaggggaaggtctcttgaggggtttgaaggatttatcttcaggcccacttgcgaagctgtttaaatcctctcacctcactgaaaaggaaggaactgaagaagtaggataccttttttctcctcgtggaggtgatggtatcagtagagaagaaaaatgctggcattcaaccttcaggaatctacatatctctggcaagagcagtgaccgacttaaattgggaggcagaagaaaggtgtcacccgaaaaggcatttccagtggaacgctttacggctggaattgaaggtttgcaggcaataaaacctcgtctgagagatcagtgcactaaaaaaggaccatcaaacaatcatgagatgggcagagattttaatagttcaagttctgttggtgaccatggagttgatgtcgaagctaccatggtcattggcgaagacgagattgagggtgccaaatggacaatggataatgtcaaattttctgtcaaagaaccaatcgaggcggttgcaacaaaagaagaactagagcaccttgtgatgctttgcagatctgaggctgatgcaatggggaggatcactgctggaattcttcgtctccttaaacttgacaaatctcttgggcaaggaactatagaacaactacgtaacctaggaagtggaggcatggacaatatcttttcacccaggaggctcagcaggcagaacagttttggtagcataggcactcctcggactccaactatgcaagccattgcagacgtcatgggttcgaaaaccacactggaagcaactatttcctcattacaaggcgagatttccgaatccaaggccaaatgtatggcactgatttctcaggcaagcagcactgaggatcaaaaccgtgccgaggacatcaggcagcttagcgaaaagctcgagagcatgcaatcgttggtgacacgattgagaactttgatcatttgatctgactatctgagttgtgcatggttttttttgtgtacagtacacaaggtcgttctgttcaaactcggaagtggcaaatgctgcttcctggtggctggttgagttattcttttgtgtacatttatatatcttgggaggcggtgtgtaaagattaaggggggtggaataatcggttgataggcagctggaggaaattttgtaggcagctggtactggcaaatatgctttgtagcacggcatcatatgatcaaacgggtcactaagaagagtgcagtgccatttatatcattgtatgtataaaatgtgcacagaacgtgcttttcgcgcacaaaaactttgttcctcctaagtcactgaagtgtttatatgccacttgtgtcaactatcgaagtgtttct

SEQ ID NO: 17932 - DNA, 4130 bp, Zea Mays
agggcccaccgtctcttctcacatcctcgcagttccacccctgtccccttccacctccctccccagtgcccccctccgctttctccatcccgcctccgatccggccacccgccaccgccgacaccgggcgacccgtcccaccgccgcgccgctccaggggaaccgtccgggcaggcgggggaggatggagtccatcatagcgcgggcgctggagtacacgctcaagtactggctcaagtccttctcccgcgaccagttcaagctccagggccgcaccgcgcagctctccaacctcgatatcaatggcgatgcgctgcacgcgagcctggggctgcctcccgcgctcgccgtcgacacagcgcgtgtcgggaagctccagatcacgttaccatctctatcaaatgtgcaagtagagccaattgaggtgaacattgacaagctcgatctcgtgcttgtagagaaggacgattctgaaaatctttccagccctagcagcactgcatcatctccatcagcaactaagagcagtggatatggttacgctgacaagacggaatgacagtgcaagtagggattgttaacctgctactggaaacacatggaggggctcaccgtcaaggggatgcaacatggtcaccgccactagcagcaatcacattccgtgatcttgtattgtacacaacaaatgaaaaatggcaggtagtaaacttgaaagaagcaagagatttctccaacaacaaagggttcatttatgtttttaagaaactggagtggcaatcactgtcagttgatctgttgcctcatcctgatatgttcgccgatgcaagatttaactcttctagtagtcaagacgacaaaagagatgatgatggtgcaaaacgaatgttttttggtggtgaaagatttttggaaggaatatctggagaggctaacatcacggtccagcggacagaacagaataatccacttgggcttgaggttcagctacatattacagaagctgtctgtcctgccttaagtgaacctggcttacgggcctttcttcgatttatgactggggtatctgtgtgcctaaacaggggagatatagatccaaaagctcaacagcttgcagaagcagcaggatcttcattggtgtccattatcgtagatcacatattcctctgcattaaagatactgagtttcaacttgaacttctcatgcagtctttgttcttctcacgggcaagcatttcagacggcgaatgctcaaagaacttatcttgcatcaaggtcggcgggatgtttctgagagacaccttttctcgccctccatgcacattgatacagccgtctatgcaagcagtttcacaagaacctccacctgtgcctgacttcggtcaaaatttttgccctcctatatatccatttggcaatcaactattagactttgctgctggagttcctttgttttccctctattgtcttcagaccaccccttctccatcacctccgaagtttgcttcaaaaacagtcatcacatgccagtctatcatggtaaccctccaggagcaatcgtgcttaagaattgcttcattcttggctgatggagttgtacccaatcgtggtgccatattgccagagtcttcaatcaacagcctgacattttcacttaaagagtttgatctctctgttccattagatactgatgaaatcgcaaggtgcagtggaaccaagaatactaacccccaatcatcattttcgggtgcaagactgcatgtggaagacctatacttctgccagtcaccatcaactaagtgtccattgctaaaccttgacagagatccagcttgcttccttctgtgggaatatcaacctgttgatgcgagtcagatgaagtgggctacttggtcttctcacctaagtctctcacttgaaacttctagcacttcaaatggacagagagcagtcagtgattctaatttgtggaaatgtattgaactagatgatatccgatttgaggtagctatggttacagcagatggtgggcctttgttggatgtaccacctccagagggtgttgtaagaattggtgttgctttccaacagttcaagtccaacacctcagttgagcaattgttttttgtgttaggtttttatacttactttggtcaagtagcagaacgtatctcaaaggtcagcaacgctaacaagtctgagtcagtgaagtcatcggctgacaagtcggagaataaactgccaagtgatacagcttttggcggaggggatctgttcctgaaagtttctcaccgcactctaggtggtgcctttgcagtcacgactaatttgatgtggacaactgtttcggtgaactgtttagaaggagaaagtgctattgtttgtgagcatggcactgcagtgactggtgaacacagcattttagtgcatggaaatgggcaccccaagatgagagctgtcttttgggttgatcataggagcaaacaccaggttaaagaacctcagttccttgatataaacatcactcatgtaatgccttacgatatccaggatatggagtgccatagcttgaatgtatcagctaaggtatctggtgttcgtcttgggggtggaatttcttacactgagtctttactgcatcgatttggtatcctgggtcctgatggcggtccaggggaaggtctcttgaggggtttgaaggatttatcttcaggcccacttgcgaagctgtttaaatcctctcacctcactgaaaaggaagatgaaaggtccaaaattgatgatcacaattcaaagtttgatctcggggtgccagatgatcttgatgtatcaattgaacttagaaattggctatttgcacttgaaggaactgaagaagtaggataccttttttctcctcgtggaggtgatggtatcagtagagaagaaaaatgctggcattcaaccttcaggaatctacatatctctggcaagagcagtgaccgacttaaattgggaggcagaagaaaggtgtcacccgaaaaggcatttccagtggaacgctttacggctggaattgaaggtttgcaggcaataaaacctcgtctgagagatcagtgcactaaaaaaggaccatcaaacaatcatgagatgggcagagattttaatagttcaagttctgttggtgaccatggagttgatgtcgaagctaccatggtcattggcgaagacgagattgagggtgccaaatggacaatggataatgtcaaattttctgtcaaagaaccaatcgaggcggttgcaacaaaagaagaactagagcaccttgtgatgctttgcagatctgaggctgatgcaatggggaggatcactgctggaattcttcgtctccttaaacttgacaaatctcttgggcaaggaactatagaacaactacgtaacctaggaagtggaggcatggacaatatcttttcacccaggaggctcagcaggcagaacagttttggtagcataggcactcctcggactccaactatgcaagccattgcagacgtcatgggttcgaaaaccacactggaagcaactatttcctcattacaaggcgagatttccgaatccaaggccaaatgtatggcactgatttctcaggcaagcagcactgaggatcaaaaccgtgccgaggacatcaggcagcttagcgaaaagctcgagagcatgcaatcgttggtgacacgattgagaactttgatcatttgatctgactatctgagttgtgcatggttttttttgtgtacagtacacaaggtcgttctgttcaaactcggaagtggcaaatgctgcttcctggtggctggttgagttattcttttgtgtacatttatatatcttgggaggcggtgtgtaaagattaaggggggtggaataatcggttgataggcagctggaggaaattttgtaggcagctggtactggcaaatatgctttgtagcacggcatcatatgatcaaacgggtcactaagaagagtgcagtgccatttatatcattgtatgtataaaatgtgcacagaacgtgcttttcgcgcacaaaaactttgttcctcctaagtcactgaagtgtttatatgccacttgtgtcaactatcgaagtgtttct

SEQ ID NO: 17933 - DNA, 4007 bp, Zea Mays
cccctcctaggctcaccaagtcaccagtcactaccactccgccagccaggcgctccctccatttccgacgcggcgcgccgaggtctgcacggacgcgcctcggtcactccgtcttcccacctctccggtctccgctggtcgtggtctcgagttccctcgcttgcttacgggaggcaacgacacgaccccgattcgagtggcgaccgggggaaccgcgtcttcgttccgtcgggggccgcctccgggtactccattctccggccccgcgattcccttcctcgcctgctgctgaggatcaagtcctcttctagtaagacaccgcgggctccaggaggcgcggcccaggctgctgatcctcgcccctggaccggtagacactgtggtggtgactggtagtattagtgattttaaatggcttcagcaagaaaagtaagaaacgcgaataagcgttatgccaaaatcaatgaagactggcaggataaagatacaccaagtgtacctaaaagtaaagtgcgaaagaaaaagttatcggacatgcttgggtctcagtggagcaaagatgagctcgagcgcttctatggtgcctacagaaaatatggaaaagattggagaaaggttgctggcactatccgcgatagaacatctgatatggtgaaggctctttacaacatgaataaggcatatttatctcttccagagggaacagcaactgctgcggggttaatcgcaatgatgaccgatcactataatattctggatggaagtaacagtgatcgagaaagcagtgattcaccaaaagcttctaggaggctacagaagcgtggtcgtgcaaaacttcaatctgtgtctaagacatctgatacacattttactgatctgttgcaacctcagcctgcttcatcgagctatggatgcctttctttgttgaagaaaaaacgttctggagacctatttgtagggaaccggccacgtgctgttgggaaaaggactccaagagtacctgttgcaagcatgtaccatcgagatgacaggggtgcaccaaatagacaagctaaaccggatgctaatgatggtgatgatgaaggagctcatgtagctgcacttgctctggcggaggtacatcaaagaggaggctcacctcagatttcccatacacctcggagatctggtgatcatatgtttttgtctcctgctaaaagtagtggcagaaaaaacgctgattcagagatgggaagctcaaagctccatggatttcagttggatgctgattaccctgaaggtagcttgggaagtagggaagccgagactggtgattataccaaaggcacatcctatttgatagccaacaaaggatctccatctagcaagcctcagaagaaagtcaagaggcctcaaaagaggagaaaaaaagctgtacgcagaacggatgatcagtttgaggatgatagagaggcttgtagtggtactgaagaagggtgcagcatgaaaaaggcaaaagaggaaccagagctggagacattgggaaccaaaactgcatggccatctagcacatcaaataaaagaagtcgccaactcttttttgatgatgaaagtttggctctagatgcattacatactttagctgatctatctgtgaatatcctacaaccatcttctgttgttgaatctgaatcatcagcacagatcaaggatgaaaaaagggacaatgattctgatggaaagcctggtatacctgcagcagctgtatcggtgtatgagcagaaagataactccaaaagtacatcaaagaaactcaaaaggcagccagaaatggcaagcactgatatggttactaggaaaaaaggcaaacttgctaaagatactcatcctgatgggagcaccacttctgaagtaaaacagcaagcttgtacatgtggtgtgaaaacagaaaaaaagaagaaatcttccatgggaaagattttaaaagatgaaaagaaaatgccaaaagatgttgagaagactgaggtttctcctgaagaagagaagacatcttctaacaaaaccatggatatcgcagagacaactacacaagttgcaacaactctgcatgctgacttgatggcaaagggtaaaagccgtcgtaaactaggcattcaaaaatcactaactcaagaatgtaaacctgccgagggtgctggcgattctggaagtgataaattgtcttactcactaagtaatattattgatctcaaggacaaactctctcattgcttatcatcacgtttgctccgtagatggtgcatgtttgagtggttctatagtgcaattgattacccgtggtttgcaaagagtgaatttgttgagtatttgaaccatgtcaagctaggtcatgttccaagactgactcatgtcgagtggggtgtcatacgaagttctcttggaaagccccgtcgattgtcgaagcagtttttgcacgaggagagagagaagcttgcgcagtatcgtgattcagtcaggcagcattatactgaacttctatctggcgttagagaaggtctaccaaccgatcttgcgcgacctctagcagttgggcagcgtgttatagcctgccatcctagaacaagggaacttcatgatgggaatgttcttactgtcgatcataatcagtgccgggttcagtttgatcgacctgaactgggtgttgagcttgtgaaggatatcgactgcatgcccctacatcctctggaaaattttcctgaatctctcagacatcaaagtgccatcaatggatactacagccacttatcggaagcaaaatatgaggatcagatgaaagagttggctagcggaggtgcagcaagatccacatcgaatttgaatggtaccgatgcaaccttctataccccttctggtcatccgatgagtaccttaatgaagcaagcaaaggaagctttgctggtggagttgaggcacatgaatgaagaagtgtctggaaagcagaaagatggagaaattattaaagacttggagcatttcagaaagcaatatgctatggtgcttgtgcagctaagagattctaatgatcaagtggctgcagctttgctttcgcttcgccaacgcaatacatatcatgggaattcagggcagtctaaatctatggaaaatggcatagcccttgctggagcaccagatccgtataaccttttcagttatattaatccagagtctggttctcaagtgatcgaagttatcgagacttcaaagtccagggcaaaaatgatggttgatgttgctatccaggctatgtgcaaagtgagtgaaggagagaatgctttttcaaaaataggggaagcactagatcacttgaatagccgcggtactggctctggttcaagtatacttggcataagacggatacctcccgattcaggacagtcaaatgcatcttatcatgacgactgcacagcggcccctgcagcaaacagcagttcaaggttgccgaacggctgtgattcggaagctcaatttcccaaagagttgatatcatcctgcgttgctatgatgcttatgataaagaactgcacggagaagcagtatcaccctgctgaagtcgcgcacatcctcgattcggcactgtcaagcgtacaaccgtgcagctcccagaacatcccgatcttcagagagatcgaaatgtgcatgggcatcatcaagaaccaaatgctggcgttgatacccactccaagtggctaagcttcaatcctgccgcgggtatttaactaatgtactctgaaaacgaaaaaacggatacctgtatgtgatgtgcaatattcctttttttgctgttgtctgtatgtacaaggcgtgtgttattattcattgcctgttattattatattcaactggggtaaaaaaaaatatcatgtactctgtctccctttctccctctttctcaaggatgcatttcactccatctttttatgtctaactaataactaattggtaattgctttctttgtgtaatttcattg

SEQ ID NO: 17934 - DNA, 4133 bp, Zea Mays
cccctcctaggctcaccaagtcaccagtcactaccactccgccagccaggcgctccctccatttccgacgcggcgcgccgaggtctgcacggacgcgcctcggtcactccgtcttcccacctctccggtctccgctggtcgtggtctcgagttccctcgcttgcttacgggaggcaacgacacgaccccgattcgagtggcgaccgggggaaccgcgtcttcgttccgtcgggggccgcctccgggtactccattctccggccccgcgattcccttcctcgcctgctgctgaggatcaagtcctcttctagtaagacaccgcgggctccaggaggcgcggcccaggctgctgatcctcgcccctggaccggtagacactgtggtggtgactggtagtattagtgattttaaatggcttcagcaagaaaagtaagaaacgcgaataagcgttatgccaaaatcaatgaagactggcaggataaagatacaccaagtgtacctaaaagtaaagtgcgaaagaaaaagttatcggacatgcttgggtctcagtggagcaaagatgagctcgagcgcttctatggtgcctacagaaaatatggaaaagattggagaaaggttgctggcactatccgcgatagaacatctgatatggtgaaggctctttacaacatgaataaggcatatttatctcttccagagggaacagcaactgctgcggggttaatcgcaatgatgaccgatcactataatattctggatggaagtaacagtgatcgagaaagcagtgattcaccaaaagcttctaggaggctacagaagcgtggtcgtgcaaaacttcaatctgtgtctaagacatctgatacacattttactgatctgttgcaacctcagcctgcttcatcgagctatggatgcctttctttgttgaagaaaaaacgttctggagggaaccggccacgtgctgttgggaaaaggactccaagagtacctgttgcaagcatgtaccatcgagatgacaggggtgcaccaaatagacaagctaaaccggatgctaatgatggtgatgatgaaggagctcatgtagctgcacttgctctggcggaggtacatcaaagaggaggctcacctcagatttcccatacacctcggagatctggtgatcatatgtttttgtctcctgctaaaagtagtggcagaaaaaacgctgattcagagatgggaagctcaaagctccatggatttcagttggatgctgattaccctgaaggtagcttgggaagtagggaagccgagactggtgattataccaaaggcacatcctatttgatagccaacaaaggatctccatctagcaagcctcagaagaaagtcaagaggcctcaaaagaggagaaaaaaagctgtacgcagaacggatgatcagtttgaggatgatagagaggcttgtagtggtactgaagaagggtgcagcatgaaaaaggcaaaagaggaaccagagctggagacattgggaaccaaaactgcatggccatctagcacatcaaataaaagaagtcgccaactcttttttgatgatgaaagtttggctctagatgcattacatactttagctgatctatctgtgaatatcctacaaccatcttctgttgttgaatctgaatcatcagcacagatcaaggatgaaaaaagggacaatgattctgatggaaagcctggtatacctgcagcagctgtatcggtgtatgagcagaaagataactccaaaagtacatcaaagaaactcaaaaggcagccagaaatggcaagcactgatatggttactaggaaaaaaggcaaacttgctaaagatactcatcctgatgggagcaccacttctgaagtaaaacagcaagcttgtacatgtggtgtgaaaacagaaaaaaagaagaaatcttccatgggaaagattttaaaagatgaaaagaaaatgccaaaagatgttgagaagactgaggtttctcctgaagaagagaagacatcttctaacaaaaccatggatatcgcagagacaactacacaagttgcaacaactctgcatgctgacttgatggcaaagggtaaaagccgtcgtaaactaggcattcaaaaatcactaactcaagaatgtaaacctgccgagggtgctggcgattctggaagtgataaattgtcttactcactaagtaatattattgatctcaaggacaaactctctcattgcttatcatcacgtttgctccgtagatggtgcatgtttgagtggttctatagtgcaattgattacccgtggtttgcaaagagtgaatttgttgagtatttgaaccatgtcaagctaggtcatgttccaagactgactcatgtcgagtggggtgtcatacgaagttctcttggaaagccccgtcgattgtcgaagcagtttttgcacgaggagagagagaagcttgcgcagtatcgtgattcagtcaggcagcattatactgaacttctatctggcgttagagaaggtctaccaaccgatcttgcgcgacctctagcagttgggcagcgtgttatagcctgccatcctagaacaagggaacttcatgatgggaatgttcttactgtcgatcataatcagtgccgggttcagtttgatcgacctgaactgggtgttgagcttgtgaaggatatcgactgcatgcccctacatcctctggaaaattttcctgaatctctcagacatcaaagtgccatcaatggatactacagccacttatcggaagcaaaatatgaggatcagatgaaagagttggctagcggaggtgcagcaagatccacatcgaatttgaatggtaccgatgcaaccttctataccccttctggtcatccgatgagtaccttaatgaagcaagcaaaggccaacacggcagttaatgaggttgcagttgcgacacaacagtcaatgtacaatcaaccatgcacactttcgcagatacaggaaagagaagctgatataagagctcttggtgagctatcacgtgctcttgataaaaaggaagctttgctggtggagttgaggcacatgaatgaagaagtgtctggaaagcagaaagatggagaaattattaaagacttggagcatttcagaaagcaatatgctatggtgcttgtgcagctaagagattctaatgatcaagtggctgcagctttgctttcgcttcgccaacgcaatacatatcatgggaattcagggcagtctaaatctatggaaaatggcatagcccttgctggagcaccagatccgtataaccttttcagttatattaatccagagtctggttctcaagtgatcgaagttatcgagacttcaaagtccagggcaaaaatgatggttgatgttgctatccaggctatgtgcaaagtgagtgaaggagagaatgctttttcaaaaataggggaagcactagatcacttgaatagccgcggtactggctctggttcaagtatacttggcataagacggatacctcccgattcaggacagtcaaatgcatcttatcatgacgactgcacagcggcccctgcagcaaacagcagttcaaggttgccgaacggctgtgattcggaagctcaatttcccaaagagttgatatcatcctgcgttgctatgatgcttatgataaagaactgcacggagaagcagtatcaccctgctgaagtcgcgcacatcctcgattcggcactgtcaagcgtacaaccgtgcagctcccagaacatcccgatcttcagagagatcgaaatgtgcatgggcatcatcaagaaccaaatgctggcgttgatacccactccaagtggctaagcttcaatcctgccgcgggtatttaactaatgtactctgaaaacgaaaaaacggatacctgtatgtgatgtgcaatattcctttttttgctgttgtctgtatgtacaaggcgtgtgttattattcattgcctgttattattatattcaactggggtaaaaaaaaatatcatgtactctgtctccctttctccctctttctcaaggatgcatttcactccatctttttatgtctaactaataactaattggtaattgctttctttgtgtaatttcattg

SEQ ID NO: 17935 - DNA, 4004 bp, Zea Mays
caacaccctcctccatcccccctcctaggctcaccaagtcaccagtcactaccactccgccagccaggcgctccctccatttccgacgcggcgcgccgaggtctgcacggacgcgcctcggtcactccgtcttcccacctctccggtctccgctggtcgtggtctcgagttccctcgcttgcttacgggaggcaacgacacgaccccgattcgagtggcgaccgggggaaccgcgtcttcgttccgtcgggggccgcctccgggtagtattagtgattttaaatggcttcagcaagaaaagtaagaaacgcgaataagcgttatgccaaaatcaatgaagactggcaggataaagatacaccaagtgtacctaaaagtaaagtgcgaaagaaaaagttatcggacatgcttgggtctcagtggagcaaagatgagctcgagcgcttctatggtgcctacagaaaatatggaaaagattggagaaaggttgctggcactatccgcgatagaacatctgatatggtgaaggctctttacaacatgaataaggcatatttatctcttccagagggaacagcaactgctgcggggttaatcgcaatgatgaccgatcactataatattctggatggaagtaacagtgatcgagaaagcagtgattcaccaaaagcttctaggaggctacagaagcgtggtcgtgcaaaacttcaatctgtgtctaagacatctgatacacattttactgatctgttgcaacctcagcctgcttcatcgagctatggatgcctttctttgttgaagaaaaaacgttctggagggaaccggccacgtgctgttgggaaaaggactccaagagtacctgttgcaagcatgtaccatcgagatgacaggggtgcaccaaatagacaagctaaaccggatgctaatgatggtgatgatgaaggagctcatgtagctgcacttgctctggcggaggtacatcaaagaggaggctcacctcagatttcccatacacctcggagatctggtgatcatatgtttttgtctcctgctaaaagtagtggcagaaaaaacgctgattcagagatgggaagctcaaagctccatggatttcagttggatgctgattaccctgaaggtagcttgggaagtagggaagccgagactggtgattataccaaaggcacatcctatttgatagccaacaaaggatctccatctagcaagcctcagaagaaagtcaagaggcctcaaaagaggagaaaaaaagctgtacgcagaacggatgatcagtttgaggatgatagagaggcttgtagtggtactgaagaagggtgcagcatgaaaaaggcaaaagaggaaccagagctggagacattgggaaccaaaactgcatggccatctagcacatcaaataaaagaagtcgccaactcttttttgatgatgaaagtttggctctagatgcattacatactttagctgatctatctgtgaatatcctacaaccatcttctgttgttgaatctgaatcatcagcacagatcaaggatgaaaaaagggacaatgattctgatggaaagcctggtatacctgcagcagctgtatcggtgtatgagcagaaagataactccaaaagtacatcaaagaaactcaaaaggcagccagaaatggcaagcactgatatggttactaggaaaaaaggcaaacttgctaaagatactcatcctgatgggagcaccacttctgaagtaaaacagcaagcttgtacatgtggtgtgaaaacagaaaaaaagaagaaatcttccatgggaaagattttaaaagatgaaaagaaaatgccaaaagatgttgagaagactgaggtttctcctgaagaagagaagacatcttctaacaaaaccatggatatcgcagagacaactacacaagttgcaacaactctgcatgctgacttgatggcaaagggtaaaagccgtcgtaaactaggcattcaaaaatcactaactcaagaatgtaaacctgccgagggtgctggcgattctggaagtgataaattgtcttactcactaagtaatattattgatctcaaggacaaactctctcattgcttatcatcacgtttgctccgtagatggtgcatgtttgagtggttctatagtgcaattgattacccgtggtttgcaaagagtgaatttgttgagtatttgaaccatgtcaagctaggtcatgttccaagactgactcatgtcgagtggggtgtcatacgaagttctcttggaaagccccgtcgattgtcgaagcagtttttgcacgaggagagagagaagcttgcgcagtatcgtgattcagtcaggcagcattatactgaacttctatctggcgttagagaaggtctaccaaccgatcttgcgcgacctctagcagttgggcagcgtgttatagcctgccatcctagaacaagggaacttcatgatgggaatgttcttactgtcgatcataatcagtgccgggttcagtttgatcgacctgaactgggtgttgagcttgtgaaggatatcgactgcatgcccctacatcctctggaaaattttcctgaatctctcagacatcaaagtgccatcaatggatactacagccacttatcggaagcaaaatatgaggatcagatgaaagagttggctagcggaggtgcagcaagatccacatcgaatttgaatggtaccgatgcaaccttctataccccttctggtcatccgatgagtaccttaatgaagcaagcaaaggccaacacggcagttaatgaggttgcagttgcgacacaacagtcaatgtacaatcaaccatgcacactttcgcagatacaggaaagagaagctgatataagagctcttggtgagctatcacgtgctcttgataaaaaggaagctttgctggtggagttgaggcacatgaatgaagaagtgtctggaaagcagaaagatggagaaattattaaagacttggagcatttcagaaagcaatatgctatggtgcttgtgcagctaagagattctaatgatcaagtggctgcagctttgctttcgcttcgccaacgcaatacatatcatgggaattcagggcagtctaaatctatggaaaatggcatagcccttgctggagcaccagatccgtataaccttttcagttatattaatccagagtctggttctcaagtgatcgaagttatcgagacttcaaagtccagggcaaaaatgatggttgatgttgctatccaggctatgtgcaaagtgagtgaaggagagaatgctttttcaaaaataggggaagcactagatcacttgaatagccgcggtactggctctggttcaagtatacttggcataagacggatacctcccgattcaggacagtcaaatgcatcttatcatgacgactgcacagcggcccctgcagcaaacagcagttcaaggttgccgaacggctgtgattcggaagctcaatttcccaaagagttgatatcatcctgcgttgctatgatgcttatgataaagaactgcacggagaagcagtatcaccctgctgaagtcgcgcacatcctcgattcggcactgtcaagcgtacaaccgtgcagctcccagaacatcccgatcttcagagagatcgaaatgtgcatgggcatcatcaagaaccaaatgctggcgttgatacccactccaagtggctaagcttcaatcctgccgcgggtatttaactaatgtactctgaaaacgaaaaaacggatacctgtatgtgatgtgcaatattcctttttttgctgttgtctgtatgtacaaggcgtgtgttattattcattgcctgttattattatattcaactggggtaaaaaaaaatatcatgtactctgtctccctttctccctctttctcaaggatgcatttcactccatctttttatgtctaactaataactaattggtaattgctttctttgtgtaatttcattg

SEQ ID NO: 17936 - DNA, 4093 bp, Zea Mays
gcaaatttccccatttctctcccctcctctagggctctaaagcgaccgcgaactgtatctcctccctcgccatttcccaacaccctcctccatcccccctcctaggctcaccaagtcaccagtcactaccactccgccagccaggcgctccctccatttccgacgcggcgcgccgaggtctgcacggacgcgcctcggtcactccgtcttcccacctctccggtctccgctggtcgtggtctcgagttccctcgcttgcttacgggaggcaacgacacgaccccgattcgagtggcgaccgggggaaccgcgtcttcgttccgtcgggggccgcctccgggtagtattagtgattttaaatggcttcagcaagaaaagtaagaaacgcgaataagcgttatgccaaaatcaatgaagactggcaggataaagatacaccaagtgtacctaaaagtaaagtgcgaaagaaaaagttatcggacatgcttgggtctcagtggagcaaagatgagctcgagcgcttctatggtgcctacagaaaatatggaaaagattggagaaaggttgctggcactatccgcgatagaacatctgatatggtgaaggctctttacaacatgaataaggcatatttatctcttccagagggaacagcaactgctgcggggttaatcgcaatgatgaccgatcactataatattctggatggaagtaacagtgatcgagaaagcagtgattcaccaaaagcttctaggaggctacagaagcgtggtcgtgcaaaacttcaatctgtgtctaagacatctgatacacattttactgatctgttgcaacctcagcctgcttcatcgagctatggatgcctttctttgttgaagaaaaaacgttctggagacctatttgtagggaaccggccacgtgctgttgggaaaaggactccaagagtacctgttgcaagcatgtaccatcgagatgacaggggtgcaccaaatagacaagctaaaccggatgctaatgatggtgatgatgaaggagctcatgtagctgcacttgctctggcggaggtacatcaaagaggaggctcacctcagatttcccatacacctcggagatctggtgatcatatgtttttgtctcctgctaaaagtagtggcagaaaaaacgctgattcagagatgggaagctcaaagctccatggatttcagttggatgctgattaccctgaaggtagcttgggaagtagggaagccgagactggtgattataccaaaggcacatcctatttgatagccaacaaaggatctccatctagcaagcctcagaagaaagtcaagaggcctcaaaagaggagaaaaaaagctgtacgcagaacggatgatcagtttgaggatgatagagaggcttgtagtggtactgaagaagggtgcagcatgaaaaaggcaaaagaggaaccagagctggagacattgggaaccaaaactgcatggccatctagcacatcaaataaaagaagtcgccaactcttttttgatgatgaaagtttggctctagatgcattacatactttagctgatctatctgtgaatatcctacaaccatcttctgttgttgaatctgaatcatcagcacagatcaaggatgaaaaaagggacaatgattctgatggaaagcctggtatacctgcagcagctgtatcggtgtatgagcagaaagataactccaaaagtacatcaaagaaactcaaaaggcagccagaaatggcaagcactgatatggttactaggaaaaaaggcaaacttgctaaagatactcatcctgatgggagcaccacttctgaagtaaaacagcaagcttgtacatgtggtgtgaaaacagaaaaaaagaagaaatcttccatgggaaagattttaaaagatgaaaagaaaatgccaaaagatgttgagaagactgaggtttctcctgaagaagagaagacatcttctaacaaaaccatggatatcgcagagacaactacacaagttgcaacaactctgcatgctgacttgatggcaaagggtaaaagccgtcgtaaactaggcattcaaaaatcactaactcaagaatgtaaacctgccgagggtgctggcgattctggaagtgataaattgtcttactcactaagtaatattattgatctcaaggacaaactctctcattgcttatcatcacgtttgctccgtagatggtgcatgtttgagtggttctatagtgcaattgattacccgtggtttgcaaagagtgaatttgttgagtatttgaaccatgtcaagctaggtcatgttccaagactgactcatgtcgagtggggtgtcatacgaagttctcttggaaagccccgtcgattgtcgaagcagtttttgcacgaggagagagagaagcttgcgcagtatcgtgattcagtcaggcagcattatactgaacttctatctggcgttagagaaggtctaccaaccgatcttgcgcgacctctagcagttgggcagcgtgttatagcctgccatcctagaacaagggaacttcatgatgggaatgttcttactgtcgatcataatcagtgccgggttcagtttgatcgacctgaactgggtgttgagcttgtgaaggatatcgactgcatgcccctacatcctctggaaaattttcctgaatctctcagacatcaaagtgccatcaatggatactacagccacttatcggaagcaaaatatgaggatcagatgaaagagttggctagcggaggtgcagcaagatccacatcgaatttgaatggtaccgatgcaaccttctataccccttctggtcatccgatgagtaccttaatgaagcaagcaaaggccaacacggcagttaatgaggttgcagttgcgacacaacagtcaatgtacaatcaaccatgcacactttcgcagatacaggaaagagaagctgatataagagctcttggtgagctatcacgtgctcttgataaaaaggaagctttgctggtggagttgaggcacatgaatgaagaagtgtctggaaagcagaaagatggagaaattattaaagacttggagcatttcagaaagcaatatgctatggtgcttgtgcagctaagagattctaatgatcaagtggctgcagctttgctttcgcttcgccaacgcaatacatatcatgggaattcagggcagtctaaatctatggaaaatggcatagcccttgctggagcaccagatccgtataaccttttcagttatattaatccagagtctggttctcaagtgatcgaagttatcgagacttcaaagtccagggcaaaaatgatggttgatgttgctatccaggctatgtgcaaagtgagtgaaggagagaatgctttttcaaaaataggggaagcactagatcacttgaatagccgcggtactggctctggttcaagtatacttggcataagacggatacctcccgattcaggacagtcaaatgcatcttatcatgacgactgcacagcggcccctgcagcaaacagcagttcaaggttgccgaacggctgtgattcggaagctcaatttcccaaagagttgatatcatcctgcgttgctatgatgcttatgataaagaactgcacggagaagcagtatcaccctgctgaagtcgcgcacatcctcgattcggcactgtcaagcgtacaaccgtgcagctcccagaacatcccgatcttcagagagatcgaaatgtgcatgggcatcatcaagaaccaaatgctggcgttgatacccactccaagtggctaagcttcaatcctgccgcgggtatttaactaatgtactctgaaaacgaaaaaacggatacctgtatgtgatgtgcaatattcctttttttgctgttgtctgtatgtacaaggcgtgtgttattattcattgcctgttattattatattcaactggggtaaaaaaaaatatcatgtactctgtctccctttctccctctttctcaaggatgcatttcactccatctttttatgtctaactaataactaattggtaattgctttctttgtgtaatttcattg

SEQ ID NO: 17937 - DNA, 720 bp, Zea Mays
ctggataaaatactcatggctcgtcagcttgctcggagatgttccccgagtatgtggtcagttggctgtctccagagcttttggagacaggaatctaaaatcactattgagatcagagcctgatataaaaatcgaagacatagatcacactgccgagctacttgttcttgcgagtgacggtctttggaaggtgatgaacaatcaagaggttgtcgatttggccaaaaggtacaaggatccctatgctgctgccaagcaattaaccgtcgaagcacaaaaaagagatagtaaggatgatatatcatgcatcgttgttcggttcaaggcgtaagtcggtctcgaaggattttcatcgagagcaaaaaaacaagtgaattaggctgcctgacgatggtagtgataatctgatggttgaataatgactggggtgttggatgtaaatgatttgtctgctccaatgtaaagttcatatataagtatgctaggattatttggtttggcgatttcaaaggtacaggtgcgagggcccgagagctactaaatagctaccatctgtaaataatggttatattggatgttgaatttgtaagagtagactgagcaaaagacatctggatagttcctaaaagaacaaggtactctttatgttcagaaagttctacaggtgtgtatgtgcttcagttagattttaaataaatcctagcaaggtggaagaggaat

SEQ ID NO: 17938 - DNA, 1406 bp, Zea Mays
cccggttgaccattccaacaggccccacccgctaacggcgacgacgactgcttccccagtgggagacctgcaatcctcagccacctgcccctccccctcccccatctccgttcacctcttcccctcttccctaccttcctgtattcgcggcgtcgagtgccgccgcccttcgccggcgccgagcacggagcaacgcaccagttcacggggcaagggtcaatagcatccggtaaagggaaaggctgtcaagggcaagtcaagatctgctatggatataaccttgtaagagggatgacgaatcatccaatggaggactatcattttgccgaacttgttgatgtcaaaggaaacgagcttggtctttttgctatttatgatggtcatttaggggataccgttcctatgtatttacagaagaatttatttacaaatattttgaatgaggaagagttttggacacacacagatagagcgattataaaagcgtatgaaaaaacagaccaagctattctgtcacatactccagatctgggacaaggtggctccactgctgtaaccgccattcttgtgaacggcaggaagttatgggtagctaatgttggcgattcaagagctgttcttttgaaaggtggtgagcccatacagatgtcgatagaccatgatccgaatgttgagcggagtgtaatcgaaaataggggtggttttgtttcaaatatgccaggagatgttccccgagtatgtggtcagttggctgtctccagagcttttggagacaggaatctaaaatcactattgagatcagagcctgatataaaaatcgaagacatagatcacactgccgagctacttgttcttgcgagtgacggtctttggaaggtgatgaacaatcaagaggttgtcgatttggccaaaaggtacaaggatccctatgctgctgccaagcaattaaccgtcgaagcacaaaaaagagatagtaaggatgatatatcatgcatcgttgttcggttcaaggcgtaagtcggtctcgaaggattttcatcgagagcaaaaaaacaagtgaattaggctgcctgacgatggtagtgataatctgatggttgaataatgactggggtgttggatgtaaatgatttgtctgctccaatgtaaagttcatatataagtatgctaggattatttggtttggcgatttcaaaggtacaggtgcgagggcccgagagctactaaatagctaccatctgtaaataatggttatattggatgttgaatttgtaagagtagactgagcaaaagacatctggatagttcctaaaagaacaaggtactctttatgttcagaaagttctacaggtgtgtatgtgcttcagttagattttaaataaatcctagcaaggtggaagaggaat

SEQ ID NO: 17939 - DNA, 3172 bp, Zea Mays
agcagatgtccgacaaggcagatccagcacacatgcttccaagcaatatggacattattgacttaagttcagatggcgagcaagagatcattgacctgtcttctgacagtgaagacaacaacactctttttcgctcttacagagaagattacgtggactatgatgatcctggtagtccttttcacctgccttttttccctcacaacacagcaccagactggaatatcatggaagaattagatgattggcgtgtgctcgcaaagaaagaatacgatgactggcttagttcaaaggcttcatcctcttatagccctgttgatgatatattaaccactgagatgaacagtaagctgccacaatctttcacctacggaggcttcattcctcaatcatgtgcacccggccattcaagtttaggtgacaacaggaccaaggaagagccctctatgacatttagtggttttcaaggatgcactgccagtggaaacggaatgccttcatctacagtgccaatagatgatatctttgtatatggaggtccacgtccacatcggatcttccctccgccaatgccatcttctgttaatgatataaaagttgaatatgacgtagaacaaaggcttttcagttctgatgagagagctgtatatgaagaagccctgaagcatatcactcaggaaacgaaggaggaagatctgcccaaaggtgttatgtcagttttactgcttaagcatcagggtcttgggaagacaatttcaacgattgcccttatacagaaggagatggttaagcagtctaggttcatgactgctggttcatacagtacaaagtttgtcccaaacagtgattatgacaatgacagtgatgttgtgattgacatggacaagaaagaaccgaaagatgaacccttgaatgagctagatggttctgcacgattgcatgtcgccagcagtcttaagctctgtgatagtaagccaaacactgctactgataaagctgaacctaagaagaaggccagagtgaggtactctgcatcaaacttgaggtcgaagactaggccagctgcaggaacattggtcgtctgccctgctagtgttcttaggcagtgggctaatgagctctctgtgaaggttatggaagacaataaattgtcagtcttggtttatcatggaagttcaaggactagagatcctaatgagttggcaacatatgatgttgttgtcaccacgtatatgactgtggcaaacgaagtacctaaagaaaattctaatgatgagcgaaagaaatgtgaaatggacggaatatgtccagaaatttccatcggcagcaaaaggaaaaagcagagcaagccaaagaagaaaaacaaacctagcaattcagaaggtggcccacttgccagggtacgatggttcagagttgtgcttgatgaagctcaaacaataaaaaattaccggactcaagtgtctagagcttgttgtggactgagggcacaaaggagatggtgcttatcaggaacacctatacaaaacaaaattgatgatctgtatagctacttctgtttcttgaagtatgaaccttactcaaaatttagtaatttcaaatatatgatcaagcaccaaattactagagattcagttcgtggctataagaaacttcaagctatcttgaggataattctactgcggcgcacaaaagaaacacttatagatggggaaccaatcttaaagctgccaccaaagacaattcagctgaataaaatagatttcacccaaaaagagcgagctttctatttgacacttgaagaaggctctcggcagaagttcaaggcatacgatgcagctgggacgataagggaaaattacgcaaacattcttgtgttattgttgcggcttaggcaggcttgtgaccaccctcttcttttgaacggacatgaatcagatctagttgacagcagttccatagaaagggcaaagcaacttcctaaggaaacagtgacaaatttgattgaaaagctggaaagaggcccggcaatttgttccatatgcaatgatccacctgaggatgctgttgtcacgacatgcggtcatgtcttctgctaccagtgtgtgcatgagaggttaacaagcgacggacatgtttgcccctatgcactctgtggaaacaagctaagttttcgatctgtttttacaccagcagtattaaaactctgtacttcgccaaagccggagtttggtgaagaaactagctgttccacagcagccgacaaaccatcctcgatctgtgaaagcagttacatctcctcgaagatccggtcagcagtggaaatacttaattcaatcatcaagacaccggcccttacagcgggggacactactgaatcgattcccagcatggcaccccctgtcaaggcaatagtcttctcccagtggactggcatgctggacctgctagagctttcactgaacagaaatggcatacagtttaggaggctggatggtgcaatgtccctcgacttgagagaaaaggaagtgaacgggtttaaaactgatcctgaggtgagagtaatgcttatgtcactgaaggctggcaatctgggtctaaacatggtagctgcttgccatgtgatcatgcttgatccgtggtggaatccttacgctgaggaccaggcggttgacagagcacacaggatcggtcagacacgtcctgttactgtttcacggttcacagttaaagacactgtggaagaccgcattttggctctgcaggagaagaagagagagatggtggaatccgcgttcggcgaggacggttccagaggcactgctaccaagctgacggtggaagatctcagatacctcttcatggtgtgatggcagcttgtgatcatccgtagggctgatggcttttgttgtgacaatcctaacaaataggctagggtagacttgatcacagtacttggcaccgcagtttgtgcaaaagtagtaggcatcttgaagctgaggtagcgtgtgtttatggtaatcccctctaatacacttcaatccatctcatatctaaccaaacaggcctttcgagttctgttgacctgtattcctgtgggatggagctcgtcctgctcggcaagctggttaatctgggagtttaaaggaacagctttaaggcttgtttggtg

SEQ ID NO: 17940 - DNA, 3284 bp, Zea Mays
agtgagatctggtcacaggtaccactgtgagctgcttgaggcttggtgtattacttgttacgagcaacaaaccatttggcaggagagagttgtgatagaatccaagtatagcagatgtccgacaaggcagatccagcacacatgcttccaagcaatatggacattattgacttaagttcagatggcgagcaagagatcattgacctgtcttctgacagtgaagacaacaacactctttttcgctcttacagagaagattacgtggactatgatgatcctggtagtccttttcacctgccttttttccctcacaacacagcaccagactggaatatcatggaagaattagatgattggcgtgtgctcgcaaagaaagaatacgatgactggcttagttcaaaggcttcatcctcttatagccctgttgatgatatattaaccactgagatgaacagtaagcagctgccacaatctttcacctacggaggcttcattcctcaatcatgtgcacccggccattcaagtttaggtgacaacaggaccaaggaagagccctctatgacatttagtggttttcaaggatgcactgccagtggaaacggaatgccttcatctacagtgccaatagatgatatctttgtatatggaggtccacgtccacatcggatcttccctccgccaatgccatcttctgttaatgatataaaagttgaatatgacgtagaacaaaggcttttcagttctgatgagagagctgtatatgaagaagccctgaagcatatcactcaggaaacgaaggaggaagatctgcccaaaggtgttatgtcagttttactgcttaagcatcagggtcttgggaagacaatttcaacgattgcccttatacagaaggagatggttaagcagtctaggttcatgactgctggttcatacagtacaaagtttgtcccaaacagtgattatgacaatgacagtgatgttgtgattgacatggacaagaaagaaccgaaagatgaacccttgaatgagctagatggttctgcacgattgcatgtcgccagcagtcttaagctctgtgatagtaagccaaacactgctactgataaagctgaacctaagaagaaggccagagtgaggtactctgcatcaaacttgaggtcgaagactaggccagctgcaggaacattggtcgtctgccctgctagtgttcttaggcagtgggctaatgagctctctgtgaaggttatggaagacaataaattgtcagtcttggtttatcatggaagttcaaggactagagatcctaatgagttggcaacatatgatgttgttgtcaccacgtatatgactgtggcaaacgaagtacctaaagaaaattctaatgatgagcgaaagaaatgtgaaatggacggaatatgtccagaaatttccatcggcagcaaaaggaaaaagcagagcaagccaaagaagaaaaacaaacctagcaattcagaaggtggcccacttgccagggtacgatggttcagagttgtgcttgatgaagctcaaacaataaaaaattaccggactcaagtgtctagagcttgttgtggactgagggcacaaaggagatggtgcttatcaggaacacctatacaaaacaaaattgatgatctgtatagctacttctgtttcttgaagtatgaaccttactcaaaatttagtaatttcaaatatatgatcaagcaccaaattactagagattcagttcgtggctataagaaacttcaagctatcttgaggataattctactgcggcgcacaaaagaaacacttatagatggggaaccaatcttaaagctgccaccaaagacaattcagctgaataaaatagatttcacccaaaaagagcgagctttctatttgacacttgaagaaggctctcggcagaagttcaaggcatacgatgcagctgggacgataagggaaaattacgcaaacattcttgtgttattgttgcggcttaggcaggcttgtgaccaccctcttcttttgaacggacatgaatcagatctagttgacagcagttccatagaaagggcaaagcaacttcctaaggaaacagtgacaaatttgattgaaaagctggaaagaggcccggcaatttgttccatatgcaatgatccacctgaggatgctgttgtcacgacatgcggtcatgtcttctgctaccagtgtgtgcatgagaggttaacaagcgacggacatgtttgcccctatgcactctgtggaaacaagctaagttttcgatctgtttttacaccagcagtattaaaactctgtacttcgccaaagccggagtttggtgaagaaactagctgttccacagcagccgacaaaccatcctcgatctgtgaaagcagttacatctcctcgaagatccggtcagcagtggaaatacttaattcaatcatcaagacaccggcccttacagcgggggacactactgaatcgattcccagcatggcaccccctgtcaaggcaatagtcttctcccagtggactggcatgctggacctgctagagctttcactgaacagaaatggcatacagtttaggaggctggatggtgcaatgtccctcgacttgagagaaaaggaagtgaacgggtttaaaactgatcctgaggtgagagtaatgcttatgtcactgaaggctggcaatctgggtctaaacatggtagctgcttgccatgtgatcatgcttgatccgtggtggaatccttacgctgaggaccaggcggttgacagagcacacaggatcggtcagacacgtcctgttactgtttcacggttcacagttaaagacactgtggaagaccgcattttggctctgcaggagaagaagagagagatggtggaatccgcgttcggcgaggacggttccagaggcactgctaccaagctgacggtggaagatctcagatacctcttcatggtgtgatggcagcttgtgatcatccgtagggctgatggcttttgttgtgacaatcctaacaaataggctagggtagacttgatcacagtacttggcaccgcagtttgtgcaaaagtagtaggcatcttgaagctgaggtagcgtgtgtttatggtaatcccctctaatacacttcaatccatctcatatctaaccaaacaggcctttcgagttctgttgacctgtattcctgtgggatggagctcgtcctgctcggcaagctggttaatctgggagtttaaaggaacagctttaaggcttgtttggtg

SEQ ID NO: 17941 - DNA, 1411 bp, Zea Mays
aaactcagaagtccgaaccggcaaagcttcggcggacccaccaggcaccagctggcaggatatattcccatgcttatcttggcgttggcggagagtggattggcacacgctttcctttcctgcagacaagctgtaaatctcgccgagctcgtcgtcggagaccaaggagaagagcaagggggggcgcagaggcagaggcttgccagcctacctagctcgtcggggccctatggagatccagcaccaccgggggctgggcaactccaaggttgtgaaggtgcagagcgaggaggcgtgggatctgttcactgatcaagcgagcaacgagggccggcccgtgggtgtccccttccttccccctccctccctcccaccctccggcctgcttcttcttctgctcttgttgaggggtctccctttgttcagttctcgaagctgcaatgatccccctgttgatgatttgggggtctcaaactcccaatcgctttcgattcggaccgttctttatccctgttgtttacagtcgtgctagaaacggtagatgcgcataccaatcgtaacgccattgcttctgtgtgagattacacgactccgaagcgacctgacctctgcagatgtggccgtgctccttgctcttcatgttcatgcagtgtacatctctctccgtttccacggcagaatcagtagaattggggggaaatagtagcctgatggcaggtgctgtattgctagtgaacagcgattctgcaccgacgggttcttctttttttttttttttttttggatccaaagagcctgacaaacctatccggctatcttgtgcaggttgttgcccatttcggggcgtcatggtgcgtgacgtccctgtccatgaactacaagtttgaggagctagcgcagacccaccccgaggtcttgttcctctacgtggacgtcgacgatgtccagagtgtttcatccaggtacggagtgaaggccatgccgacgttcttcctcatcaagagcaaggaggtggtggggaagatcgtcggggcgaacccagacgaggtgaagaagctggtggatgcttccgccgaacccttggagactcagatagtcgtggagtagtagtcgtttcagactttttttttttttgaagagtcgttcgtgtcttccgaaactgcttcgggagactgtgcgaccgtgagtgcttcttggtcagggtctggatcgtcccggactgtccagtgtcgcccgtgtgcgtgtgcgtgtgcgtgtgatgggtttctgtcgctttgtagcagtagtagcacgaaaaatttgctattttagcctttttaacgtgggctaaatgttattatgtgaccctctaaaaaaactaaaccaaacaggcctatggatccggcttttcgctcaatgatagagggtaggc

SEQ ID NO: 17942 - DNA, 1518 bp, Zea Mays
ctgcattattggacagagacgcgccttgcaactttgagctctctggcctgcccccgttccagcaagatctgtactccgtatccatcatctccttgcttagtgggcactcaaagtgttgctcaaacaaatgatgattcatcgatagtggctgaggcgacagctctccaagtttcgtctgttcgctcgtggtggaaattccgctgagcgagcgagtgaatcctcctcttcctagccccggcgtgaggagcgccggcgatgtcgaccggcggcaggaagatgaggacggcgtgcgtgaccggaggaaacgggtatatcgcctcggcgctcatcaaggtgctgctggagaagggctacgccgtcaagacgacgatgacatggagaagaactcccacctcaaggacctgcaggcgctcgggtccttggaggtcttccgcgccgacctggacgaagacggcagcttcgacgacgccgtcgccggctgcgactacgccttcctggtcgccgctccggtgaacctccacacgaagaatcccgaggaagaaatgatcgagccggccgtcaggggaactctgaacgtgatggggtcgtgcgtgaaggcgcgcacggtgaggcgcgtggtcctgacctcgtcggcggccgcggtcaccaccaggccgcagctacaaggcgacgggcacgtgctggacgaggagtcatggtccgacgtcgagtacctcagagcccacaagcctgcaggcccctgggggtacccggtgtccaaggtgctcctggagaaggaggcgagcaggttcgcggaggagcacggcatcggcctcgtcaccgtctgccccggcctcaccgtgggcgccgcgccggccccgaccgcccgcaccagcgtccccaactgcctctctcttctatccggcgacgaagccgcgttcgccgtgctggacgccatcgagagcgccaccgggtgcctgccgctggtccacgtcgacgacgtctgccgcgccgagctgttcgccgccgaggagggcgcggccgcggggaggtacgtctgctgcggcctcaacacgaccgtcgccgagctcgcgcgtttcctggcggacaagtacccgcagtacggcgtcaaaacgaacctgctctccggcgagcggcttgagaagccgagagtgtgcctgtcgtcggcgaagctggtgaaggaaggtttcgagttcaggtacaggacgctggatgacatatacgacgacatggtcgagtacggcaaggacctgggaatcctgcccgacttgtgatgctgcttgcttcctctgctctcggccggcgatcaggactggactttaaaccgtccggcaaaataagcccgtctatttatgctgctactgtgccgaaccataattggaccttcaaaaaatgtcaagaaaatttgtctatgttatgcatttttgtctactcagaaccgtttgtctgactagtaaatatggaatcgaatcctgtattagcaagcgtgacaaatatgcatcaactgttgcaagctgt

SEQ ID NO: 17943 - DNA, 576 bp, Zea Mays
tgactggcaagatttaccatttaaaaactatgcccccggagaatgaggagaattctatccgacttattacacgttctgatgccacatttgagaagtatcgtacaactgacctgttacctagggggaaacactgcatgactgttgttgatatgaggcggagcgagcgattcttgcaggaggagagagtgattctcctagaggtggaggaggatgaagtggtgatagacttcaagccaactccaagtgtcgtgtcgacctctgcctccgctccctgcacacatccctcccggtcgtcttcaaggtccagacctcctccccgctcaagttcctcatcagcacgttgcgtggtgtcatgtcgccgctttcctcagtgtccatacgcgtcgtgcgaggcatcccgcttcatctctaatcacctttatgtgcacatcgtccatatgtgacccccttctccatataatttcaacaagttttactcttttgggctccgtgtaagttcattagtaaaatctctactaattattaatgctgcaaagttaacctgtcattctgtgttatatatattttttattggta

SEQ ID NO: 17944 - DNA, 654 bp, Zea Mays
gttgaattcaggttcttgatgatgttctaatctacaaatgtgttagaagatggtcggatcctgtgtgactggcaagatttaccatttaaaaactatgcccccggagaatgaggagaattctatccgacttattacacgttctgatgccacatttgagaagtatcgtacaactgacctgttacctagggggaaacactgcatgactgttgttggtatccttgtctgatatgaggcggagcgagcgattcttgcaggaggagagagtgattctcctagaggtggaggaggatgaagtggtgatagacttcaagccaactccaagtgtcgtgtcgacctctgcctccgctccctgcacacatccctcccggtcgtcttcaaggtccagacctcctccccgctcaagttcctcatcagcacgttgcgtggtgtcatgtcgccgctttcctcagtgtccatacgcgtcgtgcgaggcatcccgcttcatctctaatcacctttatgtgcacatcgtccatatgtgacccccttctccatataatttcaacaagttttactcttttgggctccgtgtaagttcattagtaaaatctctactaattattaatgctgcaaagttaacctgtcattctgtgttatatatattttttattggta

SEQ ID NO: 17945 - DNA, 753 bp, Zea Mays
ctttcttttgaggcagtgtaaccacagatgcctttatccccttccattccgattttttgttgaattcaggttcttgatgatgttctaatctacaaatgtgttagaagatggtcggatcctgtgtgactggcaagatttaccatttaaaaactatgcccccggagaatgaggagaattctatccgacttattacacgttctgatgccacatttgagaagagccagaactgagcacctacaacccttttaagttaagcaacacaagttgaattcatgctcccatgtgggggaaacactgcatgactgttgttggtatccttgtctgatatgaggcggagcgagcgattcttgcaggaggagagagtgattctcctagaggtggaggaggatgaagtggtgatagacttcaagccaactccaagtgtcgtgtcgacctctgcctccgctccctgcacacatccctcccggtcgtcttcaaggtccagacctcctccccgctcaagttcctcatcagcacgttgcgtggtgtcatgtcgccgctttcctcagtgtccatacgcgtcgtgcgaggcatcccgcttcatctctaatcacctttatgtgcacatcgtccatatgtgacccccttctccatataatttcaacaagttttactcttttgggctccgtgtaagttcattagtaaaatctctactaattattaatgctgcaaagttaacctgtcattctgtgttatatatattttttattggta

SEQ ID NO: 17946 - DNA, 851 bp, Zea Mays
ctgacattgtgttacatagtaatacaaataactttcttttgaggcagtgtaaccacagatgcctttatccccttccattccgattttttgttgaattcaggttcttgatgatgttctaatctacaaatgtgttagaagatggtcggatcctgtgtgactggcaagatttaccatttaaaaactatgcccccggagaatgaggagaattctatccgacttattacacgttctgatgccacatttgagaagagccagaactgagcacctacaacccttttaagttaagcaacacaagttgaattcatgctcccatgtggtttgttaccaagatctgttgtatatacatatgacttatcaatgattttcatgttgttgtaactatccagtatcgtacaactgacctgttacctagggggaaacactgcatgactgttgttggtatccttgtctggaggagagagtgattctcctagaggtggaggaggatgaagtggtgatagacttcaagccaactccaagtgtcgtgtcgacctctgcctccgctccctgcacacatccctcccggtcgtcttcaaggtccagacctcctccccgctcaagttcctcatcagcacgttgcgtggtgtcatgtcgccgctttcctcagtgtccatacgcgtcgtgcgaggcatcccgcttcatctctaatcacctttatgtgcacatcgtccatatgtgacccccttctccatataatttcaacaagttttactcttttgggctccgtgtaagttcattagtaaaatctctactaattattaatgctgcaaagttaacctgtcattctgtgttatatatattttttattggta

SEQ ID NO: 17947 - DNA, 774 bp, Zea Mays
ctgacattgtgttacatagtaatacaaataactttcttttgaggcagtgtaaccacagatgcctttatccccttccattccgattttttgttgaattcaggttcttgatgatgttctaatctacaaatgtgttagaagatggtcggatcctgtgtgactggcaagatttaccatttaaaaactatgcccccggagaatgaggagaattctatccgacttattacacgttctgatgccacatttgagaagagccagaactgagcacctacaacccttttaatatcgtacaactgacctgttacctagggggaaacactgcatgactgttgttggtatccttgtctgatatgaggcggagcgagcgattcttgcaggaggagagagtgattctcctagaggtggaggaggatgaagtggtgatagacttcaagccaactccaagtgtcgtgtcgacctctgcctccgctccctgcacacatccctcccggtcgtcttcaaggtccagacctcctccccgctcaagttcctcatcagcacgttgcgtggtgtcatgtcgccgctttcctcagtgtccatacgcgtcgtgcgaggcatcccgcttcatctctaatcacctttatgtgcacatcgtccatatgtgacccccttctccatataatttcaacaagttttactcttttgggctccgtgtaagttcattagtaaaatctctactaattattaatgctgcaaagttaacctgtcattctgtgttatatatattttttattggta

SEQ ID NO: 17948 - DNA, 745 bp, Zea Mays
aagctcttacctgacattgtgttacatagtaatacaaataactttcttttgaggcagtgtaaccacagatgcctttatccccttccattccgattttttgttgaattcaggttcttgatgatgttctaatctacaaatgtgttagaagatggtcggatcctgtgtgactggcaagatttaccatttaaaaactatgcccccggagaatgaggagaattctatccgacttattacacgttctgatgccacatttgagaagagccagaactgagcacctacaacccttttaaggggaaacactgcatgactgttgttgatatgaggcggagcgagcgattcttgcaggaggagagagtgattctcctagaggtggaggaggatgaagtggtgatagacttcaagccaactccaagtgtcgtgtcgacctctgcctccgctccctgcacacatccctcccggtcgtcttcaaggtccagacctcctccccgctcaagttcctcatcagcacgttgcgtggtgtcatgtcgccgctttcctcagtgtccatacgcgtcgtgcgaggcatcccgcttcatctctaatcacctttatgtgcacatcgtccatatgtgacccccttctccatataatttcaacaagttttactcttttgggctccgtgtaagttcattagtaaaatctctactaattattaatgctgcaaagttaacctgtcattctgtgttatatatattttttattggta

SEQ ID NO: 17949 - DNA, 781 bp, Zea Mays
aagctcttacctgacattgtgttacatagtaatacaaataactttcttttgaggcagtgtaaccacagatgcctttatccccttccattccgattttttgttgaattcaggttcttgatgatgttctaatctacaaatgtgttagaagatggtcggatcctgtgtgactggcaagatttaccatttaaaaactatgcccccggagaatgaggagaattctatccgacttattacacgttctgatgccacatttgagaagagccagaactgagcacctacaacccttttaagttaagcaacacaagttgaattcatgctcccatgtgggggaaacactgcatgactgttgttgatatgaggcggagcgagcgattcttgcaggaggagagagtgattctcctagaggtggaggaggatgaagtggtgatagacttcaagccaactccaagtgtcgtgtcgacctctgcctccgctccctgcacacatccctcccggtcgtcttcaaggtccagacctcctccccgctcaagttcctcatcagcacgttgcgtggtgtcatgtcgccgctttcctcagtgtccatacgcgtcgtgcgaggcatcccgcttcatctctaatcacctttatgtgcacatcgtccatatgtgacccccttctccatataatttcaacaagttttactcttttgggctccgtgtaagttcattagtaaaatctctactaattattaatgctgcaaagttaacctgtcattctgtgttatatatattttttattggta

SEQ ID NO: 17950 - DNA, 1926 bp, Zea Mays
atgcagccggatccgggatggagcatccatgggcgtcctgaccacgccatcaatcaagcaaaaatggaaccaaagatcttcaaggacaagggtccgttgtggtgtttagaggcggaggcggtgcccggccagcatacactctggtttcacagaatgaggcacactttgctggtgactggttcgaaatttgatttctactggccaggatgtacccaatgaactcatggatctggctatgaagggttctttaaatgatgttggaagtgtagatgtcttctcttggataagctgtttggatcttcgcagtctcgctgtgctgacaaattccaccctgtccagctcaagtgatccacataatatatctttccattacttaatacctgaaggaggcaacgataagttgtcctacttcaagctaaaagtcttgctacctgattcagatctcactgttactagtcaaaagcaaatcaaggacaagctaaatgttgccactccagaaggaaattttctttggttattccacacagaattgtcaccctttcttatcgcaaaatctcagttgtcgaaaaagagattttttatatcgctgcagattccatcataaagggcaaagtcgaagatcttggtcgcatggaactaggcggttacgccattggcgctattgaagattgcagcaagcgtctcagcgattatatcagtatggatgttcttagtgccatacaaagagcgggagctgcattcagttgggtgcctaaagaaccttataacgaggatgcatgcctacttgattttgacgtgctattgatggagcctcgcaagctggagaaaaccctgattacttccatcatgtggtgggctactggatgtttgcagcaatgatgcaagatcccctctacttccattatatcactaaaagtaatgggaagctacaaggaaatttgctccagaaatttcacaaaatcaagaaacttcaagccttgaacgtggtcttcagcttcctggtcggcgagtgggaacttgatctcactgttgtgtagctgcttgctgttgtccctcttgcacagcttgggtatgtttgcaactcacagtacattttttgcatttaaatatttttcttaagagcttcgtgcatttgatttacttcaacattcatgtcatggtagtttctgaactggttgtggtgaataattttaccactgttttagacacacagcgaaccaagataaaatgtgtgcaaaactatacatgtacacaatagacacacgatgtgtgttaaaatatgtttagtttgttactaccactcataatccaataaccaaactgattagtaaaattgtgactggaataggatataaatgtacttcaacatgtggtacgataaaactctttaataggggtactgtttggtactgttttctggttattggaaaagaggtggtctgcaaacagacaaaacgtttgtcttatacagcagtagtcccataccattcctaaaattgagttagtttgttcagtttactaaaccctaaataaaaatagaatagttcccttacgcagacagaacagaccacctcttttccaataaccataaaacatgaatgttgtaaactgaacaaactgaccatgtggtagattgtatgcctttttctgttttcagttcattcctgaacaaatgtactcaattttaggaaattcatgtaaagttatgactgaaaaacaagcacttcatacagttctgctttatgcgtaaaggaacaaactattatgctttcaattaaaaaagggttctgtttttaatttgggcagtcatgctttcaattagtgtttagaaacatatactccgttcattcaagtgtagggtgttcatctgcttttagttcttcaaaacaaagcggaatcaaggtaactaaaagggtttgttaatct

SEQ ID NO: 17951 - DNA, 3250 bp, Zea Mays
atgcagccggatccgggatggagcatccatgggcgtcctgaccacgccatcaatcaagcaaaaatggaaccaaaggttcgagctccgcaggcggcaagctccttcttcatccacgccctccctccgccttgagaaccatatgtccgagctctgcaagcccccttcccccttcctgcacgccctacgttcttgattgattcctgtttgcttgtgattttgcatttcggaaatcgaatcttgtcgttcttggggatcattgggggcgattttaggatactagagtctagggctaagaaattgtatggcatcctggagtagtaggggtggagtctttaggcagatgccagaggcctattgccgggacctcgtcgagtttggcacccagtctacgccgcgagatcgaggttggacacgaggccgctacctgggctcgccgcccttgggtttcttgtcggtgctgctgctctttgggctcctctggccaaagagcttgggcatgaagcatgtgggttggatgcaggcgggttgggcgcaggtacttggggtcgaagctcatggaagatctcatcagcatcgacaagaccgtgtagcctgcctgaaagatcaaagtcggagagcatgatgtggccatcctctctcacgaggtcgttctctgtcttcaagtctctgtagaccaccctaatcacgtgcaggtactccagcgcaaggagcacttctgcctccaccatcttgctgccattccattcctattggtcacactgtcctgatctgggcaagtgcaggcttaagcatgatcacaaagagtcatacaccatgcatgtcggcatatgacagtgaattgttgacaaaaaaatattcggatacaccatgtacgtgctttaactggtttacaaagaataatttgtttatctattttctttcttcaaaggtgtatacattgataataacagtttatcaaacatcaaatactggcaatgtttaacgttgaaagatgacctatgtatcaagcaaaccaactgaacagagttttctttttggtgtgcgcaatggcaacagaagaaaaccacgtagtatagacttgataagatcatagattatctgtcaagctgcaacaaagcattacgaatgctacattctggtgtttgaaataggaaaagaaaatcttaaaatcacaacaaagttctaaagcttatccaagatctgattagattaaaatgtaaagggaactattttatactctgaaaaataactgatgaggcgtgattgttggcaccaagatgacttacattctcattgtcacaagcaatcatgtcactgaatgtggtgtaaaaggttgatgtattgattgggggaaaatgtgatcattgatctgaaacattggtttttttacttgttacagtagttcgcctattgctcattgcagatcttcaaggacaagggtccgttgtggtgtttagaggcggaggcggtgcccggccagcatacactctggtttcacagaatgaggcacactttgctggtgactggttcgaaatttgatttctactggccaggatgtacccaatgaactcatggatctggctatgaagggttctttaaatgatgttggaagtgtagatgtcttctcttggataagctgtttggatcttcgcagtctcgctgtgctgacaaattccaccctgtccagctcaagtgatccacataatatatctttccattacttaatacctgaaggaggcaacgataagttgtcctacttcaagctaaaagtcttgctacctgattcagatctcactgttactagtcaaaagcaaatcaaggacaagctaaatgttgccactccagaaggaaattttctttggttattccacacagaattgtcaccctttcttatcgcaaaatctcagttgtcgaaaaagagattttttatatcgctgcagattccatcataaagggcaaagtcgaagatcttggtcgcatggaactaggcggttacgccattggcgctattgaagattgcagcaagcgtctcagcgattatatcagtatggatgttcttagtgccatacaaagagcgggagctgcattcagttgggtgcctaaagaaccttataacgaggatgcatgcctacttgattttgacgtgctattgatggagcctcgcaagctggagaaaaccctgattacttccatcatgtggtgggctactggatgtttgcagcaatgtagagtaatgggaagctacaaggaaatttgctccagaaatttcacaaaatcaagatctgtcagaaacttcaagccttgaacgtggtcttcagcttcctggtcggcgagtgggaacttgatctcactgttgtgtagctgcttgctgttgtccctcttgcacagcttgggtatgtttgcaactcacagtacattttttgcatttaaatatttttcttaagagcttcgtgcatttgatttacttcaacattcatgtcatggtagtttctgaactggttgtggtgaataattttaccactgttttagacacacagcgaaccaagataaaatgtgtgcaaaactatacatgtacacaatagacacacgatgtgtgttaaaatatgtttagtttgttactaccactcataatccaataaccaaactgattagtaaaattgtgactggaataggatataaatgtacttcaacatgtggtacgataaaactctttaataggggtactgtttggtactgttttctggttattggaaaagaggtggtctgcaaacagacaaaacgtttgtcttatacagcagtagtcccataccattcctaaaattgagttagtttgttcagtttactaaaccctaaataaaaatagaatagttcccttacgcagacagaacagaccacctcttttccaataaccataaaacatgaatgttgtaaactgaacaaactgaccatgtggtagattgtatgcctttttctgttttcagttcattcctgaacaaatgtactcaattttaggaaattcatgtaaagttatgactgaaaaacaagcacttcatacagttctgctttatgcgtaaaggaacaaactattatgctttcaattaaaaaagggttctgtttttaatttgggcagtcatgctttcaattagtgtttagaaacatatactccgttcattcaagtgtagggtgttcatctgcttttagttcttcaaaacaaagcggaatcaaggtaactaaaagggtttgttaatct

SEQ ID NO: 17952 - DNA, 3154 bp, Zea Mays
atgcagccggatccgggatggagcatccatgggcgtcctgaccacgccatcaatcaagcaaaaatggaaccaaaggttcgagctccgcaggcggcaagctccttcttcatccacgccctccctccgccttgagaaccatatgtccgagctctgcaagcccccttcccccttcctgcacgccctacgttcttgattgattcctgtttgcttgtgattttgcatttcggaaatcgaatcttgtcgttcttggggatcattgggggcgattttaggatactagagtctagggctaagaaattgtatggcatcctggagtagtaggggtggagtctttaggcagatgccagaggcctattgccgggacctcgtcgagtttggcacccagtctacgccgcgagatcgaggttggacacgaggccgctacctgggctcgccgcccttgggtttcttgtcggtgctgctgctctttgggctcctctggccaaagagcttgggcatgaagcatgtgggttggatgcaggcgggttgggcgcaggtacttggggtcgaagctcatggaagatctcatcagcatcgacaagaccgtgtagcctgcctgaaagatcaaagtcggagagcatgatgtggccatcctctctcacgaggtcgttctctgtcttcaagtctctgtagaccaccctaatcacgtgcaggcttaagcatgatcacaaagagtcatacaccatgcatgtcggcatatgacagtgaattgttgacaaaaaaatattcggatacaccatgtacgtgctttaactggtttacaaagaataatttgtttatctattttctttcttcaaaggtgtatacattgataataacagtttatcaaacatcaaatactggcaatgtttaacgttgaaagatgacctatgtatcaagcaaaccaactgaacagagttttctttttggtgtgcgcaatggcaacagaagaaaaccacgtagtatagacttgataagatcatagattatctgtcaagctgcaacaaagcattacgaatgctacattctggtgtttgaaataggaaaagaaaatcttaaaatcacaacaaagttctaaagcttatccaagatctgattagattaaaatgtaaagggaactattttatactctgaaaaataactgatgaggcgtgattgttggcaccaagatgacttacattctcattgtcacaagcaatcatgtcactgaatgtggtgtaaaaggttgatgtattgattgggggaaaatgtgatcattgatctgaaacattggtttttttacttgttacagtagttcgcctattgctcattgcagatcttcaaggacaagggtccgttgtggtgtttagaggcggaggcggtgcccggccagcatacactctggtttcacagaatgaggcacactttgctggtgactggttcgaaatttgatttctactggccaggatgtacccaatgaactcatggatctggctatgaagggttctttaaatgatgttggaagtgtagatgtcttctcttggataagctgtttggatcttcgcagtctcgctgtgctgacaaattccaccctgtccagctcaagtgatccacataatatatctttccattacttaatacctgaaggaggcaacgataagttgtcctacttcaagctaaaagtcttgctacctgattcagatctcactgttactagtcaaaagcaaatcaaggacaagctaaatgttgccactccagaaggaaattttctttggttattccacacagaattgtcaccctttcttatcgcaaaatctcagttgtcgaaaaagagattttttatatcgctgcagattccatcataaagggcaaagtcgaagatcttggtcgcatggaactaggcggttacgccattggcgctattgaagattgcagcaagcgtctcagcgattatatcagtatggatgttcttagtgccatacaaagagcgggagctgcattcagttgggtgcctaaagaaccttataacgaggatgcatgcctacttgattttgacgtgctattgatggagcctcgcaagctggagaaaaccctgattacttccatcatgtggtgggctactggatgtttgcagcaattaatgggaagctacaaggaaatttgctccagaaatttcacaaaatcaagatctgtcagaaacttcaagccttgaacgtggtcttcagcttcctggtcggcgagtgggaacttgatctcactgttgtgtagctgcttgctgttgtccctcttgcacagcttgggtatgtttgcaactcacagtacattttttgcatttaaatatttttcttaagagcttcgtgcatttgatttacttcaacattcatgtcatggtagtttctgaactggttgtggtgaataattttaccactgttttagacacacagcgaaccaagataaaatgtgtgcaaaactatacatgtacacaatagacacacgatgtgtgttaaaatatgtttagtttgttactaccactcataatccaataaccaaactgattagtaaaattgtgactggaataggatataaatgtacttcaacatgtggtacgataaaactctttaataggggtactgtttggtactgttttctggttattggaaaagaggtggtctgcaaacagacaaaacgtttgtcttatacagcagtagtcccataccattcctaaaattgagttagtttgttcagtttactaaaccctaaataaaaatagaatagttcccttacgcagacagaacagaccacctcttttccaataaccataaaacatgaatgttgtaaactgaacaaactgaccatgtggtagattgtatgcctttttctgttttcagttcattcctgaacaaatgtactcaattttaggaaattcatgtaaagttatgactgaaaaacaagcacttcatacagttctgctttatgcgtaaaggaacaaactattatgctttcaattaaaaaagggttctgtttttaatttgggcagtcatgctttcaattagtgtttagaaacatatactccgttcattcaagtgtagggtgttcatctgcttttagttcttcaaaacaaagcggaatcaaggtaactaaaagggtttgttaatct

SEQ ID NO: 17953 - DNA, 3452 bp, Zea Mays
atgcagccggatccgggatggagcatccatgggcgtcctgaccacgccatcaatcaagcaaaaatggaaccaaaggttcgagctccgcaggcggcaagctccttcttcatccacgccctccctccgccttgagaaccatatgtccgagctctgcaagcccccttcccccttcctgcacgccctacgttcttgattgattcctgtttgcttgtgattttgcatttcggaaatcgaatcttgtcgttcttggggatcattgggggcgattttaggatactagagtctagggctaagaaattgtatggcatcctggagtagtaggggtggagtctttaggcagatgccagaggcctattgccgggacctcgtcgagtttggcacccagtctacgccgcgagatcgaggttggacacgaggccgctacctgggctcgccgcccttgggtttcttgtcggtgctgctgctctttgggctcctctggccaaagagcttgggcatgaagcatgtgggttggatgcaggcgggttgggcgcaggtacttggggtcgaagctcatggaagatctcatcagcatcgacaagaccgtgtagcctgcctgaaagatcaaagtcggagagcatgatgtggccatcctctctcacgaggtcgttctctgtcttcaagtctctgtagaccaccctaatcacgtgcaggtactccagcgcaaggagcacttctgcctccaccatcttgctgccattccattcctattggtcacactgtcctgatctgggcaagtgcaggcttaagcatgatcacaaagagtcatacaccatgcatgtcggcatatgacagtgaattgttgacaaaaaaatattcggatacaccatgtacgtgctttaactggtttacaaagaataatttgtttatctattttctttcttcaaaggtgtatacattgataataacagtttatcaaacatcaaatactggcaatgtttaacgttgaaagatgacctatgtatcaagcaaaccaactgaacagagttttctttttggtgtgcgcaatggcaacagaagaaaaccacgtagtatagacttgataagatcatagattatctgtcaagctgcaacaaagcattacgaatgctacattctggtgtttgaaataggaaaagaaaatcttaaaatcacaacaaagttctaaagcttatccaagatctgattagattaaaatgtaaagggaactattttatactctgaaaaataactgatgaggcgtgattgttggcaccaagatgacttacattctcattgtcacaagcaatcatgtcactgaatgtggtgtaaaaggttgatgtattgattgggggaaaatgtgatcattgatctgaaacattggtttttttacttgttacagtagttcgcctattgctcattgcagatcttcaaggacaagggtccgttgtggtgtttagaggcggaggcggtgcccggccagcatacactctggtttcacagaatgaggcacactttgctggtgactggttcgaaatttgatttctactggccaggatgtacccaatgaactcatggatctggctatgaagggttctttaaatgatgttggaagtgtagatgtcttctcttggataagctgtttggatcttcgcagtctcgctgtgctgacaaattccaccctgtccagctcaagtgatccacataatatatctttccattacttaatacctgaaggaggcaacgataagttgtcctacttcaagctaaaagtcttgctacctgattcagatctcactgttactagtcaaaagcaaatcaaggacaagctaaatgttgccactccagaaggaaattttctttggttattccacacagaattgtcaccctttcttatcgcaaaatctcagttgtcgaaaaagagattttttatatcgctgcagattccatcataaagggcaaagtcgaagatcttggtcgcatggaactaggcggttacgccattggcgctattgaagattgcagcaagcgtctcagcgattatatcagtatggatgttcttagtgccatacaaagagcgggagctgcattcagttgggtgcctaaagaaccttataacgaggatgcatgcctacttgattttgacgtgctattgatggagcctcgcaagctggagaaaaccctgattacttccatcatgtggtgggctactggatgtttgcagcaatgtaggtactagctcataagtttaagttatttttcgattaaaagaaccacattcttttttctgaaactattgtgttgcaggatgcaagatcccctctacttccattatatcactaaagttggttgtttgctttttaaggcttctatattattcaacaatttattctcatattatgttgttaatatattattttgttgcaatttctagagtaatgggaagctacaaggaaatttgctccagaaatttcacaaaatcaagatctgtcagaaacttcaagccttgaacgtggtcttcagcttcctggtcggcgagtgggaacttgatctcactgttgtgtagctgcttgctgttgtccctcttgcacagcttgggtatgtttgcaactcacagtacattttttgcatttaaatatttttcttaagagcttcgtgcatttgatttacttcaacattcatgtcatggtagtttctgaactggttgtggtgaataattttaccactgttttagacacacagcgaaccaagataaaatgtgtgcaaaactatacatgtacacaatagacacacgatgtgtgttaaaatatgtttagtttgttactaccactcataatccaataaccaaactgattagtaaaattgtgactggaataggatataaatgtacttcaacatgtggtacgataaaactctttaataggggtactgtttggtactgttttctggttattggaaaagaggtggtctgcaaacagacaaaacgtttgtcttatacagcagtagtcccataccattcctaaaattgagttagtttgttcagtttactaaaccctaaataaaaatagaatagttcccttacgcagacagaacagaccacctcttttccaataaccataaaacatgaatgttgtaaactgaacaaactgaccatgtggtagattgtatgcctttttctgttttcagttcattcctgaacaaatgtactcaattttaggaaattcatgtaaagttatgactgaaaaacaagcacttcatacagttctgctttatgcgtaaaggaacaaactattatgctttcaattaaaaaagggttctgtttttaatttgggcagtcatgctttcaattagtgtttagaaacatatactccgttcattcaagtgtagggtgttcatctgcttttagttcttcaaaacaaagcggaatcaaggtaactaaaagggtttgttaatct

SEQ ID NO: 17954 - DNA, 4713 bp, Zea Mays
atgcagccggatccgggatggagcatccatgggcgtcctgaccacgccatcaatcaagcaaaaatggaaccaaaggttcgagctccgcaggcggcaagctccttcttcatccacgccctccctccgccttgagaaccatatgtccgagctctgcaagcccccttcccccttcctgcacgccctacgttcttgattgattcctgtttgcttgtgattttgcatttcggaaatcgaatcttgtcgttcttggggatcattgggggcgattttaggatactagagtctagggctaagaaattgtatggcatcctggagtagtaggggtggagtctttaggcagatgccagaggcctattgccgggacctcgtcgagtttggcacccagtctacgccgcgagatcgaggttggacacgaggccgctacctgggctcgccgcccttgggtttcttgtcggtgctgctgctctttgggctcctctggccaaagagcttgggcatgaagcatgtgggttggatgcaggcgggttgggcgcaggtacttggggtcgaagctcatggaagatctcatcagcatcgacaagaccgtgtagcctgcctgaaagatcaaagtcggagagcatgatgtggccatcctctctcacgaggtcgttctctgtcttcaagtctctgtagaccaccctaatcacgtgcaggtactccagcgcaaggagcacttctgcctccaccatcttgctgccattccattcctattggtcacactgtcctgatctgggcaagtgcaggcttaagcatgatcacaaagagtcatacaccatgcatgtcggcatatgacagtgaattgttgacaaaaaaatattcggatacaccatgtacgtgctttaactggtttacaaagaataatttgtttatctattttctttcttcaaaggtgtatacattgataataacagtttatcaaacatcaaatactggcaatgtttaacgttgaaagatgacctatgtatcaagcaaaccaactgaacagagttttctttttggtgtgcgcaatggcaacagaagaaaaccacgtagtatagacttgataagatcatagattatctgtcaagctgcaacaaagcattacgaatgctacattctggtgtttgaaataggaaaagaaaatcttaaaatcacaacaaagttctaaagcttatccaagatctgattagattaaaatgtaaagggaactattttatactctgaaaaataactgatgaggcgtgattgttggcaccaagatgacttacattctcattgtcacaagcaatcatgtcactgaatgtggtgtaaaaggttgatgtattgattgggggaaaatgtgatcattgatctgaaacattggtttttttacttgttacagtagttcgcctattgctcattgcagatcttcaaggacaagggtccgttgtggtgtttagaggcggaggcggtgcccggccagcatacactctggtttcacagaatgaggcacactttgctggtgactggttcgaaatttgatttctactggccaggatgtacccaatgaactcatggatctggctatgaagggttctttaaatgatgttggaagtgtagatgtcttctcttggataagctgtttggatcttcgcagtctcgctgtgctgacaaattccaccctgtccagctcaagtgatccacataatatatctttccattacttaatacctgaaggaggcaacgataagttgtcctacttcaagctaaaagtcttgctacctgattcagatctcactgttactagtcaaaagcaaatcaaggacaagctaaatgttgccactccagaaggaaattttctttggttattccacacagaattgtcaccctttcttatcgcaaaatctcagttgtcgaaaaagagattttttatatcgctgcagattccatcataaagggcaaagtcgaagatcttggtcgcatggaactaggcggttacgccattggcgctattgaagattgcagcaagcgtctcagcgattatatcagtatggatgttcttagtgccatacaaagagcgggagctgcattcagttgggtgcctaaagaaccttataacgaggatgcatgcctacttgattttgacgtgctattgatggagcctcgcaagctggagaaaaccctgattacttccatcatgtggtgggctactggatgtttgcagcaatgtaggtactagctcataagtttaagttatttttcgattaaaagaaccacattcttttttctgaaactattgtgttgcaggatgcaagatcccctctacttccattatatcactaaagttggttgtttgctttttaaggcttctatattattcaacaatttattctcatattatgttgttaatatattattttgttgcaatttctagagtaatgggaagctacaaggaaatttgctccagaaatttcacaaaatcaagttgcagatgagctatcagttggaggtacatcaacaaatgcacacaacctggacagatgcacattcaaataacttgcaaacatagctgttcaatctttgttgtccccttgaggtcttcggcagtcagtaattcagctttttcatgatttaggttggatataataagaggttggctcttccaaagagcttgctcagtcaaaatgttctgaatcagctattcataaaaaatcatagcttgctttctattggttgtgttagcttcaaataattagttgtgcctgcatacactcatggaatctttttacatgacacaatttaagctttctatattcaagagattagttttctagggaaatatctctttatggtttcagtttttgtggttttacacatcccttaaccagaatgatttagaaatttggttgtagtttctagagaaaattctctctatagccagctttcctttttgagtcatggtttatcattaaaattttacttcacacaatggaaacctagagactaacatcaacactaagggaccaacggaaagaaaaaatgagcaaaagatagaagacaattatataccttatttttagattgatatctacagctacatagacgctagataaaaatgatgacaactttattgctattgttaagtagttaacctggatcaacatgccttgaatataagcatggtgaagcgcggctatcttgtcaaacagttatagcatgctaccgaggaaggtcgcaggtccatatgttgtcatttgtcaacattttttatttgatttggtgcctccatggtctatgtatggatgtcatatttctcatgacatgatcattgctagcttagccatattgttcatttgaccatattactcagcagttaagtctgtactattttagttattatttgttactgacacatgttattttgttacgaatctcttagttactcttttgtgtgtgtaagcttcctttctttttcttttactaggtttcaaaattcatggcatgctaatgtttgtttttagtgtcacatacttgataagttgtttgtgttgcatacctgaatgacttatgctcggtaatgtttgttgttcataagttgatgtttgagttactagacaatgttgctcgtgaggtatttaatatccccctgtatccattgacggtatactattaaacaaatgactgtttggaacagtatctaattcttgtcaccttcccataattttaacgaataacacatgaaatagatctgtcagaaacttcaagccttgaacgtggtcttcagcttcctggtcggcgagtgggaacttgatctcactgttgtgtagctgcttgctgttgtccctcttgcacagcttgggtatgtttgcaactcacagtacattttttgcatttaaatatttttcttaagagcttcgtgcatttgatttacttcaacattcatgtcatggtagtttctgaactggttgtggtgaataattttaccactgttttagacacacagcgaaccaagataaaatgtgtgcaaaactatacatgtacacaatagacacacgatgtgtgttaaaatatgtttagtttgttactaccactcataatccaataaccaaactgattagtaaaattgtgactggaataggatataaatgtacttcaacatgtggtacgataaaactctttaataggggtactgtttggtactgttttctggttattggaaaagaggtggtctgcaaacagacaaaacgtttgtcttatacagcagtagtcccataccattcctaaaattgagttagtttgttcagtttactaaaccctaaataaaaatagaatagttcccttacgcagacagaacagaccacctcttttccaataaccataaaacatgaatgttgtaaactgaacaaactgaccatgtggtagattgtatgcctttttctgttttcagttcattcctgaacaaatgtactcaattttaggaaattcatgtaaagttatgactgaaaaacaagcacttcatacagttctgctttatgcgtaaaggaacaaactattatgctttcaattaaaaaagggttctgtttttaatttgggcagtcatgctttcaattagtgtttagaaacatatactccgttcattcaagtgtagggtgttcatctgcttttagttcttcaaaacaaagcggaatcaaggtaactaaaagggtttgttaatct

SEQ ID NO: 17955 - DNA, 1512 bp, Zea Mays
gatcaatcaaagagatgacactttaatttatttggtagtacaatcaatagagacctgctacacactttgatccatactaaattaaactagaaatcattacacatatttaacaaatccttcgacaactacccaatgatgcaatccaacaaccaacaaccgtaatagttagaagctgatgatgacgatcagtagagacttgttgtgtgtcctctcaaacctattagatgaccacctcttaagtagcttattccctgatggatagatgaacctggagaatgaatccaagtcttcaaggactcattccaaaggttcatctcgagctagcaagcaagcaatgcaagctcaatctgcaatcctttttcgttgccagagctgctgcatgcatgcttagtacgtactatagttatgagagagagataaccacgcataaccatacactgctagactcactagatcagaaacgcatcgacatatgcatataatatcgtcagcagggcaggtcgatcgatctgtggtagctggctagctagctagttatatactcgttcgacgcctctgatcagagctttggcgcgctcttcgttcccagccttctcttctacctaaagctggcagcaaatgcagtactccacccgaaatcgacgggcacctcgctggctaccgcgaacgtgctcgatatcgggaccaggcacagcccccggcccttgagtgatctctcgccggcatggctgttgtcgtcctcggacctgtcaggacttgatctctgaaacgaaacgcacgcatataaagccggcatcagctttgaacagttcattcagttcagcagcaggtagtacgaacgactaccatgatccatcaaaatgaaaaggagagcatgcatgcacagtgactggtactgactactggcacggcacggcacctaccttcaggtagggcacttgatggccgttgttcttcaagtatggagcactaaggacctgcagaaaacaaggcagcacacaagacaattatgtcaatgcagctagctagctctgcgctgatcgtcgatcgaccagtccccgtctgatgattcgtgcgagccggagttctgcttcaggcttcagagatgtgttatgattaaaggtggggcggtggggggaatcatgctagtactcgtacagcaagcaaacttaccccgacctggtcgtggaggaacttgatgtactcgacggtctcatggagcaccgatgctgtatccgtctgcacgcgcgtcgagaaataagcaggttttgagagatagatgctgcattgcatatatgtgtcttttgcattgcagggatcggaagatgttagatgctgcattgctactactatatactactgcacagttccaagcactagcttagcttgtttgtataatataatatataatcagcagtagtcatcgtcaaaagctagtctcgccttcacctttccaaaaggggcgacgagttgttggagtgcagtgaccctgtcccctagcttctccttcct

SEQ ID NO: 17956 - DNA, 1436 bp, Zea Mays
cggtcacaataatgagtctacttgtcacctttcaaatcgtaataagtaggcaacaacaagtttggcttgtcaaagctctcatagatcaaatgtctactgttgcaaccacatgttttgggttcaggaacctagttcacttgcaactttatcctctgctacaaaatgcaaagcaaagtagcatgcatccaaaagtgttgcttgtagcatccacaggaacaacttcgatctgcttgctgttgacatggaatcagaagaagagaaattttcagaaaattttactctcagctatagcatgtctgctgctacttacaattggtgctcttggttgggcatgtaaaatcagaggcaaatggcacaagaagaaaatccagacgagaatgatgctagaatacttgagttctacggatgaagctgggggaaagaatatagagttcccatttattacctttgaaaacattgtcacagcaacagacaatttctctgactgtaatatacttgggaaagggggttttggcaaagtatacaagggaatgttggaaggaaccaaagaagtagccatcaagagactgagcaagagttctgggcaaggtgccgaagagttcaggaatgaagtaatcttgattgcaaagttgcagcacaagaacctagttaagcttcttggttgctgtgttcatgaagatgagaagctgttagtttatgagtacttgccgaacaaaagcttagattacttcctctttggtacattgagttttaaaactttccatttagttaacaaaatcaacaaatatacatgcatatgccttctgatatgtatgccttgtttcattttattcatattagattctgcaagaaagtcaacgcttcagtggccaacaaggttcaagataatccacggggtagctagaggaattatgtatcttcatcaagactcgagattaacaataatccatagggatctcaaagcaagcaacatcttgttagataaggacatgagcccaaaaatatcagattttggcatggctagaatattcagtagcgaccagctccatgcaaatactaaccgagttgtaggcacatatggttacatgtctcctgaatatgcaatggaaggtgccttttcagtcaagtctgacacttacagctttggtgttttaatgctggagattgtaagtggtttgaagatcagctcaccacatcttcacatggattttcctaatcttagagcatatgcatggaacatgtggaaagaagggaaaatagaagatttggtggactcatcagtcatggagaattgctcccttgatgaagtttcacaatgtgtacatataggactcttgtgtgttcaagacagtccgagcttcaggccactcatgtcggcggttgtgtccatgctggagaacaaaacgacgacacttccaactccaagtcaacctggc

SEQ ID NO: 17957 - DNA, 3058 bp, Zea Mays
ctgccaatccgacgatcagctgacacatacaaagccgctcttccccaaagagacgctcatctcggccggcggggacttcgctcttggcttcttttctcctaccagttcaagcaacaagctgtacatcgggatttggtacaacaatgtcccagagcgggagcgcacggtggtgtggatcgccaaccgtgacagcccagtcaccaccccagctacatcagtgaagctcgccgtcacaaacgattcagaactggtgctgtcagactcccaaggccacatcttttggatggcaacgagtagcacaagtggaggcgctggagcttttgcagtgctgctcaactcagggaactttgtccttcgatcgccaaacggcacggacgtatggcaaagcttcgatcacccgactgatacagtgcttccaaccatgaggagtatgataagatacaggtcacaaccggctacgggcctctttgcctggaagagccctgacgatccatcaaccggggacatctcttctggcatggatccggcctcctcaaacgttcaggtgttcatttggaatgggacattgccgtactatcgttcttctttttttaatgatgtcccagcatccggcggcacgtaccaggccaacaatacctcagtcacataccaatggatgatggtcgacacaggggatgagatctactatacgttcacagtcttagccggttctccctacatgcacttctcacttcaccacacaggcaagatgaggctcctggtctgggaaaatagcacatcatcctgggtgctgatttctgaggaacctagtgttggatgtgatctctacgcctcttgtggcccgttcggctactgcgatctcactaaggcaatgccgacatgccagtgccctgatcattttgagctggtcgacagtctcaacttctctagaggatgccagagaaaggaagagctgaaatgcggaacagagagctatttcatgaccatgcctaacatgaagattcctgacaagttcttgcacattagaaatagaaccttcgaccagtgtgcagctgagtgcgccagaaactgcacctgtatggcatacacctatgccactctaagcactgctagcactacgggcgatgcatcgaggtgtttggtctggactcaggatctcattgacatggagaaagcaagtgtttttttagagaacttgtacatccggcttggcgaatctcctgatcagaagaagagaaattttcagaaaattttactctcagctatagcatgtctgctgctacttacaattggtgctcttggttgggcatgtaaaatcagaggcaaatggcacaagaagaaaatccagacgagaatgatgctagaatacttgagttctacggatgaagctgggggaaagaatatagagttcccatttattacctttgaaaacattgtcacagcaacagacaatttctctgactgtaatatacttgggaaagggggttttggcaaagtatacaagggaatgttggaaggaaccaaagaagtagccatcaagagactgagcaagagttctgggcaaggtgccgaagagttcaggaatgaagtaatcttgattgcaaagttgcagcacaagaacctagttaagcttcttggttgctgtgttcatgaagatgagaagctgttagtttatgagtacttgccgaacaaaagcttagattacttcctctttgattctgcaagaaagtcaacgcttcagtggccaacaaggttcaagataatccacggggtagctagaggaattatgtatcttcatcaagactcgagattaacaataatccatagggatctcaaagcaagcaacatcttgttagataaggacatgagcccaaaaatatcagattttggcatggctagaatattcagtagcgaccagctccatgcaaatactaaccgagttgtaggcacatatggttacatgtctcctgaatatgcaatggaaggtgccttttcagtcaagtctgacacttacagctttggtgttttaatgctggagattgtaagtggtttgaagatcagctcaccacatcttcacatggattttcctaatcttagagcatatgcatggaacatgtggaaagaagggaaaatagaagatttggtggactcatcagtcatggagaattgctcccttgatgaagtttcacaatgtgtacatataggactcttgtgtgttcaagacagtccgagcttcaggccactcatgtcggcggttgtgtccatgctggagaacaaaacgacgacacttccaactccaagtcaacctgtatattttgcagttagggacccctaccaacctggaaaggcagttggcaacaaggagttgtctatatatgatatgagtctcactgtgccagaaggtcgttaaatgctttatttttataactgattgggatgattaattaaaccccactggcatattcattgcataactaaaactgatcgttcagcccatgtgaaggttatgtgaatggtcggtaatttgcattttgcaacagtttggtaagcctgcttatataattgtataaagacaggtgatttccttctctcagctcatgtggttgtactgtttatgtgcttattatgtggatccaatttgaccggacagattaatttctgaatgataatgttttcaaaaaaaaatgaatgacggagtagggaccttagatgcttataggttttaatttgtgcaagataaattaaagaaacataattcaccttcttttttgaacatatttatcctttcaaccttcttacatccaatttggactggatctctttacatatatgctcaagttgcagggatgctgattgtagttgtagcttgacttactgattaggaggtccttatcccgccttatatagtcaggggatgaatgtactgatcagtttatagatattatatgaaaagtacatcagatattaaatcatatctcctaatcatatctctataggacttggtcctaatggggtgtttgaatgcactagaggtctagagctaatagttagttggcta

SEQ ID NO: 17958 - DNA, 3285 bp, Zea Mays
ctgccaatccgacgatcagctgacacatacaaagccgctcttccccaaagagacgctcatctcggccggcggggacttcgctcttggcttcttttctcctaccagttcaagcaacaagctgtacatcgggatttggtacaacaatgtcccagagcgggagcgcacggtggtgtggatcgccaaccgtgacagcccagtcaccaccccagctacatcagtgaagctcgccgtcacaaacgattcagaactggtgctgtcagactcccaaggccacatcttttggatggcaacgagtagcacaagtggaggcgctggagcttttgcagtgctgctcaactcagggaactttgtccttcgatcgccaaacggcacggacgtatggcaaagcttcgatcacccgactgatacagtgcttccaaccatgaggagtatgataagatacaggtcacaaccggctacgggcctctttgcctggaagagccctgacgatccatcaaccggggacatctcttctggcatggatccggcctcctcaaacgttcaggtgttcatttggaatgggacattgccgtactatcgttcttctttttttaatgatgtcccagcatccggcggcacgtaccaggccaacaatacctcagtcacataccaatggatgatggtcgacacaggggatgagatctactatacgttcacagtcttagccggttctccctacatgcacttctcacttcaccacacaggcaagatgaggctcctggtctgggaaaatagcacatcatcctgggtgctgatttctgaggaacctagtgttggatgtgatctctacgcctcttgtggcccgttcggctactgcgatctcactaaggcaatgccgacatgccagtgccctgatcattttgagctggtcgacagtctcaacttctctagaggatgccagagaaaggaagagctgaaatgcggaacagagagctatttcatgaccatgcctaacatgaagattcctgacaagttcttgcacattagaaatagaaccttcgaccagtgtgcagctgagtgcgccagaaactgcacctgtatggcatacacctatgccactctaagcactgctagcactacgggcgatgcatcgaggtgtttggtctggactcaggatctcattgacatggagaaagcaagtgtttttttagagaacttgtacatccggcttggcgaatctcctggtacgcttgtgtctttctcttagcgtgccgtctctaagcccttgcaactcccattggtaagcctaagtttacttaaatgtatttataatgctgctttcctcaatggaaagtattttagaggtaaagtatttgcagagcagtcaggggaacaatgtgaaagtaaactcacacagttgcaaggaatgcttgatgcaataaattctaacaagatactttcttatgtacagatcagaagaagagaaattttcagaaaattttactctcagctatagcatgtctgctgctacttacaattggtgctcttggttgggcatgtaaaatcagaggcaaatggcacaagaagaaaatccagacgagaatgatgctagaatacttgagttctacggatgaagctgggggaaagaatatagagttcccatttattacctttgaaaacattgtcacagcaacagacaatttctctgactgtaatatacttgggaaagggggttttggcaaagtatacaagggaatgttggaaggaaccaaagaagtagccatcaagagactgagcaagagttctgggcaaggtgccgaagagttcaggaatgaagtaatcttgattgcaaagttgcagcacaagaacctagttaagcttcttggttgctgtgttcatgaagatgagaagctgttagtttatgagtacttgccgaacaaaagcttagattacttcctctttgattctgcaagaaagtcaacgcttcagtggccaacaaggttcaagataatccacggggtagctagaggaattatgtatcttcatcaagactcgagattaacaataatccatagggatctcaaagcaagcaacatcttgttagataaggacatgagcccaaaaatatcagattttggcatggctagaatattcagtagcgaccagctccatgcaaatactaaccgagttgtaggcacatatggttacatgtctcctgaatatgcaatggaaggtgccttttcagtcaagtctgacacttacagctttggtgttttaatgctggagattgtaagtggtttgaagatcagctcaccacatcttcacatggattttcctaatcttagagcatatgcatggaacatgtggaaagaagggaaaatagaagatttggtggactcatcagtcatggagaattgctcccttgatgaagtttcacaatgtgtacatataggactcttgtgtgttcaagacagtccgagcttcaggccactcatgtcggcggttgtgtccatgctggagaacaaaacgacgacacttccaactccaagtcaacctgtatattttgcagttagggacccctaccaacctggaaaggcagttggcaacaaggagttgtctatatatgatatgagtctcactgtgccagaaggtcgttaaatgctttatttttataactgattgggatgattaattaaaccccactggcatattcattgcataactaaaactgatcgttcagcccatgtgaaggttatgtgaatggtcggtaatttgcattttgcaacagtttggtaagcctgcttatataattgtataaagacaggtgatttccttctctcagctcatgtggttgtactgtttatgtgcttattatgtggatccaatttgaccggacagattaatttctgaatgataatgttttcaaaaaaaaatgaatgacggagtagggaccttagatgcttataggttttaatttgtgcaagataaattaaagaaacataattcaccttcttttttgaacatatttatcctttcaaccttcttacatccaatttggactggatctctttacatatatgctcaagttgcagggatgctgattgtagttgtagcttgacttactgattaggaggtccttatcccgccttatatagtcaggggatgaatgtactgatcagtttatagatattatatgaaaagtacatcagatattaaatcatatctcctaatcatatctctataggacttggtcctaatggggtgtttgaatgcactagaggtctagagctaatagttagttggcta

SEQ ID NO: 17959 - DNA, 1990 bp, Zea Mays
cggtcacaataatgagtctacttgtcacctttcaaatcgtaataagtaggcaacaacaagtttggcttgtcaaagctctcatagatcaaatgtctactgttgcaaccacatgttttgggttcaggaacctagttcacttgcaactttatcctctgctacaaaatgcaaagcaaagtagcatgcatccaaaagtgttgcttgtagcatccacaggaacaacttcgatctgcttgctgttgacatggaatcagaagaagagaaattttcagaaaattttactctcagctatagcatgtctgctgctacttacaattggtgctcttggttgggcatgtaaaatcagaggcaaatggcacaagaagaaaatccagacgagaatgatgctagaatacttgagttctacggatgaagctgggggaaagaatatagagttcccatttattacctttgaaaacattgtcacagcaacagacaatttctctgactgtaatatacttgggaaagggggttttggcaaagtatacaagggaatgttggaaggaaccaaagaagtagccatcaagagactgagcaagagttctgggcaaggtgccgaagagttcaggaatgaagtaatcttgattgcaaagttgcagcacaagaacctaattctgcaagaaagtcaacgcttcagtggccaacaaggttcaagataatccacggggtagctagaggaattatgtatcttcatcaagactcgagattaacaataatccatagggatctcaaagcaagcaacatcttgttagataaggacatgagcccaaaaatatcagattttggcatggctagaatattcagtagcgaccagctccatgcaaatactaaccgagttgtaggcacatatggttacatgtctcctgaatatgcaatggaaggtgccttttcagtcaagtctgacacttacagctttggtgttttaatgctggagattgtaagtggtttgaagatcagctcaccacatcttcacatggattttcctaatcttagagcatatgcatggaacatgtggaaagaagggaaaatagaagatttggtggactcatcagtcatggagaattgctcccttgatgaagtttcacaatgtgtacatataggactcttgtgtgttcaagacagtccgagcttcaggccactcatgtcggcggttgtgtccatgctggagaacaaaacgacgacacttccaactccaagtcaacctgtatattttgcagttagggacccctaccaacctggaaaggcagttggcaacaaggagttgtctatatatgatatgagtctcactgtgccagaaggtcgttaaatgctttatttttataactgattgggatgattaattaaaccccactggcatattcattgcataactaaaactgatcgttcagcccatgtgaaggttatgtgaatggtcggtaatttgcattttgcaacagtttggtaagcctgcttatataattgtataaagacaggtgatttccttctctcagctcatgtggttgtactgtttatgtgcttattatgtggatccaatttgaccggacagattaatttctgaatgataatgttttcaaaaaaaaatgaatgacggagtagggaccttagatgcttataggttttaatttgtgcaagataaattaaagaaacataattcaccttcttttttgaacatatttatcctttcaaccttcttacatccaatttggactggatctctttacatatatgctcaagttgcagggatgctgattgtagttgtagcttgacttactgattaggaggtccttatcccgccttatatagtcaggggatgaatgtactgatcagtttatagatattatatgaaaagtacatcagatattaaatcatatctcctaatcatatctctataggacttggtcctaatggggtgtttgaatgcactagaggtctagagctaatagttagttggcta

SEQ ID NO: 17960 - DNA, 1005 bp, Zea Mays
tggcatcaaaatacctcaaaagtcctcctgttttagagcccataatgttctgctgatcacagaacagactgaagcctgaagtggcttattgtgcctgttatgccaaaagtaaatgataactaaatgaaccaaacaatgagtggcatgcatgtgcgtgtatgtgtggttacaggtttcttctcacagaggaaaactacaccataactgatagaacagaggatcagaggaactaaggaagtggtaaattgtcaatgaaccaagccagagcaagcaagcaagtctgccatgagaaacaattaggtggtcttcgacgacatatctcggttctttgtgcaaacaacgctaatcatcaggctgggagctcagaatccaacgagaaaatacagtaatcatgtactaaactcgtgaatgaaactgaaaccctaaactgtttgcaatatattaccctgatgcacgccgttacctcctgcgagcagcgtccgccgcctgctagtggttggtggcgatagagatgcccctcttttttcaggcgagaagacggcagcggagatctggggctcaccttctggagttgttctctacgtcctgtgtatgcgctgtggtagtacggttgctccaccaccgccagttgaaggactcatgcactgagcgtaggaccaacaagcgattgacggcgtggatgatgttgaccaccgcaccgaggcgcatgatggctcggcaagctgcgacgaggtcgagcggctcgtcggcgagcgtggggtgcaggagggagcgggagcatggggaggaatactctctttgccaaatgctcatacttgcatcctaccgccggtcgtctccaccatcgtgcgacagtttcgcctttcatggggttgcatggcttctctccctgagatctcactgccgacccacgcagtggcgagtagcgtcttgttggccgcaccctagggttggtggagcctcccatcggccatctccaccatcgcacgacgacttcacctttcc

SEQ ID NO: 17961 - DNA, 6673 bp, Zea Mays
caggaggggatgagcgccggcgggggagcaatttctatgaccgtgtgggagggagaccgagcggctgcacagcgcgcgctaatactcccgcgcgcgcgcgctaaaaattgtcgcgcgcccgcctgcgcgcccgcttaggcgcctgcgcgccgcccactcgccgcctaggcgcggctgagcgccgcctagtcgccgcggtcgcctagacgccgcacaggaccctaggctacgcggcagcctatcgactagcgcctaggcgcgcctaatcgccgcctagtcggcgcctagccgaacactggtagcagctcctttttgcacaacagctcacataattgccaactacaacatgtcagcatcattaggagtaagagaatatataatccttgaacattagaccacacagatacctgatcgtccccgcggccgaaatgcaacatgttgtcttggagcatcttcagaagggggatcacgacaccatccttccatgttgccacggctgttgcggccagtgcaccgatcaaatccctcgcaaatacagtgtctcccttccataacacagagaacaacgaacggcctcaggaactagagcacccaatccacccccatcggcaaccatccctgctgcctgttgcctgccgcgtcagttccgtgcacactatcagaccccgacgcgagcgcctggacaaaggggtggtcgtgggccgggaagcgagagcctgagtgaagggcacaggtcgcgagcacggagactatcttgacgagacaggaagcgagtcgtggggcggggaggccacgaggggcgcgatatggagcggtagggcgacatctgacgggaggaggtcggggcaggaggcgatgagacgggcgagggaggccgcagcgtgcgcggcaactgcaggatgaggcgaagcgaggagggctgaggcggcgtcgtgggcggccgcgagggaggaggtcgaagacgcccccaaacacacggtgcagcagtgtggggtccgggacctaggtggtcaacgaggcgggagagcgccgtcgtggtggaggcggtggaggaaagcatggctataggcgcgacatctgacggggtcgggagtgtgtttagccggagaggatggagctagaaccttctcgttgcgtcgtgaaacggagagcggcgcgtcaccgtcgagaagcgatcagacggctgaaaattttataagcgacgtggacacattctcatgcccgttttcgatccggctttaatatataggaaataccagttgaagctattgaatcaagtggtagccaagtgcttgaacaactactcagagtcatgcttccaagatttctgaagcatgttggtttaattttatttgacgtgctatagatactttttcattaacatttttttagttcagcctttagattttttccaagcttcagcactttctttgagattacgactctagaagaatttgtgttagagcaagtaaagagtgagttggtctataagataatatactgatataggaaattgagatgaaattatatttctagaattacctctcgctttattgtaaattggacagtccattgttttaaaaagagttgaggttggtttacttcactatataatatcgttttgatgatccactagctgtgcttacccattttttaacttatattctcttgtcttttccatccgaagttaaactttaaaagcaaaccaaatgtttgggcctatttctctattaaggcaagtatatgtccatccaaactggttttttcttttgtgttatacatcaccacagctgaaagtatcactcttgactatttatttttgtttctttgtttcaataaaatttcttgctaaaatacatatccttgtatgatacaaactaactgaaatattgtttttattttttgaattttcagtctgggggagcaattcgctatacatctttgttgttttatcccggtaggtcaactttttcctattaaaaagttttgatacgtctttgttgtaaattcttcagtcggatggagacagtcatgtaatgtatgcaaagaatgtcagtaagtctatattcccctatgcacatttcgtaggtatgaaagctagctttagcggacaagtacgtgccacttgctgactaattaatcagtggtgagtaaggtcatcaatggataagttatcgtttatatattggataatttgtcaagattgctctaaaatgctgcaagtttgtgttgcggcggcgtacaattttgcttgtgcgcatgtgtagataaccatatggttcatagaaaagatgcttatggtttctgaagtgcttgcagaagcagaaaagggcgacgaaacttaatctctatatctcaggcctcatcatattgaactgtgtttttacatcgttatgttttgtgatatgtcaagcacattgtttgtacaggttgcctattgttacatgctcttggaattattacaagtctatagatctcatggggtcatctttagtggaaacatgtcatatattacttaggtagaagctagaagacttttgagcattataatttgtgttatagtttgattatgtcctatgaagtcccttgtacgatggcatgtaagagtggccactttttgttctaatgttgttttatatgaactcacagctatcaattctatattcaagtccaatccctttctacaaaatatgacgagagatgcaagaatgttggagatggggcatctaatctaacaaacaatggatgaggctactttccgtgatacccaggtatatttgtgattctattagaatgctagcaacttcatcctcgagtttggctgtgagcatttcttttttatgtttgcatgaaaatatgttagaaatttattatgccatagttaagccacaaaaaattgtatgaagaagttgttttaaaatgccattttccaaataaatacatataccatatacatcgtgagcacatctcacacctacatttatgtcagcaccccccccctgctagtttatctgcattgtattctgttctagaaagattaacagaaaaaggaaattatctacaggcctacagtctacctttgaactcaggattttactacttagccctccaaaatccagttgatcccatggtggtttatgcagaactcttttgtgtttatttcattttatggctttttgttttttttcttttagtaatttcagggcaattatatttttccaggttcacgtccatagatgtctacatattcagagaactgcaacagtgcacactcctttcaaagactgggtgcagcaaagattgttcttactgccctcagtaacattggatcgaaagctcaaaaatgatggacaaggatgttggagcagcaaaaaaaggtactgttattgtctgggaggtaacaagttggcttcaattattttttaaactgtcataaagtacatctaatcttattgttgattgcgggcttaaaactttataactcatgaaattctttgttgtattattattgctcgacataacgagaatatgattgccatccaaactaaacttgtatcagaatttgtgctttctgtttttgtataagactgccaaacattttgatttaaatatagtgctttctggttttgtataaaactgccaaatattttgatttaaagatagtgctttctggttttgtataaaactgccaaacattttgatttaaagatagatcgacttcacccaagaatgcgccctaaaaactcttcaaaatgctcgtctcagaaaaataaagaaacttaagttaattgatttaataaatggtgctccccccgttcctttttatttgttgccatttagttaaaaaatgaactagcgggctacaaatattcgagaacggaggtagtataacattttgattttaatcttagtatcttagttgttttgaagatacttcttccagtagatttgaattcgtggaccttgaatttgtttcatatgcaaacccacatgcagacccagttgttctcccaaatatctacaacacattgactgtcataactttcgtttgcaattctttttatctctacattagcctaaataaatgacaacatgctatttatttttggggtcagcgatgaaatatgcctttaggaaacacattcatgttccttagatcttgaacttagcaaaaagtggtgatgtaggactaaattgtgacctacctacaaacttttagtactgtcttttgacttctgcttatttgatgctttatacagtgtcccacccctttgctcaaccatagttgatggtgaaaaggctctaattacctttggcagttacaacgggaactacaacaacgaggtgttcagttcaaatctttgttttgaaacacaaggcaagacatttagttcaacctcgtcttcttcagtcacccgttgtagctgtcgtcgccgcttctgtgacaattggctatgttgtaattactaccacagatgagaaacccagagatattattgtgacagataattttgatatcaagagaactcaacctgcaagtaattccaaaatgatcgttgctgaaactgatgtacttactggagagaatgacatgacaaacttgccatatggtgaattggcaaagaagcttaaattagttcaagatcaactagcaccagagggttcaagatgatagaagcctgatgtgctaaacttaaacatgcagttgattctgtgaccctgaacgcttattttctggtttctttcgcttctgattacttgccttttgtcctgaacctgtcaacttagtcccaaattgctgctgcacggaagagaatgaaatctttgtggttttctttgtctaattttgtggctgcattacaatatgtcatatatagtacaacatatggttggttacttggtttaatttagtcccgtgcatgaggtgctagcgcccaatagggcgcttcctttttctagttccataaatactactgccactgcaacaatatgttgcatacgtacttttttttaagttccaggcatcattaatcaattaataacttagttaatgaaatggagattcatatatttttcttttgtttctctgtataacggatttgcacggagctgcgtttattcgtttcacatcttctaagggttcaaatgagttttgaaatcgcacgcagggcccgcggcatacactagtgtaattagggcctgttcgttttgttttaaaatccacgtggattgaggggagtactagtctaaatccatctcaatccacccccaatacccctcaattcacatggttttgggatgaaacacgatgccgctggatccagtggcggatctccgaccggggctgcctgggctgcagccccggtcgcggcccaaaaatcagtgaaatggcccatcagctccagccgcgcgaccacgtgaacagcccccggtcgcaggtctctcctcctccctctaccctcggcctccagccgccagccgcccatgccccgacgcccggagcaccgctgcaacccgcagcgtcgctcgcccggaggccggactgctagagcaccgccgcttgcctcgcccggagcaccgccacgaccacgccgctgtccagccgccgctccgtgctccctcctgctgctaattcgtggagctcaggtttgtacacacgtgctgagaagaaagtgtgcttagctattagcttgttcttgcgttggagtgatgagcctgacagccagtgatgtatggccttgccataatgccatcgagatgtgcggcgtgtgccaatgcccctccaagctttctgttggggattccttgttctgatgggagtttgggacgatgaaggaataggaggacaaaagagtttctgctaatttgtgacaaatcatgtaggaataggacgctctgtgcaaattgagaagcagaaacaacgaaggtgaagctgtgatttgtgaagtaggcaagcagtgaaggtaaaacatgtgctattatttgctttgagtttgattaagttttgatttgattatttatttggtagcaatcccatgtttataggaataaaatggataaattctcatcaagatccagaagaaagatgcttctaattctaaaacaattagggcgaataagagccgtgtagaacaaaagagaccatatatagtagccccctcttggatcaattctagatccgccactggctggatccgccctgcattttctcgcgcgctttggatccacccggcgacgccgctgatcgctcgctcccacctccgagacggaagagaccgcgggtcgcgggagcaggcagccgccttccacacgagtacacgacgaaccaaaagtacgatatcgcgagtgaaaacgtaatatactggaatacgtgttaacaaggccatgtgggttgtggcctgtgggcagtgagggccaatgcatataagccaagtgaaaatagaatcatcgaataacaacagaaaacacgaaccgtaccttgggttcctctcctctctggagattcgccattgctgtgcacacgagagtaacgcaccagccgacggcgtcgctcgtaaccccgcgcggcgtcgctcgtcaatgcaccagccgacggcgcagcgtcgctcgtaaccctaggcagaggcgcagagcgtggggtagcgggcggatgggagcttgcgggaggaacaac

SEQ ID NO: 17962 - DNA, 6580 bp, Zea Mays
caggaggggatgagcgccggcgggggagcaatttctatgaccgtgtgggagggagaccgagcggctgcacagcgcgcgctaatactcccgcgcgcgcgcgctaaaaattgtcgcgcgcccgcctgcgcgcccgcttaggcgcctgcgcgccgcccactcgccgcctaggcgcggctgagcgccgcctagtcgccgcggtcgcctagacgccgcacaggaccctaggctacgcggcagcctatcgactagcgcctaggcgcgcctaatcgccgcctagtcggcgcctagccgaacactggtagcagctcctttttgcacaacagctcacataattgccaactacaacatgtcagcatcattaggagtaagagaatatataatccttgaacattagaccacacagatacctgatcgtccccgcggccgaaatgcaacatgttgtcttggagcatcttcagaagggggatcacgacaccatccttccatgttgccacggctgttgcggccagtgcaccgatcaaatccctcgcaaatacagtgtctcccttccataacacagagaacaacgaacggcctcaggaactagagcacccaatccacccccatcggcaaccatccctgctgcctgttgcctgccgcgtcagttccgtgcacactatcagaccccgacgcgagcgcctggacaaaggggtggtcgtgggccgggaagcgagagcctgagtgaagggcacaggtcgcgagcacggagactatcttgacgagacaggaagcgagtcgtggggcggggaggccacgaggggcgcgatatggagcggtagggcgacatctgacgggaggaggtcggggcaggaggcgatgagacgggcgagggaggccgcagcgtgcgcggcaactgcaggatgaggcgaagcgaggagggctgaggcggcgtcgtgggcggccgcgagggaggaggtcgaagacgcccccaaacacacggtgcagcagtgtggggtccgggacctaggtggtcaacgaggcgggagagcgccgtcgtggtggaggcggtggaggaaagcatggctataggcgcgacatctgacggggtcgggagtgtgtttagccggagaggatggagctagaaccttctcgttgcgtcgtgaaacggagagcggcgcgtcaccgtcgagaagcgatcagacggctgaaaattttataagcgacgtggacacattctcatgcccgttttcgatccggctttaatatataggaaataccagttgaagctattgaatcaagtggtagccaagtgcttgaacaactactcagagtcatgcttccaagatttctgaagcatgttggtttaattttatttgacgtgctatagatactttttcattaacatttttttagttcagcctttagattttttccaagcttcagcactttctttgagattacgactctagaagaatttgtgttagagcaagtaaagagtgagttggtctataagataatatactgatataggaaattgagatgaaattatatttctagaattacctctcgctttattgtaaattggacagtccattgttttaaaaagagttgaggttggtttacttcactatataatatcgttttgatgatccactagctgtgcttacccattttttaacttatattctcttgtcttttccatccgaagttaaactttaaaagcaaaccaaatgtttgggcctatttctctattaaggcaagtatatgtccatccaaactggttttttcttttgtgttatacatcaccacagctgaaagtatcactcttgactatttatttttgtttctttgtttcaataaaatttcttgctaaaatacatatccttgtatgatacaaactaactgaaatattgtttttattttttgaattttcagtctgggggagcaattcgctatacatctttgttgttttatcccggtaggtcaactttttcctattaaaaagttttgatacgtctttgttgtaaattcttcagtcggatggagacagtcatgtaatgtatgcaaagaatgtcagtaagtctatattcccctatgcacatttcgtaggtatgaaagctagctttagcggacaagtacgtgccacttgctgactaattaatcagtggtgagtaaggtcatcaatggataagttatcgtttatatattggataatttgtcaagattgctctaaaatgctgcaagtttgtgttgcggcggcgtacaattttgcttgtgcgcatgtgtagataaccatatggttcatagaaaagatgcttatggtttctgaagtgcttgcagaagcagaaaagggcgacgaaacttaatctctatatctcaggcctcatcatattgaactgtgtttttacatcgttatgttttgtgatatgtcaagcacattgtttgtacaggttgcctattgttacatgctcttggaattattacaagtctatagatctcatggggtcatctttagtggaaacatgtcatatattacttaggtagaagctagaagacttttgagcattataatttgtgttatagtttgattatgtcctatgaagtcccttgtacgatggcatgtaagagtggccactttttgttctaatgttgttttatatgaactcacagctatcaattctatattcaagtccaatccctttctacaaaatatgacgagagatgcaagaatgttggagatggggcatctaatctaacaaacaatggatgaggctactttccgtgatacccaggttcacgtccatagatgtctacatattcagagaactgcaacagtgcacactcctttcaaagactgggtgcagcaaagattgttcttactgccctcagtaacattggatcgaaagctcaaaaatgatggacaaggatgttggagcagcaaaaaaaggtactgttattgtctgggaggtaacaagttggcttcaattattttttaaactgtcataaagtacatctaatcttattgttgattgcgggcttaaaactttataactcatgaaattctttgttgtattattattgctcgacataacgagaatatgattgccatccaaactaaacttgtatcagaatttgtgctttctgtttttgtataagactgccaaacattttgatttaaatatagtgctttctggttttgtataaaactgccaaatattttgatttaaagatagtgctttctggttttgtataaaactgccaaacattttgatttaaagatagatcgacttcacccaagaatgcgccctaaaaactcttcaaaatgctcgtctcagaaaaataaagaaacttaagttaattgatttaataaatggtgctccccccgttcctttttatttgttgccatttagttaaaaaatgaactagcgggctacaaatattcgagaacggaggtagtataacattttgattttaatcttagtatcttagttgttttgaagatacttcttccagtagatttgaattcgtggaccttgaatttgtttcatatgcaaacccacatgcagacccagttgttctcccaaatatctacaacacattgactgtcataactttcgtttgcaattctttttatctctacattagcctaaataaatgacaacatgctatttatttttggggtcagcgatgaaatatgcctttaggaaacacattcatgttccttagatcttgaacttagcaaaaagtggtgatgtaggactaaattgtgacctacctacaaacttttagtactgtcttttgacttctgcttatttgatgctttatacagtgtcccacccctttgctcaaccatagttgatggtgaaaaggctctaattacctttggcagttacaacgggaactacaacaacgaggtgttcagttcaagtaaatgatatttattcatattattttttctaaaatgattcatacggtgttactttagatattagatccatttttctgggattgtcttcatatatgttggcggcttgagtgcttgagtttctttcagtatctattcctgatgttaaaatcatgcttagctatccggcagaatgagcattctgctattgttgttgttttttttaaatgattcatatgttgaacataatatattagattcatttttctgtgattgccttcgtatatgttggtgacttgagtgcctgagtttctttcagttatctgtttatgatgttaaagacatatttaactatctgacagaaggagcactttgttgcagatctttgttttgaaacacaaggcaagacatttagttcaacctcgtcttcttcagtcacccgttgtagctgtcgtcgccgcttctgtgacaattggctatgttgtaattactaccacagatgagaaacccagagatattattgtgacagataattttgatatcaagagaactcaacctgcaagtaattccaaaatgatcgttgctgaaactgatgtacttactggagagaatgacatgacaaacttgccatatggtgaattggcaaagaagcttaaattagttcaagatcaactagcaccagagggttcaagatgatagaagcctgatgtgctaaacttaaacatgcagttgattctgtgaccctgaacgcttattttctggtttctttcgcttctgattacttgccttttgtcctgaacctgtcaacttagtcccaaattgctgctgcacggaagagaatgaaatctttgtggttttctttgtctaattttgtggctgcattacaatatgtcatatatagtacaacatatggttggttacttggtttaatttagtcccgtgcatgaggtgctagcgcccaatagggcgcttcctttttctagttccataaatactactgccactgcaacaatatgttgcatacgtacttttttttaagttccaggcatcattaatcaattaataacttagttaatgaaatggagattcatatatttttcttttgtttctctgtataacggatttgcacggagctgcgtttattcgtttcacatcttctaagggttcaaatgagttttgaaatcgcacgcagggcccgcggcatacactagtgtaattagggcctgttcgttttgttttaaaatccacgtggattgaggggagtactagtctaaatccatctcaatccacccccaatacccctcaattcacatggttttgggatgaaacacgatgccgctggatccagtggcggatctccgaccggggctgcctgggctgcagccccggtcgcggcccaaaaatcagtgaaatggcccatcagctccagccgcgcgaccacgtgaacagcccccggtcgcaggtctctcctcctccctctaccctcggcctccagccgccagccgcccatgccccgacgcccggagcaccgctgcaacccgcagcgtcgctcgcccggaggccggactgctagagcaccgccgcttgcctcgcccggagcaccgccacgaccacgccgctgtccagccgccgctccgtgctccctcctgctgctaattcgtggagctcaggtttgtacacacgtgctgagaagaaagtgtgcttagctattagcttgttcttgcgttggagtgatgagcctgacagccagtgatgtatggccttgccataatgccatcgagatgtgcggcgtgtgccaatgcccctccaagctttctgttggggattccttgttctgatgggagtttgggacgatgaaggaataggaggacaaaagagtttctgctaatttgtgacaaatcatgtaggaataggacgctctgtgcaaattgagaagcagaaacaacgaaggtgaagctgtgatttgtgaagtaggcaagcagtgaaggtaaaacatgtgctattatttgctttgagtttgattaagttttgatttgattatttatttggtagcaatcccatgtttataggaataaaatggataaattctcatcaagatccagaagaaagatgcttctaattctaaaacaattagggcgaataagagccgtgtagaacaaaagagaccatatatagtagccccctcttggatcaattctagatccgccactggctggatccgccctgcattttctcgcgcgctttggatccacccggcgacgccgctgatcgctcgctcccacctccgagacggaagagaccgcgggtcgcgggagcaggcagccgccttccacacgagtacacgacgaaccaaaagtacgatatcgcgagtgaaaacgtaatatactggaatacgtgttaacaaggccatgtgggttgtggcctgtgggcagtgagggccaatgcatataagccaagtgaaaatagaatcatcgaataacaacagaaaacacgaaccgtaccttgggttcctctcctctctggagattcgccattgctgtgcacacgagagtaacgcaccagccgacggcgtcgctcgtaaccccgcgcggcgtcgctcgtcaatgcaccagccgacggcgcagcgtcgctcgtaaccctaggcagaggcgcagagcgtggggtagcgggcggatgggagcttgcgggaggaacaac

SEQ ID NO: 17963 - DNA, 7031 bp, Zea Mays
caggaggggatgagcgccggcgggggagcaatttctatgaccgtgtgggagggagaccgagcggctgcacagcgcgcgctaatactcccgcgcgcgcgcgctaaaaattgtcgcgcgcccgcctgcgcgcccgcttaggcgcctgcgcgccgcccactcgccgcctaggcgcggctgagcgccgcctagtcgccgcggtcgcctagacgccgcacaggaccctaggctacgcggcagcctatcgactagcgcctaggcgcgcctaatcgccgcctagtcggcgcctagccgaacactggtagcagctcctttttgcacaacagctcacataattgccaactacaacatgtcagcatcattaggagtaagagaatatataatccttgaacattagaccacacagatacctgatcgtccccgcggccgaaatgcaacatgttgtcttggagcatcttcagaagggggatcacgacaccatccttccatgttgccacggctgttgcggccagtgcaccgatcaaatccctcgcaaatacagtgtctcccttccataacacagagaacaacgaacggcctcaggaactagagcacccaatccacccccatcggcaaccatccctgctgcctgttgcctgccgcgtcagttccgtgcacactatcagaccccgacgcgagcgcctggacaaaggggtggtcgtgggccgggaagcgagagcctgagtgaagggcacaggtcgcgagcacggagactatcttgacgagacaggaagcgagtcgtggggcggggaggccacgaggggcgcgatatggagcggtagggcgacatctgacgggaggaggtcggggcaggaggcgatgagacgggcgagggaggccgcagcgtgcgcggcaactgcaggatgaggcgaagcgaggagggctgaggcggcgtcgtgggcggccgcgagggaggaggtcgaagacgcccccaaacacacggtgcagcagtgtggggtccgggacctaggtggtcaacgaggcgggagagcgccgtcgtggtggaggcggtggaggaaagcatggctataggcgcgacatctgacggggtcgggagtgtgtttagccggagaggatggagctagaaccttctcgttgcgtcgtgaaacggagagcggcgcgtcaccgtcgagaagcgatcagacggctgaaaattttataagcgacgtggacacattctcatgcccgttttcgatccggctttaatatataggaaataccagttgaagctattgaatcaagtggtagccaagtgcttgaacaactactcagagtcatgcttccaagatttctgaagcatgttggtttaattttatttgacgtgctatagatactttttcattaacatttttttagttcagcctttagattttttccaagcttcagcactttctttgagattacgactctagaagaatttgtgttagagcaagtaaagagtgagttggtctataagataatatactgatataggaaattgagatgaaattatatttctagaattacctctcgctttattgtaaattggacagtccattgttttaaaaagagttgaggttggtttacttcactatataatatcgttttgatgatccactagctgtgcttacccattttttaacttatattctcttgtcttttccatccgaagttaaactttaaaagcaaaccaaatgtttgggcctatttctctattaaggcaagtatatgtccatccaaactggttttttcttttgtgttatacatcaccacagctgaaagtatcactcttgactatttatttttgtttctttgtttcaataaaatttcttgctaaaatacatatccttgtatgatacaaactaactgaaatattgtttttattttttgaattttcagtctgggggagcaattcgctatacatctttgttgttttatcccggtaggtcaactttttcctattaaaaagttttgatacgtctttgttgtaaattcttcagtcggatggagacagtcatgtaatgtatgcaaagaatgtcagtaagtctatattcccctatgcacatttcgtaggtatgaaagctagctttagcggacaagtacgtgccacttgctgactaattaatcagtggtgagtaaggtcatcaatggataagttatcgtttatatattggataatttgtcaagattgctctaaaatgctgcaagtttgtgttgcggcggcgtacaattttgcttgtgcgcatgtgtagataaccatatggttcatagaaaagatgcttatggtttctgaagtgcttgcagaagcagaaaagggcgacgaaacttaatctctatatctcaggcctcatcatattgaactgtgtttttacatcgttatgttttgtgatatgtcaagcacattgtttgtacaggttgcctattgttacatgctcttggaattattacaagtctatagatctcatggggtcatctttagtggaaacatgtcatatattacttaggtagaagctagaagacttttgagcattataatttgtgttatagtttgattatgtcctatgaagtcccttgtacgatggcatgtaagagtggccactttttgttctaatgttgttttatatgaactcacagctatcaattctatattcaagtccaatccctttctacaaaatatgacgagagatgcaagaatgttggagatggggcatctaatctaacaaacaatggatgaggctactttccgtgatacccaggtatatttgtgattctattagaatgctagcaacttcatcctcgagtttggctgtgagcatttcttttttatgtttgcatgaaaatatgttagaaatttattatgccatagttaagccacaaaaaattgtatgaagaagttgttttaaaatgccattttccaaataaatacatataccatatacatcgtgagcacatctcacacctacatttatgtcagcaccccccccctgctagtttatctgcattgtattctgttctagaaagattaacagaaaaaggaaattatctacaggcctacagtctacctttgaactcaggattttactacttagccctccaaaatccagttgatcccatggtggtttatgcagaactcttttgtgtttatttcattttatggctttttgttttttttcttttagtaatttcagggcaattatatttttccaggttcacgtccatagatgtctacatattcagagaactgcaacagtgcacactcctttcaaagactgggtgcagcaaagattgttcttactgccctcagtaacattggatcgaaagctcaaaaatgatggacaaggatgttggagcagcaaaaaaaggtactgttattgtctgggaggtaacaagttggcttcaattattttttaaactgtcataaagtacatctaatcttattgttgattgcgggcttaaaactttataactcatgaaattctttgttgtattattattgctcgacataacgagaatatgattgccatccaaactaaacttgtatcagaatttgtgctttctgtttttgtataagactgccaaacattttgatttaaatatagtgctttctggttttgtataaaactgccaaatattttgatttaaagatagtgctttctggttttgtataaaactgccaaacattttgatttaaagatagatcgacttcacccaagaatgcgccctaaaaactcttcaaaatgctcgtctcagaaaaataaagaaacttaagttaattgatttaataaatggtgctccccccgttcctttttatttgttgccatttagttaaaaaatgaactagcgggctacaaatattcgagaacggaggtagtataacattttgattttaatcttagtatcttagttgttttgaagatacttcttccagtagatttgaattcgtggaccttgaatttgtttcatatgcaaacccacatgcagacccagttgttctcccaaatatctacaacacattgactgtcataactttcgtttgcaattctttttatctctacattagcctaaataaatgacaacatgctatttatttttggggtcagcgatgaaatatgcctttaggaaacacattcatgttccttagatcttgaacttagcaaaaagtggtgatgtaggactaaattgtgacctacctacaaacttttagtactgtcttttgacttctgcttatttgatgctttatacagtgtcccacccctttgctcaaccatagttgatggtgaaaaggctctaattacctttggcagttacaacgggaactacaacaacgaggtgttcagttcaagtaaatgatatttattcatattattttttctaaaatgattcatacggtgttactttagatattagatccatttttctgggattgtcttcatatatgttggcggcttgagtgcttgagtttctttcagtatctattcctgatgttaaaatcatgcttagctatccggcagaatgagcattctgctattgttgttgttttttttaaatgattcatatgttgaacataatatattagattcatttttctgtgattgccttcgtatatgttggtgacttgagtgcctgagtttctttcagttatctgtttatgatgttaaagacatatttaactatctgacagaaggagcactttgttgcagatctttgttttgaaacacaaggcaagacatttagttcaacctcgtcttcttcagtcacccgttgtagctgtcgtcgccgcttctgtgacaattggctatgttgtaattactaccacagatgagaaacccagagatattattgtgacagataattttgatatcaagagaactcaacctgcaagtaattccaaaatgatcgttgctgaaactgatgtacttactggagagaatgacatgacaaacttgccatatggtgaattggcaaagaagcttaaattagttcaagatcaactagcaccagagggttcaagatgatagaagcctgatgtgctaaacttaaacatgcagttgattctgtgaccctgaacgcttattttctggtttctttcgcttctgattacttgccttttgtcctgaacctgtcaacttagtcccaaattgctgctgcacggaagagaatgaaatctttgtggttttctttgtctaattttgtggctgcattacaatatgtcatatatagtacaacatatggttggttacttggtttaatttagtcccgtgcatgaggtgctagcgcccaatagggcgcttcctttttctagttccataaatactactgccactgcaacaatatgttgcatacgtacttttttttaagttccaggcatcattaatcaattaataacttagttaatgaaatggagattcatatatttttcttttgtttctctgtataacggatttgcacggagctgcgtttattcgtttcacatcttctaagggttcaaatgagttttgaaatcgcacgcagggcccgcggcatacactagtgtaattagggcctgttcgttttgttttaaaatccacgtggattgaggggagtactagtctaaatccatctcaatccacccccaatacccctcaattcacatggttttgggatgaaacacgatgccgctggatccagtggcggatctccgaccggggctgcctgggctgcagccccggtcgcggcccaaaaatcagtgaaatggcccatcagctccagccgcgcgaccacgtgaacagcccccggtcgcaggtctctcctcctccctctaccctcggcctccagccgccagccgcccatgccccgacgcccggagcaccgctgcaacccgcagcgtcgctcgcccggaggccggactgctagagcaccgccgcttgcctcgcccggagcaccgccacgaccacgccgctgtccagccgccgctccgtgctccctcctgctgctaattcgtggagctcaggtttgtacacacgtgctgagaagaaagtgtgcttagctattagcttgttcttgcgttggagtgatgagcctgacagccagtgatgtatggccttgccataatgccatcgagatgtgcggcgtgtgccaatgcccctccaagctttctgttggggattccttgttctgatgggagtttgggacgatgaaggaataggaggacaaaagagtttctgctaatttgtgacaaatcatgtaggaataggacgctctgtgcaaattgagaagcagaaacaacgaaggtgaagctgtgatttgtgaagtaggcaagcagtgaaggtaaaacatgtgctattatttgctttgagtttgattaagttttgatttgattatttatttggtagcaatcccatgtttataggaataaaatggataaattctcatcaagatccagaagaaagatgcttctaattctaaaacaattagggcgaataagagccgtgtagaacaaaagagaccatatatagtagccccctcttggatcaattctagatccgccactggctggatccgccctgcattttctcgcgcgctttggatccacccggcgacgccgctgatcgctcgctcccacctccgagacggaagagaccgcgggtcgcgggagcaggcagccgccttccacacgagtacacgacgaaccaaaagtacgatatcgcgagtgaaaacgtaatatactggaatacgtgttaacaaggccatgtgggttgtggcctgtgggcagtgagggccaatgcatataagccaagtgaaaatagaatcatcgaataacaacagaaaacacgaaccgtaccttgggttcctctcctctctggagattcgccattgctgtgcacacgagagtaacgcaccagccgacggcgtcgctcgtaaccccgcgcggcgtcgctcgtcaatgcaccagccgacggcgcagcgtcgctcgtaaccctaggcagaggcgcagagcgtggggtagcgggcggatgggagcttgcgggaggaacaac

SEQ ID NO: 17964 - DNA, 4770 bp, Zea Mays
caggaggggatgagcgccggcgggggagcaatttctatgaccgtgtgggagggagaccgagcggctgcacagcgcgcgctaatactcccgcgcgcgcgcgctaaaaattgtcgcgcgcccgcctgcgcgcccgcttaggcgcctgcgcgccgcccactcgccgcctaggcgcggctgagcgccgcctagtcgccgcggtcgcctagacgccgcacaggaccctaggctacgcggcagcctatcgactagcgcctaggcgcgcctaatcgccgcctagtcggcgcctagccgaacactggtagcagctcctttttgcacaacagctcacataattgccaactacaacatgtcagcatcattaggagtaagagaatatataatccttgaacattagaccacacagatacctgatcgtccccgcggccgaaatgcaacatgttgtcttggagcatcttcagaagggggatcacgacaccatccttccatgttgccacggctgttgcggccagtgcaccgatcaaatccctcgcaaatacagtgtctcccttccataacacagagaacaacgaacggcctcaggaactagagcacccaatccacccccatcggcaaccatccctgctgcctgttgcctgccgcgtcagttccgtgcacactatcagaccccgacgcgagcgcctggacaaaggggtggtcgtgggccgggaagcgagagcctgagtgaagggcacaggtcgcgagcacggagactatcttgacgagacaggaagcgagtcgtggggcggggaggccacgaggggcgcgatatggagcggtagggcgacatctgacgggaggaggtcggggcaggaggcgatgagacgggcgagggaggccgcagcgtgcgcggcaactgcaggatgaggcgaagcgaggagggctgaggcggcgtcgtgggcggccgcgagggaggaggtcgaagacgcccccaaacacacggtgcagcagtgtggggtccgggacctaggtggtcaacgaggcgggagagcgccgtcgtggtggaggcggtggaggaaagcatggctataggcgcgacatctgacggggtcgggagtgtgtttagccggagaggatggagctagaaccttctcgttgcgtcgtgaaacggagagcggcgcgtcaccgtcgagaagcgatcagacggctgaaaattttataagcgacgtggacacattctcatgcccgttttcgatccggctttaatatataggaaataccagttgaagctattgaatcaagtggtagccaagtgcttgaacaactactcagagtcatgcttccaagatttctgaagcatgttggtttaattttatttgacgtgctatagatactttttcattaacatttttttagttcagcctttagattttttccaagcttcagcactttctttgagattacgactctagaagaatttgtgttagagcaagtaaagagtgagttggtctataagataatatactgatataggaaattgagatgaaattatatttctagaattacctctcgctttattgtaaattggacagtccattgttttaaaaagagttgaggttggtttacttcactatataatatcgttttgatgatccactagctgtgcttacccattttttaacttatattctcttgtcttttccatccgaagttaaactttaaaagcaaaccaaatgtttgggcctatttctctattaaggcaagtatatgtccatccaaactggttttttcttttgtgttatacatcaccacagctgaaagtatcactcttgactatttatttttgtttctttgtttcaataaaatttcttgctaaaatacatatccttgtatgatacaaactaactgaaatattgtttttattttttgaattttcagtctgggggagcaattcgctatacatctttgttgttttatcccggtaggtcaactttttcctattaaaaagttttgatacgtctttgttgtaaattcttcagtcggatggagacagtcatgtaatgtatgcaaagaatgtcagtaagtctatattcccctatgcacatttcgtaggtatgaaagctagctttagcggacaagtacgtgccacttgctgactaattaatcagtgctatcaattctatattcaagtccaatccctttctacaaaatatgacgagagatgcaagaatgttggagatggggcatctaatctaacaaacaatggatgaggctactttccgtgatacccaggttcacgtccatagatgtctacatattcagagaactgcaacagtgcacactcctttcaaagactgggtgcagcaaagattgttcttactgccctcagtaacattggatcgaaagctcaaaaatgatggacaaggatgttggagcagcaaaaaaagtgtcccacccctttgctcaaccatagttgatggtgaaaaggctctaattacctttggcagttacaacgggaactacaacaacgagtcacccgttgtagctgtcgtcgccgcttctgtgacaattggctatgttgtaattactaccacagatgagaaacccagagatattattgtgacagataattttgatatcaagagaactcaacctgcaagtaattccaaaatgatcgttgctgaaactgatgtacttactggagagaatgacatgacaaacttgccatatggtgaattggcaaagaagcttaaattagttcaagatcaactagcaccagagggttcaagatgatagaagcctgatgtgctaaacttaaacatgcagttgattctgtgaccctgaacgcttattttctggtttctttcgcttctgattacttgccttttgtcctgaacctgtcaacttagtcccaaattgctgctgcacggaagagaatgaaatctttgtggttttctttgtctaattttgtggctgcattacaatatgtcatatatagtacaacatatggttggttacttggtttaatttagtcccgtgcatgaggtgctagcgcccaatagggcgcttcctttttctagttccataaatactactgccactgcaacaatatgttgcatacgtacttttttttaagttccaggcatcattaatcaattaataacttagttaatgaaatggagattcatatatttttcttttgtttctctgtataacggatttgcacggagctgcgtttattcgtttcacatcttctaagggttcaaatgagttttgaaatcgcacgcagggcccgcggcatacactagtgtaattagggcctgttcgttttgttttaaaatccacgtggattgaggggagtactagtctaaatccatctcaatccacccccaatacccctcaattcacatggttttgggatgaaacacgatgccgctggatccagtggcggatctccgaccggggctgcctgggctgcagccccggtcgcggcccaaaaatcagtgaaatggcccatcagctccagccgcgcgaccacgtgaacagcccccggtcgcaggtctctcctcctccctctaccctcggcctccagccgccagccgcccatgccccgacgcccggagcaccgctgcaacccgcagcgtcgctcgcccggaggccggactgctagagcaccgccgcttgcctcgcccggagcaccgccacgaccacgccgctgtccagccgccgctccgtgctccctcctgctgctaattcgtggagctcaggtttgtacacacgtgctgagaagaaagtgtgcttagctattagcttgttcttgcgttggagtgatgagcctgacagccagtgatgtatggccttgccataatgccatcgagatgtgcggcgtgtgccaatgcccctccaagctttctgttggggattccttgttctgatgggagtttgggacgatgaaggaataggaggacaaaagagtttctgctaatttgtgacaaatcatgtaggaataggacgctctgtgcaaattgagaagcagaaacaacgaaggtgaagctgtgatttgtgaagtaggcaagcagtgaaggtaaaacatgtgctattatttgctttgagtttgattaagttttgatttgattatttatttggtagcaatcccatgtttataggaataaaatggataaattctcatcaagatccagaagaaagatgcttctaattctaaaacaattagggcgaataagagccgtgtagaacaaaagagaccatatatagtagccccctcttggatcaattctagatccgccactggctggatccgccctgcattttctcgcgcgctttggatccacccggcgacgccgctgatcgctcgctcccacctccgagacggaagagaccgcgggtcgcgggagcaggcagccgccttccacacgagtacacgacgaaccaaaagtacgatatcgcgagtgaaaacgtaatatactggaatacgtgttaacaaggccatgtgggttgtggcctgtgggcagtgagggccaatgcatataagccaagtgaaaatagaatcatcgaataacaacagaaaacacgaaccgtaccttgggttcctctcctctctggagattcgccattgctgtgcacacgagagtaacgcaccagccgacggcgtcgctcgtaaccccgcgcggcgtcgctcgtcaatgcaccagccgacggcgcagcgtcgctcgtaaccctaggcagaggcgcagagcgtggggtagcgggcggatgggagcttgcgggaggaacaac

SEQ ID NO: 17965 - DNA, 2916 bp, Zea Mays
actagcgtgaatgaagaacatgctcaaataagtggcaccatgaacgaagaacagattggagagtaagtgctaattacctcggccatgaaagctcgaaggatcacaaatattagtcctcgtgcctagatgaaattctgccacaaaaatatgcggacaggaaacataaaaaacataatattaacccttttacaaaacaatagtaatacaatatattcctaaagcgtgtttgaccttaggctgtaaaaaagacttacctttgcgtatgaacaaacaacatggatgttgactttaatgtgctttggctacacgtattgatctaaggaaactcacatctaaaacaacaagagaggaggaaaattgtgtggaacgagcagaaaatcgtatctaattttgcaaaggtcgaacgaagactaagagtgagaacagaaagatattaaatcagaagcagtttagtaaaacccaaacgttaaaaacaggaaacaaaactcgagaagttatgaaattaaaactagattgaggaaaactgaatttgtgttacttctctttctccaagaagtaatcgtagaagatgttatcgtcattgtaccaaaaaaaggtcatgcaacaatctacgaccagtcgaccacataagatgacagtgatctgcgaaataaaatctatagttttattaatcaggccaatcattaggaaatggagtaaaaaatgtggtctgtgtaaaattatacatagaagctgacaacgttcatattgttatacacaaaggtcaaaactcaaaagtattttagtacaggttgctgagaatggtgtgtgtgtatatatatatatatatatatatatatatacatatatatacatatatatatatatatatatatacacacacacacacttttggtaagtaaatatcttaactgacggatagggagttaactatacagaagtttacttcttttggaggagattaaagaggagacccaacctttttacctttatcagtgggagtttgatgcaactgttataaaatagaatgagtgagttgtacgtaaacgggcttaagagtttgcttcaaacctcatgattataatcactttgcgtagccttaaaatccaatgaatagagagactggtaaatgttttcctaggtgtatgtatactcagttagtaattggtgtttggaaccacaaagctttagattgaatggatatgatgggatccaagagtaagcagaacaataggacacatataagatattgcaaattagcaacatagcgcttaacgtctagtaattcattaatcagagatagtaccatacgtggaagacagtttttctattcctttttctagcgctagagcaccattcaggggaaaaacgtttttccttttgtgtttgtgaaggggagcaagcttgtggacttttttctcctgaatcacctgttgaaaacagttgaaataaggaagcagggtgtgtgactagggaaataacacatgttcttatttgggctgcaacctatactgaagaatttagcgctgctccaaaatagtgagtccacatgcgaaactaaggaggtattaatatgatccgtaaaatcaatttggtagacagttaaaaataaaaggtagtaagaatcttttttatggggtgtggtgactgcattttttaaaaaaacgaattagtgtggtaaataattttaaaccactttaaacaatgaagcgatatgttcaataaatggagaacatgtttagaaatgaaatggtagtatgaaagatgtcagactacttgcttgagcatcatatgtaggctgttaaacaaagaaagtcaccaagatgttatatagatgatatgatgaacaacaatcatataagaactttaattcaagtaattgacgaaaacaaaatcgattagttgcacctcatcaatgagtaattaaccaatggagaagttcaatattaagtcatcctaattaagtaataaaacataaaagttcatgtgtaaaacaaatatacaagataaactaatgtataatgttaatgcatcacatgaacacttataaagcaaggaatctgctcataacaattacagaatagtccacgcaccaaagaaatggtgtaatgacaccataatattacaccatgcaccacaaatgtaccaaatttcagaagatactgtgtgtagttttttaattatacgctattgcttcatacatcatgataaatcaactggggaagtatactgataggtatatatgtgatatgtcgatagaatgcatcaagtataaactaagtaacaaactctgcccaaatggataagtacattaattggattccacgatagtgttaaattttcatcaaatgataaagattccactaattaccatcctcaatccatttaaaatgttgtagagaccagcagatattatctctattaagagcggaaacaaattttctagtcttaataagaagaataacctagtgtagaggccatctgaatatctcattgactaatctgcagccattagtaaatccaatatttcattgcacaaattaagtgaaagggagaatgcagtaccatttgaccatgagctaacttcctcagtagcactaaataggcatcaaccaagaactctgcggaactaagccatatccacacttcctgaataaaaaaaagaataagtaattaaaaatcacagatgaaggtaagataattattgcgaacaacatactgcaatgtagcacatctctagatatgacatagtatataatatgagattctcaaacctacaattgttccctacctttttttttgctaaaatgtggtctatgaactaatctggactagacaataacaacgaatcactgatgaatccatcacttccatgatggaatgcacaccaaaattgctaccaggattagatcaaaa

SEQ ID NO: 17966 - DNA, 244 bp, Zea Mays
gcgaccattactacaaacagaacacaaataggccagaatcacatttcctgaaacaaggggatgcattggccgatgtgtttgtttggcacattcagagtcagaatattctttcacatgtgatagagtctttgaccatacagcttcacaggaaacaatattcaatgaaatttcagaactagtgcagagtgcacttgatggacacaaggttgtggctcatagagaagatataaaggcgcagttcaag

SEQ ID NO: 17967 - DNA, 1144 bp, Zea Mays
cgcaggtgaaggtggctaggccacgctcgtcgatggggccgcacttaacgcgagcgggtagacgaggtcgtggggggtgcgcggggtgtgggcggggacgaccgaggtggaggaaggacaaggtccgagttgaggaggaagtaaagatcagtaggcggggaggatccaacgaggggaaagacatcctcgtcaaaaacaacatggcgagagatgatgcggtgggtgaggaggtcaaggcagcggtaccccttgtggtcaggggagtaaccaaggaaaagacagtgaaaggagcgaggaaagagcttgtgaggagagatggcgggataacaggcacaaccaaagactcgaaggtgagcataggtgggagatgtgccatatagtgtgaagtgcagggtgcggtgactcaccgccttcgagggaaggcggatgaggaagtgggtggcagtgttcagggcctcttcctagtagctcgcgtgaagagacacctaaaaaaggagggaatgaatcatgttagtggtggcatgaatgatctgttcgacccagcctttctgagaagaattgtaagggcacgaaagatgcaactgaacaccatgggagtgagaaagatcgagaggcggagttgtcgaactcatggtcgttatcgcactaaagggcacgaaccaggtgacaaaactgagcgaagacctaggcaaagaagtgagggtagtaaatgtgtcagacttcaaccgcagcggtaaagtccaaggaaaatgagagaaatcatccaaaatcaccaagtagtatttatagccagaaagaataagtacaggcgatgtccataaattacaatgaataagatccaaagcttgctcagccctagaagaagaggttgcaaaagggagacgagtatggagaccaagctaacaagcatgacacagaccctcaaaatgtccgctactacaggaaatgtctgaactactggtgagcttggtcggaggtggtagaggctaggacggacggggaggacgcactagtggaggtggatggccggagcgtgtagaggggccccgagctgtcacatcgggcgagaagggtcctagtggctaggtgcttcacggacaaaccaaacgggtcaaacccaatagaacatgaattgacgatgcta

SEQ ID NO: 17968 - DNA, 737 bp, Zea Mays
aaacgggtattctaacacaaaggcagacacaatcaagaaactctggaatgcagacccgaagctccgcaaaatccacagtgtgcatatttgcttatggtcaaaccggttccggtaagacctacaccatgattagtgagagaggaggggatgacatggggataattcctcgcacacttgcgaaaatatttgagaccattgaaattcggtaatcctatggctcaaatcacaccgtaatgatttcaatgtttgaggtttataatgacaaagttcaagatttattatccccattggcacacaatgatgacttgcaatatgttgttgttaaaacaacaactgaggcacttggatatttggagaaatcattgaaaaagaggtcagtccagttatctccatttttgcatgagttggaatatttagaaaccctaaccctaatccagggctgagagaattttataggagtttggtgggctaagtccattataatagggctaattaggtaaatacagtagatccctaacctaaccctaatcaggagtttaacaccccccgcagtctcaaccctaaccctaatctagggttgggtgagtattatacagatcaataggtgggccaagcccattacataggggtagacatgtaaagacaagagggctcaagacaaaaccctaaacatgagtctaacacccccgcagtctcaactctaacctatacagatgttgagactggatcgaaactca

SEQ ID NO: 17969 - DNA, 2397 bp, Zea Mays
ctcggattggagttgtgtcacatgtggccatgttgtttgttggttaatcacttaatcctaatgagagtccaacattccttaaatccagaagcaactctacaaaggcatctccaaagagttcacagaatgctgccccaggtcctcaaggacaaccttctcagtcgggaagtaatgtttcaaagattgttcttggaactcttgtggttggtgcagcagctatgggtgcacatcaacttggttatatagatcttcaatttagggacaagaaatttccttttagcttaaagaaggaagatgtcgtaaaggtgtatgaagatctgaagattccttctgagcagaaggttgaccagacacaaaacgtgtcaggacagaacgccgagattgttcaagagaacaataatgaggctcatactccaaagggcgttctaaatgacgggatgggggcactagaggttccaatcaatgaggatcagcttgttcctgcagaagaaaagaaatcacaaaccctagcccatgagacacatccagttccagatgaacatggatctgatactaaaatgccatctgaagattctctagctgttgagatagagacagttcccatcgatgctaatgaatctagcgaagttcctcatgaacagcaaactgataggatagacagcacaattcctcctacacagtcaaccccaacaacagttagtacttatgatcaccccacagatccagatgcaccaaaggatctctcaggagctggtgctgttgagcagaaatctcttgctgagacatattttctgcaagatgaacctgatgtttcgaaagatgcaaccattaaggaaaaaagaagtgatgaagttattcgtgaaaaaacttctaaagatggtaagattgtacttgatatcattgaggctattcatgccgccgaaaagaagcaggcagatgtagatgcatacatgtattcagaagagagaagaaagttgaaggagaagtatgaaaaggagctgaaagacaccagggccagggaactgatgtatgcagaggaggcagcaattctggataaggagctaaagaaagagaaactgaagaatgctgctgcattaaaggaactgcaagaaaaagctgaacaaaaattgcaggatgagctgcagaggaaggatgaagaaacaagccaacaaattgagaaggcccaagagatagctaaagctgaacttgctgcagctgttgcaaaagagaaagcatcccagattgaacagattgctgaagcaaaccttaatgatgttatgtagcagtagcacaatgactggatgcattgatactgatatagattgatgcgctgtgtatggcattctatgcacgatctgaagaaactaggcagagtcattcagttcataagcttgctctgggcactcttgctttggaacacgctttatccagtggatcaccaatccgatcagaagtggagctattgcgtaaatctgttgaaggcatcgacaaagattcactgttagaactggctctttcatcactcccagaagatgttttagattatggatcagataccatgatggggttgaagcaaaagtttaactccttgaaggaaactatcagacacttcagccttctaccagcaggcggtggtggaatcctggcacatactgttgctcgagttgcttcttcaatcaagattaaaggcgataactctggagatggcattgagtctcttatcaacaaagtagaaaggttgattgtggatggagacttgattacagcggccgatgccttggagcaagggttacatggaactgaagcagaggagatagctaccgagtgggtgaagcaagccaggaaacgagcgatcgccgaacagacccttgctctccttcaggcgtgtgcttcttcgaccacgttctcatgattttggccagacttttttttttcttccttttgtttgcttggatttgccggtttcagtactctgtgaaaaagcttgtttttcccagaccatgttgaaaatgcgtggatggtgaacgagaaaaatcagatacaatactatagcagccagccagccactgggtctcaaagtgggggccctgcctaagtttttcatcgtgtaaacaaagctaataagttttgccctgtagctacttgctgttcgtgacattttagtgtccagttaaagcaatgtttttttaatgcaattgctgaaggattccttgcagatgtggtcatgtagcagttctacaaagggtcagtggacactgaataagtctagttacagcttgttttgttccacccagctcaactaaagtttagtttctgtcactgaatgttttaacgataattacgaatattgaatatagtctaattataaaattaattatacaaatgaaaactaaaaga

SEQ ID NO: 17970 - DNA, 2359 bp, Zea Mays
atggaatgctatataccactcggattggagttgtgtcacatgtggccatgttgtttgttggttaatcacttaatcctaatgagagtccaacattccttaaatccagaagcaactctacaaaggcatctccaaagagttcacagaatgctgccccaggtcctcaaggacaaccttctcagtcgggaagtaatgtttcaaagattgttcttggaactcttgtggttggtgcagcagctatgggtgcacatcaacttggttatatagatcttcaatttagggacaagaaatttccttttagcttaaagaaggaagatgtcgtaaaggtgtatgaagatctgaagattccttctgagcagaaggttgaccagacacaaaacgtgtcaggacagaacgccgagattgttcaagagaacaataatgaggctcatactccaaagggcgttctaaatgacgggatgggggcactagaggttccaatcaatgaggatcagcttgttcctgcagaagaaaagaaatcacaaaccctagcccatgagacacatccagttccagatgaacatggatctgatactaaaatgccatctgaagattctctagctgttgagatagagacagttcccatcgatgctaatgaatctagcgaagttcctcatgaacagcaaactgataggatagacagcacaattcctcctacacagtcaaccccaacaacagttagtacttatgatcaccccacagatccagatgcaccaaaggatctctcaggagctggtgctgttgagcagaaatctcttgctgagacatattttctgcaagatgaacctgatgtttcgaaagatgcaaccattaaggaaaaaagaagtgatgaagttattcgtgaaaaaacttctaaagatggtaagattgtacttgatatcattgaggctattcatgccgccgaaaagaagcaggcagatgtagatgcatacatgtattcagaagagagaagaaagttgaagtatgaaaaggagctgaaagacaccagggccagggaactgatgtatgcagaggaggcagcaattctggataaggagctaaagaaagagaaactgaagaatgctgctgcattaaaggaactgcaagaaaaagctgaacaaaaattgcaggatgagctgcagaggaaggatgaagaaacaagccaacaaattgagaaggcccaagagatagctaaagctgaacttgctgcagctgttgcaaaagagaaagcatcccagattgaacagattgctgaagcaaaccttaatattgatgcgctgtgtatggcattctatgcacgatctgaagaaactaggcagagtcattcagttcataagcttgctctgggcactcttgctttggaacacgctttatccagtggatcaccaatccgatcagaagtggagctattgcgtaaatctgttgaaggcatcgacaaagattcactgttagaactggctctttcatcactcccagaagatgttttagattatggatcagataccatgatggggttgaagcaaaagtttaactccttgaaggaaactatcagacacttcagccttctaccagcaggcggtggtggaatcctggcacatactgttgctcgagttgcttcttcaatcaagattaaaggcgataactctggagatggcattgagtctcttatcaacaaagtagaaaggttgattgtggatggagacttgattacagcggccgatgccttggagcaagggttacatggaactgaagcagaggagatagctaccgagtgggtgaagcaagccaggaaacgagcgatcgccgaacagacccttgctctccttcaggcgtgtgcttcttcgaccacgttctcatgattttggccagacttttttttttcttccttttgtttgcttggatttgccggtttcagtactctgtgaaaaagcttgtttttcccagaccatgttgaaaatgcgtggatggtgaacgagaaaaatcagatacaatactatagcagccagccagccactgggtctcaaagtgggggccctgcctaagtttttcatcgtgtaaacaaagctaataagttttgccctgtagctacttgctgttcgtgacattttagtgtccagttaaagcaatgtttttttaatgcaattgctgaaggattccttgcagatgtggtcatgtagcagttctacaaagggtcagtggacactgaataagtctagttacagcttgttttgttccacccagctcaactaaagtttagtttctgtcactgaatgttttaacgataattacgaatattgaatatagtctaattataaaattaattatacaaatgaaaactaaaaga

SEQ ID NO: 17971 - DNA, 2384 bp, Zea Mays
tgatacttgagctcatgcaatggaatgctatataccactcggattggagttgtgtcacatgtggccatgttgtttgttggttaatcacttaatcctaatgagagtccaacattccttaaatccagaagcaactctacaaaggcatctccaaagagttcacagaatgctgccccaggtcctcaaggacaaccttctcagtcgggaagtaatgtttcaaagattgttcttggaactcttgtggttggtgcagcagctatgggtgcacatcaacttggttatatagatcttcaatttagggacaagaaatttccttttagcttaaagaaggaagatgtcgtaaaggtgtatgaagatctgaagattccttctgagcagaaggttgaccagacacaaaacgtgtcaggacagaacgccgagattgttcaagagaacaataatgaggctcatactccaaagggcgttctaaatgacgggatgggggcactagaggttccaatcaatgaggatcagcttgttcctgcagaagaaaagaaatcacaaaccctagcccatgagacacatccagttccagatgaacatggatctgatactaaaatgccatctgaagattctctagctgttgagatagagacagttcccatcgatgctaatgaatctagcgaagttcctcatgaacagcaaactgataggatagacagcacaattcctcctacacagtcaaccccaacaacagttagtacttatgatcaccccacagatccagatgcaccaaaggatctctcaggagctggtgctgttgagcagaaatctcttgctgagacatattttctgcaagatgaacctgatgtttcgaaagatgcaaccattaaggaaaaaagaagtgatgaagttattcgtgaaaaaacttctaaagatggtaagattgtacttgatatcattgaggctattcatgccgccgaaaagaagcaggcagatgtagatgcatacatgtattcagaagagagaagaaagttgaaggagaagtatgaaaaggagctgaaagacaccagggccagggaactgatgtatgcagaggaggcagcaattctggataaggagctaaagaaagagaaactgaagaatgctgctgcattaaaggaactgcaagaaaaagctgaacaaaaattgcaggatgagctgcagaggaaggatgaagaaacaagccaacaaattgagaaggcccaagagatagctaaagctgaacttgctgcagctgttgcaaaagagaaagcatcccagattgaacagattgctgaagcaaaccttaatattgatgcgctgtgtatggcattctatgcacgatctgaagaaactaggcagagtcattcagttcataagcttgctctgggcactcttgctttggaacacgctttatccagtggatcaccaatccgatcagaagtggagctattgcgtaaatctgttgaaggcatcgacaaagattcactgttagaactggctctttcatcactcccagaagatgttttagattatggatcagataccatgatggggttgaagcaaaagtttaactccttgaaggaaactatcagacacttcagccttctaccagcaggcggtggtggaatcctggcacatactgttgctcgagttgcttcttcaatcaagattaaaggcgataactctggagatggcattgagtctcttatcaacaaagtagaaaggttgattgtggatggagacttgattacagcggccgatgccttggagcaagggttacatggaactgaagcagaggagatagctaccgagtgggtgaagcaagccaggaaacgagcgatcgccgaacagacccttgctctccttcaggcgtgtgcttcttcgaccacgttctcatgattttggccagacttttttttttcttccttttgtttgcttggatttgccggtttcagtactctgtgaaaaagcttgtttttcccagaccatgttgaaaatgcgtggatggtgaacgagaaaaatcagatacaatactatagcagccagccagccactgggtctcaaagtgggggccctgcctaagtttttcatcgtgtaaacaaagctaataagttttgccctgtagctacttgctgttcgtgacattttagtgtccagttaaagcaatgtttttttaatgcaattgctgaaggattccttgcagatgtggtcatgtagcagttctacaaagggtcagtggacactgaataagtctagttacagcttgttttgttccacccagctcaactaaagtttagtttctgtcactgaatgttttaacgataattacgaatattgaatatagtctaattataaaattaattatacaaatgaaaactaaaaga

SEQ ID NO: 17972 - DNA, 2626 bp, Zea Mays
ctgtgtaaacctatggacattttctggaattccaaggcgcctaacctttactatccctgaccttttctccgagcgttcattcaggaagctgcccggcgacgcgccgctcccccgcctcttccttgccgccgccgccgccgccgccgcagacgcgcggcacggggcggtgcccgtgcaaggcgatcggggccgtaacgctcgactgcccctccacctcctcatcctcaccccagcggtgagtagaacaaggggcggtggtcttcactgacatcgcccaccatgctgcgccggtgcatgcgggatctgcgctcgccgcggtctctcgcgagggtctccagaccgatctccgtcgagagtccaacattccttaaatccagaagcaactctacaaaggcatctccaaagagttcacagaatgctgccccaggtcctcaaggacaaccttctcagtcgggaagtaatgtttcaaagattgttcttggaactcttgtggttggtgcagcagctatgggtgcacatcaacttggttatatagatcttcaatttagggacaagaaatttccttttagcttaaagaaggaagatgtcgtaaaggtgtatgaagatctgaagattccttctgagcagaaggttgaccagacacaaaacgtgtcaggacagaacgccgagattgttcaagagaacaataatgaggctcatactccaaagggcgttctaaatgacgggatgggggcactagaggttccaatcaatgaggatcagcttgttcctgcagaagaaaagaaatcacaaaccctagcccatgagacacatccagttccagatgaacatggatctgatactaaaatgccatctgaagattctctagctgttgagatagagacagttcccatcgatgctaatgaatctagcgaagttcctcatgaacagcaaactgataggatagacagcacaattcctcctacacagtcaaccccaacaacagttagtacttatgatcaccccacagatccagatgcaccaaaggagctggtgctgttgagcagaaatctcttgctgagacatattttctgcaagatgaacctgatgtttcgaaagatgcaaccattaaggaaaaaagaagtgatgaagttattcgtgaaaaaacttctaaagatggtaagattgtacttgatatcattgaggctattcatgccgccgaaaagaagcaggcagatgtagatgcatacatgtattcagaagagagaagaaagttgaaggagaagtatgaaaaggagctgaaagacaccagggccagggaactgatgtatgcagaggaggcagcaattctggataaggagctaaagaaagagaaactgaagaatgctgctgcattaaaggaactgcaagaaaaagctgaacaaaaattgcaggatgagctgcagaggaaggatgaagaaacaagccaacaaattgagaaggcccaagagatagctaaagctgaacttgctgcagctgttgcaaaagagaaagcatcccagattgaacagattgctgaagcaaaccttaatattgatgcgctgtgtatggcattctatgcacgatctgaagaaactaggcagagtcattcagttcataagcttgctctgggcactcttgctttggaacacgctttatccagtggatcaccaatccgatcagaagtggagctattgcgtaaatctgttgaaggcatcgacaaagattcactgttagaactggctctttcatcactcccagaagatgttttagattatggatcagataccatgatggggttgaagcaaaagtttaactccttgaaggaaactatcagacacttcagccttctaccagcaggcggtggtggaatcctggcacatactgttgctcgagttgcttcttcaatcaagattaaaggcgataactctggagatggcattgagtctcttatcaacaaagtagaaaggttgattgtggatggagacttgattacagcggccgatgccttggagcaagggttacatggaactgaagcagaggagatagctaccgagtgggtgaagcaagccaggaaacgagcgatcgccgaacagacccttgctctccttcaggcgtgtgcttcttcgaccacgttctcatgattttggccagacttttttttttcttccttttgtttgcttggatttgccggtttcagtactctgtgaaaaagcttgtttttcccagaccatgttgaaaatgcgtggatggtgaacgagaaaaatcagatacaatactatagcagccagccagccactgggtctcaaagtgggggccctgcctaagtttttcatcgtgtaaacaaagctaataagttttgccctgtagctacttgctgttcgtgacattttagtgtccagttaaagcaatgtttttttaatgcaattgctgaaggattccttgcagatgtggtcatgtagcagttctacaaagggtcagtggacactgaataagtctagttacagcttgttttgttccacccagctcaactaaagtttagtttctgtcactgaatgttttaacgataattacgaatattgaatatagtctaattataaaattaattatacaaatgaaaactaaaaga

SEQ ID NO: 17973 - DNA, 2581 bp, Zea Mays
ctgtgtaaacctatggacattttctggaattccaaggcgcctaacctttactatccctgaccttttctccgagcgttcattcaggaagctgcccggcgacgcgccgctcccccgcctcttccttgccgccgccgccgccgccgccgcagacgcgcggcacggggcggtgcccgtgcaaggcgatcggggccgtaacgctcgactgcccctccacctcctcatcctcaccccagcggtgcatgcgggatctgcgctcgccgcggtctctcgcgagggtctccagaccgatctccgtcgagagtccaacattccttaaatccagaagcaactctacaaaggcatctccaaagagttcacagaatgctgccccaggtcctcaaggacaaccttctcagtcgggaagtaatgtttcaaagattgttcttggaactcttgtggttggtgcagcagctatgggtgcacatcaacttggttatatagatcttcaatttagggacaagaaatttccttttagcttaaagaaggaagatgtcgtaaaggtgtatgaagatctgaagattccttctgagcagaaggttgaccagacacaaaacgtgtcaggacagaacgccgagattgttcaagagaacaataatgaggctcatactccaaagggcgttctaaatgacgggatgggggcactagaggttccaatcaatgaggatcagcttgttcctgcagaagaaaagaaatcacaaaccctagcccatgagacacatccagttccagatgaacatggatctgatactaaaatgccatctgaagattctctagctgttgagatagagacagttcccatcgatgctaatgaatctagcgaagttcctcatgaacagcaaactgataggatagacagcacaattcctcctacacagtcaaccccaacaacagttagtacttatgatcaccccacagatccagatgcaccaaaggatctctcaggagctggtgctgttgagcagaaatctcttgctgagacatattttctgcaagatgaacctgatgtttcgaaagatgcaaccattaaggaaaaaagaagtgatgaagttattcgtgaaaaaacttctaaagatggtaagattgtacttgatatcattgaggctattcatgccgccgaaaagaagcaggcagatgtagatgcatacatgtattcagaagagagaagaaagttgaaggagaagtatgaaaaggagctgaaagacaccagggccagggaactgatgtatgcagaggaggcagcaattctggataaggagctaaagaaagagaaactgaagaatgctgctgcattaaaggaactgcaagaaaaagctgaacaaaaattgcaggatgagctgcagaggaaggatgaagaaacaagccaacaaattgagaaggcccaagagatagctaaagctgaacttgctgcagctgttgcaaaagagaaagcatcccagattgaacagattgctgaagcaaaccttaatattgatgcgctgtgtatggcattctatgcacgatctgaagaaactaggcagagtcattcagttcataagcttgctctgggcactcttgctttggaacacgctttatccagtggatcaccaatccgatcagaagtggagctattgcgtaaatctgttgaaggcatcgacaaagattcactgttagaactggctctttcatcactcccagaagatgttttagattatggatcagataccatgatggggttgaagcaaaagtttaactccttgaaggaaactatcagacacttcagccttctaccagcaggcggtggtggaatcctggcacatactgttgctcgagttgcttcttcaatcaagattaaaggcgataactctggagatggcattgagtctcttatcaacaaagtagaaaggttgattgtggatggagacttgattacagcggccgatgccttggagcaagggttacatggaactgaagcagaggagatagctaccgagtgggtgaagcaagccaggaaacgagcgatcgccgaacagacccttgctctccttcaggcgtgtgcttcttcgaccacgttctcatgattttggccagacttttttttttcttccttttgtttgcttggatttgccggtttcagtactctgtgaaaaagcttgtttttcccagaccatgttgaaaatgcgtggatggtgaacgagaaaaatcagatacaatactatagcagccagccagccactgggtctcaaagtgggggccctgcctaagtttttcatcgtgtaaacaaagctaataagttttgccctgtagctacttgctgttcgtgacattttagtgtccagttaaagcaatgtttttttaatgcaattgctgaaggattccttgcagatgtggtcatgtagcagttctacaaagggtcagtggacactgaataagtctagttacagcttgttttgttccacccagctcaactaaagtttagtttctgtcactgaatgttttaacgataattacgaatattgaatatagtctaattataaaattaattatacaaatgaaaactaaaaga

SEQ ID NO: 17974 - DNA, 2973 bp, Zea Mays
atttcctttactaacatattgcgaaattgtagctattttacagaactcgatacaaattggctgcaccaatgggccctaaattcggcgaagaaaatgcttcgctatgcggcctcaccaaaatggcccgggccagcctgcaagaaaaaacttagggttgcaagaaaaaccccagctcctttccttgtattgtcggaaatcactgtctcccctccctaccttcgcaagtttgcgcctaaaccctagctcgcttcccaatggcgccgaagaagcgcaaggccgatcccgccgagtccgccgacgctgcggaggcagccgccggcaaccaccgccaggagccagcgccctcggagcccaagccccgcgccaccatctacttccccatcaccgacgacccgccggagcccgccgccgaggaggacgaggaggatggcgctggcgaagacgaggacgacgtggaggacatcggcaagctgctcgagccactgtcgcgggagcagctcgtcgcgctgctccgcacggcggcggagacgagccccgctacgatggcggccgtgcgccgcgccgtggagtcggaccccgccagcaggaagctctttgtccacggcctcggctggggcgccagcgccgaggacctccgctccgccttctcatgcttcggcgagctcgaggactgccgcgtcatctctgacaagcagtccggcagatccaagggctatgggttcgtcctcttccgctcccgccgctctgcactccgcgccctcagccgcccccagctccaaatcgggggccgtcttgctttctgccacctcgccgcctcaggccccgcgcccccagcttctcagtctcagaaccctagctccaacccaaacaccaatgccaactctaactccaataccaccaccaatgcttctggctcatcatcgtcgcaacctgacaatatgccgcgcaagatatttgttggtaatgtgcatgctgatgtggacgtggaccgcctatataactattttgcacaattcggtgagattgaagagggtccgtttggctttgacaagaacactggcaaaccaaaaggattcgcattgtttgtttacaagtctgtggagagtgctcgccgtgctttggaggagccaatgaagaattttgatggcaagacgctcaatgtgcagaaagccatagatgggaggaccaagggctcatctggaacgaatacaaatgctaactccaatcccactactgcatctgtggctgctgctgcagctgctgcgcagatgactgctcctgccactgccgccattagcccatatgatccatcggcatatggtgccactgcggttcctgacatgagttttgcacaacaagccgctatgctgggatttggtgcacagcaacaggcattcgctcaacccaatgcaatgcttgccatgatagcggcaatgcagaacccagctgcactagggatgacaccagccatgtttgctgctatgaacccagccttcgccgctgctgctttaggtgcaggcgggcagcaggcacagacagctggtcttacgggctttggagctcagggttttgggacgcaggcatttggagctggaggtgcagttttcccaaatgcagcaggtgttcaagcagcaacagctgcatatcaaggaggtggggctcctcctggttttcaagggccacctggatttcaggttggccaagcaactacccagacaagcactgcagtggcagcagctggttatcaggctggggcagctgggcagggccaggtgcctggtgctcagattggaggcactggttttcagggtggatattgacagaactagggccctcctatctgtggtgtgccgccggactcgaagatgagcaataagcttgaacctgttgatgctggcgatgaagatgatggtgactctgggcagggtgaggagggcatctcagcgggcggagggatatgacaacctaaagggcaacgagaacaggagaagcgaagaggtgatgccaaggaaaacggtgaagaggattgaggaagaagtggaagaccaggaagatagtggcggcagcggcgacgacaatggggatggccatgacgaggagggtgtacatgaggaaggtggcgacaaagagatagatgatgatgacgacgacacactccagcccctaaagaagccgaagaagtgaagatcttcgctccgattagttaccatgtgctgaaaatttaggaagaaggagaaaattagtttattttcacctaaatttcctccgatctccaagaggatttgaatttctaaactatcctaaaatggctccacacgttcaacagcacgtgtgtgggcttgtaggagctttatgatttgaggcaattagggagattgaaattgcctttttcatcccgtatggaatcaaacgatcaatgatgcagccctggttgccttcaacttcattaatggttgccttcaacatcatggcagcttcatgtgaatcgtacgtttgtactataccttcaaatctcaactgatgtaacggaattctgacaggatacgaaaaacgctgatgcatggttagcattggaggaaaggagagtgagtaatatggagaagaaagtggatcttcggcgaagaatgttggagctaagaaagatgagcagatacgaggttaagttacattgttactcgataccgagaaactgactccgttggctcgtcgctactacatcaagaagcgaaagcagatagccgcagcggctggagttaaagttgacgatgaggagtgactgatgtgaagtactagctgttttactattgtttatccttttaccttttatttttagggctagtttggaaaccctatttttcaaagagattttcattttcctaacgtcccgtttaaatcattagaattgaatttcattctaatactagtaattttggcatatatcaattaagctaattcagttttatgcaaaatata

SEQ ID NO: 17975 - DNA, 2651 bp, Zea Mays
accacgcccaacacgcgtcataaaaaatgggtacgcatcaataaagaggagcttgggaagttgccaaggcctccgatttcgctaatgcgacggtgaaatcccgcacctacctccttcctctctctccgaggaccctcgcaccaagaactgagcgggaagagaggtagagaggcaagcgcacgagagtttctgctcctctctcgcctcgcctccgtctcctttcctctctggttctctctctgcgattctcgtcgcattggttccgttccctcacgaaaggcggtagctttctgtcttccctgatctatctagataatggcgaccacgacgtcagcgaccaccgccgccgcagcagccgccaccaccgccaagccgcgggggtcgtcgtcggccctctgccagagggtggccggcggcggcaggcggcgctccggggtggtgcggtgcgacgccgccggcgtggaggcccaggcgcaggccgtggcaaaggctgccagcgtcgccgccctcgagcagttcaagatatccgccgaccggtacatgaaggaaaggagtaccatagctgtgataggcctcagtgtacacacagcaccagtggagatgcgtgaaaaacttgctgttgcagaggaactgtggccccgtgctattcaagaactcactagcctgaaccatattgaagaggctgctgttcttagtacctgtaatagaatggaaatttatgtggtggcgctatcatggaaccgtggtatcagagaagtagtggactggatgtcgaagaaaagtggtattcccgcttccgagcttagggagcacctgttcatcttgcgaagcagtgatgccacacgccatctgtttgaggtgtcagctggccttgactctttggttctcggtgaaggacaaatccttgctcaggttaaacaagttgtgaggagtggacagaacagtggaggcttgggaaagaacatcgataggatgttcaaggatgcaatcactgctggaaagcgtgtccgcagcgagaccaacatatcatctggtgctgtttctgtcagttcagcggcggttgaactggccctgatgaagcttccgaagtctgaagcactgtcagctaggatgcttctgattggtgctggtaaaatgggaaagctagtgatcaaacatctggttgccaaaggatgcaagaaggttgttgtggtgaaccgctccgtggaaagggtggatgctattcgtgaggagatgaaagatatagagatcgtgtacaggcctctctcagacatgtatcaagctgctgctgaagctgatgtcgtgttcaccagcaccgcatctgaaacttcattgttcgcaaaagaacacgcagaggcactcccccctgtctctgatactatgggaggtgttcgcctgtttgtcgacatatctgtccccaggaatgtcagcgcatgtgtgtctgaagttggcgctgcacgagtgtacaatgtcgacgacttgaaagaggtggtggaagccaacaaggaggaccggctcaggaaagcaatggaggcgcagacaatcatcaccgaagaactgagacggttcgaggcatggagggactcgctggagaccgttccgaccatcaagaagctgaggtcgtacgcggacaggatcagggcctcggagctcgagaagtgcctgcagaaagtagcacctgaggtgcgacggcagcgacagccgcacccttgacgagacgctcgagaacatgcacgccctcaaccggatgttcagcctcgacatggagaaggcgatcatcgagcagaagatcaaggccaagctccgacgtccagaagctcccggtgtctagagcggagcggacacggcaacagaggcaatggatgagcacggggaaaaggaagagaacaagtctcaagattcggctttggcggcggagcagcgcgaggagacggcggcggcggagggagaggacacgtctgaggaatccacggaccagcgcgaggacgggcacgggtataaagcggacgaatcggcgggcctgctgcccgaggacgacgtgggctctggagaagcctcggcggcgccacacttcgggcacccgtgctcgttgttgcgcgcctgcgccggattcctgggcctgcacggctgcggcggcgatcagaagccggcggcggctgccgttgctgcatctgcagctgaagccgccacggcggcggcggcgagctcgtcccaggatgaagaagacggcggcgtcgacatggcgaaggctaacggtttctacatgcatgaggtgatcacccgcgtatgggcggtcgcggtgaggaggccgcggccgcggccgccggatcacgcgagagaagggagcggtggcaatggaggcgtacaccactaggagtagactcgccgcgcatggttgtctaccttggctcgctcatagcctccgcctacataaatattttgcccgtcagagatctgcggccgtctactgtctacatgcacctttaaataaatccatggctatgaagcatgaatgtctgatgtaattcatgtaggcttctccgatgcggacttcaaataagacaaagtagttgtttctgatgtttgagacgttaattaagctgcagcacccaagggcttacgcttgcgttgatgcatgaagggcatgttct

SEQ ID NO: 17976 - DNA, 2239 bp, Zea Mays
gccaatcacaggccagagcacatcacactccgctacgctctcatcctccggctcatctcctttctcctccccgatgccaccgagtccaccgccaccacgcccaacacgcgtcataaaaaatggggtacatgaaggaaaggagtaccatagctgtgataggcctcagtgtacacacagcaccagtggagatgcgtgaaaaacttgctgttgcagaggaactgtggccccgtgctattcaagaactcactagcctgaaccatattgaagaggctgctgttcttagtacctgtaatagaatggaaatttatgtggtggcgctatcatggaaccgtggtatcagagaagtagtggactggatgtcgaagaaaagtggtattcccgcttccgagcttagggagcacctgttcatcttgcgaagcagtgatgccacacgccatctgtttgaggtgtcagctggccttgactctttggttctcggtgaaggacaaatccttgctcaggttaaacaagttgtgaggagtggacagaacagtggaggcttgggaaagaacatcgataggatgttcaaggatgcaatcactgctggaaagcgtgtccgcagcgagaccaacatatcatctggtgctgtttctgtcagttcagcggcggttgaactggccctgatgaagcttccgaagtctgaagcactgtcagctaggatgcttctgattggtgctggtaaaatgggaaagctagtgatcaaacatctggttgccaaaggatgcaagaaggttgttgtggtgaaccgctccgtggaaagggtggatgctattcgtgaggagatgaaagatatagagatcgtgtacaggcctctctcagacatgtatcaagctgctgctgaagctgatgtcgtgttcaccagcaccgcatctgaaacttcattgttcgcaaaagaacacgcagaggcactcccccctgtctctgatactatgggaggtgttcgcctgtttgtcgacatatctgtccccaggaatgtcagcgcatgtgtgtctgaagttggcgctgcacgagtgtacaatgtcgacgacttgaaagaggtggtggaagccaacaaggaggaccggctcaggaaagcaatggaggcgcagacaatcatcaccgaagaactgagacggttcgaggcatggagggactcgctggagaccgttccgaccatcaagaagctgaggtcgtacgcggacaggatcagggcctcggagctcgagaagtgcctgcagaaagtagcacctgaggtgcgacggcagcgacagccgcacccttgacgagacgctcgagaacatgcacgccctcaaccggatgttcagcctcgacatggagaaggcgatcatcgagcagaagatcaaggccaagctccgacgtccagaagctcccggtgtctagagcggagcggacacggcaacagaggcaatggatgagcacggggaaaaggaagagaacaagtctcaagattcggctttggcggcggagcagcgcgaggagacggcggcggcggagggagaggacacgtctgaggaatccacggaccagcgcgaggacgggcacgggtataaagcggacgaatcggcgggcctgctgcccgaggacgacgtgggctctggagaagcctcggcggcgccacacttcgggcacccgtgctcgttgttgcgcgcctgcgccggattcctgggcctgcacggctgcggcggcgatcagaagccggcggcggctgccgttgctgcatctgcagctgaagccgccacggcggcggcggcgagctcgtcccaggatgaagaagacggcggcgtcgacatggcgaaggctaacggtttctacatgcatgaggtgatcacccgcgtatgggcggtcgcggtgaggaggccgcggccgcggccgccggatcacgcgagagaagggagcggtggcaatggaggcgtacaccactaggagtagactcgccgcgcatggttgtctaccttggctcgctcatagcctccgcctacataaatattttgcccgtcagagatctgcggccgtctactgtctacatgcacctttaaataaatccatggctatgaagcatgaatgtctgatgtaattcatgtaggcttctccgatgcggacttcaaataagacaaagtagttgtttctgatgtttgagacgttaattaagctgcagcacccaagggcttacgcttgcgttgatgcatgaagggcatgttct

SEQ ID NO: 17977 - DNA, 3143 bp, Zea Mays
cccacgtcggccctcccttcacggtcacggggacgcccccagtccctcacctcactagctatcgcaatagctcgcaccacgcaccaccgtgccgcgagcgccactctgagcactctatttatgccgctgccagcgcctgtgctacgagcgggagcggggtggtgctggtggtgaccaagaatcaatctcattcgagaggtttggggaggtgcagcgagctagtagctgcctagctatataccatgtccgcgtcgtccccggcctcggccgcgctggcggccaccgtggcggcggcggcggcgctgctgctgctgctgctgctctgctgccccaatgtggcgcgcgcgcagacgccggcgttcgcgtgcgacgcgtcgaacgcgacgctggcgtcgtacgggttctgcaaccggtcggcggcggcggcggcgcgcgcggcggacctggtgtcgcggctgacgctggcggagaaggtggggttcctggtggacaagcaggcggcgctgccccggctgggcgtcccgctgtacgagtggtggtcggaggcgctgcacggcgtctcctacgtggggcccggcacccggttctcgccgctggtgcccggggccaccagcttcccgcagcccatcctcacggcggcgtcgttcaacgccacgctcttccgcgccatcggcgagatttacggcaggacatgggtacggcaccatggcctcagggtcacggggcacgggcacttgtgcagcagcgcaagcagacaagggccacacattggaaatatcggtggtgtcgaacgaggcgcgggcgatgcacaacgtggggctggcggggctcacgttctggagccccaacatcaacatcttccgcgacccgcggtggggccgcgggcaggagacccccggcgaggacccgctgctcaccagcaagtacgccgtcggctacgtcaccgggctgcagggcgcggtgtccggcgccggcgccctcaaggtcgccgcatgctgcaagcactacaccgcctacgacgtcgacaactggaagggcgtcgagcgctacaccttcgacgccgtggtgtcgcagcaggacctggacgacacgttccagcccccgttcaagagctgcgtggtggacggcaacgtggccagcgtcatgtgctcctacaaccaggtcaacgggaagcccacctgcgccgacaaggacctcctgtccggagtcatcagaggggactggaagctcaacgggtacatctcgtcagactgcgactccgtcgacgtgctgtacaacaaccagcactacaccaaaacccccgaggacgcagccgccatctcgatcaaagcagggctggacctcaactgcggcaccttcctggcgcagcacaccgtggcggccgtgcaagccggcaagctgtcggagtccgacgtcgaccgggccgtcaccaacaacctcgtcacgctcatgcgcctggggttcttcgacggcgacccgcgggagctgccgttcggcaacctcggacccagcgacgtgtgcacgccctccaaccaggagctggctcgcgaggccgcgcgccagggcatcgtgctgctcaagaacaccggcaagctcccgctctccgccacctccatcaagtccatggccgtcattggccccaatgccaacgccagcttcaccatgatcggcaactacgaaggcacgccatgcaagtacacgacgccgctgcagggcctgggcgcgaacgtggccaccgtgtaccagccggggtgcaccaacgtggggtgcagcggcaacagcctgcagctcgacgcggccaccaaggccgcggccagcgctgacgtgaccgtgctggtcgtcggcgccgaccagtccatcgagcgcgagagcctggaccggaccagcctcctgctgcccggccagcagccgcagctcgtgtccgcggtcgccaacgcgtccagcggcccgtgcatcctcgtcgtcatgtcgggcgggcccttcgacatctccttcgccaagtccagcgacaagatcgccgccattctttgggtcggctaccccggcgaagccggcggcgccgccatcgccgacgtcctcttcggataccacaacccaagtggaaggttgccggtgacgtggtaccccgagtcgttcaccaaggtcccgatgaccgacatgcgcatgcggccggacccgtcgaccggctaccccggccggacgtaccggttctacaccggcgacacggtgtacgcgttcggcgacggcctgagctacaccagcttcgcgcaccacctggtgtcggcgcccaagcagttggccctgcagctcgcggagggccacgcgtgcctgaccgagcagtgcccgtccgtggaggccgagggcgcgcactgcgagggcctggcgttcgacgtgcacctccgggtgcggaacgcgggcgagaggtccggcgggcacacggtgttcctgttctcgtcgccgccggcggtgcacaacgcgccggcgaagcacctgctgggcttcgagaaggtgtcgctggagcccgggcaggcgggcgtggtggcgttcaaggtggacgtgtgcaaggacctcagcgtcgtggacgagctgggcaacaggaaggtggcgctcggcagccacacgctgcacgtcggggacctcaagcacacgctcaacttgggagtctgatggccgagaggggaatggctaccaagtaccaacgtgaaggcagttggaatttggagggctggatgggtcggaggcagtcggaagagaaggttgtcagaattggttcggcaggtgtctaataaaggcttcctgttgggaaagaattggatccacgggcagctttttagtcatttgtttggaggcattggattcattggagggtcgatttgtgattgtaatcacgataaatgtaatggattggaaattcggaaggggccagatctctttttcatacaaatcacgtgatttagtgtacaattcttttgccactaaaattgcgcagggtttgctgccctgatgcagagctagtgcaagtattgattattaaggctagttattttaatctagtgtttatgagtaaattttctttataaaaagtatagactattcgcttcatctagctatataatcctttcacaaatggtgctagcaattac

SEQ ID NO: 17978 - DNA, 844 bp, Zea Mays
tgcgtggctgctgaatgggcatgcagcataaaggcagcaaaaaaaaaaaaaaaaggttgagacgggacgacacagagagaatcaatgactcgtattcccaaatcccaaaaggccaaaaaccatacgccgcccaaatgcaaaagctgaagagggcgggggggcgtccaggttcaatgcatgtacacgaccccccttccgtcttgatctgacctgtgggctgtggcctgtcgctgctgcctgcaactgcaatgcaggtcatctctttcaaaccccacacggccacacggcatgtttcaaagtcaggtccaaattccagcagctctgagctatagaaaaaacggcttgggggcgacggagagaggggtatttgcagtataagtacctttggatcgaagagcatcactcgaagatgcatcgaggactgttcttcttcttcctcaagctgtagcctgtgggaggagaggccggagaggcctcccatggagttcccccactcatcacttcttgttggtcccctgctagctgttcgttccctcagcaggtagctagagatgatcttgctttaattttgtgctgatctcttactcgtcgtgtacgctcatatgcatggggcgacggatttgtctctgatcgttcccatgccgcctcttgtatcttgacttggatctatatatcaatgcaaataaatcatcgatgggtgacaatcgatccaagcttcctcatgtgttttcttttttgaagttctttcactagctattcgatcggaatttcttgtctactgctgtatatgcttgtgattgatcgcctgcatataaatggaaatattgtgacttgtagtttaaaa

SEQ ID NO: 17979 - DNA, 1199 bp, Zea Mays
actaccctattccgatctcgaggacgccacgccacttttaacccccccacccccccttctgtcgtggtgcctcggcccaagtgctaacgcccaactgccaaggcggggaggggggatccggtgcgcgcgcgcgcggaaatgaacaccggctgattagtaggtgggagatcgaggtcgcgcccttgccccacacgccactaaaggccgcgccgacgggctcatcaggcgctctggacgggctcgcttctgccgctccgcgcttgtgcggtgggtgaagtgctgctgctggtgcgggaagcgtcgccaaacgtgcagaccttggtgggggagcgaggagtcgaaacaagggtaagatcaggagaatacggtgctactgcttatgtgacattcaaggagcgctttgccttggaaactgcggtattgctcagtggggctactattgtggatcagccggtatgcataacttattggggacaacctgaggagacttttaatttctgggacaggccaacttgggaggttgaagaggaaattgaatacacggaagctcttacagtggctcaagatatcgtgaagacgatgctagcaaaggggtacgtgctcagcaaggacgctttggctaaggctagagcctttgatgagtcccgcggattaacagctgcagctgcagccaaggctgcagagctgagcaagagaattggtttaactgacagggtcagtgctggtgtcggtgcaatgcgatcggtcgatgagacatatcgcgtaacggagacgaccaagacggtagctactgccactggaagaactgcagctaaggtggtaaatggtatcgtcaccagcagctacttctctgcaggagccatgatgttgtctgatgctcttactagggctgccaaggccgcggctgatctggccgctcatggcagacagagttaagtgaaaaacaaaacatacaatccatcctttttcagttactaaacatgaggacgaacaccttaataggatgcttgaagtgttgttgttcgatgtatatttataacagacaacattgttgatttgttgtataaattaaaaggagacgtacactgcgtttgcactaataagtttgattattgcaaatggagtcgagtgatcgtgcagtcatgtttctgactttctgctcatttcatattctcgcatcgctgttgggtgctgccttc

SEQ ID NO: 17980 - DNA, 1194 bp, Zea Mays
actaccctattccgatctcgaggacgccacgccacttttaacccccccacccccccttctgtcgtggtgcctcggcccaagtgctaacgcccaactgccaaggcggggaggggggatccggtgcgcgcgcgcgcggaaatgaacaccggctgattagtaggtgggagatcgaggtcgcgcccttgccccacacgccactaaaggccgcgccgacgggctcatcaggcgctctggacgggctcgcttctgccgctccgcgcttgtgcggtgggtgaagtgctgctgctggtgcgggaagcgtcgccaaacgtgcagaccttggtgggggagcgaggagtcgaaacaaggatcaggagaatacggtgctactgcttatgtgacattcaaggagcgctttgccttggaaactgcggtattgctcagtggggctactattgtggatcagccggtatgcataacttattggggacaacctgaggagacttttaatttctgggacaggccaacttgggaggttgaagaggaaattgaatacacggaagctcttacagtggctcaagatatcgtgaagacgatgctagcaaaggggtacgtgctcagcaaggacgctttggctaaggctagagcctttgatgagtcccgcggattaacagctgcagctgcagccaaggctgcagagctgagcaagagaattggtttaactgacagggtcagtgctggtgtcggtgcaatgcgatcggtcgatgagacatatcgcgtaacggagacgaccaagacggtagctactgccactggaagaactgcagctaaggtggtaaatggtatcgtcaccagcagctacttctctgcaggagccatgatgttgtctgatgctcttactagggctgccaaggccgcggctgatctggccgctcatggcagacagagttaagtgaaaaacaaaacatacaatccatcctttttcagttactaaacatgaggacgaacaccttaataggatgcttgaagtgttgttgttcgatgtatatttataacagacaacattgttgatttgttgtataaattaaaaggagacgtacactgcgtttgcactaataagtttgattattgcaaatggagtcgagtgatcgtgcagtcatgtttctgactttctgctcatttcatattctcgcatcgctgttgggtgctgccttc

SEQ ID NO: 17981 - DNA, 1433 bp, Zea Mays
actaccctattccgatctcgaggacgccacgccacttttaacccccccacccccccttctgtcgtggtgcctcggcccaagtgctaacgcccaactgccaaggcggggaggggggatccggtgcgcgcgcgcgcggaaatgaacaccggctgattagtaggtgggagatcgaggtcgcgcccttgccccacacgccactaaaggccgcgccgacgggctcatcaggcgctctggacgggctcgcttctgccgctccgcgcttgtgcggtgggtgaagtgctgctgctggtgcgggaagcgtcgccaaacgtgcagaccttggtgggggagcgaggagtcgaaacaagggtaaggatgcttaatttagttgctgaggatatggatatgaagcctgctggatgaatggttaaggctttgtgaagaaatatatgaaccatgagtgaaacagggcacactgtacaagtcactaacctctcgagcagagtatctgaaagtgatctttatgagttcttttcgttctctggccctattgaacatgttgaacttatcagatcaggagaatacggtgctactgcttatgtgacattcaaggagcgctttgccttggaaactgcggtattgctcagtggggctactattgtggatcagccggtatgcataacttattggggacaacctgaggagacttttaatttctgggacaggccaacttgggaggttgaagaggaaattgaatacacgagttatcaatcatgccagtacaacactactccgcaggaagctcttacagtggctcaagatatcgtgaagacgatgctagcaaaggggtacgtgctcagcaaggacgctttggctaaggctagagcctttgatgagtcccgcggattaacagctgcagctgcagccaaggctgcagagctgagcaagagaattggtttaactgacagggtcagtgctggtgtcggtgcaatgcgatcggtcgatgagacatatcgcgtaacggagacgaccaagacggtagctactgccactggaagaactgcagctaaggtggtaaatggtatcgtcaccagcagctacttctctgcaggagccatgatgttgtctgatgctcttactagggctgccaaggccgcggctgatctggccgctcatggcagacagagttaagtgaaaaacaaaacatacaatccatcctttttcagttactaaacatgaggacgaacaccttaataggatgcttgaagtgttgttgttcgatgtatatttataacagacaacattgttgatttgttgtataaattaaaaggagacgtacactgcgtttgcactaataagtttgattattgcaaatggagtcgagtgatcgtgcagtcatgtttctgactttctgctcatttcatattctcgcatcgctgttgggtgctgccttc

SEQ ID NO: 17982 - DNA, 1392 bp, Zea Mays
actaccctattccgatctcgaggacgccacgccacttttaacccccccacccccccttctgtcgtggtgcctcggcccaagtgctaacgcccaactgccaaggcggggaggggggatccggtgcgcgcgcgcgcggaaatgaacaccggctgattagtaggtgggagatcgaggtcgcgcccttgccccacacgccactaaaggccgcgccgacgggctcatcaggcgctctggacgggctcgcttctgccgctccgcgcttgtgcggtgggtgaagtgctgctgctggtgcgggaagcgtcgccaaacgtgcagaccttggtgggggagcgaggagtcgaaacaagggatgcttaatttagttgctgaggatatggatatgaagcctgctggatgaatggttaaggctttgtgaagaaatatatgaaccatgagtgaaacagggcacactgtacaagtcactaacctctcgagcagagtatctgaaagtgatctttatgagttcttttcgttctctggccctattgaacatgttgaacttatcagatcaggagaatacggtgctactgcttatgtgacattcaaggagcgctttgccttggaaactgcggtattgctcagtggggctactattgtggatcagccggtatgcataacttattggggacaacctgaggagacttttaatttctgggacaggccaacttgggaggttgaagaggaaattgaatacacggaagctcttacagtggctcaagatatcgtgaagacgatgctagcaaaggggtacgtgctcagcaaggacgctttggctaaggctagagcctttgatgagtcccgcggattaacagctgcagctgcagccaaggctgcagagctgagcaagagaattggtttaactgacagggtcagtgctggtgtcggtgcaatgcgatcggtcgatgagacatatcgcgtaacggagacgaccaagacggtagctactgccactggaagaactgcagctaaggtggtaaatggtatcgtcaccagcagctacttctctgcaggagccatgatgttgtctgatgctcttactagggctgccaaggccgcggctgatctggccgctcatggcagacagagttaagtgaaaaacaaaacatacaatccatcctttttcagttactaaacatgaggacgaacaccttaataggatgcttgaagtgttgttgttcgatgtatatttataacagacaacattgttgatttgttgtataaattaaaaggagacgtacactgcgtttgcactaataagtttgattattgcaaatggagtcgagtgatcgtgcagtcatgtttctgactttctgctcatttcatattctcgcatcgctgttgggtgctgccttc

SEQ ID NO: 17983 - DNA, 1788 bp, Zea Mays
actaccctattccgatctcgaggacgccacgccacttttaacccccccacccccccttctgtcgtggtgcctcggcccaagtgctaacgcccaactgccaaggcggggaggggggatccggtgcgcgcgcgcgcggaaatgaacaccggctgattagtaggtgggagatcgaggtcgcgcccttgccccacacgccactaaaggccgcgccgacgggctcatcaggcgctctggacgggctcgcttctgccgctccgcgcttgtgcggtgggtgaagtgctgctgctggtgcgggaagcgtcgccaaacgtgcagaccttggtgggggagcgaggagtcgaaacaagggtaaggtaaggctccttcctcgctctccttgtgccctgtattgctgtcatttttttgggttcatttgtggttgcttcggtggtgatttgcctccggcgcatcggatttctatgccggttaatcggtttgtgcgaggagagcctggatcgatcggatcgtctgcctattgttcctttctttgttgactggtcagttacgctgtgccctagttttgttcaggacctgtacctgttcaatatagtttccgttgcataatctgtaacccttatgcaccctattttctccatctagtcttctttgtgctgaatcgggccaggtgtttgctacctacatttacagaaaaatgtttcgtttatttaggatgcttaatttagttgctgaggatatggatatgaagcctgctggatgaatggttaaggctttgtgaagaaatatatgaaccatgagtgaaacagggcacactgtacaagtcactaacctctcgagcagagtatctgaaagtgatctttatgagttcttttcgttctctggccctattgaacatgttgaacttatcagatcaggagaatacggtgctactgcttatgtgacattcaaggagcgctttgccttggaaactgcggtattgctcagtggggctactattgtggatcagccggtatgcataacttattggggacaacctgaggagacttttaatttctgggacaggccaacttgggaggttgaagaggaaattgaatacacgagttatcaatcatgccagtacaacactactccgcaggaagctcttacagtggctcaagatatcgtgaagacgatgctagcaaaggggtacgtgctcagcaaggacgctttggctaaggctagagcctttgatgagtcccgcggattaacagctgcagctgcagccaaggctgcagagctgagcaagagaattggtttaactgacagggtcagtgctggtgtcggtgcaatgcgatcggtcgatgagacatatcgcgtaacggagacgaccaagacggtagctactgccactggaagaactgcagctaaggtggtaaatggtatcgtcaccagcagctacttctctgcaggagccatgatgttgtctgatgctcttactagggctgccaaggccgcggctgatctggccgctcatggcagacagagttaagtgaaaaacaaaacatacaatccatcctttttcagttactaaacatgaggacgaacaccttaataggatgcttgaagtgttgttgttcgatgtatatttataacagacaacattgttgatttgttgtataaattaaaaggagacgtacactgcgtttgcactaataagtttgattattgcaaatggagtcgagtgatcgtgcagtcatgtttctgactttctgctcatttcatattctcgcatcgctgttgggtgctgccttc

SEQ ID NO: 17984 - DNA, 2127 bp, Zea Mays
atggcgcgattgcgagtctctggaaatagcggcgcgtgcacgcaggttacagcagggggtgggggcgtggatccatgtttagcttttgtgggtacgggtgacccgatgggtaacccatacccacatgggtatgggtatggggggtcgtcggcgtcgcacacgactggaaaatcccagttcacacagagacgacgagcgacaaacaaggcgaaaccgacccacatatatacctggccctggcctgaaaggcgatggatcgatgctgcagggtgcacagcacatctgggtcagcaggtcgcagcaacagcaatcgtcgacatgtccagcggccggagggcgtcacgcgcacggcgtgcggcggggagcgcgctcccatcgtcgacgacgtcgaggtccatctcagaggaccagatctccgagctgctgtccaagatccaggctctgctcctcccgaactctcatactcgcaatggcgcacacaggcaagctcacaaagggacaacgcgacggagaataaacgcagggctcggcctcggcctcggcggcgagggtgctgcaggacacgtgcaactacatcaggagcctgcaccaggaggtggacaacctcagcgagctgctcgccgagctgctcgcctccgccgatgtcaccagcgagcaggccgccgtcatcaggagcctgctgctcatgtgaccaccaccaaaggcaaaagcttccggtgagagcgcgtatatatatgcacgcacgcacgcacggcggcggtcagatctcagaggcacgcgctgcatgccagcctatctaccgtacttccaatctgcaattgctcattattagctgcccctgccgctgtctagctactaaactactagtactagcactgtgcccgaggatattattagtagctgctagctgagctatatatatggcgctttatttagcagacatagcagtcactagctagctagctggtggtgagcaattcgatcttgtactttgatgtaagcttgcattgtggtcgtccgtcgtcgtcgacatctctgctttgcgatcggtttggatgttaatccaagtcggatatgagaggttttgcaaataatatgggcgggagatcgatggacagacaagcaagcatcaggtttcaaatgatgatgctgctggtgctgctactacacgactagtagcagaggttaatgttgttgatgtactttgagataactaattggctttgttaaatgaaaggaagtgctttcatgtacgtcctaccctaccagatgtgctggattcagcaaaaggttgggctgagtcaattaggtttaacaaacccactaagggcttgtttggaacaaaggctactgttgtgaagtttaatctggcacctgtccgatattgcgatgattttaacaacataaccgagacctatcccttcaatcctaatggttctccactaggcattggacacctttgctcccctgatgggaggcaccttgctatgatgccacatccggagcgttgcttcatgatgtggcaatacccatggtatcccaaggaatggcatgttgagaagagtggacccagcccttggttgcggatgttccagaatgctagggaatggtgttcttagtgcaggtaaatttgtcttattaaatgcctcatacttctgtttgtggcagtatgaaatcaattctagtagaacctttaacttcctgtgcactgttacatttacatagaaccgatagttaggattgagaatgttattgttaagcttcatttagtagaacattactctctactgccagttttcggtcaaagaagaatcttatcctttttaacaaagtacactgattgaacttttggatacgaagagaagtctgtgttggtctgttggaactcttcaaatagattcaatgacccagttagcctcgttgtcaaacagttacaaattagcgagagcatcaatcaattagtccaaataacctaacatatttaaaaattctagagtctgtcaaagcgacatttactcttgatttaactttatctgctacttttcttatgatctataaagttcctgagcactttatcctcttacccgctatcaaaattgtgttgtagctagacattgttagtttccg

SEQ ID NO: 17985 - DNA, 4382 bp, Zea Mays
cagactgtcactggctcgcatgcccgttttcgctttaccaatcaatcctaccgccaatttctacttgtgaccgccagccctaccggaggccaggaggcaagcaaaagcggcgacatcttcacagatgccgcagggcgcggcggctgcggcctgagagtgagagcgcgctgtcgaggtccgactccgggtcaggcgggggagcgcattgcgatggcggagtcggcggcgacggacggcaaggcggataaggtggcgaacggaggagggggaggcggcgatgcggcgggggaggggaagaagaggggggaccaggccgtggcgttccacgagcttttctcgttcgccgacaagtgggacctgatgctcatggccgcgggcagcctgggcgcgctggctcacggcgccgccatgccgttcttcttcctgctcttcggcgacctcatcaacggtttcggcaagaaccagaccgacctccgcaccatgaccgacgaggtcgccaagtatgcgctctacttcgtctacctggggctggtggtctgcgtctcttcatacgcagagatcgcgtgctggatgtacaccggggagcgccaggtgatcgcgctccggaaggcgtacctggacgccgtgctgcggcaggacgtggggttcttcgacacggacgcgcgcacgggtgacatcgtcttcggcgtctccaccgacacgctgctcgtgcaggatgccatcggcgagaaggtcgggaacttcatgcactacatcgccaccttcctggccgggctggtcgtcggcttcgtctcggcgtggcggcttgcgctgctcagtgtggccgtcatcccggccatcgccttcgccggcggcctgtacgcgtacacgctcactgggctcacttccaaaagccgggagtcctataccaatgctggtgtcgtcgccgagcaggcaattgcacaagtaagaacagtgtactcttttgtcggagagagcaaagctctcaattcctattctgaagcaattcagaacacactgaagcttggttacaaagctgggatggccaaaggtcttggaattggatgtacttatgggatagcttgcatgtcatgggcactggtattttggtatgccggggtcttcatcaggaatgggcagtccgatggtggaaaggcttttaccgcgatcttttctgcaattgtcggtggcatgagtcttggccaggctttctcaaaccttggagccttcagtaaaggaaagattgccggttacaaactgttggaggtcattcgccagaaaccctccatagtcaatgatcataaggatggaaagtggttggctgaggtccacggaaacatagaattcaaggaagtcactttcagttatccatcaaggcctgatgttataatctttcgggatttctctcttttcttccctgctggtaaaactgttgcagtcgttggaggcagtgggtctggaaagagcactgttgtggctttgatagaaaggttctatgatcctaatgaaggccaggttttgctagacaatgttgacataaagacactccagttgaggtggctgagagaccagattggtctggtaaaccaagaacctgctctttttgcgacaacaatcctagagaatatactgtatggaaagcctgatgcaactattgcagaagttgaggctgcaacgactgcatccaatgctcatagttttatctctcttcttccgaatggttacaacacaatggtaggtgagcgaggcatccagctctctggtggtcagaaacaacgtattgcgatcgctcgtgctatgctgaagaacccaaagattctgctccttgacgaggctaccagtgcattagatgcagactcagaaagcattgtgcaagaagctttagaccgtttgatggttgggaggacgactgtagttgttgcccaccgtctgtccactataagaaacgtgaacatgatcgctgtgatccaacaaggtcaagttgttgagactgggacgcatgatgaactccttgcgaaaggaacctctggagcatatgcctcccttattcgttttcaggaaacggcacgtaatagggatcttggaggtgcatctagccgcaggtcacggtcaattcacttgacaagctcactttccaccaaatctctcagcctcaggtctggaagtctaaggaacctcagctatcagtacagtactggagcagatgggcgcatcgagatgatctctaatgctgataatgaccgcaaatacccagcaccacgtggctacttcttcaagcttctgaaactgaatgcacctgaatggccttatgcagtattgggggccattggttctgtcctctcaggatttattggcccaacttttgccatcgttatgggtgaaatgctcgacgtgttctactacagggaccccaatgagatggagaagaaaaccaagctatatgtgttcatctatattggcacaggcatatacgccgtcgttgcttatcttgtgcagcattacttcttcagcatcatgggagagaatcttacaaccagggtcaggcggatgatgttgtctgcaatacttaggaatgaagttggttggtttgacgaagaagaaaacaattcaagtctcgtggctgcgcatctagctgttgatgcagctgatgtgaagtcggccatagctgagagaatatcggtcatcctgcagaacatgacttcccttatgacttctttcgtcgttggatttatcattgaatggagagtggcaatacttattctggccactttccctctgcttgtgcttgccaactttgctcagcaactttcaatgaagggcttcgctggtgacactgcaaaggcacatgccaagagcagtatggttgctggtgaaggagtgagcaatatccgcaccgtggcggccttcaacgctcaaagcaagatcttgtcactcttcagccatgaactgcgtgtcccagagcagcaaatcctccgccgcagccagacatcaggtcttctgtttggcctgtcacagctctgcttatactcctcggaagcgctcattctctggtatggttctcatcttgtgcggtcacatgggtccaccttctccaaggtcatcaaggtttttgttgtccttgtggtgaccgccaactccgtagccgagacggtaagcctggccccggagatcatccgtggaggtgaatccatccgatccatctttggcatcctcaacagagcaacaagaatcgagcctgacgatccagagtcagagagggtcaccaccatccgaggtgacattgagttgcggcatgtcgacttttcgtatccagcacgcccggacatccaaatcttcaaggacttcaacctgaaaatccaagctgggcgcagccaggcgctagtcggagccagcggctcagggaagagcaccatcattgctctcatcgagcggttctacgacccgtgcggagggaaagtggccatcgatggcaaggacatccggacgctgaacttgaagtccctgcggcgcaagatcggcctggtgcagcaggagccagtcctcttcgcgtcgagcatcctggaaaacatcgcgtacggcaaggaaggcgcgagcgaggaggaggtggtcgaggcggcgaagacggcgaacgtgcacggcttcgtgagccagctgcccgatgggtacaggaccgcggtcggcgagcggggcatgcagctgtcgggcgggcagaagcagcggatcgccatcgccagggcggtgctcaaggacccggccatcctgctgctggacgaggcgacgagcgcgctggacgcggagtcggagtgcgtgctgcaggaggcgctggagcggctgatgaaggggcggaccaccgtcctggtggcgcaccggctgtcgacgatccgaggggtggaccgcatcgcggtcgtgcaggacgggcgggtcgtggagcacggcagccactccgacctcctggcccggccggagggcgcgtactcgcggctgctgcagttgcagcaccaccgtgtgtgacgacgacgagcctctcctccctctgatgataaaaatcttcggtttggaggcctgggcgaggtggcgggttcttcttcggtttcttgggttggttgggcggtggtcctgtcgtgcggatgtagatactaggccaaaccgtgctgtgttcttatgcataaacttggaacatgtgtgatctgtatcttctccctgggatgggatgtactaccatgaaatgcaactcttttggtccacctcgcctcatctgtcctctcaatctctagcagttaggttatcgccgagctcctcctacgatgatggaagacgagagaaaagaaaatgaattccgctgacagaagggtatggcttgccattaaaaattgaaaaaaaaa

SEQ ID NO: 17986 - DNA, 2092 bp, Zea Mays
aaggaatgccatcagccacatcgccctctccagctctcattaaaaaacctcttgcctgggggcggagctttcgaagctcgcccattgcctcccagtctcccaccctcgcaaccatcaccgccgcccaccgttcccaccgccgcggcctttatttctcccccttccatgccccgctcgcctccgccacctccccctcctcccgcccctaggtgactgtgactccctccggcgcctgaatctccatctcgctccccacccgccgcctccgccgcgagatctccggctgcccgcgccatggtcgccgcctccggccttgcgctgccgcgggtggccgcaccctgcccggcgcgcccgcggggtggtctccgccccgccttgctccgattcgcgccgcccgtggcactgccaccgcaccagctccggtgctgcgcgtccaccgtcgatgacggcttggtgtccgcagcggcctccaagccccgcctccccagggtggttggtatgggttcaaagcttgtcggatgtggatcagccatcccaacacttggcgtttcaaatgatgacctttcaaaaatagttgagacgtcagatgaatggattgcagctcgaactgggattcgtaacaggagatgaaacattgcgggggctctcaataaaagcagctcaaagggcacttgaaatggccaaagtaaaagctgaagatgttgaccttgttctcctttgtacatctactccagatgatttgtttggaggtgccactcaggtgctgacggacgtggggtgcacaaaggcttttggatttgatattacagctgcttgcagtgggtttatagttggcttaatcacagctactcgttttatcaaaggtggaggttttcagaatatcctagtagttggtgctgatgctctttcaaaatatgtggattggacagacagaggtacatgcatcctttttggtgatgctgctggtgctgtgttggtacaggcatgcagcgctgatgaagatggcttgctaggtttttgtgttcaaagtgatggcaatgggcaaaaacacctaaatgccgcaacggcaatcgatgagtcaatcttgtccaataccatggtgttcctggatttccgccaaagaaggcaacctactcatgcattcagatgaacggaaaggaagttttccgctttgctgtccgatgtgtgccacagtccattgagaaggcactccaagaagctggtttgcccgcctccagtatagactggttgttgttacatcaagctaatcagcggattattgatgcggctgccagccgattagatatcccgtccgacaaggttatttcaaatcttgccaactatggcaataccagtgcggcatccatcccgttagctttggatgaggctgttcgcagcggcaaggtgaaggctggcgatattattgcggcgtcaggttttggtgctggacttacctggggttcagctattgtcaagtggggctaattattcaacgtgaaccggaacaacacatcaatgagatagcttcaagctttcaaaggccttgggaggcctacatctgttggttctttccagtgtttttctgtgcaacatttttctttcgcatgtgccagttttccttgcacatgaaaatgcagtgcgccattttaccgtaatccatctgttccttaggctcattacacagttgagagagattgtaatgtagttggcagtagtttgagtggtggatgtaatgtaagttcttgaattttgcatggagataaatttggtggggttaaaagatgagatcacactgtaaagctaattggccttttgtctgggaactgtactgagcggtttccgatcttgtggccccaggcaataagcatgttacaaggagaattggaccgtggacgtatgctgtaggtcaattcttagtaattttgatctgtttttattatacaccattcttcgtgtatttttttttcaagtggccttggtttgtgcgttgttagatgttttgtgtttcagctatccaatcgaggtatagcaggaatgtagatgacataattgctttgacggtatcttgaatttccaggtctataaagtatat

SEQ ID NO: 17987 - DNA, 2040 bp, Zea Mays
aaggaatgccatcagccacatcgccctctccagctctcattaaaaaacctcttgcctgggggcggagctttcgaagctcgcccattgcctcccagtctcccaccctcgcaaccatcaccgccgcccaccgttcccaccgccgcggcctttatttctcccccttccatgccccgctcgcctccgccacctccccctcctcccgcccctaggtgactgtgactccctccggcgcctgaatctccatctcgctccccacccgccgcctccgccgcgagatctccggctgcccgcgccatggtcgccgcctccggccttgcgctgccgcgggtggccgcaccctgcccggcgcgcccgcggggtggtctccgccccgccttgctccgattcgcgccgcccgtggcactgccaccgcaccagctccggtgctgcgcgtccaccgtcgatgacggcttggtgtccgcagcggcctccaagccccgcctccccagggtggttggtatgggttcaaagcttgtcggatgtggatcagccatcccaacacttggcgtttcaaatgatgacctttcaaaaatagttgagacgtcagatgaatggattgcagctcgaactgggattcgtaacaggcgagttctttcaggagatgaaacattgcgggggctctcaataaaagcagctcaaagggcacttgaaatggccaaagtaaaagctgaagatgttgaccttgttctcctttgtacatctactccagatgatttgtttggaggtgccactcaggtgctgacggacgtggggtgcacaaaggcttttggatttgatattacagctgcttgcagtgggtttatagttggcttaatcacagctactcgttttatcaaagacagaggtacatgcatcctttttggtgatgctgctggtgctgtgttggtacaggcatgcagcgctgatgaagatggcttgctaggtttttgtgttcaaagtgatggcaatgggcaaaaacacctaaatgccgcaacggcaatcgatgagtcaatcttgtccaataccatggtgttcctggatttccgccaaagaaggcaacctactcatgcattcagatgaacggaaaggaagttttccgctttgctgtccgatgtgtgccacagtccattgagaaggcactccaagaagctggtttgcccgcctccagtatagactggttgttgttacatcaagctaatcagcggattattgatgcggctgccagccgattagatatcccgtccgacaaggttatttcaaatcttgccaactatggcaataccagtgcggcatccatcccgttagctttggatgaggctgttcgcagcggcaaggtgaaggctggcgatattattgcggcgtcaggttttggtgctggacttacctggggttcagctattgtcaagtggggctaattattcaacgtgaaccggaacaacacatcaatgagatagcttcaagctttcaaaggccttgggaggcctacatctgttggttctttccagtgtttttctgtgcaacatttttctttcgcatgtgccagttttccttgcacatgaaaatgcagtgcgccattttaccgtaatccatctgttccttaggctcattacacagttgagagagattgtaatgtagttggcagtagtttgagtggtggatgtaatgtaagttcttgaattttgcatggagataaatttggtggggttaaaagatgagatcacactgtaaagctaattggccttttgtctgggaactgtactgagcggtttccgatcttgtggccccaggcaataagcatgttacaaggagaattggaccgtggacgtatgctgtaggtcaattcttagtaattttgatctgtttttattatacaccattcttcgtgtatttttttttcaagtggccttggtttgtgcgttgttagatgttttgtgtttcagctatccaatcgaggtatagcaggaatgtagatgacataattgctttgacggtatcttgaatttccaggtctataaagtatat

SEQ ID NO: 17988 - DNA, 2048 bp, Zea Mays
gaagggcaaggaatgccatcagccacatcgccctctccagctctcattaaaaaacctcttgcctgggggcggagctttcgaagctcgcccattgcctcccagtctcccaccctcgcaaccatcaccgccgcccaccgttcccaccgccgcggcctttatttctcccccttccatgccccgctcgcctccgccacctccccctcctcccgcccctaggtgactgtgactccctccggcgcctgaatctccatctcgctccccacccgccgcctccgccgcgagatctccggctgcccgcgccatggtcgccgcctccggccttgcgctgccgcgggtggccgcaccctgcccggcgcgcccgcggggtggtctccgccccgccttgctccgattcgcgccgcccgtggcactgccaccgcaccagctccggtgctgcgcgtccaccgtcgatgacggcttggtgtccgcagcggcctccaagccccgcctccccagggtggttggtatgggttcaaagcttgtcggatgtggatcagccatcccaacacttggcgtttcaaatgatgacctttcaaaaatagttgagacgtcagatgaatggattgcagctcgaactgggattcgtaacaggcgagttctttcaggagatgaaacattgcgggggctctcaataaaagcagctcaaagggcacttgaaatggccaaagtaaaagctgaagatgttgaccttgttctcctttgtacatctactccagatgatttgtttggaggtgccactcaggtgctgacggacgtggggtgcacaaaggcttttggatttgatattacagctgcttgcagtgggtttatagttggcttaatcacagctactcgttttatcaaaggtggaggttttcagaatatcctagtagttggtgctgatgctctttcaaaatatgtggattggacagacagaggtacatgcatcctttttggtgatgctgctggtgctgtgttggtacagacacctaaatgccgcaacggcaatcgatgagtcaatcttgtccaataccatggtgttcctggatttccgccaaagaaggcaacctactcatgcattcagatgaacggaaaggaagttttccgctttgctgtccgatgtgtgccacagtccattgagaaggcactccaagaagctggtttgcccgcctccagtatagactggttgttgttacatcaagctaatcagcggattattgatgcggctgccagccgattagatatcccgtccgacaaggttatttcaaatcttgccaactatggcaataccagtgcggcatccatcccgttagctttggatgaggctgttcgcagcggcaaggtgaaggctggcgatattattgcggcgtcaggttttggtgctggacttacctggggttcagctattgtcaagtggggctaattattcaacgtgaaccggaacaacacatcaatgagatagcttcaagctttcaaaggccttgggaggcctacatctgttggttctttccagtgtttttctgtgcaacatttttctttcgcatgtgccagttttccttgcacatgaaaatgcagtgcgccattttaccgtaatccatctgttccttaggctcattacacagttgagagagattgtaatgtagttggcagtagtttgagtggtggatgtaatgtaagttcttgaattttgcatggagataaatttggtggggttaaaagatgagatcacactgtaaagctaattggccttttgtctgggaactgtactgagcggtttccgatcttgtggccccaggcaataagcatgttacaaggagaattggaccgtggacgtatgctgtaggtcaattcttagtaattttgatctgtttttattatacaccattcttcgtgtatttttttttcaagtggccttggtttgtgcgttgttagatgttttgtgtttcagctatccaatcgaggtatagcaggaatgtagatgacataattgctttgacggtatcttgaatttccaggtctataaagtatat

SEQ ID NO: 17989 - DNA, 2109 bp, Zea Mays
cgaagagacccatagattggtgtacgccgggggaagggcaaggaatgccatcagccacatcgccctctccagctctcattaaaaaacctcttgcctgggggcggagctttcgaagctcgcccattgcctcccagtctcccaccctcgcaaccatcaccgccgcccaccgttcccaccgccgcggcctttatttctcccccttccatgccccgctcgcctccgccacctccccctcctcccgcccctaggtgactgtgactccctccggcgcctgaatctccatctcgctccccacccgccgcctccgccgcgagatctccggctgcccgcgccatggtcgccgcctccggccttgcgctgccgcgggtggccgcaccctgcccggcgcgcccgcggggtggtctccgccccgccttgctccgattcgcgccgcccgtggcactgccaccgcaccagctccggtgctgcgcgtccaccgtcgatgacggcttggtgtccgcagcggcctccaagccccgcctccccagggtggttggtatgggttcaaagcttgtcggatgtggatcagccatcccaacacttggcgtttcaaatgatgacctttcaaaaatagttgagacgtcagatgaatggattgcagctcgaactgggattcgtaacaggcgagttctttcagctcaaagggcacttgaaatggccaaagtaaaagctgaagatgttgaccttgttctcctttgtacatctactccagatgatttgtttggaggtgccactcaggtgctgacggacgtggggtgcacaaaggcttttggatttgatattacagctgcttgcagtgggtttatagttggcttaatcacagctactcgttttatcaaaggtggaggttttcagaatatcctagtagttggtgctgatgctctttcaaaatatgtggattggacagacagaggtacatgcatcctttttggtgatgctgctggtgctgtgttggtacaggcatgcagcgctgatgaagatggcttgctaggtttttgtgttcaaagtgatggcaatgggcaaaaacacctaaatgccgcaacggcaatcgatgagtcaatcttgtccaataccatggtgttcctggatttccgccaaagaaggcaacctactcatgcattcagatgaacggaaaggaagttttccgctttgctgtccgatgtgtgccacagtccattgagaaggcactccaagaagctggtttgcccgcctccagtatagactggttgttgttacatcaagctaatcagcggattattgatgcggctgccagccgattagatatcccgtccgacaaggttatttcaaatcttgccaactatggcaataccagtgcggcatccatcccgttagctttggatgaggctgttcgcagcggcaaggtgaaggctggcgatattattgcggcgtcaggttttggtgctggacttacctggggttcagctattgtcaagtggggctaattattcaacgtgaaccggaacaacacatcaatgagatagcttcaagctttcaaaggccttgggaggcctacatctgttggttctttccagtgtttttctgtgcaacatttttctttcgcatgtgccagttttccttgcacatgaaaatgcagtgcgccattttaccgtaatccatctgttccttaggctcattacacagttgagagagattgtaatgtagttggcagtagtttgagtggtggatgtaatgtaagttcttgaattttgcatggagataaatttggtggggttaaaagatgagatcacactgtaaagctaattggccttttgtctgggaactgtactgagcggtttccgatcttgtggccccaggcaataagcatgttacaaggagaattggaccgtggacgtatgctgtaggtcaattcttagtaattttgatctgtttttattatacaccattcttcgtgtatttttttttcaagtggccttggtttgtgcgttgttagatgttttgtgtttcagctatccaatcgaggtatagcaggaatgtagatgacataattgctttgacggtatcttgaatttccaggtctataaagtatat

SEQ ID NO: 17990 - DNA, 2363 bp, Zea Mays
aaacacagtcagcaagcgaagagacccatagattggtgtacgccgggggaagggcaaggaatgccatcagccacatcgccctctccagctctcattaaaaaacctcttgcctgggggcggagctttcgaagctcgcccattgcctcccagtctcccaccctcgcaaccatcaccgccgcccaccgttcccaccgccgcggcctttatttctcccccttccatgccccgctcgcctccgccacctccccctcctcccgcccctaggtgactgtgactccctccggcgcctgaatctccatctcgctccccacccgccgcctccgccgcgagatctccggctgcccgcgccatggtcgccgcctccggccttgcgctgccgcgggtggccgcaccctgcccggcgcgcccgcggggtggtctccgccccgccttgctccgattcgcgccgcccgtggcactgccaccgcaccagctccggtgctgcgcgtccaccgtcgatgacggcttggtgtccgcagcggcctccaagccccgcctccccagggtggttggtatgggttcaaagcttgtcggatgtggatcagccatcccaacacttggcgtttcaaatgatgacctttcaaaaatagttgagacgtcagatgaatggattgcagctcgaactgggattcgtaacaggcgagttctttcaggagatgaaacattgcgggggctctcaataaaagcagctcaaagggcacttgaaatggccaaagtaaaagctgaagatgttgaccttgttctcctttgtacatctactccagatgatttgtttggaggtgccactcaggtgctgacggacgtggggtgcacaaaggcttttggatttgatattacagctgcttgcagtgggtttatagttggcttaatcacagctactcgttttatcaaaggtggaggttttcagaatatcctagtagttggtgctgatgctctttcaaaatatgtggattggacagacagaggtacatgcatcctttttggtgatgctgctggtgctgtgttggtacaggtatagcttatcccctgtgtaaatatttatatttctccctatcccagtaagtcagtgttccatggctaaatctgattgaaatatggatggaacttgttcagtaagaagcatgagcagccatgctgtgggtgatgtgacactgttaattatgagacctttattcaaattctcttgtccatttttttaatttagaattttgcaggcatgcagcgctgatgaagatggcttgctaggtttttgtgttcaaagtgatggcaatgggcaaaaacacctaaatgccgcaacggcaatcgatgagtcaatcttgtccaataccatggtgttcctggatttccgccaaagaaggcaacctactcatgcattcagatgaacggaaaggaagttttccgctttgctgtccgatgtgtgccacagtccattgagaaggcactccaagaagctggtttgcccgcctccagtatagactggttgttgttacatcaagctaatcagcggattattgatgcggctgccagccgattagatatcccgtccgacaaggttatttcaaatcttgccaactatggcaataccagtgcggcatccatcccgttagctttggatgaggctgttcgcagcggcaaggtgaaggctggcgatattattgcggcgtcaggttttggtgctggacttacctggggttcagctattgtcaagtggggctaattattcaacgtgaaccggaacaacacatcaatgagatagcttcaagctttcaaaggccttgggaggcctacatctgttggttctttccagtgtttttctgtgcaacatttttctttcgcatgtgccagttttccttgcacatgaaaatgcagtgcgccattttaccgtaatccatctgttccttaggctcattacacagttgagagagattgtaatgtagttggcagtagtttgagtggtggatgtaatgtaagttcttgaattttgcatggagataaatttggtggggttaaaagatgagatcacactgtaaagctaattggccttttgtctgggaactgtactgagcggtttccgatcttgtggccccaggcaataagcatgttacaaggagaattggaccgtggacgtatgctgtaggtcaattcttagtaattttgatctgtttttattatacaccattcttcgtgtatttttttttcaagtggccttggtttgtgcgttgttagatgttttgtgtttcagctatccaatcgaggtatagcaggaatgtagatgacataattgctttgacggtatcttgaatttccaggtctataaagtatat

SEQ ID NO: 17991 - DNA, 1864 bp, Zea Mays
cgcggccacaaccacaattattcgccgggccgggatccgcccaccgagccaccggagcaccagccaccagtgcaccaccatcgcagggagttagggacacacaccggctgccgcggcccgccatgtctcactgctgcccctgcgcgagtgcctcctcctccaccgcgcccttcttcctcccttctatccccgactcctcttcctgcaggagcggcagcggtggcgccttcagcgctgctgttggtcggagcaagctgcggtgcggcggcgggccgaggcgcgggcaagcgacagtcgcggcaggcagcaaggacggcgggagcggcggcacggctggaggggagaagggagaagacgacgccccggcgttcaatccgttcgggttcgtgacggacaacccctccagccgcagcgccatccagctgcccgcggttcccgccgaggacggcaatgtcggccagatgctctacaggatcgaagacaagggcagggaatacggctcgtatgtcagagcaggagagtttcgatggttcgtcagggaaacagatggcagatgctggctaccactgctttgcacctgactggatcggatttgggttcagtgaaatgccacaacctggatatggattcgactttaaagaggacgaatttcacaaggcatttgatgatcttcttggtactctaaatatcaccgagcccttcttcttagttgtccagggctttcttgttggttcttatgggctgacgtgggcactcaataactcaagcaaagtccttaaattagcaatccttaacagtcctcttacagtttcttctccagtccctggattgtttcagcagctaaaatggccactctttggtgaatttacttgtcaaaatgctgttttggctgagcgtttcattgaagcaggtagcgcatatatgctgaaattggaaaaggctgatgtatacaggttaccgtatctatccagtggcgctcctggattcgctttgcttgaagctgccaggaagatcaatttccaagatgtactaagtagaatttccgccggattttcgtccaacggttgggaaaaaccaatactgcttgcatggggaatatctgacaagtacttaccgctctcgatagctgaggaattcaagcaagctaatcctggcgttgtaaaactagaggcgatagaaggagctggtcacatgccgcaagaggactggccggagaaggttgtgaaggcgctgacatccttcctgtaaacatgtgcaaagatcattatgtcatccgcacgggaactttcaaacatgcatgatgactgtcgtggcttcattacgtcctcctgtctaatttaattatgccttggattgcttagatttgtgactgtacaggtcaagatgtatattagcaaacgctttgcatttgtaaattgcgacgtggacgatatcagcgacgtgttagctcacgtcagagatggataacatgttgtattttcggattcagaattatggatatggagcacgaccaggacgaaggctgagccagacgaaggtcgggggcagccgaagctgtacgcagggaagcttcggcgcgatggcacaagggggaaccgaccttaagatgaaaagacttcggggtcctcaatagatttccataaaccgttaacaaatgtaatggacatgaatgtaattttacgtgggctgcgtcccgcgtctataaatagatgaacagtactcccgtactgttcacgcggacttggcattttgcttttggcattacgctcgtacttttcaccttctctcaggaccgaaggtacatttgtaatttggaatcatttctgtttttccatgtcaataaaatagaaatgattctatggtg

SEQ ID NO: 17992 - DNA, 2857 bp, Zea Mays
ctagtttcttcgcggccacaaccacaattattcgccgggccgggatccgcccaccgagccaccggagcaccagccaccagtgcaccaccatcgcagggagttagggacacacaccggctgccgcggcccgccatgtctcactgctgcccctgcgcgagtgcctcctcctccaccgcgcccttcttcctcccttctatccccgactcctcttcctgcaggagcggcagcggtggcgccttcagcgctgctgttggtcggagcaagctgcggtgcggcggcgggccgaggcgcgggcaagcgacagtcgcggcaggcagcaaggacggcgggagcggcggcacggctggaggggagaagggagaagacgacgccccggcgttcaatccgttcgggttcgtgacggacaacccctccagccgcagcgccatccagctgcccgcggttcccgccgaggacggcaatgtcggccagatgctctacaggatcgaagacaagggcagggaatacggctcgtatgtcagagcaggagagtttcgatggttcgtcagggaaacagggtcacctgatgcacgacgtgggactattgtgttccttcacggagctcctactcagtcatttagttaccgggtggttatggctcaggttgcttcactgaacccgtataccattggaataaatacaattcatgcaatgatcagtcatttgtactgtgcattatgcaaccatgaatagggtgctgattctgacgatttttctgcaatttttttacttaggaaaatatatatgcttaagtaactttccattgtcgacaaaaatttatgatgtgttttggtctatttagattgtctccttttcaatttgagtagtatggagctataagctaacatgtattttgtttaggcaaaaaagatgtgtgcacttccatgtattactgaaacaaaacaacaacaacaataagatatggtgtttgtttctgaacattgtaattatcaacttctataaaaaccttagaactcccacgtttattacaacattatttttaatcacattgcatcttttgttttaatcaattatcacatcctctaagtatcttttgaaaataaaagatggcagatgctggctaccactgctttgcacctgactggatcggatttgggttcagtgaaatgccacaacctggatatggattcgactttaaaggtcaggaaaatgtgtattaaactaatgtcccgtttggatcactagaattgaattccattctaataatagtaatttaggcatatatcaattaagctaattcactttttatacaaaatatatttgcatactattattagcaagatgttctagatatttatgtgctatatttttactatagaggagtagaacgaagagtgtcatgtaagttacagattagaaacaaattctaatcatgcataaaatcatttcctattctccaccctatgaatttgagatagacttatatctgaactttggaaagtggtggaatgccaaattccaaactaaataagttactttattgagtgaattccaattcctttaaaatgaagggatccaaacgccccgtaaaggaatttgctatgaagacttaggtatattgtatcatttgtagaggacgaatttcacaaggcatttgatgatcttcttggtactctaaatatcaccgagcccttcttcttagttgtccagggctttcttgttggttcttatgggctgacgtgggcactcaataactcaagcaaagtccttaaattagcaatccttaacagtcctcttacagtttcttctccagtccctggattgtttcagcagctaaaatggccactctttggtgaatttacttgtcaaaatgctgttttggctgagcgtttcattgaagcaggtagcgcatatatgctgaaattggaaaaggctgatgtatacaggttaccgtatctatccagtggcgctcctggattcgctttgcttgaagctgccaggaagatcaatttccaagatgtactaagtagaatttccgccggattttcgtccaacggttgggaaaaaccaatactgcttgcatggggaatatctgacaagtacttaccgctctcgatagctgaggaattcaagcaagctaatcctggcgttgtaaaactagaggcgatagaaggagctggtcacatgccgcaagaggactggccggagaaggttgtgaaggcgctgacatccttcctgtaaacatgtgcaaagatcattatgtcatccgcacgggaactttcaaacatgcatgatgactgtcgtggcttcattacgtcctcctgtctaatttaattatgccttggattgcttagatttgtgactgtacaggtcaagatgtatattagcaaacgctttgcatttgtaaattgcgacgtggacgatatcagcgacgtgttagctcacgtcagagatggataacatgttgtattttcggattcagaattatggatatggagcacgaccaggacgaaggctgagccagacgaaggtcgggggcagccgaagctgtacgcagggaagcttcggcgcgatggcacaagggggaaccgaccttaagatgaaaagacttcggggtcctcaatagatttccataaaccgttaacaaatgtaatggacatgaatgtaattttacgtgggctgcgtcccgcgtctataaatagatgaacagtactcccgtactgttcacgcggacttggcattttgcttttggcattacgctcgtacttttcaccttctctcaggaccgaaggtacatttgtaatttggaatcatttctgtttttccatgtcaataaaatagaaatgattctatggtg

SEQ ID NO: 17993 - DNA, 2731 bp, Zea Mays
ctctaatccacgggccacgtggctcgacgccaacccggcccgaccgatcgcctcgcttcctagtttcttcgcggccacaaccacaattattcgccgggccgggatccgcccaccgagccaccggagcaccagccaccagtgcaccaccatcgcagggagttagggacacacaccggctgccgcggcccgccatgtctcactgctgcccctgcgcgagtgcctcctcctccaccgcgcccttcttcctcccttctatccccgactcctcttcctgcaggagcggcagcggtggcgccttcagcgctgctgttggtcggagcaagctgcggtgcggcggcgggccgaggcgcgggcaagcgacagtcgcggcaggcagcaaggacggcgggagcggcggcacggctggaggggagaagggagaagacgacgccccggcgttcaatccgttcgggttcgtgacggacaacccctccagccgcagcgccatccagctgcccgcggttcccgccgaggacggcaatgtcggccagatgctctacaggatcgaagacaagggcagggaatacggctcgtatgtcagagcaggagagtttcgatggttcgtcagggaaacagggtcacctgatgcacgacgtgggactattgtgttccttcacggagctcctactcagtcatttagttaccgggtggttatggctcagatggcagatgctggctaccactgctttgcacctgactggatcggatttgggttcagtgaaatgccacaacctggatatggattcgactttaaaggtcaggaaaatgtgtattaaactaatgtcccgtttggatcactagaattgaattccattctaataatagtaatttaggcatatatcaattaagctaattcactttttatacaaaatatatttgcatactattattagcaagatgttctagatatttatgtgctatatttttactatagaggagtagaacgaagagtgtcatgtaagttacagattagaaacaaattctaatcatgcataaaatcatttcctattctccaccctatgaatttgagatagacttatatctgaactttggaaagtggtggaatgccaaattccaaactaaataagttactttattgagtgaattccaattcctttaaaatgaagggatccaaacgccccgtaaaggaatttgctatgaagacttaggtatattgtatcatttgtagaggacgaatttcacaaggcatttgatgatcttcttggtactctaaatatcaccgagcccttcttcttagttgtccagggctttcttgttggttcttatgggctgacgtgggcactcaataactcaagcaaagtccttaaattagcaatccttaacagtcctcttacagtttcttctccagtccctggattgtttcagcagctaaagtcagttatttcttcttatcttagctccttacacttaatacacattaatttgctagtacaccagatctggtcttggacaaacttatagggcccataaaatgggctctcctcacccacccaacctctactagaacatgaaaaattccacttacagtattttctaaaagaagcggcaaaagctttgcccctctgacacagattgcatgtgcagcaggacaatcaaccctaccctatatgagtatatgactacacgctaacaatgcttcatttccaatgcagatggccactctttggtgaatttacttgtcaaaatgctgttttggctgagcgtttcattgaagcaggtagcgcatatatgctgaaattggaaaaggctgatgtatacaggttaccgtatctatccagtggcgctcctggattcgctttgcttgaagctgccaggaagatcaatttccaagatgtactaagtagaatttccgccggattttcgtccaacggttgggaaaaaccaatactgcttgcatggggaatatctgacaagtacttaccgctctcgatagctgaggaattcaagcaagctaatcctggcgttgtaaaactagaggcgatagaaggagctggtcacatgccgcaagaggactggccggagaaggttgtgaaggcgctgacatccttcctgtaaacatgtgcaaagatcattatgtcatccgcacgggaactttcaaacatgcatgatgactgtcgtggcttcattacgtcctcctgtctaatttaattatgccttggattgcttagatttgtgactgtacaggtcaagatgtatattagcaaacgctttgcatttgtaaattgcgacgtggacgatatcagcgacgtgttagctcacgtcagagatggataacatgttgtattttcggattcagaattatggatatggagcacgaccaggacgaaggctgagccagacgaaggtcgggggcagccgaagctgtacgcagggaagcttcggcgcgatggcacaagggggaaccgaccttaagatgaaaagacttcggggtcctcaatagatttccataaaccgttaacaaatgtaatggacatgaatgtaattttacgtgggctgcgtcccgcgtctataaatagatgaacagtactcccgtactgttcacgcggacttggcattttgcttttggcattacgctcgtacttttcaccttctctcaggaccgaaggtacatttgtaatttggaatcatttctgtttttccatgtcaataaaatagaaatgattctatggtg

SEQ ID NO: 17994 - DNA, 2327 bp, Zea Mays
tgcacatccacacgactaacgaactgaacagccccactctaatccacgggccacgtggctcgacgccaacccggcccgaccgatcgcctcgcttcctagtttcttcgcggccacaaccacaattattcgccgggccgggatccgcccaccgagccaccggagcaccagccaccagtgcaccaccatcgcagggagttagggacacacaccggctgccgcggcccgccatgtctcactgctgcccctgcgcgagtgcctcctcctccaccgcgcccttcttcctcccttctatccccgactcctcttcctgcaggagcggcagcggtggcgccttcagcgctgctgttggtcggagcaagctgcggtgcggcggcgggccgaggcgcgggcaagcgacagtcgcggcaggcagcaaggacggcgggagcggcggcacggctggaggggagaagggagaagacgacgccccggcgttcaatccgttcgggttcgtgacggacaacccctccagccgcagcgccatccagctgcccgcggttcccgccgaggacggcaatgtcggccagatgctctacaggatcgaagacaagggcagggaatacggctcgtatgtcagagcaggagagtttcgatggttcgtcagggaaacagggtcacctgatgcacgacgtgggactattgtgttccttcacggagctcctactcagtcatttagttaccgggtggttatggctcagatggcagatgctggctaccactgctttgcacctgactggatcggatttgggttcagtgaaatgccacaacctggatatggattcgactttaaagaggacgaatttcacaaggcatttgatgatcttcttggtactctaaatatcaccgagcccttcttcttagttgtccagggctttcttgttggttcttatgggctgacgtgggcactcaataactcaagcaaagtccttaaattagcaatccttaacagtcctcttacagtttcttctccagtccctggattgtttcagcagctaaagtcagttatttcttcttatcttagctccttacacttaatacacattaatttgctagtacaccagatctggtcttggacaaacttatagggcccataaaatgggctctcctcacccacccaacctctactagaacatgaaaaattccacttacagtattttctaaaagaagcggcaaaagctttgcccctctgacacagattgcatgtgcagcaggacaatcaaccctaccctatatgagtatatgactacacgctaacaatgcttcatttccaatgcagatggccactctttggtgaatttacttgtcaaaatgctgttttggctgagcgtttcattgaagcagatatatgctgaaattggaaaaggctgatgtatacaggttaccgtatctatccagtggcgctcctggattcgctttgcttgaagctgccaggaagatcaatttccaagatgtactaagtagaatttccgccggattttcgtccaacggttgggaaaaaccaatactgcttgcatggggaatatctgacaagtacttaccgctctcgatagctgaggaattcaagcaagctaatcctggcgttgtaaaactagaggcgatagaaggagctggtcacatgccgcaagaggactggccggagaaggttgtgaaggcgctgacatccttcctgtaaacatgtgcaaagatcattatgtcatccgcacgggaactttcaaacatgcatgatgactgtcgtggcttcattacgtcctcctgtctaatttaattatgccttggattgcttagatttgtgactgtacaggtcaagatgtatattagcaaacgctttgcatttgtaaattgcgacgtggacgatatcagcgacgtgttagctcacgtcagagatggataacatgttgtattttcggattcagaattatggatatggagcacgaccaggacgaaggctgagccagacgaaggtcgggggcagccgaagctgtacgcagggaagcttcggcgcgatggcacaagggggaaccgaccttaagatgaaaagacttcggggtcctcaatagatttccataaaccgttaacaaatgtaatggacatgaatgtaattttacgtgggctgcgtcccgcgtctataaatagatgaacagtactcccgtactgttcacgcggacttggcattttgcttttggcattacgctcgtacttttcaccttctctcaggaccgaaggtacatttgtaatttggaatcatttctgtttttccatgtcaataaaatagaaatgattctatggtg

SEQ ID NO: 17995 - DNA, 2831 bp, Zea Mays
ccaccgcgcaactgcttccgtcctctgccaccggggcacgccgaaagctcgcctcgcaagcgcgcggccgcgccagcacaccacgcctcgcttcgtttacccgttgcttgccgccgaatcgaccacgctggcgaccaggccagcgccatcgcatcgtccccggaccgctccggtcgcgcccgccaggcctcggggctcgggtagaccaccaccaaaacagaaccttccctccggaccgaaaccgccgcttcccctccccgctctttctgtgaggagggaagcgaggcggatgccgaggcgacggggctcgcgcaccgcactcgtgtgcccgccgcccggggaccaggcgacgtggtgactggtgaggtgaggcaagcgcgcggttttaaattccccgcacgtccttctcgccgtagttttcagtccggaggtacatcaagggaggaacaaacgtgagggctgcctgcctccggacatgggctccagcttcaagtaccgagctggcctctgcctcatcgtcgccgtcgtgctgatttgggtcatatccgcggaggtcacgcagttacttacttgggggcctcccttatggtcatatacctccctttgtcatttctaaaggattctggaaacaccagtgcttcataaattgcaagcaaaacttcctttggtggtggtgcccctttgaagaatgacgaatttcggaagactttagtgctaaattgcactgatgtgagcattcctgtagtgaaagagacaaaaccactcatatatggaatcactgaaatgaatgatggtgttttgaaggacaagcaactttcgactaaggagattgcaacttatggattgtatctttgccccttatggtttgtgacagagcgcttgcaagaactagtgttgccagtaccaccgtactgtcttcaacttcagggctcttcactcttttcattggtgttttacttggccaagactccataagtgcttcgaaagttattgctgttttcattagcatggctggcgttgtaatgacaactatgggacagacttgggcatctgatgaatcagaagtaggcaaatctggggctacacaaaggactcttctaggtgatatgtttggttttatgtcggcaatcgcgtatggtctatttactgtgctgcttaaaaaattttgtggggaggaaggagaaaaggttgatgtccaaaaactgtttggttatcttggactttttacccttgttgctctctggtggattgtctggccattaaccgcactaggcattgagccaaagttttcgatgcctcactctgctaaagtggatgaagtggtggtggcaaatagcctaattggaagtgtactatcagattacttctgggccctttctgttgtttggactactcccttggtggccacgctaggcatgtctctcacaattccactggcgatggttgcggatatgatcattcacggccgtcactattcagcagtgtatattctttgttctgtccaggtattttcaggctttgtcatcgcgagccttgcagatcggctttcacgttctctagggctattatagtttcataaaacgaagcaggttcttgttagagtgtacatctggaagtttaaaggtcgggttggttagacaaaatacttgaggaaacacgggttgggatttgggaaatgccagtaattcgtttcccttttgctcctttaaacataggagcggtgaattttgccgcggcgaatagtaaaggccagcagacgaagaagaaaccgtatattgtagcaaccctttgcaactgtatattctcctactacaaattgagcgacagtgtaaactgccgtcgttctggccttgtcgatccgtgtcgattgcaaatttgcaaatgtcacttttatatccttgtcgatccgtgttcatggcaattgcgcgagttaacaaagaatgaatgggcaaaaaaaaaaaaaaaaaaaaaaaaaacggagctacaaattgcagcgaattgaatgggcaagttgtcatactcctatgcaaagtgtgcgacaatgcaaactgaaaagtgaaaatgacttactgcacaagcaacgtcaaattcaaagtgtacatgctactagcagcttagcgagcaactgaagttctcatagtcgccatgtcggagcgagatgcgatagacggcgaaggcggcactctgtccggggtcgcgcagcagcggcgtggtgaccctgtcgacctcgaccacctcaaaaccatgctcccgcagcacgtccatgcagtccagcacgctgtcccgcacctcgctcgccgcccaccccgcggtgccgccgccgccctcgtccgtccaccacataccccgcagcgtggccgccatcgccggcatgtcctcgggatcgtagaagacgtcggacaagagcacgacgcccaccctcccgtcgccgtcgtcgagcgggagcaggtcgccccagcggagctcgcgcacgcgggcccgcgcggcgctgaggccgttggcgtccgcgttggccctgaggcccggcagcagcgcggccacgtccgtgagcacgcagcgcgcggcgccgaggcaggccacggcggcgatgcccgggagccccgtgccggcgccgagctccacgacggtggcgccacggaggcggcgcctggcgcgggggtccgcggcgaggtgcgcggccaggaccagggacgactcccacagccaggagccggtgaggacgcggcccgtggccgggtcgctcgtgccgtcgcgctccaccaccgccagcgcgcgcccggccacggctacgtgcaggacctgcgggcacagcgcgtccattcccgttcccg

SEQ ID NO: 17996 - DNA, 3052 bp, Zea Mays
ccaccgcgcaactgcttccgtcctctgccaccggggcacgccgaaagctcgcctcgcaagcgcgcggccgcgccagcacaccacgcctcgcttcgtttacccgttgcttgccgccgaatcgaccacgctggcgaccaggccagcgccatcgcatcgtccccggaccgctccggtcgcgcccgccaggcctcggggctcgggtagaccaccaccaaaacagaaccttccctccggaccgaaaccgccgcttcccctccccgctctttctgtgaggagggaagcgaggcggatgccgaggcgacggggctcgcgcaccgcactcgtgtgcccgccgcccggggaccaggcgacgtggtgactggtgaggtgaggcaagcgcgcggttttaaattccccgcacgtccttctcgccgtagttttcagtccggaggtacatcaagggaggaacaaacgtgagggctgcctgcctccggacatgggctccagcttcaagtaccgagctggcctctgcctcatcgtcgccgtcgtgctgatttgggtcatatccgcggaggtcacgcaggggatattcacaaagtacaaacatccttttgcagttacttacttgggggcctcccttatggtcatatacctccctttgtcatttctaaaggattctggaaacaccagtgcttcataaattgcaagcaaaacttcctttggtggtggtgcccctttgaagaatgacgaatttcggaagactttagtgctaaattgcactgatgtgagcattcctgtagtgaaagagacaaaaccactcatatatggaatcactgaaatgaatgatggtgttttgaaggacaagcaactttcgactaaggagattgcaacttatggattgtatctttgccccttatggtttgtgacagagtatttatcgaatgcagcgcttgcaagaactagtgttgccagtaccaccgtactgtcttcaacttcagggctcttcactcttttcattggtgttttacttggccaagactccataagtgcttcgaaagttattgctgttttcattagcatggctggcgttgtaatgacaactatgggacagacttgggcatctgatgaatcagaagtaggcaaatctggggctacacaaaggactcttctaggtgatatgtttggttttatgtcggcaatcgcgtatggtctatttactgtgctgcttaaaaaattttgtggggaggaaggagaaaaggttgatgtccaaaaactgtttggttatcttggactttttacccttgttgctctctggtggattggtattttttgtttcccttttcgaaattaatataacaggagtatacaatttcgtaatttatgatcgtattctggtatttcttaattgtgcatgcctttcatggttattttatgtaaaaaaaaatatggttattgtgttcatatttcagtctggccattaaccgcactaggcattgagccaaagttttcgatgcctcactctgctaaagtggatgaagtggtggtggcaaatagcctaattggaagtgtactatcagattacttctggctgactgtggaacttatggccagggccctttctgttgtttggactactcccttggtggccacgctaggcatgtctctcacaattccactggcgatggttgcggatatgatcattcacggccgtcactattcagcagtgtatattctttgttctgtccaggtattttcaggctttgtcatcgcgagccttgcagatcggctttcacgttctctagggctattatagtttcataaaacgaagcaggttcttgttagagtgtacatctggaagtttaaaggtcgggttggttagacaaaatacttgaggaaacacgggttgggatttgggaaatgccagtaattcgtttcccttttgctcctttaaacataggagcggtgaattttgccgcggcgaatagtaaaggccagcagacgaagaagaaaccgtatattgtagcaaccctttgcaactgtatattctcctactacaaattgagcgacagtgtaaactgccgtcgttctggccttgtcgatccgtgtcgattgcaaatttgcaaatgtcacttttatatccttgtcgatccgtgttcatggcaattgcgcgagttaacaaagaatgaatgggcaaaaaaaaaaaaaaaaaaaaaaaaaacggagctacaaattgcagcgaattgaatgggcaagttgtcatactcctatgcaaagtgtgcgacaatgcaaactgaaaagtgaaaatgacttactgcacaagcaacgtcaaattcaaagtgtacatgctactagcagcttagcgagcaactgaagttctcatagtcgccatgtcggagcgagatgcgatagacggcgaaggcggcactctgtccggggtcgcgcagcagcggcgtggtgaccctgtcgacctcgaccacctcaaaaccatgctcccgcagcacgtccatgcagtccagcacgctgtcccgcacctcgctcgccgcccaccccgcggtgccgccgccgccctcgtccgtccaccacataccccgcagcgtggccgccatcgccggcatgtcctcgggatcgtagaagacgtcggacaagagcacgacgcccaccctcccgtcgccgtcgtcgagcgggagcaggtcgccccagcggagctcgcgcacgcgggcccgcgcggcgctgaggccgttggcgtccgcgttggccctgaggcccggcagcagcgcggccacgtccgtgagcacgcagcgcgcggcgccgaggcaggccacggcggcgatgcccgggagccccgtgccggcgccgagctccacgacggtggcgccacggaggcggcgcctggcgcgggggtccgcggcgaggtgcgcggccaggaccagggacgactcccacagccaggagccggtgaggacgcggcccgtggccgggtcgctcgtgccgtcgcgctccaccaccgccagcgcgcgcccggccacggctacgtgcaggacctgcgggcacagcgcgtccattcccgttcccg

SEQ ID NO: 17997 - DNA, 2924 bp, Zea Mays
gtgagacttgatcccagcatacctggtgtttatgttcgtgcccgggtcttggtgccctaaaacctgggtgtgacatcccaccgcgcaactgcttccgtcctctgccaccggggcacgccgaaagctcgcctcgcaagcgcgcggccgcgccagcacaccacgcctcgcttcgtttacccgttgcttgccgccgaatcgaccacgctggcgaccaggccagcgccatcgcatcgtccccggaccgctccggtcgcgcccgccaggcctcggggctcgggtagaccaccaccaaaacagaaccttccctccggaccgaaaccgccgcttcccctccccgctctttctgtgaggagggaagcgaggcggatgccgaggcgacggggctcgcgcaccgcactcgtgtgcccgccgcccggggaccaggcgacgtggtgactggtgaggtgaggcaagcgcgcggttttaaattccccgcacgtccttctcgccgtagttttcagtccggaggtacatcaagggaggaacaaacgtgagggctgcctgcctccggacatgggctccagcttcaagtaccgagctggcctctgcctcatcgtcgccgtcgtgctgatttgggtcatatccgcggaggtcacgcagttacttacttgggggcctcccttatggtcatatacctccctttgtcatttctaaaggattctggaaacaccagtgcttcataaattgcaagcaaaacttcctttggtggtggtgcccctttgaagaatgacgaatttcggaagactttagtgctaaattgcactgatgtgagcattcctgtagtgaaagagacaaaaccactcatatatggaatcactgaaatgaatgatggtgttttgaaggacaagcaactttcgactaaggagattgcaacttatggattgtatctttgccccttatggtttgtgacagagtatttatcgaatgcagcgcttgcaagaactagtgttgccagtaccaccgtactgtcttcaacttcagggctcttcactcttttcattggtgttttacttggccaagactccataagtgcttcgaaagttattgctgttttcattagcatggctggcgttgtaatgacaactatgggacagacttgggcatctgatgaatcagaagtaggcaaatctggggctacacaaaggactcttctaggtgatatgtttggttttatgtcggcaatcgcgtatggtctatttactgtgctgcttaaaaaattttgtggggaggaaggagaaaaggttgatgtccaaaaactgtttggttatcttggactttttacccttgttgctctctggtggattgtctggccattaaccgcactaggcattgagccaaagttttcgatgcctcactctgctaaagtggatgaagtggtggtggcaaatagcctaattggaagtgtactatcagattacttctgggccctttctgttgtttggactactcccttggtggccacgctaggcatgtctctcacaattccactggcgatggttgcggatatgatcattcacggccgtcactattcagcagtgtatattctttgttctgtccaggtattttcaggctttgtcatcgcgagccttgcagatcggctttcacgttctctagggctattatagtttcataaaacgaagcaggttcttgttagagtgtacatctggaagtttaaaggtcgggttggttagacaaaatacttgaggaaacacgggttgggatttgggaaatgccagtaattcgtttcccttttgctcctttaaacataggagcggtgaattttgccgcggcgaatagtaaaggccagcagacgaagaagaaaccgtatattgtagcaaccctttgcaactgtatattctcctactacaaattgagcgacagtgtaaactgccgtcgttctggccttgtcgatccgtgtcgattgcaaatttgcaaatgtcacttttatatccttgtcgatccgtgttcatggcaattgcgcgagttaacaaagaatgaatgggcaaaaaaaaaaaaaaaaaaaaaaaaaacggagctacaaattgcagcgaattgaatgggcaagttgtcatactcctatgcaaagtgtgcgacaatgcaaactgaaaagtgaaaatgacttactgcacaagcaacgtcaaattcaaagtgtacatgctactagcagcttagcgagcaactgaagttctcatagtcgccatgtcggagcgagatgcgatagacggcgaaggcggcactctgtccggggtcgcgcagcagcggcgtggtgaccctgtcgacctcgaccacctcaaaaccatgctcccgcagcacgtccatgcagtccagcacgctgtcccgcacctcgctcgccgcccaccccgcggtgccgccgccgccctcgtccgtccaccacataccccgcagcgtggccgccatcgccggcatgtcctcgggatcgtagaagacgtcggacaagagcacgacgcccaccctcccgtcgccgtcgtcgagcgggagcaggtcgccccagcggagctcgcgcacgcgggcccgcgcggcgctgaggccgttggcgtccgcgttggccctgaggcccggcagcagcgcggccacgtccgtgagcacgcagcgcgcggcgccgaggcaggccacggcggcgatgcccgggagccccgtgccggcgccgagctccacgacggtggcgccacggaggcggcgcctggcgcgggggtccgcggcgaggtgcgcggccaggaccagggacgactcccacagccaggagccggtgaggacgcggcccgtggccgggtcgctcgtgccgtcgcgctccaccaccgccagcgcgcgcccggccacggctacgtgcaggacctgcgggcacagcgcgtccattcccgttcccg

SEQ ID NO: 17998 - DNA, 3003 bp, Zea Mays
tagaactcctgttatatataaagatgtgacattcgatcctgtgccactatacatcatatgtgtgagacttgatcccagcatacctggtgtttatgttcgtgcccgggtcttggtgccctaaaacctgggtgtgacatcccaccgcgcaactgcttccgtcctctgccaccggggcacgccgaaagctcgcctcgcaagcgcgcggccgcgccagcacaccacgcctcgcttcgtttacccgttgcttgccgccgaatcgaccacgctggcgaccaggccagcgccatcgcatcgtccccggaccgctccggtcgcgcccgccaggcctcggggctcgggtagaccaccaccaaaacagaaccttccctccggaccgaaaccgccgcttcccctccccgctctttctgtgaggagggaagcgaggcggatgccgaggcgacggggctcgcgcaccgcactcgtgtgcccgccgcccggggaccaggcgacgtggtgactggtgaggtgaggcaagcgcgcggttttaaattccccgcacgtccttctcgccgtagttttcagtccggaggtacatcaagggaggaacaaacgtgagggctgcctgcctccggacatgggctccagcttcaagtaccgagctggcctctgcctcatcgtcgccgtcgtgctgatttgggtcatatccgcggaggtcacgcaggggatattcacaaagtacaaacatccttttgcagttacttacttgggggcctcccttatggtcatatacctccctttgtcatttctaaaggattctggaaacaccagtgcttcataaattgcaagcaaaacttcctttggtggtggtgcccctttgaagaatgacgaatttcggaagactttagtgctaaattgcactgatgtgagcattcctgtagtgaaagagacaaaaccactcatatatggaatcactgaaatgaatgatggtgttttgaaggacaagcaactttcgactaaggagattgcaacttatggattgtatctttgccccttatggtttgtgacagagcgcttgcaagaactagtgttgccagtaccaccgtactgtcttcaacttcagggctcttcactcttttcattggtgttttacttggccaagactccataagtgcttcgaaagttattgctgttttcattagcatggctggcgttgtaatgacaactatgggacagacttgggcatctgatgaatcagaagtaggcaaatctggggctacacaaaggactcttctaggtgatatgtttggttttatgtcggcaatcgcgtatggtctatttactgtgctgcttaaaaaattttgtggggaggaaggagaaaaggttgatgtccaaaaactgtttggttatcttggactttttacccttgttgctctctggtggattgtctggccattaaccgcactaggcattgagccaaagttttcgatgcctcactctgctaaagtggatgaagtggtggtggcaaatagcctaattggaagtgtactatcagattacttctgggccctttctgttgtttggactactcccttggtggccacgctaggcatgtctctcacaattccactggcgatggttgcggatatgatcattcacggccgtcactattcagcagtgtatattctttgttctgtccaggtattttcaggctttgtcatcgcgagccttgcagatcggctttcacgttctctagggctattatagtttcataaaacgaagcaggttcttgttagagtgtacatctggaagtttaaaggtcgggttggttagacaaaatacttgaggaaacacgggttgggatttgggaaatgccagtaattcgtttcccttttgctcctttaaacataggagcggtgaattttgccgcggcgaatagtaaaggccagcagacgaagaagaaaccgtatattgtagcaaccctttgcaactgtatattctcctactacaaattgagcgacagtgtaaactgccgtcgttctggccttgtcgatccgtgtcgattgcaaatttgcaaatgtcacttttatatccttgtcgatccgtgttcatggcaattgcgcgagttaacaaagaatgaatgggcaaaaaaaaaaaaaaaaaaaaaaaaaacggagctacaaattgcagcgaattgaatgggcaagttgtcatactcctatgcaaagtgtgcgacaatgcaaactgaaaagtgaaaatgacttactgcacaagcaacgtcaaattcaaagtgtacatgctactagcagcttagcgagcaactgaagttctcatagtcgccatgtcggagcgagatgcgatagacggcgaaggcggcactctgtccggggtcgcgcagcagcggcgtggtgaccctgtcgacctcgaccacctcaaaaccatgctcccgcagcacgtccatgcagtccagcacgctgtcccgcacctcgctcgccgcccaccccgcggtgccgccgccgccctcgtccgtccaccacataccccgcagcgtggccgccatcgccggcatgtcctcgggatcgtagaagacgtcggacaagagcacgacgcccaccctcccgtcgccgtcgtcgagcgggagcaggtcgccccagcggagctcgcgcacgcgggcccgcgcggcgctgaggccgttggcgtccgcgttggccctgaggcccggcagcagcgcggccacgtccgtgagcacgcagcgcgcggcgccgaggcaggccacggcggcgatgcccgggagccccgtgccggcgccgagctccacgacggtggcgccacggaggcggcgcctggcgcgggggtccgcggcgaggtgcgcggccaggaccagggacgactcccacagccaggagccggtgaggacgcggcccgtggccgggtcgctcgtgccgtcgcgctccaccaccgccagcgcgcgcccggccacggctacgtgcaggacctgcgggcacagcgcgtccattcccgttcccg

SEQ ID NO: 17999 - DNA, 1086 bp, Zea Mays
gaaagacgtcctttggtaggagagtggtgtgagctatcatccacttcgagcaaaagccgagcagaagattctgaaaaatgtttcccttgccataaaggtatcttcacaggaacctgtggaaacagcgttggaccatggtgtcacggccgtcggctacggcacagagaacggcaaggactactggatcgtgaagaactcttggggcagcagctggggcgagtccggctacgtcaggatggagcgcaacatcaaggcgtccagcggcaagtgtggtatcgccgttgagccgtcgtaccctctgaagaagggcgccaaccccccgaaccctgggccgaccccgccttcccccaccccgccgcccaccgtctgcgacaactactactcgtgccccgacagcaccacctgctgctgcatctatgagtacggcaagtactgcttcgcctggggctgctgcccgctcgagggcgccacctgctgcgacgaccactacagctgctgcccccatgactaccccgtctgcaacgtcaagcagggaacctgcctcatgggcaaggacagcccactgtcactgtcagtgaaggctacgaagcgcaccctggccaagccgcactgggctttccctggcaacacagctgctgacggcatgaagagcagcgcatgagaaaaacgcagcatggcattaggccgccaacagccagcatgattagagcccccctgcatgcagaatgatcacccggtcccgtagttcacgacgaaagcatggctgggcggccgctgtttacggatttacttatatcactatagtaggtactcctcctgtacataagcctgaaaaaaaatgggttcagttgtttatggaactctgccaaatttgcttttgcatgccatgtaaaaatccagctagctcttgccaagcttcccctgcgcagttcaacaggactgcgattgatattcggtgtaatggaagtatttatcggaacaatcagcaatgttatgctatattcatttcttggacgtgaacaatagattggtcgatcccagttctcagagcggtggcgcagggggatggtccgtctgaggccttgc

SEQ ID NO: 18000 - DNA, 1487 bp, Zea Mays
tttacatccgcaatagataaaaaaacactcacaatacatcttaatccactccgattttctcattactatagtacctaaactaggtctaaagtgataatgatgttttccactctattgcagggagttgctgggctttctcaacaatagcggctgtggaaggcatcaaccagattgttactggcgacatgatctccttgtctgagcaggagcttgttgactgtgacacttcatacaaccaggggtgcaatggaggtttgatggactatgcgtttgagttcatcatcaacaacggcggaatcgacaccgaggaggattacccttacaagggcacggacggacggtgtgatgtcaacaggaaaaacgccaaggttgttactatcgacagctatgaagatgtaccagcgaacagtgagaaaagtctgcagaaggcagttgcgaaccagcccatcagtgttgcaattgaggctggtggcagagcatttcagctctacaactcgggtatcttcacaggaacctgtggaaacagcgttggaccatggtgtcacggccgtcggctacggcacagagaacggcaaggactactggatcgtgaagaactcttggggcagcagctggggcgagtccggctacgtcaggatggagcgcaacatcaaggcgtccagcggcaagtgtggtatcgccgttgagccgtcgtaccctctgaagaagggcgccaaccccccgaaccctgggccgaccccgccttcccccaccccgccgcccaccgtctgcgacaactactactcgtgccccgacagcaccacctgctgctgcatctatgagtacggcaagtactgcttcgcctggggctgctgcccgctcgagggcgccacctgctgcgacgaccactacagctgctgcccccatgactaccccgtctgcaacgtcaagcagggaacctgcctcatgggcaaggacagcccactgtcactgtcagtgaaggctacgaagcgcaccctggccaagccgcactgggctttccctggcaacacagctgctgacggcatgaagagcagcgcatgagaaaaacgcagcatggcattaggccgccaacagccagcatgattagagcccccctgcatgcagaatgatcacccggtcccgtagttcacgacgaaagcatggctgggcggccgctgtttacggatttacttatatcactatagtaggtactcctcctgtacataagcctgaaaaaaaatgggttcagttgtttatggaactctgccaaatttgcttttgcatgccatgtaaaaatccagctagctcttgccaagcttcccctgcgcagttcaacaggactgcgattgatattcggtgtaatggaagtatttatcggaacaatcagcaatgttatgctatattcatttcttggacgtgaacaatagattggtcgatcccagttctcagagcggtggcgcagggggatggtccgtctgaggccttgc

SEQ ID NO: 18001 - DNA, 768 bp, Zea Mays
gtttgcccaatgtatctgatctttagcaatccagggatctgtgcagcagaataacaaaccggttagcattcataataacacccaaaacaactctaagctttttatttcagatagcatctcttgacagataaatagacaaaacctacattatgccatgagttcaataaagtaaaggttatggaagtgcacaatcaagacctaatcaatttgaatccttttcacattgaaggacagggtaatcaatcttaatactctaaaacgcgtgtttcccagtaaaacagcccggccacgtcagtcagaaaatctccctagtcggatcaaactataaataaacatgggacgttggatttacatgtaggatatccttccactatgcttttgagtcttccaggaccagactaccgacctattccagttttttattttcctgcacggaaggattttcccaaaagatcttaaaccaatggaagagaaaacgaaaaaggacttaagaatctgaagaacaccgcaaaagaaggcatgcaatttctctttgttgagctctggattctttttctccacttccatttttttatgttgtttgcgccatggcttctggaccttttcaccgctgcagctagccctagatgaagcgcccgaaagattgagaagtcagccagccagccggagtaggcgggtcgccggcggtcctcaccttggcgttgatcccgcatccgctgcggaggatggacgccgcggagacgaacttcgtgccaaactggcggcaag

SEQ ID NO: 18002 - DNA, 1632 bp, Zea Mays
atgccgtacagaaagcccacgtacggcccctatagcgatgagctccaggaaaacgatagccacgattactatggtttggtctcgacgatggattctggagcaagcaagtatcacacagggtttattccagtcttcactgcttatatcacaaagaggatgaaccactatttgcatggagaaaaactgaatgcaccagcaagtcaccaagtattacgtaccagcggtaggtcctcgccggcgacatgtctaagaatcagcctcctcgcgacatgtccaagaagccggccgccgccggcggcggcggcggcggcagcgaggacctcaagaagaccgacctctccggcgacgaccctgccgccggcgagatccccgagaagcagccgcctggcaacggaggcgacaaaatggaggaggccgcccaagggcaccaagaagccggaagtcgccgccggcgaggacccgaagaaccagccgcttggcgacgttcgtgaggatgctggtaaccccgaacaacaggcggccggcttcttggacatgtcgcgaagaggctgcttcttagacagtgcgttaattctccaacaccagagggtggaggaaggtgcgctccattggcaagagcgtcagtgcaagcctcggagttgccaaggtggtggaaggaggcgtggaagtgaaacaagcagagcctgtctggatgaaaggcattctgatttggtgctcgtgacaacattgctcgagttcttttgtcttagtgattgagatgctttgttcaagaaaactgagagaaatgagcagctgaatttaatcgtcggtagttctgtgcaagtcaggtggaactttgaactttaattcttctgccactatgtgatatggtgaatactcttctgcttgtaagaaaattctggagttgaaatttgttgcctgctgatgttctctggcctggagtttcagtccttgtagaattctgcctgttttcttctgcagggccagaactcagaatgatgatgatttttcgtttcttcatggttaggtgcagtagatgtgtatggtaaggcacttttgctagagctgtggtgcagtagcatttttgaagttttgtggctggtgtgctaggttataatttttgccctttatgtttgacatgctacttggggcattttgtgtgtcattttctcctgtgttacttacaagtttgtttcacattttgaaacaattttcctttgtttcactttcctgtggttagtttgacatgcatcaaattcacaagttagcttcacaaaataaaagcaagttagagtcacatgtgttatatcacctcatctttgttactgtgtctcttgtaattgattggaaggtggtttatattgtgtaattgataggtgccaaaagaaccaaccatggagcatttgctgccgccgtgctcccctccccttctccctagttcatttcatctgctataacatcagcaacgcatgacaacgtgaatgccacaaagccaacactaccagcaagaactagcacattgtgcacgtagctcttccttctgaaccttgcaagctcttccatatcacgccttcaacaaaaagagcaatgaaagatatggatgcatgttagctaatcgagttgggaaactac

SEQ ID NO: 18003 - DNA, 3389 bp, Zea Mays
cttcatgttgatcacgttggacttacatgatctcgtgtggatggccattttcccccttctgcgtgaatggcatcagtttctctcaagtaacatctttgtcgccgtcatttgatattcctgtaatccatgcattactagctgttctcatctcagttgtgtttcattaccttcaatacatggtttaaatatgatgtttagaaagaggtgattccaacttatggatatattatttgttatatatataaagcatttttatctgaacttcctcgaaaaaaaaaaccctgctaaatctgaaccgtgctttgctcttccacactaccacaactaatgctcaagaactagctgaagcatttttataggttcacggaaccagtacataaaaggacttatcttagacatactacacgtaaaatttccaaacatcaatccaatggcatatacaattgagaagaaacatcacatctacacttccatggcattcccctacagtcagtgagtcacattcttttttctgaccctggggaagctaccagtccaatctgtcaaaaactcttcagccctctttagtacacaatataaaccaccttccaatcaattacaagagacacagtaacaaagatgaggtgatataacacatgtgactctaacttgcttttattttgtgaagctaacttgtgaatttgatgcatgtcaaactaaccacaggaaagtgaaacaaaggaaaattgtttcaaaatgtgaaacaaaattgtaagtaacacaggagaaaatggcacacaaaatgccccaagtagcatgtcaaacataaagggcaaaaattataacctagcacacgagccacaaaacttcaaaaatgctactgcaccacagctctagcaaaagtgccttaccatacacatctactgcacctaaccatgaagaaacgaaaaatcatcatcattctgagttctggccctgcataagaaaacaggcagaattccacaaggactgaaactccaggccagagaacatcagcaggcaacaaatttcaactccagaattttcttacaagcagaagagtattcaccatatcacatagtggcagaagaattaaagttcaaagttccacctgacttgcacagaactaccgacgattaaattcagctgctcatttctctcagttttcttgaacaaagcatcttaatcactaagacaaaagaactcgagcaatgttgtcacgggcaccaaatcagaatgcctttcatccagacaggctctgcttgtttcacttccacgcctccttccaccaccttggcaactccgaggcttgcactgacgctcttgccaatggagcgcaccttcctccaccctgtgttttcatcacaaacatcaccggcgaggcaatcaagtgaccaatataaccaaccccaatgctataaatactgtgcatgatctccttcgtcttctggtcacccgacatcgcgtgaaccttatcgcgagctttctctacggcgaactcgatgccgtacagaaagcccacgtacggcccctatagcgatgagctccaggaaaacgatagccacgattactatggtttggtctcgacgatggattctggtgttatccatctggatggcactgcaacggcaaaacgaaacgggttactgttattgatcggctccattccttacatcagagaaatacagtttgaaaaggatctggtcagttaaatctggatcatcatctaatcatgtgctcctatgcattcatctaactaggaattgtctcttttgtgctctaaccgaggctcaagcaattccagagtagctgaataacctctatatagttttgattgaaaataatatctatgactaggagcaagcaagtatcacacagggtttattccagtcttcactgcttatatcacaaagaggatgaaccactatttgcatggagaaaaactgaatgcaccagcaagtcaccaagtattacgtaccagcggtaggtcctcgccggcgacatgtctaagaatcagcctcctcgcgacatgtccaagaagccggccgccgccggcggcggcggcggcggcagcgaggacctcaagaagaccgacctctccggcgacgaccctgccgccggcgagatccccgagaagcagccgcctggcaacggaggcgacaaaatggaggaggccgcccaagggcaccaagaagccggaagtcgccgccggcgaggacccgaagaaccagccgcttggcgacgttcgtgaggatgctggtaaccccgaacaacaggcggccggcttcttggacatgtcgcgaagaggctgcttcttagacagtgcgttaattctccaacaccagagggtggaggaaggtgcgctccattggcaagagcgtcagtgcaagcctcggagttgccaaggtggtggaaggaggcgtggaagtgaaacaagcagagcctgtctggatgaaaggcattctgatttggtgctcgtgacaacattgctcgagttcttttgtcttagtgattgagatgctttgttcaagaaaactgagagaaatgagcagctgaatttaatcgtcggtagttctgtgcaagtcaggtggaactttgaactttaattcttctgccactatgtgatatggtgaatactcttctgcttgtaagaaaattctggagttgaaatttgttgcctgctgatgttctctggcctggagtttcagtccttgtagaattctgcctgttttcttctgcagggccagaactcagaatgatgatgatttttcgtttcttcatggttaggtgcagtagatgtgtatggtaaggcacttttgctagagctgtggtgcagtagcatttttgaagttttgtggctggtgtgctaggttataatttttgccctttatgtttgacatgctacttggggcattttgtgtgtcattttctcctgtgttacttacaagtttgtttcacattttgaaacaattttcctttgtttcactttcctgtggttagtttgacatgcatcaaattcacaagttagcttcacaaaataaaagcaagttagagtcacatgtgttatatcacctcatctttgttactgtgtctcttgtaattgattggaaggtggtttatattgtgtaattgataggtgccaaaagaaccaaccatggagcatttgctgccgccgtgctcccctccccttctccctagttcatttcatctgctataacatcagcaacgcatgacaacgtgaatgccacaaagccaacactaccagcaagaactagcacattgtgcacgtagctcttccttctgaaccttgcaagctcttccatatcacgccttcaacaaaaagagcaatgaaagatatggatgcatgttagctaatcgagttgggaaactac

SEQ ID NO: 18004 - DNA, 1877 bp, Zea Mays
atcccctcctaggtggtcgtcatggacaacggcaccatcctctccggtgaggctgctatgaaccacgccgccgtcagccccggtacggccatctcgggcttcacgcgcctcctcaaccaaaagctcaaggacgatttggtgaagagcgagatgaagctttcgccatcgtacaagttctccgagagggagggacgggccgccatccaaatccaagccgccggcggcggccaggtcatagagttgtgccccctagatctcgccgacatcctcttctccgagctgaagcacagggcggaggctcacctgggctgtgagctctcggctgctatcatcgccatgccgcatcacctcaactacaacggaaggcaggacgtcgtcaatatggcaaggtacgatgctggcttccgccgggccgccaaggccatcgaccgacagatcgcggcggccgtggcgcatcaccgccacacggagcaaggtgacggcaaggctatccttgtcttgcgtgttggtggccgcacgtccgacgccgccatcttcaagttcatcaatggcgaggctcgctacgtcatggcgtaggatgatatctacttgggaggcaagtagtcaagctcgaagacagatcaatacctactactactactactactatagaaaaaaatcgattctcttgcttgctgggtgggatgcaggtgacgacttcacggcgcggatcatcgactacatggcggagctcatcaaggagccgcaccagtgggacatcaggcaggacgcggaggcgctgcgcaggctaagggtgtcctgcgagcacgccaagaaggcattgagcgaccaggaagagacgatggtgcagatacatgtcaccggtgtcgagtcatcggcgcccctcgcgggccaagctggaggagctcaaccaggacctgttcgacagggtcatgcgacttgtggatggggagtgggtggctgccccggccccacgacgagagccgcaaggacatggtcgatgagatcgtcctcgtcggtagcggcgcgaggatgcccaagctccatcagctcgtcgaggactacttccatggcaggcagccaaacagccgcaagggagtggaaccagaggacgccatcgttcgaggcaccgccattctttcccgtcctaaggcggcgtgctacctggaggagtgctttgactttctttacggcaaggacggacttcctctgggatgtcatgtcttgattagtttagatagagcagtaatcgacccctggccaaggagtcatattgtttgttttaactgttctgttctaaagtctttgtaatatattggtaatgatggataaactctttcgtgttatgcccgtgaaacccgttatcaacttcaatgtataaattctttgagttttcaatctgtcttgctatgtcttaagtcttcacggggcccccgggggttcgccggggttccttttacttggctttttttttcttttttctctgaacctctgttcttgcattctcccagtatttattctgctgtaaaatgttcttaagagttagttctgaattcgcatctctagctaatcaacccaaatcaacccataactaagttcaaatacaatatgtgcagatcgataatcagttctctgatagcccacaaccggtcatgttgtcatttgagggcagtcataagggaaaaatcgaacctttttaagagtaaagatactaagctgaaattagcaaatagcattctttccaataccacagaacctgtgctgcagtttgctgcaactaaatggagaaccaaagatgtataatttgtttcctaccaatatataaacataaggtactccttactctttgttgataattcatcatatgtaaacttgtc

SEQ ID NO: 18005 - DNA, 1276 bp, Zea Mays
taccaagcggacccgcaggtcagaatcttctctcttgacaaggagcaagcctaatcccagaaccccacggtcgtgagaccctagctgccgtcgccgccgccgctgaccggcgacggcgatctagatgggggcgtcggcctccgtgctctcgttcccaacggccgccgcgttcccagcagccgccaccgccgtcgccggggccgccggctgcttcgcgctcggctacctcctggccttcacccgcctcccgcgccacgccgccggcccaggttcgggagggacctccgatgacgattccgaggatgactcggaagaagatgatgacgaaaactccggccgcagtcgcgcggcgaagcgggcgggagggcagaagagggccgggctccggctgctctactgggcacggaacgtggtgaccaagtccgactctgccagggaggcggaaaggtcccggtctcaggccgcggccagtcccctggagatcgagaaccttgctgagataatagaagatttcaaaatggtgttggttgtgaggaatgatctgaagatggggaaggggaagattgccgcacagtgcagtcatgcaactcttgggctattcaaaaaactccaacagagagctccaaaatcactaagaaggtgggagcggtgtgggcaagttaaagtggttgtgaaaatagaaagcgaggaagacatgctagttttacaagggagagcaaagtctttaaatctgccaactcacataaccatagacgctggaagaacacagattgctccaaattcaaggacagtcatggctattctggctgatatggttgatgatgttactggcggtctgaagcttttgtagaaaaccaccttgtcagcattttcaacttgggtcttcatagagcagtgctgggactttgcaggccacagtggtctctgcacttgtactgatgtgcggcagaagaatgaaccttggccccgttggttgacctgagtttcttgtccatgaatttatttggaaggagagcttgcattcttttttcacttgtaccgaccgttatctttggagttgtgatgttagcagttcgaattctggtgttgacaacttatagaccatcatttcttctgtaacatagataagaaaatactatttgactattgtccatttccccttttttattttctttttaataattcgtgcagtagtggacacaatactgagttgctttggagaagtcatcttgattgcggcagtgcaccgggaatcataggccctgtttgtttcggc

SEQ ID NO: 18006 - DNA, 2031 bp, Zea Mays
tgaccggtgaccgctcagtcagcttcagcagctcgagcaggatggccgttgcgctcgccacgtccccactcgcgcacaacgcccttgccccgcccccgatctccgcctcccagtcctcgctgctgctgctgctccagcgccgcgcgtccccgtctccctctccctccctctccccctccggtcacgcctcatcgcggccgtcgcgaccaaggagcctgagctcggcggcggtggatcgggggccggcgacggtgctggaggaggtggcggtggcagcggcagcgacccgaggggaggaggtcaggaaggggcggggaggcagagaaaatggggcatgaactgtccatgtcgcagaaactcagtctcgcctacgccgcgctcgtcggagctggtggtgtaatgggatatatgaagagtggaagccagaaatcctcagccctggtcctgtacttcgtccacactcaactccctgttagacctgtctttgcatcgtcgattggtttaggtatatctggccgcgcttcgtaggtgaaggggtcgcgcttcaaatagaccggcaaaaggttccctgctgatgtcgtgtcccgtggttcccgggtgttgatcggagggtactacagtatgcattttttttttctgtttcttcatgcagttttgctcgcctttggtgtctttaagggactgcttcttttttactcctctgtggatgatttgttgactgtacccacaggttagttcgtcttctgggtaataacagatagcattcgagctgattgatagccgcgggcaatcgtatgatgccacgacagaaaacatggtgcggcattccattacaagtgaacaacgatcaatcaatgtaacaaagtcaacaggcgtagcagtacggtatgcggtattgaggaatccacttcagaatacaacctagcacgcgacaacaaagcaacgacagtaaaatagaggtgttaaggtccccattattagtgcggttccacgctgctgctaccacatacagtatataataacataaataccaatataataaaaccaacagcacgtccctgtcccttcctccccacagcgtcagccagcctttcaccgttcagacttcagacttcgcggctccccaacctttcaagatactgggccttgcgccctgcttgccgtccgcagtcatctccattcccgctgactccatgccatcgaacgacttggcggggctgtacggagctttgctcacgaccctgtttcgtgccatcatttatgtaatcacttgaaatcagtagatccacgataaaaaaaaagttatactaagaaacaattctaaactcagttctaagataaggcaaaaacaggcatctaaagcttacatcagaaaaaaaaatggtgctagtttgcaaccttgagactggatctttaagtggccagcttttccaaatagaacaggataatacacaggaacatcccgattctcagatatgttattttcctaacaggggaaaaacatggtatttggagcagctaaatgggggtaatgttggtttttgtatctactgctggtcccagaactctgtcttgtgttaatatcgatttgcagattttttttttaaaaaaaaaatctcaagggagttacatgatccaaggctatttgcagctatatgttgtattatggaagcaggctctctaccaatctttctgtgaagaaattatagattttttttagggatgtcattgagcacttgtcagcagaaagtgcaatcatttaaatgctataacagcaaattttattttatttttaccctgcctggaggacaaaaaacagaatacggtacaaaatatactgttgactactgtggtgccaatagtcggggaaaaaattagtgtggtaccacatacagcagtttataactaaagttttaaacatgtagattgtagaataaggggcctaacaataagattcagaatttcagagccctgttgctatcatctatcatgctaacctgtcacgacgtttctcaaggaagcgctggagag

SEQ ID NO: 18007 - DNA, 3336 bp, Zea Mays
gccaagtcctggcggcgatcagagctcacgtcccagcatctgcgcacgccggtggctaggggccatcacagtggtatcaaagctctctgatcctcggtggggcgcctgagggtcgtgtcctctttggcggcgattccgttccagcgacctaggttctcgcggtgcaagcgtttcttctccgtcggctccaacgtcttcggttcttcatcggcgtttcccctcctccccagcttactcgtctacctcgcgtcgacatcatcccatgacgcggttgtgcttctcgacacggaactcctcctgcagtcgggatcggaacaggaccagggcggtccttgacaggaggtgtgcgaggtacaaacaaccaactcgattcattctgttcgcgatggaagagtggaggaaggaggatgcagggcgttgggatagggtgatgaaccggttggatcgtttgattcagaagtcggaagtggtggatgacgtccagcaaacaatcccgattcagtcgaggttagcagcagaggtggcaaccgaatggactgtgttggcacgtcaaatgaaggaaaccaaggctagggatatggagatgtggcctgaaaacagggttggttggatccacggtctggtgaacgaggatgtcagtatgggcttgctgcaccgggtgttggaggtatggcccctctggtgtttgatgaaatgcctcacaacagcagtgaggcggtggttgtcctgttccctgaagattcagattccttggtgttcagtgaactagtgggtctaaaagtggcatgggatgaggagatgcaatctgaaactcacatgcatgaaggtttattgaagcagcttgctcgaggtggagaagatttagaagaatcggctagcaaggatgcttatgttgaagatgaagctagtaggcctgactcaccgagtgaggcaactgcggtggttaagaatggtggaagcatggaggagcttcttcctgctagggctgacagtgtgctagaggatagcctggagaaggagcagaatgctgaagatcaggctgctgttagtaaagtggaagaggttggcacagcggctgaaaatgctgatgttattggagctggcggtattttctcccaagttttggctttggaatcaaccgctgaatttaatggtgcagggagctctgaggctgtgaagcagatcttgaaggagttggcagaatgcttctctaatggtagtatctctcgagagttcatcagtagcagggttgggcagatcatatttgatgaatctgatgctgatgaagatgaagatgatgagggggaggagaaagtatttggttcatcagacccttatttgcagcatgatttcagccctgctcggtcaaattcttttagccttttaaagctcgtagttacggcttaccctacagaagagaggaccggtgaagagctggagattggacttggacagaagatggcagttgcaatcattggcaagcttcttgcagactcggtgttgtcattagagcaaatagtttggagtagactcgatagtgtatccatctactggcctgaagtgctgttgatgattggtccatatggaggtcttgttcaatacaagtatggtgaacccacaaaacatattcctgagtgtgatggtgtgagaatcctctttaactcaagtatgagagttatacaccgagcctcagtcttgactacatcatttgttggcattggaagcaagattctagcagcatttctatacgatgttcatgatcaatgtgccaggcagaacaaagacagtgttcgatatggaataactggactgacacaatggtggctcaaggcttttagccaaggaaacagtgatatggcagttccgtcacagccaaacgatatgttgccaatagtgatcattcacagtccatatgggactgtgttctcagcctcacagtattcttcactcggttgtttctcttttaatgtgttctatgggtatgaaaccttggtgtgggcagccatagtgctcaaggggaatagagatccaaggatggttgcttggactcaacatatgactgctgccagttccatgtttaaagagccactggtcagggctcagcagctcattgagggtgtcgaggagcgcatattgttcaacaatgacacactcaagcttgccacaccattttttggtgttctcaaccatcttatttctgcaaccatgagtggtgtggtgtgctgccttcctttattgggacagcggaattctgattttcagaagcctgctgttaatctgatttccttttcgcatttccatttttttcaactcatctcacgaggtaccaagcagttctgtaatccaatagagtgtgactccacaaacatgatgtctgctgctaaccctcgccacggttgctacttcacggcgccggttatgatccatgggaaaatgagcactaagtggatgagcaaaagttgaatgtgcaaaacaagaaattcactggtgttgtccaactaatttggatcctggaagtacataattcctatgtgacagtttctgctgctcagaattttttgcaaaaactagctattcacagtcaagatgcagcacgtttctcagttcaacagggtgctatttggatacatcaccaaatctgggtgggcagcacctcagcacttagaactaagctgatttcagtcttgtatgactcagcagttggggaacatttggaaggggctcggttcacatcaatgttaagggagcagttggcaacagctcaaaacagaatgaagttgaaggctgatcgtcaccgaactgaacgccagtttcaagtgttgctcaagctccaaacgtacgcgcaacatacagtggtcactcgactgtgtccaaagcttgtgttcttttttttttggccttacaagattgtggagcatgtgggagaagttgcatacgtttggatttgcctcagtctgctcaggatgtgctgcctctgaaattttggaccgcagatcggtgaaaaagggcaattgtacagttccacaagtgctgttcaggtggagtctcattccgcaggatgcagctacctaggaggactaccatgtgcttcaccatcgctaaccacatgcccttgcttggggtcaagcaagctctgcagggggggcagatgtcacacctgatgaagcagtgacagaggtagtagaagctgaagtctgaagaggagccattgtcgtgcgatattaggtgtgtgtttctttttttgttgtaaatcgtgtgggctgtgttggacttgtgtgagtgatggtgttgggccggcctatctgggatgccatataagtatgtaatagacttgag

SEQ ID NO: 18008 - DNA, 990 bp, Zea Mays
gtttaattcagtttttgctgcaattacaccatcagtacaagcttatttgtgaattactaaggatactactggccatagtgcagatggtaaagctctcacttcagaaccgcatataggggaaacacatgtcaactcagcttcagaatccataccaaatgacgcagctcccccaacccagagcaaaatgaatgggtcgaccaagaaatcattagtcaacggtgttttggatcaaccaaatgccaactcagggctagaatcttcgggaaatgattatcctagctacactaactcgagcagtgctatgccacccgcgagtaccgagttaattgggtctgcagctgctgttatagatgttgattctgctgagaatggcccaggtacgaaaccagaacaaccggctaagggagcctcgagagcatcgaaatccaaggttgttccacgaggacagaagagggtgttgcgaagcgcaacaagaggaagagcgacgtaggggcattgctgcgctacattgttgtgtactaatatatgttgacggcccagaagggcaacatgatccctaggttaactagagctagcgccgactggtcgtttccacgtacgatgcactgcgcatcagcctgtatccatgttgtattatcgtagggcttgtaatgaccacatgccctggttagagttgatcattaggaccagtagctgcttgatttgtgtctcggtgatctagctttgggtagtttgtgcagttggaaggagacagtttgttggttgtattgtattgcagcgcacagctagcaagtgttgttgtagccatcaggtacgtgttgtgtagtgaatccaggtccagggacagagctgttcctctgtatggtggaccctgaccctttgttttgtgccatggggcctttctgtgttgtgcttacatgagctggagctgctttatttttctttttttatacgattaatacgctgctgatgagtctttttttttgtgct

SEQ ID NO: 18009 - DNA, 2335 bp, Zea Mays
caaaatcgcctcacgcttccgtttcgaatccttcgtcgcctcacgctcacgctcacgctgcttgctcctcctcccccccatccctccgcccctcccatggcgtccctcttcggggctcgccgccggcgatcgccggagtacgacggcgaggacgatagatccggcggagggagggccaagcgccggcgcctgtcgccggaggaggcggcggcgtcgccggcggagccgggcgcggcgacggggactagccacggctggctctccggcttcgtctccggagcgaagagggccatttcttccgttttgctgtcctcttcgcccgaggagaccggctcgggggaggacggggaggtggaggaggaggacgacgacgtatacgaagagggcatcgacttgaatgaaaatgaagatattcatgatattcacggggaaatagttccttatagcgagtcaaaacttgctattgagcaaatggttatgaaggaaacattctcaagggatgaatgtgataggatggtagagctaataaaatcaagagttagagattctactcctgaaacccatgagtatggaaagcaagaagaaatcccaagtaggaatgcaggcattgcacatgacttcacaggaacatgccgctccttgagccgtgataggaatttcactgaatcggtcccattctctagtatgagaatgagacctggtcattcttctccaggctttccactccaagcatcacctcagctatgcactgcagcagttagggaagcaaaaaaatggttggaagagaaaaggcagggactgggcgtaaaacctgaagacaatggatcatgcacattaaatacagatatatttagttctcgtgatgactctgacaagggttctccagttgatttggcgaaatcatacatgcggtcattacctccttggcaatccccattcttaggccatcaaaagtttgacacatcaccctccaaatactctatctcgtcaacaaaggtaactacaaaggaggactacctttccagcttttggacaaaattggaggaatcacgaatagctcgcattggatcatctggagattctgctgttgcttctaaattatggaattatggttccaattccagattatttgagaatgacacttccatattctcattgggcaccgatgagaaagttggagatcctaccaaaactcataatggctctgagaaagttgcagcaacagaaccactcggtagatgctccttacttattacaccaactgaagatagaactgatggtattactgagcctgtggaccttgcaaagaataatgagaatgcaccccaagaataccaagctgcatctgaaattatccctgataaagttgcagagggtaatgatgtgtcttccacagaattactaaggatactactggccatagtgcagatggtaaagctctcacttcagaaccgcatataggggaaacacatgtcaactcagcttcagaatccataccaaatgacgcagctcccccaacccagagcaaaatgaatgggtcgaccaagaaatcattagtcaacggtgttttggatcaaccaaatgccaactcagggctagaatcttcgggaaatgattatcctagctacactaactcgagcagtgctatgccacccgcgagtaccgagttaattgggtctgcagctgctgttatagatgttgattctgctgagaatggcccaggtacgaaaccagaacaaccggctaagggagcctcgagagcatcgaaatccaaggttgttccacgaggacagaagagggtgttgcgaagcgcaacaagaggaagagcgacgtaggggcattgctgcgctacattgttgtgtactaatatatgttgacggcccagaagggcaacatgatccctaggttaactagagctagcgccgactggtcgtttccacgtacgatgcactgcgcatcagcctgtatccatgttgtattatcgtagggcttgtaatgaccacatgccctggttagagttgatcattaggaccagtagctgcttgatttgtgtctcggtgatctagctttgggtagtttgtgcagttggaaggagacagtttgttggttgtattgtattgcagcgcacagctagcaagtgttgttgtagccatcaggtacgtgttgtgtagtgaatccaggtccagggacagagctgttcctctgtatggtggaccctgaccctttgttttgtgccatggggcctttctgtgttgtgcttacatgagctggagctgctttatttttctttttttatacgattaatacgctgctgatgagtctttttttttgtgct

SEQ ID NO: 18010 - DNA, 2236 bp, Zea Mays
caaaatcgcctcacgcttccgtttcgaatccttcgtcgcctcacgctcacgctcacgctgcttgctcctcctcccccccatccctccgcccctcccatggcgtccctcttcggggctcgccgccggcgatcgccggagtacgacggcgaggacgatagatccggcggagggagggccaagcgccggcgcctgtcgccggaggaggcggcggcgtcgccggcggagccgggcgcggcgacggggactagccacggctggctctccggcttcgtctccggagcgaagagggccatttcttccgttttgctgtcctcttcgcccgaggagaccggctcgggggaggacggggaggtggaggaggaggacgacgacgtatacgaagagggcatcgacttgaggatgaatgtgataggatggtagagctaataaaatcaagagttagagattctactcctgaaacccatgagtatggaaagcaagaagaaatcccaagtaggaatgcaggcattgcacatgacttcacaggaacatgccgctccttgagccgtgataggaatttcactgaatcggtcccattctctagtatgagaatgagacctggtcattcttctccaggctttccactccaagcatcacctcagctatgcactgcagcagttagggaagcaaaaaaatggttggaagagaaaaggcagggactgggcgtaaaacctgaagacaatggatcatgcacattaaatacagatatatttagttctcgtgatgactctgacaagggttctccagttgatttggcgaaatcatacatgcggtcattacctccttggcaatccccattcttaggccatcaaaagtttgacacatcaccctccaaatactctatctcgtcaacaaaggtaactacaaaggaggactacctttccagcttttggacaaaattggaggaatcacgaatagctcgcattggatcatctggagattctgctgttgcttctaaattatggaattatggttccaattccagattatttgagaatgacacttccatattctcattgggcaccgatgagaaagttggagatcctaccaaaactcataatggctctgagaaagttgcagcaacagaaccactcggtagatgctccttacttattacaccaactgaagatagaactgatggtattactgagcctgtggaccttgcaaagaataatgagaatgcaccccaagaataccaagctgcatctgaaattatccctgataaagttgcagagggtaatgatgtgtcttccacaggaattactaaggatactactggccatagtgcagatggtaaagctctcacttcagaaccgcatataggggaaacacatgtcaactcagcttcagaatccataccaaatgacgcagctcccccaacccagagcaaaatgaatgggtcgaccaagaaatcattagtcaacggtgttttggatcaaccaaatgccaactcagggctagaatcttcgggaaatgattatcctagctacactaactcgagcagtgctatgccacccgcgagtaccgagttaattgggtctgcagctgctgttatagatgttgattctgctgagaatggcccaggtacgaaaccagaacaaccggctaagggagcctcgagagcatcgaaatccaaggttgttccacgaggacagaagagggtgttgcgaagcgcaacaagaggaagagcgacgtaggggcattgctgcgctacattgttgtgtactaatatatgttgacggcccagaagggcaacatgatccctaggttaactagagctagcgccgactggtcgtttccacgtacgatgcactgcgcatcagcctgtatccatgttgtattatcgtagggcttgtaatgaccacatgccctggttagagttgatcattaggaccagtagctgcttgatttgtgtctcggtgatctagctttgggtagtttgtgcagttggaaggagacagtttgttggttgtattgtattgcagcgcacagctagcaagtgttgttgtagccatcaggtacgtgttgtgtagtgaatccaggtccagggacagagctgttcctctgtatggtggaccctgaccctttgttttgtgccatggggcctttctgtgttgtgcttacatgagctggagctgctttatttttctttttttatacgattaatacgctgctgatgagtctttttttttgtgct

SEQ ID NO: 18011 - DNA, 2149 bp, Zea Mays
caaaatcgcctcacgcttccgtttcgaatccttcgtcgcctcacgctcacgctcacgctgcttgctcctcctcccccccatccctccgcccctcccatggcgtccctcttcggggctcgccgccggcgatcgccggagtacgacggcgaggacgatagatccggcggagggagggccaagcgccggcgcctgtcgccggaggaggcggcggcgtcgccggcggagccgggcgcggcgacggggactagccacggctggctctccggcttcgtctccggagcgaagagggccatttcttccgttttgctgtcctcttcgcccgaggagaccggctcgggggaggacggggaggtggaggaggaggacgacgacgtatacgaagagggcatcgacttgaatgaaaatgaagatattcatgatattcacggggaaatagttccttatagcgagtcaaaacttgctattgagcaaatggttatgaaggaaacattctcaagggatgaatgtgataggatggtagagctaataaaatcaagagttagagattctactcctgaaacccatgagtatggaaagcaagaagaaatcccaagtaggaatgcaggcattgcacatgacttcacaggaacatgccgctccttgagccgtgataggaatttcactgaatcggtcccattctctagtatgagaatgagacctggtcattcttctccaggctttccactccaagcatcacctcagctatgcactgcagcagttagggaagcaaaaaaatggttggaagagaaaaggcagggactgggcgtaaaacctgaagacaatggatcatgcacattaaatacagatatatttagttctcgtgatgactctgacaagggttctccagttgatttggcgaatagctcgcattggatcatctggagattctgctgttgcttctaaattatggaattatggttccaattccagattatttgagaatgacacttccatattctcattgggcaccgatgagaaagttggagatcctaccaaaactcataatggctctgagaaagttgcagcaacagaaccactcggtagatgctccttacttattacaccaactgaagatagaactgatggtattactgagcctgtggaccttgcaaagaataatgagaatgcaccccaagaataccaagctgcatctgaaattatccctgataaagttgcagagggtaatgatgtgtcttccacaggatggtaaagctctcacttcagaaccgcatataggggaaacacatgtcaactcagcttcagaatccataccaaatgacgcagctcccccaacccagagcaaaatgaatgggtcgaccaagaaatcattagtcaacggtgttttggatcaaccaaatgccaactcagggctagaatcttcgggaaatgattatcctagctacactaactcgagcagtgctatgccacccgcgagtaccgagttaattgggtctgcagctgctgttatagatgttgattctgctgagaatggcccaggtacgaaaccagaacaaccggctaagggagcctcgagagcatcgaaatccaaggttgttccacgaggacagaagagggtgttgcgaagcgcaacaagaggaagagcgacgtaggggcattgctgcgctacattgttgtgtactaatatatgttgacggcccagaagggcaacatgatccctaggttaactagagctagcgccgactggtcgtttccacgtacgatgcactgcgcatcagcctgtatccatgttgtattatcgtagggcttgtaatgaccacatgccctggttagagttgatcattaggaccagtagctgcttgatttgtgtctcggtgatctagctttgggtagtttgtgcagttggaaggagacagtttgttggttgtattgtattgcagcgcacagctagcaagtgttgttgtagccatcaggtacgtgttgtgtagtgaatccaggtccagggacagagctgttcctctgtatggtggaccctgaccctttgttttgtgccatggggcctttctgtgttgtgcttacatgagctggagctgctttatttttctttttttatacgattaatacgctgctgatgagtctttttttttgtgct

SEQ ID NO: 18012 - DNA, 2304 bp, Zea Mays
caaaatcgcctcacgcttccgtttcgaatccttcgtcgcctcacgctcacgctcacgctgcttgctcctcctcccccccatccctccgcccctcccatggcgtccctcttcggggctcgccgccggcgatcgccggagtacgacggcgaggacgatagatccggcggagggagggccaagcgccggcgcctgtcgccggaggaggcggcggcgtcgccggcggagccgggcgcggcgacggggactagccacggctggctctccggcttcgtctccggagcgaagagggccatttcttccgttttgctgtcctcttcgcccgaggagaccggctcgggggaggacggggaggtggaggaggaggacgacgacgtatacgaagagggcatcgacttgaatgaaaatgaagatattcatgatattcacggggaaatagttccttatagcgagtcaaaacttgctattgagcaaatggttatgaaggaaacattctcaagggatgaatgtgataggatggtagagctaataaaatcaagagttagagattctactcctgaaacccatgagtatggaaagcaagaagaaatcccaagtaggaatgcaggcattgcacatgacttcacaggaacatgccgctccttgagccgtgataggaatttcactgaatcggtcccattctctagtatgagaatgagacctggtcattcttctccaggctttccactccaagcatcacctcagctatgcactgcagcagttagggaagcaaaaaaatggttggaagagaaaaggcagggactgggcgtaaaacctgaagacaatggatcatgcacattaaatacagatatatttagttctcgtgatgactctgacaagggttctccagttgatttggcgaaatcatacatgcggtcattacctccttggcaatccccattcttaggccatcaaaagtttgacacatcaccctccaaatactctatctcgtcaacaaaggtaactacaaaggaggactacctttccagcttttggacaaaattggaggaatcacgaatagctcgcattggatcatctggagattctgctgttgcttctaaattatggaattatggttccaattccagattatttgagaatgacacttccatattctcattgggcaccgatgagaaagttggagatcctaccaaaactcataatggctctgagaaagttgcagcaacagaaccactcggtagatgctccttacttattacaccaactgaagatagaactgatggtattactgagcctgtggaccttgcaaagaataatgagaatgcaccccaagaataccaagctgcatctgaaattatccctgataaagttgcagagggtaatgatgtgtcttccacaggatggtaaagctctcacttcagaaccgcatataggggaaacacatgtcaactcagcttcagaatccataccaaatgacgcagctcccccaacccagagcaaaatgaatgggtcgaccaagaaatcattagtcaacggtgttttggatcaaccaaatgccaactcagggctagaatcttcgggaaatgattatcctagctacactaactcgagcagtgctatgccacccgcgagtaccgagttaattgggtctgcagctgctgttatagatgttgattctgctgagaatggcccaggtacgaaaccagaacaaccggctaagggagcctcgagagcatcgaaatccaaggttgttccacgaggacagaagagggtgttgcgaagcgcaacaagaggaagagcgacgtaggggcattgctgcgctacattgttgtgtactaatatatgttgacggcccagaagggcaacatgatccctaggttaactagagctagcgccgactggtcgtttccacgtacgatgcactgcgcatcagcctgtatccatgttgtattatcgtagggcttgtaatgaccacatgccctggttagagttgatcattaggaccagtagctgcttgatttgtgtctcggtgatctagctttgggtagtttgtgcagttggaaggagacagtttgttggttgtattgtattgcagcgcacagctagcaagtgttgttgtagccatcaggtacgtgttgtgtagtgaatccaggtccagggacagagctgttcctctgtatggtggaccctgaccctttgttttgtgccatggggcctttctgtgttgtgcttacatgagctggagctgctttatttttctttttttatacgattaatacgctgctgatgagtctttttttttgtgct

SEQ ID NO: 18013 - DNA, 2245 bp, Zea Mays
caaaatcgcctcacgcttccgtttcgaatccttcgtcgcctcacgctcacgctcacgctgcttgctcctcctcccccccatccctccgcccctcccatggcgtccctcttcggggctcgccgccggcgatcgccggagtacgacggcgaggacgatagatccggcggagggagggccaagcgccggcgcctgtcgccggaggaggcggcggcgtcgccggcggagccgggcgcggcgacggggactagccacggctggctctccggcttcgtctccggagcgaagagggccatttcttccgttttgctgtcctcttcgcccgaggagaccggctcgggggaggacggggaggtggaggaggaggacgacgacgtatacgaagagggcatcgacttgaatgaaaatgaagatattcatgatattcacggggaaatagttccttatagcgagtcaaaacttgctattgagcaaatggttatgaaggaaacattctcaagggatgaatgtgataggatggtagagctaataaaatcaagagttagagattctactcctgaaacccatgagtatggaaagcaagaagaaatcccaatatgagaatgagacctggtcattcttctccaggctttccactccaagcatcacctcagctatgcactgcagcagttagggaagcaaaaaaatggttggaagagaaaaggcagggactgggcgtaaaacctgaagacaatggatcatgcacattaaatacagatatatttagttctcgtgatgactctgacaagggttctccagttgatttggcgaaatcatacatgcggtcattacctccttggcaatccccattcttaggccatcaaaagtttgacacatcaccctccaaatactctatctcgtcaacaaaggtaactacaaaggaggactacctttccagcttttggacaaaattggaggaatcacgaatagctcgcattggatcatctggagattctgctgttgcttctaaattatggaattatggttccaattccagattatttgagaatgacacttccatattctcattgggcaccgatgagaaagttggagatcctaccaaaactcataatggctctgagaaagttgcagcaacagaaccactcggtagatgctccttacttattacaccaactgaagatagaactgatggtattactgagcctgtggaccttgcaaagaataatgagaatgcaccccaagaataccaagctgcatctgaaattatccctgataaagttgcagagggtaatgatgtgtcttccacaggaattactaaggatactactggccatagtgcagatggtaaagctctcacttcagaaccgcatataggggaaacacatgtcaactcagcttcagaatccataccaaatgacgcagctcccccaacccagagcaaaatgaatgggtcgaccaagaaatcattagtcaacggtgttttggatcaaccaaatgccaactcagggctagaatcttcgggaaatgattatcctagctacactaactcgagcagtgctatgccacccgcgagtaccgagttaattgggtctgcagctgctgttatagatgttgattctgctgagaatggcccaggtacgaaaccagaacaaccggctaagggagcctcgagagcatcgaaatccaaggttgttccacgaggacagaagagggtgttgcgaagcgcaacaagaggaagagcgacgtaggggcattgctgcgctacattgttgtgtactaatatatgttgacggcccagaagggcaacatgatccctaggttaactagagctagcgccgactggtcgtttccacgtacgatgcactgcgcatcagcctgtatccatgttgtattatcgtagggcttgtaatgaccacatgccctggttagagttgatcattaggaccagtagctgcttgatttgtgtctcggtgatctagctttgggtagtttgtgcagttggaaggagacagtttgttggttgtattgtattgcagcgcacagctagcaagtgttgttgtagccatcaggtacgtgttgtgtagtgaatccaggtccagggacagagctgttcctctgtatggtggaccctgaccctttgttttgtgccatggggcctttctgtgttgtgcttacatgagctggagctgctttatttttctttttttatacgattaatacgctgctgatgagtctttttttttgtgct

SEQ ID NO: 18014 - DNA, 1697 bp, Zea Mays
cataagtcgtctttctccttgaccagccattagcgtcgatcgatgatttagcacggagaggctcaaggctgtccacacagtatctacagtagcctcaactgcgacagtggtagtaatcgtcgccctcatcagaaggtgccgcgtcgtgaggaagaagatgaagaagaaaatcgtgaagaaagtcctggaggagattgagaaaaagaaccgcgagatgcaggccagcaacgccgtggaagatgtggcgatcgaggtcgggccagtggagacgtttctcaaccagatcctcaacgagaagccgatgcgtttcagctccgagcagctggcggcctgcacccggaactactcgtcggagctagggtccggcggctacggcgtggtctacaagggcgagctgccgaacggcctgctggtggccgcgaaagtcctcaaggtgtcgtccatgaacaggaaggtccaggaggcgttcatggcggagatcggcaccatcggccggacgtaccacgtgcacctcgtccgcctctacggcttctgcttcgacgcgagcaccaaagcgctagtgtacgagttcctggagaacggctcgctggagaagtacctttacggcggtgacgagggcagcacgacgagcacgaggctggagtgggggacgctgcacggcatcgccgtcggcacggccaaggggatcaggtacctgcacgaggagtgccagcagcggatcgtgcactacgacatcaagccggccaacatcctcctcacggccgactacaccccgaaggtggcggacttcgggctggcgcggctgggagagcgcgagaacacgcacatgtcgctgaccggcggcggccgcgggacgcctgggtacgcggcgccggagctgtggatggcgatgccggcgtcggagaagtgcgacgtgtacagcttcgggatggtgctgttcgagatcctgggacggcgccggaactacgacccctgccttgagggcgagagcaaggagtggttcccgagatgggtgtgggagaagtacgagcagggtgagatcgagcacgtcgtgtcctgctcctgcgacgggatcgtcggaggggcggacagggagaaggcggagatcatgtgcaaggtggcgctgtggtgcgtgcagttccagccgtcggcgcggccgacgatgagcagcgtggtgcggatgctggagggggagatgcccattgtcccgcccgtgaacccgttccattatctcatggaaagcggcggcggctcaactagctcgggattgtggagcggcacataccagagcagcagcagagacaccgccggcgcagagttgtcgcctgtcggatagctctgctgccaggtcaatcggcgtcgacgcgccgtgatcgaagatgttgagcggactcgtggggggtcgtgttgatgaaacagagtttgtagtcctgtagtacacattagttaatgctttaaaaaacaatgaaggccgtggtttgtaaattagcatcgtgttttggaggactatataaaagataaaagattcgcgcacgacaaaaaaaaatcgtgcatgcgttgagtgaaatgtacttgtaccggcaggtaccaaaagatagaccattattttaggggaaagttaggtagtatttggttatattgctctgttttgagactgtttgtttggaattaaagtaaacagtcactctaattaagca

SEQ ID NO: 18015 - DNA, 1848 bp, Zea Mays
ctcaacctcgtcaggaacggaccccatcgcgcggccgacgtctctaattggtcagcaacggctgcgtgcgtgttccttccttggcctttcataagtcgtctttctccttgaccagccattagcgtcgatcgatgatttagcacggagaggctcaaggctgtccacacagactctaaacaagcttacagcccggatgcgtcgccgacatggtgaatgcagtggctacaatcatatctacagtagcctcaactgcgacagtggtagtaatcgtcgccctcatcagaaggtgccgcgtcgtgaggaagaagatgaagaagaaaatcgtgaagaaagtcctggaggagattgagaaaaagaaccgcgagatgcaggccagcaacgccgtggaagatgtggcgatcgaggtcgggccagtggagacgtttctcaaccagatcctcaacgagaagccgatgcgtttcagctccgagcagctggcggcctgcacccggaactactcgtcggagctagggtccggcggctacggcgtggtctacaagggcgagctgccgaacggcctgctggtggccgcgaaagtcctcaaggtgtcgtccatgaacaggaaggtccaggaggcgttcatggcggagatcggcaccatcggccggacgtaccacgtgcacctcgtccgcctctacggcttctgcttcgacgcgagcaccaaagcgctagtgtacgagttcctggagaacggctcgctggagaagtacctttacggcggtgacgagggcagcacgacgagcacgaggctggagtgggggacgctgcacggcatcgccgtcggcacggccaaggggatcaggtacctgcacgaggagtgccagcagcggatcgtgcactacgacatcaagccggccaacatcctcctcacggccgactacaccccgaaggtggcggacttcgggctggcgcggctgggagagcgcgagaacacgcacatgtcgctgaccggcggcggccgcgggacgcctgggtacgcggcgccggagctgtggatggcgatgccggcgtcggagaagtgcgacgtgtacagcttcgggatggtgctgttcgagatcctgggacggcgccggaactacgacccctgccttgagggcgagagcaaggagtggttcccgagatgggtgtgggagaagtacgagcagggtgagatcgagcacgtcgtgtcctgctcctgcgacgggatcgtcggaggggcggacagggagaaggcggagatcatgtgcaaggtggcgctgtggtgcgtgcagttccagccgtcggcgcggccgacgatgagcagcgtggtgcggatgctggagggggagatgcccattgtcccgcccgtgaacccgttccattatctcatggaaagcggcggcggctcaactagctcgggattgtggagcggcacataccagagcagcagcagagacaccgccggcgcagagttgtcgcctgtcggatagctctgctgccaggtcaatcggcgtcgacgcgccgtgatcgaagatgttgagcggactcgtggggggtcgtgttgatgaaacagagtttgtagtcctgtagtacacattagttaatgctttaaaaaacaatgaaggccgtggtttgtaaattagcatcgtgttttggaggactatataaaagataaaagattcgcgcacgacaaaaaaaaatcgtgcatgcgttgagtgaaatgtacttgtaccggcaggtaccaaaagatagaccattattttaggggaaagttaggtagtatttggttatattgctctgttttgagactgtttgtttggaattaaagtaaacagtcactctaattaagca

SEQ ID NO: 18016 - DNA, 1867 bp, Zea Mays
ccatggaaacccagctcaacctcgtcaggaacggaccccatcgcgcggccgacgtctctaattggtcagcaacggctgcgtgcgtgttccttccttggcctttcataagtcgtctttctccttgaccagccattagcgtcgatcgatgatttagcacggagaggctcaaggctgtccacacagcgtagactctaaacaagcttacagcccggatgcgtcgccgacatggtgaatgcagtggctacaatcatatctacagtagcctcaactgcgacagtggtagtaatcgtcgccctcatcagaaggtgccgcgtcgtgaggaagaagatgaagaagaaaatcgtgaagaaagtcctggaggagattgagaaaaagaaccgcgagatgcaggccagcaacgccgtggaagatgtggcgatcgaggtcgggccagtggagacgtttctcaaccagatcctcaacgagaagccgatgcgtttcagctccgagcagctggcggcctgcacccggaactactcgtcggagctagggtccggcggctacggcgtggtctacaagggcgagctgccgaacggcctgctggtggccgcgaaagtcctcaaggtgtcgtccatgaacaggaaggtccaggaggcgttcatggcggagatcggcaccatcggccggacgtaccacgtgcacctcgtccgcctctacggcttctgcttcgacgcgagcaccaaagcgctagtgtacgagttcctggagaacggctcgctggagaagtacctttacggcggtgacgagggcagcacgacgagcacgaggctggagtgggggacgctgcacggcatcgccgtcggcacggccaaggggatcaggtacctgcacgaggagtgccagcagcggatcgtgcactacgacatcaagccggccaacatcctcctcacggccgactacaccccgaaggtggcggacttcgggctggcgcggctgggagagcgcgagaacacgcacatgtcgctgaccggcggcggccgcgggacgcctgggtacgcggcgccggagctgtggatggcgatgccggcgtcggagaagtgcgacgtgtacagcttcgggatggtgctgttcgagatcctgggacggcgccggaactacgacccctgccttgagggcgagagcaaggagtggttcccgagatgggtgtgggagaagtacgagcagggtgagatcgagcacgtcgtgtcctgctcctgcgacgggatcgtcggaggggcggacagggagaaggcggagatcatgtgcaaggtggcgctgtggtgcgtgcagttccagccgtcggcgcggccgacgatgagcagcgtggtgcggatgctggagggggagatgcccattgtcccgcccgtgaacccgttccattatctcatggaaagcggcggcggctcaactagctcgggattgtggagcggcacataccagagcagcagcagagacaccgccggcgcagagttgtcgcctgtcggatagctctgctgccaggtcaatcggcgtcgacgcgccgtgatcgaagatgttgagcggactcgtggggggtcgtgttgatgaaacagagtttgtagtcctgtagtacacattagttaatgctttaaaaaacaatgaaggccgtggtttgtaaattagcatcgtgttttggaggactatataaaagataaaagattcgcgcacgacaaaaaaaaatcgtgcatgcgttgagtgaaatgtacttgtaccggcaggtaccaaaagatagaccattattttaggggaaagttaggtagtatttggttatattgctctgttttgagactgtttgtttggaattaaagtaaacagtcactctaattaagca

SEQ ID NO: 18017 - DNA, 1908 bp, Zea Mays
ccatggaaacccagctcaacctcgtcaggaacggaccccatcgcgcggccgacgtctctaattggtcagcaacggctgcgtgcgtgttccttccttggcctttcataagtcgtctttctccttgaccagccattagcgtcgatcgatgatttagcacggagaggctcaaggctgtccacacagcctggattgttcgatcgttcttggagctcgcagctggagcgagagaactctaaacaagcttacagcccggatgcgtcgccgacatggtgaatgcagtggctacaatcatatctacagtagcctcaactgcgacagtggtagtaatcgtcgccctcatcagaaggtgccgcgtcgtgaggaagaagatgaagaagaaaatcgtgaagaaagtcctggaggagattgagaaaaagaaccgcgagatgcaggccagcaacgccgtggaagatgtggcgatcgaggtcgggccagtggagacgtttctcaaccagatcctcaacgagaagccgatgcgtttcagctccgagcagctggcggcctgcacccggaactactcgtcggagctagggtccggcggctacggcgtggtctacaagggcgagctgccgaacggcctgctggtggccgcgaaagtcctcaaggtgtcgtccatgaacaggaaggtccaggaggcgttcatggcggagatcggcaccatcggccggacgtaccacgtgcacctcgtccgcctctacggcttctgcttcgacgcgagcaccaaagcgctagtgtacgagttcctggagaacggctcgctggagaagtacctttacggcggtgacgagggcagcacgacgagcacgaggctggagtgggggacgctgcacggcatcgccgtcggcacggccaaggggatcaggtacctgcacgaggagtgccagcagcggatcgtgcactacgacatcaagccggccaacatcctcctcacggccgactacaccccgaaggtggcggacttcgggctggcgcggctgggagagcgcgagaacacgcacatgtcgctgaccggcggcggccgcgggacgcctgggtacgcggcgccggagctgtggatggcgatgccggcgtcggagaagtgcgacgtgtacagcttcgggatggtgctgttcgagatcctgggacggcgccggaactacgacccctgccttgagggcgagagcaaggagtggttcccgagatgggtgtgggagaagtacgagcagggtgagatcgagcacgtcgtgtcctgctcctgcgacgggatcgtcggaggggcggacagggagaaggcggagatcatgtgcaaggtggcgctgtggtgcgtgcagttccagccgtcggcgcggccgacgatgagcagcgtggtgcggatgctggagggggagatgcccattgtcccgcccgtgaacccgttccattatctcatggaaagcggcggcggctcaactagctcgggattgtggagcggcacataccagagcagcagcagagacaccgccggcgcagagttgtcgcctgtcggatagctctgctgccaggtcaatcggcgtcgacgcgccgtgatcgaagatgttgagcggactcgtggggggtcgtgttgatgaaacagagtttgtagtcctgtagtacacattagttaatgctttaaaaaacaatgaaggccgtggtttgtaaattagcatcgtgttttggaggactatataaaagataaaagattcgcgcacgacaaaaaaaaatcgtgcatgcgttgagtgaaatgtacttgtaccggcaggtaccaaaagatagaccattattttaggggaaagttaggtagtatttggttatattgctctgttttgagactgtttgtttggaattaaagtaaacagtcactctaattaagca

SEQ ID NO: 18018 - DNA, 1922 bp, Zea Mays
gaaattgatccatggaaacccagctcaacctcgtcaggaacggaccccatcgcgcggccgacgtctctaattggtcagcaacggctgcgtgcgtgttccttccttggcctttcataagtcgtctttctccttgaccagccattagcgtcgatcgatgatttagcacggagaggctcaaggctgtccacacagcctggattgttcgatcgttcttggagctcgcagctggagcgagagacgtagactctaaacaagcttacagcccggatgcgtcgccgacatggtgaatgcagtggctacaatcatatctacagtagcctcaactgcgacagtggtagtaatcgtcgccctcatcagaaggtgccgcgtcgtgaggaagaagatgaagaagaaaatcgtgaagaaagtcctggaggagattgagaaaaagaaccgcgagatgcaggccagcaacgccgtggaagatgtggcgatcgaggtcgggccagtggagacgtttctcaaccagatcctcaacgagaagccgatgcgtttcagctccgagcagctggcggcctgcacccggaactactcgtcggagctagggtccggcggctacggcgtggtctacaagggcgagctgccgaacggcctgctggtggccgcgaaagtcctcaaggtgtcgtccatgaacaggaaggtccaggaggcgttcatggcggagatcggcaccatcggccggacgtaccacgtgcacctcgtccgcctctacggcttctgcttcgacgcgagcaccaaagcgctagtgtacgagttcctggagaacggctcgctggagaagtacctttacggcggtgacgagggcagcacgacgagcacgaggctggagtgggggacgctgcacggcatcgccgtcggcacggccaaggggatcaggtacctgcacgaggagtgccagcagcggatcgtgcactacgacatcaagccggccaacatcctcctcacggccgactacaccccgaaggtggcggacttcgggctggcgcggctgggagagcgcgagaacacgcacatgtcgctgaccggcggcggccgcgggacgcctgggtacgcggcgccggagctgtggatggcgatgccggcgtcggagaagtgcgacgtgtacagcttcgggatggtgctgttcgagatcctgggacggcgccggaactacgacccctgccttgagggcgagagcaaggagtggttcccgagatgggtgtgggagaagtacgagcagggtgagatcgagcacgtcgtgtcctgctcctgcgacgggatcgtcggaggggcggacagggagaaggcggagatcatgtgcaaggtggcgctgtggtgcgtgcagttccagccgtcggcgcggccgacgatgagcagcgtggtgcggatgctggagggggagatgcccattgtcccgcccgtgaacccgttccattatctcatggaaagcggcggcggctcaactagctcgggattgtggagcggcacataccagagcagcagcagagacaccgccggcgcagagttgtcgcctgtcggatagctctgctgccaggtcaatcggcgtcgacgcgccgtgatcgaagatgttgagcggactcgtggggggtcgtgttgatgaaacagagtttgtagtcctgtagtacacattagttaatgctttaaaaaacaatgaaggccgtggtttgtaaattagcatcgtgttttggaggactatataaaagataaaagattcgcgcacgacaaaaaaaaatcgtgcatgcgttgagtgaaatgtacttgtaccggcaggtaccaaaagatagaccattattttaggggaaagttaggtagtatttggttatattgctctgttttgagactgtttgtttggaattaaagtaaacagtcactctaattaagca

SEQ ID NO: 18019 - DNA, 2800 bp, Zea Mays
ccgcacgcacgcacaccacctgaggaacagggagtactaggccaagacaacaaggccacagagaattgcgacttggttgcatagttcagtgagtgggatgccactaaaacttgtttaagtttttatttagtctaaaaggccatcacttctgaatctttgtgggtgctgattcgtctctgctttcaagttcttgctccccacttagatgacactgcgtgcaccagggtcggaggatctggaatcgacatccgaagcaaatcaaggacgatttcgaaacccgtggaggatccctcggaactaccaaaatggaactacgatggatctagcacaggacaagccccgggagaagacagtgaagtcattctatacccccaggctatcttcaaggacccattccgaggtggcaacaacgttttggttatctgtgacacctacacgccacagggggaaccccttccaactaacaaacgccacagggctgcgcaaattttcagtgacccaaaggtcgctgaacaagtgccatggtttggcatagagcaagagtacactttgctccagaaagatgtaaattggcctcttggttggcctgttggaggcttccctggtccccagggtccatactactgtgccgtaggagccgacaaatcatttggccgtgacatatcagatgctcactacaaggcatgcctctacgctggaatcaacattagtggaacaaacggggaggtcatgcctggtcagtgggagtaccaagttggacctagtgttggtattgaagcaggagatcacatatggatttcgagatacattctcgagagaatcacagagcaagctggggttgtccttacccttgatccaaaaccaattcagggtgactggaacggagctggctgccacacaaattacagcacaaagaccatgcgcgaagacggcgggtttgaagagatcaagagagcaatcctgaacctttctctgcgccatgatctgcatattagtgcatacggagaaggaaatgaaagaagactgactgggaaacatgagactgcgagcatcggaacgttctcatggggtgtggcaaaccgcggctgctctatccgtgtggggcgggataccgaggcaaaagggaaagggcgtcagtaattttctactttgcatcctgtgagatgattcttgacgtaactctctactgttaaagcaagtgctggactgccgcaaaattctagggaaaaagtcgaacctatttttgtgccagtttcatattttgtaatccattttttaagtatccgtggcctgtgaccacgacaaacactagaatgcaggggacgtttgtagtgaaagaagagcattcttcaacacatcctttctttcagatatttaaattttgacgtggccctttctcacccttgtcttctctgacaggttacctggaagaccgtcggccggcatcaaacatggacccgtacattgtgacggggctactggccgagaccacgatcctctggcagccatccctcgaggcggaggctcttgccgccaagaagctggcgctgaaggtgtgaagcagctgaaggatggttcaggcaccaatataaaccggtccgcgacaagattgatctttgtgtccatggcgtgggtcttgcgactctctgctcggcggtgccactctgtacaaaatcacggctgtctttgattcatcggatattcggatacgtttgtttgttactttttgcttggacacccaccatgtttggaacttttttgggctccgtttgggggctgaacgatggtcagtggaaattttaaaaattcgtcgtctcactggttcttgagttgtgaaattcaggctggcagatggcaccagccaccgacatagctacctcccctttttttttctaacggtgcctttcatggccatcttaacgacgattttgacgcgccagcggctgccattttgtgtgtgtggtgtgcgtgtgggtggatcagcttgcaactcgtactcttagtactatcaatctatcagcgagaagcaatcatgcagggcagaggcggagagcaagagcaacagaagcaaggcctagcttatttacagagacggccggcagcgctgcttgtacaatccaacggtacaaactacacagcaagtcgacaacacaaggacaaggctggcatagactgacgaacacaaccaggaaaggagaaaaaaaaacgtcctacggtctggggtgcctgtgcttcggcttcgtcgtcggcggagagccagcatgcatggccacgccgctgtagtccgcgctgtagatcagcccagcctcggcgtccgcgccctgacccgctgtccaccgcagctttgccttctcctcctcctcctcctcgggctgcttcacctccatagccaccgcttcctcaggttgctgcgtctgcttgctctggtgctggtaataacggtatgctgatgatgacgacagctggccaagttctcggcctttgcgaccaagaaggaccagctctgctggatgcttgccgagggaagacgacggaggagaagatgaagaggcggcacctgcgccagctgcaaaagtggctagaagaagaagaaggcctgaaacaagtgctgcacaggatggcttcatcgtgcgtgctgtgctgccgtcttggggccttgggctattgccaacgaggaagagcagaggctgcagagcgagctccctccctctccacggctctcttgggtatcccatatttataaataaataaataaacaagggtactagttacaaactggcccaattgcacgatggtgtct

SEQ ID NO: 18020 - DNA, 2392 bp, Zea Mays
aagaaataggagatctggtggagatgcttttataccttaagctaccgacgacgaattatactaagtgcatgccatatgataatcataatccggtggaatctgtttatggatttgcccatagccgaagcaccgagtgcccagaaagatctacagaagcaaataaaatcatgtgtttaatcattgacacattggttctcttggtgaattcttgtaagattggcaatttgcagaatgtacagcaggagctggcaaggaatgttctgtctttgttgtacaaaatctggaagaaaactcaacccttaagatcatcgactgattgcaacaagtggaagaataaacttcagagtaaagaatatgatatatccaaatctattttcaggctttcaactggtcttgcctttccagcctggccagagcctgatgtggtcaggaaaagtgtttttggcgaaacagtgtccgactttgaaacttttgtcctagcctactgggaaaagttgcccaatttgtacaggaggaaacaagccactaaaatggatagtcttgtgttcgtcgcactgcataatgcttttaatcttgggacaacacctgattctatcattgaatcattattacagggtcttgtttcttgccccgctatcgcttctgatgagcttgacataaattcatttctccatgaggttcatgattcactgggtgattctgtaaagtacaggcaagacattagagtcatgagaacacgagatccaaatgaccaaacctcaaggggatgtgtgacagaggagcattttttcgatgatggaacggtcttcacggatgaagatgcattcatcgaaaaatgtaagcacgccttcaagaacggttattcgatcgccttgcgtggcatggagtttcggtctgagaaggttgctgctatagcttctgcactggctgatctatttgggcagccttctgtaggagccaacatatacttctcgcccgcaggatctcaaggcctggcccgacactacgacgatcactgtgtacttgtttggcagctactcggtagcaagaaatggacggtttggcctaatccgaagccactgttgcctagactgtatgaacctttcgaccctttagatggcaatttagatgagagcagtgggagagtggaggtcttacatgaaggggacatgatgtacatccccagaggttatgttcatgaggctcgcactgatgtcagtggatcagaggtgaacgattgctcactccatttgacccttgctattgaggtcgaggcaccctttgagtgggaaggttttgctcatatcgcccttcattgctgggcagagaagcagcagcttagaggttcccaatctgtcgagttcgaggggaaagcaggagcttccttatccgctattgtgcttcatgtagccatcaggttgctctccgacagtgagcctgttttcaggaaggcgtgcatggtcgcagcaaaggcagcgacgtcgtccagttcctgtacatccacaacgactcacctggaggctcttcgaagcagccagaggtcaactttcgacgagatactgaggaagatcgatcagagctgcagcatcaaggaagcgctggagcgcatcgtgtcggcggtgagagagagagacgacggagccttccagtggatgagctggctccggcacctgccgcagcaaggaacagctgcaggctacatcatcgacttctgcaatgtcttgggcgccctcgaggcgctcgtggaggcgttcgactctgaccctggccaggccctggatggcctcacggccttcaagtcagggttttgccggcgcgtcgcgtacgaggacgcgtgcgaggcctttgggactttgctcgagatgtacagaatggctaggacccagtacatgagggggatgctggcgttgcacggtgcaggtgcacacgtgagctgaggctgagccgtggagaattcgccgtgacagagaaaggttttgcttttctggtggtggttgcgtggctaggctagtcttttctcctagcgaggaaaacctgacatgtatgtgctggacacttgtacggttgtgccatgtatcgttcgatggctgcttttgactgctggtaagattatccattggcatcgatctgtgacttgttccgttgttcgacaatcagttttcaattcagcagcactctggcttggccctttccagctctggacggttcttgcgtctttcatgagcatttgccagtaaagaagtcgctggtcagtaaagaattgccagtagtggtactggcttgagatctcatccctgctgaagtctccacttgtatattgtatacagaattgcagcaaaacaattggccgtctgcgtctccagcacctgcgcagcgaagtagatgacgtttc

SEQ ID NO: 18021 - DNA, 3087 bp, Zea Mays
gactactgcgccaagctgagcgctgcgggtgaggggtcgcgcgcgccgccggctaccagggccggccggccgccccaccctgctatagctgtggatcagtggatgcgcgtccgcccctgtgtgtgtgtacccgccgaacgccatggataggagcgggaagatgagaaagaggaagaagcgcggtgacgaaagggccgccgccggtgcgccctcgccctcctccgcctctttcgacctccactttttccccgtcctccttgccgccgcccgaaccacacgccaatctagcagctcctgctccccggccgcgctcgctgcccgcctcctgcggcgtgtgctctcccactcgccgcagacgctctcccctctcccggcctccctcgtcgcgctcctccccctcctcctctcctccaggtgtgtaggacttcgtacgtcacaaactccgcttccgcccgccctcaatttgcaggaaagccctgccctgcgccttgcatacatgcccttctgatacgacgtgtgctgcaatgtggattgcagctgctcttctgtcgccgcgctaagctgcgaggtgcttggcgcggcagcgctgcggtccattgaggctggcgagacgcttgcgtcccacagtggcatcgctagcggcctggcaaggacgctgggaagtagaaaccagcgagtcattgaggctgcttgtaattctatattggatctctcggcgtcttcagtcggtagggagcgacttgcaggctcacctgttctgccgaggacattgcatctattttgtcaggtggaatctgtttatggatttgcccatagccgaagcaccgagtgcccagaaagatctacagaagcaaataaaatcatgtgtttaatcattgacacattggttctcttggtgaattcttgtaagattggcaatttgcagaatgtacagcaggagctggcaaggaatgttctgtctttgttgtacaaaatctggaagaaaactcaacccttaagatcatcgactgattgcaacaagtggaagaataaacttcagagtaaagaatatgatatatccaaatctattttcaggctttcaactggtcttgcctttccagcctggccagagcctgatgtggtcaggaaaagtgtttttggcgaaacagtgtccgactttgaaacttttgtcctagcctactgggaaaagttgcccaatttgtacaggaggaaacaagccactaaaatggatagtcttgtgttcgtcgcactgcataatgcttttaatcttgggacaacacctgattctatcattgaatcattattacagggtcttgtttcttgccccgctatcgcttctgatgagcttgacataaattcatttctccatgaggttcatgattcactgggtgattctgtaaagtacaggcaagacattagagtcatgagaacacgagatccaaatgaccaaacctcaaggggatgtgtgacagaggagcattttttcgatgatggaacggtcttcacggatgaagatgcattcatcgaaaaatgtaagcacgccttcaagaacggttattcgatcgccttgcgtggcatggagtttcggtctgagaaggttgctgctatagcttctgcactggctgatctatttgggcagccttctgtaggagccaacatatacttctcgcccgcaggatctcaaggcctggcccgacactacgacgatcactgtgtacttgtttggcagctactcggtagcaagaaatggacggtttggcctaatccgaagccactgttgcctagactgtatgaacctttcgaccctttagatggcaatttagatgagagcagtgggagagtggaggtcttacatgaaggggacatgatgtacatccccagaggttatgttcatgaggctcgcactgatgtcagtggatcagaggtgaacgattgctcactccatttgacccttgctattgaggtcgaggcaccctttgagtgggaaggttttgctcatatcgcccttcattgctgggcagagaagcagcagcttagaggttcccaatctgtcgagttcgaggggaaagcaggagcttccttatccgctattgtgcttcatgtagccatcaggttgctctccgacagtgagcctgttttcaggaaggcgtgcatggtcgcagcaaaggcagcgacgtcgtccagttcctgtacatccacaacgactcacctggaggctcttcgaagcagccagaggtcaactttcgacgagatactgaggaagatcgatcagagctgcagcatcaaggaagcgctggagcgcatcgtgtcggcggtgagagagagagacgacggagccttccagtggatgagctggctccggcacctgccgcagcaaggaacagctgcaggctacatcatcgacttctgcaatgtcttgggcgccctcgaggcgctcgtggaggcgttcgactctgaccctggccaggccctggatggcctcacggccttcaagtcagggttttgccggcgcgtcgcgtacgaggacgcgtgcgaggcctttgggactttgctcgagatgtacagaatggctaggacccagtacatgagggggatgctggcgttgcacggtgcaggtgcacacgtgagctgaggctgagccgtggagaattcgccgtgacagagaaaggttttgcttttctggtggtggttgcgtggctaggctagtcttttctcctagcgaggaaaacctgacatgtatgtgctggacacttgtacggttgtgccatgtatcgttcgatggctgcttttgactgctggtaagattatccattggcatcgatctgtgacttgttccgttgttcgacaatcagttttcaattcagcagcactctggcttggccctttccagctctggacggttcttgcgtctttcatgagcatttgccagtaaagaagtcgctggtcagtaaagaattgccagtagtggtactggcttgagatctcatccctgctgaagtctccacttgtatattgtatacagaattgcagcaaaacaattggccgtctgcgtctccagcacctgcgcagcgaagtagatgacgtttc

SEQ ID NO: 18022 - DNA, 2817 bp, Zea Mays
gactactgcgccaagctgagcgctgcgggtgaggggtcgcgcgcgccgccggctaccagggccggccggccgccccaccctgctatagctgtggatcagtggatgcgcgtccgcccctgtgtgtgtgtacccgccgaacgccatggataggagcgggaagatgagaaagaggaagaagcgcggtgacgaaagggccgccgccgctgctcttctgtcgccgcgctaagctgcgaggtgcttggcgcggcagcgctgcggtccattgaggctggcgagacgcttgcgtcccacagtggcatcgctagcggcctggcaaggacgctgggaagtagaaaccagcgagtcattgaggctgcttgtaattctatattggatctctcggcgtcttcagtcggtagggagcgacttgcaggctcacctgttctgccgaggacattgtggaatctgtttatggatttgcccatagccgaagcaccgagtgcccagaaagatctacagaagcaaataaaatcatgtgtttaatcattgacacattggttctcttggtgaattcttgtaagattggcaatttgcagaatgtacagcaggagctggcaaggaatgttctgtctttgttgtacaaaatctggaagaaaactcaacccttaagatcatcgactgattgcaacaagtggaagaataaacttcagagtaaagaatatgatatatccaaatctattttcaggctttcaactggtcttgcctttccagcctggccagagcctgatgtggtcaggaaaagtgtttttggcgaaacagtgtccgactttgaaacttttgtcctagcctactgggaaaagttgcccaatttgtacaggaggaaacaagccactaaaatggatagtcttgtgttcgtcgcactgcataatgcttttaatcttgggacaacacctgattctatcattgaatcattattacagggtcttgtttcttgccccgctatcgcttctgatgagcttgacataaattcatttctccatgaggttcatgattcactgggtgattctgtaaagtacaggcaagacattagagtcatgagaacacgagatccaaatgaccaaacctcaaggggatgtgtgacagaggagcattttttcgatgatggaacggtcttcacggatgaagatgcattcatcgaaaaatgtaagcacgccttcaagaacggttattcgatcgccttgcgtggcatggagtttcggtctgagaaggttgctgctatagcttctgcactggctgatctatttgggcagccttctgtaggagccaacatatacttctcgcccgcaggatctcaaggcctggcccgacactacgacgatcactgtgtacttgtttggcagctactcggtagcaagaaatggacggtttggcctaatccgaagccactgttgcctagactgtatgaacctttcgaccctttagatggcaatttagatgagagcagtgggagagtggaggtcttacatgaaggggacatgatgtacatccccagaggttatgttcatgaggctcgcactgatgtcagtggatcagaggtgaacgattgctcactccatttgacccttgctattgaggtcgaggcaccctttgagtaagtattctctgtatcgaagtggagttcttgctgtgcatgtctggagcttctgcttgtaaacattacctttgttgcaggtgggaaggttttgctcatatcgcccttcattgctgggcagagaagcagcagcttagaggttcccaatctgtcgagttcgaggggaaagcaggagcttccttatccgctattgtgcttcatgtagccatcaggttgctctccgacagtgagcctgttttcaggaaggcgtgcatggtcgcagcaaaggcagcgacgtcgtccagttcctgtacatccacaacgactcacctggaggctcttcgaagcagccagaggtcaactttcgacgagatactgaggaagatcgatcagagctgcagcatcaaggaagcgctggagcgcatcgtgtcggcggtgagagagagagacgacggagccttccagtggatgagctggctccggcacctgccgcagcaaggaacagctgcaggctacatcatcgacttctgcaatgtcttgggcgccctcgaggcgctcgtggaggcgttcgactctgaccctggccaggccctggatggcctcacggccttcaagtcagggttttgccggcgcgtcgcgtacgaggacgcgtgcgaggcctttgggactttgctcgagatgtacagaatggctaggacccagtacatgagggggatgctggcgttgcacggtgcaggtgcacacgtgagctgaggctgagccgtggagaattcgccgtgacagagaaaggttttgcttttctggtggtggttgcgtggctaggctagtcttttctcctagcgaggaaaacctgacatgtatgtgctggacacttgtacggttgtgccatgtatcgttcgatggctgcttttgactgctggtaagattatccattggcatcgatctgtgacttgttccgttgttcgacaatcagttttcaattcagcagcactctggcttggccctttccagctctggacggttcttgcgtctttcatgagcatttgccagtaaagaagtcgctggtcagtaaagaattgccagtagtggtactggcttgagatctcatccctgctgaagtctccacttgtatattgtatacagaattgcagcaaaacaattggccgtctgcgtctccagcacctgcgcagcgaagtagatgacgtttc

SEQ ID NO: 18023 - DNA, 1340 bp, Zea Mays
atgctcccggtgctcgaggtcctctgctgcgccgccgccgaccgtgggggcgtggactggtacagcctgtgctgctgcggacgcttcagacgaaccccagactggagggcgccctggagatgctcctggtgctcgaggtcctctgttgcgccgccgccggccgtgggggcgtggactggtacagcctgtgctgctgcggacgcttcagacgaaccccagactggagggcgccctggagatgctcctggtgctcgaggtcctctggagggcgccctggagatgctcccggtgctcgaggtcctctgctgcgccgtcgttccccttcccttcccccaccccatcggcgatgcctggatccgcgaccgccgccgtccaaccccggcctccgtctgtgaccgctccgtggtggcgcaggcgctggaggcatccacatgaccgcatatttcacggcgccgtgggctggtggcgtgacgtcaacgagtcgccgtgctctacggcatcatctcggccgtcgcgctggtccaattaatcagaatcgagtgtagggtgtcagagtatggatggacaacgcagaaggtgttccagtttctaaacttccttgtgaacggcgtgcggtctgtcgtgtttgtgctgcggcgaaatgtgcaacttgtagagcctgagataatacaacatgtgcttcaggatatgcccgggcttgcattcttcacgacatatgcacttttagtgctcttctgggctaagatttattatcaggcacgtgccatgtcgactgattggcttagaccaactttctattggatcaacggtgtggtctatgcaattcaggtgaaaattgaggacatttaccaacaataagcaattggtactctggattttcagtcagtatttttcgttgtggaaatgtgtgtctatatccttctggaaaaaatgaattatgaaagaaactttaaacatgctgggttcatggtagtcgaaaacattttgttatatctttggatatcatgctgagataagactttaattctcttgttgttgcatgcaaccttcaatatatcttgtctccttgacaatgaccagaggagtttgtcgcgcacactttgaatgtcaattgtgccaagtttgggaggcgagcatcaaggatcctcatcactggtggggaggatttgaaggtcaatctttgggctatagggaaacccggtgccctcctggctttacaagtccagttgagtcagtaagctttgactcttctaaagttacgataggtgctggtgcagcaagtggaacgataaaaatatggaatattgaggaggcgaaaggtctgggatttgacggctgga

SEQ ID NO: 18024 - DNA, 899 bp, Zea Mays
atagtaaaggtgctaaaaattgatagatcgtggtggtacaacgcatgcaaaaaatgccttaggacaaccaaaccacatggtgacacatacaagtgcaccaataattcctgtgacaccatcggatcgcctaccccaaggtcagctcttatatgtctctccatgttttttaaggtcctgctagacatcttctgtttttatctaaatatgttgactcatatgtgttccagtttaaacacactgtgagcatgatagacacagaccagctctacccctttcagttgcatattgcagtttgcaagggaacaataaagaaaaaaatggatggtggcagcacacttccaactacaccggcctcacagccatcatcgaccatactatctcaagcagggcaaggatcaggtgtcacacaaaacaagggggctgccttcatccgcgagccgtcgctaacaccggagagtcgcaaagtttcgtctagcgccaagacaaccccacatcagggagacaacctactgctaggaaaagaaattatccctgcttcgcctaacgtgcagacgccatcagaagcccacaacacccctggtgccaacactctccgcctggtatgaactccatgtcacagtcatcaatattagtagcctatcctcagtatttgtatcttgtcctcttgctgagttaacatgaaaaaacattttccggtgctgcgtatgcttacaagcagcttccatttcctcaacaaaatgtctaaatatgcttcatctatgcatccatttaccttagcatgcatgttatgccctctacattgttccagctgcctctaaaactggcaaattcgcagggtgacgcttacagtgtgctagatggatctacaaacaaacctgacaaaagtgaaacggaaaaag

SEQ ID NO: 18025 - DNA, 1191 bp, Zea Mays
ctctctctactcctctttctctctctagaatagaatactcacagcatgatcacagaggcagaagcaggcagaccggcaggcaggaccttcctcccctgatcctctgaccctctgatcgaccacccttcccccggctctccctcctccgcgccgcgcccgttgatggccggcgggaagaggacgacggcgcgccaccaacacaaccacccaccgccgccgccgcctaaccctagccctaaccgtggccgcggggtcgccgacccgccgccggcctcggacgactcgccgtcgtcgaagcgcatgctggccttccacttcctccgcgcgctggcacggatccacagcaccacgccggcgccgcgccgcccgcgcaccatccgccgcgcggcctactcgtccatggcgcgcgccgccagcccgcgccgggcctggacgcaggcgctgctgctccgccgggcgcgctcgcgcggggtggccgtcgtcggctcgtccaggcgcgcggtcctgctgcggaggcgcgtctccgcctcggcgcctccaccgatgctccgcgccagcgccggggcgacgtcggcggcggcgccgccggtccagggcccgcctccgaggcaggccggggagccggccagggccgacgcgctccggcggatcgtccccggcggcgccggcatggagtactgcagcctactcgacgagaccgccgactacgtgctgcacctccgcgcgcaggtgcagctcatgcagagcctcgtcgacctcttctctccgcccaacccaaccagtaattaatcaataccgcatggtcaattgattcttccctcttgcaccgccgtcgccgcggtttgtgtctaaatcatcatcgcatatctcttgttcatgccacacatgcatgagatggatgcatgattaagataggagattattgttgaggagagagatcgattattattattgctgctagtgcatatgtttagtgggtgtataggttgggaacacacattcatggaggatggaaccacacaccgatcaattggagggagaagagattgttcgggtaattaattgtaatatatatatagagagacaattgagccacatacatatataagctattagtgcagtgcttgctgttgggtacttggtcagatgattgagtatgcgtatacatgcctgtgaaaaattgtggagcca

SEQ ID NO: 18026 - DNA, 1199 bp, Zea Mays
ccctctctctctctactcctctttctctctctagaatagaatactcacagcatgatcacagaggcagaagcaggcagaccggcaggcaggaccttcctcccctgatcctctgtgaccctctgatcgaccacccttcccccggctctccctcctccgcgccgcgcccgttgatggccggcgggaagaggacgacggcgcgccaccaacacaaccacccaccgccgccgccgcctaaccctagccctaaccgtggccgcggggtcgccgacccgccgccggcctcggacgactcgccgtcgtcgaagcgcatgctggccttccacttcctccgcgcgctggcacggatccacagcaccacgccggcgccgcgccgcccgcgcaccatccgccgcgcggcctactcgtccatggcgcgcgccgccagcccgcgccgggcctggacgcaggcgctgctgctccgccgggcgcgctcgcgcggggtggccgtcgtcggctcgtccaggcgcgcggtcctgctgcggaggcgcgtctccgcctcggcgcctccaccgatgctccgcgccagcgccggggcgacgtcggcggcggcgccgccggtccagggcccgcctccgaggcaggccggggagccggccagggccgacgcgctccggcggatcgtccccggcggcgccggcatggagtactgcagcctactcgacgagaccgccgactacgtgctgcacctccgcgcgcaggtgcagctcatgcagagcctcgtcgacctcttctctccgcccaacccaaccagtaattaatcaataccgcatggtcaattgattcttccctcttgcaccgccgtcgccgcggtttgtgtctaaatcatcatcgcatatctcttgttcatgccacacatgcatgagatggatgcatgattaagataggagattattgttgaggagagagatcgattattattattgctgctagtgcatatgtttagtgggtgtataggttgggaacacacattcatggaggatggaaccacacaccgatcaattggagggagaagagattgttcgggtaattaattgtaatatatatatagagagacaattgagccacatacatatataagctattagtgcagtgcttgctgttgggtacttggtcagatgattgagtatgcgtatacatgcctgtgaaaaattgtggagcca

SEQ ID NO: 18027 - DNA, 4194 bp, Zea Mays
aagcaatcatcgttgaaaatgtcctcatagttgattcaaggtatgtggagaatggctcacttgccaatattatcaagccaaacaaattcggacctattcctgaatctttggtggctctttacattgctcaggtgttggaaggtcttgtttatctgcatgaacaaggtgtcattcatagagatatcaagggcgcaaatatactgagtaccaaagagggtcttgtcaaacttgctgattttggagttgccactaaattgactgaagctgacatcaacactcattctgtggtcggcactccatactggatggcgcctgaggtcattgaaatgtccggcgtttgcgctgcttctgatatctggagtgtgggttgcactgtaattgagttgctgacatgtgccccgccatattatgatctccaacctatgcctgcactgttccgtattgttcaggatgtgcatccaccaataccagaaggactgtcacctgaggttactgattttctccaacagtgtttccaaaaggatgcgatgcaaaggcctgatgcaaaagcattattgatgcatacatggttgcaaaacttaagacgagctttgcctggttctcttcggcaacctactccattgaggaacatcgatggtgatgatgaaggctcaagaggtgataatagcttgggtttttgcgacacaccaggagatattcaaacaactattacttctaatgttgaccaggagaatgggagtaaagaaccaattatggactctactgtacaaagtaaatctgaagagcttcatgatggaaatttaaaacttactgagggcagtagttcaaacagtgtggcgcttatgaaagataatgtggtccttaataaaggtccgacactagttttacatgagaagttaccggtggaatcttcatctggaggtgctgatttgaatggcaaagtaatggcacatgaactattgcaaggtggtccgccaggtaaggtagagctggagaataaagaaagttcaagtagtgatgtgttctcctttcaggctggaagacagaatattggcttccaaaaggtggttgaaccttcagttgttgaggggccaaaacagcttagtagatttagtgacaaacctgaagatgcctctttggaagacttatttccaccaaatgataaatggggagataatggggctgaaccttcaacatcaactactgtccaagaacttaaatataatggtgtacaaaatgcgttcttgaaggggctcaatgctagggtggagaagcaaaaagaaaatgataacgagtctatgaatggtggaaagctaattgaatttgccatgcaactagaaaatattgacgcgttgggttttggtgaacatattcctggagagagtcttttccctgtgcagtctgtggaatacaacaaaatagtagcacaactgagaccaggggaaagtgaagatgtaatactgttggcatgccaaaagcttctatcaattttcagttaccgccctgagcaaaaacatatttatatggcacaaaatggtttcctcccgctgatggaactccttgaaattcccagaaatcgtatattatgctctgttctgcagcttatcaacaacattgtaaaagatagtacatgcttcctagaaaatgcttgccttgttggccttattccagtggtgatgaattttgcagagccaaatcgtccaaaggatgttcgggtgcaagcatccttgtttcttcagcagctttgtcaagccagcaccctgacattgcaaatgtttgttgcatgccaagggatccctgttttggtaagctttatggagcctgactatgcaaaatacagggatatggttcatcttgcaattgacggcatttggcaggtcttcaagctccagcattcaactccaagaaacaacttctgtcgtatagcggcaaaaaatgggatgcttcctaggctggtgaatacactatatagcctgaacgaagcaacaagatttgcttcagtctcagggtcaggtgcttcagtaacacagaatggctcaaccccccgacgaagatctggccaattagacccttcagttcttgaaagttgcaaggcaaggctggatcatcatcattcatctggttctctgcaatctctacaaacagacgcagataagcaccatatattaatggactcgtcatctcctaggtttagtgataaaaccggcagtaacttggagaggaatgataacgacttggttattcggccacagaggcttagtgtttctgctggaaggacatctacagacagatcaccaaagcatgtagaactagtttcaaatggtcatattagcggtcaaaatgaccaggtccgacctctactgagtttgttggagaaagaaccaccttctcgacatatatctggacaacttgattacgtttgccacataactggattggaaaggcatgaaaccattttgccactattacatacatcgacagaaaggaaaacaaatggtgaacttgacttaatgatggattttgctgaggtctctagacatggaagagagaatggccatctggactcgagtataaaagtttcaaatagagttcatagtatgaaatatgcaccttcgacaagtgcctctaatgaaggagcatcaacttctggagctgcatcgcaaacagcatctggtgtgttatctggatcaggagtgctcaatttaagaccagggagtacaacatcatcaggcccattagctcagatgttctcttccatgagcgcagatgtggcacgcgaatatcttgaaaaagtagctgatcttcttttggagtttgcacaggcagacactgtggtaagatctctgatggccagccaaagccttcttacaaggctttttcagatgtttaacaagatagaacctcctattcttcttaagattcttaggtgcattaatcatttgtcgggtgatcctaattgtctcgagacacttcaacgcacagatgcaatcaaacatctgataccgattcttgagctttgtgatggacctctggtttttcaaatacatagtgaggtcctcaatgctttgttcaacctttgcaagattaataaaagaagacaggaacaggcagctgaaaatggaatcattcctcacttgatgaattttgtcatgtcagactcacctctgaggcagtatgccctgcctttgctgtgtgatatggctcatgcttctcgcaactctagagagcagttgagggctcatggaggactagatgcgtacttaaatctgttggaggatgatgtatgggcgtgcacggcattagattctattgctgtttgtttggctcacgataatgatcatagaaaagtggagcaggcactgttgaaaaaagaggcaattcaaaagttagtgaagttcttccaagactgcccagaacagtattttgtccatatattggactctttcttgaagataataatgaaatcttctaggctaaacacagcaatggccaccaatggcttgacagcattgctcattgcaaggcttaaccatcgagacgctattgcccgcctgactctgctgaaactcataaaggttgtctatgagcatcatcctcgaccaaaacaggtcatagtagagaatgacctccctcagaagctacaaaacctgattgaagaacgcaggggtggacaacggggcggccatcaagtgttggtcaaacaaatggccacctcattgctgaaggcgctgcacatcaacacagtattgtgattttgatgggtcatgtgttttcctctcaagttagtgtttacgttttcgctagaggaagaaaaggggcgtccttctctttttgcctccttttctgctgtggtggcttctcacgagcaccagactcatttgttgtacctgatccctccttttttgggagaaaggttcaacgttttggtgcaggataaaatgggcttgctatcctccagtgctgtgtatatctagcgtatgttagtgaagaaattgcaaattagacaatctaattaaaaaaatttaaaccatattgacattttgttccgtgtgttagtagattttccctagcctgacccacttgcaccaagcaaaatggttgatatcgtggacgtctttaacaggatgcaagaaagcatcacatagttcttttgatgcattacattacataattcttaagcgtatacaatgagat

SEQ ID NO: 18028 - DNA, 4069 bp, Zea Mays
aatcttaatcacaaaaatattgtcaagtatctgggatcactgaagacaaagagccacctccatattattttagagtatgtggagaatggctcacttgccaatattatcaagccaaacaaattcggacctattcctgaatctttggtggctctttacattgctcagtttttatatgaccaggtgttggaaggtcttgtttatctgcatgaacaaggtgtcattcatagagatatcaagggcgcaaatatactgagtaccaaagaggtcattgaaatgtccggcgtttgcgctgcttctgatatctggagtgtgggttgcactgtaattgagttgctgacatgtgccccgccatattatgatctccaacctatgcctgcactgttccgtattgttcaggatgtgcatccaccaataccagaaggactgtcacctgaggttactgattttctccaacagtgtttccaaaaggatgcgatgcaaaggcctgatgcaaaagcattattgatgcatacatggttgcaaaacttaagacgagctttgcctggttctcttcggcaacctactccattgaggaacatcgatggtgatgatgaaggctcaagaggtgataatagcttgggtttttgcgacacaccaggagatattcaaacaactattacttctaatgttgaccaggagaatgggagtaaagaaccaattatggactctactgtacaaagtaaatctgaagagcttcatgatggaaatttaaaacttactgagggcagtagttcaaacagtgtggcgcttatgaaagataatgtggtccttaataaaggtccgacactagttttacatgagaagttaccggtggaatcttcatctggaggtgctgatttgaatggcaaagtaatggcacatgaactattgcaaggtggtccgccaggtaaggtagagctggagaataaagaaagttcaagtagtgatgtgttctcctttcaggctggaagacagaatattggcttccaaaaggtggttgaaccttcagttgttgaggggccaaaacagcttagtagatttagtgacaaacctgaagatgcctctttggaagacttatttccaccaaatgataaatggggagataatggggctgaaccttcaacatcaactactgtccaagaacttaaatataatggtgtacaaaatgcgttcttgaaggggctcaatgctagggtggagaagcaaaaagaaaatgataacgagtctatgaatggtggaaagctaattgaatttgccatgcaactagaaaatattgacgcgttgggttttggtgaacatattcctggagagagtcttttccctgtgcagtctgtggaatacaacaaaatagtagcacaactgagaccaggggaaagtgaagatgtaatactgttggcatgccaaaagcttctatcaattttcagttaccgccctgagcaaaaacatatttatatggcacaaaatggtttcctcccgctgatggaactccttgaaattcccagaaatcgtatattatgctctgttctgcagcttatcaacaacattgtaaaagatagtacatgcttcctagaaaatgcttgccttgttggccttattccagtggtgatgaattttgcagagccaaatcgtccaaaggatgttcgggtgcaagcatccttgtttcttcagcagctttgtcaagccagcaccctgacattgcaaatgtttgttgcatgccaagggatccctgttttggtcttcaagctccagcattcaactccaagaaacaacttctgtcgtatagcggcaaaaaatgggatgcttcctaggctggtgaatacactatatagcctgaacgaagcaacaagatttgcttcagtctcagggtcaggtgcttcagtaacacagaatggctcaaccccccgacgaagatctggccaattagacccttcagttcttgaaagttgcaaggcaaggctggatcatcatcattcatctggttctctgcaatctctacaaacagacgcagataagcaccatatattaatggactcgtcatctcctaggtttagtgataaaaccggcagtaacttggagaggaatgataacgacttggttattcggccacagaggcttagtgtttctgctggaaggacatctacagacagatcaccaaagcatgtagaactagtttcaaatggtcatattagcggtcaaaatgaccaggtccgacctctactgagtttgttggagaaagaaccaccttctcgacatatatctggacaacttgattacgtttgccacataactggattggaaaggcatgaaaccattttgccactattacatacatcgacagaaaggaaaacaaatggtgaacttgacttaatgatggattttgctgaggtctctagacatggaagagagaatggccatctggactcgagtataaaagtttcaaatagagttcatagtatgaaatatgcaccttcgacaagtgcctctaatgaaggagcatcaacttctggagctgcatcgcaaacagcatctggtgtgttatctggatcaggagtgctcaatttaagaccagggagtacaacatcatcaggcccattagctcagatgttctcttccatgagcgcagatgtggcacgcgaatatcttgaaaaagtagctgatcttcttttggagtttgcacaggcagacactgtggtaagatctctgatggccagccaaagccttcttacaaggctttttcagatgtttaacaagatagaacctcctattcttcttaagattcttaggtgcattaatcatttgtcgggtgatcctaattgtctcgagacacttcaacgcacagatgcaatcaaacatctgataccgattcttgagctttgtgatggacctctggtttttcaaatacatagtgaggtcctcaatgctttgttcaacctttgcaagattaataaaagaagacaggaacaggcagctgaaaatggaatcattcctcacttgatgaattttgtcatgtcagactcacctctgaggcagtatgccctgcctttgctgtgtgatatggctcatgcttctcgcaactctagagagcagttgagggctcatggaggactagatgcgtacttaaatctgttggaggatgatgtatgggcgtgcacggcattagattctattgctgtttgtttggctcacgataatgatcatagaaaagtggagcaggcactgttgaaaaaagaggcaattcaaaagttagtgaagttcttccaagactgcccagaacagtattttgtccatatattggactctttcttgaagataataatgaaatcttctaggctaaacacagcaatggccaccaatggcttgacagcattgctcattgcaaggcttaaccatcgagacgctattgcccgcctgactctgctgaaactcataaaggttgtctatgagcatcatcctcgaccaaaacaggtcatagtagagaatgacctccctcagaagctacaaaacctgattgaagaacgcaggggtggacaacggggcggccatcaagtgttggtcaaacaaatggccacctcattgctgaaggcgctgcacatcaacacagtattgtgattttgatgggtcatgtgttttcctctcaagttagtgtttacgttttcgctagaggaagaaaaggggcgtccttctctttttgcctccttttctgctgtggtggcttctcacgagcaccagactcatttgttgtacctgatccctccttttttgggagaaaggttcaacgttttggtgcaggataaaatgggcttgctatcctccagtgctgtgtatatctagcgtatgttagtgaagaaattgcaaattagacaatctaattaaaaaaatttaaaccatattgacattttgttccgtgtgttagtagattttccctagcctgacccacttgcaccaagcaaaatggttgatatcgtggacgtctttaacaggatgcaagaaagcatcacatagttcttttgatgcattacattacataattcttaagcgtatacaatgagat

SEQ ID NO: 18029 - DNA, 5313 bp, Zea Mays
acgtccaggaaaaatatcgaaacaaggacgaaaaacacgaagaattacggaagagcaccccatcttcggtttctttcctccggacttcttcctgcttgcggcgtccgccaattcccttccctacccaaaccctagagcaaagctgaatggccctcgccacgagctcgcgagagactctgcgccgccgccggtgactgctgatccgcccgccgccgccgcgcccggtgctttgtcacgcaggaggcgacggtatggcgtcgaggcagcacaatgcacagttccacaaatccaagacgctcgacaacaaatacatgctcggagatgagatagggaagggggcgtacggccgcgtatacaaggggcttgacctggagaatggcgatttcgtggccatcaaacaggtctcgctggagaacattccgcaggaggatctcaacataataatgaatcttaatcacaaaaatattgtcaagtatctgggatcactgaagacaaagagccacctccatattattttagagtatgtggagaatggctcacttgccaatattatcaagccaaacaaattcggacctattcctgaatctttggtggctctttacattgctcaggtgttggaaggtcttgtttatctgcatgaacaaggtgtcattcatagagatatcaagggcgcaaatatactgagtaccaaagagggtcttgtcaaacttgctgattttggagttgccactaaattgactgaagctgacatcaacactcattctgtggtcggcactccatactggatggcgcctgaggtcattgaaatgtccggcgtttgcgctgcttctgatatctggagtgtgggttgcactgtaattgagttgctgacatgtgccccgccatattatgatctccaacctatgcctgcactgttccgtattgttcaggatgtgcatccaccaataccagaaggactgtcacctgaggttactgattttctccaacagtgtttccaaaaggatgcgatgcaaaggcctgatgcaaaagcattattgatgcatacatggttgcaaaacttaagacgagctttgcctggttctcttcggcaacctactccattgaggaacatcgatggtgatgatgaaggctcaagaggtgataatagcttgggtttttgcgacacaccaggagatattcaaacaactattacttctaatgttgaccaggagaatgggagtaaagaaccaattatggactctactgtacaaagtaaatctgaagagcttcatgatggaaatttaaaacttactgagggcagtagttcaaacagtgtggcgcttatgaaagataatgtggtccttaataaaggtccgacactagttttacatgagaagttaccggtggaatcttcatctggaggtgctgatttgaatggcaaagtaatggcacatgaactattgcaaggtggtccgccaggtaaggtagagctggagaataaagaaagttcaagtagtgatgtgttctcctttcaggctggaagacagaatattggcttccaaaaggtggttgaaccttcagttgttgaggggccaaaacagcttagtagatttagtgacaaacctgaagatgcctctttggaagacttatttccaccaaatgataaatggggagataatggggctgaaccttcaacatcaactactgtccaagaacttaaatataatggtgtacaaaatgcgttcttgaaggggctcaatgctagggtggagaagcaaaaagaaaatgataacgagtctatgaatggtggaaagctaattgaatttgccatgcaactagaaaatattgacgcgttgggttttggtgaacatattcctggagagagtcttttccctgtgcagtctgtggaatacaacaaaatagtagcacaactgagaccaggggaaagtgaagatgtaatactgttggcatgccaaaagcttctatcaattttcagttaccgccctgagcaaaaacatatttatatggcacaaaatggtttcctcccgctgatggaactccttgaaattcccagaaatcgtatattatgctctgttctgcagcttatcaacaacattgtaaaagatagtacatgcttcctagaaaatgcttgccttgttggccttattccagtggtgatgaattttgcagagccaaatcgtccaaaggatgttcgggtgcaagcatccttgtttcttcagcagctttgtcaagccagcaccctgacattgcaaatgtttgttgcatgccaagggatccctgttttggtaagctttatggagcctgactatgcaaaatacagggatatggttcatcttgcaattgacggcatttggcaggtcttcaagctccagcattcaactccaagaaacaacttctgtcgtatagcggcaaaaaatgggatgcttcctaggctggtgaatacactatatagcctgaacgaagcaacaagatttgcttcagtctcagggtcaggtgcttcagtaacacagaatggctcaaccccccgacgaagatctggccaattagacccttcagttcttgaaagttgcaaggcaaggctggatcatcatcattcatctggttctctgcaatctctacaaacagacgcagataagcaccatatattaatggactcgtcatctcctaggtttagtgataaaaccggcagtaacttggagaggaatgataacgacttggttattcggccacagaggcttagtgtttctgctggaaggacatctacagacagatcaccaaagcatgtagaactagtttcaaatggtcatattagcggtcaaaatgaccaggtccgacctctactgagtttgttggagaaagaaccaccttctcgacatatatctggacaacttgattacgtttgccacataactggattggaaaggcatgaaaccattttgccactattacatacatcgacagaaaggaaaacaaatggtgaacttgacttaatgatggattttgctgaggtctctagacatggaagagagaatggccatctggactcgagtataaaagtttcaaatagagttcatagtatgaaatatgcaccttcgacaagtgcctctaatgaaggagcatcaacttctggagctgcatcgcaaacagcatctggtgtgttatctggatcaggagtgctcaatttaagaccagggagtacaacatcatcaggcccattagctcagatgttctcttccatgagcgcagatgtggcacgcgaatatcttgaaaaagtagctgatcttcttttggagtttgcacaggcagacactgtggtaagatctctgatggccagccaaagccttcttacaaggctttttcagatgtttaacaagatagaacctcctattcttcttaagattcttaggtgcattaatcatttgtcgggtgatcctaattgtctcgagacacttcaacgcacagatgcaatcaaacatctgataccgattcttgagctttgtgatggacctctggtttttcaaatacatagtgaggtgcatagtgttttttgttgaagacttgcaaccaagcatgattgctaaggaagaaatcctactaactagtttttcaggactcattttcctttttatatggtgaaacatccagagtcaatagttttgaagattaagttatgacccatgttctatatctgctggagttggtctactacatttttgtcccaccatttcaaattttaagatgattggcttttctagatacattgcttcaactattgtatgtcgaagtgcatagcaaaatcaatgtatctagaaaaactaaaacgtcttaaaatggagggagtattattattcagagggtgccgtgggggagtgggactatcctaaacgagtgaaataacaatattacatttgatgccttgttatagcagtatgcaatacattagtatactcatagttggagtagcgaaccatcttagagtgagaaaactgtagccagcagaacagcattgtctacaaagatgacaatttgttttagctgtgctccttttttgtaccttttaagttgagacctgatgctattaaatgctaacaaccaatttatcagcagataatttgacttctgttgcactattttctgagcacataattgactgcctctgcctttgtctctaggtcctcaatgctttgttcaacctttgcaagattaataaaagaagacaggaacaggcagctgaaaatggaatcattcctcacttgatgaattttgtcatgtcagactcacctctgaggcagtatgccctgcctttgctgtgtgatatggctcatgcttctcgcaactctagagagcagttgagggctcatggaggactagatgcgtacttaaatctgttggaggatgatgtatgggcgtgcacggcattagattctattgctgtttgtttggctcacgataatgatcatagaaaagtggagcaggcactgttgaaaaaagaggcaattcaaaagttagtgaagttcttccaagactgcccagaacagtattttgtccatatattggactctttcttgaagataataatgaaatcttctaggctaaacacagcaatggccaccaatggcttgacagcattgctcattgcaaggcttaaccatcgagacgctattgcccgcctgactctgctgaaactcataaaggttgtctatgagcatcatcctcgaccaaaacaggtcatagtagagaatgacctccctcagaagctacaaaacctgattgaagaacgcaggggtggacaacggggcggccatcaagtgttggtcaaacaaatggccacctcattgctgaaggcgctgcacatcaacacagtattgtgattttgatgggtcatgtgttttcctctcaagttagtgtttacgttttcgctagaggaagaaaaggggcgtccttctctttttgcctccttttctgctgtggtggcttctcacgagcaccagactcatttgttgtacctgatccctccttttttgggagaaaggttcaacgttttggtgcaggataaaatgggcttgctatcctccagtgctgtgtatatctagcgtatgttagtgaagaaattgcaaattagacaatctaattaaaaaaatttaaaccatattgacattttgttccgtgtgttagtagattttccctagcctgacccacttgcaccaagcaaaatggttgatatcgtggacgtctttaacaggatgcaagaaagcatcacatagttcttttgatgcattacattacataattcttaagcgtatacaatgagat

SEQ ID NO: 18030 - DNA, 4997 bp, Zea Mays
gttaatttcccacgtccaggaaaaatatcgaaacaaggacgaaaaacacgaagaattacggaagagcaccccatcttcggtttctttcctccggacttcttcctgcttgcggcgtccgccaattcccttccctacccaaaccctagagcaaagctgaatggccctcgccacgagctcgcgagagactctgcgccgccgccggtgactgctgatccgcccgccgccgccgcgcccggtgctttgtcacgcaggaggcgacggtatggcgtcgaggcagcacaatgcacagttccacaaatccaagacgctcgacaacaaatacatgctcggagatgagatagggaagggggcgtacggccgcgtatacaaggggcttgacctggagaatggcgatttcgtggccatcaaacaggtctcgctggagaacattccgcaggaggatctcaacataataatgcaagagatcgaccttttgaaaaatcttaatcacaaaaatattgtcaagtatctgggatcactgaagacaaagagccacctccatattattttagagtatgtggagaatggctcacttgccaatattatcaagccaaacaaattcggacctattcctgaatctttggtggctctttacattgctcaggtgttggaaggtcttgtttatctgcatgaacaaggtgtcattcatagagatatcaagggcgcaaatatactgagtaccaaagagggtcttgtcaaacttgctgattttggagttgccactaaattgactgaagctgacatcaacactcattctgtggtcggcactccatactggatggcgcctgaggtcattgaaatgtccggcgtttgcgctgcttctgatatctggagtgtgggttgcactgtaattgagttgctgacatgtgccccgccatattatgatctccaacctatgcctgcactgttccgtattgttcaggatgtgcatccaccaataccagaaggactgtcacctgaggttactgattttctccaacagtgtttccaaaaggatgcgatgcaaaggcctgatgcaaaagcattattgatgcatacatggttgcaaaacttaagacgagctttgcctggttctcttcggcaacctactccattgaggaacatcgatggtgatgatgaaggctcaagaggtgataatagcttgggtttttgcgacacaccaggagatattcaaacaactattacttctaatgttgaccaggagaatgggagtaaagaaccaattatggactctactgtacaaagtaaatctgaagagcttcatgatggaaatttaaaacttactgagggcagtagttcaaacagtgtggcgcttatgaaagataatgtggtccttaataaaggtccgacactagttttacatgagaagttaccggtggaatcttcatctggaggtgctgatttgaatggcaaagtaatggcacatgaactattgcaaggtggtccgccaggtaaggtagagctggagaataaagaaagttcaagtagtgatgtgttctcctttcaggctggaagacagaatattggcttccaaaaggtggttgaaccttcagttgttgaggggccaaaacagcttagtagatttagtgacaaacctgaagatgcctctttggaagacttatttccaccaaatgataaatggggagataatggggctgaaccttcaacatcaactactgtccaagaacttaaatataatggtgtacaaaatgcgttcttgaaggggctcaatgctagggtggagaagcaaaaagaaaatgataacgagtctatgaatggtggaaagctaattgaatttgccatgcaactagaaaatattgacgcgttgggttttggtgaacatattcctggagagagtcttttccctgtgcagtctgtggaatacaacaaaatagtagcacaactgagaccaggggaaagtgaagatgtaatactgttggcatgccaaaagcttctatcaattttcagttaccgccctgagcaaaaacatatttatatggcacaaaatggtttcctcccgctgatggaactccttgaaattcccagaaatcgtatattatgctctgttctgcagcttatcaacaacattgtaaaagatagtacatgcttcctagaaaatgcttgccttgttggccttattccagtggtgatgaattttgcagagccaaatcgtccaaaggatgttcgggtgcaagcatccttgtttcttcagcagctttgtcaagccaggtctttttctttctccaacataacagcaacagcaaagctttttatgtcaagcaagttgggggtaagctagagttaaaaacctaatagaacccacaagtcatggtccggtcacatggatagctgttctccatgcactcctattcaaggctaaacctttgggtatatcacatcctttcaagtccccttttactgtctcttctccaatcaacttcggtcttccttttctctcttctcattactgttgcgccttaggattccactatgcactggcgtctctggaggtctccgttggatatgtccaaaccatctaaaccaatgttggacgagctttctttctccaacatagttgataatttctgatttttttaataaaagagtggaagggacaaaagctttggtgtactaatttctggtttctatctccagcaccctgacattgcaaatgtttgttgcatgccaagggatccctgttttggtaagctttatggagcctgactatgcaaaatacagggatatggttcatcttgcaattgacggcatttggcaggtcttcaagctccagcattcaactccaagaaacaacttctgtcgtatagcggcaaaaaatgggatgcttcctaggctggtgaatacactatatagcctgaacgaagcaacaagatttgcttcagtctcagggtcaggtgcttcagtaacacagaatggctcaaccccccgacgaagatctggccaattagacccttcagttcttgaaagttgcaaggcaaggctggatcatcatcattcatctggttctctgcaatctctacaaacagacgcagataagcaccatatattaatggactcgtcatctcctaggtttagtgataaaaccggcagtaacttggagaggaatgataacgacttggttattcggccacagaggcttagtgtttctgctggaaggacatctacagacagatcaccaaagcatgtagaactagtttcaaatggtcatattagcggtcaaaatgaccaggtccgacctctactgagtttgttggagaaagaaccaccttctcgacatatatctggacaacttgattacgtttgccacataactggattggaaaggcatgaaaccattttgccactattacatacatcgacagaaaggaaaacaaatggtgaacttgacttaatgatggattttgctgaggtctctagacatggaagagagaatggccatctggactcgagtataaaagtttcaaatagagttcatagtatgaaatatgcaccttcgacaagtgcctctaatgaaggagcatcaacttctggagctgcatcgcaaacagcatctggtgtgttatctggatcaggagtgctcaatttaagaccagggagtacaacatcatcaggcccattagctcagatgttctcttccatgagcgcagatgtggcacgcgaatatcttgaaaaagtagctgatcttcttttggagtttgcacaggcagacactgtggtaagatctctgatggccagccaaagccttcttacaaggctttttcagatgtttaacaagatagaacctcctattcttcttaaggtcctcaatgctttgttcaacctttgcaagattaataaaagaagacaggaacaggcagctgaaaatggaatcattcctcacttgatgaattttgtcatgtcagactcacctctgaggcagtatgccctgcctttgctgtgtgatatggctcatgcttctcgcaactctagagagcagttgagggctcatggaggactagatgcgtacttaaatctgttggaggatgatgtatgggcgtgcacggcattagattctattgctgtttgtttggctcacgataatgatcatagaaaagtggagcaggcactgttgaaaaaagaggcaattcaaaagttagtgaagttcttccaagactgcccagaacagtattttgtccatatattggactctttcttgaagataataatgaaatcttctaggctaaacacagcaatggccaccaatggcttgacagcattgctcattgcaaggcttaaccatcgagacgctattgcccgcctgactctgctgaaactcataaaggttgtctatgagcatcatcctcgaccaaaacaggtcatagtagagaatgacctccctcagaagctacaaaacctgattgaagaacgcaggggtggacaacggggcggccatcaagtgttggtcaaacaaatggccacctcattgctgaaggcgctgcacatcaacacagtattgtgattttgatgggtcatgtgttttcctctcaagttagtgtttacgttttcgctagaggaagaaaaggggcgtccttctctttttgcctccttttctgctgtggtggcttctcacgagcaccagactcatttgttgtacctgatccctccttttttgggagaaaggttcaacgttttggtgcaggataaaatgggcttgctatcctccagtgctgtgtatatctagcgtatgttagtgaagaaattgcaaattagacaatctaattaaaaaaatttaaaccatattgacattttgttccgtgtgttagtagattttccctagcctgacccacttgcaccaagcaaaatggttgatatcgtggacgtctttaacaggatgcaagaaagcatcacatagttcttttgatgcattacattacataattcttaagcgtatacaatgagat

SEQ ID NO: 18031 - DNA, 5132 bp, Zea Mays
gttaatttcccacgtccaggaaaaatatcgaaacaaggacgaaaaacacgaagaattacggaagagcaccccatcttcggtttctttcctccggacttcttcctgcttgcggcgtccgccaattcccttccctacccaaaccctagagcaaagctgaatggccctcgccacgagctcgcgagagactctgcgccgccgccggtgactgctgatccgcccgccgccgccgcgcccggtgctttgtcacgcaggaggcgacggtatggcgtcgaggcagcacaatgcacagttccacaaatccaagacgctcgacaacaaatacatgctcggagatgagatagggaagggggcgtacggccgcgtatacaaggggcttgacctggagaatggcgatttcgtggccatcaaacaggtctcgctggagaacattccgcaggaggatctcaacataataatgcaagagatcgaccttttgaaaaatcttaatcacaaaaatattgtcaagtatctgggatcactgaagacaaagagccacctccatattattttagagtatgtggagaatggctcacttgccaatattatcaagccaaacaaattcggacctattcctgaatctttggtggctctttacattgctcaggtgttggaaggtcttgtttatctgcatgaacaaggtgtcattcatagagatatcaagggcgcaaatatactgagtaccaaagagggtcttgtcaaacttgctgattttggagttgccactaaattgactgaagctgacatcaacactcattctgtggtcggcactccatactggatggcgcctgaggtcattgaaatgtccggcgtttgcgctgcttctgatatctggagtgtgggttgcactgtaattgagttgctgacatgtgccccgccatattatgatctccaacctatgcctgcactgttccgtattgttcaggatgtgcatccaccaataccagaaggactgtcacctgaggttactgattttctccaacagtgtttccaaaaggatgcgatgcaaaggcctgatgcaaaagcattattgatgcatacatggttgcaaaacttaagacgagctttgcctggttctcttcggcaacctactccattgaggaacatcgatggtgatgatgaaggctcaagaggtgataatagcttgggtttttgcgacacaccaggagatattcaaacaactattacttctaatgttgaccaggagaatgggagtaaagaaccaattatggactctactgtacaaagtaaatctgaagagcttcatgatggaaatttaaaacttactgagggcagtagttcaaacagtgtggcgcttatgaaagataatgtggtccttaataaaggtccgacactagttttacatgagaagttaccggtggaatcttcatctggaggtgctgatttgaatggcaaagtaatggcacatgaactattgcaaggtggtccgccaggtaaggtagagctggagaataaagaaagttcaagtagtgatgtgttctcctttcaggctggaagacagaatattggcttccaaaaggtggttgaaccttcagttgttgaggggccaaaacagcttagtagatttagtgacaaacctgaagatgcctctttggaagacttatttccaccaaatgataaatggggagataatggggctgaaccttcaacatcaactactgtccaagaacttaaatataatggtgtacaaaatgcgttcttgaaggggctcaatgctagggtggagaagcaaaaagaaaatgataacgagtctatgaatggtggaaagctaattgaatttgccatgcaactagaaaatattgacgcgttgggttttggtgaacatattcctggagagagtcttttccctgtgcagtctgtggaatacaacaaaatagtagcacaactgagaccaggggaaagtgaagatgtaatactgttggcatgccaaaagcttctatcaattttcagttaccgccctgagcaaaaacatatttatatggcacaaaatggtttcctcccgctgatggaactccttgaaattcccagaaatcgtatattatgctctgttctgcagcttatcaacaacattgtaaaagatagtacatgcttcctagaaaatgcttgccttgttggccttattccagtggtgatgaattttgcagagccaaatcgtccaaaggatgttcgggtgcaagcatccttgtttcttcagcagctttgtcaagccaggtctttttctttctccaacataacagcaacagcaaagctttttatgtcaagcaagttgggggtaagctagagttaaaaacctaatagaacccacaagtcatggtccggtcacatggatagctgttctccatgcactcctattcaaggctaaacctttgggtatatcacatcctttcaagtccccttttactgtctcttctccaatcaacttcggtcttccttttctctcttctcattactgttgcgccttaggattccactatgcactggcgtctctggaggtctccgttggatatgtccaaaccatctaaaccaatgttggacgagctttctttctccaacatagttgataatttctgatttttttaataaaagagtggaagggacaaaagctttggtgtactaatttctggtttctatctccagcaccctgacattgcaaatgtttgttgcatgccaagggatccctgttttggtaagctttatggagcctgactatgcaaaatacagggatatggttcatcttgcaattgacggcatttggcaggtcttcaagctccagcattcaactccaagaaacaacttctgtcgtatagcggcaaaaaatgggatgcttcctaggctggtgaatacactatatagcctgaacgaagcaacaagatttgcttcagtctcagggtcaggtgcttcagtaacacagaatggctcaaccccccgacgaagatctggccaattagacccttcagttcttgaaagttgcaaggcaaggctggatcatcatcattcatctggttctctgcaatctctacaaacagacgcagataagcaccatatattaatggactcgtcatctcctaggtttagtgataaaaccggcagtaacttggagaggaatgataacgacttggttattcggccacagaggcttagtgtttctgctggaaggacatctacagacagatcaccaaagcatgtagaactagtttcaaatggtcatattagcggtcaaaatgaccaggtccgacctctactgagtttgttggagaaagaaccaccttctcgacatatatctggacaacttgattacgtttgccacataactggattggaaaggcatgaaaccattttgccactattacatacatcgacagaaaggaaaacaaatggtgaacttgacttaatgatggattttgctgaggtctctagacatggaagagagaatggccatctggactcgagtataaaagtttcaaatagagttcatagtatgaaatatgcaccttcgacaagtgcctctaatgaaggagcatcaacttctggagctgcatcgcaaacagcatctggtgtgttatctggatcaggagtgctcaatttaagaccagggagtacaacatcatcaggcccattagctcagatgttctcttccatgagcgcagatgtggcacgcgaatatcttgaaaaagtagctgatcttcttttggagtttgcacaggcagacactgtggtaagatctctgatggccagccaaagccttcttacaaggctttttcagatgtttaacaagatagaacctcctattcttcttaagattcttaggtgcattaatcatttgtcgggtgatcctaattgtctcgagacacttcaacgcacagatgcaatcaaacatctgataccgattcttgagctttgtgatggacctctggtttttcaaatacatagtgaggtcctcaatgctttgttcaacctttgcaagattaataaaagaagacaggaacaggcagctgaaaatggaatcattcctcacttgatgaattttgtcatgtcagactcacctctgaggcagtatgccctgcctttgctgtgtgatatggctcatgcttctcgcaactctagagagcagttgagggctcatggaggactagatgcgtacttaaatctgttggaggatgatgtatgggcgtgcacggcattagattctattgctgtttgtttggctcacgataatgatcatagaaaagtggagcaggcactgttgaaaaaagaggcaattcaaaagttagtgaagttcttccaagactgcccagaacagtattttgtccatatattggactctttcttgaagataataatgaaatcttctaggctaaacacagcaatggccaccaatggcttgacagcattgctcattgcaaggcttaaccatcgagacgctattgcccgcctgactctgctgaaactcataaaggttgtctatgagcatcatcctcgaccaaaacaggtcatagtagagaatgacctccctcagaagctacaaaacctgattgaagaacgcaggggtggacaacggggcggccatcaagtgttggtcaaacaaatggccacctcattgctgaaggcgctgcacatcaacacagtattgtgattttgatgggtcatgtgttttcctctcaagttagtgtttacgttttcgctagaggaagaaaaggggcgtccttctctttttgcctccttttctgctgtggtggcttctcacgagcaccagactcatttgttgtacctgatccctccttttttgggagaaaggttcaacgttttggtgcaggataaaatgggcttgctatcctccagtgctgtgtatatctagcgtatgttagtgaagaaattgcaaattagacaatctaattaaaaaaatttaaaccatattgacattttgttccgtgtgttagtagattttccctagcctgacccacttgcaccaagcaaaatggttgatatcgtggacgtctttaacaggatgcaagaaagcatcacatagttcttttgatgcattacattacataattcttaagcgtatacaatgagat

SEQ ID NO: 18032 - DNA, 4785 bp, Zea Mays
ctcctctccctttatccctgcaacatcctcgctggcatctgccaagttcgaaggcccaccccggtataaaaggcggatccattccgttaatttcccacgtccaggaaaaatatcgaaacaaggacgaaaaacacgaagaattacggaagagcaccccatcttcggtttctttcctccggacttcttcctgcttgcggcgtccgccaattcccttccctacccaaaccctagagcaaagctgaatggccctcgccacgagctcgcgagagactctgcgccgccgccggtgactgctgatccgcccgccgccgccgcgcccggtgctttgtcacgcaggaggcgacggtatggcgtcgaggcagcacaatgcacagttccacaaatccaagacgctcgacaacaaatacatgctcggagatgagatagggaagggggcgtacggccgcgtatacaaggggcttgacctggagaatggcgatttcgtggccatcaaacaggtctcgctggagaacattccgcaggaggatctcaacataataatgaatcttaatcacaaaaatattgtcaagtatctgggatcactgaagacaaagagccacctccatattattttagagtatgtggagaatggctcacttgccaatattatcaagccaaacaaattcggacctattcctgaatctttggtggctctttacattgctcagtttttatatgaccaggtgttggaaggtcttgtttatctgcatgaacaaggtgtcattcatagagatatcaagggcgcaaatatactgagtaccaaagagggtcttgtcaaacttgctgattttggagttgccactaaattgactgaagctgacatcaacactcattctgtggtcggcactccatactggatggcgcctgaggtcattgaaatgtccggcgtttgcgctgcttctgatatctggagtgtgggttgcactgtaattgagttgctgacatgtgccccgccatattatgatctccaacctatgcctgcactgttccgtattgttcaggatgtgcatccaccaataccagaaggactgtcacctgaggttactgattttctccaacagtgtttccaaaaggatgcgatgcaaaggcctgatgcaaaagcattattgatgcatacatggttgcaaaacttaagacgagctttgcctggttctcttcggcaacctactccattgaggaacatcgatggtgatgatgaaggctcaagaggtgataatagcttgggtttttgcgacacaccaggagatattcaaacaactattacttctaatgttgaccaggagaatgggagtaaagaaccaattatggactctactgtacaaagtaaatctgaagagcttcatgatggaaatttaaaacttactgagggcagtagttcaaacagtgtggcgcttatgaaagataatgtggtccttaataaaggtccgacactagttttacatgagaagttaccggtggaatcttcatctggaggtgctgatttgaatggcaaagtaatggcacatgaactattgcaaggtggtccgccaggtaaggtagagctggagaataaagaaagttcaagtagtgatgtgttctcctttcaggctggaagacagaatattggcttccaaaaggtggttgaaccttcagttgttgaggggccaaaacagcttagtagatttagtgacaaacctgaagatgcctctttggaagacttatttccaccaaatgataaatggggagataatggggctgaaccttcaacatcaactactgtccaagaacttaaatataatggtgtacaaaatgcgttcttgaaggggctcaatgctagggtggagaagcaaaaagaaaatgataacgagtctatgaatggtggaaagctaattgaatttgccatgcaactagaaaatattgacgcgttgggttttggtgaacatattcctggagagagtcttttccctgtgcagtctgtggaatacaacaaaatagtagcacaactgagaccaggggaaagtgaagatgtaatactgttggcatgccaaaagcttctatcaattttcagttaccgccctgagcaaaaacatatttatatggcacaaaatggtttcctcccgctgatggaactccttgaaattcccagaaatcgtatattatgctctgttctgcagcttatcaacaacattgtaaaagatagtacatgcttcctagaaaatgcttgccttgttggccttattccagtggtgatgaattttgcagagccaaatcgtccaaaggatgttcgggtgcaagcatccttgtttcttcagcagctttgtcaagccagcaccctgacattgcaaatgtttgttgcatgccaagggatccctgttttggtaagctttatggagcctgactatgcaaaatacagggatatggttcatcttgcaattgacggcatttggcaggtcttcaagctccagcattcaactccaagaaacaacttctgtcgtatagcggcaaaaaatgggatgcttcctaggctggtgaatacactatatagcctgaacgaagcaacaagatttgcttcagtctcagggtcaggtgcttcagtaacacagaatggctcaaccccccgacgaagatctggccaattagacccttcagttcttgaaagttgcaaggcaaggctggatcatcatcattcatctggttctctgcaatctctacaaacagacgcagataagcaccatatattaatggactcgtcatctcctaggtttagtgataaaaccggcagtaacttggagaggaatgataacgacttggttattcggccacagaggcttagtgtttctgctggaaggacatctacagacagatcaccaaagcatgtagaactagtttcaaatggtcatattagcggtcaaaatgaccaggtccgacctctactgagtttgttggagaaagaaccaccttctcgacatatatctggacaacttgattacgtttgccacataactggattggaaaggcatgaaaccattttgccactattacatacatcgacagaaaggaaaacaaatggtgaacttgacttaatgatggattttgctgaggtctctagacatggaagagagaatggccatctggactcgagtataaaagtttcaaatagagttcatagtatgaaatatgcaccttcgacaagtgcctctaatgaaggagcatcaacttctggagctgcatcgcaaacagcatctggtgtgttatctggatcaggagtgctcaatttaagaccagggagtacaacatcatcaggcccattagctcagatgttctcttccatgagcgcagatgtggcacgcgaatatcttgaaaaagtagctgatcttcttttggagtttgcacaggcagacactgtggtaagatctctgatggccagccaaagccttcttacaaggctttttcagatgtttaacaagatagaacctcctattcttcttaagattcttaggtgcattaatcatttgtcgggtgatcctaattgtctcgagacacttcaacgcacagatgcaatcaaacatctgataccgattcttgagctttgtgatggacctctggtttttcaaatacatagtgaggtcctcaatgctttgttcaacctttgcaagattaataaaagaagacaggaacaggcagctgaaaatggaatcattcctcacttgatgaattttgtcatgtcagactcacctctgaggcagtatgccctgcctttgctgtgtgatatggctcatgcttctcgcaactctagagagcagttgagggctcatggaggactagatgcgtacttaaatctgttggaggatgatgtatgggcgtgcacggcattagattctattgctgtttgtttggctcacgataatgatcatagaaaagtggagcaggcactgttgaaaaaagaggcaattcaaaagttagtgaagttcttccaagactgcccagaacagtattttgtccatatattggactctttcttgaagataataatgaaatcttctaggctaaacacagcaatggccaccaatggcttgacagcattgctcattgcaaggcttaaccatcgagacgctattgcccgcctgactctgctgaaactcataaaggttgtctatgagcatcatcctcgaccaaaacaggtcatagtagagaatgacctccctcagaagctacaaaacctgattgaagaacgcaggggtggacaacggggcggccatcaagtgttggtcaaacaaatggccacctcattgctgaaggcgctgcacatcaacacagtattgtgattttgatgggtcatgtgttttcctctcaagttagtgtttacgttttcgctagaggaagaaaaggggcgtccttctctttttgcctccttttctgctgtggtggcttctcacgagcaccagactcatttgttgtacctgatccctccttttttgggagaaaggttcaacgttttggtgcaggataaaatgggcttgctatcctccagtgctgtgtatatctagcgtatgttagtgaagaaattgcaaattagacaatctaattaaaaaaatttaaaccatattgacattttgttccgtgtgttagtagattttccctagcctgacccacttgcaccaagcaaaatggttgatatcgtggacgtctttaacaggatgcaagaaagcatcacatagttcttttgatgcattacattacataattcttaagcgtatacaatgagat

SEQ ID NO: 18033 - DNA, 4770 bp, Zea Mays
ctcctctccctttatccctgcaacatcctcgctggcatctgccaagttcgaaggcccaccccggtataaaaggcggatccattccgttaatttcccacgtccaggaaaaatatcgaaacaaggacgaaaaacacgaagaattacggaagagcaccccatcttcggtttctttcctccggacttcttcctgcttgcggcgtccgccaattcccttccctacccaaaccctagagcaaagctgaatggccctcgccacgagctcgcgagagactctgcgccgccgccggtgactgctgatccgcccgccgccgccgcgcccggtgctttgtcacgcaggaggcgacggtatggcgtcgaggcagcacaatgcacagttccacaaatccaagacgctcgacaacaaatacatgctcggagatgagatagggaagggggcgtacggccgcgtatacaaggggcttgacctggagaatggcgatttcgtggccatcaaacaggtctcgctggagaacattccgcaggaggatctcaacataataatgaatcttaatcacaaaaatattgtcaagtatctgggatcactgaagacaaagagccacctccatattattttagagtatgtggagaatggctcacttgccaatattatcaagccaaacaaattcggacctattcctgaatctttggtggctctttacattgctcaggtgttggaaggtcttgtttatctgcatgaacaaggtgtcattcatagagatatcaagggcgcaaatatactgagtaccaaagagggtcttgtcaaacttgctgattttggagttgccactaaattgactgaagctgacatcaacactcattctgtggtcggcactccatactggatggcgcctgaggtcattgaaatgtccggcgtttgcgctgcttctgatatctggagtgtgggttgcactgtaattgagttgctgacatgtgccccgccatattatgatctccaacctatgcctgcactgttccgtattgttcaggatgtgcatccaccaataccagaaggactgtcacctgaggttactgattttctccaacagtgtttccaaaaggatgcgatgcaaaggcctgatgcaaaagcattattgatgcatacatggttgcaaaacttaagacgagctttgcctggttctcttcggcaacctactccattgaggaacatcgatggtgatgatgaaggctcaagaggtgataatagcttgggtttttgcgacacaccaggagatattcaaacaactattacttctaatgttgaccaggagaatgggagtaaagaaccaattatggactctactgtacaaagtaaatctgaagagcttcatgatggaaatttaaaacttactgagggcagtagttcaaacagtgtggcgcttatgaaagataatgtggtccttaataaaggtccgacactagttttacatgagaagttaccggtggaatcttcatctggaggtgctgatttgaatggcaaagtaatggcacatgaactattgcaaggtggtccgccaggtaaggtagagctggagaataaagaaagttcaagtagtgatgtgttctcctttcaggctggaagacagaatattggcttccaaaaggtggttgaaccttcagttgttgaggggccaaaacagcttagtagatttagtgacaaacctgaagatgcctctttggaagacttatttccaccaaatgataaatggggagataatggggctgaaccttcaacatcaactactgtccaagaacttaaatataatggtgtacaaaatgcgttcttgaaggggctcaatgctagggtggagaagcaaaaagaaaatgataacgagtctatgaatggtggaaagctaattgaatttgccatgcaactagaaaatattgacgcgttgggttttggtgaacatattcctggagagagtcttttccctgtgcagtctgtggaatacaacaaaatagtagcacaactgagaccaggggaaagtgaagatgtaatactgttggcatgccaaaagcttctatcaattttcagttaccgccctgagcaaaaacatatttatatggcacaaaatggtttcctcccgctgatggaactccttgaaattcccagaaatcgtatattatgctctgttctgcagcttatcaacaacattgtaaaagatagtacatgcttcctagaaaatgcttgccttgttggccttattccagtggtgatgaattttgcagagccaaatcgtccaaaggatgttcgggtgcaagcatccttgtttcttcagcagctttgtcaagccagcaccctgacattgcaaatgtttgttgcatgccaagggatccctgttttggtaagctttatggagcctgactatgcaaaatacagggatatggttcatcttgcaattgacggcatttggcaggtcttcaagctccagcattcaactccaagaaacaacttctgtcgtatagcggcaaaaaatgggatgcttcctaggctggtgaatacactatatagcctgaacgaagcaacaagatttgcttcagtctcagggtcaggtgcttcagtaacacagaatggctcaaccccccgacgaagatctggccaattagacccttcagttcttgaaagttgcaaggcaaggctggatcatcatcattcatctggttctctgcaatctctacaaacagacgcagataagcaccatatattaatggactcgtcatctcctaggtttagtgataaaaccggcagtaacttggagaggaatgataacgacttggttattcggccacagaggcttagtgtttctgctggaaggacatctacagacagatcaccaaagcatgtagaactagtttcaaatggtcatattagcggtcaaaatgaccaggtccgacctctactgagtttgttggagaaagaaccaccttctcgacatatatctggacaacttgattacgtttgccacataactggattggaaaggcatgaaaccattttgccactattacatacatcgacagaaaggaaaacaaatggtgaacttgacttaatgatggattttgctgaggtctctagacatggaagagagaatggccatctggactcgagtataaaagtttcaaatagagttcatagtatgaaatatgcaccttcgacaagtgcctctaatgaaggagcatcaacttctggagctgcatcgcaaacagcatctggtgtgttatctggatcaggagtgctcaatttaagaccagggagtacaacatcatcaggcccattagctcagatgttctcttccatgagcgcagatgtggcacgcgaatatcttgaaaaagtagctgatcttcttttggagtttgcacaggcagacactgtggtaagatctctgatggccagccaaagccttcttacaaggctttttcagatgtttaacaagatagaacctcctattcttcttaagattcttaggtgcattaatcatttgtcgggtgatcctaattgtctcgagacacttcaacgcacagatgcaatcaaacatctgataccgattcttgagctttgtgatggacctctggtttttcaaatacatagtgaggtcctcaatgctttgttcaacctttgcaagattaataaaagaagacaggaacaggcagctgaaaatggaatcattcctcacttgatgaattttgtcatgtcagactcacctctgaggcagtatgccctgcctttgctgtgtgatatggctcatgcttctcgcaactctagagagcagttgagggctcatggaggactagatgcgtacttaaatctgttggaggatgatgtatgggcgtgcacggcattagattctattgctgtttgtttggctcacgataatgatcatagaaaagtggagcaggcactgttgaaaaaagaggcaattcaaaagttagtgaagttcttccaagactgcccagaacagtattttgtccatatattggactctttcttgaagataataatgaaatcttctaggctaaacacagcaatggccaccaatggcttgacagcattgctcattgcaaggcttaaccatcgagacgctattgcccgcctgactctgctgaaactcataaaggttgtctatgagcatcatcctcgaccaaaacaggtcatagtagagaatgacctccctcagaagctacaaaacctgattgaagaacgcaggggtggacaacggggcggccatcaagtgttggtcaaacaaatggccacctcattgctgaaggcgctgcacatcaacacagtattgtgattttgatgggtcatgtgttttcctctcaagttagtgtttacgttttcgctagaggaagaaaaggggcgtccttctctttttgcctccttttctgctgtggtggcttctcacgagcaccagactcatttgttgtacctgatccctccttttttgggagaaaggttcaacgttttggtgcaggataaaatgggcttgctatcctccagtgctgtgtatatctagcgtatgttagtgaagaaattgcaaattagacaatctaattaaaaaaatttaaaccatattgacattttgttccgtgtgttagtagattttccctagcctgacccacttgcaccaagcaaaatggttgatatcgtggacgtctttaacaggatgcaagaaagcatcacatagttcttttgatgcattacattacataattcttaagcgtatacaatgagat

SEQ ID NO: 18034 - DNA, 3703 bp, Zea Mays
gttaatttcccacgtccaggaaaaatatcgaaacaaggacgaaaaacacgaagaattacggaagagcaccccatcttcggtttctttcctccggacttcttcctgcttgcggcgtccgccaattcccttccctacccaaaccctagagcaaagctgaatggccctcgccacgagctcgcgagagactctgcgccgccgccggtgactgctgatccgcccgccgccgccgcgcccggtgctttgtcacgcaggaggcgacggtatggcgtcgaggcagcacaatgcacagttccacaaatccaagacgctcgacaacaaatacatgctcggagatgagatagggaagggggcgtacggccgcgtatacaaggggcttgacctggagaatggcgatttcgtggccatcaaacaggtctcgctggagaacattccgcaggaggatctcaacataataatgcaagagatcgaccttttgaaaaatcttaatcacaaaaatattgtcaagtatctgggatcactgaagacaaagagccacctccatattattttagagtatgtggagaatggctcacttgccaatattatcaagccaaacaaattcggacctattcctgaatctttggtggctctttacattgctcaggtgttggaaggtcttgtttatctgcatgaacaaggtgtcattcatagagatatcaagggcgcaaatatactgagtaccaaagagggtcttgtcaaacttgctgattttggagttgccactaaattgactgaagctgacatcaacactcattctgtggtcggcactccatactggatggcgcctgaggtcattgaaatgtccggcgtttgcgctgcttctgatatctggagtgtgggttgcactgtaattgagttgctgacatgtgccccgccatattatgatctccaacctatgcctgcactgttccgtattgttcaggatgtgcatccaccaataccagaaggactgtcacctgaggttactgattttctccaacagtgtttccaaaaggatgcgatgcaaaggcctgatgcaaaagcattattgatgcatacatggttgcaaaacttaagacgagctttgcctggttctcttcggcaacctactccattgaggaacatcgatggtgatgatgaaggctcaagaggtgataatagcttgggtttttgcgacacaccaggagatattcaaacaactattacttctaatgttgaccaggagaatgggagtaaagaaccaattatggactctactgtacaaagtaaatctgaagagcttcatgatggaaatttaaaacttactgagggcagtagttcaaacagtgtggcgcttatgaaagataatgtggtccttaataaaggtccgacactagttttacatgagaagttaccggtggaatcttcatctggaggtgctgatttgaatggcaaagtaatggcacatgaactattgcaaggtggtccgccaggtaaggtagagctggagaataaagaaagttcaagtagtgatgtgttctcctttcaggctggaagacagaatattggcttccaaaaggtggttgaaccttcagttgttgaggggccaaaacagcttagtagatttagtgacaaacctgaagatgcctctttggaagacttatttccaccaaatgataaatggggagataatggggctgaaccttcaacatcaactactgtccaagaacttaaatataatggtgtacaaaatgcgttcttgaaggggctcaatgctagggtggagaagcaaaaagaaaatgataacgagtctatgaatggtggaaagctaattgaatttgccatgcaactagaaaatattgacgcgttgggttttggtgaacatattcctggagagagtcttttccctgtgcagtctgtggaatacaacaaaatagtagcacaactgagaccaggggaaagtgaagatgtaatactgttggcatgccaaaagcttctatcaattttcagttaccgccctgagcaaaaacatatttatatggcacaaaatggtttcctcccgctgatggaactccttgaaattcccagaaatcgtatattatgctctgttctgcagcttatcaacaacattgtaaaagatagtacatgcttcctagaaaatgcttgccttgttggccttattccagtggtgatgaattttgcagagccaaatcgtccaaaggatgttcgggtgcaagcatccttgtttcttcagcagctttgtcaagccagcaccctgacattgcaaatgtttgttgcatgccaagggatccctgttttggtaagctttatggagcctgactatgcaaaatacagggatatggttcatcttgcaattgacggcatttggcaggtcttcaagctccagcattcaactccaagaaacaacttctgtcgtatagcggcaaaaaatgggatgcttcctaggctggtgaatacactatatagcctgaacgaagcaacaagatttgcttcagtctcagggtcaggtgcttcagtaacacagaatggctcaaccccccgacgaagatctggccaattagacccttcagttcttgaaagttgcaaggcaaggctggatcatcatcattcatctggttctctgcaatctctacaaacagacgcagataagcaccatatattaatggactcgtcatctcctaggtttagtgataaaaccggcagtaacttggagaggaatgataacgacttggttattcggccacagaggcttagtgtttctgctggaaggacatctacagacagatcaccaaagcatgtagaactagtttcaaatggtcatattagcggtcaaaatgaccaggtccgacctctactgagtttgttggagaaagaaccaccttctcgacatatatctggacaacttgattacgtttgccacataactggattggaaaggcatgaaaccattttgccactattacatacatcgacagaaaggaaaacaaatggtgaacttgacttaatgatggattttgctggtactttattctgtgcccattattcagataggtctctagacatggaagagagaatggccatctggactcgagtataaaagtttcaaatagagttcatagtatgaaatatgcaccttcgacaagtgcctctaatgaaggagcatcaacttctggagctgcatcgcaaacagcatctggtgtgttatctggatcaggagtgctcaatttaagaccagggagtacaacatcatcaggcccattagctcagatgttctcttccatgagcgcagatgtggcacgcgaatatcttgaaaaagtagctgatcttcttttggagtttgcacaggcagacactgtggtaagatctctgatggccagccaaagccttcttacaaggctttttcagatgtttaacaagatagaacctcctattcttcttaagattcttaggtgcattaatcatttgtcgggtgatcctaattgtctcgagacacttcaacgcacagatgcaatcaaacatctgataccgattcttgagctttgtgatggacctctggtttttcaaatacatagtgaggactcattttcctttttatatggtgaaacatccagagtcaatagttttgaagattaagttatgacccatgttctatatctgctggagttggtctactacatttttgtcc

SEQ ID NO: 18035 - DNA, 3000 bp, Zea Mays
atgtcctcatagttgattcaaggtatgtggagaatggctcacttgccaatattatcaagccaaacaaattcggacctattcctgaatctttggtggctctttacattgctcaggtgcttgtggtggttactgtaatactactacttttctctttttccccttatttttatctgatttcagtttttatatgaccaggtgttggaaggtcttgtttatctgcatgaacaaggtgtcattcatagagatatcaagggcgcaaatatactgagtaccaaagaggtcattgaaatgtccggcgtttgcgctgcttctgatatctggagtgtgggttgcactgtaattgagttgctgacatgtgccccgccatattatgatctccaacctatgcctgcactgttccgtattgttcaggatgtgcatccaccaataccagaaggactgtcacctgaggatgcgatgcaaaggcctgatgcaaaagcattattgatgcatacatggttgcaaaacttaagacgagctttgcctggttctcttcggcaacctactccattgaggaacatcgatggtgatgatgaaggctcaagaggtgataatagcttgggtttttgcgacacaccaggagatattcaaacaactattacttctaatgttgaccaggagaatgggagtaaagaaccaattatggactctactgtacaaagtaaatctgaagagcttcatgatggaaatttaaaacttactgagggcagtagttcaaacagtgtggcgcttatgaaagataatgtggtccttaataaaggtccgacactagttttacatgagaagttaccggtggaatcttcatctggaggtgctgatttgaatggcaaagtaatggcacatgaactattgcaaggtggtccgccaggtaaggtagagctggagaataaagaaagttcaagtagtgatgtgttctcctttcaggctggaagacagaatattggcttccaaaaggtggttgaaccttcagttgttgaggggccaaaacagcttagtagatttagtgacaaacctgaagatgcctctttggaagacttatttccaccaaatgataaatggggagataatggggctgaaccttcaacatcaactactgtccaagaacttaaatataatggtgtacaaaatgcgttcttgaaggggctcaatgctagggtggagaagcaaaaagaaaatgataacgagtctatgaatggtggaaagctaattgaatttgccatgcaactagaaaatattgacgcgttgggttttggtgaacatattcctggagagagtcttttccctgtgcagtctgtggaatacaacaaaatagtagcacaactgagaccaggggaaagtgaagatgtaatactgttggcatgccaaaagcttctatcaattttcagttaccgccctgagcaaaaacatatttatatggcacaaaatggtttcctcccgctgatggaactccttgaaattcccagaaatcgtatattatgctctgttctgcagcttatcaacaacattgtaaaagatagtacatgcttcctagaaaatgcttgccttgttggccttattccagtggtgatgaattttgcagagccaaatcgtccaaaggatgttcgggtgcaagcatccttgtttcttcagcagctttgtcaagccaggtctttttctttctccaacataacagcaacagcaaagctttttatgtcaagcaagttgggggtaagctagagttaaaaacctaatagaacccacaagtcatggtccggtcacatggatagctgttctccatgcactcctattcaaggctaaacctttgggtatatcacatcctttcaagtccccttttactgtctcttctccaatcaacttcggtcttccttttctctcttctcattactgttgcgccttaggattccactatgcactggcgtctctggaggtctccgttggatatgtccaaaccatctaaaccaatgttggacgagctttctttctccaacatagttgataatttctgatttttttaataaaagagtggaagggacaaaagctttggtgtactaatttctggtttctatctccagcaccctgacattgcaaatgtttgttgcatgccaagggatccctgttttgggatatggttcatcttgcaattgacggcatttggcaggtcttcaagctccagcattcaactccaagaaacaacttctgtcgtatagcggcaaaaaatgggatgcttcctaggctggtgaatacactatatagcctgaacgaagcaacaagatttgcttcagtctcagggtcaggtgcttcagtaacacagaatggctcaaccccccgacgaagatctggccaattagacccttcagttcttgaaagttgcaaggcaaggctggatcatcatcattcatctggttctctgcaatctctacaaacagacgcagataagcaccatatattaatggactcgtcatctcctaggtttagtgataaaaccggcagtaacttggagaggaatgataacgacttggttattcggccacagaggcttagtgtttctgctggaaggacatctacagacagatcaccaaagcatgtagaactagtttcaaatggtcatattagcggtcaaaatgaccaggtccgacctctactgagtttgttggagaaagaaccaccttctcgacatatatctggacaacttgattacgtttgccacataactggattggaaaggcatgaaaccattttgccactattacatacatcgacagaaaggaaaacaaatggtgaacttgacttaatgatggattttgctgggatcgtgctcctttcttcaccacaaaagaatctggaaatcctggatgccacccaagtgccatttcttcctgtggctggtggcacatgataaatgctggactgctgataggctgcagaaaagaggcatgaaccatccggctaggtgccctcttt

SEQ ID NO: 18036 - DNA, 3192 bp, Zea Mays
gttaatttcccacgtccaggaaaaatatcgaaacaaggacgaaaaacacgaagaattacggaagagcaccccatcttcggtttctttcctccggacttcttcctgcttgcggcgtccgccaattcccttccctacccaaaccctagagcaaagctgaatggccctcgccacgagctcgcgagagactctgcgccgccgccggtgactgctgatccgcccgccgccgccgcgcccggtgctttgtcacgcaggaggcgacggtatggcgtcgaggcagcacaatgcacagttccacaaatccaagacgctcgacaacaaatacatgctcggagatgagatagggaagggggcgtacggccgcgtatacaaggggcttgacctggagaatggcgatttcgtggccatcaaacaggtctcgctggagaacattccgcaggaggatctcaacataataatgcaagagatcgaccttttgaaaaatcttaatcacaaaaatattgtcaagtatctgggatcactgaagacaaagagccacctccatattattttagagtatgtggagaatggctcacttgccaatattatcaagccaaacaaattcggacctattcctgaatctttggtggctctttacattgctcaggtgttggaaggtcttgtttatctgcatgaacaaggtgtcattcatagagatatcaagggcgcaaatatactgagtaccaaagagggtcttgtcaaacttgctgattttggagttgccactaaattgactgaagctgacatcaacactcattctgtggtcggcactccatactggatggcgcctgaggtcattgaaatgtccggcgtttgcgctgcttctgatatctggagtgtgggttgcactgtaattgagttgctgacatgtgccccgccatattatgatctccaacctatgcctgcactgttccgtattgttcaggatgtgcatccaccaataccagaaggactgtcacctgaggttactgattttctccaacagtgtttccaaaaggatgcgatgcaaaggcctgatgcaaaagcattattgatgcatacatggttgcaaaacttaagacgagctttgcctggttctcttcggcaacctactccattgaggaacatcgatggtgatgatgaaggctcaagaggtgataatagcttgggtttttgcgacacaccaggagatattcaaacaactattacttctaatgttgaccaggagaatgggagtaaagaaccaattatggactctactgtacaaagtaaatctgaagagcttcatgatggaaatttaaaacttactgagggcagtagttcaaacagtgtggcgcttatgaaagataatgtggtccttaataaaggtccgacactagttttacatgagaagttaccggtggaatcttcatctggaggtgctgatttgaatggcaaagtaatggcacatgaactattgcaaggtggtccgccaggtaaggtagagctggagaataaagaaagttcaagtagtgatgtgttctcctttcaggctggaagacagaatattggcttccaaaaggtggttgaaccttcagttgttgaggggccaaaacagcttagtagatttagtgacaaacctgaagatgcctctttggaagacttatttccaccaaatgataaatggggagataatggggctgaaccttcaacatcaactactgtccaagaacttaaatataatggtgtacaaaatgcgttcttgaaggggctcaatgctagggtggagaagcaaaaagaaaatgataacgagtctatgaatggtggaaagctaattgaatttgccatgcaactagaaaatattgacgcgttgggttttggtgaacatattcctggagagagtcttttccctgtgcagtctgtggaatacaacaaaatagtagcacaactgagaccaggggaaagtgaagatgtaatactgttggcatgccaaaagcttctatcaattttcagttaccgccctgagcaaaaacatatttatatggcacaaaatggtttcctcccgctgatggaactccttgaaattcccagaaatcgtatattatgctctgttctgcagcttatcaacaacattgtaaaagatagtacatgcttcctagaaaatgcttgccttgttggccttattccagtggtgatgaattttgcagagccaaatcgtccaaaggatgttcgggtgcaagcatccttgtttcttcagcagctttgtcaagccagcaccctgacattgcaaatgtttgttgcatgccaagggatccctgttttggtaagctttatggagcctgactatgcaaaatacagggatatggttcatcttgcaattgacggcatttggcaggtcttcaagctccagcattcaactccaagaaacaacttctgtcgtatagcggcaaaaaatgggatgcttcctaggctggtgaatacactatatagcctgaacgaagcaacaagatttgcttcagtctcagggtcaggtgcttcagtaacacagaatggctcaaccccccgacgaagatctggccaattagacccttcagttcttgaaagttgcaaggcaaggctggatcatcatcattcatctggttctctgcaatctctacaaacagacgcagataagcaccatatattaatggactcgtcatctcctaggtttagtgataaaaccggcagtaacttggagaggaatgataacgacttggttattcggccacagaggcttagtgtttctgctggaaggacatctacagacagatcaccaaagcatgtagaactagtttcaaatggtcatattagcggtcaaaatgaccaggtccgacctctactgagtttgttggagaaagaaccaccttctcgacatatatctggacaacttgattacgtttgccacataactggattggaaaggcatgaaaccattttgccactattacatacatcgacagaaaggaaaacaaatggtgaacttgacttaatgatggattttgctgggatcgtgctcctttcttcaccacaaaagaatctggaaatcctggatgccacccaagtgccatttcttcctgtggctggtggcacatgataaatgctggactgctgataggctgcagaaaagaggcatgaaccatccggctaggtgccctcttt

SEQ ID NO: 18037 - DNA, 703 bp, Zea Mays
acgtccaggaaaaatatcgaaacaaggacgaaaaacacgaagaattacggaagagcaccccatcttcggtttctttcctccggacttcttcctgcttgcggcgtccgccaattcccttccctacccaaaccctagagcaaagctgaatggccctcgccacgagctcgcgagagactctgcgccgccgccggtgactgctgatccgcccgccgccgccgcgcccggtgctttgtcacgcaggaggcgacggtatggcgtcgaggcagcacaatgcacagttccacaaatccaagacgctcgacaacaaatacatgctcggagatgagatagggaagggggcgtacggccgcgtatacaaggggcttgacctggagaatggcgatttcgtggccatcaaacaggaactgacgaccagcagacgtgaggaattgcgtgaaatgtggtttcgggcggagctgtgtgcctgtgtacacagcggctgcagtgcagctataatatggagtttgagccatgcagctcgcccttttgtagtgtactttttttgctgtgagattacatcccatggataggttctgctagcttactcatgtgagttgtaagcaagctctctgtttggtcacattgttcaaaaaaattatagtatgattatattgggatttcataaaaacaatgtattatttccaaatttactaccaatatacag

SEQ ID NO: 18038 - DNA, 1429 bp, Zea Mays
tgcaactggtcctgaggccgtaacctgaaatcattgcaatcctaagggtagcagctgcatagctgtagagataaaggccaaatgtgggtttctgccatcatcagaatatatatcagaagataatactatcaagaaacaagtaacgagatataagatgcatcagcacctcaaattttatcaggatatcgaagactagtgagtacaatcctcttgatctattttctgggtcaaaagagagaatatgcatggccatcaagtcccttttctcaactcctcagaacaacttaaggatttttgtcaatggatctttagcttttggtggcatgggaggtggtgcagatagtgttcatcctgctgacactcttaagtgtcttgaagatctcagcaagattagtggcctaaaactccctgacttcactgagctcctgtcagagacaatttttaggtctgaggtattaggcaacctgttggccactcaaaagttggatgatcatgacattgaaggggtaattcatctgtactacaacataatttctcagccttgtttagtctgcaaaaacctaactgatgtagagctattgcggaagtacactttcttgcattctcttccgttggacaaaagcctgaagatcgttagggacttcctcatttctgctaccgcaaaggactgtagcctgatgatcagctttcggccaagagagaatggtagtacagattctgagtatgattcagtgtttcttgaatcagtgaagcgaacctatgagtacaaggcatatttccttgatctggatgtgaaacctctggataagatggagcattattttaaactggatcagaggatagtcaatttctacacaagaaatgggggaggtcttgccatctccaaagggcagtaataccaaagacacttcgaggatttatacatctggagaagggtgcatcagggagtgttggttgttgttcctgctgcttggtgctgctgttgtaacttcatgagtacagtcccaaggttgggaggctcgacccttaacgcctggaaagggcacagggagctgtgttgtccgtcagtcgctgttgtaactcaaactagtgcatacaccgtggcttgtcacggtaatttccgaagatgtccaacgttagttgagacaaccgaactgcttaccgtggcaatcactcattgtaacatcaagttgaaaatgagggctgaagtttccctcacaggctaccatatgtcagatatgtcctttgtaccactaataagtgcccctggggtcatgtatgaatgtatctcaatttgctattgcagaaatgtttggtgaaactttcatcctcccatgctttgagcaaagctaacctaacttctttgaatctgttgggcttattccagcaaatcctggctgacggatggacctgcgatgctgtctgcttt

SEQ ID NO: 18039 - DNA, 1539 bp, Zea Mays
catcaagattgtttttttcagtgattcataacttaactcttggttaaaccgctagaacattgttggtgtcttaaaatgcaactggtcctgaggccgtaacctgaaatcattgcaatcctaagggtagcagctgcatagctgtagagataaaggccaaatgtgggtttctgccatcatcagaatatatatcagaagataatactatcaagaaacaagtaacgagatataagatgcatcagcacctcaaattttatcagggttgattcccaatacattcttgcacacatttcagatatcgaagactagtgagtacaatcctcttgatctattttctgggtcaaaagagagaatatgcatggccatcaagtcccttttctcaactcctcagaacaacttaaggatttttgtcaatggatctttagcttttggtggcatgggaggtggtgcagatagtgttcatcctgctgacactcttaagtgtcttgaagatctcagcaagattagtggcctaaaactccctgacttcactgagctcctgtcagagacaatttttaggtctgaggtattaggcaacctgttggccactcaaaagttggatgatcatgacattgaaggggtaattcatctgtactacaacataatttctcagccttgtttagtctgcaaaaacctaactgatgtagagctattgcggaagtacactttcttgcattctcttccgttggacaaaagcctgaagatcgttagggacttcctcatttctgctaccgcaaaggactgtagcctgatgatcagctttcggccaagagagaatggtagtacagattctgagtatgattcagtgtttcttgaatcagtgaagcgaacctatgagtacaaggcatatttccttgatctggatgtgaaacctctggataagatggagcattattttaaactggatcagaggatagtcaatttctacacaagaaatgggggaggtcttgccatctccaaagggcagtaataccaaagacacttcgaggatttatacatctggagaagggtgcatcagggagtgttggttgttgttcctgctgcttggtgctgctgttgtaacttcatgagtacagtcccaaggttgggaggctcgacccttaacgcctggaaagggcacagggagctgtgttgtccgtcagtcgctgttgtaactcaaactagtgcatacaccgtggcttgtcacggtaatttccgaagatgtccaacgttagttgagacaaccgaactgcttaccgtggcaatcactcattgtaacatcaagttgaaaatgagggctgaagtttccctcacaggctaccatatgtcagatatgtcctttgtaccactaataagtgcccctggggtcatgtatgaatgtatctcaatttgctattgcagaaatgtttggtgaaactttcatcctcccatgctttgagcaaagctaacctaacttctttgaatctgttgggcttattccagcaaatcctggctgacggatggacctgcgatgctgtctgcttt

SEQ ID NO: 18040 - DNA, 1915 bp, Zea Mays
gtcctcgtcgccttcctgggaaatctccagctactgcccactgccccttcccttcagtccctttccccgggctgtggcactagtactagcaccagcatctcttcaggtctccaccaagcgcagacaccgcagcagcggcagcggcacgatctggtgacccccccgccgcgtcaagcctgctcctccggtgatcgccggactggcggggtaggaaccagcggagcgcagcccgcctccttccgctgtgtctgacagcagcagatcctcgatggagatggatggggttctgcaagccgcggatgccaaggattgggtttacaagggggaaggcgccgcgaatcttatcctcagctacaccggctcgtcgccctccatggtccgtgtacgtgtttctagggattttctggagcttgtcgaaaagaatgttcttagcagccgtcctgctgggagagtaaatgcaagttcaattgataacactgctgatgccgctcttctgatagcagaccactctttattttctggcaatcctaagggtagcagctgcatagctgtagagataaaggccaaatgtgggtttctgccatcatcagaatatatatcagaagataatactatcaagaaacaagtaacgagatataagatgcatcagcacctcaaattttatcaggatatcgaagactagtgagtacaatcctcttgatctattttctgggtcaaaagagagaatatgcatggccatcaagtcccttttctcaactcctcagaacaacttaaggatttttgtcaatggatctttagcttttggtggcatgggaggtggtgcagatagtgttcatcctgctgacactcttaagtgtcttgaagatctcagcaagattagtggcctaaaactccctgacttcactgagctcctgtcagagacaatttttaggtctgaggtattaggcaacctgttggccactcaaaagttggatgatcatgacattgaaggggtaattcatctgtactacaacataatttctcagccttgtttagtctgcaaaaacctaactgatgtagagctattgcggaagtacactttcttgcattctcttccgttggacaaaagcctgaagatcgttagggacttcctcatttctgctaccgcaaaggactgtagcctgatgatcagctttcggccaagagagaatggtagtacagattctgagtatgattcagtgtttcttgaatcagtgaagcgaacctatgagtacaaggcatatttccttgatctggatgtgaaacctctggataagatggagcattattttaaactggatcagaggatagtcaatttctacacaagaaatgggggaggtcttgccatctccaaagggcagtaataccaaagacacttcgaggatttatacatctggagaagggtgcatcagggagtgttggttgttgttcctgctgcttggtgctgctgttgtaacttcatgagtacagtcccaaggttgggaggctcgacccttaacgcctggaaagggcacagggagctgtgttgtccgtcagtcgctgttgtaactcaaactagtgcatacaccgtggcttgtcacggtaatttccgaagatgtccaacgttagttgagacaaccgaactgcttaccgtggcaatcactcattgtaacatcaagttgaaaatgagggctgaagtttccctcacaggctaccatatgtcagatatgtcctttgtaccactaataagtgcccctggggtcatgtatgaatgtatctcaatttgctattgcagaaatgtttggtgaaactttcatcctcccatgctttgagcaaagctaacctaacttctttgaatctgttgggcttattccagcaaatcctggctgacggatggacctgcgatgctgtctgcttt

SEQ ID NO: 18041 - DNA, 2207 bp, Zea Mays
gtcctcgtcgccttcctgggaaatctccagctactgcccactgccccttcccttcagtccctttccccgggctgtggcactagtactagcaccagcatctcttcaggtctccaccaagcgcagacaccgcagcagcggcagcggcacgatctggtgacccccccgccgcgtcaagcctgctcctccggtgatcgccggactggcggggtaggaaccagcggagcgcagcccgcctccttccgctgtgtctgacagcagcagatcctcgatggagatggatggggttctgcaagccgcggatgccaaggattgggtttacaagggggaaggcgccgcgaatcttatcctcagctacaccggctcgtcgccctccatgcttggcaaggtactgcggctcaagaagattctaaaaaacaagtcgcagcgggcaccaagttgtattgtattctcaagtcatgagcaactcctgtggggccatatcccagaactggttgagtcggtcaaacaagattgcttggctcaagcctatgcagtgcatgttatgagccaacacctgggtgccaatcatgtcgatggtggggtccgtgtacgtgtttctagggattttctggagcttgtcgaaaagaatgttcttagcagccgtcctgctgggagagtaaatgcaagttcaattgataacactgctgatgccgctcttctgatagcagaccactctttattttctggcaatcctaagggtagcagctgcatagctgtagagataaaggccaaatgtgggtttctgccatcatcagaatatatatcagaagataatactatcaagaaacaagtaacgagatataagatgcatcagcacctcaaattttatcaggatatcgaagactagtgagtacaatcctcttgatctattttctgggtcaaaagagagaatatgcatggccatcaagtcccttttctcaactcctcagaacaacttaaggatttttgtcaatggatctttagcttttggtggcatgggaggtggtgcagatagtgttcatcctgctgacactcttaagtgtcttgaagatctcagcaagattagtggcctaaaactccctgacttcactgagctcctgtcagagacaatttttaggtctgaggtattaggcaacctgttggccactcaaaagttggatgatcatgacattgaaggggtaattcatctgtactacaacataatttctcagccttgtttagtctgcaaaaacctaactgatgtagagctattgcggaagtacactttcttgcattctcttccgttggacaaaagcctgaagatcgttagggacttcctcatttctgctaccgcaaaggactgtagcctgatgatcagctttcggccaagagagaatggtagtacagattctgagtatgattcagtgtttcttgaatcagtgaagcgaacctatgagtacaaggtatactactgtgaaatatggtgtcgttttacctttatcttctaatcgtccagcactctagccacaaaactagcaatatagttcacaagcatatttccttgatctggatgtgaaacctctggataagatggagcattattttaaactggatcagaggatagtcaatttctacacaagaaatgggggaggtcttgccatctccaaagggcagtaataccaaagacacttcgaggatttatacatctggagaagggtgcatcagggagtgttggttgttgttcctgctgcttggtgctgctgttgtaacttcatgagtacagtcccaaggttgggaggctcgacccttaacgcctggaaagggcacagggagctgtgttgtccgtcagtcgctgttgtaactcaaactagtgcatacaccgtggcttgtcacggtaatttccgaagatgtccaacgttagttgagacaaccgaactgcttaccgtggcaatcactcattgtaacatcaagttgaaaatgagggctgaagtttccctcacaggctaccatatgtcagatatgtcctttgtaccactaataagtgcccctggggtcatgtatgaatgtatctcaatttgctattgcagaaatgtttggtgaaactttcatcctcccatgctttgagcaaagctaacctaacttctttgaatctgttgggcttattccagcaaatcctggctgacggatggacctgcgatgctgtctgcttt

SEQ ID NO: 18042 - DNA, 1789 bp, Zea Mays
gtcctcgtcgccttcctgggaaatctccagctactgcccactgccccttcccttcagtccctttccccgggctgtggcactagtactagcaccagcatctcttcaggtctccaccaagcgcagacaccgcagcagcggcagcggcacgatctggtgacccccccgccgcgtcaagcctgctcctccggtgatcgccggactggcggggtaggaaccagcggagcgcagcccgcctccttccgctggtccgtgtacgtgtttctagggattttctggagcttgtcgaaaagaatgttcttagcagccgtcctgctgggagagtaaatgcaagttcaattgataacactgctgatgccgctcttctgatagcagaccactctttattttctggcaatcctaagggtagcagctgcatagctgtagagataaaggccaaatgtgggtttctgccatcatcagaatatatatcagaagataatactatcaagaaacaagtaacgagatataagatgcatcagcacctcaaattttatcagggtgagatatcgaagactagtgagtacaatcctcttgatctattttctgggtcaaaagagagaatatgcatggccatcaagtcccttttctcaactcctcagaacaacttaaggatttttgtcaatggatctttagcttttggtggcatgggaggtggtgcagatagtgttcatcctgctgacactcttaagtgtcttgaagatctcagcaagattagtggcctaaaactccctgacttcactgagctcctgtcagagacaatttttaggtctgaggtattaggcaacctgttggccactcaaaagttggatgatcatgacattgaaggggtaattcatctgtactacaacataatttctcagccttgtttagtctgcaaaaacctaactgatgtagagctattgcggaagtacactttcttgcattctcttccgttggacaaaagcctgaagatcgttagggacttcctcatttctgctaccgcaaaggactgtagcctgatgatcagctttcggccaagagagaatggtagtacagattctgagtatgattcagtgtttcttgaatcagtgaagcgaacctatgagtacaaggcatatttccttgatctggatgtgaaacctctggataagatggagcattattttaaactggatcagaggatagtcaatttctacacaagaaatgggggaggtcttgccatctccaaagggcagtaataccaaagacacttcgaggatttatacatctggagaagggtgcatcagggagtgttggttgttgttcctgctgcttggtgctgctgttgtaacttcatgagtacagtcccaaggttgggaggctcgacccttaacgcctggaaagggcacagggagctgtgttgtccgtcagtcgctgttgtaactcaaactagtgcatacaccgtggcttgtcacggtaatttccgaagatgtccaacgttagttgagacaaccgaactgcttaccgtggcaatcactcattgtaacatcaagttgaaaatgagggctgaagtttccctcacaggctaccatatgtcagatatgtcctttgtaccactaataagtgcccctggggtcatgtatgaatgtatctcaatttgctattgcagaaatgtttggtgaaactttcatcctcccatgctttgagcaaagctaacctaacttctttgaatctgttgggcttattccagcaaatcctggctgacggatggacctgcgatgctgtctgcttt

SEQ ID NO: 18043 - DNA, 2037 bp, Zea Mays
gtcctcgtcgccttcctgggaaatctccagctactgcccactgccccttcccttcagtccctttccccgggctgtggcactagtactagcaccagcatctcttcaggtctccaccaagcgcagacaccgcagcagcggcagcggcacgatctggtgacccccccgccgcgtcaagcctgctcctccggtgatcgccggactggcggggtaggaaccagcggagcgcagcccgcctccttccgctgtgtctgacagcagcagatcctcgatggagatggatggggttctgcaagccgcggatgccaaggattgggtttacaagggggaaggcgccgcgaatcttatcctcagctacaccggctcgtcgccctccatggtccgtgtacgtgtttctagggattttctggagcttgtcgaaaagaatgttcttagcagccgtcctgctgggagagtaaatgcaagttcaattgataacactgctgatgccgctcttctgatagcagaccactctttattttctggcaatcctaagggtagcagctgcatagctgtagagataaaggccaaatgtgggtttctgccatcatcagaatatatatcagaagataatactatcaagaaacaagtaacgagatataagatgcatcagcacctcaaattttatcagggttgattcccaatacattcttgcacacatttcagatatcgaagactagtgagtacaatcctcttgatctattttctgggtcaaaagagagaatatgcatggccatcaagtcccttttctcaactcctcagaacaacttaaggatttttgtcaatggatctttagcttttggtggcatgggaggtggtgcagatagtgttcatcctgctgacactcttaagtgtcttgaagatctcagcaagattagtggcctaaaactccctgacttcactgagctcctgtcagagacaatttttaggtctgaggtattaggcaacctgttggccactcaaaagttggatgatcatgacattgaaggggtaattcatctgtactacaacataatttctcagccttgtttagtctgcaaaaacctaactgatgtagagctattgcggaagtacactttcttgcattctcttccgttggacaaaagcctgaagatcgttagggacttcctcatttctgctaccgcaaaggactgtagcctgatgatcagctttcggccaagagagaatggtagtacagattctgagtatgattcagtgtttcttgaatcagtgaagcgaacctatgagtacaaggtatactactgtgaaatatggtgtcgttttacctttatcttctaatcgtccagcactctagccacaaaactagcaatatagttcacaagcatatttccttgatctggatgtgaaacctctggataagatggagcattattttaaactggatcagaggatagtcaatttctacacaagaaatgggggaggtcttgccatctccaaagggcagtaataccaaagacacttcgaggatttatacatctggagaagggtgcatcagggagtgttggttgttgttcctgctgcttggtgctgctgttgtaacttcatgagtacagtcccaaggttgggaggctcgacccttaacgcctggaaagggcacagggagctgtgttgtccgtcagtcgctgttgtaactcaaactagtgcatacaccgtggcttgtcacggtaatttccgaagatgtccaacgttagttgagacaaccgaactgcttaccgtggcaatcactcattgtaacatcaagttgaaaatgagggctgaagtttccctcacaggctaccatatgtcagatatgtcctttgtaccactaataagtgcccctggggtcatgtatgaatgtatctcaatttgctattgcagaaatgtttggtgaaactttcatcctcccatgctttgagcaaagctaacctaacttctttgaatctgttgggcttattccagcaaatcctggctgacggatggacctgcgatgctgtctgcttt

SEQ ID NO: 18044 - DNA, 2578 bp, Zea Mays
gcgagagccagaattcgacgctggcggcggcgcgtcgccaatacgcagcgcggatgtggagccacatgcaagcgtgtgtccgcccgcgtggcgtccactctccctccacgtttcggcgtcctcgtcgccttcctgggaaatctccagctactgcccactgccccttcccttcagtccctttccccgggctgtggcactagtactagcaccagcatctcttcaggtctccaccaagcgcagacaccgcagcagcggcagcggcacgatctggtgacccccccgccgcgtcaagcctgctcctccggtgatcgccggactggcggggtaggaaccagcggagcgcagcccgcctccttccgctgtgtctgacagcagcagatcctcgatggagatggatggggttctgcaagccgcggatgccaaggattgggtttacaagggggaaggcgccgcgaatcttatcctcagctacaccggctcgtcgccctccatgcttggcaaggtactgcggctcaagaagattctaaaaaacaagtcgcagcgggcaccaagttgtattgtattctcaagtcatgagcaactcctgtggggccatatcccagaactggttgagtcggtcaaacaagattgcttggctcaagcctatgcagtgcatgttatgagccaacacctgggtgccaatcatgtcgatggtggggtatggttcagattcagttcatttatgtcctgttattgtgattttgattggtaacatattgacaacctcgacacttggggtcagattcagttcacttatggaagaaattggagaattgtgataatttatctataatcacccctactgaaatagaaataacatggcatcaatgtgcatgctattggattttgacacgaatatgctttattctatcatatgttggtaattccagcaggcagcaggcactactctttggatccacgtgacttgacaaagaaatcatgccatctttccacaatgcaggtccgtgtacgtgtttctagggattttctggagcttgtcgaaaagaatgttcttagcagccgtcctgctgggagagtaaatgcaagttcaattgataacactgctgatgccgctcttctgatagcagaccactctttattttctggcaatcctaagggtagcagctgcatagctgtagagataaaggccaaatgtgggtttctgccatcatcagaatatatatcagaagataatactatcaagaaacaagtaacgagatataagatgcatcagcacctcaaattttatcagggtgaggttgattcccaatacattcttgcacacatttcagatatcgaagactagtgagtacaatcctcttgatctattttctgggtcaaaagagagaatatgcatggccatcaagtcccttttctcaactcctcagaacaacttaaggatttttgtcaatggatctttagcttttggtggcatgggaggtggtgcagatagtgttcatcctgctgacactcttaagtgtcttgaagatctcagcaagattagtggcctaaaactccctgacttcactgagctcctgtcagagacaatttttaggtctgaggtattaggcaacctgttggccactcaaaagttggatgatcatgacattgaaggggtaattcatctgtactacaacataatttctcagccttgtttagtctgcaaaaacctaactgatgtagagctattgcggaagtacactttcttgcattctcttccgttggacaaaagcctgaagatcgttagggacttcctcatttctgctaccgcaaaggactgtagcctgatgatcagctttcggccaagagagaatggtagtacagattctgagtatgattcagtgtttcttgaatcagtgaagcgaacctatgagtacaaggcatatttccttgatctggatgtgaaacctctggataagatggagcattattttaaactggatcagaggatagtcaatttctacacaagaaatgggggaggtcttgccatctccaaagggcagtaataccaaagacacttcgaggatttatacatctggagaagggtgcatcagggagtgttggttgttgttcctgctgcttggtgctgctgttgtaacttcatgagtacagtcccaaggttgggaggctcgacccttaacgcctggaaagggcacagggagctgtgttgtccgtcagtcgctgttgtaactcaaactagtgcatacaccgtggcttgtcacggtaatttccgaagatgtccaacgttagttgagacaaccgaactgcttaccgtggcaatcactcattgtaacatcaagttgaaaatgagggctgaagtttccctcacaggctaccatatgtcagatatgtcctttgtaccactaataagtgcccctggggtcatgtatgaatgtatctcaatttgctattgcagaaatgtttggtgaaactttcatcctcccatgctttgagcaaagctaacctaacttctttgaatctgttgggcttattccagcaaatcctggctgacggatggacctgcgatgctgtctgcttt

SEQ ID NO: 18045 - DNA, 2270 bp, Zea Mays
gcgagagccagaattcgacgctggcggcggcgcgtcgccaatacgcagcgcggatgtggagccacatgcaagcgtgtgtccgcccgcgtggcgtccactctccctccacgtttcggcgtcctcgtcgccttcctgggaaatctccagctactgcccactgccccttcccttcagtccctttccccgggctgtggcactagtactagcaccagcatctcttcaggtctccaccaagcgcagacaccgcagcagcggcagcggcacgatctggtgacccccccgccgcgtcaagcctgctcctccggtgatcgccggactggcggggtaggaaccagcggagcgcagcccgcctccttccgctgtgtctgacagcagcagatcctcgatggagatggatggggttctgcaagccgcggatgccaaggattgggtttacaagggggaaggcgccgcgaatcttatcctcagctacaccggctcgtcgccctccatgcttggcaaggtactgcggctcaagaagattctaaaaaacaagtcgcagcgggcaccaagttgtattgtattctcaagtcatgagcaactcctgtggggccatatcccagaactggttgagtcggtcaaacaagattgcttggctcaagcctatgcagtgcatgttatgagccaacacctgggtgccaatcatgtcgatggtggggtccgtgtacgtgtttctagggattttctggagcttgtcgaaaagaatgttcttagcagccgtcctgctgggagagtaaatgcaagttcaattgataacactgctgatgccgctcttctgatagcagaccactctttattttctggcaatcctaagggtagcagctgcatagctgtagagataaaggccaaatgtgggtttctgccatcatcagaatatatatcagaagataatactatcaagaaacaagtaacgagatataagatgcatcagcacctcaaattttatcagggttgattcccaatacattcttgcacacatttcagatatcgaagactagtgagtacaatcctcttgatctattttctgggtcaaaagagagaatatgcatggccatcaagtcccttttctcaactcctcagaacaacttaaggatttttgtcaatggatctttagcttttggtggcatgggaggtggtgcagatagtgttcatcctgctgacactcttaagtgtcttgaagatctcagcaagattagtggcctaaaactccctgacttcactgagctcctgtcagagacaatttttaggtctgaggtattaggcaacctgttggccactcaaaagttggatgatcatgacattgaaggggtaattcatctgtactacaacataatttctcagccttgtttagtctgcaaaaacctaactgatgtagagctattgcggaagtacactttcttgcattctcttccgttggacaaaagcctgaagatcgttagggacttcctcatttctgctaccgcaaaggactgtagcctgatgatcagctttcggccaagagagaatggtagtacagattctgagtatgattcagtgtttcttgaatcagtgaagcgaacctatgagtacaaggcatatttccttgatctggatgtgaaacctctggataagatggagcattattttaaactggatcagaggatagtcaatttctacacaagaaatgggggaggtcttgccatctccaaagggcagtaataccaaagacacttcgaggatttatacatctggagaagggtgcatcagggagtgttggttgttgttcctgctgcttggtgctgctgttgtaacttcatgagtacagtcccaaggttgggaggctcgacccttaacgcctggaaagggcacagggagctgtgttgtccgtcagtcgctgttgtaactcaaactagtgcatacaccgtggcttgtcacggtaatttccgaagatgtccaacgttagttgagacaaccgaactgcttaccgtggcaatcactcattgtaacatcaagttgaaaatgagggctgaagtttccctcacaggctaccatatgtcagatatgtcctttgtaccactaataagtgcccctggggtcatgtatgaatgtatctcaatttgctattgcagaaatgtttggtgaaactttcatcctcccatgctttgagcaaagctaacctaacttctttgaatctgttgggcttattccagcaaatcctggctgacggatggacctgcgatgctgtctgcttt

SEQ ID NO: 18046 - DNA, 1515 bp, Zea Mays
aactgccggccttttcctatgaaattcagacacgaccacgcacggagcatttggaagtcatcctcgcccagtcgccccaccaccgcctccgtcgacgtcgtcctcgcctccgccgcgctcgcctcaccgccaccgccaccacggccttcctcgtctcatctccgccgtggcctcgccctcgatacgctactgacggggtgcccctcgccgtcgacacgtgacctccgtcatttgcatctcagctccaagatctactccagctgctggcctgtagctggcagtggtgactggcaggctgatctggttggacatggagagcgggctgctcttggcaccaggattggcaccatcaccggcacgcttgtctccaatctccatcgatataattgactgcattcggcttggttgtgcttgttttcagggtgaagacaagaagtgacccagcaatttccattttcttgttcaggatccttcatccgcaccagaacctccaccaccaattgatggaccattcaaagctttgggtgttgattacacaggagatgttgtgattccaagcttggagagtcataatgtccgtcagctttatccaaagggccccaatattgacttcaaaaaggagctaaggaccctcaacagagagcttcaattgcatattttggagctggcagatattttagttgagagaccatctcaatatgctcgtagggtggaagatatcacactcatattcaagaacttgcatcatcttctcaattccctacgacctcatcaggcaagagccacattgattcacatgcttgagagccaaattcagcgccgcaaggaagcaattgaagatataaagcagaggagagtggaagcgcagaagctgcttgcggaatcactgcatatcttggatgcaagccaagctaactaggctgacgccgagttggctggttcaagactggttcttcttagttaagagagtgttagcagcttcgagcctgccttcagctacatgttgggttactttgttgtggaagtatagattgtgagattgatgcctcgtggctaaacttagggggtgtttgaatgcactagaactaatagttagttagctaaaaattattagttagattagctagctaacaaataactagctaactattaactactttaccaaaaatagctaatagctaaactattagctagagtgtttggacgtttcaactaattttagccactaactattagttttagtgcattcaaacacttccttaatcgaaaggttctctatgctactcccttcattccaaattattagttttattttttttaatgcattattatgcacctagatgtatactatgtgtagatacataataaaagctaagtattcagaaaaattaaaataacttacagtatgatttaaaatagaggaaataatatattacagtattatctagaggaagagtttgccttattttgtacaagtatcgactaggaaattggatgtgtgaaacaagttcttcg

SEQ ID NO: 18047 - DNA, 1794 bp, Zea Mays
cttggagcgaggggcggaggcgtaaaaagactcggccctttgctgtgactgcggccccattagaaacggccgtctgggcagatccgaattaggccggcccatcagagcatcagacggtcaccctctggaagctcagaccccccgtggatgtcccggcctttttcctgggaaacgtcgcgtggaattcaactgccggccttttcctatgaaattcagacacgaccacgcacggagcatttggaagtcatcctcgcccagtcgccccaccaccgcctccgtcgacgtcgtcctcgcctccgccgcgctcgcctcaccgccaccgccaccacggccttcctcgtctcatctccgccgtggcctcgccctcgatacgctactgacggggtgcccctcgccgtcgacacgtgacctccgtcatttgcatctcagctccaagatctactccagatcgggtgcatgcatgcagctgctggcctgtagctggcagtggtgactggcaggctgatctggttggacatggagagcgggctgctcttggcaccaggattggcaccatcaccggcacgcttgtctccaatctccatcgatataattgactgcattcggcttggttgtgcttgttttcagggtgaagacaagaagtgacccagcaatttccattttcttgttcaggatggcaatggccacatcatcatcttaccctccaccacctcccttttaccgactgtacaaaaattttgagcaggatccttcatccgcaccagaacctccaccaccaattgatggaccattcaaagctttgggtgttgattacacaggagatgttgtgattccaagcttggagagtcataatgtccgtcagctttatccaaagggccccaatattgacttcaaaaaggagctaaggaccctcaacagagagcttcaattgcatattttggagctggcagatattttagttgagagaccatctcaatatgctcgtagggtggaagatatcacactcatattcaagaacttgcatcatcttctcaattccctacgacctcatcaggcaagagccacattgattcacatgcttgagagccaaattcagcgccgcaaggaagcaattgaagatataaagcagaggagagtggaagcgcagaagctgcttgcggaatcactgcatatcttggatgcaagccaagctaactaggctgacgccgagttggctggttcaagactggttcttcttagttaagagagtgttagcagcttcgagcctgccttcagctacatgttgggttactttgttgtggaagtatagattgtgagattgatgcctcgtggctaaacttagggggtgtttgaatgcactagaactaatagttagttagctaaaaattattagttagattagctagctaacaaataactagctaactattaactactttaccaaaaatagctaatagctaaactattagctagagtgtttggacgtttcaactaattttagccactaactattagttttagtgcattcaaacacttccttaatcgaaaggttctctatgctactcccttcattccaaattattagttttattttttttaatgcattattatgcacctagatgtatactatgtgtagatacataataaaagctaagtattcagaaaaattaaaataacttacagtatgatttaaaatagaggaaataatatattacagtattatctagaggaagagtttgccttattttgtacaagtatcgactaggaaattggatgtgtgaaacaagttcttcg

SEQ ID NO: 18048 - DNA, 1296 bp, Zea Mays
aactgccggccttttcctatgaaattcagacacgaccacgcacggagcatttggaagtcatcctcgcccagtcgccccaccaccgcctccgtcgacgtcgtcctcgcctccgccgcgctcgcctcaccgccaccgccaccacggccttcctcgtctcatctccgccgtggcctcgccctcgatacgctactgacggggtgcccctcgccgtcgacacgtgacctccgtcatttgcatctcagctccaagatctactccagatcgggtgcatgcatgcagctgctggcctgtagctggcagtggtgactggcaggctgatctggttggacatggagagcgggctgctcttggcaccaggattggcaccatcaccggcacgcttgtctccaatctccatcgatataattgactgcattcggcttggttgtgcttgttttcagggtgaagacaagaagtgacccagcaatttccattttcttgttcaggatggcaatggccacatcatcatcttaccctccaccacctcccttttaccgactgtacaaaaattttgagcaggatccttcatccgcaccagaacctccaccaccaattgatggaccattcaaagctttgggtgttgattacacaggagatgttgtgattccaagcttggagagtcataatgtccgtcagctttatccaaagggccccaatattggtgcgttggttcttgagaaatagatatgtttattgtgtatgcatacatactcaattctttgtgattgttaaatgttaaagctgtttataagtaggcactagctagacttgtgccaaaagaaaggcgaaaggggctgaaatcgttaatcattttaacgacctgggagatttggaagcatagaaattcatgtgtttttgaacttgcaaggccttgcattcctgacatccttagacagatcatggaggaatgcaggatatggtggtgggctgatgcttcaaatctgcaagattttattatttggtcgttgtccaggacgtgatgatcttcaccaaattagtttgcctttgccttatcttttggtcatgttttagaaatggtttgtacagttagggtgctgtgtgagtgggtgtgggtcttgtaagtctggccttagctggacaaatttgtctctttccttaatgaaatttcacacacatctcctgcgttgttcggaaaaaatatatataacaaataagttgttgtgctgttattttttaggacttgacaagttgtctttggtttaatgagctgactctggaaaatttgttaaattttag

SEQ ID NO: 18049 - DNA, 1025 bp, Zea Mays
aactgccggccttttcctatgaaattcagacacgaccacgcacggagcatttggaagtcatcctcgcccagtcgccccaccaccgcctccgtcgacgtcgtcctcgcctccgccgcgctcgcctcaccgccaccgccaccacggccttcctcgtctcatctccgccgtggcctcgccctcgatacgctactgacggggtgcccctcgccgtcgacacgtgacctccgtcatttgcatctcagctccaagatctactccagctgctggcctgtagctggcagtggtgactggcaggctgatctggttggacatggagagcgggctgctcttggcaccaggattggcaccatcaccggcacgcttgtctccaatctccatcgatataattgactgcattcggcttgggtgaagacaagaagtgacccagcaatttccattttcttgttcaggatggcaatggccacatcatcatcttaccctccaccacctcccttttaccgactgtacaaaaattttgagcaggatccttcatccgcaccagaacctccaccaccaattgatggaccattcaaagctttgggtgttgattacacaggagatgttgtgattccaagcttggagagtcataatgtccgtcagctttatccaaagggccccaatattgatcatggaggaatgcaggatatggtggtgggctgatgcttcaaatctgcaagattttattatttggtcgttgtccaggacgtgatgatcttcaccaaattagtttgcctttgccttatcttttggtcatgttttagaaatggtttgtacagttagggtgctgtgtgagtgggtgtgggtcttgtaagtctggccttagctggacaaatttgtctctttccttaatgaaatttcacacacatctcctgcgttgttcggaaaaaatatatataacaaataagttgttgtgctgttattttttaggacttgacaagttgtctttggtttaatgagctgactctggaaaatttgttaaattttag

SEQ ID NO: 18050 - DNA, 2388 bp, Zea Mays
aagagaggtaactgaacgaagcatccggtgtgtgccctcgtcatccgccgccgccgccatgccgggcttcgctcagcgtctcgcgggcatcccgtggcggagcatcgcgaggcaaggcctctcccgcgtgttcctggtggcgaaggcctactgcgtgatccacgtcgtcaacgaccacctctgctcggtgaccttagtgcggggcgccagcatgctgccgtccctgaacctggcgggcgacgcggtggcggtggacagggtcagcgtgaggctcggccgggtcgcgccgggggacatcgtgctgatgatctcccccgaggacccgcgcaagtcggtcgtcaagcgcgtcgtcgggatgcaaggggactccgtcacctaccttgtcgaccccggcaaaagcgactcctcctccagaaccgtcgtggtaccgcaagatcatgtctgggtgcagggtgacaatatctttgcttctaacgattcgaggcaatttggagctgtgccttatgggctgattacagggaagatcttttgccgggtttggccgccggagagtttcggcgcaattgatgacgcaaccaagcagtcttaacgctgaggaggagccgaggagagcacatggacccatattgtttgctcgcgcccagagattctataatagccaactgcagggggggcccttccttgagctcgagagctttcgacgacctaccgcagcgcatttctacagcgaagcaaagagcgtgtcccgtgtttttatagttttggtgtgtgacaagttctgaaacccaaatcggcacaggtttcgagacagtttttttttttttgaatcgaagttgacataatctatagctacatgaaacgcagtcgtttttgttcacgcgcaagataccctagatttacatgtcagtggatcggagcacagccaacaagcacatatgctgcgtaatgcaggaaaggacctacttggtttcagtacacaaaagcacacagcggactggtagtctagcgagagtcgatccaagatctgaagaactcgtggagctatttggtgtgtggaggaatcataaaagggctactgattgcgttacctaagctagatctgttagaagctataactgcaaaactaaacctgagattctagatctacttctgatgcttgtgagagactagtgcgcttcgattcttgcatctccacctcaacagagatcacttgttttggcttgcagttttctgtctccatccgtctgagtttttccttctgtatggcacgtagttcatacctacaacaggtaggataagtgtacaatgatgttgtcaataacaaatggtagctggcataggagaacgtacgtaatatcatatatcaggaggtaaggtaaactctatatggtaatgtaattgctcatcaaatagcgacagttcagtcctccattatgatatttgcacgttctgtgcgaatgttgcagagaaactggcagtaacaattttggtcaatggattgccaattatgtcagtttcaaccctcaaacatctcaattttttgcttggcaaaaagcttattgtggtattcctatatatgacatcacttcttattatccagggaagaacttacagattacattttttagcttcacagcttgtgcttattctccagggaactaacagattacattattgagcctaaacaggaaagcccactatttcttcaggttatccatgtactgaaatttttattacattacatgtgatcttcctatatagcttcattgattgtgcttattctccagggaactaacagattacatttttaagcctaaacaggaaagcccactattccttcaggttatctatgtagtgaaaatttattccatgttatctttctagcagtacgagtttataccataaagaacaatcaccttgtgatattccttgatagtaagtatataatgaaactatagtaagtgggcgtagcaggaagaagcataattgcttcgatataatgtttctgtttatcgccaagtccaaatttcctgtcccctaaatttagaattgttaacttgtctacaaagcttcatgtcaagacactcctacatgcttgatgcttcaatagtatattcttgagggaacttatagcttgcattttattagcctattacacaagagagcccactagcttttaaggtttatctatgtagtcaaaaatgtgtttcatcttccgagcagaagtatgtatactaaataacaaatcgcctgagtgagatgctaataattaaagaagatagcactcaactgatagtaaccaaagtgagatgctaatttcgaagtttcgctcattgatcaacgactgacagactgcgagagcaattgaactccacaactgaagcatca

SEQ ID NO: 18051 - DNA, 1563 bp, Zea Mays
aagagaggtaactgaacgaagcatccggtgtgtgccctcgtcatccgccgccgccgccatgccgggcttcgctcagcgtctcgcgggcatcccgtggcggagcatcgcgaggcaaggcctctcccgcgtgttcctggtggcgaaggcctactgcgtgatccacgtcgtcaacgaccacctctgctcggtgaccttagtgcggggcgccagcatgctgccgtccctgaacctggcgggcgacgcggtggcggtggacagggtcagcgtgaggctcggccgggtcgcgccgggggacatcgtgctgatgatctcccccgaggacccgcgcaagtcggtcgtcaagcgcgtcgtcgggatgcaaggggactccgtcacctaccttgtcgaccccggcaaaagcgactcctcctccagaaccgtcgtggtaccgcaagatcatgtctgggtgcagggtgacaatatctttgcttctaacgattcgaggcaatttggagctgtgccttatgggctgattacagggaagatcttttgccgggtttggccgccggagagtttcggcgcaattgatgacgcaaccaagcagtcttaacgctgaggaggagccgaggagagcacatggacccatattgtttgctcgcgcccagagattctataatagccaactgcagggggggcccttccttgagctcgagagctttcgacgacctaccgcagcgcatttctacagcgaagcaaagagcgtgtcccgtgtttttatagttttggtgtgtgacaagttctgaaacccaaatcggcacaggtttcgagacagtttttttttttttggtgctagtgccaacctgggtttgggtttgcaactacactacaacttcacatgcttattccaaacatttgaactgatttgtcagtcctcgttttgcagaagggtgtgtttgtttgtttatccatgtccatgtcaaaacacacgacgattattgttcagcatgtccatgtcaaaacatacatcgatcttgaggttattatgccatactatatatatagcactgtaataaagtcatccatccggcctctacgtcgacgcggcggcggcggtggcgctgggctccggtgctgctgccgccgctagctgaaaccgatggtgctgctgctgctgcagcagcagcgacgacttgcactgggcgcacatgcagatctgctgggtggtgcagaagccgccgacgtagcccttgtcctggcagcgggcgatgcagagcagtggcgcgtcgcggcactccgggacgatgctgcggaacagcgggcacatgcccttgccgtctgagggtgacggcaaaataaggaaggagaacatgatcagtagtagggcatcagttgcagccatgacgaccaccttggaagaagccatggcactggttgtagcttccgcttccgatctgcaggcgaacgaatgaatcggtttcaggctttcagctgtgctgcttagatgtactgtctgtacttacatatatatgcatgcgccggggcgataataaggaaaagagctaggagttttaattttcttcttct

SEQ ID NO: 18052 - DNA, 1073 bp, Zea Mays
ctttcattcttcttctcttttctcgttccccccgttggggttttgagctccgacgaaccctaataatcgccggggaccggcgaccgatcgcccgccggcatgcaccattagcagcggatgaagcaggcagcggcggccgcggccgcggcgcagcaggcactgctcctgcagcagcagtcgcagccgcccttgttccccgtgcaccacccgcaccccggcctcctcgccgcaccacagatagagcccatagtcagtggaaacctgcctcctgggtttgattcaagtacatgccgcagcgtgtatgtttgcaatatccatcttcaagtgacggacgcagtactgcaggaagtcttccaaagcattggtccagtagaagggtgcaagctcatcagaaaagaaaagtcatcctttggtttcattgactaccatgatcgcagatatgctgcactagcaattttatctctcaatggcagacaactgtatggtcagccgattaaagtcaattgggcatatacaagtactccgagggagggcacatcaggtcattttaatatttttgttggggatctttgcccggaagtcactgatgctactttgtttgcatttttctctggttactctacttgctcagatgctagtgttatgtgggaccagaaaacaggacgatccagaggatttggttttgtttctttcaggaaccagcagaatctggaaaagagaatccaaatgatgatggtcctgaaaataaccctcagtttactactgtttatgttggcaatcttcctcacgagttttacagacagatgcatgcgcggaggcctcgatgggagttgatgcatgcgcagttgtggatagttgcgacaccaaactccaatgagacaaagtttacaagggatcccttgctcctgttatgtcacccgcccgcacgctaccaaacggttgacataaagatggaataaacaaatcacaccttgctccatgttttgagggcatgcgttctcccttttagatctaaagtatactagcgattgcgaaaaatattttacctttccaagagacttaatcctatttca

SEQ ID NO: 18053 - DNA, 1182 bp, Zea Mays
caacgcctccgctttcattcttcttctcttttctcgttccccccgttggggttttgagctccgacgaaccctaataatcgccggggaccggcgaccgatcgcccgccggcatgcaccattagcagcggatgaagcaggcagcggcggccgcggccgcggcgcagcaggcactgctcctgcagcagcagtcgcagccgcccttgttccccgtgcaccacccgcaccccggcctcctcgccgcaccacagatagagcccatagtcagtggaaacctgcctcctgggtttgattcaagtacatgccgcagcgtgtatgtttgcaatatccatcttcaagtgacggacgcagtactgcaggaagtcttccaaagcattggtccagtagaagggtgcaagctcatcagaaaagaaaagtcatcctttggtttcattgactaccatgatcgcagatatgctgcactagcaattttatctctcaatggcagacaactgtatggtcagccgattaaagtcaattgggcatatacaagtactccgagggagggcacatcaggtcattttaatatttttgttggggatctttgcccggaagtcactgatgctactttgtttgcatttttctctggttactctacttgctcagatgctagtgttatgtgggaccagaaaacaggacgatccagaggatttggttttgtttctttcaggaaccagcaggatgctcaaagtgagataaatgacttgaatggtgtgttctctagttccatgtttctaacttatgttccattttgaagtcccgagtgtttcaaaaagtgctagcagctagacgtgcctagcaacctaggtggtgctcaggcgttgcttgacatttgtactttctatggacagtatgccatgttgaataaagtattttttggcatgacatatcagaacaaaaaacattttaccatgctcccttgtgtaatatgactgtagtttatgttcctccatctctaatttgctatgttcatgcatacatcagacctgtaacacccttgtccaggaaaaaaagcctagacaaaatggctaggtgcttggtgagacagtgcagcactgcctaggttgaatgacagtttttcccctcagtatgtatgatatggtataacgcataacaataaattctgccaggctcttatgttcaact

SEQ ID NO: 18054 - DNA, 1283 bp, Zea Mays
atggcggggtgcctgacgccggcgatgtactcccagatggtcgccgtggccggcctcagcgacgggctgaggcggcagtcccccgccctggccgacgtcgcgagctgcgtgaccgtgcggcgcgcgttacggacggagcaggagcttcacattcgccaggagctgggacacggcctccgactccgtcgccgggattatgaacgcccaatcggagctggatgtcttgctggatgggatgcagggagccgcgacggtcgcggaggacgacgacgacgagaagctgtcgtccgaccagcacacgctctcactgcggaacgccgccgaagcgaggcggcagccagtctgcagcagcaccatagcgtcctcgatgaggccgaggtggaagcaaacttggccgaggaccaagtacgtgtacgtggatgtgggcatcgaccatcaggaaaccacttggtcggattctcattctcgccaaatcaaggcaccaattcgtgcaatgctcaaggtcccgtacctcccctgggtataggtgtttgggttcttggagaggctggtaaggacgcgacgcttgagatcggagatgtcgaagcagcggaaggagcggacggggaagcagcagaaggggcgagcgtcaggttctgcgtcatcggagcggtggcggtcgggcgagaggagcttggcgcgggagatcgtgccgagatcaccggagaaagggaaatggcgctgcgaagacagagaagaaagggaaatggaggagatggcgtgcgtgaaaccatagagcccatagtcagtggaaacctgcctcctgggtttgattcaagtacatgccgcagcgtgtatgtttgcaatatccatcttcaagtgacggacgcagtactgcaggaagtcttccaaagcattggtccagtagaagggtgcaagctcatcagaaaagaaaagtcatcctttggtttcattgactaccatgatcgcagatatgctgcactagcaattttatctctcaatggcagacaactgtatggtcagccgattaaagtcaattgggcatatacaagtactccgagggagggcacatcaggtcattttaatatttttgttggggatctttgcccggaagtcactgatgctactttgtttgcatttttctctggttactctacttgctcagatgctagtgttatgtgggaccagaaaacaggacgatccagaggatttggttttgtttctttcaggaaccagcagtcatcctttggtttcattgactaccatgatcgcagatatgctgc

SEQ ID NO: 18055 - DNA, 346 bp, Zea Mays
ctgaagtgctgaaataatcctgtcattttaatatttttgttggggatctttgcccggaagtcactgatgctactttgtttgcatttttctctggttactctacttgctcagatgctagtgttatgtgggaccagaaaacaggacgatccagaggatttggttttgtttctttcaggaaccagcagatacgttaattgatcacgaaatacggagggcacgagatggattaatctcaagtgaagctgatgaatgaacttgaagattggatgatctgatcaagtgccaggatgggacatgctcgacaagcgagtatcatctaacaacactaacttagtgttatcacagg

SEQ ID NO: 18056 - DNA, 509 bp, Zea Mays
cttctacctgcaaatgcggagaggctgcttcaaatccatgacatgtcatcctttggtttcattgactaccatgatcgcagatatgctgcactagcaattttatctctcaatggcagacaactgtatggtcagccgattaaagtcaattgggcatatacaagtactccgagggagggcacatcaggtcattttaatatttttgttggggatctttgcccggaagtcactgatgctactttgtttgcatttttctctggttactctacttgctcagatgctagtgttatgtgggaccagaaaacaggacgatccagaggatttggttttgtttctttcaggaaccagcagatacgttaattgatcacgaaatacggagggcacgagatggattaatctcaagtgaagctgatgaatgaacttgaagattggatgatctgatcaagtgccaggatgggacatgctcgacaagcgagtatcatctaacaacactaacttagtgttatcacagg

SEQ ID NO: 18057 - DNA, 712 bp, Zea Mays
caacgcctccgctttcattcttcttctcttttctcgttccccccgttggggttttgagctccgacgaaccctaataatcgccggggaccggcgaccgatcgcccgccggcatgcaccattagcagcggatgaagcaggcagcggcggccgcggccgcggcgcagcaggcactgctcctgcagcagcagtcgcagccgcccttgttccccgtgcaccacccgcaccccggcctcctcgccgcaccacagtcatcctttggtttcattgactaccatgatcgcagatatgctgcactagcaattttatctctcaatggcagacaactgtatggtcagccgattaaagtcaattgggcatatacaagtactccgagggagggcacatcaggtcattttaatatttttgttggggatctttgcccggaagtcactgatgctactttgtttgcatttttctctggttactctacttgctcagatgctagtgttatgtgggaccagaaaacaggacgatccagaggatttggttttgtttctttcaggaaccagcagatacgttaattgatcacgaaatacggagggcacgagatggattaatctcaagtgaagctgatgaatgaacttgaagattggatgatctgatcaagtgccaggatgggacatgctcgacaagcgagtatcatctaacaacactaacttagtgttatcacagg

SEQ ID NO: 18058 - DNA, 1560 bp, Zea Mays
atggcggggtgcctgacgccggcgatgtactcccagatggtcgccgtggccggcctcagcgacgggctgaggcggcagtcccccgccctggccgacgtcgcgagctgcgtgaccgtgcggcgcgcgttacggacggagcaggagcttcacattcgccaggagctgggacacggcctccgactccgtcgccgggattatgaacgcccaatcggagctggatgtcttgctggatgggatgcagggagccgcgacggtcgcggaggacgacgacgacgagaagctgtcgtccgaccagcacacgctctcactgcggaacgccgccgaagcgaggcggcagccagtctgcagcagcaccatagcgtcctcgatgaggccgaggtggaagcaaacttggccgaggaccaagtacgtgtacgtggatgtgggcatcgaccatcaggaaaccacttggtcggattctcattctcgccaaatcaaggcaccaattcgtgcaatgctcaaggtcccgtacctcccctgggtataggtgtttgggttcttggagaggctggtaaggacgcgacgcttgagatcggagatgtcgaagcagcggaaggagcggacggggaagcagcagaaggggcgagcgtcaggttctgcgtcatcggagcggtggcggtcgggcgagaggagcttggcgcgggagatcgtgccgagatcaccggagaaagggaaatggcgctgcgaagacagagaagaaagggaaatggaggagatggcgtgcgtgaaaccatagagcccatagtcagtggaaacctgcctcctgggtttgattcaagtacatgccgcagcgtgtatgtttgcaatatccatcttcaagtgacggacgcagtactgcaggaagtcttccaaagcattggtccagtagaagggtgcaagctcatcagaaaagaaaagtcatcctttggtttcattgactaccatgatcgcagatatgctgcactagcaattttatctctcaatggcagacaactgtatggtcagccgattaaagtcaattgggcatatacaagtactccgagggagggcacatcaggtcattttaatatttttgttggggatctttgcccggaagtcactgatgctactttgtttgcatttttctctggttactctacttgctcagatgctagtgttatgtgggaccagaaaacaggacgatccagaggatttggttttgtttctttcaggaaccagcagatacgttaattgatcacgaaatacggagggcacgagatggattaatctcaagtgaagctgatgaatgaacttgaagattggatgatctgatcaagtgccaggatgggacatgctcgacaagcgagtatcatctaacaacactaacttagtgttatcacagatacgttaattgatcacgaaatacggagggcacgagatggattaatctcaagtgaagctgatgaatgaacttgaagattggatgatctgatcaagtgccaggatgggacatgctcgacaagcgagtatcatctaacaacactaacttagtgttatcacagg

SEQ ID NO: 18059 - DNA, 869 bp, Zea Mays
cgcctccgctttcattcttcttctcttttctcgttccccccgttggggttttgagctccgacgaaccctaataatcgccggggaccggcgaccgatcgcccgccggcatgcaccattagcagcggatgaagcaggcagcggcggccgcggccgcggcgcagcaggcactgctcctgcagcagcagtcgcagccgcccttgttccccgtgcaccacccgcaccccggcctcctcgccgcaccacagatagagcccatagtcagtggaaacctgcctcctgggtttgattcaagtacatgccgcagcgtgtatgtttgcaatatccatcttcaagtgacggacgcagtactgcaggaagtcttccaaagcattggtccagtagaagggtgcaagctcatcagaaaagaaaagtcatcctttggtttcattgactaccatgatcgcagatatgctgcactagcaattttatctctcaatggcagacaactgtatggtcagccgattaaagtcaattgggcatatacaagtactccgagggagggcacatcaggtcattttaatatttttgttggggatctttgcccggaagtcactgatgctactttgtttgcatttttctctggttactctacttgctcagatgctagtgttatgtgggaccagaaaacaggacgatccagaggatttggttttgtttctttcaggaaccagcagatacgttaattgatcacgaaatacggagggcacgagatggattaatctcaagtgaagctgatgaatgaacttgaagattggatgatctgatcaagtgccaggatgggacatgctcgacaagcgagtatcatctaacaacactaacttagtgttatc

SEQ ID NO: 18060 - DNA, 4083 bp, Zea Mays
aaatcagtttccagtgtaaagtgatacacaaagagttggttgctaatatatttaaaaaagggggaaagaatgcttgttaagtcagtgtccggtttaaaaaaccacttcatccaaaataaagtggtgcatcatgaattcattactcaaattatgtggtataacataatttctaatattaatactaactaactatgagaaataatgtaatgatggattaactcgttccattctacaaactaaacaaaaaaaaaagaacggccacactggctgagcctgaggacgtcccccagccacgcgttccaggttccacgctcttcccacggcatgtgtccgatcgttctgatctctgatggatgcgttgtgtttcctcttctggtgagaaagaacgggacgggacggcgcgttttcggtcgtagcagtgtctggtcgtaacgggaggtagatacctgaaatgacgcaacctaaacaaacctcccggcgtttcgtcgcatcttcggagccgctcgcggcgtttggcccagcatccagcggcacggcgacggctcaaccgcgcccccgctcccgctcgccgtcgccgccgcgagattcgctcgacgcaaaaactggtttccgcaaggggctgggcgtgagtgagcccgcccagcagcaatcgccagcacccagcagagcaggcgtgccgcgagatcttcccggcgatccttgaaagctacgagtccggcaaaggactacaaggcgcgggcgcgcaaaatccaggggtggatcactgcccccgcccctggccctgccacatgcaccagcaggcagcagcccactgccactcgggtcgccgctcgccacagccacctgatcgctcgccgtcgccgaccagaatccagagagatcagagagcctcgcctggcctctcgacaccgccgcgccgatgatgtgacgtgaccgccggccccggacgcacactgtacccaacagcgacgcatggtgccgtgaatgcggcggtgggtctacgggctgctgctctgctcactgcctcctgccctgctcactcccgaccccgacatgacacgaagaacacaactgctgcaacagtgaggagcttggttggttcgtttgcttctttccatccacggtaccggctgtgcacgtctgcgacggtgccaaataaaaactggtcaaattctctcgcaataataataatatatatggcattatcatttccgactacaaatataaagtggccatgttttacgcacaaagttttcacatgattgattaaactatttgctagtcaaaggcaagaagacttatttttttccaaaaaaatatatatcttgtagtatttttttttgtgacagggagagggagtactagtactctagtagaagaataacaatccattgttttcagagcgggccaaccaactggaagatccgaaaggcaaagggaccctccatttcgccaaggggccactcctccctataaagcctagcaagccacctcccccagccatccgcctgcaaaagccagccaccagcccaccaccgtgcccatttcacctcaccactaccaggaacccccgccattgattggcccattcccaacccaaccgcgcggctagaggcacaggcacctcgaccggcgaccgggagtgcgtgcgctcgctcgctcactcgtgcggtgggcatggagaaatgcagcagcaagatccggtccatcgtgtggctgcggcagacgctgcggcggtggcggtcccgagcggcgtcgcgcgcggcggcggcggcggcggctgatgcggcggtcccgtcgggccacgtggcggtgtgcgtgggcggcgcgtcgcggcggttcgtggtgcgggcggcgcacctgaaccaccccgtgttccgggagctgctccggcaggcggaggaggagtacgggttcccgcgcgcgggccccatcgcgctcccctgcgacgaggccctcttcgagcacgtcctccgccacctctccgccccgtccaagtcctcctcccgcttcgtcaccctcgacgacctccagagcgccggcgccacgcactgctgctgcgtcgccgccgccggcgactcgctcccgctcctccgcggcttctccgccgacaaggccgtctggtgagcgcgccgccctgctcgccggagccagccaccacccgtgtgcctgcctagtgcctattcgcgcgcgcgcgccggccatctcgccgtcgtcccccccgttttttgtggggtgttattttccccacttcttcgcgctcgctccctccgtttccagctgaacgcggcggagacagacagctcgacgagcaagacgagagcggcccggatggacgccggaggcggtgaagtgagatggctgagaaagaagtcctaggatttttttagaacgactgtcaagtctagccatccattcattcccctgtcgaatcaatccgggggctaaggtttacgtaattctttttcttcttcttctttgcttttctccccacccccaataatcctccagtgtaaatacatgtactactgcggtttggccacgccagccagcattgttgcaacttggaagtgaaaggaaaaacattcgtttttttacttctgctaccacggagtaaaaccatattttttgttgactgttgactgcttgggcaacggctatttgtgtcatatattttcagacgaatcatggtacactattctccaaaatgttcccaggtgctttaggaaagaaagcagaggaatcaattcctcctggatcgcgcaaaaaactattctgagtgtcactgcactgcaggttaggtctctcactgaactgactgcacatctaccagcgacaagttagggtgactcccgtgaatcatcctatcctatagtttattatcctcccagtgttctttgtcttggtctcttggagaagaatgtatgtgatgtatggtggagggagaagagagagagaaggggcttacagtcggcttcgacacaaaaacgaagaagctatgtgagaaagacaagtgaggtcttacactaatactgatgagttaaccactatatatgaataagctaaatgtcagactacaaggatccttaccgtccgcccacgattgacgctgttattaaacttgctcttagcagaaagttcacaactgctcctgctcctttgaatagaatttagcagaaagttcactcctgctcgtttgaatagaatgtatgttgaagctgtcgctaggctggtcgcaatgattacgccattaccagccaccaccaaccgaatcatgggttgatgctcctactaatcgatctcgcaacacgaaagtattgctcaaccaatccctctgtttttgtaaagattggtcgactaggggggcggcgacttgtggtcagcctatatacataggcattttcctttcatattctactcgtaggggaaaaagcagcaggtacctttcatactctactcgtaaagaactcgacaatctgccgcgttctttaactctgtctccccctcgttattttttccctagaatcttgttcatttcctagcacataacggtacgggactccacttgcaagttgcaccagctgtagaagaagccttggatggagcaaggcgagtgaaccacgaagacgagatgaggttttgtatcatcagccaccaaaaaaagcaacacacgcacaaaaacatgcgcgaccagagtccatgccagttaaagaatattattagatactaagcaagtagtaggagtatccaggaagacaaacctatggcaaattggcgacatggacaagcacccctcccagtcccagtccggctccgccggcggcgatgggacgggcgacccgtgaacatcccggtcgtctctctggttggtgcggcgggcccggctgcggcgcgctgcccaatgtgccgcagcggaggcgcgtgcatgtgggctgtggggactgggggggtgggagacgacccatggtccccgctccggctgcatgtgtgctgatagctgataccggcagcgggggccaggcgcatggcgcccgtagtccttcccagctttatccgtagtcctttcccggttttgccttttcc

SEQ ID NO: 18061 - DNA, 567 bp, Zea Mays
ctgcttcgctggcattaaccttgtaccagtaataacgccgtaaaaccacgtatatacatgaagtcgttattattatttgatatacgggtgagtacacgacgatcccgtgcagctggcactgtctgctccgctgtgctgtgcatacgttaacaggtttggtgctttctgtcttggcctaccttccatttcattgttctcaggaataggatggatggttactgtcgaaaggccagacccgagaccaaacagggacgccggccgttttattaatggtgatgaaagcacaagctcctgaaccgtggtcccttgctccgtccgtctgccgtgcgtgtgcacacacacgctcgatctgatgctgatattacacacgtacgatcgccggcggcgaatgagtgtactttgttgctcaggagacgtaaataagcaggccaggatcaggatggatatcatcatcgtttttggacggcaaggcaacaaccggtgcggacagcgacagcagcggacgcctaaacttcgagaggaactcatcatttactcatccggacccaatttcttgataacatatct

SEQ ID NO: 18062 - DNA, 1694 bp, Zea Mays
cttgctagctgcttcactgttattactacgacgagcttgcgtgtactgtccagtccagtgttacaggcaaaaagtgaaggacatagtgcggggtgctctgtttccagaggttggtgtggacaaaaggactgggtctgctggtggaactggcgggcaagtagttgtccgagacattgaacttttctcatactgcgagtcatgcttgcttccattcagcatacagtgccatgttgggtatgttccctcgggtggaagggtggttgggttaagcaagctttctagagtgtctgatgtctttgccaagagattgcaaaaccctcaaagactagccaatgaagtctgtggtgcactgcatgctagcattcagccagccggtgtggctgttgctctgcagtgctggcacattcctttgccagaaaacctggaatgcaagaccttgcaaggttggataagaacttcacgttcatgtcggtctggactatttgagggtgaaagcagcactttatggagtgacttcttggctcttgttaagcttaggggcatagacatggaggctgggactggggaccgttgtgtctctgttccttggtgccccttaaggtctcgtgaggttccactctccaatgggctctgcaagaaaagctcaaccaatggcatggtttccgcagttgcctcaatgctcttatcactcggagaggaccccctcaggaaagagcttctaggcacacctcagcgttatgtgcagtggctgatgaagttcagagcacgcaatctactagacgtgaagctgaatggctttacacttggtaacgctagcctacatgagaggccaggcggaggcacagctgaccatggacatggatcaatccgaaccgagctgcacttgccattttgtgcgcagtgtgagcaccatcttctgcccttctacggagtagttcacattgggtacttggacaaaggaagtggagaaggcatcatcgaccggtcgcattttcaggcactggttcgtttctatggctgcaagcttcaggtgcaagaaaggatgacgaggcagatagccgaagcagttcattcggtttcacgcaacggggccatggtcgttgtcgaggccagccacatgtgcatgatctcaaggggggtagagaaaataaggagcaacacggcgacagttgcggtcttgggccactttttgaccgacccttctgccaaggcacgcttcctgcagaatgttctgcgtacagctggttctgcggtttgaatcgtatgacttagcaaaggaagggaaaaaaatgtgtacgattactctccagcaatggcattttttttgcggatcttctggtctaatacgattaccactgaaaatgtccgtagctcatcgcctcttcttcttgactgcaaatctgtcacctgggtgactgtaccgaggatgtcacaagaaaacaccgaaagttttttttggttctcttgtgttgtaccatgtcacttgtacaccgtttcaaataaaaaaaaagaaaaaaaaagaatagtacgtaatagttacagccgtgccaagaaggaaatagttattcgtacgttagatttcttgtcagattgtcagttgttctcgagatttgtagtggaggttactctggattttgttgtaagtttgagttttgatgatgcaccgatagagatcagtgaaggaaactacgcag

SEQ ID NO: 18063 - DNA, 1826 bp, Zea Mays
atttgagaaaagttctttggaaatattcgatatcactagcgagcactagtgcacaatatattctgtattctgcaagcattctactgttactcatttttagtgcacggatgaacatttcacttgatttgtgcagttgagtttcattgcactaaaggcaaaatctccttgtgttttgagatgacaaattcctctctgcacaattcaatggttttgcttaccttggactgtactggtaaggttttttatttcggaggattccccttctcaagctggattgagaccgcaggacaatctccaagcaaaaggctcatggttaatgcatgcagctggcccaagctcagatgattcgctgccacctggcttcgaatcattgcagccaacaagctgtctcaaaattgacatatcccaaatccatgttattaggtggagatgcccaccaaaggtattgcataatcctgtttggcttgtagctgctggagaagaaagtgaggaggttgccttgcagaatgatagaatatttggagcacttgaggctatatatccacggccgtcgaatatacccccaaacccatttgttactcctgatgtgaaagactcccaatatgatgattcccgaacccagttggttccgttgctcccagttgaagaggatgatgcctctgaccagttggaagaaccacctgttggtctatcaagtagttaccagcagtcagataagtacgactcagcaacattcagggtcccacaagcctcagacgctccctttaccactgcgcagcagcagcagccgaatggttccatcaacaccacaaggtctggtgcccccgttgagcctgacacagtggctgctgcatctgctgcttacactgcaataattcagagcaaccgaatgggaaatatgattgacaaagatctgctcgtcgaaatgctaagtgaccctgcccaacttgagaggttaatgaaagaatatggcgcgcttaagcacgaacagtcaactaacagttctgttgccccaatggtgcaaggtccaccaccccagatgacagctagtgttccggtctccttcccagatcacaccactacttttcacaacataaactctacactgccgcctccacctgttctgaatcgtctgcctcctccagctattccttcagcagttaccatcaatccaccagcaagttcaagtcaagcaattagctttccaactggccgaaccagcggcttgaactattaccagaccctgatccatcagcatggaggggagaggcaggagccacagccacttcaacagcatggaatgcactttccaatgcatcatcgcactgtcgcttcccagtctagcgccactgatattgtcagcagtggtactatgccagctagggatactaagcaaaggcctacgaggccttgtgcttacttcaacagcgccagaggatgccgcaatggtgcgaactgcacctttctgcacgatgtgtctgccgcgaggaaagaacagccaaagggatccaaaagaattaagctagacagtagaatagctggtcggtattgaggaggctgctgccggttgattttttactgttctttggttcaaaatccttttcctcctttttcccttcaaaaaattattcagtaaatattgcgccccagctcctttgctttctcttagccaatttctatttgtttactagaagaacatgctcttagcccatttctctttgttgactaaaagaaaatgttttagaagaaagaaaaaaaatcccatgattaaatggagctctgtcgttattgaaccagttgaacacatgttaattggtggcagttat

SEQ ID NO: 18064 - DNA, 2849 bp, Zea Mays
ctgcctttaggaagcaccagtaacggaaacagacgtcttcccaattccaactcttggtgcctataccaaaagcaagcaccccaccgaatacttctgcaaaaatctaaccgcgagcgatacaagtacgcatggcggcttctcagtgccgcggagagctgccgagaagctgtttccgcaactggtacgacttcagctcagacccgtgttttcaacccccaggattactcaatgcagcctcctaatcaggagcttatcgtccgagatttgcatgataacatgtggacgttccgtcacatttatcgtggccagccaaagcgacatcttctaacaactggatggagcctttttgttggggcgaaacggcttaaagctggagactctgtcttatttatcagggatgagaagtcacagctccttgtcggtgttaggagggccacccgacaacaaccggctttgtcttcatccgtcctgtctactgacagtatgcacataggcgttcttgctgcagcagctcatgcagcatcaagtggtggctcatttactatttactacaatcctcggacaagcccgtcgccatttgtgattcctcttgcgaggtacaataaggccacgtatctgcaaccatctgttggaatgaggttcgcgatgatgtttgagacggaggagtcaagcaagcgcagatgcacaggtgctattgtgggaattagcgactatgacccgatgcgatggccaaactcaaagtggcgcaacttgcaggtagaatgggatgaacatgggtatggagaaagacctgaaagagttagcatatgggatatcgaaactccagagaacatggttttctcttctcctttgaattcgaagcggcaatgtcttcctagctatggagttccgggcctacaaattggatctgtaaatatgtcatcaattccaagggcacaaggaaatcctatcggtaacttgcagcacatgccagggatgggctcagaattggctctactgcttctcaatcaatctggccagaacatcggaagtccaatcgcttgtcaacaatcatcattttccagcattattcaaaatgctaagcacagctatttccctccaaagacgtttggtgcttccactgcttcaatgaagcaagaaagcatgccttcgactgaagcccagccacagttgaatgctcttggtattcagagaagtgatcgagtaagctgtgaagttcagacagctagtgattcaaatcctgcacaggagatgagtgttaaaccaagagcaccaagaagcacagattcacactcaagccaaagcatttcggatcaaaacagcaagggtgagcctagaacaaaaactcgaaggagcaagaagagctcgtatcagaaaaccatttcagataaatctgagctttgttcagtaccttctcagatttgtgacgacaagaagcatggttcagagccaagactggctgactgtgaagccgaacaagctacctgtgggaataacgaagaatcatctggagcacttacacatggtgattttgctggagagctccaagttcagcagcaggttgaacagcatgaactacttgcgccaccaaagatagaatcatcaaagtcacctgatggagggaagtccgtcagttcgttcccaaaccaagggtgtatcccacagttctttgagggtctggactggatgattccaccttcctattaccaagactccaatggcatccaatcagttaccgcgtcggataacatttttaatccatctgaaggtataccttccaccatgaacgctgatgccttggatgcgtttcaaacatcttgcctttctgagtgctttcctagctccattcaagagttcatcggcagtccggatataaacacactggcatttatgtcgcctgagatgcaacaattggatgccggcagcaacttgccgagcacatccaactcctatgtgcagatgagtttctcggaggagagccacagcgcatccttgagtggccttcacatggaagccatccatataaacagctcgtcatgctctcagccactggcgacggggagcttcgatgcaggggcgttcccgaaactgtcaaacataagagaatgccaacccttgcctctgcaagagatccacaccagttccatgggaacaccttcatgcagtatggacgcggcggcagagtacggcacggatagaagtgcgaagcaaatgaaaccaccggtccggacctatacaaaggttcagaagttaggatcagttggaagatgtattgacgttacacggttcagagattaccatgagttgaggtcagccattgcgtgcatgtttggactccaggggaagctggaacatcctggcagttcagattggaagcttgtttatgtcgactacgagaacgatgttcttctcgttggagacgatccatgggaggagttcatcaactgtgtgagatgcatccggatcttatcaccttcggaagtacagcagatgagcgagaacggcgtgcatgtcttgaacgactgcatccaaatagcttagcaaagtcacggctgtatgctctacagcctgcacagtgtaggctcttcttgtaaataaaaatatacagcatgtgcgtcaaattctctggtcgctctgtttcttttgtagcacgagaagaaacaattacagatgtcaacatcctgccaatgccatgtgtgtttctttcaggagtcaaattatttttttacgaagctgaatcgagctaacggacgtgaggaaattctgtaaaacaactgttaatcataaattctgtaaaagtatggtgtcgtggtaggtggggcattaccttagccttccggatgagctgg

SEQ ID NO: 18065 - DNA, 3395 bp, Zea Mays
catccttcaaccaccaagccttggcatcgttctgccctgcgtgtggcggcggtccctggagaggagacaagccgactggcatgcaggcgtggtagagctctcacttcccctcagccaccaatgctaaagtgcgcataagctgctgggagccgatattgcatccgtcgggagcttggcaccaacaaaagctcgagttttccctttttcagcttcggtctggtgcgtgcggcgcggcgcctcccggagatgatggcctcctcgcaggagaaggccacgtcgggtgtcctgaggaacgcggcggcgctgctcgacgaaatgcagctcatgggagaaacgcagggtgcgaagaaggtgatcaactccgagctgtggcacgcgtgcgcggggccgctagtgtgcttgccgcagcgcgggagcctcgtctactacttcccgcagggccacagcgagcaggttgctgctaccactaaaaagataccgaattctcgcatcccaaactacccgagtctcccgccgcagctgctatgccaagtccacaacatcactttgcatgccgacaaagaaactgatgagatttactgccagatgaccctgcaaccgttacactcggaaacagacgtcttcccaattccaactcttggtgcctataccaaaagcaagcaccccaccgaatacttctgcaaaaatctaaccgcgagcgatacaagtacgcatggcggcttctcagtgccgcggagagctgccgagaagctgtttccgcaactggattactcaatgcagcctcctaatcaggagcttatcgtccgagatttgcatgataacatgtggacgttccgtcacatttatcgtggccagccaaagcgacatcttctaacaactggatggagcctttttgttggggcgaaacggcttaaagctggagactctgtcttatttatcagggatgagaagtcacagctccttgtcggtgttaggagggccacccgacaacaaccggctttgtcttcatccgtcctgtctactgacagtatgcacataggcgttcttgctgcagcagctcatgcagcatcaagtggtggctcatttactatttactacaatcctcggacaagcccgtcgccatttgtgattcctcttgcgaggtacaataaggccacgtatctgcaaccatctgttggaatgaggttcgcgatgatgtttgagacggaggagtcaagcaagcgcagatgcacaggtgctattgtgggaattagcgactatgacccgatgcgatggccaaactcaaagtggcgcaacttgcaggtagaatgggatgaacatgggtatggagaaagacctgaaagagttagcatatgggatatcgaaactccagagaacatggttttctcttctcctttgaattcgaagcggcaatgtcttcctagctatggagttccgggcctacaaattggatctgtaaatatgtcatcaattccaagggcacaaggaaatcctatcggtaacttgcagcacatgccagggatgggctcagaattggctctactgcttctcaatcaatctggccagaacatcggaagtccaatcgcttgtcaacaatcatcattttccagcattattcaaaatgctaagcacagctatttccctccaaagacgtttggtgcttccactgcttcaatgaagcaagaaagcatgccttcgactgaagcccagccacagttgaatgctcttggtattcagagaagtgatcgagtaagctgtgaagttcagacagctagtgattcaaatcctgcacaggagatgagtgttaaaccaagagcaccaagaagcacagattcacactcaagccaaagcatttcggatcaaaacagcaagggtgagcctagaacaaaaactcgaaggagcaagaagagctcgtatcagaaaaccatttcagataaatctgagctttgttcagtaccttctcagatttgtgacgacaagaagcatggttcagagccaagactggctgactgtgaagccgaacaagctacctgtgggaataacgaagaatcatctggagcacttacacatggtgattttgctggagagctccaagttcagcagcaggttgaacagcatgaactacttgcgccaccaaagatagaatcatcaaagtcacctgatggagggaagtccgtcagttcgttcccaaaccaagggtgtatcccacagttctttgagggtctggactggatgattccaccttcctattaccaagactccaatggcatccaatcagttaccgcgtcggataacatttttaatccatctgaaggtataccttccaccatgaacgctgatgccttggatgcgtttcaaacatcttgcctttctgagtgctttcctagctccattcaagagttcatcggcagtccggatataaacacactggcatttatgtcgcctgagatgcaacaattggatgccggcagcaacttgccgagcacatccaactcctatgtgcagatgagtttctcggaggagagccacagcgcatccttgagtggccttcacatggaagccatccatataaacagctcgtcatgctctcagccactggcgacggggagcttcgatgcaggggcgttcccgaaactgtcaaacataagagaatgccaacccttgcctctgcaagagatccacaccagttccatgggaacaccttcatgcagtatggacgcggcggcagagtacggcacggatagaagtgcgaagcaaatgaaaccaccggtccggacctatacaaaggttcagaagttaggatcagttggaagatgtattgacgttacacggttcagagattaccatgagttgaggtcagccattgcgtgcatgtttggactccaggggaagctggaacatcctggcagttcagattggaagcttgtttatgtcgactacgagaacgatgttcttctcgttggagacgatccatgggaggagttcatcaactgtgtgagatgcatccggatcttatcaccttcggaagtacagcagatgagcgagaacggcgtgcatgtcttgaacgactgcatccaaatagcttagcaaagtcacggctgtatgctctacagcctgcacagtgtaggctcttcttgtaaataaaaatatacagcatgtgcgtcaaattctctggtcgctctgtttcttttgtagcacgagaagaaacaattacagatgtcaacatcctgccaatgccatgtgtgtttctttcaggagtcaaattatttttttacgaagctgaatcgagctaacggacgtgaggaaattctgtaaaacaactgttaatcataaattctgtaaaagtatggtgtcgtggtaggtggggcattaccttagccttccggatgagctgg

SEQ ID NO: 18066 - DNA, 4308 bp, Zea Mays
gctggacgctggttggtggttgccttcgctcttcatccttcaaccaccaagccttggcatcgttctgccctgcgtgtggcggcggtccctggagaggagacaagccgacgtgtggtttccgttcttggcattgctcaatctccccccccccctccctctctcttgctttgttgcttcttgactttcgtcgtctccctatctttctcatccttttatctgttggttttgaattcgacggcacggacgacaatgaagaaagcgggttcgtgacgcgtcagtcacggcctctcgtgtaatccaaagccccaaacctctgccacttgcctgcctagcgttgccgccgttcatgagagaccatgcatgcacgcacgctgccattcaccgcatggggaaagagaagagcctgtcgccgttgcaggttcgcaagtcgcaacgacggggctttgcattgcagctcggcgcatcaggagccgggcgccaagtggcgtgcacgcccgtcccgtggagttcattcgagcacgcacataccagctagacctactagctgacgaccgagattctttgcgttctactctgcgcgttcgtagcccccctgtccctgtgcccctgttgggctttactcctactgcctcgtagccgtaggagggcatggcatgctctgcctgcgactgcgcgtggcgtgaggaggacacaaaagccgcctgctttcttgggggaaaaaaggcggggtcgtggtcgactggtcgccatggggacccaaacccccaacccacccaacaccatcgcttggaatgcattgctagcagcagtaggcagtagccactagcagctactaccaccgctataccactaggaaatgcgtttgggttgggggcttgggttccgtcttcttcacctggcctttactcccctcccaacctcctctttgcctgctgctcgcaaacagaaacagcttgcttgccatttaacacgctcgtcctctctcacagtggcatgcaggcgtggtagagctctcacttcccctcagccaccaatgctaaagtgcgcataagctgctgggagccgatattgcatccgtcgggagcttggcaccaacaaaagctcgagttttccctttttcagcttcggtctggtgcgtgcggcgcggcgcctcccggagatgatggcctcctcgcaggagaaggccacgtcgggtgtcctgaggaacgcggcggcgctgctcgacgaaatgcagctcatgggagaaacgcagggtgcgaagaaggtgatcaactccgagctgtggcacgcgtgcgcggggccgctagtgtgcttgccgcagcgcgggagcctcgtctactacttcccgcagggccacagcgagcaggttgctgctaccactaaaaagataccgaattctcgcatcccaaactacccgagtctcccgccgcagctgctatgccaagtccacaacatcactttgcatgccgacaaagaaactgatgagatttactgccagatgaccctgcaaccgttacactcggaaacagacgtcttcccaattccaactcttggtgcctataccaaaagcaagcaccccaccgaatacttctgcaaaaatctaaccgcgagcgatacaagtacgcatggcggcttctcagtgccgcggagagctgccgagaagctgtttccgcaactggattactcaatgcagcctcctaatcaggagcttatcgtccgagatttgcatgataacatgtggacgttccgtcacatttatcgtggccagccaaagcgacatcttctaacaactggatggagcctttttgttggggcgaaacggcttaaagctggagactctgtcttatttatcagggatgagaagtcacagctccttgtcggtgttaggagggccacccgacaacaaccggctttgtcttcatccgtcctgtctactgacagtatgcacataggcgttcttgctgcagcagctcatgcagcatcaagtggtggctcatttactatttactacaatcctcggacaagcccgtcgccatttgtgattcctcttgcgaggtacaataaggccacgtatctgcaaccatctgttggaatgaggttcgcgatgatgtttgagacggaggagtcaagcaagcgcagatgcacaggtgctattgtgggaattagcgactatgacccgatgcgatggccaaactcaaagtggcgcaacttgcaggtagaatgggatgaacatgggtatggagaaagacctgaaagagttagcatatgggatatcgaaactccagagaacatggttttctcttctcctttgaattcgaagcggcaatgtcttcctagctatggagttccgggcctacaaattggatctgtaaatatgtcatcaattccaagggcacaaggaaatcctatcggtaacttgcagcacatgccagggatgggctcagaattggctctactgcttctcaatcaatctggccagaacatcggaagtccaatcgcttgtcaacaatcatcattttccagcattattcaaaatgctaagcacagctatttccctccaaagacgtttggtgcttccactgcttcaatgaagcaagaaagcatgccttcgactgaagcccagccacagttgaatgctcttggtattcagagaagtgatcgagtaagctgtgaagttcagacagctagtgattcaaatcctgcacaggagatgagtgttaaaccaagagcaccaagaagcacagattcacactcaagccaaagcatttcggatcaaaacagcaagggtgagcctagaacaaaaactcgaaggagcaagaagagctcgtatcagaaaaccatttcagataaatctgagctttgttcagtaccttctcagatttgtgacgacaagaagcatggttcagagccaagactggctgactgtgaagccgaacaagctacctgtgggaataacgaagaatcatctggagcacttacacatggtgattttgctggagagctccaagttcagcagcaggttgaacagcatgaactacttgcgccaccaaagatagaatcatcaaagtcacctgatggagggaagtccgtcagttcgttcccaaaccaagggtgtatcccacagttctttgagggtctggactggatgattccaccttcctattaccaagactccaatggcatccaatcagttaccgcgtcggataacatttttaatccatctgaaggtataccttccaccatgaacgctgatgccttggatgcgtttcaaacatcttgcctttctgagtgctttcctagctccattcaagagttcatcggcagtccggatataaacacactggcatttatgtcgcctgagatgcaacaattggatgccggcagcaacttgccgagcacatccaactcctatgtgcagatgagtttctcggaggagagccacagcgcatccttgagtggccttcacatggaagccatccatataaacagctcgtcatgctctcagccactggcgacggggagcttcgatgcaggggcgttcccgaaactgtcaaacataagagaatgccaacccttgcctctgcaagagatccacaccagttccatgggaacaccttcatgcagtatggacgcggcggcagagtacggcacggatagaagtgcgaagcaaatgaaaccaccggtccggacctatacaaaggttcagaagttaggatcagttggaagatgtattgacgttacacggttcagagattaccatgagttgaggtcagccattgcgtgcatgtttggactccaggggaagctggaacatcctggcagttcagattggaagcttgtttatgtcgactacgagaacgatgttcttctcgttggagacgatccatgggaggagttcatcaactgtgtgagatgcatccggatcttatcaccttcggaagtacagcagatgagcgagaacggcgtgcatgtcttgaacgactgcatccaaatagcttagcaaagtcacggctgtatgctctacagcctgcacagtgtaggctcttcttgtaaataaaaatatacagcatgtgcgtcaaattctctggtcgctctgtttcttttgtagcacgagaagaaacaattacagatgtcaacatcctgccaatgccatgtgtgtttctttcaggagtcaaattatttttttacgaagctgaatcgagctaacggacgtgaggaaattctgtaaaacaactgttaatcataaattctgtaaaagtatggtgtcgtggtaggtggggcattaccttagccttccggatgagctgg

SEQ ID NO: 18067 - DNA, 1928 bp, Zea Mays
gtacgcgctccggagtccggaggcactcgccgccgtcgaattattcccattctcatcacgccgtgcgccagggatactactatggaccggcgcaggatcttattcggccactagaacccagctttcagtcccgagacgtcgtaatcgctagatgatcgatgaacgccaagaagattaagctgcacgactatcaccactgctacggatcgccgatgtgtgacccacagctgttcccgcgcgccgccgccgccaccaccgcagggctctccttgcacccggggccggggctcgtgggctccctgccgcagcggcatggcggcggcggcggcggctgggtgcacgaggagcacaccgcgacgaccccgagggcggcgcaggggcagggcggctgcgtcgtcggctccgacgccgccgcgttcttcgccgccgaggagctcatgatgggcacggcgcggttcgactcccctctcggcggaacgacgacggcactccaggagctgacagcgtttgccaagggaccgccgtttggccggccgaggcccacgacggggggcgagcgcgagcgcgagcggctgtacccagtggacccgctgccgctccgcgactgcgcggcggtgaggacgtactacgtccggccgcagcagcgcgacggcgccacggaggcgcctccttcactcgagctgccattccagcggcggcagcagcaacaagtgcacgggctattcggcgacccttccaccggcaggctactcggcggcggcgagcctcaagctcactcctttccagctcacaccctgaagcaggttccggcgagcacgtttgtccccgcgatggaggcgccgccgggcatgcagagccttatggacaacccgctgtccaggagctgcagtatcatcggtgcggcggcgacccacgcagggagcggtaacgccgccgcgccggggcaaggtgctcccagcaagacgcggattcggtggacgcaggacctccacgagcgcttcgtcgactgcgtcaacaagctcggcggcgcggacaaggcgactcccaagggcattctgaagctgatgaactctgatggcctcacaatctaccacatcaagagccaccttcagaaataccgcatagccaagtacatgcccgtgtcatcgacgtccgaagggaaagagaaacgagctgctgccgccaatgacgtgcagaatctcgaccccggcaccgggatgaagatcacggaagcgctacgcgtccagctcgacgtgcagaggcgcctccacgagcagctcgagatccagaggaatctgcagctgaggatcgaggcgcaaggcaagaagctgcagaagatgttcgaggagcagatgaagacgagcaggaccgtgatggggccgccgcagggcgccgacgtcgccttcatcggcgccggcgagcaggaggaggaggtggaggtggaggacgcgttcgacgacgtgcagctactggcggccgtgtccagcgccagcgtcggctaccgcgacggcggattccagtcgaagataagctagcctgtcgcctccagcctccaggcttcagctggcttgtcggcattgtaattgtagggtttgactacaaatgccatcgtagctatccatggaagatgatgcctacaatgtttgggacgacgacgacgagtgttttggagggaaaaaaaggaaactaaattgttggggatgcaggcaagggacgatcctcgtcgtccacttatgtcgttgattggaaggtgtgatcgtgcacctagcctaaccacttagttttaaaagttctctctgaactttagaatgtgagtgtctatttttgcttatttatttttaataaaaaaccatcaggtctcttatagaggttggatctcgttttttgccgtgaagtaaatccgtaaatccggttagtgcatctttaag

SEQ ID NO: 18068 - DNA, 1852 bp, Zea Mays
cttggcttgggccttgggctcccatcactccatcaggccgatgccttcaatgcaagcttttcagtcccgagacgtcgtaatcgctagatgatcgatgaacgccaagaagattaagctgcacgactatcaccactgctacggatcgccgatgtgtgacccacagctgttcccgcgcgccgccgccgccaccaccgcagggctctccttgcacccggggccggggctcgtgggctccctgccgcagcggcatggcggcggcggcggcggctgggtgcacgaggagcacaccgcgacgaccccgagggcggcgcaggggcagggcggctgcgtcgtcggctccgacgccgccgcgttcttcgccgccgaggagctcatgatgggcacggcgcggttcgactcccctctcggcggaacgacgacggcactccaggagctgacagcgtttgccaagggaccgccgtttggccggccgaggcccacgacggggggcgagcgcgagcgcgagcggctgtacccagtggacccgctgccgctccgcgactgcgcggcggtgaggacgtactacgtccggccgcagcagcgcgacggcgccacggaggcgcctccttcactcgagctgccattccagcggcggcagcagcaacaagtgcacgggctattcggcgacccttccaccggcaggctactcggcggcggcgagcctcaagctcactcctttccagctcacgttccggcgagcacgtttgtccccgcgatggaggcgccgccgggcatgcagagccttatggacaacccgctgtccaggagctgcagtatcatcggtgcggcggcgacccacgcagggagcggtaacgccgccgcgccggggcaaggtgctcccagcaagacgcggattcggtggacgcaggacctccacgagcgcttcgtcgactgcgtcaacaagctcggcggcgcggacaaggcgactcccaagggcattctgaagctgatgaactctgatggcctcacaatctaccacatcaagagccaccttcagaaataccgcatagccaagtacatgcccgtgtcatcgacgtccgaagggaaagagaaacgagctgctgccgccaatgacgtgcagaatctcgaccccggcaccgggatgaagatcacggaagcgctacgcgtccagctcgacgtgcagaggcgcctccacgagcagctcgagatccagaggaatctgcagctgaggatcgaggcgcaaggcaagaagctgcagaagatgttcgaggagcagatgaagacgagcaggaccgtgatggggccgccgcagggcgccgacgtcgccttcatcggcgccggcgagcaggaggaggaggtggaggtggaggacgcgttcgacgacgtgcagctactggcggccgtgtccagcgccagcgtcggctaccgcgacggcggattccagtcgaagataagctagcctgtcgcctccagcctccaggcttcagctggcttgtcggcattgtaattgtagggtttgactacaaatgccatcgtagctatccatggaagatgatgcctacaatgtttgggacgacgacgacgagtgttttggagggaaaaaaaggaaactaaattgttggggatgcaggcaagggacgatcctcgtcgtccacttatgtcgttgattggaaggtgtgatcgtgcacctagcctaaccacttagttttaaaagttctctctgaactttagaatgtgagtgtctatttttgcttatttatttttaataaaaaaccatcaggtctcttatagaggttggatctcgttttttgccgtgaagtaaatccgtaaatccggttagtgcatctttaag

SEQ ID NO: 18069 - DNA, 1809 bp, Zea Mays
cttggcttgggccttgggctcccatcactccatcaggccgatgccttcaatgcaagcttttcagtcccgagacgtcgtaatcgctagatgatcgatgaacgccaagaagattaagctgcacgactatcaccactgctacggatcgccgatgtgtgacccacagctgttcccgcgcgccgccgccgccaccaccgcagggctctccttgcacccggggccggggctcgtgggctccctgccgcagcggcatggcggcggcggcggcggctgggtgcacgaggagcacaccgcgacgaccccgagggcggcgcaggggcagggcggctgcgtcgtcggctccgacgccgccgcgttcttcgccgccgaggagctcatgatgggcacggcgcggttcgactcccctctcggcggaacgacgacggcactccaggagctgacagcgtttgccaagggaccgccgtttggccggccgaggcccacgacggggggcgagcgcgagcgcgagcggctgtacccagtggacccgctgccgctccgcgactgcgcggcggtgaggacgtactacgtccggccgcagcagcgcgacggcgccacggaggcgcctccttcactcgagctgccattccagcggcggcagcagcaacaagtgcacgggctattcggcgacccttccaccggcaggctactcggcggcggcgagcctcaagctcactcctttccagctcacaccctgaagcaggttccggcgagcacgtttgtccccgcgatggaggcgccgccgggcatgcagagccttatggacaacccgctgtccaggagctgcagtatcatcggtgcggcggcgacccacgcagggagcggtaacgccgccgcgccggggcaaggtgctcccagcaagacgcggattcggtggacgcaggacctccacgagcgcttcgtcgactgcgtcaacaagctcggcggcgcggacaaggcgactcccaagggcattctgaagctgatgaactctgatggcctcacaatctaccacatcaagagccaccttcagaaataccgcatagccaagtacatgcccgtgtcatcgacgtccgaagcgggatgaagatcacggaagcgctacgcgtccagctcgacgtgcagaggcgcctccacgagcagctcgagatccagaggaatctgcagctgaggatcgaggcgcaaggcaagaagctgcagaagatgttcgaggagcagatgaagacgagcaggaccgtgatggggccgccgcagggcgccgacgtcgccttcatcggcgccggcgagcaggaggaggaggtggaggtggaggacgcgttcgacgacgtgcagctactggcggccgtgtccagcgccagcgtcggctaccgcgacggcggattccagtcgaagataagctagcctgtcgcctccagcctccaggcttcagctggcttgtcggcattgtaattgtagggtttgactacaaatgccatcgtagctatccatggaagatgatgcctacaatgtttgggacgacgacgacgagtgttttggagggaaaaaaaggaaactaaattgttggggatgcaggcaagggacgatcctcgtcgtccacttatgtcgttgattggaaggtgtgatcgtgcacctagcctaaccacttagttttaaaagttctctctgaactttagaatgtgagtgtctatttttgcttatttatttttaataaaaaaccatcaggtctcttatagaggttggatctcgttttttgccgtgaagtaaatccgtaaatccggttagtgcatctttaag

SEQ ID NO: 18070 - DNA, 1973 bp, Zea Mays
atcaaagcctgcgtttgtcccctagcctcctgtccgacatggaagcctgcacttttatatactgttaccaggtggatcatctttgcatcttatcattctctgtcacctgcttggcttgggccttgggctcccatcactccatcaggccgatgccttcaatgcaagcttttcagtcccgagacgtcgtaatcgctagatgatcgatgaacgccaagaagattaagctgcacgactatcaccactgctacggatcgccgatgtgtgacccacagctgttcccgcgcgccgccgccgccaccaccgcagggctctccttgcacccggggccggggctcgtgggctccctgccgcagcggcatggcggcggcggcggcggctgggtgcacgaggagcacaccgcgacgaccccgagggcggcgcaggggcagggcggctgcgtcgtcggctccgacgccgccgcgttcttcgccgccgaggagctcatgatgggcacggcgcggttcgactcccctctcggcggaacgacgacggcactccaggagctgacagcgtttgccaagggaccgccgtttggccggccgaggcccacgacggggggcgagcgcgagcgcgagcggctgtacccagtggacccgctgccgctccgcgactgcgcggcggtgaggacgtactacgtccggccgcagcagcgcgacggcgccacggaggcgcctccttcactcgagctgccattccagcggcggcagcagcaacaagtgcacgggctattcggcgacccttccaccggcaggctactcggcggcggcgagcctcaagctcactcctttccagctcacaccctgaagcaggttccggcgagcacgtttgtccccgcgatggaggcgccgccgggcatgcagagccttatggacaacccgctgtccaggagctgcagtatcatcggtgcggcggcgacccacgcagggagcggtaacgccgccgcgccggggcaaggtgctcccagcaagacgcggattcggtggacgcaggacctccacgagcgcttcgtcgactgcgtcaacaagctcggcggcgcggacaaggcgactcccaagggcattctgaagctgatgaactctgatggcctcacaatctaccacatcaagagccaccttcagaaataccgcatagccaagtacatgcccgtgtcatcgacgtccgaagggaaagagaaacgagctgctgccgccaatgacgtgcagaatctcgaccccggcaccgggatgaagatcacggaagcgctacgcgtccagctcgacgtgcagaggcgcctccacgagcagctcgagatccagaggaatctgcagctgaggatcgaggcgcaaggcaagaagctgcagaagatgttcgaggagcagatgaagacgagcaggaccgtgatggggccgccgcagggcgccgacgtcgccttcatcggcgccggcgagcaggaggaggaggtggaggtggaggacgcgttcgacgacgtgcagctactggcggccgtgtccagcgccagcgtcggctaccgcgacggcggattccagtcgaagataagctagcctgtcgcctccagcctccaggcttcagctggcttgtcggcattgtaattgtagggtttgactacaaatgccatcgtagctatccatggaagatgatgcctacaatgtttgggacgacgacgacgagtgttttggagggaaaaaaaggaaactaaattgttggggatgcaggcaagggacgatcctcgtcgtccacttatgtcgttgattggaaggtgtgatcgtgcacctagcctaaccacttagttttaaaagttctctctgaactttagaatgtgagtgtctatttttgcttatttatttttaataaaaaaccatcaggtctcttatagaggttggatctcgttttttgccgtgaagtaaatccgtaaatccggttagtgcatctttaag

SEQ ID NO: 18071 - DNA, 1167 bp, Zea Mays
aaacgaaaggactgccctaacctcatgcagtcgtgcccgcttgtttcacttgctcgccttcacccctcgtcgccgccgccgccaccgccgtcgccgtcgcaagcgatgatgctcaacatcaacttgttccgcactgacaagggcgacaacccagaccttattcgcgagtcccagcgtagtcggttcgcctccgtcgagctcgtcgacgaggtcatcgccctcgacaaggcatggcgcgaaaggcagttcgagctggataagatccggcaggagcttaacgctaccagcaagaagatcggcaagctcaaagccagcaagcaagaagaggaagcgaagaagctcatggagagcacagacgaaattaagaaaaggttgacaggcaaagaagttgaggtgtaggaggccaagagcaccctcgacgccaaggtcacgacgattggcaacatcgtgcatgagtccgtgccagtcagcaacgacgaggtgacctggaaatttagcaaacaataaaattgtacgggcatttggagagaagagagtagaggataatttgaagaaccacgtggacctttgcagataaaagttacatggatattgtcatcaaaggtggtgtatgggtcggtcatttactctctggttactccttgccaatggacatgccgtcgcaagtaaatgtaaagagttctgaagaggttgctggaatgtggaagcactccatcaaagtttcttatgaagcaacaaaggcagcatttcctggtggtgaagttatcgcacatcttgatcacaagatgggagagtgtcggatgcttcttcatatactatttcttggtccgtcaaatctgcttgacccaaatgcaagttttgctcaaatgtggcaaaaataattgtctcatcgattgttagcgcgcctgcttccagcaaagtttcagagaaggaaaagatggaatgtaactcaaattttggtggccgcacaagtgtggagacttgaattcatatatacttagttaggctcaatattagtgcaaacagttgataaccaagtttttcaattagtatttagttttggctttagagtacacttatgtatgagttatttgacaatatttatttatgagatattgaatggtacttatctatattatattagttacaatgttattaaatatatgc

SEQ ID NO: 18072 - DNA, 1262 bp, Zea Mays
ctttgagcttctatttttgtttctgctcttgctgccaaaaagtccggcccatatttcagcatagactttagtagtcggcccaagtatcctgccaagcccacctgcgacgtcaaacgaaaggactgccctaacctcatgcagtcgtgcccgcttgtttcacttgctcgccttcacccctcgtcgccgccgccgccaccgccgtcgccgtcgcaagcgatgatgctcaacatcaacttgttccgcactgacaagggcgacaacccagaccttattcgcgagtcccagcgtagtcggttcgcctccgtcgagctcgtcgacgaggtcatcgccctcgacaaggcatggcgcgaaaggcagttcgagctggataagatccggcaggagcttaacgctaccagcaagaagatcggcaagctcaaagccagcaagcaagaagaggaagcgaagaagctcatggagagcacagacgaaattaagaaaaggttgacaggcaaagaagttgaggtgtaggaggccaagagcaccctcgacgccaaggtcacgacgattggcaacatcgtgcatgagtccgtgccagtcagcaacgacgaggcaaacaataaaattgtacgggcatttggagagaagagagtagaggataatttgaagaaccacgtggacctttgcagataaaagttacatggatattgtcatcaaaggtggtgtatgggtcggtcatttactctctggttactccttgccaatggacatgccgtcgcaagtaaatgtaaagagttctgaagaggttgctggaatgtggaagcactccatcaaagtttcttatgaagcaacaaaggcagcatttcctggtggtgaagttatcgcacatcttgatcacaagatgggagagtgtcggatgcttcttcatatactatttcttggtccgtcaaatctgcttgacccaaatgcaagttttgctcaaatgtggcaaaaataattgtctcatcgattgttagcgcgcctgcttccagcaaagtttcagagaaggaaaagatggaatgtaactcaaattttggtggccgcacaagtgtggagacttgaattcatatatacttagttaggctcaatattagtgcaaacagttgataaccaagtttttcaattagtatttagttttggctttagagtacacttatgtatgagttatttgacaatatttatttatgagatattgaatggtacttatctatattatattagttacaatgttattaaatatatgc

SEQ ID NO: 18073 - DNA, 489 bp, Zea Mays
aaacgaaaggactgccctaacctcatgcagtcgtgcccgcttgtttcacttgctcgccttcacccctcgtcgccgccgccgccaccgccgtcgccgtcgcaagcgatgatgctcaacatcaacttgttccgcactgacaagggcgacaacccagaccttattcgcgagtcccagcgtagtcggttcgcctccgtcgagctcgtcgacgaggtcatcgccctcgacaaggcatggcgcgaaaggcagttcgagctggataagatccggcaggagcttaacgctaccagcaagaagatcggcaagctcaaagccagcaagcaagaagaggaagcgaagaagctcatggagagcacagacgaaattaagaaaaggttgacaggcaaagaagttgaggtgtaggaggccaagagcaccctcgacgccaaggtcacgacgattggcaacatcgtgcatgagtccgtgccagtcagcaacgacgagatgaactga

SEQ ID NO: 18074 - DNA, 2349 bp, Zea Mays
gctacaaacaaaattggcaacctaagttgcgagaagatctacagttgaagacaaaacaagaaacagagatgcaagaagagttggaagggctaaaagacaccttgcaatccgaacgacaaagttccaaagaagtaaaaaatgagcttgataagctaaaatctctatgtgatgagaaagaatctgctttgcaggctgccctgatggaaaaaagtagacttgaaaccagattgacaagtagccagggccgtgagagagatactttgacaactgtaggcagcgtcaatagtgacattgagatgcttaccaagcttaaggaggatttgaaatcataccaaaaagagctcgatgcatcaaaacaggtctcgaagaagctcatgtcagaaaagaatcttcttgaccagaaggttcaaaggcttgaaagaatgaaaaatgaagagaaaagcacaatggaaaaggtttatgcggatgaatgccgtaaactgaaatctcagattgctgaattggagcagaaattggaagatgcaacacaatccttaaatgtggctgaatcaaatcttgctgtaagaaatgctgaagttgatagcttgcaaaatagtctgaaagaccttgatgaactaagagagttcaaagcggatgttgaccgaaagaatcaacaaactgctgagattcttaaaaggcaaggggcacaattggtggaacttgagaatctttataagcaagaacaagttctgcgaaaacgttactataatacaattgaagatatgaaaggaaaaataagagttttttgtcgcttgcgccctctaagcgacaaggaactttcttttgaggagaaaaatatagtttgcagtcctgatgaatttacaattgcacatccatggaaagatgagaagtcgaagcaacatatatatgatcgtgtttttgatgcaaacacaagtcaagaagaaatatttgaggatactaagtacctggtacaatcagctgttgatggatataacgtttgcatatttgcatatggtcaaactggttctggaaagactttcactatttatggttcagataacaatcctggtcttactccaagggccacatctgaactttttagggtgataaagcgcgatgggaacaaatattcattttcattgaagacatatatggtggagctttatcaagataatcttgtggacctattgttgcccagaaatgtgaagccgctaaagttagagataaaaaaagattccaagggtgttgttactgttgaaaatgcgacagttgtgagcatttcgagtattgaggaactgagggctataatttcaagaggctctgagaggaggcacactgccggaactaatatgaatgatgagagttcaaggtctcatttaattctttcagtcattattgaaagtacaaatcttcaaacccaatcatatgcaagaggcaaggaaagcaactgaaagaagcacaaagtataaacaaatctctttctgctttggctgatgttattggtgctttatcttctgatggacaacatataccttaccggaaccataagttaacaatgcttatgagtgattctctgggagggaatgcgaagaccttgatgtttgtgaatgtttcaccagcagagtctaacttggaggagacttacaactcgctgatgtatgcttcacgcgttcgatgcattgttaatgatacgagcaagcatgttgctccaaaagaaatcatgagattgaagaagttgatcgcctactggaaggagcaagcaggcaagcggagtgatgaggacgagctagaggaggtaaaggaagagaggatctcaaaagagagagcagacaatcgcctgactggctgacaacttgacacaaccactgaatgctcctggttccgttcttccattacctggagaagaggtgattgatgctgatgagcatttgcaactgccacgagttctgcgatcgctctctaacagaatgttccgatatcatctgacctgtacatacagtagctacgtattatatactatggcagcgatgcccgtttgtacaaagaggaatgtagcacacattgatagaaagggaaaaggttgtgtgactgggaggcttgatgcgccctaagcctataacagctggatcatgtctttttccccccttggagcaggtatttaaagcataatgtgagcgtccttacccaattctttcttatcttgtgtaaaaatcgggtagccttggatgtcaattaaacacgtaaacttcaccttggactagactacttcgattttggaccaagagagtgagatgtctatgtggtgtcatggtatttttcatctgagttaaccagtatggagatgagtac

SEQ ID NO: 18075 - DNA, 4165 bp, Zea Mays
acaccgcgtacatttcttccttcacgccgtcaactttgtccatgtccatacctcctgagcttgctggagctattccgttaattgatcgatttcaggtcgagggctttctcaaagcaatgcaaaagcagattcattcagctggaaaacgtgggtttttttctaaaaagtctgttggaccacaagctcgtgagaagttcactttggaagatatgttgtgctttcaaaaggatcctattccaacttcattactgaagataagcagtgaccttgtaagccgctcaattaaattgttccatgtcatattgaagtacatgggcgtcgattcaccagcaataataactttggatgagagaatagaacttgttgcgaagctctacaagcatacgttgaagcgttctgaacttcgagatgaactctttgcccagatttcaaaacaaacacgtaacaatcctgataggggttggtcaataagagcttgggagcttatgtacctgtgtgcatcatccatgccaccaagcaaagatattggggcatacttgtctgagtatgttcactttgttgcccacggagccacaactgattctgatgttcgagttctagcactgaacacactgaatgcattaaaacgatcagtcaaggcaggtcctagggttacaattcctgcacgggaggaaatagaagctcttttgacaagccgaaagcttacaacaattgtttttttcttggacgaaacttttgaagaaatcacctatgacatggcaacaactgttgctgatgctgttgaggaacttgctagcattatcaaactttcagtgtattctagtttcagcctatttgaatgtcggaaggttgttaacggatcaaagtcttcagaggttggcaatgaggaatacattggattagatgataacaaatatattggtgacttgctatctgaattcagatcagctaaggatcgcaacaaaggagaaattcttcattgcaaacttgtattcaagaaacgtctcttccgcgagtcggatgaggctgtgactgatccaatgtttgttcagctatcatatgtccagttgcaacatgattacattttgggaaactatcctgttggcagggatgatgcttcacaactctctgctctgcaaatcttggttgagattggattcatcgacaatcctgagtcctgcgtcgaatggatatcacttttagagagatttcttcctagacaagtggcgattaccagagcaaagcgagattgggagcttgacatcatttcacgctttcagttaatggaacatttatcaaaagacgatgcacggcaacaatttctcagaatcttaaggactcttccatatgggaactctgttttctttagtgtccgtaagattgatgatccaataggattgctacctggaaaaattattctgggaatcaacaaacgaggggttcactttttccgtccagttcccaaggaatatcttcattctgcagaattaagagacatcatgcaatttggtagcagcaatactgctgttttctttaaaatgcgagttgctggtgtccttcatatctttcaatttgaaacaaagcagggcgaggaaatatgtgtagcacttcaaacacatataaatgacgtcatgctccgcagatattcaaaagcacgctctgctaatagtgtgacatcgcaaaatgatgttaaccatgcatataagccaccaaatattgaaatgtatgagaagcatgtccaagaactgacaaaaacagttgaggaatctcagaagcaagcagatcagttgcgagaagatctacagttgaagacaaaacaagaaacagagatgcaagaagagttggaagggctaaaagacaccttgcaatccgaacgacaaagttccaaagaagtaaaaaatgagcttgataagctaaaatctctatgtgatgagaaagaatctgctttgcaggctgccctgatggaaaaaagtagacttgaaaccagattgacaagtagccagggccgtgagagagatactttgacaactgtaggcagcgtcaatagtgacattgagatgcttaccaagcttaaggaggatttgaaatcataccaaaaagagctcgatgcatcaaaacaggtctcgaagaagctcatgtcagaaaagaatcttcttgaccagaaggttcaaaggcttgaaagaatgaaaaatgaagagaaaagcacaatggaaaaggtttatgcggatgaatgccgtaaactgaaatctcagattgctgaattggagcagaaattggaagatgcaacacaatccttaaatgtggctgaatcaaatcttgctgtaagaaatgctgaagttgatagcttgcaaaatagtctgaaagaccttgatgaactaagagagttcaaagcggatgttgaccgaaagaatcaacaaactgctgagattcttaaaaggcaaggggcacaattggtggaacttgagaatctttataagcaagaacaagttctgcgaaaacgttactataatacaattgaagatatgaaaggaaaaataagagttttttgtcgcttgcgccctctaagcgacaaggaactttcttttgaggagaaaaatatagtttgcagtcctgatgaatttacaattgcacatccatggaaagatgagaagtcgaagcaacatatatatgatcgtgtttttgatgcaaacacaagtcaagaagaaatatttgaggatactaagtacctggtacaatcagctgttgatggatataacgtttgcatatttgcatatggtcaaactggttctggaaagactttcactatttatggttcagataacaatcctggtcttactccaagggccacatctgaactttttagggtgataaagcgcgatgggaacaaatattcattttcattgaagacatatatggtggagctttatcaagataatcttgtggacctattgttgcccagaaatgtgaagccgctaaagttagagataaaaaaagattccaagggtgttgttactgttgaaaatgcgacagttgtgagcatttcgagtattgaggaactgagggctataatttcaagaggctctgagaggaggcacactgccggaactaatatgaatgatgagagttcaaggtctcatttaattctttcagtcattattgaaagtacaaatcttcaaacccaatcatatgcaagaggcaagctaagttttgtggaccttgctggttctgagagggtgaaaaaatctggttccgcaggaaagcaactgaaagaagcacaaagtataaacaaatctctttctgctttggctgatgttattggtgctttatcttctgatggacaacatataccttaccggaaccataagttaacaatgcttatgagtgattctctgggagggaatgcgaagaccttgatgtttgtgaatgtttcaccagcagagtctaacttggaggagacttacaactcgctgatgtatgcttcacgcgttcgatgcattgttaatgatacgagcaagcatgttgctccaaaagaaatcatgagattgaagaagttgatcgcctactggaaggagcaagcaggcaagcggagtgatgaggacgagctagaggaggtaaaggaagagaggatctcaaaagagagagcagacaatcgcctgactggctgacaacttgacacaaccactgaatgctcctggttccgttcttccattacctggagaagaggtgattgatgctgatgagcatttgcaactgccacgagttctgcgatcgctctctaacagaatgttccgatatcatctgacctgtacatacagtagctacgtattatatactatggcagcgatgcccgtttgtacaaagaggaatgtagcacacattgatagaaagggaaaaggttgtgtgactgggaggcttgatgcgccctaagcctataacagctggatcatgtctttttccccccttggagcaggtatttaaagcataatgtgagcgtccttacccaattctttcttatcttgtgtaaaaatcgggtagccttggatgtcaattaaacacgtaaacttcaccttggactagactacttcgattttggaccaagagagtgagatgtctatgtggtgtcatggtatttttcatctgagttaaccagtatggagatgagtac

SEQ ID NO: 18076 - DNA, 4745 bp, Zea Mays
ttcccattcccagctgcgcacgccggcctcccaaaaatcacgagcgcttgcgcggcaccaggaggaggacacggggagggaggggagaacagaacagaacagcagcggaagaggccccgcaccacgtcgcgtgattttctttaatccgctagcaacacagcgccccgcccctcgtgaaggcctccagtccacaccagccttcgtcccgtcctgccccccaccccatcctcgcctccggatctcgctccgccggccgcggccggacgaggcgcctgcgacccggtccgaccctccctccctccctccccctctcccgccgaccgcgcgtctgtcgggactcgggccggcttacttataccgctcgcattgccgggtgcctgctccatttgtccaccccactcgccgcgcgcgcggactccgtgccccgggcgggccactcgcagcttcgagctagctcggagcttctgagcacgaccacgaggaggagaggtacaggctactacagttctgggagatggcggccggcggggtggggcccgcgcagcaccaggcggcgaacggcgcctctggcagcgtcagcaacggtggcgccgccacgccgctgcacggctcggccgccgacggctacgacagcgacggctacagcttcgcgccccccacgccgtcaactttgtccatgtccatacctcctgagcttgctggagctattccgttaattgatcgatttcaggtcgagggctttctcaaagcaatgcaaaagcagattcattcagctggaaaacgtgggtttttttctaaaaagtctgttggaccacaagctcgtgagaagttcactttggaagatatgttgtgctttcaaaaggatcctattccaacttcattactgaagataagcagtgaccttgtaagccgctcaattaaattgttccatgtcatattgaagtacatgggcgtcgattcaccagcaataataactttggatgagagaatagaacttgttgcgaagctctacaagcatacgttgaagcgttctgaacttcgagatgaactctttgcccagatttcaaaacaaacacgtaacaatcctgataggggttggtcaataagagcttgggagcttatgtacctgtgtgcatcatccatgccaccaagcaaagatattggggcatacttgtctgagtatgttcactttgttgcccacggagccacaactgattctgatgttcgagttctagcactgaacacactgaatgcattaaaacgatcagtcaaggcaggtcctagggttacaattcctgcacgggaggaaatagaagctcttttgacaagccgaaagcttacaacaattgtttttttcttggacgaaacttttgaagaaatcacctatgacatggcaacaactgttgctgatgctgttgaggaacttgctagcattatcaaactttcagtgtattctagtttcagcctatttgaatgtcggaaggttgttaacggatcaaagtcttcagaggttggcaatgaggaatacattggattagatgataacaaatatattggtgacttgctatctgaattcagatcagctaaggatcgcaacaaaggagaaattcttcattgcaaacttgtattcaagaaacgtctcttccgcgagtcggatgaggctgtgactgatccaatgtttgttcagctatcatatgtccagttgcaacatgattacattttgggaaactatcctgttggcagggatgatgcttcacaactctctgctctgcaaatcttggttgagattggattcatcgacaatcctgagtcctgcgtcgaatggatatcacttttagagagatttcttcctagacaagtggcgattaccagagcaaagcgagattgggagcttgacatcatttcacgctttcagttaatggaacatttatcaaaagacgatgcacggcaacaatttctcagaatcttaaggactcttccatatgggaactctgttttctttagtgtccgtaagattgatgatccaataggattgctacctggaaaaattattctgggaatcaacaaacgaggggttcactttttccgtccagttcccaaggaatatcttcattctgcagaattaagagacatcatgcaatttggtagcagcaatactgctgttttctttaaaatgcgagttgctggtgtccttcatatctttcaatttgaaacaaagcagggcgaggaaatatgtgtagcacttcaaacacatataaatgacgtcatgctccgcagatattcaaaagcacgctctgctaatagtgtgacatcgcaaaatgatgttaaccatgcatataagccaccaaatattgaaatgtatgagaagcatgtccaagaactgacaaaaacagttgaggaatctcagaagcaagcagatcagttgcgagaagatctacagttgaagacaaaacaagaaacagagatgcaagaagagttggaagggctaaaagacaccttgcaatccgaacgacaaagttccaaagaagtaaaaaatgagcttgataagctaaaatctctatgtgatgagaaagaatctgctttgcaggctgccctgatggaaaaaagtagacttgaaaccagattgacaagtagccagggccgtgagagagatactttgacaactgtaggcagcgtcaatagtgacattgagatgcttaccaagcttaaggaggatttgaaatcataccaaaaagagctcgatgcatcaaaacaggtctcgaagaagctcatgtcagaaaagaatcttcttgaccagaaggttcaaaggcttgaaagaatgaaaaatgaagagaaaagcacaatggaaaaggtttatgcggatgaatgccgtaaactgaaatctcagattgctgaattggagcagaaattggaagatgcaacacaatccttaaatgtggctgaatcaaatcttgctgtaagaaatgctgaagttgatagcttgcaaaatagtctgaaagaccttgatgaactaagagagttcaaagcggatgttgaccgaaagaatcaacaaactgctgagattcttaaaaggcaaggggcacaattggtggaacttgagaatctttataagcaagaacaagttctgcgaaaacgttactataatacaattgaagatatgaaaggaaaaataagagttttttgtcgcttgcgccctctaagcgacaaggaactttcttttgaggagaaaaatatagtttgcagtcctgatgaatttacaattgcacatccatggaaagatgagaagtcgaagcaacatatatatgatcgtgtttttgatgcaaacacaagtcaagaagaaatatttgaggatactaagtacctggtacaatcagctgttgatggatataacgtttgcatatttgcatatggtcaaactggttctggaaagactttcactatttatggttcagataacaatcctggtcttactccaagggccacatctgaactttttagggtgataaagcgcgatgggaacaaatattcattttcattgaagacatatatggtggagctttatcaagataatcttgtggacctattgttgcccagaaatgtgaagccgctaaagttagagataaaaaaagattccaagggtgttgttactgttgaaaatgcgacagttgtgagcatttcgagtattgaggaactgagggctataatttcaagaggctctgagaggaggcacactgccggaactaatatgaatgatgagagttcaaggtctcatttaattctttcagtcattattgaaagtacaaatcttcaaacccaatcatatgcaagaggcaaggaaagcaactgaaagaagcacaaagtataaacaaatctctttctgctttggctgatgttattggtgctttatcttctgatggacaacatataccttaccggaaccataagttaacaatgcttatgagtgattctctgggagggaatgcgaagaccttgatgtttgtgaatgtttcaccagcagagtctaacttggaggagacttacaactcgctgatgtatgcttcacgcgttcgatgcattgttaatgatacgagcaagcatgttgctccaaaagaaatcatgagattgaagaagttgatcgcctactggaaggagcaagcaggcaagcggagtgatgaggacgagctagaggaggtaaaggaagagaggatctcaaaagagagagcagacaatcgcctgactggctgacaacttgacacaaccactgaatgctcctggttccgttcttccattacctggagaagaggtgattgatgctgatgagcatttgcaactgccacgagttctgcgatcgctctctaacagaatgttccgatatcatctgacctgtacatacagtagctacgtattatatactatggcagcgatgcccgtttgtacaaagaggaatgtagcacacattgatagaaagggaaaaggttgtgtgactgggaggcttgatgcgccctaagcctataacagctggatcatgtctttttccccccttggagcaggtatttaaagcataatgtgagcgtccttacccaattctttcttatcttgtgtaaaaatcgggtagccttggatgtcaattaaacacgtaaacttcaccttggactagactacttcgattttggaccaagagagtgagatgtctatgtggtgtcatggtatttttcatctgagttaaccagtatggagatgagtac

SEQ ID NO: 18077 - DNA, 3585 bp, Zea Mays
ccccgcccctcgtgaaggcctccagtccacaccagccttcgtcccgtcctgccccccaccccatcctcgcctccggatctcgctccgccggccgcggccggacgaggcgcctgcgacccggtccgaccctccctccctccctccccctctcccgccgaccgcgcgtctgtcgggactcgggccggcttacttataccgctcgcattgccgggtgcctgctccatttgtccaccccactcgccgcgcgcgcggactccgtgccccgggcgggccactcgcagcttcgagctagctcggagcttctgagcacgaccacgaggaggagaggtacaggctactacagttctgggagatggcggccggcggggtggggcccgcgcagcaccaggcggcgaacggcgcctctggcagcgtcagcaacggtggcgccgccacgccgctgcacggctcggccgccgacggctacgacagcgacggctacagcttcgcgccccccacgccgtcaactttgtccatgtccatacctcctgagcttgctggagctattccgttaattgatcgatttcaggtcgagggctttctcaaagcaatgcaaaagcagattcattcagctggaaaacgtgggtttttttctaaaaagtctgttggaccacaagctcgtgagaagttcactttggaagatatgttgtgctttcaaaaggatcctattccaacttcattactgaagataagcagtgaccttgtaagccgctcaattaaattgttccatgtcatattgaagtacatgggcgtcgattcaccagcaataataactttggatgagagaatagaacttgttgcgaagctctacaagcatacgttgaagcgttctgaacttcgagatgaactctttgcccagatttcaaaacaaacacgtaacaatcctgataggggttggtcaataagagcttgggagcttatgtacctgtgtgcatcatccatgccaccaagcaaagatattggggcatacttgtctgagtatgttcactttgttgcccacggagccacaactgattctgatgttcgagttctagcactgaacacactgaatgcattaaaacgatcagtcaaggcaggtcctagggttacaattcctgcacgggaggaaatagaagctcttttgacaagccgaaagcttacaacaattgtttttttcttggacgaaacttttgaagaaatcacctatgacatggcaacaactgttgctgatgctgttgaggaacttgctagcattatcaaactttcagtgtattctagtttcagcctatttgaatgtcggaaggttgttaacggatcaaagtcttcagaggttggcaatgaggaatacattggattagatgataacaaatatattggtgacttgctatctgaattcagatcagctaaggatcgcaacaaaggagaaattcttcattgcaaacttgtattcaagaaacgtctcttccgcgagtcggatgaggctgtgactgatccaatgtttgttcagctatcatatgtccaggtactgaaggattgccagtttgtgtgttattcaagtaatcttggttcaaaaatagagctaacaagtaacattgttctgcagttgcaacatgattacattttgggaaactatcctgttggcagggatgatgcttcacaactctctgctctgcaaatcttggttgagattggattcatcgacaatcctgagtcctgcgtcgaatggatatcacttttagagagatttcttcctagacaagtggcgattaccagagcaaagcgagattgggagcttgacatcatttcacgctttcagttaatggaacatttatcaaaagacgatgcacggcaacaatttctcagaatcttaaggactcttccatatgggaactctgttttctttagtgtccgtaagattgatgatccaataggattgctacctggaaaaattattctgggaatcaacaaacgaggggttcactttttccgtccagttcccaaggaatatcttcattctgcagaattaagagacatcatgcaatttggtagcagcaatactgctgttttctttaaaatgcgagttgctggtgtccttcatatctttcaatttgaaacaaagcagggcgaggaaatatgtgtagcacttcaaacacatataaatgacgtcatgctccgcagatattcaaaagcacgctctgctaatagtgtgacatcgcaaaatgatgttaaccatgcatataagccaccaaatattgaaatgtatgagaagcatgtccaagaactgacaaaaacagttgaggaatctcagaagcaagcagatcagttgcgagaagatctacagttgaagacaaaacaagaaacagagatgcaagaagagttggaagggctaaaagacaccttgcaatccgaacgacaaagttccaaagaagtaaaaaatgagcttgataagctaaaatctctatgtgatgagaaagaatctgctttgcaggctgccctgatggaaaaaagtagacttgaaaccagattgacaagtagccagggccgtgagagagatactttgacaactgtaggcagcgtcaatagtgacattgagatgcttaccaagcttaaggaggatttgaaatcataccaaaaagagctcgatgcatcaaaacaggtctcgaagaagctcatgtcagaaaagaatcttcttgaccagaaggttcaaaggcttgaaagaatgaaaaatgaagagaaaagcacaatggaaaaggtttatgcggatgaatgccgtaaactgaaatctcagattgctgaattggagcagaaattggaagatgcaacacaatccttaaatgtggctgaatcaaatcttgctgtaagaaatgctgaagttgatagcttgcaaaatagtctgaaagaccttgatgaactaagagagttcaaagcggatgttgaccgaaagaatcaacaaactgctgagattcttaaaaggcaaggggcacaattggtggaacttgagaatctttataagcaagaacaagttctgcgaaaacgttactataatacaattgaagatatgaaaggaaaaataagagttttttgtcgcttgcgccctctaagcgacaaggaactttcttttgaggagaaaaatatagtttgcagtcctgatgaatttacaattgcacatccatggaaagatgagaagtcgaagcaacatatatatgatcgtgtttttgatgcaaacacaagtcaagaagaaatatttgaggatactaagtacctggtacaatcagctgttgatggatataacgtttgcatatttgcatatggtcaaactggttctggaaagactttcactatttatggttcagataacaatcctggtcttactccaagggccacatctgaactttttagggtgataaagcgcgatgggaacaaatattcattttcattgaagacatatatggtggagctttatcaagataatcttgtggacctattgttgcccagaaatgtgaagccgctaaagttagagataaaaaaagattccaagtttccattgggaatttcagaagtgtgttt

SEQ ID NO: 18078 - DNA, 1176 bp, Zea Mays
ttggctacaaacaaaattggcaacctaagttgcgagaagatctacagttgaagacaaaacaagaaacagagatgcaagaagagttggaagggctaaaagacaccttgcaatccgaacgacaaagttccaaagaagtaaaaaatgagcttgataagctaaaatctctatgtgatgagaaagaatctgctttgcaggctgccctgatggaaaaaagtagacttgaaaccagattgacaagtagccagggccgtgagagagatactttgacaactgtaggcagcgtcaatagtgacattgagatgcttaccaagcttaaggaggatttgaaatcataccaaaaagagctcgatgcatcaaaacaggtctcgaagaagctcatgtcagaaaagaatcttcttgaccagaaggttcaaaggcttgaaagaatgaaaaatgaagagaaaagcacaatggaaaaggtttatgcggatgaatgccgtaaactgaaatctcagattgctgaattggagcagaaattggaagatgcaacacaatccttaaatgtggctgaatcaaatcttgctgtaagaaatgctgaagttgatagcttgcaaaatagtctgaaagaccttgatgaactaagagagttcaaagcggatgttgaccgaaagaatcaacaaactgctgagattcttaaaaggcaaggggcacaattggtggaacttgagaatctttataagcaagaacaagttctgcgaaaacgttactataatacaattgaagatatgaaaggaaaaataagagttttttgtcgcttgcgccctctaagcgacaaggaactttcttttgaggagaaaaatatagtttgcagtcctgatgaatttacaattgcacatccatggaaagatgagaagtcgaagcaacatatatatgatcgtgtttttgatgcaaacacaagtcaagaagaaatatttgaggatactaagtacctggtacaatcagctgttgatggatataacgtttgcatatttgcatatggtcaaactggttctggaaagactttcactatttatggttcagataacaatcctggtcttactccaagggccacatctgaactttttagggtgataaagcgcgatgggaacaaatattcattttcattgaagatcctaagtatgccttcgatattatcct

SEQ ID NO: 18079 - DNA, 1446 bp, Zea Mays
gtccacatgacccgcttatgtggggattcaagggttttccaacttcggatgcaaagcttggaaggtgggtgctgacagcagaagatatatgcttcaagaatgtagtcatgtcctacatgtttcgacttggtaacatttcatttgaagatatggattgttgccttttgatagaggactacaaggcattttaaggtgtatccagtgaagcatgcaaaataggaaaacgtctagcacaatcctattaaatccagcaaacacctgtctgttccgtacttatgaaatccagtttcacttcaactgccagcaacctttttagaaattcagtttcatggcactcaattcacccaccaagactagcgaattgcagagggttggcatagcttgtcttcttgccataatatcttcagtccctcatttgcagtattgtgtatcagataagattagctgatgcttgctaatctatgtgctgtggtactagtacaagaagcaaatggtatcaaatgtagcgcctcattatattttgttcaactgatattcagatgtccaggcccttcacattatttggttattcttattttttccatttctaaggtgacaaataactgtgcgcacagggaaatgcataccaatcacgagagggggtgggatttatcaagaacacatgaatgaagcccttgacgtgcttagaaatggaggctggctgcatacattccctgaaggaaaaatagcccaagaagatcagccgattagaagattgaagtggggaacggccagtcttattgtccgagcacctataactccaatagttttgccaattgttcactctggtttcgaaaaggtcatgccagaaaactcgttctttggacggcgaccaccggtgccactctgcagtaagaagatagacatcattgttggagagccaatagagtttgacttgccaagcttgaagcaagaagcatcaacggtaccccatgactcatcctctgaacggaaggggtggccggccattacaccagatgggctggacgaggccgcccagagatggctttaccagaagatgtcagacaaggtccagtctgtgatggagagactgcggaaaacagttaccaaccttaagcagcgttgatcttcatctatcaggcaataccttgttgaactgctgattaggattctttaaccagcttgagttggtggatacagaaatggacaagtggtcgtcacacaagttcgtcaaagtattggtaataatagaattagagctcagattgtttcattttttagtctttttttagttattgttttgaaaggtttcttcattatttacaatcaactgttcaggttgcctgccagttttactgaggcatgaataaaaaaaggcttttgatattcagttgcaaaatcaccatccatttacctgtcttatgtgtagtggtttattttttttgt

SEQ ID NO: 18080 - DNA, 1258 bp, Zea Mays
agacgaaaaaccgagcccacgcgagaagaaaaaaagtggctaaaaatggaggcgtccgcggaggcggcggccgccgccgccgctgcgcgaacgttgaggtgggctggccgcgcggggcacctgggcggcgtcccgcgcgccgtcgtgttcgccgcggtgggcgcgttcgccaaggcgtgcgcctcgctgctcaacaccaccacggtccacaacgccgacgcgctcctccgcctcgtctcggcgcgggctcccgggacgccgctcctcaccgtcagcaatcacatgtccacgttagatgacccgcttatgtggggattcaagggttttccaacttcggatgcaaagcttggaaggtgggtgctgacagcagaagatatatgcttcaagaatgtagtcatgtcctacatgtttcgacttgggaaatgcataccaatcacgagagggggtgggatttatcaagaacacatgaatgaagcccttgacgtgcttagaaatggaggctgggtatggggctgcatacattccctgaaggaaaaatagcccaagaagatcagccgattagaagattgaagtggggaacggccagtcttattgtccgagcacctataactccaatagttttgccaattgttcactctggtttcgaaaaggtcatgccagaaaactcgttctttggacggcgaccaccggtgccactctgcagtaagaagatagacatcattgttggagagccaatagagtttgacttgccaagcttgaagcaagaagcatcaacggtaccccatgactcatcctctgaacggaaggggtggccggccattacaccagatgggctggacgaggccgcccagagatggctttaccagaagatgtcagacaaggtccagtctgtgatggagagactgcggaaaacagttaccaaccttaagcagcgttgatcttcatctatcaggcaataccttgttgaactgctgattaggattctttaaccagcttgagttggtggatacagaaatggacaagtggtcgtcacacaagttcgtcaaagtattggtaataatagaattagagctcagattgtttcattttttagtctttttttagttattgttttgaaaggtttcttcattatttacaatcaactgttcaggttgcctgccagttttactgaggcatgaataaaaaaaggcttttgatattcagttgcaaaatcaccatccatttacctgtcttatgtgtagtggtttattttttttgt

SEQ ID NO: 18081 - DNA, 1245 bp, Zea Mays
agacgaaaaaccgagcccacgcgagaagaaaaaaagtggctaaaaatggaggcgtccgcggaggcggcggccgccgccgccgctgcgcgaacgttgaggtgggctggccgcgcggggcacctgggcggcgtcccgcgcgccgtcgtgttcgccgcggtgggcgcgttcgccaaggcgtgcgcctcgctgctcaacaccaccacggtccacaacgccgacgcgctcctccgcctcgtctcggcgcgggctcccgggacgccgctcctcaccgtcagcaatcacatgtccacatgacccgcttatgtggggattcaagggttttccaacttcggatgcaaagcttggaaggtgggtgctgacagcagaagatatatgcttcaagaatgtagtcatgtcctacatgtttcgacttgggaaatgcataccaatcacgagagggggtgggatttatcaagaacacatgaatgaagcccttgacgtgcttagaaatggaggctggctgcatacattccctgaaggaaaaatagcccaagaagatcagccgattagaagattgaagtggggaacggccagtcttattgtccgagcacctataactccaatagttttgccaattgttcactctggtttcgaaaaggtcatgccagaaaactcgttctttggacggcgaccaccggtgccactctgcagtaagaagatagacatcattgttggagagccaatagagtttgacttgccaagcttgaagcaagaagcatcaacggtaccccatgactcatcctctgaacggaaggggtggccggccattacaccagatgggctggacgaggccgcccagagatggctttaccagaagatgtcagacaaggtccagtctgtgatggagagactgcggaaaacagttaccaaccttaagcagcgttgatcttcatctatcaggcaataccttgttgaactgctgattaggattctttaaccagcttgagttggtggatacagaaatggacaagtggtcgtcacacaagttcgtcaaagtattggtaataatagaattagagctcagattgtttcattttttagtctttttttagttattgttttgaaaggtttcttcattatttacaatcaactgttcaggttgcctgccagttttactgaggcatgaataaaaaaaggcttttgatattcagttgcaaaatcaccatccatttacctgtcttatgtgtagtggtttattttttttgt

SEQ ID NO: 18082 - DNA, 1606 bp, Zea Mays
cagaggggcatagacgaaaaaccgagcccacgcgagaagaaaaaaagtggctaaaaatggaggcgtccgcggaggcggcggccgccgccgccgctgcgcgaacgttgaggtgggctggccgcgcggggcacctgggcggcgtcccgcgcgccgtcgtgttcgccgcggtgggcgcgttcgccaaggcgtgcgcctcgctgctcaacaccaccacggtccacaacgccgacgcgctcctccgcctcgtctcggcgcgggctcccgggacgccgctcctcaccgtcagcaatcacatgtccacgttagatgacccgcttatgtggggattcaagggttttccaacttcggatgcaaagcttggaaggtgggtgctgacagcagaagatatatgcttcaagaatgtagtcatgtcctacatgtttcgacttggtaacatttcatttgaagatatggattgttgccttttgatagaggactacaaggcattttaaggtgtatccagtgaagcatgcaaaataggaaaacgtctagcacaatcctattaaatccagcaaacacctgtctgttccgtacttatgaaatccagtttcacttcaactgccagcaacctttttagaaattcagtttcatggcactcaattcacccaccaagactagcgaattgcagagggttggcatagcttgtcttcttgccataatatcttcagtccctcatttgcagtattgtgtatcagataagattagctgatgcttgctaatctatgtgctgtggtactagtacaagaagcaaatgggaaatgcataccaatcacgagagggggtgggatttatcaagaacacatgaatgaagcccttgacgtgcttagaaatggaggctgggaaaaatagcccaagaagatcagccgattagaagattgaagtggggaacggccagtcttattgtccgagcacctataactccaatagttttgccaattgttcactctggtttcgaaaaggtcatgccagaaaactcgttctttggacggcgaccaccggtgccactctgcagtaagaagatagacatcattgttggagagccaatagagtttgacttgccaagcttgaagcaagaagcatcaacggtaccccatgactcatcctctgaacggaaggggtggccggccattacaccagatgggctggacgaggccgcccagagatggctttaccagaagatgtcagacaaggtccagtctgtgatggagagactgcggaaaacagttaccaaccttaagcagcgttgatcttcatctatcaggcaataccttgttgaactgctgattaggattctttaaccagcttgagttggtggatacagaaatggacaagtggtcgtcacacaagttcgtcaaagtattggtaataatagaattagagctcagattgtttcattttttagtctttttttagttattgttttgaaaggtttcttcattatttacaatcaactgttcaggttgcctgccagttttactgaggcatgaataaaaaaaggcttttgatattcagttgcaaaatcaccatccatttacctgtcttatgtgtagtggtttattttttttgt

SEQ ID NO: 18083 - DNA, 1635 bp, Zea Mays
cctacatcgtcagaggggcatagacgaaaaaccgagcccacgcgagaagaaaaaaagtggctaaaaatggaggcgtccgcggaggcggcggccgccgccgccgctgcgcgaacgttgaggtgggctggccgcgcggggcacctgggcggcgtcccgcgcgccgtcgtgttcgccgcggtgggcgcgttcgccaaggcgtgcgcctcgctgctcaacaccaccacggtccacaacgccgacgcgctcctccgcctcgtctcggcgcgggctcccgggacgccgctcctcaccgtcagcaatcacatgtccacgttagatgacccgcttatgtggggattcaagggttttccaacttcggatgcaaagcttggaaggtgggtgctgacagcagaagatatatgcttcaagaatgtagtcatgtcctacatgtttcgacttggtaacatttcatttgaagatatggattgttgccttttgatagaggactacaaggcattttaaggtgtatccagtgaagcatgcaaaataggaaaacgtctagcacaatcctattaaatccagcaaacacctgtctgttccgtacttatgaaatccagtttcacttcaactgccagcaacctttttagaaattcagtttcatggcactcaattcacccaccaagactagcgaattgcagagggttggcatagcttgtcttcttgccataatatcttcagtccctcatttgcagtattgtgtatcagataagattagctgatgcttgctaatctatgtgctgtggtactagtacaagaagcaaatgggaaatgcataccaatcacgagagggggtgggatttatcaagaacacatgaatgaagcccttgacgtgcttagaaatggaggctggctgcatacattccctgaaggaaaaatagcccaagaagatcagccgattagaagattgaagtggggaacggccagtcttattgtccgagcacctataactccaatagttttgccaattgttcactctggtttcgaaaaggtcatgccagaaaactcgttctttggacggcgaccaccggtgccactctgcagtaagaagatagacatcattgttggagagccaatagagtttgacttgccaagcttgaagcaagaagcatcaacggtaccccatgactcatcctctgaacggaaggggtggccggccattacaccagatgggctggacgaggccgcccagagatggctttaccagaagatgtcagacaaggtccagtctgtgatggagagactgcggaaaacagttaccaaccttaagcagcgttgatcttcatctatcaggcaataccttgttgaactgctgattaggattctttaaccagcttgagttggtggatacagaaatggacaagtggtcgtcacacaagttcgtcaaagtattggtaataatagaattagagctcagattgtttcattttttagtctttttttagttattgttttgaaaggtttcttcattatttacaatcaactgttcaggttgcctgccagttttactgaggcatgaataaaaaaaggcttttgatattcagttgcaaaatcaccatccatttacctgtcttatgtgtagtggtttattttttttgt

SEQ ID NO: 18084 - DNA, 1243 bp, Zea Mays
cctacatcgtcagaggggcatagacgaaaaaccgagcccacgcgagaagaaaaaaagtggctaaaaatggaggcgtccgcggaggcggcggccgccgccgccgctgcgcgaacgttgaggtgggctggccgcgcggggcacctgggcggcgtcccgcgcgccgtcgtgttcgccgcggtgggcgcgttcgccaaggcgtgcgcctcgctgctcaacaccaccacggtccacaacgccgacgcgctcctccgcctcgtctcggcgcgggctcccgggacgccgctcctcaccgtcagcaatcacatgtccacgttagatgacccgcttatgtggggattcaagggttttccaacttcggatgcaaagcttggaaggtgggtgctgacagcagaagatatatgcttcaagaatgtagtcatgtcctacatgtttcgacttgggaaatgcataccaatcacgagagggggtgggatttatcaagaacacatgaatgaagcccttgacgtgcttagaaatggaggctggcccaagaagatcagccgattagaagattgaagtggggaacggccagtcttattgtccgagcacctataactccaatagttttgccaattgttcactctggtttcgaaaaggtcatgccagaaaactcgttctttggacggcgaccaccggtgccactctgcagtaagaagatagacatcattgttggagagccaatagagtttgacttgccaagcttgaagcaagaagcatcaacggtaccccatgactcatcctctgaacggaaggggtggccggccattacaccagatgggctggacgaggccgcccagagatggctttaccagaagatgtcagacaaggtccagtctgtgatggagagactgcggaaaacagttaccaaccttaagcagcgttgatcttcatctatcaggcaataccttgttgaactgctgattaggattctttaaccagcttgagttggtggatacagaaatggacaagtggtcgtcacacaagttcgtcaaagtattggtaataatagaattagagctcagattgtttcattttttagtctttttttagttattgttttgaaaggtttcttcattatttacaatcaactgttcaggttgcctgccagttttactgaggcatgaataaaaaaaggcttttgatattcagttgcaaaatcaccatccatttacctgtcttatgtgtagtggtttattttttttgt

SEQ ID NO: 18085 - DNA, 1535 bp, Zea Mays
aacacgataaataaaaaatgaatggagtattttctattaacataatatatgacttaattattggagccttaattttttttgtggccctaaaattttcaaatgaaattatatttaaatttttgggactcaaatataagacttgtttttagagggagtggttttttgacttttgttttataataaagaaaggtaaatcttgtttgtgaaaacgcgaatccagcaaagagcgagcaaagcggcaaatggcgcgtccagtggagacccaccgaaacctaccagtgtccctacatcgtcagaggggcatagacgaaaaaccgagcccacgcgagaagaaaaaaagtggctaaaaatggaggcgtccgcggaggcggcggccgccgccgccgctgcgcgaacgttgaggtgggctggccgcgcggggcacctgggcggcgtcccgcgcgccgtcgtgttcgccgcggtgggcgcgttcgccaaggcgtgcgcctcgctgctcaacaccaccacggtccacaacgccgacgcgctcctccgcctcgtctcggcgcgggctcccgggacgccgctcctcaccgtcagcaatcacatgtccacgttagatgacccgcttatgtggggattcaagggttttccaacttcggatgcaaagcttggaaggtgggtgctgacagcagaagatatatgcttcaagaatgtagtcatgtcctacatgtttcgacttgggaaatgcataccaatcacgagagggggtgggatttatcaagaacacatgaatgaagcccttgacgtgcttagaaatggaggctgggaaaaatagcccaagaagatcagccgattagaagattgaagtggggaacggccagtcttattgtccgagcacctataactccaatagttttgccaattgttcactctggtttcgaaaaggtcatgccagaaaactcgttctttggacggcgaccaccggtgccactctgcagtaagaagatagacatcattgttggagagccaatagagtttgacttgccaagcttgaagcaagaagcatcaacggtaccccatgactcatcctctgaacggaaggggtggccggccattacaccagatgggctggacgaggccgcccagagatggctttaccagaagatgtcagacaaggtccagtctgtgatggagagactgcggaaaacagttaccaaccttaagcagcgttgatcttcatctatcaggcaataccttgttgaactgctgattaggattctttaaccagcttgagttggtggatacagaaatggacaagtggtcgtcacacaagttcgtcaaagtattggtaataatagaattagagctcagattgtttcattttttagtctttttttagttattgttttgaaaggtttcttcattatttacaatcaactgttcaggttgcctgccagttttactgaggcatgaataaaaaaaggcttttgatattcagttgcaaaatcaccatccatttacctgtcttatgtgtagtggtttattttttttgt

SEQ ID NO: 18086 - DNA, 1554 bp, Zea Mays
aacacgataaataaaaaatgaatggagtattttctattaacataatatatgacttaattattggagccttaattttttttgtggccctaaaattttcaaatgaaattatatttaaatttttgggactcaaatataagacttgtttttagagggagtggttttttgacttttgttttataataaagaaaggtaaatcttgtttgtgaaaacgcgaatccagcaaagagcgagcaaagcggcaaatggcgcgtccagtggagacccaccgaaacctaccagtgtccctacatcgtcagaggggcatagacgaaaaaccgagcccacgcgagaagaaaaaaagtggctaaaaatggaggcgtccgcggaggcggcggccgccgccgccgctgcgcgaacgttgaggtgggctggccgcgcggggcacctgggcggcgtcccgcgcgccgtcgtgttcgccgcggtgggcgcgttcgccaaggcgtgcgcctcgctgctcaacaccaccacggtccacaacgccgacgcgctcctccgcctcgtctcggcgcgggctcccgggacgccgctcctcaccgtcagcaatcacatgtccacgttagatgacccgcttatgtggggattcaagggttttccaacttcggatgcaaagcttggaaggtgggtgctgacagcagaagatatatgcttcaagaatgtagtcatgtcctacatgtttcgacttgggaaatgcataccaatcacgagagggggtgggatttatcaagaacacatgaatgaagcccttgacgtgcttagaaatggaggctggctgcatacattccctgaaggaaaaatagcccaagaagatcagccgattagaagattgaagtggggaacggccagtcttattgtccgagcacctataactccaatagttttgccaattgttcactctggtttcgaaaaggtcatgccagaaaactcgttctttggacggcgaccaccggtgccactctgcagtaagaagatagacatcattgttggagagccaatagagtttgacttgccaagcttgaagcaagaagcatcaacggtaccccatgactcatcctctgaacggaaggggtggccggccattacaccagatgggctggacgaggccgcccagagatggctttaccagaagatgtcagacaaggtccagtctgtgatggagagactgcggaaaacagttaccaaccttaagcagcgttgatcttcatctatcaggcaataccttgttgaactgctgattaggattctttaaccagcttgagttggtggatacagaaatggacaagtggtcgtcacacaagttcgtcaaagtattggtaataatagaattagagctcagattgtttcattttttagtctttttttagttattgttttgaaaggtttcttcattatttacaatcaactgttcaggttgcctgccagttttactgaggcatgaataaaaaaaggcttttgatattcagttgcaaaatcaccatccatttacctgtcttatgtgtagtggtttattttttttgt

SEQ ID NO: 18087 - DNA, 2302 bp, Zea Mays
ctgaaatagcccagattacagtggcagtacacactcggcccgtttcagattcgtgacgtactccctccctccaaccacgcccggccaaacttgccatggcgctaccgtcgtcctcgacccccaccgcgtcggctccggcctccctcggcgagcggtggccgccgctggagtctacccccgcagttttcaaccagttcgtgtggtcgctaggtgtcccggaggacgacgtggagttccacgacgtgtacgggctcgacgccgacgcgttggatatggttccccagcctgtgctcgccgttgttctctgcttccccgatccaccacaggatgcaagttacccttcagaacaactcttaatttctggagaaaaggaaacacaggaccaggtttactttataaaacagatcgaatcattgggaaatgcttgtggaactattgctctactccatgctgttggaaatgcatcttccaaagtcaatttagtggagaattcatgcttggacttgttcttcaaatcaactgctaccatggacccatatgagcgtgctgtgtttctggagaaggatgatacaatggcaagggctcacttacttgctgccaatgatggtgccaccgagctcagtgatcttatagaagagcactacgtttgttttgtgtatgtcaatggaacactttatgagcttgatggaatgaaggatggacctataaagcacggaccctgttctttctataagtttgctgcaggatgttgttcctgttattaaggccatcatgtgcaatatccccaactcaatcaacttcaatcttatggtgctgtcaaggaaagaaaaataatggtggtgctattccttgagctggttagatgacccgcttatgtggggattcaagggttttccaacttcggatgcaaagcttggaaggtgggtgctgacagcagaagatatatgcttcaagaatgtagtcatgtcctacatgtttcgacttggtaacatttcatttgaagatatggattgttgccttttgatagaggactacaaggcattttaaggtgtatccagtgaagcatgcaaaataggaaaacgtctagcacaatcctattaaatccagcaaacacctgtctgttccgtacttatgaaatccagtttcacttcaactgccagcaacctttttagaaattcagtttcatggcactcaattcacccaccaagactagcgaattgcagagggttggcatagcttgtcttcttgccataatatcttcagtccctcatttgcagtattgtgtatcagataagattagctgatgcttgctaatctatgtgctgtggtactagtacaagaagcaaatggtatcaaatgtagcgcctcattatattttgttcaactgatattcagatgtccaggcccttcacattatttggttattcttattttttccatttctaaggtgacaaataactgtgcgcacagggaaatgcataccaatcacgagagggggtgggatttatcaagaacacatgaatgaagcccttgacgtgcttagaaatggaggctggctgcatacattccctgaaggaaaaatagcccaagaagatcagccgattagaagattgaagtggggaacggccagtcttattgtccgagcacctataactccaatagttttgccaattgttcactctggtttcgaaaaggtcatgccagaaaactcgttctttggacggcgaccaccggtgccactctgcagtaagaagatagacatcattgttggagagccaatagagtttgacttgccaagcttgaagcaagaagcatcaacggtaccccatgactcatcctctgaacggaaggggtggccggccattacaccagatgggctggacgaggccgcccagagatggctttaccagaagatgtcagacaaggtccagtctgtgatggagagactgcggaaaacagttaccaaccttaagcagcgttgatcttcatctatcaggcaataccttgttgaactgctgattaggattctttaaccagcttgagttggtggatacagaaatggacaagtggtcgtcacacaagttcgtcaaagtattggtaataatagaattagagctcagattgtttcattttttagtctttttttagttattgttttgaaaggtttcttcattatttacaatcaactgttcaggttgcctgccagttttactgaggcatgaataaaaaaaggcttttgatattcagttgcaaaatcaccatccatttacctgtcttatgtgtagtggtttattttttttgt

SEQ ID NO: 18088 - DNA, 1460 bp, Zea Mays
cgtactccctccctccaaccacgcccggccaaacttgccatggcgctaccgtcgtcctcgacccccaccgcgtcggctccggcctccctcggcgagcggtggccgccgctggagtctacccccgcagttttcaaccagttcgtgtggtcgctaggtgtcccggaggacgacgtggagttccacgacgtgtacgggctcgacgccgacgcgttggatatggttccccagcctgtgctcgccgttgttctctgcttccccgatccaccacaggatgcaagttacccttcagaacaactcttaatttctggagaaaaggaaacacaggaccaggtttactttataaaacagatcgaatcattgggaaatgcttgtggaactattgctctactccatgctgttggaaatgcatcttccaaagtcaatttagtggagaattcatgcttggacttgttcttcaaatcaactgctaccatggacccatatgagcgtgctgtgtttctggagaaggatgatacaatggcaagggctcacttacttgctgccaatgatggtgccaccgagctcagtgatcttatagaagagcactacgtttgttttgtgtatgtcaatggaacactttatgagcttgatggaatgaaggatggacctataaagcacggaccctgttctttctataagtttgctgcaggatgttgttcctgttattaaggccatcatgtgcaatatccccaactcaatcaacttcaatcttatggtgctgtcaaggaaagaaaaataatggtggtgctattccttgagctggtaagcggtggaatgcaaaacgcaagggttcaagggaaggggattaaacggatgcctgtttggactgcagctgcgtcactaataagttagatgacccgcttatgtggggattcaagggttttccaacttcggatgcaaagcttggaaggtgggtgctgacagcagaagatatatgcttcaagaatgtagtcatgtcctacatgtttcgacttggtaacatttcatttgaagatatggattgttgccttttgatagaggactacaaggcattttaaggtgtatccagtgaagcatgcaaaataggaaaacgtctagcacaatcctattaaatccagcaaacacctgtctgttccgtacttatgaaatccagtttcacttcaactgccagcaacctttttagaaattcagtttcatggcactcaattcacccaccaagactagcgaattgcagagggttggcatagcttgtcttcttgccataatatcttcagtccctcatttgcagtattgtgtatcagataagattagctgatgcttgctaatctatgtgctgtggtactagtacaagaagcaaatggtatcaaatgtagcgcctcattatattttgttcaactgatattcagatgtccaggcccttcacattatttggttattcttat

SEQ ID NO: 18089 - DNA, 1195 bp, Zea Mays
cgtactccctccctccaaccacgcccggccaaacttgccatggcgctaccgtcgtcctcgacccccaccgcgtcggctccggcctccctcggcgagcggtggccgccgctggagtctacccccgcagttttcaaccagttcgtgtggtcgctaggtgtcccggaggacgacgtggagttccacgacgtgtacgggctcgacgccgacgcgttggatatggttccccagcctgtgctcgccgttgttctctgcttccccgatccaccacaggtcaggcaaaggtggcaccatatgtatcttcaagaagtaagcaggattggtgtggcctagcaagcggttgcaggccttcacatgtgcacacagtgctgttggaatcatggcctgcgctcctagagatgggatgcaagttacccttcagaacaactcttaatttctggagaaaaggaaacacaggaccaggtttactttataaaacagatcgaatcattgggaaatgcttgtggaactattgctctactccatgctgttggaaatgcatcttccaaagtcaatttagtggagaattcatgcttggacttgttcttcaaatcaactgctaccatggacccatatgagcgtgctgtgtttctggagaaggatgatacaatggcaagggctcacttacttgctgccaatgatggtgccaccgagctcagtgatcttatagaagagcactacgtttgttttgtgtatgtcaatggaacactttatgagcttgatggaatgaaggatggacctataaagcacggaccctgttctttctataagtttgctgcaggatgttgttcctgttattaaggccatcatgtgcaatatccccaactcaatcaacttcaatcttatggtgctgtcaaggaaagaaaaataatggtggtgctattccttgagctggtaagcggtggaatgcaaaacgcaagggttcaagggaaggggattaaacggatgcctgtttggactgcagctgcgtcactaataagttcagtgaatgcaaacattttttcctgatgtgttcgctatcatatctagtcgagtgcgtgactacattcatctttagtgttcgcaaagcatctgaaaacttgtcttaggctctatttgtttccttccagtattatataatccagcttatacattatataggccccgtttgtttcctttt

SEQ ID NO: 18090 - DNA, 1021 bp, Zea Mays
cgtactccctccctccaaccacgcccggccaaacttgccatggcgctaccgtcgtcctcgacccccaccgcgtcggctccggcctccctcggcgagcggtggccgccgctggagtctacccccgcagttttcaaccagttcgtgtggtcgctaggtgtcccggaggacgacgtggagttccacgacgtgtacgggctcgacgccgacgcgttggatatggttccccagcctgtgctcgccgttgttctctgcttccccgatccaccacaggaaacacaggaccaggtttactttataaaacagatcgaatcattgggaaatgcttgtggaactattgctctactccatgctgttggaaatgcatcttccaaagtcaatttagtggagaattcatgcttggacttgttcttcaaatcaactgctaccatggacccatatgagcgtgctgtgtttctggagaaggatgatacaatggcaagggctcacttacttgctgccaatgatggtgccaccgagctcagtgatcttatagaagagcactacgtttgttttgtgtatgtcaatggaacactttatgagcttgatggaatgaaggatggacctataaagcacggaccctgttctttctataagtttgctgcaggatgttgttcctgttattaaggccatcatgtgcaatatccccaactcaatcaacttcaatcttatggtgctgtcaaggaaagaaaaataatggtggtgctattccttgagctggtaagcggtggaatgcaaaacgcaagggttcaagggaaggggattaaacggatgcctgtttggactgcagctgcgtcactaataagttcagtgaatgcaaacattttttcctgatgtgttcgctatcatatctagtcgagtgcgtgactacattcatctttagtgttcgcaaagcatctgaaaacttgtcttaggctctatttgtttccttccagtattatataatccagcttatacattatataggccccgtttgtttcctttt

SEQ ID NO: 18091 - DNA, 917 bp, Zea Mays
ctcaccactacggttccatagttcagctttcacaaactagtgagctttccatattggaatattctgcttgccaacttcatcagtcattcctcttcatgatcatccaggaatgactgtactgagcaaaatcctttatggttccatgcatgtgaaatcatatgattggatagagcctactgtcctagcaagtagccagccagcaaggttggccaaattacatacagatgatgttcgtactgctccatgtccaacctccattttgtatccccaaagtggtgggaacctgcactgcttcacttcagtatcttcttgtgctgttcttgatgtccttgccccaccatataacgatgacgctggtcggatttgcacttattttcatgactatccattttcaagtctctcagctggacgcacgaaggtagctggtaacccagataattatgcatggctggaggccataaacactccagtgaatatcaacatgcacactggcatgtataccggtccaactgtacagacatgatgtaaagatgaaccggagcatcaagcagcagctgggtgcctcttcactgatagtagagctctaatatagtgatgtatgttctatactttgaggttagcttttcccctctggccccctttgttggagaaactgttgtacttcagttaagagataagttttcagagtaatttctcctaatcagtttagtagaggtttcaggttcactaacctgagcagtgatcaggcttttagcttatttatttatgttgtgcaacgctggaatggttttgaatgcaaaattgtcactgatgttgccgcattgccgtcttaactcgcgggggctggctgcatgccgatatcggtgtttgaacggaaagaggactcacaacaagaaatgaatgaacgatgttccatt

SEQ ID NO: 18092 - DNA, 1583 bp, Zea Mays
ttaagataaaaaatagagataccgatatagatattatatatcaatatatttagagagatattagcagaacaaagtagatatataggtagggttaattaaagatacattcggttcctgataaaattcaattgaataattcaaatgtggccgcgtatgtgaactccgtcataaacgagaacccagccgctgagtagacttgtgttttcgcttccccttccccatcccctctcctcccctcgccggcttgtcggtctcgccgcgccactggccatacatccaagacgctaatccgtgtgggggaaaagcccccctctctctgaaactattcaaatggcgtggggcgtatccccgcggcggcagccgtcgttcccggtgcaggccctctacgagctctgcaagcgctccttcccctccccttccgccgcctcatcgtctcccccgcccgctgatgtcgtccgcagcatctcctcgctcatggatacaatcactcctgcggatgttgggctcagagattataatcttgaggacgacagggggcatggattttttgactccaacctcctcaagggttcaggaaggcttcctcggtgggcgcggcccatcaagtaccttcatatctacagctgtgatgcattctctgcaagtacagtatatcttgaactcatcaggcttagtctggtgaaatacagcctcctggttgaccatgctatccaaaattggaatattctgcttgccaacttcatcagtcattcctcttcatgatcatccaggaatgactgtactgagcaaaatcctttatggttccatgcatgtgaaatcatatgattggatagagcctactgtcctagcaagtagccagccagcaaggttggccaaattacatacagatgatgttcgtactgctccatgtccaacctccattttgtatccccaaagtggtgggaacctgcactgcttcacttcagtatcttcttgtgctgttcttgatgtccttgccccaccatataacgatgacgctggtcggatttgcacttattttcatgactatccattttcaagtctctcagcagctggacgcacgaaggtagctggtaacccagataattatgcatggctggaggccataaacactccagtgaatatcaacatgcacactggcatgtataccggtccaactgtacagacatgatgtaaagatgaaccggagcatcaagcagcagctgggtgcctcttcactgatagtagagctctaatatagtgatgtatgttctatactttgaggttagcttttcccctctggccccctttgttggagaaactgttgtacttcagttaagagataagttttcagagtaatttctcctaatcagtttagtagaggtttcaggttcactaacctgagcagtgatcaggcttttagcttatttatttatgttgtgcaacgctggaatggttttgaatgcaaaattgtcactgatgttgccgcattgccgtcttaactcgcgggggctggctgcatgccgatatcggtgtttgaacggaaagaggactcacaacaagaaatgaatgaacgatgttccatt

SEQ ID NO: 18093 - DNA, 1979 bp, Zea Mays
gtttgatttgaggaatgaagtaattcatcttcttctcactcctcacctttttagttggtttgtggaatagaatgggttgatccatcaccaccccattcctcataagctaataattagtatatacatgatgagtgagttgattccaccaaaattgatggaatgaacttatgatgcatcacctcataaaacatagagtgactccacaaaccaaacacaccattagagagtcatttataaaatttgttttctatgttttttcactcttcaataacttttatattttatttgcactctagagagtcgtttttattttctatttttggctaaccagaaatttaaaataaaaggttagttttatttgtataatcattttaaaacctgttagaggatttctatttatcaaaatctctattcctagcaattagaaaagatatagaaaatcatttatagttgttgttaatatagatatacattaagataaaaaatagagataccgatatagatattatatatcaatatatttagagagatattagcagaacaaagtagatatataggtagggttaattaaagatacattcggttcctgataaaattcaattgaataattcaaatgtggccgcgtatgtgaactccgtcataaacgagaacccagccgctgagtagacttgtgttttcgcttccccttccccatcccctctcctcccctcgccggcttgtcggtctcgccgcgccactggccatacatccaagacgctaatccgtgtgggggaaaagcccccctctctctgaaactattcaaatggcgtggggcgtatccccgcggcggcagccgtcgttcccggtgcaggccctctacgagctctgcaagcgctccttcccctccccttccgccgcctcatcgtctcccccgcccgctgatgtcgtccgcagcatctcctcgctcatggatacaatcactcctgcggatgttgggctcagagattataatcttgaggacgacagggggcatggattttttgactccaacctcctcaagggttcaggaaggcttcctcggtgggcgcggcccatcaagtaccttcatatctacagctgtgatgcattctctattggaatattctgcttgccaacttcatcagtcattcctcttcatgatcatccaggaatgactgtactgagcaaaatcctttatggttccatgcatgtgaaatcatatgattggatagagcctactgtcctagcaagtagccagccagcaaggttggccaaattacatacagatgatgttcgtactgctccatgtccaacctccattttgtatccccaaagtggtgggaacctgcactgcttcacttcagtatcttcttgtgctgttcttgatgtccttgccccaccatataacgatgacgctggtcggatttgcacttattttcatgactatccattttcaagtctctcagcagctggacgcacgaaggtagctggtaacccagataattatgcatggctggaggccataaacactccagtgaatatcaacatgcacactggcatgtataccggtccaactgtacagacatgatgtaaagatgaaccggagcatcaagcagcagctgggtgcctcttcactgatagtagagctctaatatagtgatgtatgttctatactttgaggttagcttttcccctctggccccctttgttggagaaactgttgtacttcagttaagagataagttttcagagtaatttctcctaatcagtttagtagaggtttcaggttcactaacctgagcagtgatcaggcttttagcttatttatttatgttgtgcaacgctggaatggttttgaatgcaaaattgtcactgatgttgccgcattgccgtcttaactcgcgggggctggctgcatgccgatatcggtgtttgaacggaaagaggactcacaacaagaaatgaatgaacgatgttccatt

SEQ ID NO: 18094 - DNA, 2417 bp, Zea Mays
gtgagcgccgagatttgagctgccgtctctccttcgcatcggcgtgatccaatgatagcaccaagagcgcaccttcccctctccctgacggcgtcgtcctccccgcacggcggcgcgcgcacccgcaccaagaagaggaagaaaccatgtcccccaacctggacagcgccatcaagagccaggtgccggcgctgctcctgaggcgtctcttcggcgcgtcccggcgggacgaggccaagcagctccagcggaccccggcgccggtggggaggcggcgggtgtttgtgcagacggagaccggctgcgtgctcggcatggacctggaccgcggggacaacgcgcacaccgtcaagcgccggctgcagctcgcgctcaacatgcccaccggcgggacctcgctcaccttcggcgatcgcctcctggagaacgacctgtccttcatacgcccggactcgccgctgctgctcacccggaacagcatcaaccggagctgctccaccccgtgcctctgccccgtctccaaggacttcgagcacaaggactgcagcggactggttgagatgctcggctgttccagcagctgtgcccgggtgaagcgcctcgtggacgacgtggtgactgccatcaggagcggcgtggatccggtccccattagcagcggccttggtggctcgtactacttcaggaacgtcttgggcgacagggttgctattgtgaagccgacggacgaggagccctttgcgccaaacaatcccaaggggttcgtcgggagggcgctcggtcagccgggcctcaagagatctgtgcgagtgggagagacggggtttagggaggttgcggcgttcctgttggaccatgacaacttcgccaacgttcctgccacggctctggtgaagataacacactccattttcaacataaactgcccggtaaatggaggaaacctggcaccggctcatgaccagcaacagcaagttaacagcaagattgcttcgttccagcagttcatagcccatgacttcgacgccagcgaccatggcacgtcaagcttccctgtcgctgctgttcataggatcggcatactagatatccggattttcaacactgacaggcacgccggcaatgtgctggtgaggaagcttaacggtggcacaggccgctttggttgccagacagagctgttcccaattgatcatggcatgtgcttgccggagaacttggaggacccttacttcgagtggatccattgggctcaggcttctattccgttctctgaggaagagctcgagtacatcagaaatcttgatccaaggaaagatgtgcagatgctgcgccgggaacttccgatgatacgtgaggcctgcctacatgtactggccctgtgcacaatcttccttaaggaggctgcagctttcggactctgcttggccgagataggcgagatgatgaccagggagttcagagggatggaggaggaaccaagccagctggaggttatgtgtatggaggccaggaagagagtagcagagtgggagcccttctctgccacggctgaacatggagaagataccgatttccagttctcggtggatatgctaggagaatacagtgatgtagtgcgatcaccgaggttcaatggctcaggttccaaggtgtccagtttcagaagccctttgtctaagctcgtcgagagtgtcgacgagggcagtgatggccatgaagatcaaaacgagtctgatcgagtcttgtatgctggatggaatacatccagcgttcctagcaaagctatgggccatagtggcaatgcctcaaaaagtgcaatgaacaggagtgccgatgaacaacttccatcaagtatgtgttttgtcaggctgtcggatatgagtgcagatgagtgggatgtattcctcgaaaaattccaggagctgctgaaagaggcactgcacgagagcgcaagggcagcagtaggtcaaaggatgaagcagcggctgggcacttcatgcaagttttgagcagggcaatagcgcatcagagaagaaaaaaatgcagtgctacttgtactgcttgcttatggagtgagtacaggatgaagatatcatcgtatgtggcaccttcaaccttgtgcaacgatctaggttgcagcagccatgtccagcaggtagataggaccacaagcatatgtagtgacggtgtggagaactgctacgcgtgtttattagctatatgtttacgaaggggaatgcttaataataaatgtttgtcagcctgtgtatattggcttgatgttagatactccagctttagcatgcaatttcttagtcgctgaaaattctttgtagcttgtgatgtgacctgtgagcagtgtaaacgttgcacctttgatggaaaaataatgcttacctgttgttgaatatctt

SEQ ID NO: 18095 - DNA, 2484 bp, Zea Mays
gatagagaaatgagcttcgctgttcgagaaaacagcagagcccggccgaattcgttgggcagcctgcggagatgcagtagaggccgccaggcgcagatggaatgagcgaccgggctctgctccgccgctagcctgccgccgcaccgcgccgtcgatcgccgcgccatgaacggtccccgcggctaccccctttctccaccggcaccttacccccgtatggcgtgatccaatgatagcaccaagagcgcaccttcccctctccctgacggcgtcgtcctccccgcacggcggcgcgcgcacccgcaccaagaagaggaagaaaccatgtcccccaacctggacagcgccatcaagagccaggtgccggcgctgctcctgaggcgtctcttcggcgcgtcccggcgggacgaggccaagcagctccagcggaccccggcgccggtggggaggcggcgggtgtttgtgcagacggagaccggctgcgtgctcggcatggacctggaccgcggggacaacgcgcacaccgtcaagcgccggctgcagctcgcgctcaacatgcccaccggcgggacctcgctcaccttcggcgatcgcctcctggagaacgacctgtccttcatacgcccggactcgccgctgctgctcacccggaacagcatcaaccggagctgctccaccccgtgcctctgccccgtctccaaggacttcgagcacaaggactgcagcggactggttgagatgctcggctgttccagcagctgtgcccgggtgaagcgcctcgtggacgacgtggtgactgccatcaggagcggcgtggatccggtccccattagcagcggccttggtggctcgtactacttcaggaacgtcttgggcgacagggttgctattgtgaagccgacggacgaggagccctttgcgccaaacaatcccaaggggttcgtcgggagggcgctcggtcagccgggcctcaagagatctgtgcgagtgggagagacggggtttagggaggttgcggcgttcctgttggaccatgacaacttcgccaacgttcctgccacggctctgcagttcatagcccatgacttcgacgccagcgaccatggcacgtcaagcttccctgtcgctgctgttcataggatcggcatactagatatccggattttcaacactgacaggcacgccggcaatgtgctggtgaggaagcttaacggtggcacaggccgctttggttgccagacagagctgttcccaattgatcatggcatgtgcttgccggagaacttggaggacccttacttcgagtggatccattgggctcaggcttctattccgttctctgaggaagagctcgagtacatcagaaatcttgatccaaggaaagatgtgcagatgctgcgccgggaacttccgatgatacgtgaggcctgcctacatgtactggccctgtgcacaatcttccttaaggaggctgcagctttcggactctgcttggccgagataggcgagatgatgaccagggagttcagagggatggaggaggaaccaagccagctggaggttatgtgtatggaggccaggaagagagtagcagagtgggagcccttctctgccacggctgaacatggagaagataccgatttccagttctcggtggatatgctaggagaatacagtgatgtagtgcgatcaccgaggttcaatggctcaggttccaaggtgtccagtttcagaagccctttgtctaagctcgtcgagagtgtcgacgagggcagtgatggccatgaagatcaaaacgagtctgatcgagtcttgtatgctggatggaatacatccagcgttcctagcaaagctatgggccatagtggcaatgcctcaaaaagtgcaatgaacaggagtgccgatgaacaacttccatcaagtatgtgttttgtcaggctgtcggatatgagtgcagatgagtgggatgtattcctcgaaaaattccaggagctgctgaaagaggcactgcacgagagcgcaagggcagcagtaggtcaaaggatgaagcagcggctgggcacttcatgcaagttttgagcagggcaatagcgcatcagagaagaaaaaaatgcagtgctacttgtactgcttgcttatggagtgagtacaggatgaagatatcatcgtatgtggcaccttcaaccttgtgcaacgatctaggttgcagcagccatgtccagcaggtagataggaccacaagcatatgtagtgacggtgtggagaactgctacgcgtgtttattagctatatgtttacgaaggggaatgcttaataataaatgtttgtcagcctgtgtatattggcttgatgttagatactccagctttagcatgcaatttcttagtcgctgaaaattctttgtagcttgtgatgtgacctgtgagcagtgtaaacgttgcacctttgatggaaaaataatgcttacctgttgttgaatatctt

SEQ ID NO: 18096 - DNA, 917 bp, Zea Mays
ctcagctcgtgataaaattgaaacgagccgagtcgagtcgagccgagctggccacgagtcgagcgagctcaccacgagtattttgcccagccctactggtcggcctccctgactccctccgccgtgggaaaggaaagcggaggaggaagaggagccaagccgctcgcctcaacacacccccacccaagcaacacgcggaaaaggcgaggcgatggtggtgcggcggctgggcggcgcggggcgcgcgctgctcacgctccccaacatccggaggcgggcgtccaactcctgggccgccgtctgcgacaccttcttctccactaagcaagtgttcgagaaccaccgcatcgtcttcaccgtcggcacctccatcgcctccgtcctcacggcttgggcaggctattcacttcgccacgtgcaacaatcaaggattgaacagaggcttgagtcaattgaatcatctgtccgcggtaggctggcgaggtggtgcttggtacgctcgaaggggcttgagaaaagagcaacaaaagctggtggggatgggtcacatgaagtcgcacgacagatggcactggcggcccttcaacaggctcaggaacagcaggttagcctccaagaacaagcgcgccgacgcccatccaagcaccgaggccccctcgacgtcaagcaacgcggcctctgcggacgttagctgtgcttctcagccggcagcgggcagtgcatgagcttatatatccacaacaatggactaggatgtgactgtgagcttggggccgcgtagtagtccatacgacttggtagaacagacaatgtgagtcagctcgatctgtggtggatcgtttttacatgcgtgaaccagtacagtgtacatacaaatgtacaatcatatgtactttgataaaccattacataagcta

SEQ ID NO: 18097 - DNA, 1097 bp, Zea Mays
ggggaaggtgggtgggaagaggctgcccaaagctaccccagccgcgtctccccaccaccaccaccagcccttcttctacccccaaccctcccccaacaccacaccagcgcagcgccctctcctacccgactcccagctagcccctcacgcgctcgtcggcgccctgtcgagtcgagcccgcatctcgcccgatcgagagcgagcgcatccgcgcgccggggagagctttgctttcggtggtctgtaacgactcaacgacgacggcaggcggtagataaaggcgcgcgatgtgcgacgcggcgccgaggtacaggggcgtgcggaagcggccgtggggccggttcgcggcggagatccgggacccggcgaagcgcgcgcgcgtctggctcggcaccttcgactcggccgaggccgcggcgcgcgcctacgacgtggccgcgcgggccctgcgcggcccgctcgccaggaccaacttccccgcgctcaccaccacctcccgccgccccgcgcccacgtgcagctccggctccaccgtcgagtcctccagcgggccccgcgccggggaccccagggccagggcggcgcatcgcggccgtgctgctgcgaagccgcggcggcccccacggcaggcgccgccgccgcccaccgacgccgactgccacagcgactgcgcgtcgtcggcctccgtcgtggacgacggcgacgacgcgtccacggtccggtcgcgcgcgcgcccgtcgctcgatctcaacctcccggcgccgctcgacttggacggtggccacgacctcgggttctgcacggacctgcggctctgtctctgagcgatcggaatcggatccacggacgaggcggattctgctttgacttgtcgtgagcttgtagcagtagtgccatgtactacgcgatacgaatggcaatagaattggatgatggttccttttctttaacgctctccggattcattcagaggtcagtcatctcgtcgagagtttcagcctttttttctcatgtctggatctgatttgtatcttgctgtcattctgtatgtactttgtaaaagaaaacagacttggggtaaaatttttggaggaaca

SEQ ID NO: 18098 - DNA, 3811 bp, Zea Mays
tcgccgccgcccatcgcaccctgccttagacgcccatgctcgccatggccggctggccgcattcctcagggcctcggcctccgcggtggccgaagcgggcggcgacccggccgttctccacgcggtcctcatcaagaccgcatcgtcctctcgcaccgcctacaacctcctcttctcccgctaccatccatccctctcgctgcacctcctctcccgcctcccgttccacttccgccccactgccgcctcactcacctcctcgctctcttccctctccgcttcctccccggcctccgtgctcccgctcctccgccgcgtcctcggcatgtcgcctgctctcctcgccgacggcccgctctcctcactcctccgctccatgccgccgtccattgcaccccacgtgcacgccctcgccttcaagctcgccctatcgtcgtccccctactccgcctcttgccttattaccctcacccgcatccgcccgctcacccgcatccgcccgctcacccgcatccgcccgccacctgttcgatgaaatccctgttgcaaaccgggaccccgtttgctactcctctacgattgttgggcttgcacagaacgggtggtacgaagaatctctcagtgtcttcgctggcatgcgtgtaaatgctgttgattctaccatgtatgcactctccggtgctctccgggctgctgcagggcttgctgtgctggagcagacttgtgggattcacgcgcatgcggtggtggttgggcttgatgggaatgtgtgtgttgggactgccctggtggatgcttatggtaaggctggaggtgtggatgatgcagccagggtttttaaggggttgggtgctgaccggaacctgattacatggaacacggtgctgtctgctcatgctcagcagggagatgtgcaagcggtcattggactgtttaaccagatgatggagctgggttttgctcctgatgggctaacattccttgctgttctcacggcatgtagtaatgccggagcagccactgaagctgagttttggttggaaacaatgcagtcaaagtacagtgtgaagcctggccttgagcattatacttgcgtggtgggtgcaatggcacggatggggcgtctagaggatgcagagagtgttgcttgtacaatgccatgcaaaccggatgcagcagtgtggcggacgcttctaatgggctgtgtggttcaccgcaaggttgacctggcagaatccatgggacagaggcttctggagattaatcccaaggatgactcggcttatgtcctgcttgccaacgtctactcagctgctgggaaaaagaacgaggaggctgaggcatggactgcaatgagggaccatggagtcaggaaggaaggtggcaggagttggattgaggttagagggctggtacatgtgttcgttgcaaacgaaagaagacatgaacagctgctagaaatatatgacaaactgactgaattgattctagaggtagagaagttagggtacaaggagacagatgaggggtttgggcatcatagtgaaagattggcccttgcatatgggttgatcagtggtgctgcaccatcaggaaaggtgttgagaatagttaagaatttgagaatatgtgctcattgccatgaattcttcaagtatgctagcatggtgatcgacagagtaattgtagtacgggatgtcaataggtaccacacaattaagaaaggtgattgcagctgcagagactgctggtgaaacacatatatcctgagggtaaactatgatgcaagaagcattattacgattttcggatactccacgagataattggcttcataaaaaactcaccgcaggattgattggaaacttgcttggagttgttgccatagggtttacactcttctaagcaagtgaaagcttctttggtttgtacaaaacaagaaggttgaagatcggactgacccacattttcccactgtccaaggcatagtatttctgggcttgaaggttgaggcattgatacagtttatactccaacagggtgcatcaaaaaatttgaatctcatgtagtgggataaactctggacaatcaacaagaagataattgatccagtgtgcgcaaggcatacttctgtgctaaaagaccagtgtgtcatctttactcttcaaaatggtccaggccatttattcgaataatcgaattttaccaagacataagaaattttagggtgctggaaagaaggctacaacctttgccaacagaattttggctcgattttgctgatgtggtagctactaccgagggtgaggaagtaacctttatggattgggggaatgctactgttaaagagatcaaggtggagtgtggagtaattactgaactagttggagaactaaatcttgagggatctgtgaaaacaacaaaactgaagatcacatggctagcagatatagaggagctagttcccctttcattggtggaatttgattatctcatcagcaagaaaaagatggttttgtcatgccatcgtggtttgttgtccacgagcttcccatgagcgctgagtttgccgcaagatgagactggggttctcaaggctatgcaagatgtgcacgccatgatacagggaagtagccgatggtatctatccaccctgataacatatttgtttgtggattcagtcaaagaggtgctctgacattagctagtgttttgctttatccgaagaagttaggtggaggagcagtgttcagcaggtgggtgcctttcggttcatcagtgagaggatttcacctgaagcgaggaagacccatttctttggtcgcatcgatggaatggctgacaaagtagtcttgtttgaagccggtcaagctggtccaccatttttttttgcagagtacgggtgttaactgtgattcaaggcatatttcccttttatcttgagtcatggatcaagagtcgtctaaatgcctctcaagagaaggccgctgcagaaggtgcgtgtacttcatcgggctgtgctggagcgcacctgccaagctgtggtggccactgatgagttccggcgagagcgaaggcccgatggccatactgacatcttcttgcggtggaatcgagtcgtcatcaggttgacagatggactgcacgacatctgagctcccacactctttcctgtactccaggatgatgctgctgagctggttctgctgctggaagtgatcaggaagagtctgcatagcacagaagaggaaactagtacaaaaacttcgttaagagcaagacaagtttgtttggttccatacatacctagcgaagtaagcaagatggcatggcggtcgatgaaccacggcgcgatctcggcccggacctcctccggcatcttggacagcctcctcgtcaccttgttcatcatcacccacgtgctgcagggagatgacagaaaacttttgccttcatcatcatctgctgcatgcacagggcgatgtctaacgttcggtcgggaggaccaggctagcttgccttgttgcgcggacgaagacgtcgccggagttgcggccacggatgagccagtcccgccgcatgccgttcttccccgacgagcccacccaggtatcgatgtccagcacctctcccctgaaacaacgggacagaccgagataagcctgtctgtcatgaatcatgagcgcagacgatgcatgcatgcaatgggtccgtgccgtgaatttaccagatcgggtactggtcgacttggacgtgcatcctggagacaacccagatgaggttgttcctgatcatgccgtgcgtggcgccg

SEQ ID NO: 18099 - DNA, 3477 bp, Zea Mays
tcgccgccgcccatcgcaccctgccttagacgcccatgctcgccatggccggctggccgcattcctcagggcctcggcctccgcggtggccgaagcgggcggcgacccggccgttctccacgcggtcctcatcaagaccgcatcgtcctctcgcaccgcctacaacctcctcttctcccgctaccatccatccctctcgctgcacctcctctcccgcctcccgttccacttccgccccactgccgcctcactcacctcctcgctctcttccctctccgcttcctccccggcctccgtgctcccgctcctccgccgcgtcctcggcatgtcgcctgctctcctcgccgacggcccgctctcctcactcctccgctccatgccgccgtccattgcaccccacgtgcacgccctcgccttcaagctcgccctatcgtcgtccccctactccgcctcttgccttattaccctcacccgcatccgcccgctcacccgcatccgcccgctcacccgcatccgcccgccacctgttcgatgaaatccctgttgcaaaccgggaccccgtttgctactcctctacgattgttgggcttgcacagaacgggtggtacgaagaatctctcagtgtcttcgctggcatgcgtgtaaatgctgttgattctaccatgtatgcactctccggtgctctccgggctgctgcagggcttgctgtgctggagcagacttgtgggattcacgcgcatgcggtggtggttgggcttgatgggaatgtgtgtgttgggactgccctggtggatgcttatggtaaggctggaggtgtggatgatgcagccagggtttttaaggggttgggtgctgaccggaacctgattacatggaacacggtgctgtctgctcatgctcagcagggagatgtgcaagcggtcattggactgtttaaccagatgatggagctgggttttgctcctgatgggctaacattccttgctgttctcacggcatgtagtaatgccggagcagccactgaagctgagttttggttggaaacaatgcagtcaaagtacagtgtgaagcctggccttgagcattatacttgcgtggtgggtgcaatggcacggatggggcgtctagaggatgcagagagtgttgcttgtacaatgccatgcaaaccggatgcagcagtgtggcggacgcttctaatgggctgtgtggttcaccgcaaggttgacctggcagaatccatgggacagaggcttctggagattaatcccaaggatgactcggcttatgtcctgcttgccaacgtctactcagctgctgggaaaaagaacgaggaggctgaggcatggactgcaatgagggaccatggagtcaggaaggaaggtggcaggagttggattgaggttagagggctggtacatgtgttcgttgcaaacgaaagaagacatgaacagctgctagaaatatatgacaaactgactgaattgattctagaggtagagaagttagggtacaaggagacagatgaggggtttgggcatcatagtgaaagattggcccttgcatatgggttgatcagtggtgctgcaccatcaggaaaggtgttgagaatagttaagaatttgagaatatgtgctcattgccatgaattcttcaagtatgctagcatggtgatcgacagagtaattgtagtacgggatgtcaataggtaccacacaattaagaaaggtgattgcagctgcagagactgctggtgaaacacatatatcctgagggtaaactatgatgcaagaagcattattacgattttcggatactccacgagataattggcttcataaaaaactcaccgcaggattgattggaaacttgcttggagttgttgccatagggtttacactcttctaagcaagtgaaagcttctttggtttgtacaaaacaagaaggttgaagatcggactgacccacattttcccactgtccaaggcatagtatttctgggcttgaaggttgaggcattgatacagtttatactccaacagggtgcatcaaaaaatttgaatctcatgtagtgggataaactctggacaatcaacaagaagataattgatccagtgtgcgcaaggcatacttctgtgctaaaagaccagtgtgtcatctttactcttcaaaatggtccaggccatttattcgaataatcgaattttaccaagacataagaaattttagggtgctggaaagaaggctacaacctttgccaacagaattttggctcgattttgctgatgtggtagctactaccgagggtgaggaagtaacctttatggattgggggaatgctactgttaaagagatcaaggtggagtgtggagtaattactgaactagttggagaactaaatcttgagggatctgtgaaaacaacaaaactgaagatcacatggctagcagatatagaggagctagttcccctttcattggtggaatttgattatctcatcagcaagaaaaaggtgctctgacattagctagtgttttgctttatccgaagaagttaggtggaggagcagtgttcagcaggtgggtgcctttcggttcatcagtgagaggatttcacctgaagcgaggaagacccatttctttggtcgcatcgatggaatggctgacaaagtagtcttgtttgaagccggtcaagctggtccaccatttttttttgcagagtacgggtgttaactgtgattcaaggcatatttcccttttatcttgagtcatggatcaagagtcgtctaaatgcctctcaagagaaggccgctgcagaaggtgcgtgtacttcatcgggctgtgctggagcgcacctgccaagctgtggtggccactgatgagttccggcgagagcgaaggcccgatggccatactgacatcttcttgcggtggaatcgagtcgtcatcaggttgacagatggactgcacgacatctgagctcccacactctttcctgtactccaggatgatgctgctgagctggttctgctgctggaagtgatcaggaagagtctgcatagcacagaagagatggcatggcggtcgatgaaccacggcgcgatctcggcccggacctcctccggcatcttggacagcctcctcgtcaccttgttcatcatcacccacgtgctgcagggagatgacagaaaacttttgccttcatcatcatctgctgcatgcacagggcgatgtctaacgttcggtcgggaggaccaggctagcttgccttgttgcgcggacgaagacgtcgccggagttgcggccacggatgagccagtcccgccgcatgccgttcttccccgacgagcccacccagacgatgcatgcatgcaatgggtccgtgccgtgaatttaccagatcgggtactggtcgacttggacgtgcatcctggagacaacccagatgaggttgttcctgatcatgccgtgcgtggcgccg

SEQ ID NO: 18100 - DNA, 4617 bp, Zea Mays
tcgccgccgcccatcgcaccctgccttagacgcccatgctcgccatggccggctggccgcattcctcagggcctcggcctccgcggtggccgaagcgggcggcgacccggccgttctccacgcggtcctcatcaagaccgcatcgtcctctcgcaccgcctacaacctcctcttctcccgctaccatccatccctctcgctgcacctcctctcccgcctcccgttccacttccgccccactgccgcctcactcacctcctcgctctcttccctctccgcttcctccccggcctccgtgctcccgctcctccgccgcgtcctcggcatgtcgcctgctctcctcgccgacggcccgctctcctcactcctccgctccatgccgccgtccattgcaccccacgtgcacgccctcgccttcaagctcgccctatcgtcgtccccctactccgcctcttgccttattaccctcacccgcatccgcccgctcacccgcatccgcccgctcacccgcatccgcccgccacctgttcgatgaaatccctgttgcaaaccgggaccccgtttgctactcctctacgattgttgggcttgcacagaacgggtggtacgaagaatctctcagtgtcttcgctggcatgcgtgtaaatgctgttgattctaccatgtatgcactctccggtgctctccgggctgctgcagggcttgctgtgctggagcagacttgtgggattcacgcgcatgcggtggtggttgggcttgatgggaatgtgtgtgttgggactgccctggtggatgcttatggtaaggctggaggtgtggatgatgcagccagggtttttaaggggttgggtgctgaccggaacctgattacatggaacacggtgctgtctgctcatgctcagcagggagatgtgcaagcggtcattggactgtttaaccagatgatggagctgggttttgctcctgatgggctaacattccttgctgttctcacggcatgtagtaatgccggagcagccactgaagctgagttttggttggaaacaatgcagtcaaagtacagtgtgaagcctggccttgagcattatacttgcgtggtgggtgcaatggcacggatggggcgtctagaggatgcagagagtgttgcttgtacaatgccatgcaaaccggatgcagcagtgtggcggacgcttctaatgggctgtgtggttcaccgcaaggttgacctggcagaatccatgggacagaggcttctggagattaatcccaaggatgactcggcttatgtcctgcttgccaacgtctactcagctgctgggaaaaagaacgaggaggctgaggcatggactgcaatgagggaccatggagtcaggaaggaaggtggcaggagttggattgaggttagagggctggtacatgtgttcgttgcaaacgaaagaagacatgaacagctgctagaaatatatgacaaactgactgaattgattctagaggtagagaagttagggtacaaggagacagatgaggggtttgggcatcatagtgaaagattggcccttgcatatgggttgatcagtggtgctgcaccatcaggaaaggtgttgagaatagttaagaatttgagaatatgtgctcattgccatgaattcttcaagtatgctagcatggtgatcgacagagtaattgtagtacgggatgtcaataggtaccacacaattaagaaaggtgattgcagctgcagagactgctggtgaaacacatatatcctgagggtaaactatgatgcaagaagcattattacgattttcggatactccacgagataattggcttcataaaaaactcaccgcaggattgattggaaacttgcttggagttgttgccatagggtttacactcttctaagcaagtgaaagcttctttggtttgtacaaaacaagaaggttgaagatcggactgacccacattttcccactgtccaaggcatagtatttctgggcttgaaggttgaggcattgatacagtttatactccaacagggtgcatcaaaaaatttgaatctcatgtagtgggataaactctggacaatcaacaagaagataattgatccagtgtgcgcaaggcatacttctgtgctaaaagaccagtgtgtcatctttactcttcaaaatggtccaggccatttattcgaataatcgaattttaccaagacataagaaattttagggtgctggaaagaaggctacaacctttgccaacagaattttggctcgattttgctgatgtggtagctactaccgagggtgaggaagtaacctttatggattgggggaatgctactgttaaagagatcaaggtggagtgtggagtaattactgaactagttggagaactaaatcttgagggatctgtgaaaacaacaaaactgaagatcacatggctagcagatatagaggagctagttcccctttcattggtggaatttgattatctcatcagcaagaaaaaggtgctctgacattagctagtgttttgctttatccgaagaagttaggtggaggagcagtgttcagcaggtgggtgcctttcggttcatcagtgagaggatttcacctgaagcgaggaagacccatttctttggtcgcatcgatggaatggctgacaaagtagtcttgtttgaagccggtcaagctggtccaccatttttttttgcagagtacgggtgttaactgtgattcaaggcatatttcccttttatcttgagtcatggatcaagagtcgtctaaatgcctctcaagagaaggccggttagttgatccttgcatttagtcttcattatatgagacatatcaatttggcaacgaatagctgatgctggagctggacttgatggggactagcttgggagcccgcactcagctactcgtgctggaatttgtgttcattattcgattctcgtttattagttcaacagttgaactgttgattctgtgaagaaacgaaaataatttagacgtttggtgggattctcgtttattttcatccataggtggattataaacgaaaccgggcagggcctaactacgaaatagtagtggaatccaaccttttccttctttttttaatagtatagcaaagcacatttcaaagagacacgtcagggggctttatatgattttttcttccacgtagttctccctcgcacaatctcctcgtacttgtcgcctgctttcagctgcagaaggtgcgtgtacttcatcgggctgtgctggagcgcacctgccaagctgtggtggccactgatgagttccggcgagagcgaaggcccgatggccatactgacatcttcttgcggtggaatcgagtcgtcatcaggttgacagatggactgcacgacatctgagctcccacactctttcctgtactccaggatgatgctgctgagctggttctgctgctggaagtgatcaggaagagtctgcatagcacagaagaggtatgtgtgtaacatgaggtattcttgtgcttgagccatactctcttgatttctcaccagcatagctatgtactctatctgtcccacaaaggatgtcgtttgaattttttgacatcaagtttgaccagctcatctcattcaaacatttgtgaaaacatagaaaaattcagttcatagttaaagtaaattatatgataaactaaatctgaatgaaaataaatgataattatgaaattttttgaataagacgagccggcaaacttcataccgaaaaagtcaaacgacatcctctgtgggacggagagagtatgttgtaccagaagtaaaacgtcaaggcagcaatgttttggcactgtagaaaattggttttctttacctcaagcatccacctcacgtatttgacattgttgacgtggtggttcatatccagatcacttcgcttgggctacaaataagtgccacattcatatcaacttatggatcacctcaattttattccgagtaaaacaacttagctaatcttactgtgttaaattatagtcgttacatgcgagacagttatatgagcaaaaaaacaatgtgtcacttcacttgcattaatctaagactcgttttcgttggtccaactttgtcctaggaaactagtacaaaaacttcgttaagagcaagacaagtttgtttggttccatacatacctagcgaagtaagcaagatggcatggcggtcgatgaaccacggcgcgatctcggcccggacctcctccggcatcttggacagcctcctcgtcaccttgttcatcatcacccacgtgctgcagggagatgacagaaaacttttgccttcatcatcatctgctgcatgcacagggcgatgtctaacgttcggtcgggaggaccaggctagcttgccttgttgcgcggacgaagacgtcgccggagttgcggccacggatgagccagtcccgccgcatgccgttcttccccgacgagcccacccagacgatgcatgcatgcaatgggtccgtgccgtgaatttaccagatcgggtactggtcgacttggacgtgcatcctggagacaacccagatgaggttgttcctgatcatgccgtgcgtggcgccg

SEQ ID NO: 18101 - DNA, 3552 bp, Zea Mays
tcgccgccgcccatcgcaccctgccttagacgcccatgctcgccatggccggctggccgcattcctcagggcctcggcctccgcggtggccgaagcgggcggcgacccggccgttctccacgcggtcctcatcaagaccgcatcgtcctctcgcaccgcctacaacctcctcttctcccgctaccatccatccctctcgctgcacctcctctcccgcctcccgttccacttccgccccactgccgcctcactcacctcctcgctctcttccctctccgcttcctccccggcctccgtgctcccgctcctccgccgcgtcctcggcatgtcgcctgctctcctcgccgacggcccgctctcctcactcctccgctccatgccgccgtccattgcaccccacgtgcacgccctcgccttcaagctcgccctatcgtcgtccccctactccgcctcttgccttattaccctcacccgcatccgcccgctcacccgcatccgcccgctcacccgcatccgcccgccacctgttcgatgaaatccctgttgcaaaccgggaccccgtttgctactcctctacgattgttgggcttgcacagaacgggtggtacgaagaatctctcagtgtcttcgctggcatgcgtgtaaatgctgttgattctaccatgtatgcactctccggtgctctccgggctgctgcagggcttgctgtgctggagcagacttgtgggattcacgcgcatgcggtggtggttgggcttgatgggaatgtgtgtgttgggactgccctggtggatgcttatggtaaggctggaggtgtggatgatgcagccagggtttttaaggggttgggtgctgaccggaacctgattacatggaacacggtgctgtctgctcatgctcagcagggagatgtgcaagcggtcattggactgtttaaccagatgatggagctgggttttgctcctgatgggctaacattccttgctgttctcacggcatgtagtaatgccggagcagccactgaagctgagttttggttggaaacaatgcagtcaaagtacagtgtgaagcctggccttgagcattatacttgcgtggtgggtgcaatggcacggatggggcgtctagaggatgcagagagtgttgcttgtacaatgccatgcaaaccggatgcagcagtgtggcggacgcttctaatgggctgtgtggttcaccgcaaggttgacctggcagaatccatgggacagaggcttctggagattaatcccaaggatgactcggcttatgtcctgcttgccaacgtctactcagctgctgggaaaaagaacgaggaggctgaggcatggactgcaatgagggaccatggagtcaggaaggaaggtggcaggagttggattgaggttagagggctggtacatgtgttcgttgcaaacgaaagaagacatgaacagctgctagaaatatatgacaaactgactgaattgattctagaggtagagaagttagggtacaaggagacagatgaggggtttgggcatcatagtgaaagattggcccttgcatatgggttgatcagtggtgctgcaccatcaggaaaggtgttgagaatagttaagaatttgagaatatgtgctcattgccatgaattcttcaagtatgctagcatggtgatcgacagagtaattgtagtacgggatgtcaataggtaccacacaattaagaaaggtgattgcagctgcagagactgctggtgaaacacatatatcctgagggtaaactatgatgcaagaagcattattacgattttcggatactccacgagataattggcttcataaaaaactcaccgcaggattgattggaaacttgcttggagttgttgccatagggtttacactcttctaagcaagtgaaagcttctttggtttgtacaaaacaagaaggttgaagatcggactgacccacattttcccactgtccaaggcatagtatttctgggcttgaaggttgaggcattgatacagtttatactccaacagggtgcatcaaaaaatttgaatctcatgtagtgggataaactctggacaatcaacaagaagataattgatccagtgtgcgcaaggcatacttctgtgctaaaagaccagtgtgtcatctttactcttcaaaatggtccaggccatttattcgaataatcgaattttaccaagacataagaaattttagggtgctggaaagaaggctacaacctttgccaacagaattttggctcgattttgctgatgtggtagctactaccgagggtgaggaagtaacctttatggattgggggaatgctactgttaaagagatcaaggtggagtgtggagtaattactgaactagttggagaactaaatcttgagggatctgtgaaaacaacaaaactgaagatcacatggctagcagatatagaggagctagttcccctttcattggtggaatttgattatctcatcagcaagaaaaaggtgctctgacattagctagtgttttgctttatccgaagaagttaggtggaggagcagtgttcagcaggtgggtgcctttcggttcatcagtgagaggatttcacctgaagcgaggaagacccatttctttggtcgcatcgatggaatggctgacaaagtagtcttgtttgaagccggtcaagctggtccaccatttttttttgcagagtacgggtgttaactgtgattcaaggcatatttcccttttatcttgagtcatggatcaagagtcgtctaaatgcctctcaagagaaggccgctgcagaaggtgcgtgtacttcatcgggctgtgctggagcgcacctgccaagctgtggtggccactgatgagttccggcgagagcgaaggcccgatggccatactgacatcttcttgcggtggaatcgagtcgtcatcaggttgacagatggactgcacgacatctgagctcccacactctttcctgtactccaggatgatgctgctgagctggttctgctgctggaagtgatcaggaagagtctgcatagcacagaagaggaaactagtacaaaaacttcgttaagagcaagacaagtttgtttggttccatacatacctagcgaagtaagcaagatggcatggcggtcgatgaaccacggcgcgatctcggcccggacctcctccggcatcttggacagcctcctcgtcaccttgttcatcatcacccacgtgctgcagggagatgacagaaaacttttgccttcatcatcatctgctgcatgcacagggcgatgtctaacgttcggtcgggaggaccaggctagcttgccttgttgcgcggacgaagacgtcgccggagttgcggccacggatgagccagtcccgccgcatgccgttcttccccgacgagcccacccagacgatgcatgcatgcaatgggtccgtgccgtgaatttaccagatcgggtactggtcgacttggacgtgcatcctggagacaacccagatgaggttgttcctgatcatgccgtgcgtggcgccg

SEQ ID NO: 18102 - DNA, 3915 bp, Zea Mays
tcgccgccgcccatcgcaccctgccttagacgcccatgctcgccatggccggctggccgcattcctcagggcctcggcctccgcggtggccgaagcgggcggcgacccggccgttctccacgcggtcctcatcaagaccgcatcgtcctctcgcaccgcctacaacctcctcttctcccgctaccatccatccctctcgctgcacctcctctcccgcctcccgttccacttccgccccactgccgcctcactcacctcctcgctctcttccctctccgcttcctccccggcctccgtgctcccgctcctccgccgcgtcctcggcatgtcgcctgctctcctcgccgacggcccgctctcctcactcctccgctccatgccgccgtccattgcaccccacgtgcacgccctcgccttcaagctcgccctatcgtcgtccccctactccgcctcttgccttattaccctcacccgcatccgcccgctcacccgcatccgcccgctcacccgcatccgcccgccacctgttcgatgaaatccctgttgcaaaccgggaccccgtttgctactcctctacgattgttgggcttgcacagaacgggtggtacgaagaatctctcagtgtcttcgctggcatgcgtgtaaatgctgttgattctaccatgtatgcactctccggtgctctccgggctgctgcagggcttgctgtgctggagcagacttgtgggattcacgcgcatgcggtggtggttgggcttgatgggaatgtgtgtgttgggactgccctggtggatgcttatggtaaggctggaggtgtggatgatgcagccagggtttttaaggggttgggtgctgaccggaacctgattacatggaacacggtgctgtctgctcatgctcagcagggagatgtgcaagcggtcattggactgtttaaccagatgatggagctgggttttgctcctgatgggctaacattccttgctgttctcacggcatgtagtaatgccggagcagccactgaagctgagttttggttggaaacaatgcagtcaaagtacagtgtgaagcctggccttgagcattatacttgcgtggtgggtgcaatggcacggatggggcgtctagaggatgcagagagtgttgcttgtacaatgccatgcaaaccggatgcagcagtgtggcggacgcttctaatgggctgtgtggttcaccgcaaggttgacctggcagaatccatgggacagaggcttctggagattaatcccaaggatgactcggcttatgtcctgcttgccaacgtctactcagctgctgggaaaaagaacgaggaggctgaggcatggactgcaatgagggaccatggagtcaggaaggaaggtggcaggagttggattgaggttagagggctggtacatgtgttcgttgcaaacgaaagaagacatgaacagctgctagaaatatatgacaaactgactgaattgattctagaggtagagaagttagggtacaaggagacagatgaggggtttgggcatcatagtgaaagattggcccttgcatatgggttgatcagtggtgctgcaccatcaggaaaggtgttgagaatagttaagaatttgagaatatgtgctcattgccatgaattcttcaagtatgctagcatggtgatcgacagagtaattgtagtacgggatgtcaataggtaccacacaattaagaaaggtgattgcagctgcagagactgctggtgaaacacatatatcctgagggtaaactatgatgcaagaagcattattacgattttcggatactccacgagataattggcttcataaaaaactcaccgcaggattgattggaaacttgcttggagttgttgccatagggtttacactcttctaagcaagtgaaagcttctttggtttgtacaaaacaagaaggttgaagatcggactgacccacattttcccactgtccaaggcatagtatttctgggcttgaaggttgaggcattgatacagtttatactccaacagggtgcatcaaaaaatttgaatctcatgtagtgggataaactctggacaatcaacaagaagataattgatccagtgtgcgcaaggcatacttctgtgctaaaagaccagtgtgtcatctttactcttcaaaatggtccaggccatttattcgaataatcgaattttaccaagacataagaaattttagggtgctggaaagaaggctacaacctttgccaacagaattttggctcgattttgctgatgtggtagctactaccgagggtgaggaagtaacctttatggattgggggaatgctactgttaaagagatcaaggtggagtgtggagtaattactgaactagttggagaactaaatcttgagggatctgtgaaaacaacaaaactgaagatcacatggctagcagatatagaggagctagttcccctttcattggtggaatttgattatctcatcagcaagaaaaaggtgcttttactcctgtgcataggcgcttttactcctgtgcgtaggaattgcttcgagtcaacatcagctggtacaaggagagttcttttttttgctcttggcagatggttttgtcatgccatcgtggtttgttgtccacgagcttcccatgagcgctgagtttgccgcaagatgagactggggttctcaaggctatgcaagatgtgcacgccatgatacagggaagtagccgatggtatctatccaccctgataacatatttgtttgtggattcagtcaaagaggtgctctgacattagctagtgttttgctttatccgaagaagttaggtggaggagcagtgttcagcaggtgggtgcctttcggttcatcagtgagaggatttcacctgaagcgaggaagacccatttctttggtcgcatcgatggaatggctgacaaagtagtcttgtttgaagccggtcaagctggtccaccatttttttttgcagagtacgggtgttaactgtgattcaaggcatatttcccttttatcttgagtcatggatcaagagtcgtctaaatgcctctcaagagaaggccgctgcagaaggtgcgtgtacttcatcgggctgtgctggagcgcacctgccaagctgtggtggccactgatgagttccggcgagagcgaaggcccgatggccatactgacatcttcttgcggtggaatcgagtcgtcatcaggttgacagatggactgcacgacatctgagctcccacactctttcctgtactccaggatgatgctgctgagctggttctgctgctggaagtgatcaggaagagtctgcatagcacagaagaggaaactagtacaaaaacttcgttaagagcaagacaagtttgtttggttccatacatacctagcgaagtaagcaagatggcatggcggtcgatgaaccacggcgcgatctcggcccggacctcctccggcatcttggacagcctcctcgtcaccttgttcatcatcacccacgtgctgcagggagatgacagaaaacttttgccttcatcatcatctgctgcatgcacagggcgatgtctaacgttcggtcgggaggaccaggctagcttgccttgttgcgcggacgaagacgtcgccggagttgcggccacggatgagccagtcccgccgcatgccgttcttccccgacgagcccacccaggtatcgatgtccagcacctctcccctgaaacaacgggacagaccgagataagcctgtctgtcatgaatcatgagcgcagacgatgcatgcatgcaatgggtccgtgccgtgaatttaccagatcgggtactggtcgacttggacgtgcatcctggagacaacccagatgaggttgttcctgatcatgccgtgcgtggcgccg

SEQ ID NO: 18103 - DNA, 4059 bp, Zea Mays
tcgccgccgcccatcgcaccctgccttagacgcccatgctcgccatggccggctggccgcattcctcagggcctcggcctccgcggtggccgaagcgggcggcgacccggccgttctccacgcggtcctcatcaagaccgcatcgtcctctcgcaccgcctacaacctcctcttctcccgctaccatccatccctctcgctgcacctcctctcccgcctcccgttccacttccgccccactgccgcctcactcacctcctcgctctcttccctctccgcttcctccccggcctccgtgctcccgctcctccgccgcgtcctcggcatgtcgcctgctctcctcgccgacggcccgctctcctcactcctccgctccatgccgccgtccattgcaccccacgtgcacgccctcgccttcaagctcgccctatcgtcgtccccctactccgcctcttgccttattaccctcacccgcatccgcccgctcacccgcatccgcccgctcacccgcatccgcccgccacctgttcgatgaaatccctgttgcaaaccgggaccccgtttgctactcctctacgattgttgggcttgcacagaacgggtggtacgaagaatctctcagtgtcttcgctggcatgcgtgtaaatgctgttgattctaccatgtatgcactctccggtgctctccgggctgctgcagggcttgctgtgctggagcagacttgtgggattcacgcgcatgcggtggtggttgggcttgatgggaatgtgtgtgttgggactgccctggtggatgcttatggtaaggctggaggtgtggatgatgcagccagggtttttaaggggttgggtgctgaccggaacctgattacatggaacacggtgctgtctgctcatgctcagcagggagatgtgcaagcggtcattggactgtttaaccagatgatggagctgggttttgctcctgatgggctaacattccttgctgttctcacggcatgtagtaatgccggagcagccactgaagctgagttttggttggaaacaatgcagtcaaagtacagtgtgaagcctggccttgagcattatacttgcgtggtgggtgcaatggcacggatggggcgtctagaggatgcagagagtgttgcttgtacaatgccatgcaaaccggatgcagcagtgtggcggacgcttctaatgggctgtgtggttcaccgcaaggttgacctggcagaatccatgggacagaggcttctggagattaatcccaaggatgactcggcttatgtcctgcttgccaacgtctactcagctgctgggaaaaagaacgaggaggctgaggcatggactgcaatgagggaccatggagtcaggaaggaaggtggcaggagttggattgaggttagagggctggtacatgtgttcgttgcaaacgaaagaagacatgaacagctgctagaaatatatgacaaactgactgaattgattctagaggtagagaagttagggtacaaggagacagatgaggggtttgggcatcatagtgaaagattggcccttgcatatgggttgatcagtggtgctgcaccatcaggaaaggtgttgagaatagttaagaatttgagaatatgtgctcattgccatgaattcttcaagtatgctagcatggtgatcgacagagtaattgtagtacgggatgtcaataggtaccacacaattaagaaaggtgattgcagctgcagagactgctggtgaaacacatatatcctgagggtaaactatgatgcaagaagcattattacgattttcggatactccacgagataattggcttcataaaaaactcaccgcaggattgattggaaacttgcttggagttgttgccatagggtttacactcttctaagcaagtgaaagcttctttggtttgtacaaaacaagaaggttgaagatcggactgacccacattttcccactgtccaaggcatagtatttctgggcttgaaggttgaggcattgatacagtttatactccaacagggtgcatcaaaaaatttgaatctcatgtagtgggataaactctggacaatcaacaagaagataattgatccagtgtgcgcaaggcatacttctgtgctaaaagaccagtgtgtcatctttactcttcaaaatggtccaggccatttattcgaataatcgaattttaccaagacataagaaattttagggtgctggaaagaaggctacaacctttgccaacagaattttggctcgattttgctgatgtggtagctactaccgagggtgaggaagtaacctttatggattgggggaatgctactgttaaagagatcaaggtggagtgtggagtaattactgaactagttggagaactaaatcttgagggatctgtgaaaacaacaaaactgaagatcacatggctagcagatatagaggagctagttcccctttcattggtggaatttgattatctcatcagcaagaaaaaggtgctctgacattagctagtgttttgctttatccgaagaagttaggtggaggagcagtgttcagcaggtgggtgcctttcggttcatcagtgagaggatttcacctgaagcgaggaagacccatttctttggtcgcatcgatggaatggctgacaaagtagtcttgtttgaagccggtcaagctggtccaccatttttttttgcagagtacgggtgttaactgtgattcaaggcatatttcccttttatcttgagtcatggatcaagagtcgtctaaatgcctctcaagagaaggccggttagttgatccttgcatttagtcttcattatatgagacatatcaatttggcaacgaatagctgatgctggagctggacttgatggggactagcttgggagcccgcactcagctactcgtgctggaatttgtgttcattattcgattctcgtttattagttcaacagttgaactgttgattctgtgaagaaacgaaaataatttagacgtttggtgggattctcgtttattttcatccataggtggattataaacgaaaccgggcagggcctaactacgaaatagtagtggaatccaaccttttccttctttttttaatagtatagcaaagcacatttcaaagagacacgtcagggggctttatatgattttttcttccacgtagttctccctcgcacaatctcctcgtacttgtcgcctgctttcagctgcagaaggtgcgtgtacttcatcgggctgtgctggagcgcacctgccaagctgtggtggccactgatgagttccggcgagagcgaaggcccgatggccatactgacatcttcttgcggtggaatcgagtcgtcatcaggttgacagatggactgcacgacatctgagctcccacactctttcctgtactccaggatgatgctgctgagctggttctgctgctggaagtgatcaggaagagtctgcatagcacagaagaggaaactagtacaaaaacttcgttaagagcaagacaagtttgtttggttccatacatacctagcgaagtaagcaagatggcatggcggtcgatgaaccacggcgcgatctcggcccggacctcctccggcatcttggacagcctcctcgtcaccttgttcatcatcacccacgtgctgcagggagatgacagaaaacttttgccttcatcatcatctgctgcatgcacagggcgatgtctaacgttcggtcgggaggaccaggctagcttgccttgttgcgcggacgaagacgtcgccggagttgcggccacggatgagccagtcccgccgcatgccgttcttccccgacgagcccacccaggtatcgatgtccagcacctctcccctgaaacaacgggacagaccgagataagcctgtctgtcatgaatcatgagcgcagacgatgcatgcatgcaatgggtccgtgccgtgaatttaccagatcgggtactggtcgacttggacgtgcatcctggagacaacccagatgaggttgttcctgatcatgccgtgcgtggcgccg

SEQ ID NO: 18104 - DNA, 3770 bp, Zea Mays
ctcgccgccgcccatcgcaccctgccttagacgcccatgctcgccatggccggctggccgcattcctcagggcctcggcctccgcggtggccgaagcgggcggcgacccggccgttctccacgcggtcctcatcaagaccgcatcgtcctctcgcaccgcctacaacctcctcttctcccgctaccatccatccctctcgctgcacctcctctcccgcctcccgttccacttccgccccactgccgcctcactcacctcctcgctctcttccctctccgcttcctccccggcctccgtgctcccgctcctccgccgcgtcctcggcatgtcgcctgctctcctcgccgacggcccgctctcctcactcctccgctccatgccgccgtccattgcaccccacgtgcacgccctcgccttcaagctcgccctatcgtcgtccccctactccgcctcttgccttattaccctcacccgcatccgcccgctcacccgcatccgcccgctcacccgcatccgcccgccacctgttcgatgaaatccctgttgcaaaccgggaccccgtttgctactcctctacgattgttgggcttgcacagaacgggtggtacgaagaatctctcagtgtcttcgctggcatgcgtgtaaatgctgttgattctaccatgtatgcactctccggtgctctccgggctgctgcagggcttgctgtgctggagcagacttgtgggattcacgcgcatgcggtggtggttgggcttgatgggaatgtgtgtgttgggactgccctggtggatgcttatggtaaggctggaggtgtggatgatgcagccagggtttttaaggggttgggtgctgaccggaacctgattacatggaacacggtgctgtctgctcatgctcagcagggagatgtgcaagcggtcattggactgtttaaccagatgatggagctgggttttgctcctgatgggctaacattccttgctgttctcacggcatgtagtaatgccggagcagccactgaagctgagttttggttggaaacaatgcagtcaaagtacagtgtgaagcctggccttgagcattatacttgcgtggtgggtgcaatggcacggatggggcgtctagaggatgcagagagtgttgcttgtacaatgccatgcaaaccggatgcagcagtgtggcggacgcttctaatgggctgtgtggttcaccgcaaggttgacctggcagaatccatgggacagaggcttctggagattaatcccaaggatgactcggcttatgtcctgcttgccaacgtctactcagctgctgggaaaaagaacgaggaggctgaggcatggactgcaatgagggaccatggagtcaggaaggaaggtggcaggagttggattgaggttagagggctggtacatgtgttcgttgcaaacgaaagaagacatgaacagctgctagaaatatatgacaaactgactgaattgattctagaggtagagaagttagggtacaaggagacagatgaggggtttgggcatcatagtgaaagattggcccttgcatatgggttgatcagtggtgctgcaccatcaggaaaggtgttgagaatagttaagaatttgagaatatgtgctcattgccatgaattcttcaagtatgctagcatggtgatcgacagagtaattgtagtacgggatgtcaataggtaccacacaattaagaaaggtgattgcagctgcagagactgctggtgaaacacatatatcctgagggtaaactatgatgcaagaagcattattacgattttcggatactccacgagataattggcttcataaaaaactcaccgcaggattgattggaaacttgcttggagttgttgccatagggtttacactcttctaagcaagtgaaagcttctttggtttgtacaaaacaagaaggttgaagatcggactgacccacattttcccactgtccaaggcatagtatttctgggcttgaaggttgaggcattgatacagtttatactccaacagggtgcatcaaaaaatttgaatctcatgtagtgggataaactctggacaatcaacaagaagataattgatccagtgtgcgcaaggcatacttctgtgctaaaagaccagtgtgtcatctttactcttcaaaatggtccaggccatttattcgaataatcgaattttaccaagacataagaaattttagggtgctggaaagaaggctacaacctttgccaacagaattttggctcgattttgctgatgtggtagctactaccgagggtgaggaagtaacctttatggattgggggaatgctactgttaaagagatcaaggtggagtgtggagtaattactgaactagttggagaactaaatcttgagggatctgtgaaaacaacaaaactgaagatcacatggctagcagatatagaggagctagttcccctttcattggtggaatttgattatctcatcagcaagaaaaaggaattgcttcgagtcaacatcagctggtacaaggagagttcttttttttgctcttggcagatggttttgtcatgccatcgtggtttgttgtccacgagcttcccatgagcgctgagtttgccgcaagatgagactggggttctcaaggctatgcaagatgtgcacgccatgatacagggaagtagccgatggtatctatccaccctgataacatatttgtttgtggattcagtcaaagaggtgctctgacattagctagtgttttgctttatccgaagaagttaggtggaggagcagtgttcagcaggtgggtgcctttcggttcatcagtgagaggatttcacctgaagcgaggaagacccatttctttggtcgcatcgatggaatggctgacaaagtagtcttgtttgaagccggtcaagctggtccaccatttttttttgcagagtacgggtgttaactgtgattcaaggcatatttcccttttatcttgagtcatggatcaagagtcgtctaaatgcctctcaagagaaggccgctgcagaaggtgcgtgtacttcatcgggctgtgctggagcgcacctgccaagctgtggtggccactgatgagttccggcgagagcgaaggcccgatggccatactgacatcttcttgcggtggaatcgagtcgtcatcaggttgacagatggactgcacgacatctgagctcccacactctttcctgtactccaggatgatgctgctgagctggttctgctgctggaagtgatcaggaagagtctgcatagcacagaagaggatgtcgtttgaattttttgacatcaagtttgaccagctcatctcattcaaacatttgtgaaaacatagaaaaattcagttcatagttaaagtaaattatatgataaactaaatctgaatgaaaataaatgataattatgaaattttttgaataagacgagccggcaaacttcataccgaaaaagtcaaacgacatcctctgtgggacggagagagtatgttgtaccagaagtaaaacgtcaaggcagcaatgttttggcactgtagaaaattggttttctttacctcaagcatccacctcacgtatttgacattgttgacgtggtggttcatatccagatcacttcgcttgggctacaaataagtgccacattcatatcaacttatggatcacctcaattttattccgagtaaaacaacttagctaatcttactgtgttaaattatagtcgttacatgcg

SEQ ID NO: 18105 - DNA, 3550 bp, Zea Mays
tcgccgccgcccatcgcaccctgccttagacgcccatgctcgccatggccggctggccgcattcctcagggcctcggcctccgcggtggccgaagcgggcggcgacccggccgttctccacgcggtcctcatcaagaccgcatcgtcctctcgcaccgcctacaacctcctcttctcccgctaccatccatccctctcgctgcacctcctctcccgcctcccgttccacttccgccccactgccgcctcactcacctcctcgctctcttccctctccgcttcctccccggcctccgtgctcccgctcctccgccgcgtcctcggcatgtcgcctgctctcctcgccgacggcccgctctcctcactcctccgctccatgccgccgtccattgcaccccacgtgcacgccctcgccttcaagctcgccctatcgtcgtccccctactccgcctcttgccttattaccctcacccgcatccgcccgctcacccgcatccgcccgctcacccgcatccgcccgccacctgttcgatgaaatccctgttgcaaaccgggaccccgtttgctactcctctacgattgttgggcttgcacagaacgggtggtacgaagaatctctcagtgtcttcgctggcatgcgtgtaaatgctgttgattctaccatgtatgcactctccggtgctctccgggctgctgcagggcttgctgtgctggagcagacttgtgggattcacgcgcatgcggtggtggttgggcttgatgggaatgtgtgtgttgggactgccctggtggatgcttatggtaaggctggaggtgtggatgatgcagccagggtttttaaggggttgggtgctgaccggaacctgattacatggaacacggtgctgtctgctcatgctcagcagggagatgtgcaagcggtcattggactgtttaaccagatgatggagctgggttttgctcctgatgggctaacattccttgctgttctcacggcatgtagtaatgccggagcagccactgaagctgagttttggttggaaacaatgcagtcaaagtacagtgtgaagcctggccttgagcattatacttgcgtggtgggtgcaatggcacggatggggcgtctagaggatgcagagagtgttgcttgtacaatgccatgcaaaccggatgcagcagtgtggcggacgcttctaatgggctgtgtggttcaccgcaaggttgacctggcagaatccatgggacagaggcttctggagattaatcccaaggatgactcggcttatgtcctgcttgccaacgtctactcagctgctgggaaaaagaacgaggaggctgaggcatggactgcaatgagggaccatggagtcaggaaggaaggtggcaggagttggattgaggttagagggctggtacatgtgttcgttgcaaacgaaagaagacatgaacagctgctagaaatatatgacaaactgactgaattgattctagaggtagagaagttagggtacaaggagacagatgaggggtttgggcatcatagtgaaagattggcccttgcatatgggttgatcagtggtgctgcaccatcaggaaaggtgttgagaatagttaagaatttgagaatatgtgctcattgccatgaattcttcaagtatgctagcatggtgatcgacagagtaattgtagtacgggatgtcaataggtaccacacaattaagaaaggtgattgcagctgcagagactgctggtgaaacacatatatcctgagggtaaactatgatgcaagaagcattattacgattttcggatactccacgagataattggcttcataaaaaactcaccgcaggattgattggaaacttgcttggagttgttgccatagggtttacactcttctaagcaagtgaaagcttctttggtttgtacaaaacaagaaggttgaagatcggactgacccacattttcccactgtccaaggcatagtatttctgggcttgaaggttgaggcattgatacagtttatactccaacagggtgcatcaaaaaatttgaatctcatgtagtgggataaactctggacaatcaacaagaagataattgatccagtgtgcgcaaggcatacttctgtgctaaaagaccagtgtgtcatctttactcttcaaaatggtccaggccatttattcgaataatcgaattttaccaagacataagaaattttagggtgctggaaagaaggctacaacctttgccaacagaattttggctcgattttgctgatgtggtagctactaccgagggtgaggaagtaacctttatggattgggggaatgctactgttaaagagatcaaggtggagtgtggagtaattactgaactagttggagaactaaatcttgagggatctgtgaaaacaacaaaactgaagatcacatggctagcagatatagaggagctagttcccctttcattggtggaatttgattatctcatcagcaagaaaaagatggttttgtcatgccatcgtggtttgttgtccacgagcttcccatgagcgctgagtttgccgcaagatgagactggggttctcaaggctatgcaagatgtgcacgccatgatacagggaagtagccgatggtgctctgacattagctagtgttttgctttatccgaagaagttaggtggaggagcagtgttcagcaggtgggtgcctttcggttcatcagtgagaggatttcacctgaagcgaggaagacccatttctttggtcgcatcgatggaatggctgacaaagtagtcttgtttgaagccggtcaagctggtccaccatttttttttgcagagtacgggtgttaactgtgattcaaggcatatttcccttttatcttgagtcatggatcaagagtcgtctaaatgcctctcaagagaaggccggttagttgatccttgcatttagtcttcattatatgagacatatcaatttggcaacgaatagctgatgctggagctggacttgatggggactagcttgggagcccgcactcagctactcgtgctggaatttgtgttcattattcgattctcgtttattagttcaacagttgaactgttgattctgtgaagaaacgaaaataatttagacgtttggtgggattctcgtttattttcatccataggtggattataaacgaaaccgggcagggcctaactacgaaatagtagtggaatccaaccttttccttctttttttaatagtatagcaaagcacatttcaaagagacacgtcagggggctttatatgattttttcttccacgtagttctccctcgcacaatctcctcgtacttgtcgcctgctttcagctgcagaaggtgcgtgtacttcatcgggctgtgctggagcgcacctgccaagctgtggtggccactgatgagttccggcgagagcgaaggcccgatggccatactgacatcttcttgcggtggaatcgagtcgtcatcaggttgacagatggactgcacgacatctgagctcccacactctttc

SEQ ID NO: 18106 - DNA, 2993 bp, Zea Mays
tcgccgccgcccatcgcaccctgccttagacgcccatgctcgccatggccggctggccgcattcctcagggcctcggcctccgcggtggccgaagcgggcggcgacccggccgttctccacgcggtcctcatcaagaccgcatcgtcctctcgcaccgcctacaacctcctcttctcccgctaccatccatccctctcgctgcacctcctctcccgcctcccgttccacttccgccccactgccgcctcactcacctcctcgctctcttccctctccgcttcctccccggcctccgtgctcccgctcctccgccgcgtcctcggcatgtcgcctgctctcctcgccgacggcccgctctcctcactcctccgctccatgccgccgtccattgcaccccacgtgcacgccctcgccttcaagctcgccctatcgtcgtccccctactccgcctcttgccttattaccctcacccgcatccgcccgctcacccgcatccgcccgctcacccgcatccgcccgccacctgttcgatgaaatccctgttgcaaaccgggaccccgtttgctactcctctacgattgttgggcttgcacagaacgggtggtacgaagaatctctcagtgtcttcgctggcatgcgtgtaaatgctgttgattctaccatgtatgcactctccggtgctctccgggctgctgcagggcttgctgtgctggagcagacttgtgggattcacgcgcatgcggtggtggttgggcttgatgggaatgtgtgtgttgggactgccctggtggatgcttatggtaaggctggaggtgtggatgatgcagccagggtttttaaggggttgggtgctgaccggaacctgattacatggaacacggtgctgtctgctcatgctcagcagggagatgtgcaagcggtcattggactgtttaaccagatgatggagctgggttttgctcctgatgggctaacattccttgctgttctcacggcatgtagtaatgccggagcagccactgaagctgagttttggttggaaacaatgcagtcaaagtacagtgtgaagcctggccttgagcattatacttgcgtggtgggtgcaatggcacggatggggcgtctagaggatgcagagagtgttgcttgtacaatgccatgcaaaccggatgcagcagtgtggcggacgcttctaatgggctgtgtggttcaccgcaaggttgacctggcagaatccatgggacagaggcttctggagattaatcccaaggatgactcggcttatgtcctgcttgccaacgtctactcagctgctgggaaaaagaacgaggaggctgaggcatggactgcaatgagggaccatggagtcaggaaggaaggtggcaggagttggattgaggttagagggctggtacatgtgttcgttgcaaacgaaagaagacatgaacagctgctagaaatatatgacaaactgactgaattgattctagaggtagagaagttagggtacaaggagacagatgaggggtttgggcatcatagtgaaagattggcccttgcatatgggttgatcagtggtgctgcaccatcaggaaaggtgttgagaatagttaagaatttgagaatatgtgctcattgccatgaattcttcaagtatgctagcatggtgatcgacagagtaattgtagtacgggatgtcaataggtaccacacaattaagaaaggtgattgcagctgcagagactgctggtgaaacacatatatcctgagggtaaactatgatgcaagaagcattattacgattttcggatactccacgagataattggcttcataaaaaactcaccgcaggattgattggaaacttgcttggagttgttgccatagggtttacactcttctaagcaagtgaaagcttctttggtttgtacaaaacaagaaggttgaagatcggactgacccacattttcccactgtccaaggcatagtatttctgggcttgaaggttgaggcattgatacagtttatactccaacagggtgcatcaaaaaatttgaatctcatgtagtgggataaactctggacaatcaacaagaagataattgatccagtgtgcgcaaggcatacttctgtgctaaaagaccagtgtgtcatctttactcttcaaaatggtccaggccatttattcgaataatcgaattttaccaagacataagaaattttagggtgctggaaagaaggctacaacctttgccaacagaattttggctcgattttgctgatgtggtagctactaccgagggtgaggaagtaacctttatggattgggggaatgctactgttaaagagatcaaggtggagtgtggagtaattactgaactagttggagaactaaatcttgagggatctgtgaaaacaacaaaactgaagatcacatggctagcagatatagaggagctagttcccctttcattggtggaatttgattatctcatcagcaagaaaaaggtgtgctctgacattagctagtgttttgctttatccgaagaagttaggtggaggagcagtgttcagcaggtgggtgcctttcggttcatcagtgagaggatttcacctgaagcgaggaagacccatttctttggtcgcatcgatggaatggctgacaaagtagtcttgtttgaagccggtcaagctggtccaccatttttttttgcagagtacgggtgttaactgtgattcaaggcatatttcccttttatcttgagtcatggatcaagagtcgtctaaatgcctctcaagagaaggccgctgcagaaggtgcgtgtacttcatcgggctgtgctggagcgcacctgccaagctgtggtggccactgatgagttccggcgagagcgaaggcccgatggccatactgacatcttcttgcggtggaatcgagtcgtcatcaggttgacagatggactgcacgacatctgagctcccacactctttc

SEQ ID NO: 18107 - DNA, 2961 bp, Zea Mays
ctcatgccgcctcgccgccgcccatcgcaccctgccttagacgcccatgctcgccatggccggctggccgcattcctcagggcctcggcctccgcggtggccgaagcgggcggcgacccggccgttctccacgcggtcctcatcaagaccgcatcgtcctctcgcaccgcctacaacctcctcttctcccgctaccatccatccctctcgctgcacctcctctcccgcctcccgttccacttccgccccactgccgcctcactcacctcctcgctctcttccctctccgcttcctccccggcctccgtgctcccgctcctccgccgcgtcctcggcatgtcgcctgctctcctcgccgacggcccgctctcctcactcctccgctccatgccgccgtccattgcaccccacgtgcacgccctcgccttcaagctcgccctatcgtcgtccccctactccgcctcttgccttattaccctcacccgcatccgcccgctcacccgcatccgcccgctcacccgcatccgcccgccacctgttcgatgaaatccctgttgcaaaccgggaccccgtttgctactcctctacgattgttgggcttgcacagaacgggtggtacgaagaatctctcagtgtcttcgctggcatgcgtgtaaatgctgttgattctaccatgtatgcactctccggtgctctccgggctgctgcagggcttgctgtgctggagcagacttgtgggattcacgcgcatgcggtggtggttgggcttgatgggaatgtgtgtgttgggactgccctggtggatgcttatggtaaggctggaggtgtggatgatgcagccagggtttttaaggggttgggtgctgaccggaacctgattacatggaacacggtgctgtctgctcatgctcagcagggagatgtgcaagcggtcattggactgtttaaccagatgatggagctgggttttgctcctgatgggctaacattccttgctgttctcacggcatgtagtaatgccggagcagccactgaagctgagttttggttggaaacaatgcagtcaaagtacagtgtgaagcctggccttgagcattatacttgcgtggtgggtgcaatggcacggatggggcgtctagaggatgcagagagtgttgcttgtacaatgccatgcaaaccggatgcagcagtgtggcggacgcttctaatgggctgtgtggttcaccgcaaggttgacctggcagaatccatgggacagaggcttctggagattaatcccaaggatgactcggcttatgtcctgcttgccaacgtctactcagctgctgggaaaaagaacgaggaggctgaggcatggactgcaatgagggaccatggagtcaggaaggaaggtggcaggagttggattgaggttagagggctggtacatgtgttcgttgcaaacgaaagaagacatgaacagctgctagaaatatatgacaaactgactgaattgattctagaggtagagaagttagggtacaaggagacagatgaggggtttgggcatcatagtgaaagattggcccttgcatatgggttgatcagtggtgctgcaccatcaggaaaggtgttgagaatagttaagaatttgagaatatgtgctcattgccatgaattcttcaagtatgctagcatggtgatcgacagagtaattgtagtacgggatgtcaataggtaccacacaattaagaaaggtgattgcagctgcagagactgctggtgaaacacatatatcctgagggtaaactatgatgcaagaagcattattacgattttcggatactccacgagataattggcttcataaaaaactcaccgcaggattgattggaaacttgcttggagttgttgccatagggtttacactcttctaagcaagtgaaagcttctttggtttgtacaaaacaagaaggttgaagatcggactgacccacattttcccactgtccaaggcatagtatttctgggcttgaaggttgaggcattgatacagtttatactccaacagggtgcatcaaaaaatttgaatctcatgtagtgggataaactctggacaatcaacaagaagataattgatccagtgtgcgcaaggcatacttctgtgctaaaagaccagtgtgtcatctttactcttcaaaatggtccaggccatttattcgaataatcgaattttaccaagacataagaaattttagggtgctggaaagaaggctacaacctttgccaacagaattttggctcgattttgctgatgtggtagctactaccgagggtgaggaagtaacctttatggattgggggaatgctactgttaaagagatcaaggtggagtgtggagtaattactgaactagttggagaactaaatcttgagggatctgtgaaaacaacaaaactgaagatcacatggctagcagatatagaggagctagttcccctttcattggtggaatttgattatctcatcagcaagaaaaagttaggtggaggagcagtgttcagcaggtgggtgcctttcggttcatcagtgagaggatttcacctgaagcgaggaagacccatttctttggtcgcatcgatggaatggctgacaaagtagtcttgtttgaagccggtcaagctggtccaccatttttttttgcagagtacgggtgttaactgtgattcaaggcatatttcccttttatcttgagtcatggatcaagagtcgtctaaatgcctctcaagagaaggccgctgcagaaggtgcgtgtacttcatcgggctgtgctggagcgcacctgccaagctgtggtggccactgatgagttccggcgagagcgaaggcccgatggccatactgacatcttcttgcggtggaatcgagtcgtcatcaggttgacagatggactgcacgacatctgagctcccacactctttc

SEQ ID NO: 18108 - DNA, 363 bp, Zea Mays
atggcgacgaggaggagcagggcgttggagaggacggaggggaagctgtaccccgcgcgctcgaaaacgaaccagaccgtggtggcgcccaccacagctgccgccgaggcgttcctccgtcgccacagcagcaagtcggcaactggaccgggtccccgcgcgaggaagggtatgagcagtcagggatcggcgggattcagcgggagagcagttttaacaatacggtgttgcaggagtgaggtggagagagagagagagacagagaggggggggcatgggcgcgcgtacctgcaccgccgccgaggagggcgtggagagaccgcggtccggtggccatgcgagatcgcctggggactggggtag

SEQ ID NO: 18109 - DNA, 2929 bp, Zea Mays
gccgaacccctggacaccccacaccaaaagaaaccaactaaaatcccaaaagagaggaaaggcacaaacagacggtacaaagaaagggacgctcgtctcgtctcgtcacgtgccgccgccatggctgctctgggccgtggcctgcccctcctcctcctgctcctcctcctcgccgtatcgggggccgccaacgccgcggcggcgcccggcggcatgtccatcatcacctacaacgaggagcacggcgcgcgggggctggagcggacggagccggaggtgcgggccatgtacgacctctggctcgcggagcacggccgcgcctacaacgcgctgggcgagggcgagggcgagcgcgaccgccgcttcctcgtcttctgggacaacctccgcttcgtcgacgcgcacaacgagcgcgccggcgcccgcggcttccgcctcgggatgaaccagttcgccgacctcaccaacgacgagttccgcgccgcgtacctcggcgccatggtccccgccgcccgccggggagccgtcgtgggggagaggtaccgccacgacggcgccgccgaggagctgccggagagcgtcgactggagggagaagggcgccgtcgcgcccgtcaagaaccaggggcaatgcggaagttgctgggctttctctgcagtaagctcagtggaaagcgttaaccagatcgtcaccggtgagatggtgacactgtctgaacaggagctcgtagagtgctcgactgacggagggaacagcggctgcaacggcgggctcatggacgccgctttcgatttcatcataaagaacgggggcatcgataccgaagatgactacccttacagagccgtggacgggaagtgcgacatgaacaggaaaaatgccagggttgtgagcatcgatggctttgaagacgtgcctgagaacgacgagaagtcgctgcagaaggcggttgctcaccagccagttagcgttgccattgaggccggaggccgggagttccagctctacaaatcgggtgtcttcagcggaagctgcaccacgaaccttgaccatggtgtcgtcgcggtcggctacggcgccgagaacgggaaggactactggatcgtccgcaactcgtggggcccgaagtggggcgaggctggttacatccgtatggagaggaacgtcaacgccagcactgggaagtgcgggatcgcgatgatggcgtcctacccgacgaagaagggcgcgaaccctcccaggccgtctccaaccccgccaacaccgccggctgcccctgacaatgtctgcgacgagaacttctcgtgctccgcgggcagcacctgctgctgcgcgtttggcttcaggaacgtctgctcgatctgggactgcccattgctttttctgactcatgggcgttcagatcaccaagagcaagatttcatagattatctatatgtttgtataagtactattaccgtcccatgaatccgctgtaaataactagtacctctgattaaaaggataatattatttgtcacccagtgtcatgaatgcagcagtggaacttattcctcccccccaaaaaggctaccaaatcaccatggccatggatcagttcccacccccatggccttggtgaggatggccgtgcgccgtgtacccaggcaactcgcaggggatgtgcgggatgaaggggcagtgcttgctggggtcgacgtagaaggcggcgcactcgagcgggggccgctggtcggggaaccccagaatgcagttgcgccgcacgtccaggacacggctgcgcaccagctccatgcagtggtgccccaccgagtggaagaagttgtccgacagcgacaggttctgcagcttccccgtccgcgccagcaggcacaccacgtcgggcacctgcccgtacagctggttccccgccaggttgagctcctccacgtcgcggaggcagccgaacgacagcggcacgggccccgtgatctcgttcccgccggcgtcgaacacggccagcccctccaccagcccgatctcgtaggggaggcacccggacaggcggttgttgaggaacagcacctccgacagcgtggccgacgcgttgtagatggagcgcgggatggggcccgtgaactggttgttggccaccaccaggtactgcgcgcccgtgctgccgagcgtgtccgggatccgcccgccaaagccgttgttgttgaggaagagcgcctccaccgtgagcgcgaacaccggcgctggcacctcccccgcgtaccggttgaagcggaggtccaggaacagcagcccgcccagcggcaccacggcctccgggaacgcgcccgagaagttgttgttggacaggtccagctcgtagaagtagcgcagctgggtcaggtccggcacgtcgccggagaagttgttggagttggcgtggaacagcgccaggtccgggaacgcgtcgatgaacccggccagcgacggcgcgcacagcccgaacccgttgaagtcgatggacgccaccgtcagcacgcccggcgcgtccggcgggtagtcgcagtagaatcccctgtagtacgtggtggtgctgccgttgttgaagaagctgtcgcagagctccgtgcccgtccacgtcgccgtcacgcccagcgggtcgcacgtgatcgtctgcttgaacgcctggatcaccgggtacagcgccctcagcttgtcgttcctgaacctccacggcggcggcggcgacggctcgcacccgcaaccctccagcgccgccgtgctgttcgtcccgcggtggtcccaggacggcgacggcgctggcgcgacgaactcgacgtggctcgagccgcagagcgcgccgtgcgccgcggcgagcaccagcacagctactgccgccgctgccgcccccgccattattcgtctcgggctcggagcagtagtgccagtggagatt

SEQ ID NO: 18110 - DNA, 691 bp, Zea Mays
gcgaaactgagttcccaaactcttaccccaagctatttgggatgaagtttgttgctgcctacctgcttgctgtcctcgctgggaactccagcccctctgccgaggacttgacagccattctggagtcagggagaagtttgcttcagtcccatgtggcggtggcggtgtggctgttgtggcagctgcccctgctgctggcggcgctcctgcagctgaggcgaagaaagaagagaaggtggaggagaaggaagaaagtgatgacgacatgggcttcagcctcttcgactaagcctgtgcaatagtcaagagtattgtttttgagtcgcggaagcagagggaagaaaaatcgtagtcatgtttggactttaactttgttttatgttggaaagtacttgaaagacttttcctgtggtaattctaggcgtaggttgctgtgctggttggggtttactggtgaaccagagtttttctatctcccactatgaatttgttacctcaagttacctggatgttcactattttgttggtacatgtcgattttgcctcgtgcatccgtgtacactgagtgagtatgcgcatgtgctacctgctgtcggtgttcgtgttcttggcatggatgtttgcatcgatgaaagtaaagagctgttgggagttgatgattcagatggcgttggctgccggctgaaatttt

SEQ ID NO: 18111 - DNA, 810 bp, Zea Mays
ttcccatcctcatctcttacctgcctgctgcgcgaaactgagttcccaaactcttaccccaagctatttgggatgaagtttgttgctgcctacctgcttgctgtcctcgctgggaactccagcccctctgccgaggacttgacagccattctggagtcagttggctgtgaagttgacaatgaaaagatggaactccttctgtcccaactgagcggtaaggacattaccgagctcattgctgctggcagggagaagtttgcttcagtcccatgtggcggtggcggtgtggctgttgtggcagctgcccctgctgctggcggcgctcctgcagctgaggcgaagaaagaagagaaggtggaggagaaggaagaaagtgatgacgacatgggcttcagcctcttcgactaagcctgtgcaatagtcaagagtattgtttttgagtcgcggaagcagagggaagaaaaatcgtagtcatgtttggactttaactttgttttatgttggaaagtacttgaaagacttttcctgtggtaattctaggcgtaggttgctgtgctggttggggtttactggtgaaccagagtttttctatctcccactatgaatttgttacctcaagttacctggatgttcactattttgttggtacatgtcgattttgcctcgtgcatccgtgtacactgagtgagtatgcgcatgtgctacctgctgtcggtgttcgtgttcttggcatggatgtttgcatcgatgaaagtaaagagctgttgggagttgatgattcagatggcgttggctgccggctgaaatttt

SEQ ID NO: 18112 - DNA, 3093 bp, Zea Mays
attgattgtaaaagtatcaggttctatccttttcttttcgctttctaataaaatgcgcactagaggttgccctcctgatccttcaaaaaatactaggaaaacacgacgcccactcttctccgtgtgattcgctcagctcgaacaacctccggctgaacgctaactgactgaatgacgcctaactgaacaatagctaactgactaacttgactcagactgaaactcaaacgacagggactagccagagttatctaacaggtcggcggggacggaggcagcgggtggcgtctgcctttggcggctctggacggcttctaggagaagagtaacagtagtagtaccgccgcgcaagggacgactgggaggaggagaactgcggtggcttccatgtcgcgtctccttcgtgctccctagtcacaggcgctgctctttgtgcttgctacgaacccgtcgcgcagcagtcgttgcatgggaagacgacgacggcgcgcaacagtacgtggcttgacgtgcctacggccaggtgacggagccgcgccgctgccgccttgagcggtccgagcaggatggcgctgccacggcggcacctccactggcgcgacgcgcgacttctgagtccatgggccatggcaattgaggatgggcctggcatttgggctgctggcaaaggtgacacccaaataacaataacatggcctacatgcgctgagaagaatagcaggaaaaagaaaattggtccactttggcagaggttcgaggcgccgcgaggaaatggagcagacgatgccggatgtgcgtccaccacctccggtcacccagatctgaccggcgtcggccatgaagcggctccccatcctggtcgtccccgtcctcctcctcctactctccatctccttcttcctcttccggcctaccaccccgcctgtcctcagttcgcggcaagccttcgaacccgaccgccgtctcagggtctacgtcgcggacctcccccgcgcgttcaactacggcctgctcgaccgctactggtccctccgcgcagcggactcccgcatccaggcctcgtccgaccctgaccacccgcccccgcacgaccacccgccataccccgagaaccccctcatcaagcagtacagcgccgagtactggctcctcgcctccctccgcgccgcggcgacggcgccggccgccgtgagggtcgtcgcggactggagggaagccgatgtcgtctttgttcccttcttcgcgacgctgtctgcggagatggagctcgggtggggaaccaagggcgccttccgcaagaaggacggcaacgaagactaccggcggcagcgggaggttgtcgaccgcgtcacctcccaccccgcgtggcggaggtccagcggccgggatcacatcttcgtcctgacagaccctgtggctatgtggcatgtccgtgctgagattgctcctgcaatccttttggtggttgattttggaggatggtataaagttgattcaaagtcttcaagcaaaaactcgtctcgggtgatacagcacactcaagtgtcattgcttaaggatgttattgtgccttacacgcatttgcttccgacactgctcttatcagagaataaagatcgtcgcacacttctctacttcaagggggcgaagcataggcatcgggtcagtgctttttatcactctattcagcacttggactgtttgttatcctttatcagtaatccgtactctaataagtttcacataactcttcccaagcaattcacaagccatgaaaaatatcacaaccagtacatatgggtattttgttgctatggaaaatataaacttacaccgtatttatgtttaccggcttttaaatatctgaacttgagctactaaaagtgagatgaacaaacaaacgatggtacttataattttttttcttcaaagcttttgctagctatcattttgagcaacatgcttccaacaacaattctcgatcctgatgaccttatagtttgctgtgctagataatgatattcagaaacgagctctatgtagctgctttctaacttatagtttgctattgacccgtatatgacaaaatagacaatgcatggttaagcagtcaggctaagttacattaaacatcgttgtttctaaatttgggtgatatttctaactttagcacaggcttcatgcttttgaatatacaatatcttctttcagggtggtttagtacgagagaaattatgggatttgctgggtaatgagcctgacgttatcatggaagaaggcttcccgaatgccaccggacgtgaacaatcaataaaagggttgcggacatcggaattttgcttgcacccagccggtgacaccccaacctcatgtcgcctctttgatgctattgccagtctgtgcataccagtcatcgttagtgatgaggttgagctccctttcgaagggataatagactacacagaaatctccattttcgtgtcagttagtaacgctatgagaccgaaatggctaacaagctacttgaggaatatttccaagcagcagaaggacgagtttcgaagaaacctggctcgtgtccaacctatctttgagtatgacaccagctactccagcagcagaggctctacctccattgatggtgctgtgagtcacatatggaagaagattcagcagaaactgccaatgattcaggaggcaatcatcagggacaagcggaagcctgatggcgtgtcaatcccgctccggtgtcattgtacatgaacttaccatagctgctgcggaacgctggtaccaccatggcaccatgggaatggcttataatgagcaattactccaagctaattcctttcttgttttttgttggtagttgcaaatatgatcatgtaaaggaatggcttatgtttttaacccaatttttgtaaacccctttagtagtggttttgcacgttgttgtgtcattggagtggatttgcatgttgggcaatgatgatttatttgcttgttcggcaatgatgattcatacgggaaaaaacccacttggattgaaaagactggaatataatttgtttctttacatcaataagaattgat

SEQ ID NO: 18113 - DNA, 971 bp, Zea Mays
ctcctattcagaaatctatctgaacagcttgctgagattgtcaatcatggaaaactggtgtctgatgagatcatcataaatctgctgtcaagacgtctggaagagggagaggaaaagggtgaattggggttcatccttgatggctttcctcgaaccataggacaagcggagatacttgaaggagtcacagacattgatttggtgatcaatctcaaactccgagaagaagctctgcttgcgaaatgccttggcaggaggatgtgcagccagtgtggagggaacttcaatgtggcctccattgatattgagggtgaagatggtgggcctcgaatgtacatgcccccactgttgcctcctccacagtgtgaatcgaagctgattgctagagcagacgatactgaagaagtgactgaaccagtggaggagttctacagagcacgtgggaaactgctggagttcaatctgcctggtgggatacccgaatcatggccgaagttactgcaggccctgaacatagaagaccccgacaataagcgatctgcagcagcatgattcttgttttgttataggaatgcacattctaaattgaacatctgtagactatgtcaaagctagtcaaattggtgggcattccttacatctttgggaagcctactccattctggatccagattattgtggcatggcactcaactgtacagtagattgatcatcgattggcaaggtcgatcgatggatgtgctgactgtgatcctcgaacgtaaggtgtgtaaaaaggcaagaaaataattgttgggcgtcgagacattcacttgtaggtcgtaccatgcatatgcttgttgaaagaggggagcatgccagaaacgtctgatttttatttttatttttttatttgggagggctggctggctggagcttttcgtgtatgtgacgagctacctatgtacgcaatacactaatactacactgca

SEQ ID NO: 18114 - DNA, 1029 bp, Zea Mays
cagaaaagaggccccaacagccgcgctcctattcagaaatctatctgaacagcttgctgagattgtcaatcatggaaaactggtgtctgatgagatcatcataaatctgctgtcaagacgtctggaagagggagaggaaaagggtgaattggggttcatccttgatggctttcctcgaaccataggacaagcggagatacttgaaggagtcacagacattgatttggtgatcaatctcaaactccgagaagaagctctgcttgcgaaatgccttggcaggaggatgtgcagccagtgtggagggaacttcaatgtggcctccattgatattgagggtgaagatggtgggcctcgaatgtacatgcccccactgttgcctcctccacagtgtgaatcgaagctgattgctagagcagacgatactgaagaagtggtaaaagagcggctgcgtgtgtaccatgatttgactgaaccagtggaggagttctacagagcacgtgggaaactgctggagttcaatctgcctggtgggatacccgaatcatggccgaagttactgcaggccctgaacatagaagaccccgacaataagcgatctgcagcagcatgattcttgttttgttataggaatgcacattctaaattgaacatctgtagactatgtcaaagctagtcaaattggtgggcattccttacatctttgggaagcctactccattctggatccagattattgtggcatggcactcaactgtacagtagattgatcatcgattggcaaggtcgatcgatggatgtgctgactgtgatcctcgaacgtaaggtgtgtaaaaaggcaagaaaataattgttgggcgtcgagacattcacttgtaggtcgtaccatgcatatgcttgttgaaagaggggagcatgccagaaacgtctgatttttatttttatttttttatttgggagggctggctggctggagcttttcgtgtatgtgacgagctacctatgtacgcaatacactaatactacactgca

SEQ ID NO: 18115 - DNA, 1680 bp, Zea Mays
tctctctctttctctctcgtgcgtgtcgaagactccaagtcgaactcaaaacacgcaacacgcaagtcacgaacgcacgacaaaaggaagaaaaacccaagaaatatctctgcggccctgctcgtcccgagccgagccggcgagatggcggggatgtctcgcgcgatccgcaacttcgccgccgcgtcccggcgaaccctgaccgctgcttcggggccggcgctgccgaaggaggcggcggcggcgggggcgcgggtgagggcggcggcgcccgggcgcatggggcgggatcaggaggacgggaggcgcgtgcagtgggtgttcctcgggtgccccggggtggggaagggcacctacgccagccgcctctcgcagctgctcggcgtcccgcacatcgccaccggcgacctcgtccgcgacgccctggccacccctggccccttctccaacaagcttgctgagattgtcaatcatggaaaactggtgtctgatgagatcatcataaatctgctgtcaagacgtctggaagagggagaggaaaagggtgaattggggttcatccttgatggctttcctcgaaccataggacaagcggagatacttgaaggagtcacagacattgatttggtgatcaatctcaaactccgagaagaagctctgcttgcgaaatgccttggcaggaggatgtgcagccagtgtggagggaacttcaatgtggcctccattgatattgagggtgaagatggtgggcctcgaatgtacatgcccccactgttgcctcctccacagtgtgaatcgaagctgattgctagagcagacgatactgaagaagtggtaaaagagcggctgcgtgtgtaccatgatttggtagggtgtggttgcccttttttatatatatatctgtttatataacctgaattcttgtgctgctgtagtaaatgagtttgtcgtaatataggcaagctggactaatttctatatgattttcgtataaacgaaataatgtaacatgctaaaaaaaatagtgtagcatgttttgattggttgcacgtttgattgtagcatggttgctgtggtgtcatcatataccttaccaagtgggttttcatctttgcagactgaaccagtggaggagttctacagagcacgtgggaaactgctggagttcaatctgcctggtgggatacccgaatcatggccgaagttactgcaggccctgaacatagaagaccccgacaataagcgatctgcagcagcatgattcttgttttgttataggaatgcacattctaaattgaacatctgtagactatgtcaaagctagtcaaattggtgggcattccttacatctttgggaagcctactccattctggatccagattattgtggcatggcactcaactgtacagtagattgatcatcgattggcaaggtcgatcgatggatgtgctgactgtgatcctcgaacgtaaggtgtgtaaaaaggcaagaaaataattgttgggcgtcgagacattcacttgtaggtcgtaccatgcatatgcttgttgaaagaggggagcatgccagaaacgtctgatttttatttttatttttttatttgggagggctggctggctggagcttttcgtgtatgtgacgagctacctatgtacgcaatacactaatactacactgca

SEQ ID NO: 18116 - DNA, 1014 bp, Zea Mays
ggctaaagcacatcttgctgagattgtcaatcatggaaaactggtgtctgatgagatcatcataaatctgctgtcaagacgtctggaagagggagaggaaaagggtgaattggggttcatccttgatggctttcctcgaaccataggacaagcggtgagctaattatttgacctgaccgagatacttgaaggagtcacagacattgatttggtgatcaatctcaaactccgagaagaagctctgcttgcgaaatgccttggcaggaggatgtgcagccagtgtggagggaacttcaatgtggcctccattgatattgagggtgaagatggtgggcctcgaatgtacatgcccccactgttgcctcctccacagtgtgaatcgaagctgattgctagagcagacgatactgaagaagtggtaaaagagcggctgcgtgtgtaccatgatttgactgaaccagtggaggagttctacagagcacgtgggaaactgctggagttcaatctgcctggtgggatacccgaatcatggccgaagttactgcaggccctgaacatagaagaccccgacaataagcgatctgcagcagcatgattcttgttttgttataggaatgcacattctaaattgaacatctgtagactatgtcaaagctagtcaaattggtgggcattccttacatctttgggaagcctactccattctggatccagattattgtggcatggcactcaactgtacagtagattgatcatcgattggcaaggtcgatcgatggatgtgctgactgtgatcctcgaacgtaaggtgtgtaaaaaggcaagaaaataattgttgggcgtcgagacattcacttgtaggtcgtaccatgcatatgcttgttgaaagaggggagcatgccagaaacgtctgatttttatttttatttttttatttgggagggctggctggctggagcttttcgtgtatgtgacgagctacctatgtacgcaatacactaatactacactgca

SEQ ID NO: 18117 - DNA, 1080 bp, Zea Mays
ccaaacggtgtcaccacgacagttttcaattcagcacgtgacaaggccggtctgagccgacgcgcgggtcccactcgtcattgacctaaaggctaaagcacatcttgctgagattgtcaatcatggaaaactggtgtctgatgagatcatcataaatctgctgtcaagacgtctggaagagggagaggaaaagggtgaattggggttcatccttgatggctttcctcgaaccataggacaagcggagatacttgaaggagtcacagacattgatttggtgatcaatctcaaactccgagaagaagctctgcttgcgaaatgccttggcaggaggatgtgcagccagtgtggagggaacttcaatgtggcctccattgatattgagggtgaagatggtgggcctcgaatgtacatgcccccactgttgcctcctccacagtgtgaatcgaagctgattgctagagcagacgatactgaagaagtggtaaaagagcggctgcgtgtgtaccatgatttgactgaaccagtggaggagttctacagagcacgtgggaaactgctggagttcaatctgcctggtgggatacccgaatcatggccgaagttactgcaggccctgaacatagaagaccccgacaataagcgatctgcagcagcatgattcttgttttgttataggaatgcacattctaaattgaacatctgtagactatgtcaaagctagtcaaattggtgggcattccttacatctttgggaagcctactccattctggatccagattattgtggcatggcactcaactgtacagtagattgatcatcgattggcaaggtcgatcgatggatgtgctgactgtgatcctcgaacgtaaggtgtgtaaaaaggcaagaaaataattgttgggcgtcgagacattcacttgtaggtcgtaccatgcatatgcttgttgaaagaggggagcatgccagaaacgtctgatttttatttttatttttttatttgggagggctggctggctggagcttttcgtgtatgtgacgagctacctatgtacgcaatacactaatactacactgca

SEQ ID NO: 18118 - DNA, 2659 bp, Zea Mays
ccagtcttaggtagcacttctccaagctcatcaatcgttcctccttagatacattcccattatatatcatgtgccgagtgccctccaagatggtttactacagtaatatagttgtgcatcaattctaaaacagagttgataccttttttccatcttcaaggttctgctctctcatgccgcagttttacaacgttgaaggcttaaaaattctacagaactagatgatacttgcataatgcagccctcagatatttggaaggcgcatgctggttcatcacagtcagaggcttcgggtctggatatggagaggaacggatgcaatcataattgctgtccatctcctctccagccaattgcttcagctggtcagcactctgaaagcagcgctgcatacttttcttggcctacatctactctaatgcacggctcagctgaaggccgtgctaattactttgggaatctacagaagggtgtactaccaggacatcttggtcgcttgccaaatggccagcaagccaccaccttacttgatttaatgattataagagcattccacagcaagattctccgccggtttagtcttggtacagcaataggctttagaatcaggaaaggaacattgactgacacacctgccatccttgtgtttgttgctcgaaaggttcacaggaagtggctcagccctactcaatgtcttccaggtgcccttgagggacctgggggtgtgtggtgtgatgttgatgttgttgaattttcttattatggtgcaccagccccaacaccgaaggaacaactttatgatgagcttgttgatggattgcgtggtagcgaccctagtataggctcaggttcacaggtggctagtcttgagacctatgggactttgggtgccattgtgaagagtcgaactggcaacaagcaagttgggttccttacaaacaggcatgttgcggttgatctggattatcccaaccagaagatgttccatccgttgcctcctaatcttggacctggagtttacctaggtgctgttgagagagcaacatcatttataacagatgatgtttggtacgggatatatgcaggaacaaacccagaaacttttgtccgagctgatggtgcatttataccgtttgctgatgactttgaaattgctagtgtcagcacctccgttaaaggagttggagtcattggtaatgtaaaggcaattgacttgcaatccccaattggcagtctcattgggagacaagttgtcaaagttggaagaagttctggtatgacaactgggactgttgtcgcatacgcacttgagtacaatgatgagaagggaatatgtttcttcactgactttcttgtcgttggggagaaccaacaaacatttgatcttgaaggggacagtggaagcctcataatcttaacaggacaagacggtgagaagccgcaacctataggaattatatggggtggtacagctaaccggggaaggttgaaacttaaaagtggccagggtccggagaactggacaagtggagttgatcttggccgccttcttgatctcttggagctagatctgatcacaacaagtgaagggctacaagctgccttggaagaacaaaggattactctagctgccgctgcggctgcagccactaattcaactgccacagaatcgtcacctgttgctggccctcaagaggatgataaaatcgacaaaatctatgagcctctcggcattaacatcattcctcgagacggttctgccatatcaacggaccaacccaacgaggatgtggaagagctaaacctgatgtctccaatgcgcaatggtgaagaaggcaacggtgacttcaataacttgatggacttggaatcggaaaattcacctgatggtatttctattgctctgaacctgggagagcgggagccagaaagactccgctctgtttctgattcgatgctggacatagacttgcagaaatgaggctgcccgctgctatgctgcagacgtattgcaggaggctccgtatcattcagctttttttatcgatcattgcaggtatggccacaaaggaaataatctgtttctaggcgactggaccggttgttctgcttgaaacccggtctgggttaagctgtgaagctcctgcagccgcttgctcctgcagttttgcgtcaagtgtctaccaactctagcatatgtagtgctgcgtaagatgtcggcacctcagatagacagaggcgccatatttcttgctcatgtaatgttatttgttgtatgctcgtttgtatgtactgcatgaagcattgtaaaattgagcaacagcaaccagagctcgagaatcttaggcgcaaccaaccaaccccgtatcgatgaattgacaataaagctgaatattttaggtgtttagaaagtattttctcttagatttttggggagattaggatacaaactctctgattcaagcagcccctaggtgttgtcctgacctgcttgatcaaacgacctgctggctaaagtttggacagagtagtcgctctctagcttgatgagttcttaagctatcttcaacaaattactcattctatctcatatatcgtttggtttacgaaatgtaacgtaaatgataatgataatgatttatatttgaatactagcggt

SEQ ID NO: 18119 - DNA, 2697 bp, Zea Mays
ccagtcttgttgactcttgagtcttccaccttcctcctcccgtctcgtctccaacggtgtgcttcttcctccggacgcctcgctcgtccgaccgctttacctccctcctccggcgagctccctccgctgttcctggtgtgtctacgcgccagctcctcctcttgtcgattttgggcgcgctcccctccgccgccgggctgtgctgcgcggacgcggttcgtggattcggcagaaggatctgcaccgtcctcgccgccgatatgcaggagcactagcaaagcggcttcgccatccctccggagtccggagcagccagttgtgcatcaattctaaaacagagttgataccttttttccatcttcaaggttctgctctctcatgccgcagttttacaacgttgaaggcttaaaaattctacagaactagatgatacttgcataatgcagccctcagatatttggaaggcgcatgctggttcatcacagtcagaggcttcgggtctggatatggagaggaacggatgcaatcataattgctgtccatctcctctccagccaattgcttcagctggtcagcactctgaaagcagcgctgcatacttttcttggcctacatctactctaatgcacggctcagctgaaggccgtgctaattactttgggaatctacagaagggtgtactaccaggacatcttggtcgcttgccaaatggccagcaagccaccaccttacttgatttaatgattataagagcattccacagcaagattctccgccggtttagtcttggtacagcaataggctttagaatcaggaaaggaacattgactgacacacctgccatccttgtgtttgttgctcgaaaggttcacaggaagtggctcagccctactcaatgtcttccaggtgcccttgagggacctgggggtgtgtggtgtgatgttgatgttgttgaattttcttattatggtgcaccagccccaacaccgaaggaacaactttatgatgagcttgttgatggattgcgtggtagcgaccctagtataggctcaggttcacaggtggctagtcttgagacctatgggactttgggtgccattgtgaagagtcgaactggcaacaagcaagttgggttccttacaaacaggcatgttgcggttgatctggattatcccaaccagaagatgttccatccgttgcctcctaatcttggacctggagtttacctaggtgctgttgagagagcaacatcatttataacagatgatgtttggtacgggatatatgcaggaacaaacccagaaacttttgtccgagctgatggtgcatttataccgtttgctgatgactttgaaattgctagtgtcagcacctccgttaaaggagttggagtcattggtaatgtaaaggcaattgacttgcaatccccaattggcagtctcattgggagacaagttgtcaaagttggaagaagttctggtatgacaactgggactgttgtcgcatacgcacttgagtacaatgatgagaagggaatatgtttcttcactgactttcttgtcgttggggagaaccaacaaacatttgatcttgaaggggacagtggaagcctcataatcttaacaggacaagacggtgagaagccgcaacctataggaattatatggggtggtacagctaaccggggaaggttgaaacttaaaagtggccagggtccggagaactggacaagtggagttgatcttggccgccttcttgatctcttggagctagatctgatcacaacaagtgaagggctacaagctgccttggaagaacaaaggattactctagctgccgctgcggctgcagccactaattcaactgccacagaatcgtcacctgttgctggccctcaagaggatgataaaatcgacaaaatctatgagcctctcggcattaacatcattcctcgagacggttctgccatatcaacggaccaacccaacgaggatgtggaagagctaaacctgatgtctccaatgcgcaatggtgaagaaggcaacggtgacttcaataacttgatggacttggaatcggaaaattcacctgatggtatggccacaaaggaaataatctgtttctaggcgactggaccggttgttctgcttgaaacccggtctgggttaagctgtgaagctcctgcagccgcttgctcctgcagttttgcgtcaagtgtctaccaactctagcatatgtagtgctgcgtaagatgtcggcacctcagatagacagaggcgccatatttcttgctcatgtaatgttatttgttgtatgctcgtttgtatgtactgcatgaagcattgtaaaattgagcaacagcaaccagagctcgagaatcttaggcgcaaccaaccaaccccgtatcgatgaattgacaataaagctgaatattttaggtgtttagaaagtattttctcttagatttttggggagattaggatacaaactctctgattcaagcagcccctaggtgttgtcctgacctgcttgatcaaacgacctgctggctaaagtttggacagagtagtcgctctctagcttgatgagttcttaagctatcttcaacaaattactcattctatctcatatatcgtttggtttacgaaatgtaacgtaaatgataatgataatgatttatatttgaatactagcggt

SEQ ID NO: 18120 - DNA, 2680 bp, Zea Mays
ccagtcttgttgactcttgagtcttccaccttcctcctcccgtctcgtctccaacggtgtgcttcttcctccggacgcctcgctcgtccgaccgctttacctccctcctccggcgagctccctccgctgttcctgatatgcaggagcactagcaaagcggcttcgccatccctccggagtccggagcagccagttgtgcatcaattctaaaacagagttgataccttttttccatcttcaaggttctgctctctcatgccgcagttttacaacgttgaaggcttaaaaattctacagaactagatgatacttgcataatgcagccctcagatatttggaaggcgcatgctggttcatcacagtcagaggcttcgggtctggatatggagaggaacggatgcaatcataattgctgtccatctcctctccagccaattgcttcagctggtcagcactctgaaagcagcgctgcatacttttcttggcctacatctactctaatgcacggctcagctgaaggccgtgctaattactttgggaatctacagaagggtgtactaccaggacatcttggtcgcttgccaaatggccagcaagccaccaccttacttgatttaatgattataagagcattccacagcaagattctccgccggtttagtcttggtacagcaataggctttagaatcaggaaaggaacattgactgacacacctgccatccttgtgtttgttgctcgaaaggttcacaggaagtggctcagccctactcaatgtcttccaggtgcccttgagccccaacaccgaaggaacaactttatgatgagcttgttgatggattgcgtggtagcgaccctagtataggctcaggttcacaggtggctagtcttgagacctatgggactttgggtgccattgtgaagagtcgaactggcaacaagcaagttgggttccttacaaacaggcatgttgcggttgatctggattatcccaaccagaagatgttccatccgttgcctcctaatcttggacctggagtttacctaggtgctgttgagagagcaacatcatttataacagatgatgtttggtacgggatatatgcaggaacaaacccagaaacttttgtccgagctgatggtgcatttataccgtttgctgatgactttgaaattgctagtgtcagcacctccgttaaaggagttggagtcattggtaatgtaaaggcaattgacttgcaatccccaattggcagtctcattgggagacaagttgtcaaagttggaagaagttctggtatgacaactgggactgttgtcgcatacgcacttgagtacaatgatgagaagggaatatgtttcttcactgactttcttgtcgttggggagaaccaacaaacatttgatcttgaaggggacagtggaagcctcataatcttaacaggacaagacggtgagaagccgcaacctataggaattatatggggtggtacagctaaccggggaaggttgaaacttaaaagtggccagggtccggagaactggacaagtggagttgatcttggccgccttcttgatctcttggagctagatctgatcacaacaagtgaagggctacaagctgccttggaagaacaaaggattactctagctgccgctgcggctgcagccactaattcaactgccacagaatcgtcacctgttgctggccctcaagaggatgataaaatcgacaaaatctatgagcctctcggcattaacatcattcctcgagacggttctgccatatcaacggaccaacccaacgaggatgtggaagagctaaacctgatgtctccaatgcgcaatggtgaagaaggcaacggtgacttcaataacttgatggacttggaatcggaaaattcacctgatggtatttctattgctctgaacctgggagagcgggagccagaaagactccgctctgtttctgattcgatgctggacatagacttgcagaaatgaggctgcccgctgctatgctgcagacgtattgcaggaggctccgtatcattcagctttttttatcgatcattgcaggtatggccacaaaggaaataatctgtttctaggcgactggaccggttgttctgcttgaaacccggtctgggttaagctgtgaagctcctgcagccgcttgctcctgcagttttgcgtcaagtgtctaccaactctagcatatgtagtgctgcgtaagatgtcggcacctcagatagacagaggcgccatatttcttgctcatgtaatgttatttgttgtatgctcgtttgtatgtactgcatgaagcattgtaaaattgagcaacagcaaccagagctcgagaatcttaggcgcaaccaaccaaccccgtatcgatgaattgacaataaagctgaatattttaggtgtttagaaagtattttctcttagatttttggggagattaggatacaaactctctgattcaagcagcccctaggtgttgtcctgacctgcttgatcaaacgacctgctggctaaagtttggacagagtagtcgctctctagcttgatgagttcttaagctatcttcaacaaattactcattctatctcatatatcgtttggtttacgaaatgtaacgtaaatgataatgataatgatttatatttgaatactagcggt

SEQ ID NO: 18121 - DNA, 2815 bp, Zea Mays
ccagtcttgttgactcttgagtcttccaccttcctcctcccgtctcgtctccaacggtgtgcttcttcctccggacgcctcgctcgtccgaccgctttacctccctcctccggcgagctccctccgctgttcctggtgtgtctacgcgccagctcctcctcttgtcgattttgggcgcgctcccctccgccgccgggctgtgctgcgcggacgcggttcgtggattcggcagaaggatctgcaccgtcctcgccgccgatatgcaggagcactagcaaagcggcttcgccatccctccggagtccggagcagccaggttctgctctctcatgccgcagttttacaacgttgaaggcttaaaaattctacagaactagatgatacttgcataatgcagccctcagatatttggaaggcgcatgctggttcatcacagtcagaggcttcgggtctggatatggagaggaacggatgcaatcataattgctgtccatctcctctccagccaattgcttcagctggtcagcactctgaaagcagcgctgcatacttttcttggcctacatctactctaatgcacggctcagctgaaggccgtgctaattactttgggaatctacagaagggtgtactaccaggacatcttggtcgcttgccaaatggccagcaagccaccaccttacttgatttaatgattataagagcattccacagcaagattctccgccggtttagtcttggtacagcaataggctttagaatcaggaaaggaacattgactgacacacctgccatccttgtgtttgttgctcgaaaggttcacaggaagtggctcagccctactcaatgtcttccaggtgcccttgagggacctgggggtgtgtggtgtgatgttgatgttgttgaattttcttattatggtgcaccagccccaacaccgaaggaacaactttatgatgagcttgttgatggattgcgtggtagcgaccctagtataggctcaggttcacaggtggctagtcttgagacctatgggactttgggtgccattgtgaagagtcgaactggcaacaagcaagttgggttccttacaaacaggcatgttgcggttgatctggattatcccaaccagaagatgttccatccgttgcctcctaatcttggacctggagtttacctaggtgctgttgagagagcaacatcatttataacagatgatgtttggtacgggatatatgcaggaacaaacccagaaacttttgtccgagctgatggtgcatttataccgtttgctgatgactttgaaattgctagtgtcagcacctccgttaaaggagttggagtcattggtaatgtaaaggcaattgacttgcaatccccaattggcagtctcattgggagacaagttgtcaaagttggaagaagttctggtatgacaactgggactgttgtcgcatacgcacttgagtacaatgatgagaagggaatatgtttcttcactgactttcttgtcgttggggagaaccaacaaacatttgatcttgaaggggacagtggaagcctcataatcttaacaggacaagacggtgagaagccgcaacctataggaattatatggggtggtacagctaaccggggaaggttgaaacttaaaagtggccagggtccggagaactggacaagtggagttgatcttggccgccttcttgatctcttggagctagatctgatcacaacaagtgaagggctacaagctgccttggaagaacaaaggattactctagctgccgctgcggctgcagccactaattcaactgccacagaatcgtcacctgttgctggccctcaagaggatgataaaatcgacaaaatctatgagcctctcggcattaacatcattcctcgagacggttctgccatatcaacggaccaacccaacgaggatgtggaagagctaaacctgatgtctccaatgcgcaatggtgaagaaggcaacggtgacttcaataacttgatggacttggaatcggaaaattcacctgatggtatttctattgctctgaacctgggagagcgggagccagaaagactccgctctgtttctgattcgatgctggacatagacttgcagaaatgaggctgcccgctgctatgctgcagacgtattgcaggaggctccgtatcattcagctttttttatcgatcattgcaggtatggccacaaaggaaataatctgtttctaggcgactggaccggttgttctgcttgaaacccggtctgggttaagctgtgaagctcctgcagccgcttgctcctgcagttttgcgtcaagtgtctaccaactctagcatatgtagtgctgcgtaagatgtcggcacctcagatagacagaggcgccatatttcttgctcatgtaatgttatttgttgtatgctcgtttgtatgtactgcatgaagcattgtaaaattgagcaacagcaaccagagctcgagaatcttaggcgcaaccaaccaaccccgtatcgatgaattgacaataaagctgaatattttaggtgtttagaaagtattttctcttagatttttggggagattaggatacaaactctctgattcaagcagcccctaggtgttgtcctgacctgcttgatcaaacgacctgctggctaaagtttggacagagtagtcgctctctagcttgatgagttcttaagctatcttcaacaaattactcattctatctcatatatcgtttggtttacgaaatgtaacgtaaatgataatgataatgatttatatttgaatactagcggt

SEQ ID NO: 18122 - DNA, 4014 bp, Zea Mays
ccagtcttgttgactcttgagtcttccaccttcctcctcccgtctcgtctccaacggtgtgcttcttcctccggacgcctcgctcgtccgaccgctttacctccctcctccggcgagctccctccgctgttcctgatatgcaggagcactagcaaagcggcttcgccatccctccggagtccggagcagccagctcatcaatcgttcctccttagatacattcccattatatatcatgtgccgagtgccctccaagatggtttactacagtaatataggtattagagtcatatcaatcaaattttcatcactatatgtattcatacctttcaattttctctggacaagttatctgttcgagtttgcctatcatgacctgtccatttgtttaccttcccatgttataaggtatcttagctccattttgagtttttacggcagacccagggttagaggctcccgcatgagtggggtctgggtgttagagtatattaggcatgttgagtatattaggcaactcctcatatggttggtttaggattgattgtaatcccgggataaccttccttatatctaggataacattccttatctctaggataggcttcttgccctccaagtcatgtactcctacatattctctctagagactcaatgcaatacatcccacacattatacacattctctccttccttcatgttatcggagccagaggtcacgagtttgaatcctggttagcgctattaaataaaataattgttgttcgcttctattccatgtctgagacccaaaaaaagaggctcgacgtgaggggggtgttggagtataatataagtgaattgcctacctcttcctatcagtttaagcttttgggttggactggttggtgcatgcaacttaatatggtagagataaaccaaggcgagccttctccccctacaaatatggaaaggctgctctattctgagtttttttattaataaaaaaggataagatatgctcttgctgcatgccttatcttcccaagttgaacactgattaatctgctgaacagcagacgatgtggatcctttgtattgtccgtgtttttactgaattcgtgcttcccttgtgcacttttactggtaatcagtttttattatggaaaaaataccactatagtcttcttgatatatcattctttcacctgttggtattccactgggaggaacgttgcttctagagaactttgcacttattctctgcaaagttaactttattcttttaacatcattcctagaatcctagtgcaacgccttttgatgctggctgtgtgcaaccatttttttacttgtatcattagacaatgcgctgcggggctgtgatattagttttatattgctctgattcgtaaacttgtaggtctaattcttgatgaaccattttctgttgatgacttatggacttctttttttcctgtgatcagttgtgcatcaattctaaaacagagttgataccttttttccatcttcaaggttctgctctctcatgccgcagttttacaacgttgaaggcttaaaaattctacagaactagatgatacttgcataatgcagccctcagatatttggaaggcgcatgctggttcatcacagtcagaggcttcgggtctggatatggagaggaacggatgcaatcataattgctgtccatctcctctccagccaattgcttcagctggtcagcactctgaaagcagcgctgcatacttttcttggcctacatctactctaatgcacggctcagctgaaggccgtgctaattactttgggaatctacagaagggtgtactaccaggacatcttggtcgcttgccaaatggccagcaagccaccaccttacttgatttaatgattataagagcattccacagcaagattctccgccggtttagtcttggtacagcaataggctttagaatcaggaaaggaacattgactgacacacctgccatccttgtgtttgttgctcgaaaggttcacaggaagtggctcagccctactcaatgtcttccaggtgcccttgagggacctgggggtgtgtggtgtgatgttgatgttgttgaattttcttattatggtgcaccagccccaacaccgaaggaacaactttatgatgagcttgttgatggattgcgtggtagcgaccctagtataggctcaggttcacaggtggctagtcttgagacctatgggactttgggtgccattgtgaagagtcgaactggcaacaagcaagttgggttccttacaaacaggcatgttgcggttgatctggattatcccaaccagaagatgttccatccgttgcctcctaatcttggacctggagtttacctaggtgctgttgagagagcaacatcatttataacagatgatgtttggtacgggatatatgcaggaacaaacccagaaacttttgtccgagctgatggtgcatttataccgtttgctgatgactttgaaattgctagtgtcagcacctccgttaaaggagttggagtcattggtaatgtaaaggcaattgacttgcaatccccaattggcagtctcattgggagacaagttgtcaaagttggaagaagttctggtatgacaactgggactgttgtcgcatacgcacttgagtacaatgatgagaagggaatatgtttcttcactgactttcttgtcgttggggagaaccaacaaacatttgatcttgaaggggacagtggaagcctcataatcttaacaggacaagacggtgagaagccgcaacctataggaattatatggggtggtacagctaaccggggaaggttgaaacttaaaagtggccagggtccggagaactggacaagtggagttgatcttggccgccttcttgatctcttggagctagatctgatcacaacaagtgaagggctacaagctgccttggaagaacaaaggattactctagctgccgctgcggctgcagccactaattcaactgccacagaatcgtcacctgttgctggccctcaagaggatgataaaatcgacaaaatctatgagcctctcggcattaacatcattcctcgagacggttctgccatatcaacggaccaacccaacgaggatgtggaagagctaaacctgatgtctccaatgcgcaatggtgaagaaggcaacggtgacttcaataacttgatggacttggaatcggaaaattcacctgatggtatttctattgctctgaacctgggagagcgggagccagaaagactccgctctgtttctgattcgatgctggacatagacttgcagaaatgaggctgcccgctgctatgctgcagacgtattgcaggaggctccgtatcattcagctttttttatcgatcattgcaggtatggccacaaaggaaataatctgtttctaggcgactggaccggttgttctgcttgaaacccggtctgggttaagctgtgaagctcctgcagccgcttgctcctgcagttttgcgtcaagtgtctaccaactctagcatatgtagtgctgcgtaagatgtcggcacctcagatagacagaggcgccatatttcttgctcatgtaatgttatttgttgtatgctcgtttgtatgtactgcatgaagcattgtaaaattgagcaacagcaaccagagctcgagaatcttaggcgcaaccaaccaaccccgtatcgatgaattgacaataaagctgaatattttaggtgtttagaaagtattttctcttagatttttggggagattaggatacaaactctctgattcaagcagcccctaggtgttgtcctgacctgcttgatcaaacgacctgctggctaaagtttggacagagtagtcgctctctagcttgatgagttcttaagctatcttcaacaaattactcattctatctcatatatcgtttggtttacgaaatgtaacgtaaatgataatgataatgatttatatttgaatactagcggt

SEQ ID NO: 18123 - DNA, 2793 bp, Zea Mays
ccagtcttgttgactcttgagtcttccaccttcctcctcccgtctcgtctccaacggtgtgcttcttcctccggacgcctcgctcgtccgaccgctttacctccctcctccggcgagctccctccgctgttcctggtgtgtctacgcgccagctcctcctcttgtcgattttgggcgcgctcccctccgccgccgggctgtgctgcgcggacgcggttcgtggattcggcagaaggatctgcaccgtcctcgccgccgatatgcaggagcactagcaaagcggcttcgccatccctccggagtccggagcagccagttttacaacgttgaaggcttaaaaattctacagaactagatgatacttgcataatgcagccctcagatatttggaaggcgcatgctggttcatcacagtcagaggcttcgggtctggatatggagaggaacggatgcaatcataattgctgtccatctcctctccagccaattgcttcagctggtcagcactctgaaagcagcgctgcatacttttcttggcctacatctactctaatgcacggctcagctgaaggccgtgctaattactttgggaatctacagaagggtgtactaccaggacatcttggtcgcttgccaaatggccagcaagccaccaccttacttgatttaatgattataagagcattccacagcaagattctccgccggtttagtcttggtacagcaataggctttagaatcaggaaaggaacattgactgacacacctgccatccttgtgtttgttgctcgaaaggttcacaggaagtggctcagccctactcaatgtcttccaggtgcccttgagggacctgggggtgtgtggtgtgatgttgatgttgttgaattttcttattatggtgcaccagccccaacaccgaaggaacaactttatgatgagcttgttgatggattgcgtggtagcgaccctagtataggctcaggttcacaggtggctagtcttgagacctatgggactttgggtgccattgtgaagagtcgaactggcaacaagcaagttgggttccttacaaacaggcatgttgcggttgatctggattatcccaaccagaagatgttccatccgttgcctcctaatcttggacctggagtttacctaggtgctgttgagagagcaacatcatttataacagatgatgtttggtacgggatatatgcaggaacaaacccagaaacttttgtccgagctgatggtgcatttataccgtttgctgatgactttgaaattgctagtgtcagcacctccgttaaaggagttggagtcattggtaatgtaaaggcaattgacttgcaatccccaattggcagtctcattgggagacaagttgtcaaagttggaagaagttctggtatgacaactgggactgttgtcgcatacgcacttgagtacaatgatgagaagggaatatgtttcttcactgactttcttgtcgttggggagaaccaacaaacatttgatcttgaaggggacagtggaagcctcataatcttaacaggacaagacggtgagaagccgcaacctataggaattatatggggtggtacagctaaccggggaaggttgaaacttaaaagtggccagggtccggagaactggacaagtggagttgatcttggccgccttcttgatctcttggagctagatctgatcacaacaagtgaagggctacaagctgccttggaagaacaaaggattactctagctgccgctgcggctgcagccactaattcaactgccacagaatcgtcacctgttgctggccctcaagaggatgataaaatcgacaaaatctatgagcctctcggcattaacatcattcctcgagacggttctgccatatcaacggaccaacccaacgaggatgtggaagagctaaacctgatgtctccaatgcgcaatggtgaagaaggcaacggtgacttcaataacttgatggacttggaatcggaaaattcacctgatggtatttctattgctctgaacctgggagagcgggagccagaaagactccgctctgtttctgattcgatgctggacatagacttgcagaaatgaggctgcccgctgctatgctgcagacgtattgcaggaggctccgtatcattcagctttttttatcgatcattgcaggtatggccacaaaggaaataatctgtttctaggcgactggaccggttgttctgcttgaaacccggtctgggttaagctgtgaagctcctgcagccgcttgctcctgcagttttgcgtcaagtgtctaccaactctagcatatgtagtgctgcgtaagatgtcggcacctcagatagacagaggcgccatatttcttgctcatgtaatgttatttgttgtatgctcgtttgtatgtactgcatgaagcattgtaaaattgagcaacagcaaccagagctcgagaatcttaggcgcaaccaaccaaccccgtatcgatgaattgacaataaagctgaatattttaggtgtttagaaagtattttctcttagatttttggggagattaggatacaaactctctgattcaagcagcccctaggtgttgtcctgacctgcttgatcaaacgacctgctggctaaagtttggacagagtagtcgctctctagcttgatgagttcttaagctatcttcaacaaattactcattctatctcatatatcgtttggtttacgaaatgtaacgtaaatgataatgataatgatttatatttgaatactagcggt

SEQ ID NO: 18124 - DNA, 2696 bp, Zea Mays
atctccgtcacacctttttccctccctgctcttccagtcttgttgactcttgagtcttccaccttcctcctcccgtctcgtctccaacggtgtgcttcttcctccggacgcctcgctcgtccgaccgctttacctccctcctccggcgagctccctccgctgttcctgatatgcaggagcactagcaaagcggcttcgccatccctccggagtccggagcagccagttgtgcatcaattctaaaacagagttgataccttttttccatcttcaaggttctgctctctcatgccgcagttttacaacgttgaaggcttaaaaattctacagaactagatgatacttgcataatgcagccctcagatatttggaaggcgcatgctggttcatcacagtcagaggcttcgggtctggatatggagaggaacggatgcaatcataattgctgtccatctcctctccagccaattgcttcagctggtcagcactctgaaagcagcgctgcatacttttcttggcctacatctactctaatgcacggctcagctgaaggccgtgctaattactttgggaatctacagaagggtgtactaccaggacatcttggtcgcttgccaaatggccagcaagccaccaccttacttgatttaatgattataagagcattccacagcaagattctccgccggtttagtcttggtacagcaataggctttagaatcaggaaaggaacattgactgacacacctgccatccttgtgtttgttgctcgaaaggttcacaggaagtggctcagccctactcaatgtcttccaggtgcccttgagggacctgggggtgtgtggtgtgatgttgatgttgttgaattttcttattatggtgcaccagccccaacaccgaaggaacaactttatgatgagcttgttgatggattgcgtggtagcgaccctagtataggctcaggttcacaggtggctagtcttgagacctatgggactttgggtgccattgtgaagagtcgaactggcaacaagcaagttgggttccttacaaacaggcatgttgcggttgatctggattatcccaaccagaagatgttccatccgttgcctcctaatcttggacctggagtttacctaggtgctgttgagagagcaacatcatttataacagatgatgtttggtacgggatatatgcaggaacaaacccagaaacttttgtccgagctgatggtgcatttataccgtttgctgatgactttgaaattgctagtgtcagcacctccgttaaaggagttggagtcattggtaatgtaaaggcaattgacttgcaatccccaattggcagtctcattgggagacaagttgtcaaagttggaagaagttctggtatgacaactgggactgttgtcgcatacgcacttgagtacaatgatgagaagggaatatgtttcttcactgactttcttgtcgttggggagaaccaacaaacatttgatcttgaaggggacagtggaagcctcataatcttaacaggacaagacggtgagaagccgcaacctataggaattatatggggtggtacagctaaccggggaaggttgaaacttaaaagtggccagggtccggagaactggacaagtggagttgatcttggccgccttcttgatctcttggagctagatctgatcacaacaagtgaagggctacaagctgccttggaagaacaaaggattactctagctgccgctgcggctgcagccactaattcaactgccacagaatcgtcacctgttgctggccctcaagaggatgataaaatcgacaaaatctatgagcctctcggcattaacatcattcctcgagacggttctgccatatcaacggaccaacccaacgaggatgtggaagagctaaacctgatgtctccaatgcgcaatggtgaagaaggcaacggtgacttcaataacttgatggacttggaatcggaaaattcacctgatgacttgcagaaatgaggctgcccgctgctatgctgcagacgtattgcaggaggctccgtatcattcagctttttttatcgatcattgcaggtatggccacaaaggaaataatctgtttctaggcgactggaccggttgttctgcttgaaacccggtctgggttaagctgtgaagctcctgcagccgcttgctcctgcagttttgcgtcaagtgtctaccaactctagcatatgtagtgctgcgtaagatgtcggcacctcagatagacagaggcgccatatttcttgctcatgtaatgttatttgttgtatgctcgtttgtatgtactgcatgaagcattgtaaaattgagcaacagcaaccagagctcgagaatcttaggcgcaaccaaccaaccccgtatcgatgaattgacaataaagctgaatattttaggtgtttagaaagtattttctcttagatttttggggagattaggatacaaactctctgattcaagcagcccctaggtgttgtcctgacctgcttgatcaaacgacctgctggctaaagtttggacagagtagtcgctctctagcttgatgagttcttaagctatcttcaacaaattactcattctatctcatatatcgtttggtttacgaaatgtaacgtaaatgataatgataatgatttatatttgaatactagcggt

SEQ ID NO: 18125 - DNA, 2730 bp, Zea Mays
attctatctccgtcacacctttttccctccctgctcttccagtcttgttgactcttgagtcttccaccttcctcctcccgtctcgtctccaacggtgtgcttcttcctccggacgcctcgctcgtccgaccgctttacctccctcctccggcgagctccctccgctgttcctgatatgcaggagcactagcaaagcggcttcgccatccctccggagtccggagcagccaggttctgctctctcatgccgcagttttacaacgttgaaggcttaaaaattctacagaactagatgatacttgcataatgcagccctcagatatttggaaggcgcatgctggttcatcacagtcagaggcttcgggtctggatatggagaggaacggatgcaatcataattgctgtccatctcctctccagccaattgcttcagctggtcagcactctgaaagcagcgctgcatacttttcttggcctacatctactctaatgcacggctcagctgaaggccgtgctaattactttgggaatctacagaagggtgtactaccaggacatcttggtcgcttgccaaatggccagcaagccaccaccttacttgatttaatgattataagagcattccacagcaagattctccgccggtttagtcttggtacagcaataggctttagaatcaggaaaggaacattgactgacacacctgccatccttgtgtttgttgctcgaaaggttcacaggaagtggctcagccctactcaatgtcttccaggtgcccttgagggacctgggggtgtgtggtgtgatgttgatgttgttgaattttcttattatggtgcaccagccccaacaccgaaggaacaactttatgatgagcttgttgatggattgcgtggtagcgaccctagtataggctcaggttcacaggtggctagtcttgagacctatgggactttgggtgccattgtgaagagtcgaactggcaacaagcaagttgggttccttacaaacaggcatgttgcggttgatctggattatcccaaccagaagatgttccatccgttgcctcctaatcttggacctggagtttacctaggtgctgttgagagagcaacatcatttataacagatgatgtttggtacgggatatatgcaggaacaaacccagaaacttttgtccgagctgatggtgcatttataccgtttgctgatgactttgaaattgctagtgtcagcacctccgttaaaggagttggagtcattggtaatgtaaaggcaattgacttgcaatccccaattggcagtctcattgggagacaagttgtcaaagttggaagaagttctggtatgacaactgggactgttgtcgcatacgcacttgagtacaatgatgagaagggaatatgtttcttcactgactttcttgtcgttggggagaaccaacaaacatttgatcttgaaggggacagtggaagcctcataatcttaacaggacaagacggtgagaagccgcaacctataggaattatatggggtggtacagctaaccggggaaggttgaaacttaaaagtggccagggtccggagaactggacaagtggagttgatcttggccgccttcttgatctcttggagctagatctgatcacaacaagtgaagggctacaagctgccttggaagaacaaaggattactctagctgccgctgcggctgcagccactaattcaactgccacagaatcgtcacctgttgctggccctcaagaggatgataaaatcgacaaaatctatgagcctctcggcattaacatcattcctcgagacggttctgccatatcaacggaccaacccaacgaggatgtggaagagctaaacctgatgtctccaatgcgcaatggtgaagaaggcaacggtgacttcaataacttgatggacttggaatcggaaaattcacctgatggtatttctattgctctgaacctgggagagcgggagccagaaagactccgctctgtttctgattcgatgctggacatagacttgcagaaatgaggctgcccgctgctatgctgcagacgtattgcaggaggctccgtatcattcagctttttttatcgatcattgcaggtatggccacaaaggaaataatctgtttctaggcgactggaccggttgttctgcttgaaacccggtctgggttaagctgtgaagctcctgcagccgcttgctcctgcagttttgcgtcaagtgtctaccaactctagcatatgtagtgctgcgtaagatgtcggcacctcagatagacagaggcgccatatttcttgctcatgtaatgttatttgttgtatgctcgtttgtatgtactgcatgaagcattgtaaaattgagcaacagcaaccagagctcgagaatcttaggcgcaaccaaccaaccccgtatcgatgaattgacaataaagctgaatattttaggtgtttagaaagtattttctcttagatttttggggagattaggatacaaactctctgattcaagcagcccctaggtgttgtcctgacctgcttgatcaaacgacctgctggctaaagtttggacagagtagtcgctctctagcttgatgagttcttaagctatcttcaacaaattactcattctatctcatatatcgtttggtttacgaaatgtaacgtaaatgataatgataatgatttatatttgaatactagcggt

SEQ ID NO: 18126 - DNA, 1840 bp, Zea Mays
gaacgaaataattacgcaaacagccacctgaatcgttgtagcgtacgtgccgaaaattggttttttcacgcacattgatgggcaaaaccgttctcccccttctgtaattgtcattgggggagggatttcaggcatcgcagctgcacgtgctttgtcgactgcttcatttaaggtcacactcttggagtccagggaccgacctggtggccgtgtgcacactgactattctttcggttgcccaattgacatgggagcatcatggttgcatggtgtttgcaatgagaattctttggcaccactgattaggatgcttgggcttaggttatatcgcacaagcggtgataactctgttctgtatgaccatgatttggaaagttatgctctttttgataagcatggtcagcaagttccccaggagatagtaagcaaagttggagagacatttgagagaattcttaaggagactgtcatagtaagagatgagcatgcaaatgacatgcctctttttcaagccatagcgatcgtgcttgacaggaatccgcatatgaaggcctggaatatgaagtactgcagtggtgcatatgtaggctggaggcatggttcgctactgacatggacaatatatctctgaaaacttgggatcaggaacatgtgcttaccggtggacatggtcttatggtgaatggctacgaccctgtcatcagagctctcgctcaaggtctcgatattcacctcaaccacagggtcacaaagatcatacaacgctataacaaggttattgtctgtgtggaagatggggcgagttttgtcgcagacgctgctatagtaaccgtccctctcggggtactcaaggcaaacatcatcaagtttgagcctgagctaccgaaagagaagctctcggcaatcgccgaccttggcgtcggtatcgagaacaagatagctctcaagttcgacactgtgttttggcccgacgttgaagtgataggtagggtggccccgacgtcaaacgcctgtggctactttctcaaccttaacaaagccacaggaaacccggtcctggtgtgcatggtggccggaaggttcgcgtacgagatcgagaagctgtcggacgaagagtccgtgaacttcgtcatgtcccagctcaggaacatgctgccgcaggcaactgacccggttcagtatctggtctcgcgctggggtagtgaccccaactcacttggctcctactcgtgcgacctggtggggaaaccagctgacctgtatgaaaggttctgcgctccggtgggcagcctgttcttcgccggggaggccgcctgcattgaccactccggatcggtgcacggagcttactcgtcaggcatcgctgccgcagaggactgccgaaggcgtctgtcggcgcagctaggcatctcggccggcctgttccaggtcgggaaggctgccatgagggaggagatgacggctgaagccatggtccccttccagatatccaggttgtaagagagaatctattcaacaccgtctttgtgtcaccggtttgttgcttgatgtaattgtaaaatggtgtaagaccttgtttgttggaatattcgatggtggatgctgtttttcgtcaggtaaacgtcagcgtcagctgggccagatgaatgaatattcgcattgcgcgctgaacggattccaatccacgagctctcgctgcactgcagcttgccgaccactccaatccacgagctctcgctgcactgcagcttgccgaccactccactccacgtacacaatgcaaaagcccgagagggaacccttccacaatccacacccgtaccatgaatctaatcggcac

SEQ ID NO: 18127 - DNA, 1826 bp, Zea Mays
cgtcgattctgacggcctgaggttgcagctggcacgtatgcgttggttttttcacgcacattgatgggcaaaaccgttctcccccttctgtaattgtcattgggggagggatttcaggcatcgcagctgcacgtgctttgtcgactgcttcatttaaggtcacactcttggagtccagggaccgacctggtggccgtgtgcacactgactattctttcggttgcccaattgacatgggagcatcatggttgcatggtgtttgcaatgagaattctttggcaccactgattaggatgcttgggcttaggttatatcgcacaagcggtgataactctgttctgtatgaccatgatttggaaagttatgctctttttgataagcatggtcagcaagttccccaggagatagtaagcaaagttggagagacatttgagagaattcttaaggagactgtcatagtaagagatgagcatgcaaatgacatgcctctttttcaagccatagcgatcgtgcttgacaggaatccgcatatgaaggcctggaatatgaagtactgcagtggtgcatatgtaggctggaggcatggttcgctactgacatggacaatatatctctgaaaacttgggatcaggaacatgtgcttaccggtggacatggtcttatggtgaatggctacgaccctgtcatcagagctctcgctcaaggtctcgatattcacctcaaccacagggtcacaaagatcatacaacgctataacaaggttattgtctgtgtggaagatggggcgagttttgtcgcagacgctgctatagtaaccgtccctctcggggtactcaaggcaaacatcatcaagtttgagcctgagctaccgaaagagaagctctcggcaatcgccgaccttggcgtcggtatcgagaacaagatagctctcaagttcgacactgtgttttggcccgacgttgaagtgataggtagggtggccccgacgtcaaacgcctgtggctactttctcaaccttaacaaagccacaggaaacccggtcctggtgtgcatggtggccggaaggttcgcgtacgagatcgagaagctgtcggacgaagagtccgtgaacttcgtcatgtcccagctcaggaacatgctgccgcaggcaactgacccggttcagtatctggtctcgcgctggggtagtgaccccaactcacttggctcctactcgtgcgacctggtggggaaaccagctgacctgtatgaaaggttctgcgctccggtgggcagcctgttcttcgccggggaggccgcctgcattgaccactccggatcggtgcacggagcttactcgtcaggcatcgctgccgcagaggactgccgaaggcgtctgtcggcgcagctaggcatctcggccggcctgttccaggtcgggaaggctgccatgagggaggagatgacggctgaagccatggtccccttccagatatccaggttgtaagagagaatctattcaacaccgtctttgtgtcaccggtttgttgcttgatgtaattgtaaaatggtgtaagaccttgtttgttggaatattcgatggtggatgctgtttttcgtcaggtaaacgtcagcgtcagctgggccagatgaatgaatattcgcattgcgcgctgaacggattccaatccacgagctctcgctgcactgcagcttgccgaccactccaatccacgagctctcgctgcactgcagcttgccgaccactccactccacgtacacaatgcaaaagcccgagagggaacccttccacaatccacacccgtaccatgaatctaatcggcac

SEQ ID NO: 18128 - DNA, 2243 bp, Zea Mays
gccaacatttattcgggtgcgagacccaaactggctcatatggacgaaccagatgggtaatgaatgcgattttcgtcacagtgagggtgctaggatgaaccctagggactgttggtactggttgaatggcagttgtttgaatcccaagtgtgcatttcgccatccgccaattgatggtctctttggtgccccaacttctggactacctccagtttctgcgcactacggtgcctataacttgggcaagcagatggtcccatgctattacttccagaaagggaactgcttgaagggtgatagatgccctttctatcatggaccacaaacagctagtaatgatcttgcagagcaagcggcgaaggtttcttcctttcctttggaaccgtcccaggctcaaaataacgaagaggctgtagctccaaataattcaacgcagcaagaggcccgaatgactgaaaacaggacttcgattcatgtttccaagagtggcacccagtaatacgcttgcagcaaagaaaagttccacaactgaggatcatcctatgcactatcagaaccaggttcctgtggagatcgatcctgtcaaagactggaaccaaaattttgaagtgtctcctactgattacctgccacaggatagtagggaggctgatgatattttgggggagtcctctcctggttttgatgttcttgtagacaatgatgtagatgttgctgaagattttgcaagggatatgtacccggtagaagattacgagtatgttacatctgattttgatgctcgggcccatcatgaaagtgagcagttcaacgatggaatgggtgtgaatggacggattggacagtatgatggctatgagaggaaacgccgtagatcttcatctgagaggaacctagacagacattaccatccagatggaaggtttcttcacagagagcttgatcgtggcgagatagatggatcagatctacgccatcagctccgcaggagaagaataaatgggccctcaacaaccattagcccagaacgggctaatggggaccgacatgggagggatgaaccctacagagaaagggcacatggtggtcaccacacgtacagagatcgctatcagggcccacgaggaagcaatctaagttcccgtctgcaggccagaataaagcttcctcgaagatcacctgatagagttgatactcgcttcgaggatgagcgagacaggagaagattcagggatatgttttctccaatgaggcgtatggatttccatggtggtaggcatcaagaggctggacataatcaagaaaggggccacaggaagttaagcgagcttgtctctactgtcaggcatgcagatggcctctctgctagaagagatgcagtgggttcaactcattttgctgctcgcagaaacttgggagagccaaggaaggcaaatggtcttgtggaatccgaagcatctcttgattttgagggcccaaaaccccttagtgtcatcttacagagaaaaagggaggcagcacagggcaataactatgagaaatttgctgaggttgcagtcacgcagacaggttctctggatgaaactgagaagaaaagctgtgacaacgttaccaggtttgcagattgcaagagtggttcaggtgacgaagagtataaagagcaagatcatatccttgtggatgcacacaggcagtcttcggatcatggtgataagtttgaggctgggtatgctgctgaagtggatgcagaaggaaaacaagaggcagatgactatgaccagagagagggcgagtccgacgactacgagacatttgaaggccatgactacaaatctgaagatgaaaatgtgtaccaagacgacgaggatttcgatgataatgatgactttgctcggaaagtaggggttttattgccttagacgccgcggtgtcattggttctgttgcttgaggcaacgagctctagtttttgccatcggttctgttgcttgaggcaaagctgaaatgccgatcataatcgatttgaggtttacatgtaaactgctgtgtgatgttcagcacatctgacctctccttggactttgttatattagtttccgtactaacagcaggatatattccttaatcaatttgtgcccggaacgaaatataatcaactccacaatgggggggggggcgttttgcttataatctgtgtacgatgcatgggttctgtatgcatgtattttggccttatgctttgag

SEQ ID NO: 18129 - DNA, 2657 bp, Zea Mays
aacaatctattggagcggtgtatagcggctagagaagtatagagagagaaaaagagaggccgttggtttgggtttggttcgttgcctgtcccctcccttcccgtcataaaagataccagcaggcagaggcggctccaatccaacccagtccacacgagacgaaacgagccgagcccatccctccgtcgccttcgccaaccctagcctagcctccttcttctcctcctcccgcggatccaacctccgcccgcccgcccgccgccgccgagagagccctatctcccccacgccgcggtctccgcgcaagcgggggcaggggacgcggatcccgcagctccccgccatctccggaacggccatggaggtggcggcggctgccgcagggaagccgctgacgccggaggaggaggcactccggcgcagcaccgactgcgtctacttcctcgcctcgccgctcacctgcaagaagggtaatgaatgcgattttcgtcacagtgagggtgctaggatgaaccctagggactgttggtactggttgaatggcagttgtttgaatcccaagtgtgcatttcgccatccgccaattgatggtctctttggtgccccaacttctggactacctccagtttctgcgcactacggtgcctataacttgggcaagcagatggtcccatgctattacttccagaaagggaactgcttgaagggtgatagatgccctttctatcatggaccacaaacagctagtaatgatcttgcagagcaagcggcgaaggtttcttcctttcctttggaaccgtcccaggctcaaaataacgaagaggctgtagctccaaataattcaacgcagcaagaggcccgaatgactgaaaacaggacttcgattcatgtttccaagagtggcacccagtaatacgcttgcagcaaagaaaagttccacaactgaggatcatcctatgcactatcagaaccaggttcctgtggagatcgatcctgtcaaagactggaaccaaaattttgaagtgtctcctactgattacctgccacaggatagtagggaggctgatgatattttgggggagtcctctcctggttttgatgttcttgtagacaatgatgtagatgttgctgaagattttgcaagggatatgtacccggtagaagattacgagtatgttacatctgattttgatgctcgggcccatcatgaaagtgagcagttcaacgatggaatgggtgtgaatggacggattggacagtatgatggctatgagaggaaacgccgtagatcttcatctgagaggaacctagacagacattaccatccagatggaaggtttcttcacagagagcttgatcgtggcgagatagatggatcagatctacgccatcagctccgcaggagaagaataaatgggccctcaacaaccattagcccagaacgggctaatggggaccgacatgggagggatgaaccctacagagaaagggcacatggtggtcaccacacgtacagagatcgctatcagggcccacgaggaagcaatctaagttcccgtctgcaggccagaataaagcttcctcgaagatcacctgatagagttgatactcgcttcgaggatgagcgagacaggagaagattcagggatatgttttctccaatgaggcgtatggatttccatggtggtaggcatcaagaggctggacataatcaagaaaggggccacaggaagttaagcgagcttgtctctactgtcaggcatgcagatggcctctctgctagaagagatgcagtgggttcaactcattttgctgctcgcagaaacttgggagagccaaggaaggcaaatggtcttgtggaatccgaagcatctcttgattttgagggcccaaaaccccttagtgtcatcttacagagaaaaagggaggcagcacagggcaataactatgagaaatttgctgaggttgcagtcacgcagacaggttctctggatgaaactgagaagaaaagctgtgacaacgttaccaggtttgcagattgcaagagtggttcaggtgacgaagagtataaagagcaagatcatatccttgtggatgcacacaggcagtcttcggatcatggtgataagtttgaggctgggtatgctgctgaagtggatgcagaaggaaaacaagaggcagatgactatgaccagagagagggcgagtccgacgactacgagacatttgaaggccatgactacaaatctgaagatgaaaatgtgtaccaagacgacgaggatttcgatgataatgatgactttgctcggaaagtaggggttttattgccttagacgccgcggtgtcattggttctgttgcttgaggcaacgagctctagtttttgccatcggttctgttgcttgaggcaaagctgaaatgccgatcataatcgatttgaggtttacatgtaaactgctgtgtgatgttcagcacatctgacctctccttggactttgttatattagtttccgtactaacagcaggatatattccttaatcaatttgtgcccggaacgaaatataatcaactccacaatgggggggggggcgttttgcttataatctgtgtacgatgcatgggttctgtatgcatgtattttggccttatgctttgag

SEQ ID NO: 18130 - DNA, 1426 bp, Zea Mays
tagtgctttccagccctaagctcatggctgatactgaatgaataacgtcctgtcctgatgaaactcctttttaagctatgtgatactgaaatgcatgttgatattcctttctatttgtggtttagtatcaattagttcaattgtgctcgattgttgttctaccgagctagttttacatctatgccaattgtccactgtatcagtagtttagattttgtataacctttttattttgcaattataacaaaaaagtgatcaacagggatctttatgtatgcagtgatgaataatgaatgcattcaacgtgcctttcagagttacactagtgtgaaggacttaaaatgctagcagtttatagcaaaactagtttcaggctttgtattgttttattttacagtagctcgttactgtatatgtatatttgttgtctttttttatttatgtgaaaagtttgattggcttttccgggtgtatggtgccacgacagaatcctagttgcaaacagaaggaacacaatctcgttgggactagtcattgcaatcttgttgattgatctaccgattccattattggccttctttattcgtaaaatattaataagatctggttttagctatatagacttgcagtctacatgtctgccataagattgtggttctctaaaatctgagcaaaagtgctgcctggttaaaacattgtcccatacataatagtagattatttgttgtcattgatgcatgagatgctattgtttatcaccttttcaatgcatttctctgttttgtacaataggtaaactaccaattttacatgtagataccaagatggttgttccgtagattcgtacacaaaaattgtttaggttgcagcaaaatatagtagttttaaagcaccccatgttcctttttgtttctcagcaatctgtatcatacctgctgctttctgaggtggtatcattgttttcaaccatgaaatactgagcctatcagtttcagctagcatggcttggtaatatgagatgattcatgcttattgattagatcgagctaatgaaggaaaaagttatgtgttctttttctttgacaaaagaagatggagtttccatattttaactgtggttattataggtttaaacaagcgcatctgaccatggctaggagctgagcagaagagaagatatgctttgcctttatgacagcgaggcgagctgcacctgaagaaacaaaagaatcttaggaattacaaacaagggctgtactgtaataatgtggttcttgtaaaccaattttgccttagaattctgtaacttgaatcatccacagatgtgcgactgtcttttgtttatgtggatctatgaattacctgccgctcctcgtttgaactacttgcaattccattatagcatcatttgaaaatggcatcaatt

SEQ ID NO: 18131 - DNA, 284 bp, Zea Mays
gaaacctagatacaggagtcatgtgagtgaccggatatgctttgcctttatgacagcgaggcgagctgcacctgaagaaacaaaagaatcttaggaattacaaacaagggctgtactgtaataatgtggttcttgtaaaccaattttgccttagaattctgtaacttgaatcatccacagatgtgcgactgtcttttgtttatgtggatctatgaattacctgccgctcctcgtttgaactacttgcaattccattatagcatcatttgaaaatggcatcaatt

SEQ ID NO: 18132 - DNA, 345 bp, Zea Mays
cttacacaccagagaaacctagatacaggagtcatgtgagtgaccggtttaaacaagcgcatctgaccatggctaggagctgagcagaagagaagatatgctttgcctttatgacagcgaggcgagctgcacctgaagaaacaaaagaatcttaggaattacaaacaagggctgtactgtaataatgtggttcttgtaaaccaattttgccttagaattctgtaacttgaatcatccacagatgtgcgactgtcttttgtttatgtggatctatgaattacctgccgctcctcgtttgaactacttgcaattccattatagcatcatttgaaaatggcatcaatt

SEQ ID NO: 18133 - DNA, 674 bp, Zea Mays
gtctagggttttaccctctccaacacgacgaggttttgctccgacaccgacgcgacagccgacaaggcagggggagaggccgagaggggaaatggcatcgttgtcccgcaccgctgctgccgctgtcgtggccctgaggtcggcggtccgctccgcgccccttaccggccgcgtcctcggagcgccactaccttcctttgcctcgccttccgctacccgctccgcccggatcctccgcaggtcggcggccgcggcgtcggcggggctggaaacgctaatgccgctgcacagcgcggtggctgccgcgcggcttaggtcctgcatcgccgtcgactcctcctgctggtgctcgctctcacaaggtttaaacaagcgcatctgaccatggctaggagctgagcagaagagaagtgaggacactgagatatgctttgcctttatgacagcgaggcgagctgcacctgaagaaacaaaagaatcttaggaattacaaacaagggctgtactgtaataatgtggttcttgtaaaccaattttgccttagaattctgtaacttgaatcatccacagatgtgcgactgtcttttgtttatgtggatctatgaattacctgccgctcctcgtttgaactacttgcaattccattatagcatcatttgaaaatggcatcaatt

SEQ ID NO: 18134 - DNA, 827 bp, Zea Mays
gttctcagctttcgtgaatccatccacgggccacccaattttctcctgctccggcccatacaaaatctcaaaatcctccagatgaaggtcgctcggcccaaacctagtagtgtctagggttttaccctctccaacacgacgaggttttgctccgacaccgacgcgacagccgacaaggcagggggagaggccgagaggggaaatggcatcgttgtcccgcaccgctgctgccgctgtcgtggccctgaggtcggcggtccgctccgcgccccttaccggccgcgtcctcggagcgccactaccttcctttgcctcgccttccgctacccgctccgcccggatcctccgcaggtcggcggccgcggcgtcggcggggctggaaacgctaatgccgctgcacagcgcggtggctgccgcgcggcttaggtcctgcatcgccgtcgactcctcctgctggtgctcgctctcacaaggtttaaacaagcgcatctgaccatggctaggagctgagcagaagagaagtgaggacactgagttaaaacgaagtcatttttttgttgcagatatttgtaacatgatatgctttgcctttatgacagcgaggcgagctgcacctgaagaaacaaaagaatcttaggaattacaaacaagggctgtactgtaataatgtggttcttgtaaaccaattttgccttagaattctgtaacttgaatcatccacagatgtgcgactgtcttttgtttatgtggatctatgaattacctgccgctcctcgtttgaactacttgcaattccattatagcatcatttgaaaatggcatcaatt

SEQ ID NO: 18135 - DNA, 1876 bp, Zea Mays
aaaccaattagcgtctagggtttagcctctccaacccacgtggttttgcttcgacaacgacgctttggcatcgcacacgacgtgagaagaaatggcatctttgtcccgcacagccgtcgccgccgtgaggtccgcagcccgctcagcaccccttaccggccgcgtcccaggcgcgccactgccttcccttgcctcgtcttccgctgcccggtccgcccggatcctccgcaggtcggcggccgcgtcgtcgtcggggctggagacgctcatgccgctgcacagcgcggtggcggccgcgcggcttaggtcctgcatcgccgttgacttctcctgctggagctcgctctcacaaggtaaccgttggttctggctgttaccctttgacgggataacaaatatttgaatctgttgttgggtgttgcatgctttgcaatatttccgtgtgattgtgcatcttctgtacgagaaaaagaagtccaagccccttcaagtcgctagtttaaccttaacgttttgccagcattctcgaatcaattgctcagagcaccaatcaattattgaactgagctcattacacagattgtttgttctacctttacccacataaaccaagatacagaaggagtcatgtgagtgagctggctactttagcaacgtgtgcattcctgccgtgctttgcacatatgaggtcaatccccagagctatgactgatgaatacatacgaatagtatcctgtcctgattaaactctttttacctttgtggtactgaaatacacgctgatgtttctttttctatttgtagtttagtagcaattagttcaattttgatcgattgttcttctgcagagctacctttacatctatgttcaattgcccggctgtattagcaatatgccattagatttctctttttttttatagtcatgatatttttagcttaaaattattgacctgttttgtttatttggacactgtgggtgggtatggttgtgaaatgagctgttttagctgacccaatgtcagagttgtcacgaactagttggctatttttacaggccaagttcatggagctactgccttaggagcgtgtgttcattctctgacttattggctgtcagtgctaaatggcgcataccaatttggaaacttgtgaacttccatagtagtttcgattttgtataaccttttgtttctggcaacgttgacaaaatttgatcagcagggatctttatgaatgcttttcaaagttacactagtacttgtaataaaaattcctcaatttctctttaggtgtgcaaactttaaatccatatgatataatggcaacatgtattacatcttgtatcccaggcctgacttgctcttatatttggtgatgtaggatacgctttgcctttgtgacagagagaagaaaccaatgaacattaggaatcactatcaagggctgtaataatgtgattcttgtaaactaattttgcctttatagttcattggattttgtaacctggaccattcgaagatgtgcagctggcattcgttgatgcttggattttatttctggatccgtttcttacctgcagcttgtctttcagacagacagttggttggctgttgggatattattcccaattctaaatcatgcgtttttcaaggtaaagttacacaagcatcacctggaattttgtacagtggaatcatctgtgcactcacaggaggaacagtaaacagtaaagcctatttgccaagaagtatgtgtgattgcagtttgtagtcttagatgcgtttgatctgaacttaaaaaaatggaacaagtggtgaatgcaaatgttcttgatgtgcctctagcttcacatcgaggatttcttaaagttatt

SEQ ID NO: 18136 - DNA, 541 bp, Zea Mays
gatgacttccatcttgattatgaaagctaaacaggctcccgtgacgattctgtggcacactgtagcactgtccatggcggtccggtgtgctgtgctcccatgttcgctggtgtcacctctagcatgtacaccgtgcgcgtcttcagaactcccccgttacttgtatccggtgcaggccaccgctctggactgatatcttgtaggttccacttaggaatcagtatcagcgactctatcctagttggtttgtagctcgcacggcactcgttcttgtgtcgcatcgaaatcttcaggctaaatgcttagttgaaactgttcccgtgattcttaagctatctatgtatttgaggattccccggcatgctttcgacgatgaactgcaataatctgaatgcaggaggattgtttgaatgctatcttgtgtctgccgggtgctgggtgcaaggttgattttgacgcatctagctttagcttatgacgtttcaggtgttctctgtctgaaactatttttatgcatggtgagttgatgaccacgaaaata

SEQ ID NO: 18137 - DNA, 2173 bp, Zea Mays
ttcatatggaatgagaaaaaccagcttctgcttggaatcagacgcgccagccgtccacagactgtgatgccctcttctgttctttcgagtgacagcatgcacattgggctccttgcagcagcagctcatgctgctgcaacaaacagccgtttcacaattttctttaatcctagggcaagtccatcagaatttgttatacccctttcgaaatacatcaaggcagtttttcacacgcggatatcagttgggatgcgattcaggatgttgtttgagacagaggaatctagtgtccgcaggtacatggggacaataactgaagtgagtgatgctgacccagtgcgttggcctagttcctattggagatcagtgaagatgacagcaatgctttgatgtggctgagaggagttgctggtgaagggggctttcagtctttaaacttccagtcacctggtgtaggttcctggggacaacagagactccatccatccttacttagcaatgaccatgatcagtatcaagcagtggttgctgccgcagctgcttcccagtcggatggttatctgaagcagcaattcctacaccttcaacaacctatgcagtccccacaggaacagtgcaatctcaatccgctgttgcagcagcaaatactacagcaagggagccaacagcagatggttagtcctgatgctcaaaatatccagtccgtgctcaacccaaatgctattcagcagcagctccaacaattccagcagatgcagcatgctcataatgaccagaagcagaagattcaaccagatcagccgtaccaagttcctagcagtgcggttctctcgagtccaacatcattaccaagccatttgcgggaaaaatttggcttttctgatcctaatgtcaactcttccagcttcatcagctctagcagcaacgagaatatgctggaatcaaacttccttcagggaagctcaaaatctgtggatttgtctagattcaaccaacctgtagttagcgagcagcagcagcaacaggcatggaagcaaaagtttatttgctcacaatcgatgtcttttgggggctcggtttcacttaactcacccactaccaaagatggtcctgttgacaacaaaattggtcgtgatgtgcagaaccagaccctttttagccctcaagttgactcttcctccctactgtacaatatggtacctaatttgacctcaaatgttgcggataataatatatcaacgattccctctggatcaacatatctgcaaagtccaatgtatggttgtctggatgactcttctggtttattgcaaaatacaggagagaatgatccgacaactagaacattcgttaaggtttacaagtcaggatcggtggggagatccttggacatcacccggttctctaattatgctgaacttcgagaggaactgggtcagatgttcggcattaagggtcagttggatgaccctgatagatcaggctggcagcttgtatttgtcgacagggagaacgatgtgcttctccttggagacgacccgtgggagtcatttgtgaatagtgtatggtacatcaaaatactttcacctgaggatgtgcataagatgggaaagccaggaaacgatccacgctacctatcttaaattgatacccagagctctttcgggctcccgtgacgattctgtggcacactgtagcactgtccatggcggtccggtgtgctgtgctcccatgttcgctggtgtcacctctagcatgtacaccgtgcgcgtcttcagaactcccccgttacttgtatccggtgcaggccaccgctctggactgatatcttgtaggttccacttaggaatcagtatcagcgactctatcctagttggtttgtagctcgcacggcactcgttcttgtgtcgcatcgaaatcttcaggctaaatgcttagttgaaactgttcccgtgattcttaagctatctatgtatttgaggattccccggcatgctttcgacgatgaactgcaataatctgaatgcaggaggattgtttgaatgctatcttgtgtctgccgggtgctgggtgcaaggttgattttgacgcatctagctttagcttatgacgtttcaggtgttctctgtctgaaactatttttatgcatggtgagttgatgaccacgaaaata

SEQ ID NO: 18138 - DNA, 2366 bp, Zea Mays
ctggagtgtgtttgtcagtgctaagagacttgttgctggagattctgtgctattcatatggaatgagaaaaaccagcttctgcttggaatcagacgcgccagccgtccacagactgtgatgccctcttctgttctttcgagtgacagcatgcacattgggctccttgcagcagcagctcatgctgctgcaacaaacagccgtttcacaattttctttaatcctagggcaagtccatcagaatttgttatacccctttcgaaatacatcaaggcagtttttcacacgcggatatcagttgggatgcgattcaggatgttgtttgagacagaggaatctagtgtccgcaggtacatggggacaataactgaagtgagtgatgctgacccagtgcgttggcctagttcctattggagatcagtgaaggttggctgggatgaatcaacagcaggagaaaggccacctagagtttctctgtgggaaattgagccactgacaacctttcctatgtatccatccctcttcccactgcgagttaagcatccatggtattcaggagttgctgctcttcatgcaatgctttgatgtggctgagaggagttgctggtgaagggggctttcagtctttaaacttccagtcacctggtgtaggttcctggggacaacagagactccatccatccttacttagcaatgaccatgatcagtatcaagcagtggttgctgccgcagctgcttcccagtcggatggttatctgaagcagcaattcctacaccttcaacaacctatgcagtccccacaggaacagtgcaatctcaatccgctgttgcagcagcaaatactacagcaagggagccaacagcagatggttagtcctgatgctcaaaatatccagtccgtgctcaacccaaatgctattcagcagcagctccaacaattccagcagatgcagcatgctcataatgaccagaagcagaagattcaaccagatcagccgtaccaagttcctagcagtgcggttctctcgagtccaacatcattaccaagccatttgcgggaaaaatttggcttttctgatcctaatgtcaactcttccagcttcatcagctctagcagcaacgagaatatgctggaatcaaacttccttcagggaagctcaaaatctgtggatttgtctagattcaaccaacctgtagttagcgagcagcagcagcaacaggcatggaagcaaaagtttatttgctcacaatcgatgtcttttgggggctcggtttcacttaactcacccactaccaaagatggtcctgttgacaacaaaattggtcgtgatgtgcagaaccagaccctttttagccctcaagttgactcttcctccctactgtacaatatggtacctaatttgacctcaaatgttgcggataataatatatcaacgattccctctggatcaacatatctgcaaagtccaatgtatggttgtctggatgactcttctggtttattgcaaaatacaggagagaatgatccgacaactagaacattcgttaaggtttacaagtcaggatcggtggggagatccttggacatcacccggttctctaattatgctgaacttcgagaggaactgggtcagatgttcggcattaagggtcagttggatgaccctgatagatcaggctggcagcttgtatttgtcgacagggagaacgatgtgcttctccttggagacgacccgtgggagtcatttgtgaatagtgtatggtacatcaaaatactttcacctgaggatgtgcataagatgggaaagccaggaaacgatccacgctacctatcttaaattgatacccagagctctttcgggctcccgtgacgattctgtggcacactgtagcactgtccatggcggtccggtgtgctgtgctcccatgttcgctggtgtcacctctagcatgtacaccgtgcgcgtcttcagaactcccccgttacttgtatccggtgcaggccaccgctctggactgatatcttgtaggttccacttaggaatcagtatcagcgactctatcctagttggtttgtagctcgcacggcactcgttcttgtgtcgcatcgaaatcttcaggctaaatgcttagttgaaactgttcccgtgattcttaagctatctatgtatttgaggattccccggcatgctttcgacgatgaactgcaataatctgaatgcaggaggattgtttgaatgctatcttgtgtctgccgggtgctgggtgcaaggttgattttgacgcatctagctttagcttatgacgtttcaggtgttctctgtctgaaactatttttatgcatggtgagttgatgaccacgaaaata

SEQ ID NO: 18139 - DNA, 3008 bp, Zea Mays
ctctctctctctctctctctccgtgccccccaggccctcctcccaggctcccagcccccctcccgtccctctctctgtctctctccacgcaccatggcgatctccgagctcgggtgagctgacaaggtgggcgtcccgtacctagtaccgctgcctgcctcgggtgaacgagcgtcggttcggctcggtgcagaatgcggccgatttgagcgaggacgggaggggcgcgatggatgcgggttcgggcggattcgcgaggaggctctagaggaggttaggtttcggccccggccccggcccggctgtgggagatgagctcctcgtccgcggccagcatcgggcagcagccgccggaggaagagaagaagtgcctcaactcggagctgtggcacgcgtgcgccggcccgctcgtctgcctccccaccgtcgccacgcgcgtcgtctacttcccgcagggccacagcgagcaggtggcggcgtcgacgaacaaggaggtggacgggcacatccccaactaccccaacctgccgccgcagctgatctgccagctgcacgatgtcacaatgcatgcggatgtggagacggatgaagtgtacgcgcagatgacgctgcagccgctcaacccacaagagcagaacgacccgtacctgcctgcggagatgggaatcatgagcaagcagccgacgaactacttctgcaagacgctgactgcgagcgacaccagcacgcacggcgggttctctgtgccccgtcgcgcggccgagcgtgtcttccccccactggatttcacacagcagcctccagcacaggagcttattgcacgggatattcatgatgtcgagtggaagttcaggcatatcttccgagggcaagtccatcagaatttgttatacccctttcgaaatacatcaaggcagtttttcacacgcggatatcagttgggatgcgattcaggatgttgtttgagacagaggaatctagtgtccgcaggtacatggggacaataactgaagtgagtgatgctgacccagtgcgttggcctagttcctattggagatcagtgaaggttggctgggatgaatcaacagcaggagaaaggccacctagagtttctctgtgggaaattgagccactgacaacctttcctatgtatccatccctcttcccactgcgagttaagcatccatggtattcaggagttgctgctcttcatgcaatgctttgatgtggctgagaggagttgctggtgaagggggctttcagtctttaaacttccagtcacctggtgtaggttcctggggacaacagagactccatccatccttacttagcaatgaccatgatcagtatcaagcagtggttgctgccgcagctgcttcccagtcggatggttatctgaagcagcaattcctacaccttcaacaacctatgcagtccccacaggaacagtgcaatctcaatccgctgttgcagcagcaaatactacagcaagggagccaacagcagatggttagtcctgatgctcaaaatatccagtccgtgctcaacccaaatgctattcagcagcagctccaacaattccagcagatgcagcatgctcataatgaccagaagcagaagattcaaccagatcagccgtaccaagttcctagcagtgcggttctctcgagtccaacatcattaccaagccatttgcgggaaaaatttggcttttctgatcctaatgtcaactcttccagcttcatcagctctagcagcaacgagaatatgctggaatcaaacttccttcagggaagctcaaaatctgtggatttgtctagattcaaccaacctgtagttagcgagcagcagcagcaacaggcatggaagcaaaagtttatttgctcacaatcgatgtcttttgggggctcggtttcacttaactcacccactaccaaagatggtcctgttgacaacaaaattggtcgtgatgtgcagaaccagaccctttttagccctcaagttgactcttcctccctactgtacaatatggtacctaatttgacctcaaatgttgcggataataatatatcaacgattccctctggatcaacatatctgcaaagtccaatgtatggttgtctggatgactcttctggtttattgcaaaatacaggagagaatgatccgacaactagaacattcgttaaggtttacaagtcaggatcggtggggagatccttggacatcacccggttctctaattatgctgaacttcgagaggaactgggtcagatgttcggcattaagggtcagttggatgaccctgatagatcaggctggcagcttgtatttgtcgacagggagaacgatgtgcttctccttggagacgacccgtgggagtcatttgtgaatagtgtatggtacatcaaaatactttcacctgaggatgtgcataagatgggaaagccaggaaacgatccacgctacctatcttaaattgatacccagagctctttcgggctcccgtgacgattctgtggcacactgtagcactgtccatggcggtccggtgtgctgtgctcccatgttcgctggtgtcacctctagcatgtacaccgtgcgcgtcttcagaactcccccgttacttgtatccggtgcaggccaccgctctggactgatatcttgtaggttccacttaggaatcagtatcagcgactctatcctagttggtttgtagctcgcacggcactcgttcttgtgtcgcatcgaaatcttcaggctaaatgcttagttgaaactgttcccgtgattcttaagctatctatgtatttgaggattccccggcatgctttcgacgatgaactgcaataatctgaatgcaggaggattgtttgaatgctatcttgtgtctgccgggtgctgggtgcaaggttgattttgacgcatctagctttagcttatgacgtttcaggtgttctctgtctgaaactatttttatgcatggtgagttgatgaccacgaaaata

SEQ ID NO: 18140 - DNA, 2864 bp, Zea Mays
ctctctctctctctctctctccgtgccccccaggccctcctcccaggctcccagcccccctcccgtccctctctctgtctctctccacgcaccatggcgatctccgagctcgggtgagctgacaagaatgcggccgatttgagcgaggacgggaggggcgcgatggatgcgggttcgggcggattcgcgaggaggctctagaggaggttaggtttcggccccggccccggcccggctgtgggagatgagctcctcgtccgcggccagcatcgggcagcagccgccggaggaagagaagaagtgcctcaactcggagctgtggcacgcgtgcgccggcccgctcgtctgcctccccaccgtcgccacgcgcgtcgtctacttcccgcagggccacagcgagcaggtggcggcgtcgacgaacaaggaggtggacgggcacatccccaactaccccaacctgccgccgcagctgatctgccagctgcacgatgtcacaatgcatgcggatgtggagacggatgaagtgtacgcgcagatgacgctgcagccgctcaacccacaagagcagaacgacccgtacctgcctgcggagatgggaatcatgagcaagcagccgacgaactacttctgcaagacgctgactgcgagcgacaccagcacgcacggcgggttctctgtgccccgtcgcgcggccgagcgtgtcttccccccactggatttcacacagcagcctccagcacaggagcttattgcacgggatattcatgatgtcgagtggaagttcaggcatatcttccgagggcaagtccatcagaatttgttatacccctttcgaaatacatcaaggcagtttttcacacgcggatatcagttgggatgcgattcaggatgttgtttgagacagaggaatctagtgtccgcaggtacatggggacaataactgaagtgagtgatgctgacccagtgcgttggcctagttcctattggagatcagtgaaggttggctgggatgaatcaacagcaggagaaaggccacctagagtttctctgtgggaaattgagccactgacaacctttcctatgtatccatccctcttcccactgcgagttaagcatccatggtattcaggagttgctgctcttcatggttcctggggacaacagagactccatccatccttacttagcaatgaccatgatcagtatcaagcagtggttgctgccgcagctgcttcccagtcggatggttatctgaagcagcaattcctacaccttcaacaacctatgcagtccccacaggaacagtgcaatctcaatccgctgttgcagcagcaaatactacagcaagggagccaacagcagatggttagtcctgatgctcaaaatatccagtccgtgctcaacccaaatgctattcagcagcagctccaacaattccagcagatgcagcatgctcataatgaccagaagcagaagattcaaccagatcagccgtaccaagttcctagcagtgcggttctctcgagtccaacatcattaccaagccatttgcgggaaaaatttggcttttctgatcctaatgtcaactcttccagcttcatcagctctagcagcaacgagaatatgctggaatcaaacttccttcagggaagctcaaaatctgtggatttgtctagattcaaccaacctgtagttagcgagcagcagcagcaacaggcatggaagcaaaagtttatttgctcacaatcgatgtcttttgggggctcggtttcacttaactcacccactaccaaagatggtcctgttgacaacaaaattggtcgtgatgtgcagaaccagaccctttttagccctcaagttgactcttcctccctactgtacaatatggtacctaatttgacctcaaatgttgcggataataatatatcaacgattccctctggatcaacatatctgcaaagtccaatgtatggttgtctggatgactcttctggtttattgcaaaatacaggagagaatgatccgacaactagaacattcgttaaggtttacaagtcaggatcggtggggagatccttggacatcacccggttctctaattatgctgaacttcgagaggaactgggtcagatgttcggcattaagggtcagttggatgaccctgatagatcaggctggcagcttgtatttgtcgacagggagaacgatgtgcttctccttggagacgacccgtgggagtcatttgtgaatagtgtatggtacatcaaaatactttcacctgaggatgtgcataagatgggaaagccaggaaacgatccacgctacctatcttaaattgatacccagagctctttcgggctcccgtgacgattctgtggcacactgtagcactgtccatggcggtccggtgtgctgtgctcccatgttcgctggtgtcacctctagcatgtacaccgtgcgcgtcttcagaactcccccgttacttgtatccggtgcaggccaccgctctggactgatatcttgtaggttccacttaggaatcagtatcagcgactctatcctagttggtttgtagctcgcacggcactcgttcttgtgtcgcatcgaaatcttcaggctaaatgcttagttgaaactgttcccgtgattcttaagctatctatgtatttgaggattccccggcatgctttcgacgatgaactgcaataatctgaatgcaggaggattgtttgaatgctatcttgtgtctgccgggtgctgggtgcaaggttgattttgacgcatctagctttagcttatgacgtttcaggtgttctctgtctgaaactatttttatgcatggtgagttgatgaccacgaaaata

SEQ ID NO: 18141 - DNA, 3278 bp, Zea Mays
ctctctctctctctctctctccgtgccccccaggccctcctcccaggctcccagcccccctcccgtccctctctctgtctctctccacgcaccatggcgatctccgagctcgggtgagctgacaaggtgggcgtcccgtacctagtaccgctgcctgcctcgggtgaacgagcgtcggttcggctcggtgcagaatgcggccgatttgagcgaggacgggaggggcgcgatggatgcgggttcgggcggattcgcgaggaggctctagaggaggttaggtttcggccccggccccggcccggctgtgggagatgagctcctcgtccgcggccagcatcgggcagcagccgccggaggaagagaagaagtgcctcaactcggagctgtggcacgcgtgcgccggcccgctcgtctgcctccccaccgtcgccacgcgcgtcgtctacttcccgcagggccacagcgagcaggtggcggcgtcgacgaacaaggaggtggacgggcacatccccaactaccccaacctgccgccgcagctgatctgccagctgcacgatgtcacaatgcatgcggatgtggagacggatgaagtgtacgcgcagatgacgctgcagccgctcaacccacaagagcagaacgacccgtacctgcctgcggagatgggaatcatgagcaagcagccgacgaactacttctgcaagacgctgactgcgagcgacaccagcacgcacggcgggttctctgtgccccgtcgcgcggccgagcgtgtcttccccccactgtgtggtttgtaggatttcacacagcagcctccagcacaggagcttattgcacgggatattcatgatgtcgagtggaagttcaggcatatcttccgagcccaaaagacacctgctgactactggctggagtgtgtttgtcagtgctaagagacttgttgctggagattctgtgctattcatatggaatgagaaaaaccagcttctgcttggaatcagacgcgccagccgtccacagactgtgatgccctcttctgttctttcgagtgacagcatgcacattgggctccttgcagcagcagctcatgctgctgcaacaaacagccgtttcacaattttctttaatcctagggcaagtccatcagaatttgttatacccctttcgaaatacatcaaggcagtttttcacacgcggatatcagttgggatgcgattcaggatgttgtttgagacagaggaatctagtgtccgcaggtacatggggacaataactgaagtgagtgatgctgacccagtgcgttggcctagttcctattggagatcagtgaaggttggctgggatgaatcaacagcaggagaaaggccacctagagtttctctgtgggaaattgagccactgacaacctttcctatgtatccatccctcttcccactgcgagttaagcatccatggtattcaggagttgctgctcttcatgatgacagcaatgctttgatgtggctgagaggagttgctggtgaagggggctttcagtctttaaacttccagtcacctggtgtaggttcctggggacaacagagactccatccatccttacttagcaatgaccatgatcagtatcaagcagtggttgctgccgcagctgcttcccagtcggatggttatctgaagcagcaattcctacaccttcaacaacctatgcagtccccacaggaacagtgcaatctcaatccgctgttgcagcagcaaatactacagcaagggagccaacagcagatggttagtcctgatgctcaaaatatccagtccgtgctcaacccaaatgctattcagcagcagctccaacaattccagcagatgcagcatgctcataatgaccagaagcagaagattcaaccagatcagccgtaccaagttcctagcagtgcggttctctcgagtccaacatcattaccaagccatttgcgggaaaaatttggcttttctgatcctaatgtcaactcttccagcttcatcagctctagcagcaacgagaatatgctggaatcaaacttccttcagggaagctcaaaatctgtggatttgtctagattcaaccaacctgtagttagcgagcagcagcagcaacaggcatggaagcaaaagtttatttgctcacaatcgatgtcttttgggggctcggtttcacttaactcacccactaccaaagatggtcctgttgacaacaaaattggtcgtgatgtgcagaaccagaccctttttagccctcaagttgactcttcctccctactgtacaatatggtacctaatttgacctcaaatgttgcggataataatatatcaacgattccctctggatcaacatatctgcaaagtccaatgtatggttgtctggatgactcttctggtttattgcaaaatacaggagagaatgatccgacaactagaacattcgttaaggtttacaagtcaggatcggtggggagatccttggacatcacccggttctctaattatgctgaacttcgagaggaactgggtcagatgttcggcattaagggtcagttggatgaccctgatagatcaggctggcagcttgtatttgtcgacagggagaacgatgtgcttctccttggagacgacccgtgggagtcatttgtgaatagtgtatggtacatcaaaatactttcacctgaggatgtgcataagatgggaaagccaggaaacgatccacgctacctatcttaaattgatacccagagctctttcgggctcccgtgacgattctgtggcacactgtagcactgtccatggcggtccggtgtgctgtgctcccatgttcgctggtgtcacctctagcatgtacaccgtgcgcgtcttcagaactcccccgttacttgtatccggtgcaggccaccgctctggactgatatcttgtaggttccacttaggaatcagtatcagcgactctatcctagttggtttgtagctcgcacggcactcgttcttgtgtcgcatcgaaatcttcaggctaaatgcttagttgaaactgttcccgtgattcttaagctatctatgtatttgaggattccccggcatgctttcgacgatgaactgcaataatctgaatgcaggaggattgtttgaatgctatcttgtgtctgccgggtgctgggtgcaaggttgattttgacgcatctagctttagcttatgacgtttcaggtgttctctgtctgaaactatttttatgcatggtgagttgatgaccacgaaaata

SEQ ID NO: 18142 - DNA, 3271 bp, Zea Mays
ctctctctctctctctctctccgtgccccccaggccctcctcccaggctcccagcccccctcccgtccctctctctgtctctctccacgcaccatggcgatctccgagctcgggtgagctgacaaggtgggcgtcccgtacctagtaccgctgcctgcctcgggtgaacgagcgtcggttcggctcggtgcagaatgcggccgatttgagcgaggacgggaggggcgcgatggatgcgggttcgggcggattcgcgaggaggctctagaggaggttaggtttcggccccggccccggcccggctgtgggagatgagctcctcgtccgcggccagcatcgggcagcagccgccggaggaagagaagaagtgcctcaactcggagctgtggcacgcgtgcgccggcccgctcgtctgcctccccaccgtcgccacgcgcgtcgtctacttcccgcagggccacagcgagcaggtggcggcgtcgacgaacaaggaggtggacgggcacatccccaactaccccaacctgccgccgcagctgatctgccagctgcacgatgtcacaatgcatgcggatgtggagacggatgaagtgtacgcgcagatgacgctgcagccgctcaacccacaagagcagaacgacccgtacctgcctgcggagatgggaatcatgagcaagcagccgacgaactacttctgcaagacgctgactgcgagcgacaccagcacgcacggcgggttctctgtgccccgtcgcgcggccgagcgtgtcttccccccactggatttcacacagcagcctccagcacaggagcttattgcacgggatattcatgatgtcgagtggaagttcaggcatatcttccgaggccagcccaaaagacacctgctgactactggctggagtgtgtttgtcagtgctaagagacttgttgctggagattctgtgctattcatatggaatgagaaaaaccagcttctgcttggaatcagacgcgccagccgtccacagactgtgatgccctcttctgttctttcgagtgacagcatgcacattgggctccttgcagcagcagctcatgctgctgcaacaaacagccgtttcacaattttctttaatcctagggcaagtccatcagaatttgttatacccctttcgaaatacatcaaggcagtttttcacacgcggatatcagttgggatgcgattcaggatgttgtttgagacagaggaatctagtgtccgcaggtacatggggacaataactgaagtgagtgatgctgacccagtgcgttggcctagttcctattggagatcagtgaaggttggctgggatgaatcaacagcaggagaaaggccacctagagtttctctgtgggaaattgagccactgacaacctttcctatgtatccatccctcttcccactgcgagttaagcatccatggtattcaggagttgctgctcttcatgatgacagcaatgctttgatgtggctgagaggagttgctggtgaagggggctttcagtctttaaacttccagtcacctggtgtaggttcctggggacaacagagactccatccatccttacttagcaatgaccatgatcagtatcaagcagtggttgctgccgcagctgcttcccagtcggatggttatctgaagcagcaattcctacaccttcaacaacctatgcagtccccacaggaacagtgcaatctcaatccgctgttgcagcagcaaatactacagcaagggagccaacagcagatggttagtcctgatgctcaaaatatccagtccgtgctcaacccaaatgctattcagcagcagctccaacaattccagcagatgcagcatgctcataatgaccagaagcagaagattcaaccagatcagccgtaccaagttcctagcagtgcggttctctcgagtccaacatcattaccaagccatttgcgggaaaaatttggcttttctgatcctaatgtcaactcttccagcttcatcagctctagcagcaacgagaatatgctggaatcaaacttccttcagggaagctcaaaatctgtggatttgtctagattcaaccaacctgtagttagcgagcagcagcagcaacaggcatggaagcaaaagtttatttgctcacaatcgatgtcttttgggggctcggtttcacttaactcacccactaccaaagatggtcctgttgacaacaaaattggtcgtgatgtgcagaaccagaccctttttagccctcaagttgactcttcctccctactgtacaatatggtacctaatttgacctcaaatgttgcggataataatatatcaacgattccctctggatcaacatatctgcaaagtccaatgtatggttgtctggatgactcttctggtttattgcaaaatacaggagagaatgatccgacaactagaacattcgttaaggtttacaagtcaggatcggtggggagatccttggacatcacccggttctctaattatgctgaacttcgagaggaactgggtcagatgttcggcattaagggtcagttggatgaccctgatagatcaggctggcagcttgtatttgtcgacagggagaacgatgtgcttctccttggagacgacccgtgggagtcatttgtgaatagtgtatggtacatcaaaatactttcacctgaggatgtgcataagatgggaaagccaggaaacgatccacgctacctatcttaaattgatacccagagctctttcgggctcccgtgacgattctgtggcacactgtagcactgtccatggcggtccggtgtgctgtgctcccatgttcgctggtgtcacctctagcatgtacaccgtgcgcgtcttcagaactcccccgttacttgtatccggtgcaggccaccgctctggactgatatcttgtaggttccacttaggaatcagtatcagcgactctatcctagttggtttgtagctcgcacggcactcgttcttgtgtcgcatcgaaatcttcaggctaaatgcttagttgaaactgttcccgtgattcttaagctatctatgtatttgaggattccccggcatgctttcgacgatgaactgcaataatctgaatgcaggaggattgtttgaatgctatcttgtgtctgccgggtgctgggtgcaaggttgattttgacgcatctagctttagcttatgacgtttcaggtgttctctgtctgaaactatttttatgcatggtgagttgatgaccacgaaaata

SEQ ID NO: 18143 - DNA, 3283 bp, Zea Mays
ctctctctctctctctctctccgtgccccccaggccctcctcccaggctcccagcccccctcccgtccctctctctgtctctctccacgcaccatggcgatctccgagctcgggtgagctgacaaggtgggcgtcccgtacctagtaccgctgcctgcctcgggtgaacgagcgtcggttcggctcggtgcagaatgcggccgatttgagcgaggacgggaggggcgcgatggatgcgggttcgggcggattcgcgaggaggctctagaggaggttaggtttcggccccggccccggcccggctgtgggagatgagctcctcgtccgcggccagcatcgggcagcagccgccggaggaagagaagaagtgcctcaactcggagctgtggcacgcgtgcgccggcccgctcgtctgcctccccaccgtcgccacgcgcgtcgtctacttcccgcagggccacagcgagcaggtggcggcgtcgacgaacaaggaggtggacgggcacatccccaactaccccaacctgccgccgcagctgatctgccagctgcacgatgtcacaatgcatgcggatgtggagacggatgaagtgtacgcgcagatgacgctgcagccgctcaacccacaagagcagaacgacccgtacctgcctgcggagatgggaatcatgagcaagcagccgacgaactacttctgcaagacgctgactgcgagcgacaccagcacgcacggcgggttctctgtgccccgtcgcgcggccgagcgtgtcttccccccactgtgtggtttgtaggatttcacacagcagcctccagcacaggagcttattgcacgggatattcatgatgtcgagtggaagttcaggcatatcttccgaggccagcccaaaagacacctgctgactactggctggagtgtgtttgtcagtgctaagagacttgttgctggagattctgtgctattcatatggaatgagaaaaaccagcttctgcttggaatcagacgcgccagccgtccacagactgtgatgccctcttctgttctttcgagtgacagcatgcacattgggctccttgcagcagcagctcatgctgctgcaacaaacagccgtttcacaattttctttaatcctagggcaagtccatcagaatttgttatacccctttcgaaatacatcaaggcagtttttcacacgcggatatcagttgggatgcgattcaggatgttgtttgagacagaggaatctagtgtccgcaggtacatggggacaataactgaagtgagtgatgctgacccagtgcgttggcctagttcctattggagatcagtgaaggttggctgggatgaatcaacagcaggagaaaggccacctagagtttctctgtgggaaattgagccactgacaacctttcctatgtatccatccctcttcccactgcgagttaagcatccatggtattcaggagttgctgctcttcatgatgacagcaatgctttgatgtggctgagaggagttgctggtgaagggggctttcagtctttaaacttccagtcacctggtgtaggttcctggggacaacagagactccatccatccttacttagcaatgaccatgatcagtatcaagcagtggttgctgccgcagctgcttcccagtcggatggttatctgaagcagcaattcctacaccttcaacaacctatgcagtccccacaggaacagtgcaatctcaatccgctgttgcagcagcaaatactacagcaagggagccaacagcagatggttagtcctgatgctcaaaatatccagtccgtgctcaacccaaatgctattcagcagcagctccaacaattccagcagatgcagcatgctcataatgaccagaagcagaagattcaaccagatcagccgtaccaagttcctagcagtgcggttctctcgagtccaacatcattaccaagccatttgcgggaaaaatttggcttttctgatcctaatgtcaactcttccagcttcatcagctctagcagcaacgagaatatgctggaatcaaacttccttcagggaagctcaaaatctgtggatttgtctagattcaaccaacctgtagttagcgagcagcagcagcaacaggcatggaagcaaaagtttatttgctcacaatcgatgtcttttgggggctcggtttcacttaactcacccactaccaaagatggtcctgttgacaacaaaattggtcgtgatgtgcagaaccagaccctttttagccctcaagttgactcttcctccctactgtacaatatggtacctaatttgacctcaaatgttgcggataataatatatcaacgattccctctggatcaacatatctgcaaagtccaatgtatggttgtctggatgactcttctggtttattgcaaaatacaggagagaatgatccgacaactagaacattcgttaaggtttacaagtcaggatcggtggggagatccttggacatcacccggttctctaattatgctgaacttcgagaggaactgggtcagatgttcggcattaagggtcagttggatgaccctgatagatcaggctggcagcttgtatttgtcgacagggagaacgatgtgcttctccttggagacgacccgtgggagtcatttgtgaatagtgtatggtacatcaaaatactttcacctgaggatgtgcataagatgggaaagccaggaaacgatccacgctacctatcttaaattgatacccagagctctttcgggctcccgtgacgattctgtggcacactgtagcactgtccatggcggtccggtgtgctgtgctcccatgttcgctggtgtcacctctagcatgtacaccgtgcgcgtcttcagaactcccccgttacttgtatccggtgcaggccaccgctctggactgatatcttgtaggttccacttaggaatcagtatcagcgactctatcctagttggtttgtagctcgcacggcactcgttcttgtgtcgcatcgaaatcttcaggctaaatgcttagttgaaactgttcccgtgattcttaagctatctatgtatttgaggattccccggcatgctttcgacgatgaactgcaataatctgaatgcaggaggattgtttgaatgctatcttgtgtctgccgggtgctgggtgcaaggttgattttgacgcatctagctttagcttatgacgtttcaggtgttctctgtctgaaactatttttatgcatggtgagttgatgaccacgaaaata

SEQ ID NO: 18144 - DNA, 3120 bp, Zea Mays
ctctctctctctctctctctccgtgccccccaggccctcctcccaggctcccagcccccctcccgtccctctctctgtctctctccacgcaccatggcgatctccgagctcgggtgagctgacaagaatgcggccgatttgagcgaggacgggaggggcgcgatggatgcgggttcgggcggattcgcgaggaggctctagaggaggttaggtttcggccccggccccggcccggctgtgggagatgagctcctcgtccgcggccagcatcgggcagcagccgccggaggaagagaagaagtgcctcaactcggagctgtggcacgcgtgcgccggcccgctcgtctgcctccccaccgtcgccacgcgcgtcgtctacttcccgcagggccacagcgagcaggtggcggcgtcgacgaacaaggaggtggacgggcacatccccaactaccccaacctgccgccgcagctgatctgccagctgcacgatgtcacaatgcatgcggatgtggagacggatgaagtgtacgcgcagatgacgctgcagccgctcaacccacaagagcagaacgacccgtacctgcctgcggagatgggaatcatgagcaagcagccgacgaactacttctgcaagacgctgactgcgagcgacaccagcacgcacggcgggttctctgtgccccgtcgcgcggccgagcgtgtcttccccccactggatttcacacagcagcctccagcacaggagcttattgcacgggatattcatgatgtcgagtggaagttcaggcatatcttccgaggccagcccaaaagacacctgctgactactggctggagtgtgtttgtcagtgctaagagacttgttgctggagattctgtgctattcatatggaatgagaaaaaccagcttctgcttggaatcagacgcgccagccgtccacagactgtgatgccctcttctgttctttcgagtgacagcatgcacattgggctccttgcagcagcagctcatgctgctgcaacaaacagccgtttcacaattttctttaatcctagggcaagtccatcagaatttgttatacccctttcgaaatacatcaaggcagtttttcacacgcggatatcagttgggatgcgattcaggatgttgtttgagacagaggaatctagtgtccgcaggtacatggggacaataactgaagtgagtgatgctgacccagtgcgttggcctagttcctattggagatcagtgaaggttggctgggatgaatcaacagcaggagaaaggccacctagagtttctctgtgggaaattgagccactgacaacctttcctatgtatccatccctcttcccactgcgagttaagcatccatggtattcaggagttgctgctcttcatggttcctggggacaacagagactccatccatccttacttagcaatgaccatgatcagtatcaagcagtggttgctgccgcagctgcttcccagtcggatggttatctgaagcagcaattcctacaccttcaacaacctatgcagtccccacaggaacagtgcaatctcaatccgctgttgcagcagcaaatactacagcaagggagccaacagcagatggttagtcctgatgctcaaaatatccagtccgtgctcaacccaaatgctattcagcagcagctccaacaattccagcagatgcagcatgctcataatgaccagaagcagaagattcaaccagatcagccgtaccaagttcctagcagtgcggttctctcgagtccaacatcattaccaagccatttgcgggaaaaatttggcttttctgatcctaatgtcaactcttccagcttcatcagctctagcagcaacgagaatatgctggaatcaaacttccttcagggaagctcaaaatctgtggatttgtctagattcaaccaacctgtagttagcgagcagcagcagcaacaggcatggaagcaaaagtttatttgctcacaatcgatgtcttttgggggctcggtttcacttaactcacccactaccaaagatggtcctgttgacaacaaaattggtcgtgatgtgcagaaccagaccctttttagccctcaagttgactcttcctccctactgtacaatatggtacctaatttgacctcaaatgttgcggataataatatatcaacgattccctctggatcaacatatctgcaaagtccaatgtatggttgtctggatgactcttctggtttattgcaaaatacaggagagaatgatccgacaactagaacattcgttaaggtttacaagtcaggatcggtggggagatccttggacatcacccggttctctaattatgctgaacttcgagaggaactgggtcagatgttcggcattaagggtcagttggatgaccctgatagatcaggctggcagcttgtatttgtcgacagggagaacgatgtgcttctccttggagacgacccgtgggagtcatttgtgaatagtgtatggtacatcaaaatactttcacctgaggatgtgcataagatgggaaagccaggaaacgatccacgctacctatcttaaattgatacccagagctctttcgggctcccgtgacgattctgtggcacactgtagcactgtccatggcggtccggtgtgctgtgctcccatgttcgctggtgtcacctctagcatgtacaccgtgcgcgtcttcagaactcccccgttacttgtatccggtgcaggccaccgctctggactgatatcttgtaggttccacttaggaatcagtatcagcgactctatcctagttggtttgtagctcgcacggcactcgttcttgtgtcgcatcgaaatcttcaggctaaatgcttagttgaaactgttcccgtgattcttaagctatctatgtatttgaggattccccggcatgctttcgacgatgaactgcaataatctgaatgcaggaggattgtttgaatgctatcttgtgtctgccgggtgctgggtgcaaggttgattttgacgcatctagctttagcttatgacgtttcaggtgttctctgtctgaaactatttttatgcatggtgagttgatgaccacgaaaata

SEQ ID NO: 18145 - DNA, 3015 bp, Zea Mays
ctctctctctctctctctctccgtgccccccaggccctcctcccaggctcccagcccccctcccgtccctctctctgtctctctccacgcaccatggcgatctccgagctcgggtgagctgacaaggtgggcgtcccgtacctagtaccgctgcctgcctcgggtgaacgagcgtcggttcggctcggtgcagaatgcggccgatttgagcgaggacgggaggggcgcgatggatgcgggttcgggcggattcgcgaggaggctctagaggaggttaggtttcggccccggccccggcccggctgtgggagatgagctcctcgtccgcggccagcatcgggcagcagccgccggaggaagagaagaagtgcctcaactcggagctgtggcacgcgtgcgccggcccgctcgtctgcctccccaccgtcgccacgcgcgtcgtctacttcccgcagggccacagcgagcaggtggcggcgtcgacgaacaaggaggtggacgggcacatccccaactaccccaacctgccgccgcagctgatctgccagctgcacgatgtcacaatgcatgcggatgtggagacggatgaagtgtacgcgcagatgacgctgcagccgctcaacccacaagagcagaacgacccgtacctgcctgcggagatgggaatcatgagcaagcagccgacgaactacttctgcaagacgctgactgcgagcgacaccagcacgcacggcgggttctctgtgccccgtcgcgcggccgagcgtgtcttccccccactggatttcacacagcagcctccagcacaggagcttattgcacgggatattcatgatgtcgagtggaagttcaggcatatcttccgagggcaagtccatcagaatttgttatacccctttcgaaatacatcaaggcagtttttcacacgcggatatcagttgggatgcgattcaggatgttgtttgagacagaggaatctagtgtccgcaggtacatggggacaataactgaagtgagtgatgctgacccagtgcgttggcctagttcctattggagatcagtgaaggttggctgggatgaatcaacagcaggagaaaggccacctagagtttctctgtgggaaattgagccactgacaacctttcctatgtatccatccctcttcccactgcgagttaagcatccatggtattcaggagttgctgctcttcatgatgacagcaatgctttgatgtggctgagaggagttgctggtgaagggggctttcagtctttaaacttccagtcacctggtgtaggttcctggggacaacagagactccatccatccttacttagcaatgaccatgatcagtatcaagcagtggttgctgccgcagctgcttcccagtcggatggttatctgaagcagcaattcctacaccttcaacaacctatgcagtccccacaggaacagtgcaatctcaatccgctgttgcagcagcaaatactacagcaagggagccaacagcagatggttagtcctgatgctcaaaatatccagtccgtgctcaacccaaatgctattcagcagcagctccaacaattccagcagatgcagcatgctcataatgaccagaagcagaagattcaaccagatcagccgtaccaagttcctagcagtgcggttctctcgagtccaacatcattaccaagccatttgcgggaaaaatttggcttttctgatcctaatgtcaactcttccagcttcatcagctctagcagcaacgagaatatgctggaatcaaacttccttcagggaagctcaaaatctgtggatttgtctagattcaaccaacctgtagttagcgagcagcagcagcaacaggcatggaagcaaaagtttatttgctcacaatcgatgtcttttgggggctcggtttcacttaactcacccactaccaaagatggtcctgttgacaacaaaattggtcgtgatgtgcagaaccagaccctttttagccctcaagttgactcttcctccctactgtacaatatggtacctaatttgacctcaaatgttgcggataataatatatcaacgattccctctggatcaacatatctgcaaagtccaatgtatggttgtctggatgactcttctggtttattgcaaaatacaggagagaatgatccgacaactagaacattcgttaaggtttacaagtcaggatcggtggggagatccttggacatcacccggttctctaattatgctgaacttcgagaggaactgggtcagatgttcggcattaagggtcagttggatgaccctgatagatcaggctggcagcttgtatttgtcgacagggagaacgatgtgcttctccttggagacgacccgtgggagtcatttgtgaatagtgtatggtacatcaaaatactttcacctgaggatgtgcataagatgggaaagccaggaaacgatccacgctacctatcttaaattgatacccagagctctttcgggctcccgtgacgattctgtggcacactgtagcactgtccatggcggtccggtgtgctgtgctcccatgttcgctggtgtcacctctagcatgtacaccgtgcgcgtcttcagaactcccccgttacttgtatccggtgcaggccaccgctctggactgatatcttgtaggttccacttaggaatcagtatcagcgactctatcctagttggtttgtagctcgcacggcactcgttcttgtgtcgcatcgaaatcttcaggctaaatgcttagttgaaactgttcccgtgattcttaagctatctatgtatttgaggattccccggcatgctttcgacgatgaactgcaataatctgaatgcaggaggattgtttgaatgctatcttgtgtctgccgggtgctgggtgcaaggttgattttgacgcatctagctttagcttatgacgtttcaggtgttctctgtctgaaactatttttatgcatggtgagttgatgaccacgaaaata

SEQ ID NO: 18146 - DNA, 4052 bp, Zea Mays
ctctctctctctctctctctccgtgccccccaggccctcctcccaggctcccagcccccctcccgtccctctctctgtctctctccacgcaccatggcgatctccgagctcgggtgagctgacaagaatgcggccgatttgagcgaggacgggaggggcgcgatggatgcgggttcgggcggattcgcgaggaggctctagaggaggttaggtttcggccccggccccggcccggctgtgggagatgagctcctcgtccgcggccagcatcgggcagcagccgccggaggaagagaagaagtgcctcaactcggagctgtggcacgcgtgcgccggcccgctcgtctgcctccccaccgtcgccacgcgcgtcgtctacttcccgcagggccacagcgagcaggtggcggcgtcgacgaacaaggaggtggacgggcacatccccaactaccccaacctgccgccgcagctgatctgccagctgcacgatgtcacaatgcatgcggatgtggagacggatgaagtgtacgcgcagatgacgctgcagccgctcaacccacaagagcagaacgacccgtacctgcctgcggagatgggaatcatgagcaagcagccgacgaactacttctgcaagacgctgactgcgagcgacaccagcacgcacggcgggttctctgtgccccgtcgcgcggccgagcgtgtcttccccccactgctgcatgctgggttgtttggtttgctgttgcaaataacaggtggtatagtgtgccgccagcgcattccactttctagccgccagcgccaggaactgaggaaccctggaagttggaacggccgtgcactcgccaggaagtcaagaactgagaagccgtgtcgaacgattgaaactgggagatgttggatcgttggaacggcccaacgacgcacaggatggccatgtggggtccctggtgggcctggcttagggaatgagaaaaaccagcttctgcttggaatcagacgcgccagccgtccacagactgtgatgccctcttctgttctttcgagtgacagcatgcacattgggctccttgcagcagcagctcatgctgctgcaacaaacagccgtttcacaattttctttaatcctagggcaagtccatcagaatttgttatacccctttcgaaatacatcaaggcagtttttcacacgcggatatcagttgggatgcgattcaggatgttgtttgagacagaggaatctagtgtccgcaggtacatggggacaataactgaagtgagtgatgctgacccagtgcgttggcctagttcctattggagatcagtgaaggttggctgggatgaatcaacagcaggagaaaggccacctagagtttctctgtgggaaattgagccactgacaacctttcctatgtatccatccctcttcccactgcgagttaagcatccatggtattcaggagttgctgctcttcatggtacacttcaaatactcatgcttgttgctatcacgctgagtgcagcacctctggtgttgtggctatttacatgcgttatttctgttactgctacaaagtaggtactcatagcgctgccagattacactgaaagcagccagcaagaacaatagtttttttttttggagtagaagcctgtttatatcagctactagggaaaaaagttacatagatgcttttagatccaacaattggctcaggaaacttgatatgatgatgagttgttgacctcagccgaagtaatctggcagttcagtgactgaggttttgttatttccatcttgcttcaatggaaactagaagtaaaactgctgtacaactaaaatatggatatcttccaagggcctgtttggacccacagagatagtagtttgctgctaatattagctcctttggatacaaacaggcctagctaatacttaagtttattgttagttgaatacccaactaacatatattttactagttgaaccaaactagctagtagcaggtaatattagctaaaaaaggacggaccagtgcccggaggctcccactttgtgtgggtcatggggaaggacaggaccaaaacatctatgccaaattggcagcattgagggaggcaccatggtagaacgtgctatttcatttatttgctgaagcttttcatttatgtgttagacaacttgtgtcattattgtcattgcctttcattctgttattatgcctttattgattgtaatattacacttaagatgacagcaatgctttgatgtggctgagaggagttgctggtgaagggggctttcagtctttaaacttccagtcacctggtgtaggttcctggggacaacagagactccatccatccttacttagcaatgaccatgatcagtatcaagcagtggttgctgccgcagctgcttcccagtcggatggttatctgaagcagcaattcctacaccttcaacaacctatgcagtccccacaggaacagtgcaatctcaatccgctgttgcagcagcaaatactacagcaagggagccaacagcagatggttagtcctgatgctcaaaatatccagtccgtgctcaacccaaatgctattcagcagcagctccaacaattccagcagatgcagcatgctcataatgaccagaagcagaagattcaaccagatcagccgtaccaagttcctagcagtgcggttctctcgagtccaacatcattaccaagccatttgcgggaaaaatttggcttttctgatcctaatgtcaactcttccagcttcatcagctctagcagcaacgagaatatgctggaatcaaacttccttcagggaagctcaaaatctgtggatttgtctagattcaaccaacctgtagttagcgagcagcagcagcaacaggcatggaagcaaaagtttatttgctcacaatcgatgtcttttgggggctcggtttcacttaactcacccactaccaaagatggtcctgttgacaacaaaattggtcgtgatgtgcagaaccagaccctttttagccctcaagttgactcttcctccctactgtacaatatggtacctaatttgacctcaaatgttgcggataataatatatcaacgattccctctggatcaacatatctgcaaagtccaatgtatggttgtctggatgactcttctggtttattgcaaaatacaggagagaatgatccgacaactagaacattcgttaaggtttacaagtcaggatcggtggggagatccttggacatcacccggttctctaattatgctgaacttcgagaggaactgggtcagatgttcggcattaagggtcagttggatgaccctgatagatcaggctggcagcttgtatttgtcgacagggagaacgatgtgcttctccttggagacgacccgtgggagtcatttgtgaatagtgtatggtacatcaaaatactttcacctgaggatgtgcataagatgggaaagccaggaaacgatccacgctacctatcttaaattgatacccagagctctttcgggctcccgtgacgattctgtggcacactgtagcactgtccatggcggtccggtgtgctgtgctcccatgttcgctggtgtcacctctagcatgtacaccgtgcgcgtcttcagaactcccccgttacttgtatccggtgcaggccaccgctctggactgatatcttgtaggttccacttaggaatcagtatcagcgactctatcctagttggtttgtagctcgcacggcactcgttcttgtgtcgcatcgaaatcttcaggctaaatgcttagttgaaactgttcccgtgattcttaagctatctatgtatttgaggattccccggcatgctttcgacgatgaactgcaataatctgaatgcaggaggattgtttgaatgctatcttgtgtctgccgggtgctgggtgcaaggttgattttgacgcatctagctttagcttatgacgtttcaggtgttctctgtctgaaactatttttatgcatggtgagttgatgaccacgaaaata

SEQ ID NO: 18147 - DNA, 2656 bp, Zea Mays
ccagcgcgcgtgccgctctccatgtcgttgcgcctcggcttccacaacctggagccggcgctcgccgcggcggccgaggcgctgttcggcacccgctccccgccgcgcgccgtcctccgccgcgcgcgcgcgctgcacgcgctcctcgtggtctcgtccctgccgtccgcgccccgcccgcccaccttcctcgtcaaccagctgctcgccctctactgccgcctctccgcggtccccgacgccctcgccctcctccgctccacgccgtgcccctccgtgatctcctacaacaccgtcctctccgctctctcgcgcaccccaaggcacgcgcaggacgccttcgggctcttccgcggcctgcactcgtcgggtctccgcccgaccgcccccagcctctgcgccgtcctccgcgccgccggcgcactgcgcgacggccgcgcgggggccgcggcacacgcgcatgcctcggcgctcggcttcctcgccagcgacattgtgccgaccgcgctgctccagatgtactccgggtgcgggtcgccgagggacgctaaccaggtgttcgacgaaatgatgacgccggatgtggtggcgtggaactgcgtgatgcactgcaacgtacggtacgattacctggaccgcgccctgcggaagttctgccggatggtgagcactgggctggcgcctacagagagcaccctttcttcggtgctgagtgggtgcgggcgctctggggacttgcaccatgggcgtgcgctacatggatgggtggtgaaatcagaggagcttgatcctgatttgcctttgcataatgcgctgcttgatatgtactgctgctgtggtgatctagacactgcagtacttgtgtttcggaggatcgaaacaccagacttggtgtcatggaataccataatttctggattttctggcgttgcggacggatggaccgcagtgcaggcctttgtgaagctcaaggctgtgtcctctgaatggctggctccagatgagtacacatttgcggcagtggtggctgcagctgcttctttaccagcaatgtgtagcggcaaaccgcttcatgcttgtgtgatcaaggctgggttggagagcagcgtctttgttgcgaatacacttctcaatatgtatttcacaaatgaggatccagagtctgctcacattttgttcgattccgttatggtgaaagatgttatcatgtggactgagatggtagctggccattctgcactagtgctttgaactccgcagcagatcttgcaggtcttaagcaaggggaaatgctccatgctcaagtggtaaaaagtggctatgaaggaaatatttgtgtctctggaagccttgttgatatgtacgcgaaaaatggtactcttcttcgtgcctattctgttttctgcaccatacagaagccagatttgaagtgctggaatgctatgataggaggatatggcaaccacggggattctgaaatggcattcaaactatttggtgacatgattcgtagtgatctgcaacctgaccatgtaacatacatctcactcctttctacttgtagccattgtggactggttgagaaaggaaagctttattggttctgcatgataaatgacggcattgtaccagggttcaaacactacactagcatggtgagtttgttgagtagggcaggtttattggaggaagcagttgagttaattaataaatccccttctgccaagagatatcctgagctatggagaattctactaagctctagtgtgacatttaaaaatctgtcaattggtgttcatgctgctgaacaagcactggagctggatccagatgatctctcaacacatatactgctttcaaacctttatgcttctataggaaaatgggatagtgtgtctgaaattaggagaaagatcagagggctcatgattgaaaaggagcctgggcttagctggattgagattgagaaaatggtacatgtgttttctgcagacgatgaatgccacacacgcattgatgattgtcgtgatgagttacttagaataatggaaaacatggtactgttggatagttatgaaaatgaaatagtgttaaatggttaggttgcctttgttgttaatggaaatggggttgacttggtcagaaaatgcctaagttgctatgaacttatttctgttgcatgacatgctttctttcatggcactaagaaagctgatgagtataaccagatttttcagcacaacaaatgataggagaagctatatatcaagcgtccaacaatttttgagattctccatcatgaacagtagaatttctggctataaaacttgtcctctgtcaaatacacactgaaaattgatgtcgttcgagccagtctgccccgatgccgcctgccgctgcctccttcccgacacgcgacgtcgttcgaccccaaaccctcctgacaccctcaccccatttttcatcatcacgacgccgacacatctggcaggtcccatctcgctcgtcgcgacgatgcgacccattctcggcggtcggcgagtttggtgaaccagcgagccctagcttcttgtcggagaggccacctgacaccgtccctttcccgatgcccctgccgttcaaggagataaacattggacatgtaagtacggcttcg

SEQ ID NO: 18148 - DNA, 2184 bp, Zea Mays
atttttaggatgggagggcctactagatctaggaagcctagcggtagagaattttataataataaccgacgcgactttttctttttgttttctggcggcgtggtgttctttttcactgagaagagaataagggagatcaaacggggccgtggaaaaaggggggttagttttattcgactggcttcgcgtgcgccgatcttctatttagcacgcgacaggagcatctcgttgctcgattcggttttcttcgtgaattcgcccccagcgagccgagctagaattggaattggaactggacttgcggctgctgcgttcggcgggggctggaattctcgccgcatccccgtgtggtggtgagaggccgtggctcgtgttgcggtcgacgcgcgaggagggtcgacggcctcgcgccattggggtacgaagccggccgagactgagcggccgctgatcctggtttgagcgcctcgggttcctcttggatttggttggcgtttttatgggcgggtagatcggtccggtgatttctcagctgctatcggtgcgatggcagctgactccagcatggggtttcaccaggggatcaccgcctctctgtacaaccatcacatgctctcgttccagtccaacagcgacgtcggcatcggcggcggcgacgacgctaccggtggcatggtcatggccccggggagtgtgagtgggggcagtggcaacgccgggctgttcctctccccaaacacaggggtcgtcggcaacgcaccgggggttgccccgttaatgaactcgtcgggggatgcgttccgtggcactgggacgcccaagtataagtatgtcactggttctccttccgattggagtgaccgtgaggtagacatactgaatgaagggcttgtgagatatgctcgtgaacctagtatcatgaggtacattaagatagcagctatgcttcctaacagaaccatcagggatgttgcgctgcgatgctgctgggctacaggtaaagagagaaggaagaaacctgatggattctacacagggaaaaaaatgagagacgtgaagccaatccaggacaaaatggttgcatcagtcccaatagctaattttcacatgacacctacaaccaatgtaatccccttttcggtatcaacgcagcatccaaatcaacaaagtcaggttcccaaagaagtgcaacccagcgtctcctggaggaaaataatcagttgcttaaccagatttctgcaaataatgaaacattcaagacagtggagaacacagatctttttctccgcacgagtaacaacatcaaaacaattttaagcagaatgagcgaaacgcctggtatcatgagtcagatgcccccattgcctttatccataaacgaagaccatataaattctcttattcaactgaacagactggttgcatcatatggcacaacaagcatttcccatcatacgaagcaagagccatgaagctagtctactaaacccagggaaaaatgagaggaccagatggccggacccctcctgcaattctgtaaacgtgctgctgaggaagtcttgcatgttatactctaaccaagtgccaggaacagtcactgctttccagataatgttttcgcagtgacctgattgtttccaacccgtctgccagcctgcctgcccaccaattcttgaagcatttggaagaagtctgcagttgtggttcgagagccgcaagctatttgctgctgtttctgtttccgttatccagcatgtagaccagagtatcagacagtggatcctggtctctgcaaatgacctgtaaatatcggacggctgctggcgttccatgttttgtttctctgatcgctcatgaatgtatttcttcttttctcccccacccccggtcaccggacagggttgcattgctcccaatatgtaactgtatacagtagcgactccattttctgactaattggacacggaaacccaaacatttgttgtccagatgttctactcttttttttcaccacttcaaaagtaatggtggacaacgagtcggctcgttcgagttcgagctgactcgttaagctaacgagccagctcggctcgttaaggtaacgagtcatagagtcggctcggctcgtttacgagctcgagctgtctcatttagctagcgagccagaacagaacaaaaataaaa

SEQ ID NO: 18149 - DNA, 2598 bp, Zea Mays
atttttaggatgggagggcctactagatctaggaagcctagcggtagagaattttataataataaccgacgcgactttttctttttgttttctggcggcgtggtgttctttttcactgagaagagaataagggagatcaaacggggccgtggaaaaaggggggttagttttattcgactggcttcgcgtgcgccgatcttctatttagcacgcgacaggagcatctcgttgctcgattcggttttcttcgtgaattcgcccccagcgagccgagctagaattggaattggaactggacttgcggctgctgcgttcggcgggggctggaattctcgccgcatccccgtgtggtggtgagaggccgtggctcgtgttgcggtcgacgcgcgaggagggtcgacggcctcgcgccattggggccgctgatcctggtttgagcgcctcgggttcctcttggatttggttggcgtttttatgggcgggtagatcggtccggtgatttctcagctgctatcggtgcgatggcagctgactccagcatggggtttcaccaggggatcaccgcctctctgtacaaccatcacatgctctcgttccagtccaacagcgacgtcggcatcggcggcggcgacgacgctaccggtggcatggtcatggccccggggagtgtgagtgggggcagtggcaacgccgggctgttcctctccccaaacacaggggtcgtcggcaacgcaccgggggttgccccgttaatgaactcgtcgggggatgcgttccgtggcactgggacgcccaagtataagtatgtcactggttctccttccgattggagtgaccgtgaggtagacatactgaatgaagggcttgtgaggttaattcattcccccattttgcttcctgaattgcttttgcctgtactgtacttttctctactgttgcacatatggaacttggtttgctttcttttcgcacctttaatgtgttccaaggttgtggagcaccaattacgaacctaaagcaattattacgcaaccagacctttacttggtcggttttgagttaaaaattgaactttctctattgtgcttgtgtcgctattcaggttactgtggaacggcacttgtcttctccatgagcacttctttgtagccacgttctagtgccttgtgaccatgttttttccatcaccaatcgagccacaaaactctagtgtattagttgttgacaagtgctgctgtctgcttgacatatttgatctgagaaactattcatttcctttccaattttaattccttaatcaccattggcagatatgctcgtgaacctagtatcatgaggtacattaagatagcagctatgcttcctaacagaaccatcagggatgttgcgctgcgatgctgctgggctacaggtaaagagagaaggaagaaacctgatggattctacacagggaaaaaaatgagagacgtgaagccaatccaggacaaaatggttgcatcagtcccaatagctaattttcacatgacacctacaaccaatgtaatccccttttcggtatcaacgcagcatccaaatcaacaaagtcaggttcccaaagaagtgcaacccagcgtctcctggaggaaaataatcagttgcttaaccagatttctgcaaataatgaaacattcaagacagtggagaacacagatctttttctccgcacgagtaacaacatcaaaacaattttaagcagaatgagcgaaacgcctggtatcatgagtcagatgcccccattgcctttatccataaacgaagaccatataaattctcttattcaactgaacagactggttgcatcatatggcacaacaagcatttcccatcatacgaagcaagagccatgaagctagtctactaaacccagggaaaaatgagaggaccagatggccggacccctcctgcaattctgtaaacgtgctgctgaggaagtcttgcatgttatactctaaccaagtgccaggaacagtcactgctttccagataatgttttcgcagtgacctgattgtttccaacccgtctgccagcctgcctgcccaccaattcttgaagcatttggaagaagtctgcagttgtggttcgagagccgcaagctatttgctgctgtttctgtttccgttatccagcatgtagaccagagtatcagacagtggatcctggtctctgcaaatgacctgtaaatatcggacggctgctggcgttccatgttttgtttctctgatcgctcatgaatgtatttcttcttttctcccccacccccggtcaccggacagggttgcattgctcccaatatgtaactgtatacagtagcgactccattttctgactaattggacacggaaacccaaacatttgttgtccagatgttctactcttttttttcaccacttcaaaagtaatggtggacaacgagtcggctcgttcgagttcgagctgactcgttaagctaacgagccagctcggctcgttaaggtaacgagtcatagagtcggctcggctcgtttacgagctcgagctgtctcatttagctagcgagccagaacagaacaaaaataaaa

SEQ ID NO: 18150 - DNA, 2178 bp, Zea Mays
atttttaggatgggagggcctactagatctaggaagcctagcggtagagaattttataataataaccgacgcgactttttctttttgttttctggcggcgtggtgttctttttcactgagaagagaataagggagatcaaacggggccgtggaaaaaggggggttagttttattcgactggcttcgcgtgcgccgatcttctatttagcacgcgacaggagcatctcgttgctcgattcggttttcttcgtgaattcgcccccagcgagccgagctagaattggaattggaactggacttgcggctgctgcgttcggcgggggctggaattctcgccgcatccccgtgtggtggtgagaggccgtggctcgtgttgcggtcgacgcgcgaggagggtcgacggcctcgcgccattggggccgctgatcctggtttgagcgcctcgggttcctcttggatttggttggcgtttttatgggcgggtagatcggtccggtgatttctcagctgctatcggtgcgatggcagctgactccagcatggggtttcaccaggggatcaccgcctctctgtacaaccatcacatgctctcgttccagtccaacagcgacgtcggcatcggcggcggcgacgacgctaccggtggcatggtcatggccccggggagtgtgagtgggggcagtggcaacgccgggctgttcctctccccaaacacaggggtcgtcggcaacgcaccgggggttgccccgttaatgaactcgtcgggggatgcgttccgtggcactgggacgcccaagtataagtatgtcactggttctccttccgattggagtgaccgtgaggtagacatactgaatgaagggcttgtgagatatgctcgtgaacctagtatcatgaggtacattaagatagcagctatgcttcctaacagaaccatcagggatgttgcgctgcgatgctgctgggctacaggtaaagagagaaggaagaaacctgatggattctacacagggaaaaaaatgagagacgtgaagccaatccaggacaaaatggttgcatcagtcccaatagctaattttcacatgacacctacaaccaatgtaatccccttttcggtatcaacgcagcatccaaatcaacaaagtcaggttcccaaagaagcagctcctgttgtcgacagtgcaacccagcgtctcctggaggaaaataatcagttgcttaaccagatttctgcaaataatgaaacattcaagacagtggagaacacagatctttttctccgcacgagtaacaacatcaaaacaattttaagcagaatgagcgaaacgcctggtatcatgagtcagatgcccccattgcctttatccataaacgaagaccatataaattctcttattcaactgaacagactggttgcatcatatggcacaacaagcatttcccatcatacgaagcaagagccatgaagctagtctactaaacccagggaaaaatgagaggaccagatggccggacccctcctgcaattctgtaaacgtgctgctgaggaagtcttgcatgttatactctaaccaagtgccaggaacagtcactgctttccagataatgttttcgcagtgacctgattgtttccaacccgtctgccagcctgcctgcccaccaattcttgaagcatttggaagaagtctgcagttgtggttcgagagccgcaagctatttgctgctgtttctgtttccgttatccagcatgtagaccagagtatcagacagtggatcctggtctctgcaaatgacctgtaaatatcggacggctgctggcgttccatgttttgtttctctgatcgctcatgaatgtatttcttcttttctcccccacccccggtcaccggacagggttgcattgctcccaatatgtaactgtatacagtagcgactccattttctgactaattggacacggaaacccaaacatttgttgtccagatgttctactcttttttttcaccacttcaaaagtaatggtggacaacgagtcggctcgttcgagttcgagctgactcgttaagctaacgagccagctcggctcgttaaggtaacgagtcatagagtcggctcggctcgtttacgagctcgagctgtctcatttagctagcgagccagaacagaacaaaaataaaa

SEQ ID NO: 18151 - DNA, 786 bp, Zea Mays
gctcttctttcgcctccaatctgcgaggcaaggcgtctgatcccctgcagccgtacgtccctaggagctcacccaccccgcgcaatcgataactgactcggtcgccggcagcatgcaaatcataggccgagcgcgccgagcggcgtcttgccctgcccagcctcgaagtagaaggcgagcatggcaagcatggcgatgcgggcgtgcttgatctcggccagcttgagccgctcgagcttgtcgacgtcggggatgtagacgccgtccttgacggtgccggcgaggccgagcgggtcgaagaacttgccgcccgggtagccctgctcgccggtgaagttagcgaagttctcggcggtgcgggaccatggcgtggcccactccacggcctgggagtccgggttgaagaagtccacccaccgcttcgactccacccaccccatcagcagcagctgcgtgcccagcagcgacccgaaggagaagggcgcgatggcgctcgggtccgcgccggcctcgaaccacgggatgccgctccacgcctgccccacgaagatgcccagcacggccgccatcgcccaccgcccgtggatcagctccgcctcccggtaccacttgaggaacgccgggtccttgcccagccccagcgggtcgaacccgaagtcgccggggagcctgcaagtcgtcgtggtcagcttcgacctccatttaatttttctcctcgtacgtatcacagttataagtgaacatagacagacagcgaaagactcacgagccgtcgagccagggcgg

SEQ ID NO: 18152 - DNA, 57 bp, Zea Mays
tctgccagtccagtcggaattaatgcaatgaaatcgatccatactatacattacatg

SEQ ID NO: 18153 - DNA, 565 bp, Zea Mays
ctctccatttgggtttcttgacaaggtatgaccgtgtacgaggagtggagattggcaacaaagatataaagcttgaatacttggaagaggcatttacaacttcaaactggatagtgcgcatatacaaggtgaaacccccaaagaacaggtcctgaggcgtcatcgctagtgaagtggttggagagctattacctcagacaagtacatattgtcaaaaaatctgaatctgagtggcctcaggagagggcggggtcgttgttatgggcacctgctttggcgagagtgactattagcagccatagcatcagttcagctcgaagtcaagaacatctttcccctcattcggtttaggtgtaatcggtgaggaaccaattgtggcaacagcgagtaatttttaattgttgagcatccatggccgaactattaaagtttttgtaggcgcaatgacatatttgaatagaaacttgtctttgatcaatccaaggcaatggattttttcggcactaaacacaaaatatgaactgttaatctgttctctctattattatatgttttcatggtccaa

SEQ ID NO: 18154 - DNA, 2807 bp, Zea Mays
ctccgctcggtctcggtctcgctctcgctgcactcgtcttccccgcccgtcccctgatctcagatccagaccaaacgaattccacactaaaccccccctgccccagacgtcgcgcgcatgaaatgaaaccctagtgagtagtgaccctgtccggatcactgcgtggcgccgccatggcaccctccgctctggcctccctcccggcgccgctccggtcactgcggctcaagacgaagcagcaggagctactgctccgcgtctcggcgctggcgctcatctacgttctcgccttcgccgtccgcctcttctccgtcctccgctacgagtctatgatccacgagttcgacccctacttcaattaccgcaccacgctcttcctcaccgagaacggctttagcgagttctggaactggttcgattccgagagctggtacccgctcgggcgcgtcgtcggggggactctcttcccgggtctcatggtgaccgccgcgctgctccaccgcctcctccgcgcgctctccctcgctgtccacatccgcgaggtctgcgtcctcaccgcgcctttcttcgccgccaacaccactctcgtcgcctacgcctttggccgcgagatctgggactccggggcggggctcgtcgccgccgcgctcatcgccaccgtccctggctacatctcccgctccgtcgcggggtcctacgataacgagggcgtcgccatcttcgcgctgctgctcaccttctacttcttcgtgcgcgccgtcaacaccgggtcgctcgcctgggcgcttgcctcggcgttcggctacttctacatggtgtcggcatggggaggctacgtgttcatcatcaatctcgtcccgctctatgtgcttgtgctgcttgttaccgggaggtactcacaaaggctctacgtggcctacaattgcatgtatgtgcttgggatgttgcttgcgatgcagatccgttttgttggattccaacatgtgcagtccggagagcacatggctgctatgggagtcttcttccttttgcaggttttcttcttcttggactgggtaaaatacctgctaaacgatgccagactgtttaagtcattccttcgaattacccttacatgtgtgattactgttggcaccctggctcttggtattggcactgcatctggttacatctctccttggacaggacgattttactccctgctagatcctacctatgcaaaggaccatataccaatcatcgcatctgtttctgagcatcaaccaacagcatggtcatctttcatgtttgacttccacatcctcctttttctgttcccagctggcctttatttctgtttcaagcgcctgtcagatgccacaatatttattgttatgtatggcctcacaagtatgtactttgctggtgtgatggtccggttaattcttgtggcagcaccagccgtttgccttattagtgctattgctgcatctgctacaataaaaaacctaaccactttgatcaggacaaagagcagaagtccacagactacttctgggaaaacaactggctcaaagtcagctgctaagggtgtagttgatcaatctttaccattccaacacaatgctgctattggtcttcttctgggtgccttttacttgctcagtaggtatgccatacactgcacttgggtgacatctgaggcttactcttctccatctatagttttggccgcaaggggtcataatggtggaagagttatctttgatgattatcgtgaggcatactattggcttcgtcagaacactcctcctgatgctaagattatgtcttggtgggactatggataccaaattacagctatgggtaacagaactgtcattgttgataataatacatggaataacacacacatagctactgttggacgtgctatgtcatcttatgaagatgaagcatatgagatcatgcagtcacttgatgtgaactatgtgcttgttgtatttggaggtgttactggatattcttcagatgatatcaacaagttcttatggatggtacgtattggtggaggggttttccctgtaatcaaagagccagattaccttgttaacggggagtatcgtattgacaagggggcagcaccaaaaatgctgaactgcctaatagaggattcctctgaaaatactcaacttttagcacagatttggggggaaaacatttacattgtacaagctttgttactaccgatttggagaacttaccacagaatatggaaaacctccagggtatgaccgtgtacgaggagtggagattggcaacaaagatataaagcttgaatacttggaagaggcatttacaacttcaaactggatagtgcgcatatacaaggtgaaacccccaaagaacaggtcctgaggcgtcatcgctagtgaagtggttggagagctattacctcagacaagtacatattgtcaaaaaatctgaatctgagtggcctcaggagagggcggggtcgttgttatgggcacctgctttggcgagagtgactattagcagccatagcatcagttcagctcgaagtcaagaacatctttcccctcattcggtttaggtgtaatcggtgaggaaccaattgtggcaacagcgagtaatttttaattgttgagcatccatggccgaactattaaagtttttgtaggcgcaatgacatatttgaatagaaacttgtctttgatcaatccaaggcaatggattttttcggcactaaacacaaaatatgaactgttaatctgttctctctattattatatgttttcatggtccaa

SEQ ID NO: 18155 - DNA, 3053 bp, Zea Mays
ctctccctttaaatcgagcgccgcttcctctccgccgctttctctccccttcactcgagcgccgcttcctctccccttccatcgagcgcagcgcctgcgccgccgccaccactccgcaccgccgccagttccccacttcctccccacacccgaatcggattgaagccagaaggcaaggtgaagagtgggcttgggtaacggttgcaaagagatatccccaacagttgcagtcactcgcatccagtcggctcagctatggaggaggactcatcagcgatggagccgaataggctgcgcgaggccgaggcggcggctggggagctgaagaggctgcgcgaggccgggcagtctcagtacatgtaccggtctatcgccgacgccagggttgtcggcggccgggtctgcctcttcgccgtcgtctccgagatcggcgctaccgtccacagccgtggcacggatttcactgttacgttgagggtaatagatgaatcatacaagtctggaatatctgtaactttttttgctgacagcactgcactattgccttgtgtgaagtcgtgtggagatgtgatcagtctccataacgtcgtgataaagaaatatagagatttctttgtgcaatttgacaaaaagtactcttcattcgcgctgtttgaaggcaaaacgtatactgaatgcagtccatatcagacttctataagatatcatgacagcgaacacgacaaagattttttaaatcagatgagaacgtggctccctcaaggtctgaaggatttcacttcaaataattccgaattgtatttaatgaatttgaagtccgattctacttttgatctagtatgcaaggtttttcatgtacatgtggagaacaacaattcaatattttatgtttgggatggaactgatacccctgcagctgagtttccagcaattttggatgctgaggcagccaaatcactctctctacatgaaggcccccctctatccagggagattttatgtacaatgccagatttcggaactgtcctaaggattttttcagatagatttgtcaataaagtatcatatatgcaaaagaacatatattgggccaggttctggaacattacttgcaaacaaaactttggcatttggaaaggtactttctcggactccggtggagttcgcctattatcaaacaaagatgatagcgttgttgatcgtctaaagatgtatgacagccgcatcgccaaccgagttcgtcgtcggccgatggcaagcatcccctccagtgttactgatgtagaatacgaggatgcaggttacgcttcattaatgaagtctttaactcatcatgatgtgacgcacaaattgagaaccttggtccgtgttgtggcagcacatccatgtgaagctagtttgctttcaactggtaactgtcatcttcggttgactcttgaggatcctacagcgagaattcatgcgtatgtccacaagaatgatttggtcggattctttggtggtggttttttgacagcagaagtgatagtaaaaaagatgaacatggtactgggcatcccggaaccacaaggcagcgtggaagttgccccctcgaccaggaatccaccttggatatggtgttgcttgatgtcatactatatggacaaaaacgatccctgggtcagcagaaagtaccggatctatagcacagccatcagggattgagcagagggatgctgctggaatgtgcaggaacaaacttgtaaatgaatgggacagatgctgtgtagtattggcatcttgcttgtagaagaggccatatgcttttgcaggacaaagagcagaagtccacagactacttctgggaaaacaactggctcaaagtcagctgctaagggtgtagttgatcaatctttaccattccaacacaatgctgctattggtcttcttctgggtgccttttacttgctcagtaggtatgccatacactgcacttgggtgacatctgaggcttactcttctccatctatagttttggccgcaaggggtcataatggtggaagagttatctttgatgattatcgtgaggcatactattggcttcgtcagaacactcctcctgatgctaagattatgtcttggtgggactatggataccaaattacagctatgggtaacagaactgtcattgttgataataatacatggaataacacacacatagctactgttggacgtgctatgtcatcttatgaagatgaagcatatgagatcatgcagtcacttgatgtgaactatgtgcttgttgtatttggaggtgttactggatattcttcagatgatatcaacaagttcttatggatggtacgtattggtggaggggttttccctgtaatcaaagagccagattaccttgttaacggggagtatcgtattgacaagggggcagcaccaaaaatgctgaactgcctaatgtacaagctttgttactaccgatttggagaacttaccacagaatatggaaaacctccagggtatgaccgtgtacgaggagtggagattggcaacaaagatataaagcttgaatacttggaagaggcatttacaacttcaaactggatagtgcgcatatacaaggtgaaacccccaaagaacaggtcctgaggcgtcatcgctagtgaagtggttggagagctattacctcagacaagtacatattgtcaaaaaatctgaatctgagtggcctcaggagagggcggggtcgttgttatgggcacctgctttggcgagagtgactattagcagccatagcatcagttcagctcgaagtcaagaacatctttcccctcattcggtttaggtgtaatcggtgaggaaccaattgtggcaacagcgagtaatttttaattgttgagcatccatggccgaactattaaagtttttgtaggcgcaatgacatatttgaatagaaacttgtctttgatcaatccaaggcaatggattttttcggcactaaacacaaaatatgaactgttaatctgttctctctattattatatgttttcatggtccaa

SEQ ID NO: 18156 - DNA, 1979 bp, Zea Mays
ctcgttcctgccttgcgaaacggagcacccaaaccctagcatgtattgggagaatctaatccagttcccgatgaccatggcgcagcgcacgatgtgcctgcttcggcggtccattgggtttacagggccgcaggcacagagagccctgagtaccactgccgcgccggcggcggagggtgcagccgtggctgaagctacggcgaaggaggcgaagaggaggaggaagaatctgtttgacgtagtgcagttcctgccagagtggggcattggatacaaggttgccaagaccacctggcgtgatgtctcctatcagatcaccaagatcaacctgtacaaggatggtcggcatggaaaggcgtgggggcttcggtacaaggtgtgcaagctgcagacaccccaactaggatcagcggtgttaacaaacgtgggtggaagtacataaaagaatcacagaagaaactacaagaagcccccaaagtagacgtagctgttgctgctgcctagtttgtagttacatgcatgtttgttgtaagatgattcggtaaatctttagatggctgttgccagggtgagaacagggaaccactttttttttggatcgactctatacttttttgtcgatgacgactgaacctctctgcaacatgtccagtttctcttcttttcttttccttatggaacgaacctttaccgtaatgtactgatgcagaagaactgtgttgattgtggcaatctagtttccattcaaatgcaatccttgtttcattctgagccaatgttcctaggtttcagccgttcgttttccaagttgaactattttgttcctcaccatgttcctaggttttcattctacactgcggaggcgattgactggtattctcagtcagatgatgctggacggagtcatgcctacacgttcgcaacgcaggacaagtttggtgttcagccccgcgaggaccactacatggtcgatctgggactggtgttctggtatggcaggcggtgctggttgcctgccatctttcacggcagcgaggctgtaggcactcatctaattttggaagcagcaagcgagcgaacaaacaaacataccattgtgtgtcacaaagatgtcgaaaaacaaacttgcttgtatcaaaattagctcttcatgtatactgtaccaaatatacgcaaatgaccccgcagcatagttaattacaagctaaactcataaaaggaaattccttcaacattcccattggcatcctcggtggtcggtgctgaagccgcaggcaatggtcttaagtgactgtcgtagtcaagagaggttccaggtattgcttgaacttatcttttgtcattgccccttctcgccggctatctgctacctctcggccattcttgaagaaaatcaaagtcgggagaccatagaccttgtactcttcaatcagctgcggattggcgtcgtgatcgatcttgacgatttttactcgcccgtcatattcctgcgtcacaagattagactttaatcaaagctgtgattctggttagaagcaagcaatattgtttcctcgcacatatgtttaaagcatcacattctgctatgaggtgccagccaatgatggatcatctccctcaggatcgtaacactagccttgaatcaaacatgctgttccagtgttcctaatagcttccacacctgatgaacactgaaactgtcctcactttctaaagcgttttggccactgaatttcagcaaagcaaaaaactggaccgtggacttgtacactgatgccaactcaaatcacagacatgaacctatggacaagagcacgacatggcaccagcacagacgaacacagacatggataaggataagcacccgccgggaagcaggcaagcagcagagtaccctatacctcggaggcccagtcgacgacgggcgcgatgaggcggcacggcccgcaccagtcggcgacgaagtccacgagcacggg

SEQ ID NO: 18157 - DNA, 1983 bp, Zea Mays
ctcgttcctgccttgcgaaacggagcacccaaaccctagcatgtattgggagaatctaatccagttcccgatgaccatggcgcagcgcacgatgtgcctgcttcggcggtccattgggtttacagggccgcaggcacagagagccctgagtaccactgccgcgccggcggcggagggtgcagccgtggctgaagctacggcgaaggaggcgaagaggaggaggaagaatctgtttgacgtagtgcagttcctgccagagtggggcattggatacaaggttgccaagaccacctggcgtgatgtctcctatcagatcaccaagatcaacctgtacaaggatggtcggcatggaaaggcgtgggggcttcggtacaaggcaggtgtgcaagctgcagacaccccaactaggatcagcggtgttaacaaacgtgggtggaagtacataaaagaatcacagaagaaactacaagaagcccccaaagtagacgtagctgttgctgctgcctagtttgtagttacatgcatgtttgttgtaagatgattcggtaaatctttagatggctgttgccagggtgagaacagggaaccactttttttttggatcgactctatacttttttgtcgatgacgactgaacctctctgcaacatgtccagtttctcttcttttcttttccttatggaacgaacctttaccgtaatgtactgatgcagaagaactgtgttgattgtggcaatctagtttccattcaaatgcaatccttgtttcattctgagccaatgttcctaggtttcagccgttcgttttccaagttgaactattttgttcctcaccatgttcctaggttttcattctacactgcggaggcgattgactggtattctcagtcagatgatgctggacggagtcatgcctacacgttcgcaacgcaggacaagtttggtgttcagccccgcgaggaccactacatggtcgatctgggactggtgttctggtatggcaggcggtgctggttgcctgccatctttcacggcagcgaggctgtaggcactcatctaattttggaagcagcaagcgagcgaacaaacaaacataccattgtgtgtcacaaagatgtcgaaaaacaaacttgcttgtatcaaaattagctcttcatgtatactgtaccaaatatacgcaaatgaccccgcagcatagttaattacaagctaaactcataaaaggaaattccttcaacattcccattggcatcctcggtggtcggtgctgaagccgcaggcaatggtcttaagtgactgtcgtagtcaagagaggttccaggtattgcttgaacttatcttttgtcattgccccttctcgccggctatctgctacctctcggccattcttgaagaaaatcaaagtcgggagaccatagaccttgtactcttcaatcagctgcggattggcgtcgtgatcgatcttgacgatttttactcgcccgtcatattcctgcgtcacaagattagactttaatcaaagctgtgattctggttagaagcaagcaatattgtttcctcgcacatatgtttaaagcatcacattctgctatgaggtgccagccaatgatggatcatctccctcaggatcgtaacactagccttgaatcaaacatgctgttccagtgttcctaatagcttccacacctgatgaacactgaaactgtcctcactttctaaagcgttttggccactgaatttcagcaaagcaaaaaactggaccgtggacttgtacactgatgccaactcaaatcacagacatgaacctatggacaagagcacgacatggcaccagcacagacgaacacagacatggataaggataagcacccgccgggaagcaggcaagcagcagagtaccctatacctcggaggcccagtcgacgacgggcgcgatgaggcggcacggcccgcaccagtcggcgacgaagtccacgagcacggg

SEQ ID NO: 18158 - DNA, 1933 bp, Zea Mays
ctctccctttaaatcgagcgccgcttcctctccgccgctttctctccccttcactcgagcgccgcttcctctccccttccatcgagcgcagcgcctgcgccgccgccaccactccgcaccgccgccagttccccacttcctccccacacccgaatcggattgaagccagaaggcaaggtgaagagtgggcttgggtaacggttgcaaagagatatccccaacagttgcagtcactcgcatccagtcggctcagctatggaggaggactcatcagcgatggagccgaataggctgcgcgaggccgaggcggcggctggggagctgaagaggctgcgcgaggccgggcagtctcagtacatgtaccggtctatcgccgacgccagggttgtcggcggccgggtctgcctcttcgccgtcgtctccgagatcggcgctaccgtccacagccgtggcacggatttcactgttacgttgagggtaatagatgaatcatacaagtctggaatatctgtaactttttttgctgacagcactgcactattgccttgtgtgaagtcgtgtggagatgtgatcagtctccataacgtcgtggcaaaacgtatactgaatgcagtccatatcagacttctataagatatcatgacagcgaacacgacaaagattttttaaatcagatgagaacgtggctccctcaaggtctgaaggatttcacttcaaataattccgaattgtatttaatgaatttgaagtccgattctacttttgatctagtatgcaaggtttttcatgtacatgtggagaacaacaattcaatattttatgtttgggatggaactgatacccctgcagctgagtttccagcaattttggatgctgaggcagccaaatcactctctctacatgaaggcccccctctatccagggagattttatgtacaatgccagatttcggaactgtcctaaggattttttcagatagatttgtcaataaagtatcatatatgcaaaagaacatatattgggccaggttctggaacattacttgcaaacaaaactttggcatttggaaaggtactttctcggactccggtggagttcgcctattatcaaacaaagatgatagcgttgttgatcgtctaaagatgtatgacagccgcatcgccaaccgagttcgtcgtcggccgatggcaagcatcccctccagtgttactggtgacgcacaaattgagaaccttggtccgtgttgtggcagcacatccatgtgaagctagtttgctttcaactggtaactgtcatcttcggttgactcttgaggatcctacagcgagaattcatgcgtatgtccacaagaatgatttggtcggattctttggtggtggttttttgacagcagaagtgatagtaaaaaagatgaacatggtactgggcatcccggaaccacaaggcagcgtggaagttgccccctcgaccaggaatccaccttggatatggtgttgcttgatgtcatactatatggacaaaaacgatccctgggtcagcagaaagtaccggatctatagcacagccatcagggattgagcagagggatgctgctggaatgtgcaggaacaaacttgtaaatgaatgggacagatgctgtgtagtattggcatcttgcttgtagaagaggccatatgcttttgcaggtgcaatcagtgaatcattccatactgaacactgagaatagcacctcgggttcattctgtatgtgcctacactctagattgtcttttgggtgctcatcacgaaacgtgagcatatcttttggaaacagagacctgcgtttgattcctgtgcttgttatgttgtgattgatcattggggggaggttgagcttttgagccagtataaaaatactgaccggaccatcaatattattgatcattgggagtat

SEQ ID NO: 18159 - DNA, 2062 bp, Zea Mays
ctctccctttaaatcgagcgccgcttcctctccgccgctttctctccccttcactcgagcgccgcttcctctccccttccatcgagcgcagcgcctgcgccgccgccaccactccgcaccgccgccagttccccacttcctccccacacccgaatcggattgaagccagaaggcaaggtgaagagtgggcttgggtaacggttgcaaagagatatccccaacagttgcagtcactcgcatccagtcggctcagctatggaggaggactcatcagcgatggagccgaataggctgcgcgaggccgaggcggcggctggggagctgaagaggctgcgcgaggccgggcagtctcagtacatgtaccggtctatcgccgacgccagggttgtcggcggccgggtctgcctcttcgccgtcgtctccgagatcggcgctaccgtccacagccgtggcacggatttcactgttacgttgagggtaatagatgaatcatacaagtctggaatatctgtaactttttttgctgacagcactgcactattgccttgtgtgaagtcgtgtggagatgtgatcagtctccataacgtcgtgtccatatcagacttctataagatatcatgacagcgaacacgacaaagattttttaaatcagatgagaacgtggctccctcaaggtctgaaggatttcacttcaaataattccgaattgtatttaatgaatttgaagtccgattctacttttgatctagtatgcaaggtttttcatgtacatgtggagaacaacaattcaatattttatgtttgggatggaactgatacccctgcagctgagtttccagcaatgtaagattttagatttgttttgcaattttttgtaataactaagaaaaacatctatgaaatataagatggtgttttagtgttttccaaatactaatgcagcttttaatttttgtttggttgtttttacttggtgcactgaacataagcatagtttggatgctgaggcagccaaatcactctctctacatgaaggcccccctctatccagggagattttatgtacaatgccagatttcggaactgtcctaaggattttttcagatagatttgtcaataaagtatcatatatgcaaaagaacatatattgggccaggttctggaacattacttgcaaacaaaactttggcatttggaaaggtactttctcggactccggtggagttcgcctattatcaaacaaagatgatagcgttgttgatcgtctaaagatgtatgacagccgcatcgccaaccgagttcgtcgtcggccgatggcaagcatcccctccagtgttactggtgacgcacaaattgagaaccttggtccgtgttgtggcagcacatccatgtgaagctagtttgctttcaactggtaactgtcatcttcggttgactcttgaggatcctacagcgagaattcatgcgtatgtccacaagaatgatttggtcggattctttggtggtggttttttgacagcagaagtgatagtaaaaaagatgaacatggtactgggcatcccggaaccacaaggcagcgtggaagttgccccctcgaccaggaatccaccttggatatggtgttgcttgatgtcatactatatggacaaaaacgatccctgggtcagcagaaagtaccggatctatagcacagccatcagggattgagcagagggatgctgctggaatgtgcaggaacaaacttgtaaatgaatgggacagatgctgtgtagtattggcatcttgcttgtagaagaggccatatgcttttgcaggtgcaatcagtgaatcattccatactgaacactgagaatagcacctcgggttcattctgtatgtgcctacactctagattgtcttttgggtgctcatcacgaaacgtgagcatatcttttggaaacagagacctgcgtttgattcctgtgcttgttatgttgtgattgatcattggggggaggttgagcttttgagccagtataaaaatactgaccggaccatcaatattattgatcattgggagtat

SEQ ID NO: 18160 - DNA, 2120 bp, Zea Mays
ctctccctttaaatcgagcgccgcttcctctccgccgctttctctccccttcactcgagcgccgcttcctctccccttccatcgagcgcagcgcctgcgccgccgccaccactccgcaccgccgccagttccccacttcctccccacacccgaatcggattgaagccagaaggcaaggtgaagagtgggcttgggtaacggttgcaaagagatatccccaacagttgcagtcactcgcatccagtcggctcagctatggaggaggactcatcagcgatggagccgaataggctgcgcgaggccgaggcggcggctggggagctgaagaggctgcgcgaggccgggcagtctcagtacatgtaccggtctatcgccgacgccagggttgtcggcggccgggtctgcctcttcgccgtcgtctccgagatcggcgctaccgtccacagccgtggcacggatttcactgttacgttgagggtaatagatgaatcatacaagtctggaatatctgtaactttttttgctgacagcactgcactattgccttgtgtgaagtcgtgtggagatgtgatcagtctccataacgtcgtggcaaaacgtatactgaatgcagtccatatcagacttctataagatatcatgacagcgaacacgacaaagattttttaaatcagatgagaacgtggctccctcaaggtctgaaggatttcacttcaaataattccgaattgtatttaatgaatttgaagtccgattctacttttgatctagtatgcaaggtttttcatgtacatgtggagaacaacaattcaatattttatgtttgggatggaactgatacccctgcagctgagtttccagcaatgtaagattttagatttgttttgcaattttttgtaataactaagaaaaacatctatgaaatataagatggtgttttagtgttttccaaatactaatgcagcttttaatttttgtttggttgtttttacttggtgcactgaacataagcataggtaatgaaaacataataagttttttcttagaaaaaaaatatttggtgatgtcagtcatgtcactattttcacttaatttacctgtttttgattggtgaacatatagtttggatgctgaggcagccaaatcactctctctacatgaaggcccccctctatccagggagattttatgtacaatgccagatttcggaactgtcctaaggattttttcagatagatttgtcaataaagtatcatatatgcaaaagaacatatattgggccaggttctggaacattacttgcaaacaaaactttggcatttggaaaggatgtatgacagccgcatcgccaaccgagttcgtcgtcggccgatggcaagcatcccctccagtgttactggtgacgcacaaattgagaaccttggtccgtgttgtggcagcacatccatgtgaagctagtttgctttcaactggtaactgtcatcttcggttgactcttgaggatcctacagcgagaattcatgcgtatgtccacaagaatgatttggtcggattctttggtggtggttttttgacagcagaagtgatagtaaaaaagatgaacatggtactgggcatcccggaaccacaaggcagcgtggaagttgccccctcgaccaggaatccaccttggatatggtgttgcttgatgtcatactatatggacaaaaacgatccctgggtcagcagaaagtaccggatctatagcacagccatcagggattgagcagagggatgctgctggaatgtgcaggaacaaacttgtaaatgaatgggacagatgctgtgtagtattggcatcttgcttgtagaagaggccatatgcttttgcaggtgcaatcagtgaatcattccatactgaacactgagaatagcacctcgggttcattctgtatgtgcctacactctagattgtcttttgggtgctcatcacgaaacgtgagcatatcttttggaaacagagacctgcgtttgattcctgtgcttgttatgttgtgattgatcattggggggaggttgagcttttgagccagtataaaaatactgaccggaccatcaatattattgatcattgggagtat

SEQ ID NO: 18161 - DNA, 2318 bp, Zea Mays
ctctccctttaaatcgagcgccgcttcctctccgccgctttctctccccttcactcgagcgccgcttcctctccccttccatcgagcgcagcgcctgcgccgccgccaccactccgcaccgccgccagttccccacttcctccccacacccgaatcggattgaagccagaaggcaaggtgaagagtgggcttgggtaacggttgcaaagagatatccccaacagttgcagtcactcgcatccagtcggctcagctatggaggaggactcatcagcgatggagccgaataggctgcgcgaggccgaggcggcggctggggagctgaagaggctgcgcgaggccgggcagtctcagtacatgtaccggtctatcgccgacgccagggttgtcggcggccgggtctgcctcttcgccgtcgtctccgagatcggcgctaccgtccacagccgtggcacggatttcactgttacgttgagggtaatagatgaatcatacaagtctggaatatctgtaactttttttgctgacagcactgcactattgccttgtgtgaagtcgtgtggagatgtgatcagtctccataacgtcgtggtatagcataaaactctatttaatatgcaattcgcccttgattattcctcgaagttataaaagtgtcttttttatgtgttgttatttaagcatattttattttctcgtcattttttggaattttagtaacacatctgcactggtgcaatgcctactttaatctgtagataaagaaatatagagatttctttgtgcaatttgacaaaaagtactcttcattcgcgctgtttgaaggcaaaacgtatactgaatgcagtccatatcagacttctataagatatcatgacagcgaacacgacaaagattttttaaatcagatgagaacgtggctccctcaaggtctgaaggatttcacttcaaataattccgaattgtatttaatgaatttgaagtccgattctacttttgatctagtatgcaaggtttttcatgtacatgtggagaacaacaattcaatattttatgtttgggatggaactgatacccctgcagctgagtttccagcaatgtaagattttagatttgttttgcaattttttgtaataactaagaaaaacatctatgaaatataagatggtgttttagtgttttccaaatactaatgcagcttttaatttttgtttggttgtttttacttggtgcactgaacataagcatagtttggatgctgaggcagccaaatcactctctctacatgaaggcccccctctatccagggagattttatgtacaatgccagatttcggaactgtcctaaggattttttcagatagatttgtcaataaagtatcatatatgcaaaagaacatatattgggccaggttctggaacattacttgcaaacaaaactttggcatttggaaaggtactttctcggactccggtggagttcgcctattatcaaacaaagatgatagcgttgttgatcgtctaaagatgtatgacagccgcatcgccaaccgagttcgtcgtcggccgatggcaagcatcccctccagtgttactggtgacgcacaaattgagaaccttggtccgtgttgtggcagcacatccatgtgaagctagtttgctttcaactggtaactgtcatcttcggttgactcttgaggatcctacagcgagaattcatgcgtatgtccacaagaatgatttggtcggattctttggtggtggttttttgacagcagaagtgatagtaaaaaagatgaacatggtactgggcatcccggaaccacaaggcagcgtggaagttgccccctcgaccaggaatccaccttggatatggtgttgcttgatgtcatactatatggacaaaaacgatccctgggtcagcagaaagtaccggatctatagcacagccatcagggattgagcagagggatgctgctggaatgtgcaggaacaaacttgtaaatgaatgggacagatgctgtgtagtattggcatcttgcttgtagaagaggccatatgcttttgcaggtgcaatcagtgaatcattccatactgaacactgagaatagcacctcgggttcattctgtatgtgcctacactctagattgtcttttgggtgctcatcacgaaacgtgagcatatcttttggaaacagagacctgcgtttgattcctgtgcttgttatgttgtgattgatcattggggggaggttgagcttttgagccagtataaaaatactgaccggaccatcaatattattgatcattgggagtat

SEQ ID NO: 18162 - DNA, 1970 bp, Zea Mays
ctctccctttaaatcgagcgccgcttcctctccgccgctttctctccccttcactcgagcgccgcttcctctccccttccatcgagcgcagcgcctgcgccgccgccaccactccgcaccgccgccagttccccacttcctccccacacccgaatcggattgaagccagaaggcaaggtgaagagtgggcttgggtaacggttgcaaagagatatccccaacagttgcagtcactcgcatccagtcggctcagctatggaggaggactcatcagcgatggagccgaataggctgcgcgaggccgaggcggcggctggggagctgaagaggctgcgcgaggccgggcagtctcagtacatgtaccggtctatcgccgacgccagggttgtcggcggccgggtctgcctcttcgccgtcgtctccgagatcggcgctaccgtccacagccgtggcacggatttcactgttacgttgagggtaatagatgaatcatacaagtctggaatatctgtaactttttttgctgacagcactgcactattgccttgtgtgaagtcgtgtggagatgtgatcagtctccataacgtcgtgtccatatcagacttctataagatatcatgacagcgaacacgacaaagattttttaaatcagatgagaacgtggctccctcaaggtctgaaggatttcacttcaaataattccgaattgtatttaatgaatttgaagtccgattctacttttgatctagtatgcaaggtttttcatgtacatgtggagaacaacaattcaatattttatgtttgggatggaactgatacccctgcagctgagtttccagcaattttggatgctgaggcagccaaatcactctctctacatgaaggcccccctctatccagggagattttatgtacaatgccagatttcggaactgtcctaaggattttttcagatagatttgtcaataaagtatcatatatgcaaaagaacatatattgggccaggttctggaacattacttgcaaacaaaactttggcatttggaaaggtactttctcggactccggtggagttcgcctattatcaaacaaagatgatagcgttgttgatcgtctaaagatgtatgacagccgcatcgccaaccgagttcgtcgtcggccgatggcaagcatcccctccagtgttactgatgtagaatacgaggatgcaggttacgcttcattaatgaagtctttaactcatcatgatgtgacgcacaaattgagaaccttggtccgtgttgtggcagcacatccatgtgaagctagtttgctttcaactggtaactgtcatcttcggttgactcttgaggatcctacagcgagaattcatgcgtatgtccacaagaatgatttggtcggattctttggtggtggttttttgacagcagaagtgatagtaaaaaagatgaacatggtactgggcatcccggaaccacaaggcagcgtggaagttgccccctcgaccaggaatccaccttggatatggtgttgcttgatgtcatactatatggacaaaaacgatccctgggtcagcagaaagtaccggatctatagcacagccatcagggattgagcagagggatgctgctggaatgtgcaggaacaaacttgtaaatgaatgggacagatgctgtgtagtattggcatcttgcttgtagaagaggccatatgcttttgcaggtgcaatcagtgaatcattccatactgaacactgagaatagcacctcgggttcattctgtatgtgcctacactctagattgtcttttgggtgctcatcacgaaacgtgagcatatcttttggaaacagagacctgcgtttgattcctgtgcttgttatgttgtgattgatcattggggggaggttgagcttttgagccagtataaaaatactgaccggaccatcaatattattgatcattgggagtat

SEQ ID NO: 18163 - DNA, 2121 bp, Zea Mays
ctctccctttaaatcgagcgccgcttcctctccgccgctttctctccccttcactcgagcgccgcttcctctccccttccatcgagcgcagcgcctgcgccgccgccaccactccgcaccgccgccagttccccacttcctccccacacccgaatcggattgaagccagaaggcaaggtgaagagtgggcttgggtaacggttgcaaagagatatccccaacagttgcagtcactcgcatccagtcggctcagctatggaggaggactcatcagcgatggagccgaataggctgcgcgaggccgaggcggcggctggggagctgaagaggctgcgcgaggccgggcagtctcagtacatgtaccggtctatcgccgacgccagggttgtcggcggccgggtctgcctcttcgccgtcgtctccgagatcggcgctaccgtccacagccgtggcacggatttcactgttacgttgagggtaatagatgaatcatacaagtctggaatatctgtaactttttttgctgacagcactgcactattgccttgtgtgaagtcgtgtggagatgtgatcagtctccataacgtcgtgtccatatcagacttctataagatatcatgacagcgaacacgacaaagattttttaaatcagatgagaacgtggctccctcaaggtctgaaggatttcacttcaaataattccgaattgtatttaatgaatttgaagtccgattctacttttgatctagtatgcaaggtttttcatgtacatgtggagaacaacaattcaatattttatgtttgggatggaactgatacccctgcagctgagtttccagcaatgtaagattttagatttgttttgcaattttttgtaataactaagaaaaacatctatgaaatataagatggtgttttagtgttttccaaatactaatgcagcttttaatttttgtttggttgtttttacttggtgcactgaacataagcatagtttggatgctgaggcagccaaatcactctctctacatgaaggcccccctctatccagggagattttatgtacaatgccagatttcggaactgtcctaaggattttttcagatagatttgtcaataaagtatcatatatgcaaaagaacatatattgggccaggttctggaacattacttgcaaacaaaactttggcatttggaaaggtactttctcggactccggtggagttcgcctattatcaaacaaagatgatagcgttgttgatcgtctaaagatgtatgacagccgcatcgccaaccgagttcgtcgtcggccgatggcaagcatcccctccagtgttactgatgtagaatacgaggatgcaggttacgcttcattaatgaagtctttaactcatcatgatgtgacgcacaaattgagaaccttggtccgtgttgtggcagcacatccatgtgaagctagtttgctttcaactggtaactgtcatcttcggttgactcttgaggatcctacagcgagaattcatgcgtatgtccacaagaatgatttggtcggattctttggtggtggttttttgacagcagaagtgatagtaaaaaagatgaacatggtactgggcatcccggaaccacaaggcagcgtggaagttgccccctcgaccaggaatccaccttggatatggtgttgcttgatgtcatactatatggacaaaaacgatccctgggtcagcagaaagtaccggatctatagcacagccatcagggattgagcagagggatgctgctggaatgtgcaggaacaaacttgtaaatgaatgggacagatgctgtgtagtattggcatcttgcttgtagaagaggccatatgcttttgcaggtgcaatcagtgaatcattccatactgaacactgagaatagcacctcgggttcattctgtatgtgcctacactctagattgtcttttgggtgctcatcacgaaacgtgagcatatcttttggaaacagagacctgcgtttgattcctgtgcttgttatgttgtgattgatcattggggggaggttgagcttttgagccagtataaaaatactgaccggaccatcaatattattgatcattgggagtat

SEQ ID NO: 18164 - DNA, 2143 bp, Zea Mays
ctctccctttaaatcgagcgccgcttcctctccgccgctttctctccccttcactcgagcgccgcttcctctccccttccatcgagcgcagcgcctgcgccgccgccaccactccgcaccgccgccagttccccacttcctccccacacccgaatcggattgaagccagaaggcaaggtgaagagtgggcttgggtaacggttgcaaagagatatccccaacagttgcagtcactcgcatccagtcggctcagctatggaggaggactcatcagcgatggagccgaataggctgcgcgaggccgaggcggcggctggggagctgaagaggctgcgcgaggccgggcagtctcagtacatgtaccggtctatcgccgacgccagggttgtcggcggccgggtctgcctcttcgccgtcgtctccgagatcggcgctaccgtccacagccgtggcacggatttcactgttacgttgagggtaatagatgaatcatacaagtctggaatatctgtaactttttttgctgacagcactgcactattgccttgtgtgaagtcgtgtggagatgtgatcagtctccataacgtcgtggcaaaacgtatactgaatgcagtccatatcagacttctataagatatcatgacagcgaacacgacaaagattttttaaatcagatgagaacgtggctccctcaaggtctgaaggatttcacttcaaataattccgaattgtatttaatgaatttgaagtccgattctacttttgatctagtatgcaaggtttttcatgtacatgtggagaacaacaattcaatattttatgtttgggatggaactgatacccctgcagctgagtttccagcaatgtaagattttagatttgttttgcaattttttgtaataactaagaaaaacatctatgaaatataagatggtgttttagtgttttccaaatactaatgcagcttttaatttttgtttggttgtttttacttggtgcactgaacataagcatagtttggatgctgaggcagccaaatcactctctctacatgaaggcccccctctatccagggagattttatgtacaatgccagatttcggaactgtcctaaggattttttcagatagatttgtcaataaagtatcatatatgcaaaagaacatatattgggccaggttctggaacattacttgcaaacaaaactttggcatttggaaaggtactttctcggactccggtggagttcgcctattatcaaacaaagatgatagcgttgttgatcgtctaaagatgtatgacagccgcatcgccaaccgagttcgtcgtcggccgatggcaagcatcccctccagtgttactgatgtagaatacgaggatgcaggttacgcttcattaatgaagtctttaactcatcatgatgtgacgcacaaattgagaaccttggtccgtgttgtggcagcacatccatgtgaagctagtttgctttcaactggtaactgtcatcttcggttgactcttgaggatcctacagcgagaattcatgcgtatgtccacaagaatgatttggtcggattctttggtggtggttttttgacagcagaagtgatagtaaaaaagatgaacatggtactgggcatcccggaaccacaaggcagcgtggaagttgccccctcgaccaggaatccaccttggatatggtgttgcttgatgtcatactatatggacaaaaacgatccctgggtcagcagaaagtaccggatctatagcacagccatcagggattgagcagagggatgctgctggaatgtgcaggaacaaacttgtaaatgaatgggacagatgctgtgtagtattggcatcttgcttgtagaagaggccatatgcttttgcaggtgcaatcagtgaatcattccatactgaacactgagaatagcacctcgggttcattctgtatgtgcctacactctagattgtcttttgggtgctcatcacgaaacgtgagcatatcttttggaaacagagacctgcgtttgattcctgtgcttgttatgttgtgattgatcattggggggaggttgagcttttgagccagtataaaaatactgaccggaccatcaatattattgatcattgggagtat

SEQ ID NO: 18165 - DNA, 2210 bp, Zea Mays
ctctccctttaaatcgagcgccgcttcctctccgccgctttctctccccttcactcgagcgccgcttcctctccccttccatcgagcgcagcgcctgcgccgccgccaccactccgcaccgccgccagttccccacttcctccccacacccgaatcggattgaagccagaaggcaaggtgaagagtgggcttgggtaacggttgcaaagagatatccccaacagttgcagtcactcgcatccagtcggctcagctatggaggaggactcatcagcgatggagccgaataggctgcgcgaggccgaggcggcggctggggagctgaagaggctgcgcgaggccgggcagtctcagtacatgtaccggtctatcgccgacgccagggttgtcggcggccgggtctgcctcttcgccgtcgtctccgagatcggcgctaccgtccacagccgtggcacggatttcactgttacgttgagggtaatagatgaatcatacaagtctggaatatctgtaactttttttgctgacagcactgcactattgccttgtgtgaagtcgtgtggagatgtgatcagtctccataacgtcgtgataaagaaatatagagatttctttgtgcaatttgacaaaaagtactcttcattcgcgctgtttgaaggcaaaacgtatactgaatgcagtccatatcagacttctataagatatcatgacagcgaacacgacaaagattttttaaatcagatgagaacgtggctccctcaaggtctgaaggatttcacttcaaataattccgaattgtatttaatgaatttgaagtccgattctacttttgatctagtatgcaaggtttttcatgtacatgtggagaacaacaattcaatattttatgtttgggatggaactgatacccctgcagctgagtttccagcaatgtaagattttagatttgttttgcaattttttgtaataactaagaaaaacatctatgaaatataagatggtgttttagtgttttccaaatactaatgcagcttttaatttttgtttggttgtttttacttggtgcactgaacataagcatagtttggatgctgaggcagccaaatcactctctctacatgaaggcccccctctatccagggagattttatgtacaatgccagatttcggaactgtcctaaggattttttcagatagatttgtcaataaagtatcatatatgcaaaagaacatatattgggccaggttctggaacattacttgcaaacaaaactttggcatttggaaaggtactttctcggactccggtggagttcgcctattatcaaacaaagatgatagcgttgttgatcgtctaaagatgtatgacagccgcatcgccaaccgagttcgtcgtcggccgatggcaagcatcccctccagtgttactgatgtagaatacgaggatgcaggttacgcttcattaatgaagtctttaactcatcatgatgtgacgcacaaattgagaaccttggtccgtgttgtggcagcacatccatgtgaagctagtttgctttcaactggtaactgtcatcttcggttgactcttgaggatcctacagcgagaattcatgcgtatgtccacaagaatgatttggtcggattctttggtggtggttttttgacagcagaagtgatagtaaaaaagatgaacatggtactgggcatcccggaaccacaaggcagcgtggaagttgccccctcgaccaggaatccaccttggatatggtgttgcttgatgtcatactatatggacaaaaacgatccctgggtcagcagaaagtaccggatctatagcacagccatcagggattgagcagagggatgctgctggaatgtgcaggaacaaacttgtaaatgaatgggacagatgctgtgtagtattggcatcttgcttgtagaagaggccatatgcttttgcaggtgcaatcagtgaatcattccatactgaacactgagaatagcacctcgggttcattctgtatgtgcctacactctagattgtcttttgggtgctcatcacgaaacgtgagcatatcttttggaaacagagacctgcgtttgattcctgtgcttgttatgttgtgattgatcattggggggaggttgagcttttgagccagtataaaaatactgaccggaccatcaatattattgatcattgggagtat

SEQ ID NO: 18166 - DNA, 2084 bp, Zea Mays
ctctccctttaaatcgagcgccgcttcctctccgccgctttctctccccttcactcgagcgccgcttcctctccccttccatcgagcgcagcgcctgcgccgccgccaccactccgcaccgccgccagttccccacttcctccccacacccgaatcggattgaagccagaaggcaaggtgaagagtgggcttgggtaacggttgcaaagagatatccccaacagttgcagtcactcgcatccagtcggctcagctatggaggaggactcatcagcgatggagccgaataggctgcgcgaggccgaggcggcggctggggagctgaagaggctgcgcgaggccgggcagtctcagtacatgtaccggtctatcgccgacgccagggttgtcggcggccgggtctgcctcttcgccgtcgtctccgagatcggcgctaccgtccacagccgtggcacggatttcactgttacgttgagggtaatagatgaatcatacaagtctggaatatctgtaactttttttgctgacagcactgcactattgccttgtgtgaagtcgtgtggagatgtgatcagtctccataacgtcgtggcaaaacgtatactgaatgcagtccatatcagacttctataagatatcatgacagcgaacacgacaaagattttttaaatcagatgagaacgtggctccctcaaggtctgaaggatttcacttcaaataattccgaattgtatttaatgaatttgaagtccgattctacttttgatctagtatgcaaggtttttcatgtacatgtggagaacaacaattcaatattttatgtttgggatggaactgatacccctgcagctgagtttccagcaatgtaagattttagatttgttttgcaattttttgtaataactaagaaaaacatctatgaaatataagatggtgttttagtgttttccaaatactaatgcagcttttaatttttgtttggttgtttttacttggtgcactgaacataagcatagtttggatgctgaggcagccaaatcactctctctacatgaaggcccccctctatccagggagattttatgtacaatgccagatttcggaactgtcctaaggattttttcagatagatttgtcaataaagtatcatatatgcaaaagaacatatattgggccaggttctggaacattacttgcaaacaaaactttggcatttggaaaggtactttctcggactccggtggagttcgcctattatcaaacaaagatgatagcgttgttgatcgtctaaagatgtatgacagccgcatcgccaaccgagttcgtcgtcggccgatggcaagcatcccctccagtgttactggtgacgcacaaattgagaaccttggtccgtgttgtggcagcacatccatgtgaagctagtttgctttcaactggtaactgtcatcttcggttgactcttgaggatcctacagcgagaattcatgcgtatgtccacaagaatgatttggtcggattctttggtggtggttttttgacagcagaagtgatagtaaaaaagatgaacatggtactgggcatcccggaaccacaaggcagcgtggaagttgccccctcgaccaggaatccaccttggatatggtgttgcttgatgtcatactatatggacaaaaacgatccctgggtcagcagaaagtaccggatctatagcacagccatcagggattgagcagagggatgctgctggaatgtgcaggaacaaacttgtaaatgaatgggacagatgctgtgtagtattggcatcttgcttgtagaagaggccatatgcttttgcaggtgcaatcagtgaatcattccatactgaacactgagaatagcacctcgggttcattctgtatgtgcctacactctagattgtcttttgggtgctcatcacgaaacgtgagcatatcttttggaaacagagacctgcgtttgattcctgtgcttgttatgttgtgattgatcattggggggaggttgagcttttgagccagtataaaaatactgaccggaccatcaatattattgatcattgggagtat

SEQ ID NO: 18167 - DNA, 1499 bp, Zea Mays
ctaaaatagaccaatcaaatgtctgtttaagttgaaggaacatagcaatcaacattccaatatccattgtacagcctacagtgtgctaggatccaaatgtagtttacacttagttttgcttgcaagttagcagcttgattcaattgtattgtatgttctaactgaaagcactaaaagttgtaaaatgtggcctatattttgtttgtgctattggaaaagtagaaacagtctaagtgcctgttctgtttctttttggcacatattagttctgtgtttctgtttgcactgatgatattggaaggaatctgggataactgaaaatatcggtgtatgctgtcgaagcctgtgaaattgttgtccaggctcgtgaaattgtaaaagcaaacaacctaactgatcagattgtggtcatccatggacgtgttgaggatgttgaccttgaggaaaaggttgatgttataatatcagaatggatgggctatatgcttctctatgagagtatgctgccaagcgtcctatttgcaagagataaatggcttaagcccgggggtcttattcttccttctcatgctacgctcttcatggcccccgtaacaaatcgtgagagatatgaagacagcgtcgatttctggcgtgacgtctatggcataaacatgtctgctcttgtgccacttgccaaaaagtttacatctgaggaaccctccattgaaacaattggtggagagaatgttataagttggccatctgtgttcaagcgcttcgattgctataattttacagctgaggaattcaaatctatcacttcaaaatacaaagtttcatcaatgatgttagctcccattcatggctttggtttctggtttgaggtggagttcaacgagcctatagagtcctctcataattttccttccagtttggatccacttgagattatacagaagaaaaggagacgatcctcagaagatatagttctgtccacagccccagaggatgagccaacccactggcaacagaccattttgtatttcccggatcctatagaggtgaagcaggaccaaattatagaaggttctgtaacagtgtcccaaagcgaggagaatccacgttttctgaatattcatctagagtgcttgaggacagacattggttaaggactgcgccatgcgatgaactggtgtttttatgcttctagtggcttgatttcaggcgcgcaatggggtgttggcagggaggagctgacaatatttcagatttctttaatggaagtggagaatttgtactatttatgccaattatccgtctaatacgaaggcaggattttagtaattgtactccgtcttattctatagagtatatactggttgttgattttggatccgcacgctgtgacctaagtctcgcatccaagggtccctttggaacaaaggaaacatgaaggatttttttatgatccattccctatcggaaaaattcccacgtgagtctttagaccacattat

SEQ ID NO: 18168 - DNA, 1577 bp, Zea Mays
tttctctcgtcccaaaagcttgcttcgcgctttcgaaaaaccacaccaagtcgggaaggcagaggcacagggagggagccgacagccgagagcaccttccgattccgcccaagaaatctccacccaatctctctgtcctctcctcccttctcatcatttcgccatgctgccatcgcacctcaacggccactccgccctcgggcgccgtcgcccgcgcctctccgccgccgccggggagtctccggcggcagcgggggtagaggcggcggctccgctggaggagcacgaccgcatctacttccaggcctactcccatctcggcatccacgagactatgatcaaggaccgcgtaaggaccgatgcttaccatgcagcgatcatgcgccaccagaaatttatcgaggggaaggttgtgctggatgtggggtgtggtactggaatactctctgtgttctgtgctcgtgctggcgcaaagcgagtgtatgctgtcgaagcctgtgaaattgttgtccaggctcgtgaaattgtaaaagcaaacaacctaactgatcagattgtggtcatccatggacgtgttgaggatgttgaccttgaggaaaaggttgatgttataatatcagaatggatgggctatatgcttctctatgagagtatgctgccaagcgtcctatttgcaagagataaatggcttaagcccgggggtcttattcttccttctcatgctacgctcttcatggcccccgtaacaaatcgtgagagatatgaagacagcgtcgatttctggcgtgacgtctatggcataaacatgtctgctcttgtgccacttgccaaaaagtttacatctgaggaaccctccattgaaacaattggtggagagaatgttataagttggccatctgtgttcaagcgcttcgattgctataattttacagctgaggaattcaaatctatcacttcaaaatacaaagtttcatcaatgatgttagtttggatccacttgagattatacagaagaaaaggagacgatcctcagaagatatagttctgtccacagccccagaggatgagccaacccactggcaacagaccattttgtatttcccggatcctatagaggtgaagcaggaccaaattatagaaggttctgtaacagtgtcccaaagcgaggagaatccacgttttctgaatattcatctagagtgcttcacaggaggacagacattggttaaggactgcgccatgcgatgaactggtgtttttatgcttctagtggcttgatttcaggcgcgcaatggggtgttggcagggaggagctgacaatatttcagatttctttaatggaagtggagaatttgtactatttatgccaattatccgtctaatacgaaggcaggattttagtaattgtactccgtcttattctatagagtatatactggttgttgattttggatccgcacgctgtgacctaagtctcgcatccaagggtccctttggaacaaaggaaacatgaaggatttttttatgatccattccctatcggaaaaattcccacgtgagtctttagaccacattat

SEQ ID NO: 18169 - DNA, 404 bp, Zea Mays
tttgctgaattggtggaaggttaattcacatagatttccagtggtgtcgagaatggcaaagaaattcctaactattccggcgacatctgtgtcttcagagtctacttttagcacgggaggtagaactctagatgattatcgtagttctctaaggccttcaatggtggaggcattggtatgctcttctagctggatccgaggaacacatgatggaagcatgatatatgtggaagaagatgatgaggacaatgttgagaacattatgttcccaaaaagcttggtggaaagcaactaaatttggaagaattggatggagacaagacaagctaagctaaggagacgtcaagagtcaagactcaagagaagatgcatcatactactgctgctgcttgagaatatactgc

SEQ ID NO: 18170 - DNA, 7083 bp, Zea Mays
gtttgagtgactaaagattagtccctccattttagtctcatttagttcctaaattaccaaacagtaggactaaactgttttagtccctagtccctcaacatgtggctaaaaaagactaaatcatattaatttcacatttaccccttatttagtttaattgtattaatagcaggagaatgttataggtcattttagtcttcttatgagtcatttagtgtattcttactaattttagtaattagaaccaaatatgatagagactaaactttagtccctagactaaggctctgtttggtttgggatgactaaagtttagtcacttttagtcactaaagaagcagatatggtgactaaagtgaagtgaataaactttagttctttagtcaccaaaggagtgactaaaagactaaagtagtatttttatcttatttgccctccgcactttcttctaggggtaaaacaatcattattcacaacaattaatgctccttagtccgatttagtcacgggaaccaaacatattttagcgactaaactttagtcactaaaatttattctaatgactaaagaaaccaaacagggcctaaagaaaataaacaagaccatagtttaaaatagaaaattagatataggataaagatagtgctacacgtctgacgttcacgtgtggtcttggtcttcggttggggttggcattaatggcttcttcaagctactccttacatacatttcctttttctagttccgatggacgcgcctgataaggggaacaatcatctagaaaatatccctggctagtaagatatttaggaaaatgtttctcgctaatttagttcttctcgcaatatagtaccttgtatgattggttcgatttctttttaatctgaaactaactttaaaatggcaaatatttgtattccaataccaaaaaactagtaattcccatgagattattttgtatgttgcaatcgggaaaaatagttttggttctggtaaaaaaatagcaagatgtactcgtatgaagaattttaaaagttagattttgttgtgtagaaaaaactcgtaatactggtttttgttccgtgtcacttttaagttaattttagattataaataaaaataaattggaccaactatacaaggtgctacaagacaagcagaattgcattggcgagaggcgattactagatgtattagagggtgtttgattttcatgttaccaaatatgtaaattaaaatatagttttagtttccgtatttaataatttagcggctagaatgctagaaattggtccctataaccaaacacccccttactatcgagggacgttttctagataatcaagttattgggtgctatttaggtttcctaaagtgtcacataagcatgaaattgatgaaacttgcgttaacaaaaatggaaggtacatgagctagccgagacgaggcccgaaagagagcgccattttcaatcggcgaaccagtcttagaggtaactctagttgttatctaaaagatttcctaaatcaataatttagatagctaatataaaacttatctacaacagttctctaaataaattttctaaatttaacaacttctcatctaaccttattttctctctgcatttggtaataatttagcaactctctgaaccaaaatgttggctccattacattgataatgaagataattaatacatttctgacttattttttatgtggatagatacaaaacaaaactaaacctatatttagagaattattggaaaactcataatttttatttctaaagttatttagcaacttattaaatctatgatttagacaactaaaatttagataactattaaagttctcagctcaacccccgcagatgtttttaattcgatttttattcgaaccaagccccatctctctcgtcttccacctcctgcgtcctgccttccccacccccaccgcacagcgcccggccggccccaaccagacagctccgtttcccctccccgtcctccctccacctcgaccgcgcaccaaacccgaaagcgcagccacatcccctcctccagccagcgcggccgcatccctcctccagccagcgcacttcgcatctgctccgcgtcaccccgagcggcggcgcctgcccccaccgggcagtgtgtacggccgcctcgtgttagggactggcggggcgcgagatccgggctgcaagggcgggcagggggtcccgttggtggcgccgcggtgtcgccgtgatctgcgatgagattgggcccggcggcgcggtactcgctgcggaggtagacggccatggcgaccaacaccaagcgcgcctacaagctccaggagtttgtggcgcatgcgtccaatgtgaactgcctcaagattgggaggaagacctcacgggttcttgtcaccggaggagaggatcataaggtcaatctttgggctattgggaagcccaattcaattctgagtttatcagggcacacaagtgctgtggagtcggttggttttgattccaccgaagtttttgtggctgcaggagcagccagtggaacaataaaactatgggatttggaggaggcaaagattgtccgtactcttactggacatagatcaaattgtatgtcagttgatttccatccttttggggaattctttgcctctgggtcattggacactaatctgaagatatgggatataagaaggaagaattgcatccatacatacaaaggtcacacacgaggagtgaatgctattagattcacacccgatgggcggtgggttgtgtctggtggcgaagataatatagtaaagctctgggatcttacagctggaaagttattacatgaattcaagtgtcatgagggtcagatccagtgcatagattttcatccccatgagttcctcctggcaacaggttcagctgataaaactgtcaagttctgggatttggagacatttgagttgattggatctacaggacctgagacgacaggtgttcggtccatgacattcaatcctgacggaagaactctgttatgtgggttgcacgaaagcttaaaggttttctcctgggagccaataagatgccatgatactgtcgatgtgggatggtctagacttgctgatttgaatgtccacgagggaaaacttcttggttgttctttcaatcaaagttgtgttggaatatgggttgttgatctgacgcgtcttgagtcatatgcaacgggtacttcaacaaaattaaatggccattctgaattgaagactgtgtctagtggcactatgcctttacaaaatgatagtggttcaagggctaacatagggcaatcatcagtcttgcaaagttcagagaataacttaaaagcttcctcaggaagactgtcggtttctcagaactcagattctgctcccaaagagactaaatcaacaccctctagcgggttggtcccaagcacaccacaaagggctggatttagctccaataatagatctgttggaaattcaacttttcaatctggtggtaccactaccaccttgaagagaagttcgttgcggagtaacagtgcctctaatgttcacaatttcagtaaagctgatatagtgcctgtcattgttcccagagctagctcaggaggggagttggttacgggttctagaagtgatgctggtgatgtggcacctgttctccctaaggtaaccagaagggctgatccttctagtgattctagaaaagaaagtaatgatgtggaacctgttattcctagagcaagctcaacaatggaaatagcctctgattcagcacccatttctacttccaagtcaggcagaaggttggaggctgcccctgattcaaaaaaagaaagtgctgatacagcacctgctgttcccaatcccagggcaaatgcaagaatggagatggcctctgattctgcacctgctcttttaaagacaaacaaaaagctagattctggtactgattcaaagaaagaaagtgctgatgcagtacctgttattctgatttctgattcaaggagagaaccctctgctggaagagtatcaccattcagaatccagtcaagatatgctgagctgcggaagctagcccatgccaaaattgacagaggaagtaaaactactggaacagatgacttcaattgccaaatatttcttccccgtaaaaatggtgtttttcaaacaataagttctgaagaaacccgtaaagatgtaaaatgtggtccagttgacaggacggaattttcaaattcatcagaaccaaatgcaagtgtccgcagtgagaattatgtttctagaatgcgcaaaccacgagataactgctatattgaagtttcaagaaaagggagagcaaggtcaagtgtctgtaattgggaagggcgggaccagtcccctagtcacgaagaaccgatgacagccagttcttcgctggctcctacaggccgtccaaattcatctgtatgtctaaaacaagccataaaccttttccttttatatgttctggtacttcatttttttaactcccaaaggttgtaaatatgtgggtttgttaagcttgaagatacttgtgcttactttattatctgatttcatttatcatggttcatggtggctgctgctgtcccattgattcttgtgcatgcatcatgggcctatgactcaaccattccttcaatcatactcttgccccaggcccagcctacacctatcactagttcccatttgaaaccctgttgaattccaataattcctatgaaattatcgtgacacttgtgcttgactaccttgcacttactatactgaagatttccagctcttaaactttatttaacacatcagtttatacctggaattgcatatttggccatctatgctttttacacagatctacatgaaacctttcctcttctgcagagaggaagcagtcaagcttctgaaactccaatcatagctaatgatgaagatgttatatctcttttcatggaacaacatgagttatttctaagctcgacaaagtctcggctgacaaaattgcagatcattcatcaaatgtgggaaagaaatgacatcaggggtgtactctctgcgatggaaaggatgggtgatcatgctgtcagtactttgctgctctttcttttgtacgcaataatcagcatgttaatgattgtgtgatttctggtaattcaggtctgtgctgatatggctagcgttctgatggaaaaaagtgatgtaatcacacttgatttatgtacctctatcctacctgccgccactgatcttctggagagtaaaattgacagacacttaggcgtcgcattggaattgttggtgaagcttgtaaggacttttggtccaatgatccattcaacagtatcatcaggtccttgtgttggtgtagaccttgaggcagagcaaaggagggagcgctgcaatttatgcttcattgaattggagaatgccaaaaataagcttccatctcttacaagaaaaggggcagttgcaaatgctgcacaagagcttgcgctcgtcttccaggaaatcatgagctgactgacgacatactagacacacagaattagatgggacgttcttccctctgctggcaccgagattggatatcagctgcccatggagcgctaagagctactcagtcttagcgccgtcatcaagctccaaggccacagcagcggtgaagggcattttgctgctgctattcccgcagtctgtacacatgctaacacataatccgtgtcatttgtgaagagaagctgctgccatggacaatggacttcagccacaatattatgtggatgtcgtttcatgggctgccggcgatgctacaggtcccgatcgaatgatgatcagcagatgggaactcgtagttccttgctgtctgcagcacctttctcatgtaccgttagcatgtgcgtgtttgtggttgggttgggttgtttggccgatttactgatcattggcgaatgaagtgagccatgtacatcattttgaagaattaatatcttttcttcttctgagtacctccctttgtcatgcactgcattgagtgaaaatgatatcatgtggtgttgccttgaactggtttcggtgagtttccattttccctgatctggcaaaaatctacgtgtttgtactgttgttaggcaggcagctggtagtgtggcatgttaaacaacagtaccttacacaaaccattatgcagacaaaaaccaaatggcaccctagaccagaggcatgcatgcaagaagtacccgtccttattccaatcatcttggcaattgcatcacagaaactagcttcctcgtcggcgggtcctagcaggtagggacacaggacttggtgcacttggcggcgcacttgctgtgcgccgagagcgtgcaggccttgccgcagagcaccttcttcttgtggcactcctccttggtgaggcagctcctgccctgcttctcgccctccttgctgctcccctcctccttggcgtgctcgccgccgcccgacgagctctggtcgtcgccctgcgtggccacgccgccgctcggccacgcctccatcggctgcgcccgcgagaccttgttgcccgcccaggtggacgccaccctcgcgccctccgcgaccagcaggccctcctcctcgaggcgcacctcgtgcagcaacgccggcgcgatggcgccgctggctgtcgcggcgaccgcgagaaggaccgacacggcgaggtagcaggagcgagacatcatcgctgcagctagctagcgttttggctgcttttgagctgtgagtggcattcgcttccagtccctgcgtgtttttatagtgctctagtatagtacgttcgtgagcaaccgagcagcaagcaacaggggcgtgtctcaactactggtttgggtgagaggcgccagctacgtgctcgtaaccgagcgagcatacatgcaccatttttgttttcttctcttgcaccattttcatccaaaagacccgaatgggggtatatcagacggattgaaatcacaaatatgaggtcagctaccagataccaatcttctatctggcg

SEQ ID NO: 18171 - DNA, 3025 bp, Zea Mays
agcttgcacaggtcagagtttagttgtcctaggaagcggaggcagcaagtgacatcgctcatcgttgcactgatcaagtggttcaagtctccaactgttcagaaacaaactatcagaagtattcaagaatttcaaaatactaaatgacaacatgatttttgtaaacactaagaagcgaaatcattgattgaaatccggtacagatcaaatgccagcttgtttttttatttcggcagccatgtgtatataatctgctaacaatacgaataaataaaaggtcaatgaaattattgagccaaaatatattgtagcaaagccatcataggaatataaatcttctgacaatgcatatcacaaataaaacattttatcttttgggttcgaggtcctcgaaaagttttaatcgccatattatcttttgactgagtagcatataactcatatcctctatcgttgacattgtacatgcattttgcagtgtggggctgatgaatgtcattgtgaaagaccgggagaacatgtcagtgacagatgtagaggaatttgaaaccgtgctggtggtggatctgcctccttcagtcgacgaatacattgagatcctcactggggctgctcgtcatgtgattggaggcgaagtgcatagcatattctgtaacactgatgcttctattgcaaaacctctggctcagcttcttgcagactgcggtcaggtggtgcatgaattccttaaaagcctgaagtcttcatagcagagacttgtgtacgcaatcagagtagtcagatcacatcgtggcgatttagatcattttggagcaattttgatattttcttgttggactgctggtggcgacatggaagtagcatatagatgggccggacaactatgcttaaggtgttgaattatctcctttgatgcgacaatatatccaccacatgatccaaaagacttggtaaaagctactaatcctggcagtgaggtccaaaccatactggaaaagctctgacaaggatcaaacaataaggattccaaagacgaattggaactcacttctgcattctgcgcaatgtctgttagtgttacatctgccccaacctttgcagctactaatcgtggcagtgaggtcccagcaccaagctgcaaaaatgatacgtgcgaattagataagagtgtaactgtagcattgtcctgtgaaacaataatgtacatgtagtcgtgtagaggaatgcatgactccacaaagagatgatttccggcctcctcggacacctgaaataagcaaattaagcgagaggttctcacatgcttctcgcgcgggagtcggacaacgggcaatgggaggtgtacgatagggccgtcgaggtcctcggtgggtggtacagcgaagagggcgtcagccaccccatgcgccagttccgtccccttccgcaggcactcctgcctcagcttctccctgagtttttccgcttcagaaaaatttaaatagaacttctagttagaaatgcttcttgatttatttcccttctaaagtacacaagttactttttacagtaaacagaaatggtagggatttgtgggctttatgaaagaaaaattagggatatcaacccaatggcctaacttatgacatcagtgacttctataacttcattgatggcctaactgacattagtgcgctggtgtgagtacaacttttttaaagatttcaaggctattcagtgcattctgcaatttgtatcaaagaaagacaaaccttgtaaggaatgaaatggagtagtagtattgtaggttgaagatttctttttgtactttggtcttgaactgaacatggagtttctttggggcaagggaacctatgcagacataattttatctgaaacaacttttgcaacgataaaatgattatgccatctaaagaatatatataggaattcagatcaatgtgacagccagctaccacatgtccaaatggcactaaataggaaggaattaaaaactcagaaaaggacaatcagatccatgttatcattcaataaaaagtcaaaatgactcaatgacaaacttacagtcttcacctttaggtcttccccactgagctccctcagtataaaagaagacaacatacaaggctatgcaaaacaggcagaaatcatctgaaagaattaacatggtgcactggtgtagtcatgtagaaatgatatagttgcatttttgcagtaataaccaatgtctcctttaagtaaatgtttacccactaaggtagcatatatggatatcaacatgaacaagtgtacaccttctaaaaagagaagactgtgtgcaagaatatgcagaagtaaaagaaatatttcaaaagattacaaatcgacccaagtctgtcatgttccacttgtgtagaaagaatataaatatccatttctgttgtaaggaaatgttacttattcgctaatgttacttatttgctgatgtagcatatatggatcgtaatctgtgttgattgtatgtttgaataatgtagtataaaagaatcaagcctgaattcagtccatcttaccatattaatcatctggaaggaagatcagacatctttttgcttgtttgacatatttgcttagtagagcgctcgtacattgtgacggcacacaaataattcgataaaatgttagtgtgcaacggttacaagaaaatgaagaacacatatattatcaaactcaatatctcaaaaattgattgcaatttgtagaggaaagctgaaagcaatttcgtacctagaaataatttcataaacccatttacctcggcgccagcatctgcacaacaataggaaatggaaatactttcataaactcatttaccgtcaggatacatctttgctactgaattttcatagcacctgatctatcaagtgaagcaatagaatggaaggagagttgatagtcgcctagagggggggtgaatagggcgaaactgaaatttacaaatataaacacaactacaagccgggttagcgttagaaatataaacgag

SEQ ID NO: 18172 - DNA, 2040 bp, Zea Mays
ccgaaagtaaatgtaggcatgcactaaaccataaaataaacaaggctgtaccaacagacaattgtgtcatagactatatcatgttaggaagtgcacacattttgcaaggtgacaaagttgagcggtaacaacttctctgggaggtacaccttcactgatttgaggatttcaagaaaaacaacagatgtgaacatcttaaaaaataaatgtgtccacctacacctagtggttacttggtcaggactgatgtgatatcaacaaagcatacagttggaagaatgcaagtcaatatgaaacattgagtggttgcagaagttcactgatgcaaaactaattattacccccaaacaatgcatcaaccacctggaagagaacaatcatacagtaggactgttaagtctgtaaactacatctgattctgagagtataggtaatccaacaaagaacattctccaactaatatgatatttttagaagtcaaaatgattgcctgccacaaattcatattctagtttggcctaccttttacagtttaacctccattcctctggtttctgtgagacttggttcatacaagtttgatatataggtaagattgggacaaatacaagatgaattccatcgaggtaaaataaaatagctaaggaagattcgtttggaattatgtcatgctagcttaggttaaattttactttctattgaatagcacaccaattctagatataaaaaaactcggccaagaatggaatgaccgccctcccggcataatattaaaaagagaccgaaacaatgaccccgtccgagaaaatctccgaaccctgtcctcccatcactaacatgccggcgtcataccgtccactctgcaacggataaactaacccgagagtggataaggcacaacgaggggattttttaaccaagcccgaaagttcgcccccgaagggaatcgaacccgggacttggaggtgctactcggaagcattaaccactaggctagaggcccttttgccaccaattctagatatatatgcttaaagtttttttttaaaaaaaactttcctaggttgtaggctccttttggttggactatgtcaaatagaaaattgagcaatatatagttccattctaatgaaatctagctaagagaaaaacacaaaattccaaggaaaaagtgtcattgtgtaaacactcactccattccgaatggcaagtcgttttggcttttctagattcgtagtttttacaaagtatcagacagtcactaaaaagctacctaaaaaactaaaatggattatagtttggaacagagagagtacctctcaattgctgtaataaaataatttcaggggtaaaggcacaagaaagcaactttaatcactgggaccataggcgctaagtggtcaaggaaaattactgcacactgctgtattcgcagtttcatgttttatggtgatctccatacagtagctccatacaatactgtcaatggcactgatagtatggcaaaaacagagatactagaagatccaactacagttactgctatatggtagtatcaacgattcaaacacttagggctagtttggcaaccctattttttttcaagggatttccattttcccaagggaaattagttcagttttctttgggaaaacgagaatctcttgggaaaatggtgttgccaatctagcccttaatggagaacaatacccaccctagaaggcctgcagctatacccaagttctcagcattgaaactagtccgtgactggctattcccttaacacaaacttctagcgtctcctaatacctaattaacctaagtaataaaaaacaacattttcctttgtggttcattcacctccgtagagcagaagaaacagttaaaattagtcgaaagatcgccaaaaggcgttagatctgactcgaacagccggaaacctagcccacacgcaagcaagcatacaggcagcaaaacagcgtatgccccaagcagatcggaaccagcgccggcggtgctcacctccgccactcgcggagg

SEQ ID NO: 18173 - DNA, 3104 bp, Zea Mays
aattttcagtcctcgtgtatcacccctcctacataggtgagggtttaaaccttgattaatgactctacatttacactcagctaactaataaaacacataattttctattgtattacagcaaagatattatgctatagtttgaagagagaaagcgttgccgaccaacgacagataatccatcaagtgccttgtaccacctgcagcccacgatccacctatctatcattctatctatatgttgagtgatataaacatctctctcggctttttatgaaccaactttttagtagtcctaaccaaactttgaccatgtttgtttccctcttagattatataaatttgagtatgatgggagggtcggagactaaaatattattttaggatcacaaataagctacacaatactagcttctttgtattctcaaattgatattttacccgtctatccttcgacactaatccaatttatataatctaggaggaaaacaaatgtgccctcaaattcaaataggtcggaccctctaagtttagttaccttttatttacaacgtgtttaagaactttatcctcttttatatgcatacagctagtgcaaatgacatgtctcaaaaatgctaaaacattatcaaccattgtttttttctgtcaaccagacaactttttgatcaaattagcgtatcacgatacaccgagacacccattcgatgaacttacaatactatgtatttaatggtagatgtcatagattaagttaaaaaatgagaacgagaaacaaaggatttaggtctttgttagcatgaaatcatcatcaaggtctcgatacttgaagaacctacggttatagttggctcgaggcccaaataaactcgtctagacgcagaataccgccctaaacctgcaatggtatcagtagctgatgccactgtgtcactccaaatagatcagtcctccaaagacacatgtttgtggagtaagagagactgcttgagaattgaagaacatatggtatggaagatatagcaggcaccactaatatctaaaacttgtcaaggttagcgacgcggaggcactcttctcggtcgacgctccgggcccgaacaaaggcgaccaccccacatccgcaccctcacggaggccggcgacctccagctctagttctagataagacgcgaaaaaagaagggagtcaggacaactgaaaggaagtcgccacagaaggaaaaggcaccactaacccacgacacagcggtctgcctctgctagacgggcgcgaaggaaggctagctcgctgtcagcattttcgagcgtcgcattggtagcgaccagactctccccgagatccgagggggtctaggacgagaggattggaaccccgcccagacaaaaaggcagcctgaagtctttcctttggcccatcgaaataacttggctgcattgaatgaagaaggtgaagagacaaacacaatattagagcttgttcggttaggggtggatcgatggggattagaggagattaaatccccttctatacaaaattaaataggaggggatttaatcccctccaatccccatcaatcctcttcaaactgaacaagccctgaagggcttgtttggaatcaagagtaatggagggaattgagggagctacaatcctctactatttaattttaaatagtgagggattctagtaccctcaatcctcttcgttccacttacttccaaacaagtcctaagggtccggtagcaggagggagaggagcccagaccctgattcgatcatcctctgcctaagaggacgcaacacgtgggggctgctcctccgcacgacactttttttgggtccataggggatcacgaagaaaccatcctttagcgaagggaacaaggcaaagtatgtcaaagtcgctcgaggaaagaatcatttatagaaaggtgtgaggcgtagcggaacgagatggattccaagcgccatgtatggaacgagacgaaacaccaaatgcacgaaactatgaaagtgtgcgctaggataaggggcaaggcaacgccctgacctaagaaaagcccccgagaggaggggggctaatgtcggggataagatcacggtccctggtgctcatcagttagtgaacgtgttagggaaaatcctctggcaattggggcccgttagtcagctggaggagataggtaatgtctggtctaaaagtacccacccctagacgagcttcgtggcaccgagcctaggtcgggcatgaaggaactagataggggtcaggtgagccgaagagaaaccactcttgtggatcccttggctagcccgagaccaacccgtcataattgactggccgcattaactatgtttggcgctgagccacatcagggcgtcggtctgcctacacctcatgacgtacgagcccctcggactggcaacactcatagcctaggaacccatcggattgcgacgcatttacggcccgcacgtcccccggtgtacggtgcactcgtgacctatcggaattaggcctaagtgcacaaaccgctagcagggcgtaacgactagtctcaggctatgaaggcctagggtcggtgtagcccaaatgatgacgctcgggacccacgatgacgacatcatccaccataaggaatacgacgcaactaggtgatcatggggcccacgggcttcacccacttagttttacctttgactggtggctccttccgaaggccccttacttggcctataaattgaagatgttggccctcggacggacggaggtccacatgaacaacacacggacgacggaccccagacgcgaatacgaagaaaaagaatgaaaggcaccatacctaggtaatgtacctgctgccgccatagaacgggggccgcgagcgccgcttgggctggagaatagatgggccgcgcgtccgtagcctcgaaagcgatagcggaaacgtcgcacgcttccaccggtcgtaggaacaggttggtcgcgaccttaaaccgagtgcagtgcgtttatcttagcaagaaaaagctcaccggaaagcgactagcgattgacaaaggcagatggatcaaaagaaatccaagcgcgtgcttatcttatc

SEQ ID NO: 18174 - DNA, 156 bp, Zea Mays
atgcgtcatcactctcagaacacaacacagcacagcacagcacagcacagatggtgtgctgctacactacagctagctccagctattttacatgagaatcgtaggcgtagaagatgttgtccggggcgacgaggggcagcttctcgacgtacatga

SEQ ID NO: 18175 - DNA, 1581 bp, Zea Mays
ctttcctgcttactagcagatctcggcctacgagtcaagcaagctcctagatttgcaggttctcttgccccatcccttcgctgttattggtttcttctcgcaacccgtccttcgcttcgcttcgcttcgagaaacgcgtctgctttcagggccaaattcgcagcgaactgtattcactgtactgtttcaccgaaccctttccacccgttaagattagaatttagtcccgcgacgaccaaccgacgatgccgtgcagaaacgagagatgcgaagcggtggcgtacaacacggaactacccagccaccaccaggaggcaccagccgtcactcctttcaggatgggtgcacggcctcgtctcatcacgccactatcgccgcagatttggctacagttagtgacgcgtgacaaggaagaagcactatcctatccttctagtcgacgctagtgctattctgtgggcacggtgatcggcttccgtgttgtgctttagaggagattttggtggcgtcagatcgggacgcatgatgtgatgcaatggacggcctaactctaaagttgattggtggggcaagggcgctgatgaagaatatacaaaagaatgacgatgctgatgtgaaacaaccaaatagtgcatctacacatttcttggactggggatctttctgtgcctactgacttgctctgggcatattgctgccgaaactgcaaacggtcactgcctctcttgttacatgaccatcgtatttgtgcttattatgctggaaggcgcaatcactatggatgtatttttgaatagcaactgggaagaggatttccccgctgacccatcaggcaagtttgaggatttcaagcacttcgtgagatcaaatttcgagatatgtgaatgggtaggcctctcagtggtggctgctcaggtgttatcgatcattcttgggatggtactcaggacccttgggcctgaccgtgagaccgactatgacagtgatgatgacgtgaccgtgcctgcaaggctgcctcttttgataaatcagtcccagcatggttcatactatgctgaacctaacacgtctggaaggagtgattcatggaaactgcggattttagacaaggtcaacaactaagatcttaaggatctcatacaacagaccctccagtaaagactctctctccaaggggttcgggagaatgataagagtatacctttttcttcatctcatggagagatgattagcagcagcagtagaatagtttacacacatttgaatgcaatccaacatgcacaagtatttgagtagcatgtgacttgacccccccccccccctcctacaaaacctacacaatgtaggggaaggatgtttattgtaccaaaatgtttcagaaaagagataaagggcatgaacggtggtggtgccttcactgaccaaagacagaaatatttgttctcccccccccccctgcctatcagctcagctgcatcatgcatgtgtttttgatctgcttgtcgggccggcaggtttcctatttgcaccaactgtcaatgccaaagggtgaaaaaaaatgaaatgaaaatgtcttgaaat

SEQ ID NO: 18176 - DNA, 1303 bp, Zea Mays
ggcgactagtattaacctaccacaacaccaagtccccccccacctccgcattgtctccgccgcgatttgtcaacgtgacgtcacgccgcgcctccgagagggagccagtgtggtggaggacacgaggctgccggagccgcaggtgttgctccggtcagcatcggcatggcggggcggatggtgcggagctgcgtgcagacggcgctcaaggcggccaactccgtcgtggggctcgccggcatggccgtcatcctctacgcgctctggatgctccgcgcttggtacagggaggtcgccgacctccaacaacacctcccggtcccctggtgcatctacacatttcttggactggggatctttctgtgcctactgacttgctctgggcatattgctgccgaaactgcaaacgtggttagcagcttctgctggtttatccaaggttttcagttagtacatgaccatcgtatttgtgcttattatgctggaaggcgcaatcactatggatgtatttttgaatagcaactgggaagaggatttccccgctgacccatcaggcaagtttgaggatttcaagcacttcgtgagatcaaatttcgagatatgtgaatgggtaggcctctcagtggtggctgctcaggtgttatcgatcattcttgggatggtactcaggacccttgggcctgaccgtgagaccgactatgacagtgatgatgacgtgaccgtgcctgcaaggctgcctcttttgataaatcagtcccagcatggttcatactatgctgaacctaacacgtctggaaggagtgattcatggaaactgcggattttagacaaggtcaacaactaagatcttaaggatctcatacaacagaccctccagtaaagactctctctccaaggggttcgggagaatgataagagtatacctttttcttcatctcatggagagatgattagcagcagcagtagaatagtttacacacatttgaatgcaatccaacatgcacaagtatttgagtagcatgtgacttgacccccccccccccctcctacaaaacctacacaatgtaggggaaggatgtttattgtaccaaaatgtttcagaaaagagataaagggcatgaacggtggtggtgccttcactgaccaaagacagaaatatttgttctcccccccccccctgcctatcagctcagctgcatcatgcatgtgtttttgatctgcttgtcgggccggcaggtttcctatttgcaccaactgtcaatgccaaagggtgaaaaaaaatgaaatgaaaatgtcttgaaat

SEQ ID NO: 18177 - DNA, 1344 bp, Zea Mays
ggcgactagtattaacctaccacaacaccaagtccccccccacctccgcattgtctccgccgcgatttgtcaacgtgacgtcacgccgcgcctccgagagggagccagtgtggtggaggacacgaggctgccggagccgcaggtgttgctccggtcagcatcggcatggcggggcggatggtgcggagctgcgtgcagacggcgctcaaggcggccaactccgtcgtggggctcgccggcatggccgtcatcctctacgcgctctggatgctccgcgcttggtacagggaggtcgccgacctccaacaacacctcccggtcccctggtgcatctacacatttcttggactggggatctttctgtgcctactgacttgctctgggcatattgctgccgaaactgcaaacgctgccatcacttggggtttgcttgttgactacctataatggatcagtggttagcagcttctgctggtttatccaaggttttcatacatgaccatcgtatttgtgcttattatgctggaaggcgcaatcactatggatgtatttttgaatagcaactgggaagaggatttccccgctgacccatcaggcaagtttgaggatttcaagcacttcgtgagatcaaatttcgagatatgtgaatgggtaggcctctcagtggtggctgctcaggtgttatcgatcattcttgggatggtactcaggacccttgggcctgaccgtgagaccgactatgacagtgatgatgacgtgaccgtgcctgcaaggctgcctcttttgataaatcagtcccagcatggttcatactatgctgaacctaacacgtctggaaggagtgattcatggaaactgcggattttagacaaggtcaacaactaagatcttaaggatctcatacaacagaccctccagtaaagactctctctccaaggggttcgggagaatgataagagtatacctttttcttcatctcatggagagatgattagcagcagcagtagaatagtttacacacatttgaatgcaatccaacatgcacaagtatttgagtagcatgtgacttgacccccccccccccctcctacaaaacctacacaatgtaggggaaggatgtttattgtaccaaaatgtttcagaaaagagataaagggcatgaacggtggtggtgccttcactgaccaaagacagaaatatttgttctcccccccccccctgcctatcagctcagctgcatcatgcatgtgtttttgatctgcttgtcgggccggcaggtttcctatttgcaccaactgtcaatgccaaagggtgaaaaaaaatgaaatgaaaatgtcttgaaat

SEQ ID NO: 18178 - DNA, 1229 bp, Zea Mays
ggcgactagtattaacctaccacaacaccaagtccccccccacctccgcattgtctccgccgcgatttgtcaacgtgacgtcacgccgcgcctccgagagggagccagtgtggtggaggacacgaggctgccggagccgcaggtgttgctccggtcagcatcggcatggcggggcggatggtgcggagctgcgtgcagacggcgctcaaggcggccaactccgtcgtggggctcgccggcatggccgtcatcctctacgcgctctggatgctccgcgcttggtacagggaggtcgccgacctccaacaacacctcccggtcccctgtgcgacctgacgttgatattgcgtctctttttccttaacctgacaacgtagtacatgaccatcgtatttgtgcttattatgctggaaggcgcaatcactatggatgtatttttgaatagcaactgggaagaggatttccccgctgacccatcaggcaagtttgaggatttcaagcacttcgtgagatcaaatttcgagatatgtgaatgggtaggcctctcagtggtggctgctcaggtgttatcgatcattcttgggatggtactcaggacccttgggcctgaccgtgagaccgactatgacagtgatgatgacgtgaccgtgcctgcaaggctgcctcttttgataaatcagtcccagcatggttcatactatgctgaacctaacacgtctggaaggagtgattcatggaaactgcggattttagacaaggtcaacaactaagatcttaaggatctcatacaacagaccctccagtaaagactctctctccaaggggttcgggagaatgataagagtatacctttttcttcatctcatggagagatgattagcagcagcagtagaatagtttacacacatttgaatgcaatccaacatgcacaagtatttgagtagcatgtgacttgacccccccccccccctcctacaaaacctacacaatgtaggggaaggatgtttattgtaccaaaatgtttcagaaaagagataaagggcatgaacggtggtggtgccttcactgaccaaagacagaaatatttgttctcccccccccccctgcctatcagctcagctgcatcatgcatgtgtttttgatctgcttgtcgggccggcaggtttcctatttgcaccaactgtcaatgccaaagggtgaaaaaaaatgaaatgaaaatgtcttgaaat

SEQ ID NO: 18179 - DNA, 1532 bp, Zea Mays
ggctacactacactcaccatagcacatgatacccatgttaacgtgaacggaatccatccaacaagcaaacacacgatcagcgcaaacgaaacacgacaacccatgattgaggcgtgcgcgggacgtgacggcgaggcggcgactagtattaacctaccacaacaccaagtccccccccacctccgcattgtctccgccgcgatttgtcaacgtgacgtcacgccgcgcctccgagagggagccagtgtggtggaggacacgaggctgccggagccgcaggtgttgctccggtcagcatcggcatggcggggcggatggtgcggagctgcgtgcagacggcgctcaaggcggccaactccgtcgtggggctcgccggcatggccgtcatcctctacgcgctctggatgctccgcgcttggtacagggaggtcgccgacctccaacaacacctcccggtcccctggtgcatctacacatttcttggactggggatctttctgtgcctactgacttgctctgggcatattgctgccgaaactgcaaacgctgccatcacttggggtttgcttgttgactacctataatggatcagtggttagcagcttctgctggtttatccaaggttttcatgcgacctgacgttgatattgcgtctctttttccttaacctgacaacgtagtacatgaccatcgtatttgtgcttattatgctggaaggcgcaatcactatggatgtatttttgaatagcaactgggaagaggatttccccgctgacccatcaggcaagtttgaggatttcaagcacttcgtgagatcaaatttcgagatatgtgaatgggtaggcctctcagtggtggctgctcaggtgttatcgatcattcttgggatggtactcaggacccttgggcctgaccgtgagaccgactatgacagtgatgatgacgtgaccgtgcctgcaaggctgcctcttttgataaatcagtcccagcatggttcatactatgctgaacctaacacgtctggaaggagtgattcatggaaactgcggattttagacaaggtcaacaactaagatcttaaggatctcatacaacagaccctccagtaaagactctctctccaaggggttcgggagaatgataagagtatacctttttcttcatctcatggagagatgattagcagcagcagtagaatagtttacacacatttgaatgcaatccaacatgcacaagtatttgagtagcatgtgacttgacccccccccccccctcctacaaaacctacacaatgtaggggaaggatgtttattgtaccaaaatgtttcagaaaagagataaagggcatgaacggtggtggtgccttcactgaccaaagacagaaatatttgttctcccccccccccctgcctatcagctcagctgcatcatgcatgtgtttttgatctgcttgtcgggccggcaggtttcctatttgcaccaactgtcaatgccaaagggtgaaaaaaaatgaaatgaaaatgtcttgaaat

SEQ ID NO: 18180 - DNA, 964 bp, Zea Mays
cgagcccctagactctgcctttttttccctggggcagcagccgcgccaggtgtcgtcggcgccgccacggctgcagagaaggccacggatctccagcggggattaaatgctattcaccatgttgtaaaggatcgactggataagagaatgaccaactgggagaaattctgctatcgacattgcttcgatgtacctgaaggttttgtggccgctgatgatgatagttcttgtgcaaatgaatcacaaaaagatgggatttcggattcagatttggatttggaacttgactctttgaggagaaagtttggaagtgctaacaaggaatctgaaaaccttgaaagagagttgtcctcactggaaaggcaagctacgttcaaaagaagacttgattcttctgtctctgagatagaaaagttgtttgaagaagaaatggtgcagggaaatttgaaagatcttgtgaaggcaataccggttttgcaccagaaaataatagatgcaaatcagagaaggactgagattaggagcttggtagatcaacaggcttggaacacgaagagatcgagagacagcaagccataagcgctggagaagagtactgccagttcccactttccctcttcagttctcccgtgttctactgcatgtgttgaagacattcaagaggttgtcaacatcttacagagcaagtagcttgttgctcttttcctgattcatgttggttccacatagcgcctgcagcttgcttgcttggataaagcagtggtttgcccagttagtcttgttattgatcaaccgctattatttgatactggctccgtcccaaaatattagtcgttttagtattttaccagattcatatcatactcagtgtatgtcttttacatatgtctagattcattgttatttatttaaatatagacataaaattggtgagctagcctagtcccattttaatgttttttaa

SEQ ID NO: 18181 - DNA, 1155 bp, Zea Mays
agcagtttctcaaacactggccgagcgcaaaatttgaaaaccaaccctcaacctcaatcggggtgccggcgtccgacgaagtcgacgggccatccccattccccacccggcagtcggcagtccccacaccccaagacctctgaagagtcggaagaagaagcgggcgatggaagacggcgacgagagcgcggccgcggcggcggcgctggggctgagcccgcagcttttcgtcaacgaggtccacggcatcatagccgacatcagcgccgaggccttcgagtactgtctccaggcagcagccgcgccaggtgtcgtcggcgccgccacggctgcagagaaggccacggatctccagcggggattaaatgctattcaccatgttgtaaaggatcgactggataagagaatgaccaactgggagaaattctgctatcgacattgcttcgatgtacctgaaggttttgtggccgctgatgatgatagttcttgtgcaaatgaatcacaaaaagatgggatttcggattcagatttggatttggaacttgactctttgaggagaaagtttggaagtagagttgtcctcactggaaaggcaagctacgttcaaaagaagacttgattcttctgtctctgagatagaaaagttgtttgaagaagaaatggtgcagggaaatttgaaagatcttgtgaaggcaataccggttttgcaccagaaaataatagatgcaaatcagagaaggactgagattaggagcttggtagatcaacaggcttggaacacgaagagatcgagagacagcaagccataagcgctggagaagagttctactgcatgtgttgaagacattcaagaggttgtcaacatcttacagagcaagtagcttgttgctcttttcctgattcatgttggttccacatagcgcctgcagcttgcttgcttggataaagcagtggtttgcccagttagtcttgttattgatcaaccgctattatttgatactggctccgtcccaaaatattagtcgttttagtattttaccagattcatatcatactcagtgtatgtcttttacatatgtctagattcattgttatttatttaaatatagacataaaattggtgagctagcctagtcccattttaatgttttttaa

SEQ ID NO: 18182 - DNA, 1218 bp, Zea Mays
agcagtttctcaaacactggccgagcgcaaaatttgaaaaccaaccctcaacctcaatcggggtgccggcgtccgacgaagtcgacgggccatccccattccccacccggcagtcggcagtccccacaccccaagacctctgaagagtcggaagaagaagcgggcgatggaagacggcgacgagagcgcggccgcggcggcggcgctggggctgagcccgcagcttttcgtcaacgaggtccacggcatcatagccgacatcagcgccgaggccttcgagtactgtctccaggcagcagccgcgccaggtgtcgtcggcgccgccacggctgcagagaaggccacggatctccagcggggattaaatgctattcaccatgttgtaaaggatcgactggataagagaatgaccaactgggagaaattctgctatcgacattgcttcgatgtacctgaaggttttgtggccgctgatgatttcttgtgcaaatgaatcacaaaaagatgggatttcggattcagatttggatttggaacttgactctttgaggagaaagtttggaagtgctaacaaggaatctgaaaaccttgaaagagagttgtcctcactggaaaggcaagctacgttcaaaagaagacttgattcttctgtctctgagatagaaaagttgtttgaagaagaaatggtgcagggaaatttgaaagatcttgtgaaggcaataccggttttgcaccagaaaataatagatgcaaatcagagaaggactgagattaggagcttggtagatcaacaggcttggaacacgaagagatcgagagacagcaagccataagcgctggagaagagtactgccagttcccactttccctcttcagttctcccgtgttctactgcatgtgttgaagacattcaagaggttgtcaacatcttacagagcaagtagcttgttgctcttttcctgattcatgttggttccacatagcgcctgcagcttgcttgcttggataaagcagtggtttgcccagttagtcttgttattgatcaaccgctattatttgatactggctccgtcccaaaatattagtcgttttagtattttaccagattcatatcatactcagtgtatgtcttttacatatgtctagattcattgttatttatttaaatatagacataaaattggtgagctagcctagtcccattttaatgttttttaa

SEQ ID NO: 18183 - DNA, 1245 bp, Zea Mays
aaacaagcatgctcatagacacagcagtttctcaaacactggccgagcgcaaaatttgaaaaccaaccctcaacctcaatcggggtgccggcgtccgacgaagtcgacgggccatccccattccccacccggcagtcggcagtccccacaccccaagacctctgaagagtcggaagaagaagcgggcgatggaagacggcgacgagagcgcggccgcggcggcggcgctggggctgagcccgcagcttttcgtcaacgaggtccacggcatcatagccgacatcagcgccgaggccttcgagtactgtctccaggcagcagccgcgccaggtgtcgtcggcgccgccacggctgcagagaaggccacggatctccagcggggattaaatgctattcaccatgttgtaaaggatcgactggataagagaatgaccaactgggagaaattctgctatcgacattgcttcgatgtacctgaaggttttgtggccgctgatgatgatagttcttgtgcaaatgaatcacaaaaagatgggatttcggattcagatttggatttggaacttgactctttgaggagaaagtttggaagtgctaacaaggaatctgaaaaccttgaaagagagttgtcctcactggaaaggcaagctacgttcaaaagaagacttgattcttctgtctctgagatagaaaagttgtttgaagaagaaatggtgcagggaaatttgaaagatcttgtgaaggcaataccggttttgcaccagaaaataatagatgcaaatcagagaaggactgagattaggagcttggtagatcaacaggcttggaacacgaagagatcgagagacagcaagccataagcgctggagaagagtactgccagttcccactttccctcttcagttctcccgtgttctactgcatgtgttgaagacattcaagaggttgtcaacatcttacagagcaagtagcttgttgctcttttcctgattcatgttggttccacatagcgcctgcagcttgcttgcttggataaagcagtggtttgcccagttagtcttgttattgatcaaccgctattatttgatactggctccgtcccaaaatattagtcgttttagtattttaccagattcatatcatactcagtgtatgtcttttacatatgtctagattcattgttatttatttaaatatagacataaaattggtgagctagcctagtcccattttaatgttttttaa

SEQ ID NO: 18184 - DNA, 1258 bp, Zea Mays
tattgcattaaaacaccaccttatactgtgataaactttagcggaaaattggaaacaagcatgctcatagacacagcagtttctcaaacactggccgagcgcaaaatttgaaaaccaaccctcaacctcaatcggggtgccggcgtccgacgaagtcgacgggccatccccattccccacccggcagtcggcagtccccacaccccaagacctctgaagagtcggaagaagaagcgggcgatggaagacggcgacgagagcgcggccgcggcggcggcgctggggctgagcccgcagcttttcgtcaacgaggtccacggcatcatagccgacatcagcgccgaggccttcgagtactgtctccaggcagcagccgcgccaggtgtcgtcggcgccgccacggctgcagagaaggccacggatctccagcggggattaaatgctattcaccatgttgtaaaggatcgactggataagagaatgaccaactgggagaaattctgctatcgacattgcttcgatgtacctgaaggttttgtggccgctgatgatgatagttcttgtgcaaatgaatcacaaaaagatgggatttcggattcagatttggatttggaacttgactctttgaggagaaagtttggaagtgctaacaaggaatctgaaaaccttgaaagagagttgtcctcactggaaaggcaagctacgttcaaaagaagacttgattcttctgtctctgagatagaaaagttgtttgaagaagaaatggtgcagggaaatttgaaagatcttgtgaaggcaataccggttttgcaccagaaaataatagatgcaaatcagagaaggactgagattaggagcttggtagatcaacaggcttggaacacgaagagatcgagagacagcaagccataagcgctggagaagagttctactgcatgtgttgaagacattcaagaggttgtcaacatcttacagagcaagtagcttgttgctcttttcctgattcatgttggttccacatagcgcctgcagcttgcttgcttggataaagcagtggtttgcccagttagtcttgttattgatcaaccgctattatttgatactggctccgtcccaaaatattagtcgttttagtattttaccagattcatatcatactcagtgtatgtcttttacatatgtctagattcattgttatttatttaaatatagacataaaattggtgagctagcctagtcccattttaatgttttttaa

SEQ ID NO: 18185 - DNA, 1277 bp, Zea Mays
gccgcgacctcatctcgccgaggactggatcgccggaggggtttgatgcaatacctggttccaagctcactagtgatgtgaactggggatgcatggttagaagtagtcagatgctggttgctcaggcactgatttttcaccatcttggaagatcttggagaaagccatcagagaagccatacgacccagattatatacgggtcttacacctatttggtgactctgaagcttgtgctttctctattcacaatttacttcaagctggaaggaattatggtctggctgctggatcatgggtgggtccatatgctatgtgccgggcatggcagacccttatccgcacaaatagagagcaagctgatgctgtcgatgggaaggaaaatttccctatggcgctatatgtcgtttcgggtgatgaagatggtgaaagaggtggagctccagttttttgtattgatgttgctgctcagctttgctccaatttcaataaaggacaatgtacatggtcacctattcttttgttgattcctctggttcttggccttgacaaaattaatccaaggtacatcccattactaaaggagacgtttaagttcccacaaagcttgggcattttaggtggaaaacctgggacgtcaacatacattgctggggtacaagaagatagggctctctacctagatccccatgacgttcagatggcggttgatattgcaccggataacttggaggcggacacttcctcgtaccactgcagtgttgtccgagatttggctctagaacaaatagacccatccctagccattggtttttactgtcgcgacaaagacgatttcgatgatttctgttctcgggcatctgagttggcagagaaagccaatggagcgccactctttactgtcatgcagtcagtccagccatcgaagcaaatgtataaacaggatgatgggctgtgctgttgttctggcagtagcatggccaacgaggactacgaccttgacgcctctggcgaggcaggagaagagtggcagatcctctaaaccaggggaacaccgatgacatgttgggttgaaaaactcatggaacatgttgcctgaatgccctcgtttgcgtgtgaatacaggggatgatttgttgtctctgagtgtcgttgggtgccaacgtctcttaggaggaaaatgttcaaaacgtgacaggtggaaatgttcaaaacatacacttgtgaatgatcatagataaatgtatttaacattccatttgctaacaccatttcacca

SEQ ID NO: 18186 - DNA, 1390 bp, Zea Mays
cgatccctcgccgcgacctcatctcgccgaggactggatcgccggaggggtgtcgcccgaggaagaggagtctggcggctcggattctgacagcggccatgctgcgtttctggaagatttctcttccaggatatggatcacttaccggaaagggtttgatgcaatacctggttccaagctcactagtgatgtgaactggggatgcatggttagaagtagtcagatgctggttgctcaggcactgatttttcaccatcttggaagatcttggagaaagccatcagagaagccatacgacccagattatatacgggtcttacacctatttggtgactctgaagcttgtgctttctctattcacaatttacttcaagctggaaggaattatggtctggctgctggatcatgggtgggtccatatgctatgtgccgggcatggcagacccttatccgcacaaatagagagcaagctgatgctgtcgatgggaaggaaaatttccctatggcgctatatgtcgtttcgggtgatgaagatggtgaaagaggtggagctccagttttttgtattgatgttgctgctcagctttgctccaatttcaataaaggacaatgtacatggtcacctattcttttgttgattcctctggttcttggccttgacaaaattaatccaaggtacatcccattactaaaggagacgtttaagttcccacaaagcttgggcattttaggtggaaaacctgggacgtcaacatacattgctggggtacaagaagatagggctctctacctagatccccatgacgttcagatggcggttgatattgcaccggataacttggaggcggacacttcctcgtaccactgcagtgttgtccgagatttggctctagaacaaatagacccatccctagccattggtttttactgtcgcgacaaagacgatttcgatgatttctgttctcgggcatctgagttggcagagaaagccaatggagcgccactctttactgtcatgcagtcagtccagccatcgaagcaaatgtataaacaggatgatgggctgtgctgttgttctggcagtagcatggccaacgaggactacgaccttgacgcctctggcgaggcaggagaagagtggcagatcctctaaaccaggggaacaccgatgacatgttgggttgaaaaactcatggaacatgttgcctgaatgccctcgtttgcgtgtgaatacaggggatgatttgttgtctctgagtgtcgttgggtgccaacgtctcttaggaggaaaatgttcaaaacgtgacaggtggaaatgttcaaaacatacacttgtgaatgatcatagataaatgtatttaacattccatttgctaacaccatttcacca

SEQ ID NO: 18187 - DNA, 880 bp, Zea Mays
gatgcacccgtacgtctccatccctccctccctccctcccccctcttcttttcttcggctcttccgccgcctccacgcggcctacgccacctccccctcacctcccgccgtgcgccccgatccctcgccgcgacctcatctcgccgaggactggatcgccggagggtacatcccattactaaaggagacgtttaagttcccacaaagcttgggcattttaggtggaaaacctgggacgtcaacatacattgctggggtacaagaagatagggctctctacctagatccccatgacgttcagatggcggttgatattgcaccggataacttggaggcggacacttcctcgtaccactgcagtgttgtccgagatttggctctagaacaaatagacccatccctagccattggtttttactgtcgcgacaaagacgatttcgatgatttctgttctcgggcatctgagttggcagagaaagccaatggagcgccactctttactgtcatgcagtcagtccagccatcgaagcaaatgtataaacaggatgatgggctgtgctgttgttctggcagtagcatggccaacgaggactacgaccttgacgcctctggcgaggcaggagaagagtggcagatcctctaaaccaggggaacaccgatgacatgttgggttgaaaaactcatggaacatgttgcctgaatgccctcgtttgcgtgtgaatacaggggatgatttgttgtctctgagtgtcgttgggtgccaacgtctcttaggaggaaaatgttcaaaacgtgacaggtggaaatgttcaaaacatacacttgtgaatgatcatagataaatgtatttaacattccatttgctaacaccatttcacca

SEQ ID NO: 18188 - DNA, 1834 bp, Zea Mays
gatgcacccgtacgtctccatccctccctccctccctcccccctcttcttttcttcggctcttccgccgcctccacgcggcctacgccacctccccctcacctcccgccgtgcgccccgatccctcgccgcgacctcatctcgccgaggactggatcgccggagggacatcgtgggtgggtgggtgtgtccttcgcacccatgcggcgttagctgatgacgacctcgcctgagaggggagaagcaccacctgcgccgccacgcgattcaccgtgcgaggacgccgccccagctgccgccgtcgttgcctcttcctcctctggctccgagcgcgaggaagacggcggctccaggcagcccaaggcatctgtcctgtccggcgtcttcgcgccccctctcgccatattcgaggggcagcagcaggtctcctcgacgccgtgcgacgccagctcgacaaagccgccctcggggtcctatgcttggtccaggattctgaggaggttcgtgggcagcggctccatgtggcgtcttctgggctgcgccagggtcctgacctccggtgacgtgtggttccttggtaaatgctacagggtgtcgcccgaggaagaggagtctggcggctcggattctgacagcggccatgctgcgtttctggaagatttctcttccaggatatggatcacttaccggaaagggtttgatgcaatacctggttccaagctcactagtgatgtgaactggggatgcatggttagaagtagtcagatgctggttgctcaggcactgatttttcaccatcttggaagatcttggagaaagccatcagagaagggttgcttataatgaccaaatgttcatatgcagccatacgacccagattatatacgggtcttacacctatttggtgactctgaagcttgtgctttctctattcacaatttacttcaagctggaaggaattatggtctggctgctggatcatgggtgggtccatatgctatgtgccgggcatggcagacccttatccgcacaaatagagagcaagctgatgctgtcgatgggaaggaaaatttccctatggcgctatatgtcgtttcgggtgatgaagatggtgaaagaggtacatcccattactaaaggagacgtttaagttcccacaaagcttgggcattttaggtggaaaacctgggacgtcaacatacattgctggggtacaagaagatagggctctctacctagatccccatgacgttcagatggcggttgatattgcaccggataacttggaggcggacacttcctcgtaccactgcagtgttgtccgagatttggctctagaacaaatagacccatccctagccattggtttttactgtcgcgacaaagacgatttcgatgatttctgttctcgggcatctgagttggcagagaaagccaatggagcgccactctttactgtcatgcagtcagtccagccatcgaagcaaatgtataaacaggatgatgggctgtgctgttgttctggcagtagcatggccaacgaggactacgaccttgacgcctctggcgaggcaggagaagagtggcagatcctctaaaccaggggaacaccgatgacatgttgggttgaaaaactcatggaacatgttgcctgaatgccctcgtttgcgtgtgaatacaggggatgatttgttgtctctgagtgtcgttgggtgccaacgtctcttaggaggaaaatgttcaaaacgtgacaggtggaaatgttcaaaacatacacttgtgaatgatcatagataaatgtatttaacattccatttgctaacaccatttcacca

SEQ ID NO: 18189 - DNA, 1874 bp, Zea Mays
gatgcacccgtacgtctccatccctccctccctccctcccccctcttcttttcttcggctcttccgccgcctccacgcggcctacgccacctccccctcacctcccgccgtgcgccccgatccctcgccgcgacctcatctcgccgaggactggatcgccggagggacatcgtgggtgggtgggtgtgtccttcgcacccatgcggcgttagctgatgacgacctcgcctgagaggggagaagcaccacctgcgccgccacgcgattcaccgtgcgaggacgccgccccagctgccgccgtcgttgcctcttcctcctctggctccgagcgcgaggaagacggcggctccaggcagcccaaggcatctgtcctgtccggcgtcttcgcgccccctctcgccatattcgaggggcagcagcaggtctcctcgacgccgtgcgacgccagctcgacaaagccgccctcggggtcctatgcttggtccaggattctgaggagggtgtcgcccgaggaagaggagtctggcggctcggattctgacagcggccatgctgcgtttctggaagatttctcttccaggatatggatcacttaccggaaagggtttgatgcaatacctggttccaagctcactagtgatgtgaactggggatgcatggttagaagtagtcagatgctggttgctcaggcactgatttttcaccatcttggaagatcttggagaaagccatcagagaagggttgcttataatgaccaaatgttcatatgcagccatacgacccagattatatacgggtcttacacctatttggtgactctgaagcttgtgctttctctattcacaatttacttcaagctggaaggaattatggtctggctgctggatcatgggtgggtccatatgctatgtgccgggcatggcagacccttatccgcacaaatagagagcaagctgatgctgtcgatgggaaggaaaatttccctatggcgctatatgtcgtttcgggtgatgaagatggtgaaagaggtggagctccagttttttgtattgatgttgctgctcagctttgctccaatttcaataaaggacaatgtacatggtcacctattcttttgttgattcctctggttcttggccttgacaaaattaatccaaggtacatcccattactaaaggagacgtttaagttcccacaaagcttgggcattttaggtggaaaacctgggacgtcaacatacattgctggggtacaagaagatagggctctctacctagatccccatgacgttcagatggcggttgatattgcaccggataacttggaggcggacacttcctcgtaccactgcagtgttgtccgagatttggctctagaacaaatagacccatccctagccattggtttttactgtcgcgacaaagacgatttcgatgatttctgttctcgggcatctgagttggcagagaaagccaatggagcgccactctttactgtcatgcagtcagtccagccatcgaagcaaatgtataaacaggatgatgggctgtgctgttgttctggcagtagcatggccaacgaggactacgaccttgacgcctctggcgaggcaggagaagagtggcagatcctctaaaccaggggaacaccgatgacatgttgggttgaaaaactcatggaacatgttgcctgaatgccctcgtttgcgtgtgaatacaggggatgatttgttgtctctgagtgtcgttgggtgccaacgtctcttaggaggaaaatgttcaaaacgtgacaggtggaaatgttcaaaacatacacttgtgaatgatcatagataaatgtatttaacattccatttgctaacaccatttcacca

SEQ ID NO: 18190 - DNA, 1711 bp, Zea Mays
gatgcacccgtacgtctccatccctccctccctccctcccccctcttcttttcttcggctcttccgccgcctccacgcggcctacgccacctccccctcacctcccgccgtgcgccccgatccctcgccgcgacctcatctcgccgaggactggatcgccggagggacatcgtgggtgggtgggtgtgtccttcgcacccatgcggcgttagctgatgacgacctcgcctgagaggggagaagcaccacctgcgccgccacgcgattcaccgtgcgaggacgccgccccagctgccgccgtcgttgcctcttcctcctctggctccgagcgcgaggaagacggcggctccaggcagcccaaggcatctgtcctgtccggcgtcttcgcgccccctctcgccatattcgaggggcagcagcaggtctcctcgacgccgtgcgacgccagctcgacaaagccgccctcggggtcctatgcttggtccaggattctgaggagggtgtcgcccgaggaagaggagtctggcggctcggattctgacagcggccatgctgcgtttctggaagatttctcttccaggatatggatcacttaccggaaagggtttgatgcaatacctggttccaagctcactagtgatgtgaactggggatgcatggttagaagtagtcagatgctggttgctcaggcactgatttttcaccatcttggaagatcttggagaaagccatcagagaagccatacgacccagattatatacgggtcttacacctatttggtgactctgaagcttgtgctttctctattcacaatttacttcaagctggaaggaattatggtctggctgctggatcatgggtgggtccatatgctatgtgccgggcatggcagacccttatccgcacaaatagagagcaagctgatgctgtcgatgggaaggaaaatttccctatggcgctatatgtcgtttcgggtgatgaagatggtgaaagaggtacatcccattactaaaggagacgtttaagttcccacaaagcttgggcattttaggtggaaaacctgggacgtcaacatacattgctggggtacaagaagatagggctctctacctagatccccatgacgttcagatggcggttgatattgcaccggataacttggaggcggacacttcctcgtaccactgcagtgttgtccgagatttggctctagaacaaatagacccatccctagccattggtttttactgtcgcgacaaagacgatttcgatgatttctgttctcgggcatctgagttggcagagaaagccaatggagcgccactctttactgtcatgcagtcagtccagccatcgaagcaaatgtataaacaggatgatgggctgtgctgttgttctggcagtagcatggccaacgaggactacgaccttgacgcctctggcgaggcaggagaagagtggcagatcctctaaaccaggggaacaccgatgacatgttgggttgaaaaactcatggaacatgttgcctgaatgccctcgtttgcgtgtgaatacaggggatgatttgttgtctctgagtgtcgttgggtgccaacgtctcttaggaggaaaatgttcaaaacgtgacaggtggaaatgttcaaaacatacacttgtgaatgatcatagataaatgtatttaacattccatttgctaacaccatttcacca

SEQ ID NO: 18191 - DNA, 1436 bp, Zea Mays
gatgcacccgtacgtctccatccctccctccctccctcccccctcttcttttcttcggctcttccgccgcctccacgcggcctacgccacctccccctcacctcccgccgtgcgccccgatccctcgccgcgacctcatctcgccgaggactggatcgccggaggggtttgatgcaatacctggttccaagctcactagtgatgtgaactggggatgcatggttagaagtagtcagatgctggttgctcaggcactgatttttcaccatcttggaagatcttggagaaagccatcagagaagggttgcttataatgaccaaatgttcatatgcagccatacgacccagattatatacgggtcttacacctatttggtgactctgaagcttgtgctttctctattcacaatttacttcaagctggaaggaattatggtctggctgctggatcatgggtgggtccatatgctatgtgccgggcatggcagacccttatccgcacaaatagagagcaagctgatgctgtcgatgggaaggaaaatttccctatggcgctatatgtcgtttcgggtgatgaagatggtgaaagaggtggagctccagttttttgtattgatgttgctgctcagctttgctccaatttcaataaaggacaatgtacatggtcacctattcttttgttgattcctctggttcttggccttgacaaaattaatccaaggtacatcccattactaaaggagacgtttaagttcccacaaagcttgggcattttaggtggaaaacctgggacgtcaacatacattgctggggtacaagaagatagggctctctacctagatccccatgacgttcagatggcggttgatattgcaccggataacttggaggcggacacttcctcgtaccactgcagtgttgtccgagatttggctctagaacaaatagacccatccctagccattggtttttactgtcgcgacaaagacgatttcgatgatttctgttctcgggcatctgagttggcagagaaagccaatggagcgccactctttactgtcatgcagtcagtccagccatcgaagcaaatgtataaacaggatgatgggctgtgctgttgttctggcagtagcatggccaacgaggactacgaccttgacgcctctggcgaggcaggagaagagtggcagatcctctaaaccaggggaacaccgatgacatgttgggttgaaaaactcatggaacatgttgcctgaatgccctcgtttgcgtgtgaatacaggggatgatttgttgtctctgagtgtcgttgggtgccaacgtctcttaggaggaaaatgttcaaaacgtgacaggtggaaatgttcaaaacatacacttgtgaatgatcatagataaatgtatttaacattccatttgctaacaccatttcacca

SEQ ID NO: 18192 - DNA, 1841 bp, Zea Mays
gatgcacccgtacgtctccatccctccctccctccctcccccctcttcttttcttcggctcttccgccgcctccacgcggcctacgccacctccccctcacctcccgccgtgcgccccgatccctcgccgcgacctcatctcgccgaggactggatcgccggagggacatcgtgggtgggtgggtgtgtccttcgcacccatgcggcgttagctgatgacgacctcgcctgagaggggagaagcaccacctgcgccgccacgcgattcaccgtgcgaggacgccgccccagctgccgccgtcgttgcctcttcctcctctggctccgagcgcgaggaagacggcggctccaggcagcccaaggcatctgtcctgtccggcgtcttcgcgccccctctcgccatattcgaggggcagcagcaggtctcctcgacgccgtgcgacgccagctcgacaaagccgccctcggggtcctatgcttggtccaggattctgaggagggtgtcgcccgaggaagaggagtctggcggctcggattctgacagcggccatgctgcgtttctggaagatttctcttccaggatatggatcacttaccggaaagggtttgatgcaatacctggttccaagctcactagtgatgtgaactggggatgcatggttagaagtagtcagatgctggttgctcaggcactgatttttcaccatcttggaagatcttggagaaagccatcagagaagccatacgacccagattatatacgggtcttacacctatttggtgactctgaagcttgtgctttctctattcacaatttacttcaagctggaaggaattatggtctggctgctggatcatgggtgggtccatatgctatgtgccgggcatggcagacccttatccgcacaaatagagagcaagctgatgctgtcgatgggaaggaaaatttccctatggcgctatatgtcgtttcgggtgatgaagatggtgaaagaggtggagctccagttttttgtattgatgttgctgctcagctttgctccaatttcaataaaggacaatgtacatggtcacctattcttttgttgattcctctggttcttggccttgacaaaattaatccaaggtacatcccattactaaaggagacgtttaagttcccacaaagcttgggcattttaggtggaaaacctgggacgtcaacatacattgctggggtacaagaagatagggctctctacctagatccccatgacgttcagatggcggttgatattgcaccggataacttggaggcggacacttcctcgtaccactgcagtgttgtccgagatttggctctagaacaaatagacccatccctagccattggtttttactgtcgcgacaaagacgatttcgatgatttctgttctcgggcatctgagttggcagagaaagccaatggagcgccactctttactgtcatgcagtcagtccagccatcgaagcaaatgtataaacaggatgatgggctgtgctgttgttctggcagtagcatggccaacgaggactacgaccttgacgcctctggcgaggcaggagaagagtggcagatcctctaaaccaggggaacaccgatgacatgttgggttgaaaaactcatggaacatgttgcctgaatgccctcgtttgcgtgtgaatacaggggatgatttgttgtctctgagtgtcgttgggtgccaacgtctcttaggaggaaaatgttcaaaacgtgacaggtggaaatgttcaaaacatacacttgtgaatgatcatagataaatgtatttaacattccatttgctaacaccatttcacca

SEQ ID NO: 18193 - DNA, 1042 bp, Zea Mays
taggtggacaggtggagcaggaatccttttagttgctgaaaagacagtccaaaaatcactatcactatcatagcacaaaacaagtgcaagaatgtaacatcagtaccacattcctaagactggtcagaataactaaaaatttgagtactgaaataaattaatgtgttaggataattaataaatgtccaactgaactcagaccaaccactgctgatatctgttggacattgtgtgattgtgtccatgaaaaagatggcaattgtatatatatgatcttctgagagaccttgtgaaaagcagtaaaccaatatgtttttttctcgcacgcgcaggagagctgcacatcattataataagagagagaaaggtccaaagtggaccacaatacaatgcccgaacaaggcaaaataacacactagaccagaacctcaatacagacagggaactctatcctcatctcatgctgcaataggacgacctcagctgtcacagcactaggcgctagaaatagccctgaccctattaaaggcagccgggagaccaaggctctcaagttgctttgcaccagccctactccaacactccacttcatccataaacagtctttgaattatatgggggaaaccaatatgttgcatgactagttcacaataaaccaatcaaaattgtatttcaagaagaacagcttgaatattgctggagagaaaatgaaattacaagataatgaacaaaagtaaatacctagcagaatacaatctggcaactaataaaatagaagcacagtgtaggaccaagtgctcaaactagacaacagtcattcaatatcatcatgctatggaaataaagttaaatattcaagttcagttaagttccagatgatatttcaacttacagaaggtggaagtgccatacagattactaaaactttaaagtgtgactcgaattgaataagataagtagcaagtaaacatggaggtaaccttgtgcttccaattgaactgaatgatgttctgaaccagaaccagtactatgatatagtgat

SEQ ID NO: 18194 - DNA, 4035 bp, Zea Mays
gctagtggcaggtggcagcgagtgagaaggtgagctcgcctccctcgcgcctcccattcccccctcgcgcagtcctatcgtaggaatgggatgaggccggggcccctccctccttcctcctcggcgcttctcccgtgacaagcctccattctccagataggggaggatggatttgtccaggttcgcctccggcgtcgggcccagccgcgtggccccgcgggcgggcctgcagatcggcgccgccgagaatggcttccgggcctgctccctgcggcgagcacggcaccgcggcggcgggaacgggaacctcacggccgccgcgtccaccctccgcggccgcggcgggctcttctacctggctcccacgcgccggagtcatcccagtctccggctcttctacctgcttcccacgcgcgggagtcatctcagtctccgcgccagatggcggccgcgctgccagggcaacgactcattggcctacgtcgacggccccttggagaccgctaagggctccggcgaggtcgacgacaacgtgcccaccagctcggggtccgacgacgacaggggcctcgccgacgtcgacggcctcagggagatgctgcagaggtccaggaacgagctggaggtggccagggtcaacagcaccatgttcgaggagaaggcgcagcggatatccgagtcggccatcgcgttcaaggaccgcgccgacggcgcccagagggatgtgtgcgcggccgtagccaccgtgcaggagatcatcagcaaggaggcggacgccaaggaggccgtccagaaggctaccatggcgctgtccatggccgaggcgaggctgcagctggccgcggaggcgctggaggccaaccggggctcggtaggcccgacggaggttagcatcgaaggcatggagcaggaggccctcctgtctgcacaggaagagattaaggattgtcgggcagccctgtcgcggtgcgcggaggagctgagtcgtgtccaggacaagaaaatggagctgcagaaggaggttgataggctgacggatctcgctgggaaggcccagatggatgcgtccaacgccgaagaagatgttgccaatataatggtgctggctgagcaggcggtggctcttgagatggaagcctcacagcgtgtcaacgatgcggaaatggtgctgctgaaagcggagaaggccatagcctcgattgataccgtggtggagctaccgtcacctgctgaagagcagagaagcactgaagaagacagcgtttctgaagggtacgagtatagcagcgatgtcactgatgatgtttatgtaagggatgaggtgtcaagtatcgagcgcctaatggtcggtgacttgactgttcagggctttgagcagcttgaaccatcccgtgaaatatatgatgaagaaagcagtaataagatgtctgttgagcctcagaaagaagctgagtctgattcagataagtcgaaacaagggaagaagcaagaaatggaacgaaaggagcacaccaaggaaccactgagtgctccaaaagcactggtgaagagatcatcccgtttcttctcggcatctttcttctcctccaaagttgatggagagtttacacctacatctgtcttccgagggttaatgaaatcagtgcaaaaacaagctccgaagcttgttgttgggatattgcttctcggtgcaggggcattcttcttaaatagggctgagaagagtcaactatttcagcagcaaggcattgccacaagtattggaaaggtaacctccacaacaaagcccatagttcttgagatacggcgaattccacagagagtaaagaagctaatagagctcttacctcatcaagaggtaaatgaggaagaagcttcacttttcgacatactatacttgcttctggccagtgttatttttgtaccattatttcagaaaatccctggagtcctgttcttggatatcttgctgctggtgtcctcattggtccatatgggctgtccatcatccgtaatgtgcatgagacaaaggcaattgcggaatttggagttgtgttcttactatttaacattggacttgagctttctgtggaaagactaagctcgatgaagaagtgctggctactactgctgctgttggtgtgatagctcattgttttgccgcactaccaggaccagcagcaattgttgttgggagtggcttggctctgtcatccacagctgttgtcttgcaagtattgcaagagcgtggtgaaagtacgtcacgtcatggacgtgctacattttctgtgttattgttccaggatttggctgtggtggttctgttgatattaatacctctcatatcacctaattcttcaaaaggaggggttggtttccaagcaatagcagaagccatgggaatggctgcagtcaaagcagtagctgctataactgccataattgctggaggtcgtctgttgctccggcctatttacaaacaaattgctgaaaatcagaatgctgagatattttcagcaaatacactccttgttatttttggcacaagtcttcttacagcccgggctgggttatcgatggcacttggagcttttttagctggtctgttactagcagaaacagagttctcattgcaggttgagtcagatatagctccctatcgtggtcttctgttaggacttttctttatgacggttggaatgtctattgacccaaagctgcttctgtcaaacttcccagcgatctctgtgatattgagtctcttgataattggaaagacattgttagttacatttgtcggcagggtgtttggggtttctgctatagctgccattcgtgttggcctcttgcttgcacctggtggtgagtttgcttttgttgcctttggagaagctgtcaaccagggtcttctatcacctcaattaacatcgttgctatttttagtcgttggcatttcaatggctctgacaccatggttagctgctggagggcagtttctggcatcaaaatttgagcagcatgatgtgaggagtttattgcccgtggaaagtgagactgacgatttgcaagaccatatcattatattaggctttggacgtgttgggcagatcattgcacaactcctgtcagagcggttaattccttttgttgcacttgatgctggaagtgatcgggttgcagctgggcgtgcacttgatcttccagtgtattttggtgattctggaaagcagagaggtactgcacaaaaattggagctgaaagagcttgtgctgctgcaattactttggatactcctggtgcaaactacagagctgtctgggcgttgaacaaatatttcccaaatgtgaagacatttgttagagcacatgatgttgatcatggtgttaatttggagaaagctggtgcaacggcggttgtccctgagaccttggagccaagtcttcagctagctgctgctgtccttgcacaagcaaaactcccaatgtcagagattcaggaaaccatcaacgagttccggaatcgtcatctgtcagagcttacagagttgtgtgctacgtcaggaagttctcttggctatggattttccagagctacgtccaaatcgaagtctttcacctccgacgacgaaaaccaaacagtggatggcacactagcaatctgatgctgatgagataaaatgggatccccttgctagcgctagattggttgcattgttcagtagataatcctgtttcatgtggaaggagggtggaataattattcatataagagctgtcataaaagttggcgtccatttttgtatgttagacacttagtgcttgtttgagagtaatggaagggactgagagggccaaaatcctttatgccccgtttgtttccttttattttgaggacttggaatctaactattggaataggctatttttttaaaatgtgacattccaccacttccaaagttatcatatgagcctatctctaattattcataggatgagatatgtaatttgattctatagatttacatgctatttttcc

SEQ ID NO: 18195 - DNA, 3893 bp, Zea Mays
gctagtggcaggtggcagcgagtgagaaggtgagctcgcctccctcgcgcctcccattcccccctcgcgcagtcctatcgtaggaatgggatgaggccggggcccctccctccttcctcctcggcgcttctcccgtgacaagcctccattctccagataggggaggatggatttgtccaggttcgcctccggcgtcgggcccagccgcgtggccccgcgggcgggcctgcagatcggcgccgccgagaatggcttccgggcctgctccctgcggcgagcacggcaccgcggcggcgggaacgggaacctcacggccgccgcgtccaccctccgcggccgcggcgggctcttctacctggctcccacgcgccggagtcatcccagtctccggctcttctacctgcttcccacgcgcgggagtcatctcagtctccgcgccagatggcggccgcgctgccagggcaacgactcattggcctacgtcgacggccccttggagaccgctaagggctccggcgaggtcgacgacaacgtgcccaccagctcggggtccgacgacgacaggggcctcgccgacgtcgacggcctcagggagatgctgcagaggtccaggaacgagctggaggtggccagggtcaacagcaccatgttcgaggagaaggcgcagcggatatccgagtcggccatcgcgttcaaggaccgcgccgacggcgcccagagggatgtgtgcgcggccgtagccaccgtgcaggagatcatcagcaaggaggcggacgccaaggaggccgtccagaaggctaccatggcgctgtccatggccgaggcgaggctgcagctggccgcggaggcgctggaggccaaccggggctcggtaggcccgacggaggttagcatcgaaggcatggagcaggaggccctcctgtctgcacaggaagagattaaggattgtcgggcagccctgtcgcggtgcgcggaggagctgagtcgtgtccaggacaagaaaatggagctgcagaaggaggttgataggctgacggatctcgctgggaaggcccagatggatgcgtccaacgccgaagaagatgttgccaatataatggtgctggctgagcaggcggtggctcttgagatggaagcctcacagcgtgtcaacgatgcggaaatggtgctgctgaaagcggagaaggccatagcctcgattgataccgtggtggagctaccgtcacctgctgaagagcagagaagcactgaagaagacagcgtttctgaagggtacgagtatagcagcgatgtcactgatgatgtttatgtaagggatgaggtgtcaagtatcgagcgcctaatggtcggtgacttgactgttcagggctttgagcagcttgaaccatcccgtgaaatatatgatgaagaaagcagtaataagatgtctgttgagcctcagaaagaagctgagtctgattcagataagtcgaaacaagggaagaagcaagaaatggaacgaaaggagcacaccaaggaaccactgagtgctccaaaagcactggtgaagagatcatcccgtttcttctcggcatctttcttctcctccaaagttgatggagagtttacacctacatctgtcttccgagggttaatgaaatcagtgcaaaaacaagctccgaagcttgttgttgggatattgcttctcggtgcaggggcattcttcttaaatagggctgagaagagtcaactatttcagcagcaaggcattgccacaagtattggaaaggtaacctccacaacaaagcccatagttcttgagatacggcgaattccacagagagtaaagaagctaatagagctcttacctcatcaagaggtaaatgaggaagaagcttcacttttcgacatactatacttgcttctggccagtgttatttttgtaccattatttcagaaaatccctggagcaaatactggcttaatatcctgcacctgcagctttctgtggaaagactaagctcgatgaagaagtgctggctactactgctgctgttggtgtgatagctcattgttttgccgcactaccaggaccagcagcaattgttgttgggagtggcttggctctgtcatccacagctgttgtcttgcaagtattgcaagagcgtggtgaaagtacgtcacgtcatggacgtgctacattttctgtgttattgttccaggatttggctgtggtggttctgttgatattaatacctctcatatcacctaattcttcaaaaggaggggttggtttccaagcaatagcagaagccatgggaatggctgcagtcaaagcagtagctgctataactgccataattgctggaggtcgtctgttgctccggcctatttacaaacaaattgctgaaaatcagaatgctgagatattttcagcaaatacactccttgttatttttggcacaagtcttcttacagcccgggctgggttatcgatggcacttggagcttttttagctggtctgttactagcagaaacagagttctcattgcaggttgagtcagatatagctccctatcgtggtcttctgttaggacttttctttatgacggttggaatgtctattgacccaaagctgcttctgtcaaacttcccagcgatctctgtgatattgagtctcttgataattggaaagacattgttagttacatttgtcggcagggtgtttggggtttctgctatagctgccattcgtgttggcctcttgcttgcacctggtggtgagtttgcttttgttgcctttggagaagctgtcaaccagtcgttggcatttcaatggctctgacaccatggttagctgctggagggcagtttctggcatcaaaatttgagcagcatgatgtgaggagtttattgcccgtggaaagtgagactgacgatttgcaagaccatatcattatattaggctttggacgtgttgggcagatcattgcacaactcctgtcagagcggttaattccttttgttgcacttgatgctggaagtgatcgggttgcagctgggcgtgcacttgatcttccagtgtattttggtgattctggaaagcagagaggtactgcacaaaaattggagctgaaagagcttgtgctgctgcaattactttggatactcctggtgcaaactacagagctgtctgggcgttgaacaaatatttcccaaatgtgaagacatttgttagagcacatgatgttgatcatggtgttaatttggagaaagctggtgcaacggcggttgtccctgagaccttggagccaagtcttcagctagctgctgctgtccttgcacaagcaaaactcccaatgtcagagattcaggaaaccatcaacgagttccggaatcgtcatctgtcagagcttacagagttgtgtgctacgtcaggaagttctcttggctatggattttccagagctacgtccaaatcgaagtctttcacctccgacgacgaaaaccaaacagtggatggcacactagcaatctgatgctgatgagataaaatgggatccccttgctagcgctagattggttgcattgttcagtagataatcctgtttcatgtggaaggagggtggaataattattcatataagagctgtcataaaagttggcgtccatttttgtatgttagacacttagtgcttgtttgagagtaatggaagggactgagagggccaaaatcctttatgccccgtttgtttccttttattttgaggacttggaatctaactattggaataggctatttttttaaaatgtgacattccaccacttccaaagttatcatatgagcctatctctaattattcataggatgagatatgtaatttgattctatagatttacatgctatttttcc

SEQ ID NO: 18196 - DNA, 4156 bp, Zea Mays
acgagcgctagtggcaggtggcagcgagtgagaaggtgagctcgcctccctcgcgcctcccattcccccctcgcgcagtcctatcgtaggaatgggatgaggccggggcccctccctccttcctcctcggcgcttctcccgtgacaagcctccattctccagtccgtgagcactccactccctgtctccgcttttgtttctctcgtcccaacctccccttttctgcgggtttgatccgcacggtacaggataggggaggatggatttgtccaggttcgcctccggcgtcgggcccagccgcgtggccccgcgggcgggcctgcagatcggcgccgccgagaatggcttccgggcctgctccctgcggcgagcacggcaccgcggcggcgggaacgggaacctcacggccgccgcgtccaccctccgcggccgcggcgggctcttctacctggctcccacgcgccggagtcatcccagtctccggctcttctacctgcttcccacgcgcgggagtcatctcagtctccgcgccagatggcggccgcgctgccagggcaacgactcattggcctacgtcgacggccccttggagaccgctaagggctccggcgaggtcgacgacaacgtgcccaccagctcggggtccgacgacgacaggggcctcgccgacgtcgacggcctcagggagatgctgcagaggtccaggaacgagctggaggtggccagggtcaacagcaccatgttcgaggagaaggcgcagcggatatccgagtcggccatcgcgttcaaggaccgcgccgacggcgcccagagggatgtgtgcgcggccgtagccaccgtgcaggagatcatcagcaaggaggcggacgccaaggaggccgtccagaaggctaccatggcgctgtccatggccgaggcgaggctgcagctggccgcggaggcgctggaggccaaccggggctcggtaggcccgacggaggttagcatcgaaggcatggagcaggaggccctcctgtctgcacaggaagagattaaggattgtcgggcagccctgtcgcggtgcgcggaggagctgagtcgtgtccaggacaagaaaatggagctgcagaaggaggttgataggctgacggatctcgctgggaaggcccagatggatgcgtccaacgccgaagaagatgttgccaatataatggtgctggctgagcaggcggtggctcttgagatggaagcctcacagcgtgtcaacgatgcggaaatggtgctgctgaaagcggagaaggccatagcctcgattgataccgtggtggagctaccgtcacctgctgaagagcagagaagcactgaagaagacagcgtttctgaagggtacgagtatagcagcgatgtcactgatgatgtttatgtaagggatgaggtgtcaagtatcgagcgcctaatggtcggtgacttgactgttcagggctttgagcagcttgaaccatcccgtgaaatatatgatgaagaaagcagtaataagatgtctgttgagcctcagaaagaagctgagtctgattcagataagtcgaaacaagggaagaagcaagaaatggaacgaaaggagcacaccaaggaaccactgagtgctccaaaagcactggtgaagagatcatcccgtttcttctcggcatctttcttctcctccaaagttgatggagagtttacacctacatctgtcttccgagggttaatgaaatcagtgcaaaaacaagctccgaagcttgttgttgggatattgcttctcggtgcaggggcattcttcttaaatagggctgagaagagtcaactatttcagcagcaaggcattgccacaagtattggaaaggtaacctccacaacaaagcccatagttcttgagatacggcgaattccacagagagtaaagaagctaatagagctcttacctcatcaagaggtaaatgaggaagaagcttcacttttcgacatactatacttgcttctggccagtgttatttttgtaccattatttcagaaaatccctggagtcctgttcttggatatcttgctgctggtgtcctcattggtccatatgggctgtccatcatccgtaatgtgcatgagacaaaggcaattgcggaatttggagttgtgttcttactatttaacattggacttgagctttctgtggaaagactaagctcgatgaagaagtatgtctttggcttgggatctgctcaggtgctggctactactgctgctgttggtgtgatagctcattgttttgccgcactaccaggaccagcagcaattgttgttgggagtggcttggctctgtcatccacagctgttgtcttgcaagtattgcaagagcgtggtgaaagtacgtcacgtcatggacgtgctacattttctgtgttattgttccaggatttggctgtggtggttctgttgatattaatacctctcatatcacctaattcttcaaaaggaggggttggtttccaagcaatagcagaagccatgggaatggctgcagtcaaagcagtagctgctataactgccataattgctggaggtcgtctgttgctccggcctatttacaaacaaattgctgaaaatcagaatgctgagatattttcagcaaatacactccttgttatttttggcacaagtcttcttacagcccgggctgggttatcgatggcacttggagcttttttagctggtctgttactagcagaaacagagttctcattgcaggttgagtcagatatagctccctatcgtggtcttctgttaggacttttctttatgacggttggaatgtctattgacccaaagctgcttctgtcaaacttcccagcgatctctgtgatattgagtctcttgataattggaaagacattgttagttacatttgtcggcagggtgtttggggtttctgctatagctgccattcgtgttggcctcttgcttgcacctggtggtgagtttgcttttgttgcctttggagaagctgtcaaccagggtcttctatcacctcaattaacatcgttgctatttttagtcgttggcatttcaatggctctgacaccatggttagctgctggagggcagtttctggcatcaaaatttgagcagcatgatgtgaggagtttattgcccgtggaaagtgagactgacgatttgcaagaccatatcattatattaggctttggacgtgttgggcagatcattgcacaactcctgtcagagcggttaattccttttgttgcacttgatgctggaagtgatcgggttgcagctgggcgtgcacttgatcttccagtgtattttggtgattctggaaagcagagaggtactgcacaaaaattggagctgaaagagcttgtgctgctgcaattactttggatactcctggtgcaaactacagagctgtctgggcgttgaacaaatatttcccaaatgtgaagacatttgttagagcacatgatgttgatcatggtgttaatttggagaaagctggtgcaacggcggttgtccctgagaccttggagccaagtcttcagctagctgctgctgtccttgcacaagcaaaactcccaatgtcagagattcaggaaaccatcaacgagttccggaatcgtcatctgtcagagcttacagagttgtgtgctacgtcaggaagttctcttggctatggattttccagagctacgtccaaatcgaagtctttcacctccgacgacgaaaaccaaacagtggatggcacactagcaatctgatgctgatgagataaaatgggatccccttgctagcgctagattggttgcattgttcagtagataatcctgtttcatgtggaaggagggtggaataattattcatataagagctgtcataaaagttggcgtccatttttgtatgttagacacttagtgcttgtttgagagtaatggaagggactgagagggccaaaatcctttatgccccgtttgtttccttttattttgaggacttggaatctaactattggaataggctatttttttaaaatgtgacattccaccacttccaaagttatcatatgagcctatctctaattattcataggatgagatatgtaatttgattctatagatttacatgctatttttcc

SEQ ID NO: 18197 - DNA, 3967 bp, Zea Mays
acgagcgctagtggcaggtggcagcgagtgagaaggtgagctcgcctccctcgcgcctcccattcccccctcgcgcagtcctatcgtaggaatgggatgaggccggggcccctccctccttcctcctcggcgcttctcccgtgacaagcctccattctccagtccgtgagcactccactccctgtctccgcttttgtttctctcgtcccaacctccccttttctgcgggtttgatccgcacggtacaggataggggaggatggatttgtccaggttcgcctccggcgtcgggcccagccgcgtggccccgcgggcgggcctgcagatcggcgccgccgagaatggcttccgggcctgctccctgcggcgagcacggcaccgcggcggcgggaacgggaacctcacggccgccgcgtccaccctccgcggccgcggcgggctcttctacctggctcccacgcgccggagtcatcccagtctccggctcttctacctgcttcccacgcgcgggagtcatctcagtctccgcgccagatggcggccgcgctgccagggcaacgactcattggcctacgtcgacggccccttggagaccgctaagggctccggcgaggtcgacgacaacgtgcccaccagctcggggtccgacgacgacaggggcctcgccgacgtcgacggcctcagggagatgctgcagaggtccaggaacgagctggaggtggccagggtcaacagcaccatgttcgaggagaaggcgcagcggatatccgagtcggccatcgcgttcaaggaccgcgccgacggcgcccagagggatgtgtgcgcggccgtagccaccgtgcaggagatcatcagcaaggaggcggacgccaaggaggccgtccagaaggctaccatggcgctgtccatggccgaggcgaggctgcagctggccgcggaggcgctggaggccaaccggggctcggtaggcccgacggaggttagcatcgaaggcatggagcaggaggccctcctgtctgcacaggaagagattaaggattgtcgggcagccctgtcgcggtgcgcggaggagctgagtcgtgtccaggacaagaaaatggagctgcagaaggaggttgataggctgacggatctcgctgggaaggcccagatggatgcgtccaacgccgaagaagatgttgccaatataatggtgctggctgagcaggcggtggctcttgagatggaagcctcacagcgtgtcaacgatgcggaaatggtgctgctgaaagcggagaaggccatagcctcgattgataccgtggtggagctaccgtcacctgctgaagagcagagaagcactgaagaagacagcgtttctgaagggtacgagtatagcagcgatgtcactgatgatgtttatgtaagggatgaggtgtcaagtatcgagcgcctaatggtcggtgacttgactgttcagggctttgagcagcttgaaccatcccgtgaaatatatgatgaagaaagcagtaataagatgtctgttgagcctcagaaagaagctgagtctgattcagataagtcgaaacaagggaagaagcaagaaatggaacgaaaggagcacaccaaggaaccactgagtgctccaaaagcactggtgaagagatcatcccgtttcttctcggcatctttcttctcctccaaagttgatggagagtttacacctacatctgtcttccgagggttaatgaaatcagtgcaaaaacaagctccgaagcttgttgttgggatattgcttctcggtgcaggggcattcttcttaaatagggctgagaagagtcaactatttcagcagcaaggcattgccacaagtattggaaaggtaacctccacaacaaagcccatagttcttgagatacggcgaattccacagagagtaaagaagctaatagagctcttacctcatcaagaggtaaatgaggaagaagcttcacttttcgacatactatacttgcttctggccagtgttatttttgtaccattatttcagaaaatccctggagcaaatactggcttaatatcctgcacctgcagctttctgtggaaagactaagctcgatgaagaagtgctggctactactgctgctgttggtgtgatagctcattgttttgccgcactaccaggaccagcagcaattgttgttgggagtggcttggctctgtcatccacagctgttgtcttgcaagtattgcaagagcgtggtgaaagtacgtcacgtcatggacgtgctacattttctgtgttattgttccaggatttggctgtggtggttctgttgatattaatacctctcatatcacctaattcttcaaaaggaggggttggtttccaagcaatagcagaagccatgggaatggctgcagtcaaagcagtagctgctataactgccataattgctggaggtcgtctgttgctccggcctatttacaaacaaattgctgaaaatcagaatgctgagatattttcagcaaatacactccttgttatttttggcacaagtcttcttacagcccgggctgggttatcgatggcacttggagcttttttagctggtctgttactagcagaaacagagttctcattgcaggttgagtcagatatagctccctatcgtggtcttctgttaggacttttctttatgacggttggaatgtctattgacccaaagctgcttctgtcaaacttcccagcgatctctgtgatattgagtctcttgataattggaaagacattgttagttacatttgtcggcagggtgtttggggtttctgctatagctgccattcgtgttggcctcttgcttgcacctggtggtgagtttgcttttgttgcctttggagaagctgtcaaccagggtcttctatcacctcaattaacatcgttgctatttttagtcgttggcatttcaatggctctgacaccatggttagctgctggagggcagtttctggcatcaaaatttgagcagcatgatgtgaggagtttattgcccgtggaaagtgagactgacgatttgcaagaccatatcattatattaggctttggacgtgttgggcagtgatcgggttgcagctgggcgtgcacttgatcttccagtgtattttggtgattctggaaagcagagaggtactgcacaaaaattggagctgaaagagcttgtgctgctgcaattactttggatactcctggtgcaaactacagagctgtctgggcgttgaacaaatatttcccaaatgtgaagacatttgttagagcacatgatgttgatcatggtgttaatttggagaaagctggtgcaacggcggttgtccctgagaccttggagccaagtcttcagctagctgctgctgtccttgcacaagcaaaactcccaatgtcagagattcaggaaaccatcaacgagttccggaatcgtcatctgtcagagcttacagagttgtgtgctacgtcaggaagttctcttggctatggattttccagagctacgtccaaatcgaagtctttcacctccgacgacgaaaaccaaacagtggatggcacactagcaatctgatgctgatgagataaaatgggatccccttgctagcgctagattggttgcattgttcagtagataatcctgtttcatgtggaaggagggtggaataattattcatataagagctgtcataaaagttggcgtccatttttgtatgttagacacttagtgcttgtttgagagtaatggaagggactgagagggccaaaatcctttatgccccgtttgtttccttttattttgaggacttggaatctaactattggaataggctatttttttaaaatgtgacattccaccacttccaaagttatcatatgagcctatctctaattattcataggatgagatatgtaatttgattctatagatttacatgctatttttcc

SEQ ID NO: 18198 - DNA, 3972 bp, Zea Mays
gaaacacgagcgctagtggcaggtggcagcgagtgagaaggtgagctcgcctccctcgcgcctcccattcccccctcgcgcagtcctatcgtaggaatgggatgaggccggggcccctccctccttcctcctcggcgcttctcccgtgacaagcctccattctccagataggggaggatggatttgtccaggttcgcctccggcgtcgggcccagccgcgtggccccgcgggcgggcctgcagatcggcgccgccgagaatggcttccgggcctgctccctgcggcgagcacggcaccgcggcggcgggaacgggaacctcacggccgccgcgtccaccctccgcggccgcggcgggctcttctacctggctcccacgcgccggagtcatcccagtctccggctcttctacctgcttcccacgcgcgggagtcatctcagtctccgcgccagatggcggccgcgctgccagggcaacgactcattggcctacgtcgacggccccttggagaccgctaagggctccggcgaggtcgacgacaacgtgcccaccagctcggggtccgacgacgacaggggcctcgccgacgtcgacggcctcagggagatgctgcagaggtccaggaacgagctggaggtggccagggtcaacagcaccatgttcgaggagaaggcgcagcggatatccgagtcggccatcgcgttcaaggaccgcgccgacggcgcccagagggatgtgtgcgcggccgtagccaccgtgcaggagatcatcagcaaggaggcggacgccaaggaggccgtccagaaggctaccatggcgctgtccatggccgaggcgaggctgcagctggccgcggaggcgctggaggccaaccggggctcggtaggcccgacggaggttagcatcgaaggcatggagcaggaggccctcctgtctgcacaggaagagattaaggattgtcgggcagccctgtcgcggtgcgcggaggagctgagtcgtgtccaggacaagaaaatggagctgcagaaggaggttgataggctgacggatctcgctgggaaggcccagatggatgcgtccaacgccgaagaagatgttgccaatataatggtgctggctgagcaggcggtggctcttgagatggaagcctcacagcgtgtcaacgatgcggaaatggtgctgctgaaagcggagaaggccatagcctcgattgataccgtggtggagctaccgtcacctgctgaagagcagagaagcactgaagaagacagcgtttctgaagggtacgagtatagcagcgatgtcactgatgatgtttatgtaagggatgaggtgtcaagtatcgagcgcctaatggtcggtgacttgactgttcagggctttgagcagcttgaaccatcccgtgaaatatatgatgaagaaagcagtaataagatgtctgttgagcctcagaaagaagctgagtctgattcagataagtcgaaacaagggaagaagcaagaaatggaacgaaaggagcacaccaaggaaccactgagtgctccaaaagcactggtgaagagatcatcccgtttcttctcggcatctttcttctcctccaaagttgatggagagtttacacctacatctgtcttccgagggttaatgaaatcagtgcaaaaacaagctccgaagcttgttgttgggatattgcttctcggtgcaggggcattcttcttaaatagggctgagaagagtcaactatttcagcagcaaggcattgccacaagtattggaaaggtaacctccacaacaaagcccatagttcttgagatacggcgaattccacagagagtaaagaagctaatagagctcttacctcatcaagaggtaaatgaggaagaagcttcacttttcgacatactatacttgcttctggccagtgttatttttgtaccattatttcagaaaatccctggagcaaatactggcttaatatcctgcacctgcagctttctgtggaaagactaagctcgatgaagaagtatgtctttggcttgggatctgctcaggtgctggctactactgctgctgttggtgtgatagctcattgttttgccgcactaccaggaccagcagcaattgttgttgggagtggcttggctctgtcatccacagctgttgtcttgcaagtattgcaagagcgtggtgaaagtacgtcacgtcatggacgtgctacattttctgtgttattgttccaggatttggctgtggtggttctgttgatattaatacctctcatatcacctaattcttcaaaaggaggggttggtttccaagcaatagcagaagccatgggaatggctgcagtcaaagcagtagctgctataactgccataattgctggaggtcgtctgttgctccggcctatttacaaacaaattgctgaaaatcagaatgctgagatattttcagcaaatacactccttgttatttttggcacaagtcttcttacagcccgggctgggttatcgatggcacttggagcttttttagctggtctgttactagcagaaacagagttctcattgcaggttgagtcagatatagctccctatcgtggtcttctgttaggacttttctttatgacggttggaatgtctattgacccaaagctgcttctgtcaaacttcccagcgatctctgtgatattgagtctcttgataattggaaagacattgttagttacatttgtcggcagggtgtttggggtttctgctatagctgccattcgtgttggcctcttgcttgcacctggtggtgagtttgcttttgttgcctttggagaagctgtcaaccagggtcttctatcacctcaattaacatcgttgctatttttagtcgttggcatttcaatggctctgacaccatggttagctgctggagggcagtttctggcatcaaaatttgagcagcatgatgtgaggagtttattgcccgtggaaagtgagactgacgatttgcaagaccatatcattatattaggctttggacgtgttgggcagatcattgcacaactcctgtcagagcggttaattccttttgttgcacttgatgctggaagtgatcgggttgcagctgggcgtgcacttgatcttccagtgtattttggtgattctggaaagcagagaggtactgcacaaaaattggagctgaaagagcttgtgctgctgcaattactttggatactcctggtgcaaactacagagctgtctgggcgttgaacaaatatttcccaaatgtgaagacatttgttagagcacatgatgttgatcatggtgttaatttggagaaagctggtgcaacggcggttgtccctgagaccttggagccaagtcttcagctagctgctgctgtccttgcacaagcaaaactcccaatgtcagagattcaggaaaccatcaacgagttccggaatcgtcatctgtcagagcttacagagttgtgtgctacgtcaggaagttctcttggctatggattttccagagctacgtccaaatcgaagtctttcacctccgacgacgaaaaccaaacagtggatggcacactagcaatctgatgctgatgagataaaatgggatccccttgctagcgctagattggttgcattgttcagtagataatcctgtttcatgtggaaggagggtggaataattattcatataagagctgtcataaaagttggcgtccatttttgtatgttagacacttagtgcttgtttgagagtaatggaagggactgagagggccaaaatcctttatgccccgtttgtttccttttattttgaggacttggaatctaactattggaataggctatttttttaaaatgtgacattccaccacttccaaagttatcatatgagcctatctctaattattcataggatgagatatgtaatttgattctatagatttacatgctatttttcc

SEQ ID NO: 18199 - DNA, 3958 bp, Zea Mays
cccaagaccacaaggaaacacgagcgctagtggcaggtggcagcgagtgagaaggtgagctcgcctccctcgcgcctcccattcccccctcgcgcagtcctatcgtaggaatgggatgaggccggggcccctccctccttcctcctcggcgcttctcccgtgacaagcctccattctccagataggggaggatggatttgtccaggttcgcctccggcgtcgggcccagccgcgtggccccgcgggcgggcctgcagatcggcgccgccgagaatggcttccgggcctgctccctgcggcgagcacggcaccgcggcggcgggaacgggaacctcacggccgccgcgtccaccctccgcggccgcggcgggctcttctacctggctcccacgcgccggagtcatcccagtctccggctcttctacctgcttcccacgcgcgggagtcatctcagtctccgcgccagatggcggccgcgctgccagggcaacgactcattggcctacgtcgacggccccttggagaccgctaagggctccggcgaggtcgacgacaacgtgcccaccagctcggggtccgacgacgacaggggcctcgccgacgtcgacggcctcagggagatgctgcagaggtccaggaacgagctggaggtggccagggtcaacagcaccatgttcgaggagaaggcgcagcggatatccgagtcggccatcgcgttcaaggaccgcgccgacggcgcccagagggatgtgtgcgcggccgtagccaccgtgcaggagatcatcagcaaggaggcggacgccaaggaggccgtccagaaggctaccatggcgctgtccatggccgaggcgaggctgcagctggccgcggaggcgctggaggccaaccggggctcggtaggcccgacggaggttagcatcgaaggcatggagcaggaggccctcctgtctgcacaggaagagattaaggattgtcgggcagccctgtcgcggtgcgcggaggagctgagtcgtgtccaggacaagaaaatggagctgcagaaggaggttgataggctgacggatctcgctgggaaggcccagatggatgcgtccaacgccgaagaagatgttgccaatataatggtgctggctgagcaggcggtggctcttgagatggaagcctcacagcgtgtcaacgatgcggaaatggtgctgctgaaagcggagaaggccatagcctcgattgataccgtggtggagctaccgtcacctgctgaagagcagagaagcactgaagaagacagcgtttctgaagggtacgagtatagcagcgatgtcactgatgatgtttatgtaagggatgaggtgtcaagtatcgagcgcctaatggtcggtgacttgactgttcagggctttgagcagcttgaaccatcccgtgaaatatatgatgaagaaagcagtaataagatgtctgttgagcctcagaaagaagctgagtctgattcagataagtcgaaacaagggaagaagcaagaaatggaacgaaaggagcacaccaaggaaccactgagtgctccaaaagcactggtgaagagatcatcccgtttcttctcggcatctttcttctcctccaaagttgatggagagtttacacctacatctgtcttccgagggttaatgaaatcagtgcaaaaacaagctccgaagcttgttgttgggatattgcttctcggtgcaggggcattcttcttaaatagggctgagaagagtcaactatttcagcagcaaggcattgccacaagtattggaaaggtaacctccacaacaaagcccatagttcttgagatacggcgaattccacagagagtaaagaagctaatagagctcttacctcatcaagaggtaaatgaggaagaagcttcacttttcgacatactatacttgcttctggccagtgttatttttgtaccattatttcagaaaatccctggagcaaatactggcttaatatcctgcacctgcagctttctgtggaaagactaagctcgatgaagaagtgctggctactactgctgctgttggtgtgatagctcattgttttgccgcactaccaggaccagcagcaattgttgttgggagtggcttggctctgtcatccacagctgttgtcttgcaagtattgcaagagcgtggtgaaagtacgtcacgtcatggacgtgctacattttctgtgttattgttccaggatttggctgtggtggttctgttgatattaatacctctcatatcacctaattcttcaaaaggaggggttggtttccaagcaatagcagaagccatgggaatggctgcagtcaaagcagtagctgctataactgccataattgctggaggtcgtctgttgctccggcctatttacaaacaaattgctgaaaatcagaatgctgagatattttcagcaaatacactccttgttatttttggcacaagtcttcttacagcccgggctgggttatcgatggcacttggagcttttttagctggtctgttactagcagaaacagagttctcattgcaggttgagtcagatatagctccctatcgtggtcttctgttaggacttttctttatgacggttggaatgtctattgacccaaagctgcttctgtcaaacttcccagcgatctctgtgatattgagtctcttgataattggaaagacattgttagttacatttgtcggcagggtgtttggggtttctgctatagctgccattcgtgttggcctcttgcttgcacctggtggtgagtttgcttttgttgcctttggagaagctgtcaaccagggtcttctatcacctcaattaacatcgttgctatttttagtcgttggcatttcaatggctctgacaccatggttagctgctggagggcagtttctggcatcaaaatttgagcagcatgatgtgaggagtttattgcccgtggaaagtgagactgacgatttgcaagaccatatcattatattaggctttggacgtgttgggcagatcattgcacaactcctgtcagagcggttaattccttttgttgcacttgatgctggaagtgatcgggttgcagctgggcgtgcacttgatcttccagtgtattttggtgattctggaaagcagagaggtactgcacaaaaattggagctgaaagagcttgtgctgctgcaattactttggatactcctggtgcaaactacagagctgtctgggcgttgaacaaatatttcccaaatgtgaagacatttgttagagcacatgatgttgatcatggtgttaatttggagaaagctggtgcaacggcggttgtccctgagaccttggagccaagtcttcagctagctgctgctgtccttgcacaagcaaaactcccaatgtcagagattcaggaaaccatcaacgagttccggaatcgtcatctgtcagagcttacagagttgtgtgctacgtcaggaagttctcttggctatggattttccagagctacgtccaaatcgaagtctttcacctccgacgacgaaaaccaaacagtggatggcacactagcaatctgatgctgatgagataaaatgggatccccttgctagcgctagattggttgcattgttcagtagataatcctgtttcatgtggaaggagggtggaataattattcatataagagctgtcataaaagttggcgtccatttttgtatgttagacacttagtgcttgtttgagagtaatggaagggactgagagggccaaaatcctttatgccccgtttgtttccttttattttgaggacttggaatctaactattggaataggctatttttttaaaatgtgacattccaccacttccaaagttatcatatgagcctatctctaattattcataggatgagatatgtaatttgattctatagatttacatgctatttttcc

SEQ ID NO: 18200 - DNA, 4064 bp, Zea Mays
cccaagaccacaaggaaacacgagcgctagtggcaggtggcagcgagtgagaaggtgagctcgcctccctcgcgcctcccattcccccctcgcgcagtcctatcgtaggaatgggatgaggccggggcccctccctccttcctcctcggcgcttctcccgtgacaagcctccattctccagataggggaggatggatttgtccaggttcgcctccggcgtcgggcccagccgcgtggccccgcgggcgggcctgcagatcggcgccgccgagaatggcttccgggcctgctccctgcggcgagcacggcaccgcggcggcgggaacgggaacctcacggccgccgcgtccaccctccgcggccgcggcgggctcttctacctggctcccacgcgccggagtcatcccagtctccggctcttctacctgcttcccacgcgcgggagtcatctcagtctccgcgccagatggcggccgcgctgccagggcaacgactcattggcctacgtcgacggccccttggagaccgctaagggctccggcgaggtcgacgacaacgtgcccaccagctcggggtccgacgacgacaggggcctcgccgacgtcgacggcctcagggagatgctgcagaggtccaggaacgagctggaggtggccagggtcaacagcaccatgttcgaggagaaggcgcagcggatatccgagtcggccatcgcgttcaaggaccgcgccgacggcgcccagagggatgtgtgcgcggccgtagccaccgtgcaggagatcatcagcaaggaggcggacgccaaggaggccgtccagaaggctaccatggcgctgtccatggccgaggcgaggctgcagctggccgcggaggcgctggaggccaaccggggctcggtaggcccgacggaggttagcatcgaaggcatggagcaggaggccctcctgtctgcacaggaagagattaaggattgtcgggcagccctgtcgcggtgcgcggaggagctgagtcgtgtccaggacaagaaaatggagctgcagaaggaggttgataggctgacggatctcgctgggaaggcccagatggatgcgtccaacgccgaagaagatgttgccaatataatggtgctggctgagcaggcggtggctcttgagatggaagcctcacagcgtgtcaacgatgcggaaatggtgctgctgaaagcggagaaggccatagcctcgattgataccgtggtggagctaccgtcacctgctgaagagcagagaagcactgaagaagacagcgtttctgaagggtacgagtatagcagcgatgtcactgatgatgtttatgtaagggatgaggtgtcaagtatcgagcgcctaatggtcggtgacttgactgttcagggctttgagcagcttgaaccatcccgtgaaatatatgatgaagaaagcagtaataagatgtctgttgagcctcagaaagaagctgagtctgattcagataagtcgaaacaagggaagaagcaagaaatggaacgaaaggagcacaccaaggaaccactgagtgctccaaaagcactggtgaagagatcatcccgtttcttctcggcatctttcttctcctccaaagttgatggagagtttacacctacatctgtcttccgagggttaatgaaatcagtgcaaaaacaagctccgaagcttgttgttgggatattgcttctcggtgcaggggcattcttcttaaatagggctgagaagagtcaactatttcagcagcaaggcattgccacaagtattggaaaggtaacctccacaacaaagcccatagttcttgagatacggcgaattccacagagagtaaagaagctaatagagctcttacctcatcaagaggtaaatgaggaagaagcttcacttttcgacatactatacttgcttctggccagtgttatttttgtaccattatttcagaaaatccctggaggcagtcctgttcttggatatcttgctgctggtgtcctcattggtccatatgggctgtccatcatccgtaatgtgcatgagacaaaggcaattgcggaatttggagttgtgttcttactatttaacattggacttgagctttctgtggaaagactaagctcgatgaagaagtgctggctactactgctgctgttggtgtgatagctcattgttttgccgcactaccaggaccagcagcaattgttgttgggagtggcttggctctgtcatccacagctgttgtcttgcaagtattgcaagagcgtggtgaaagtacgtcacgtcatggacgtgctacattttctgtgttattgttccaggatttggctgtggtggttctgttgatattaatacctctcatatcacctaattcttcaaaaggaggggttggtttccaagcaatagcagaagccatgggaatggctgcagtcaaagcagtagctgctataactgccataattgctggaggtcgtctgttgctccggcctatttacaaacaaattgctgaaaatcagaatgctgagatattttcagcaaatacactccttgttatttttggcacaagtcttcttacagcccgggctgggttatcgatggcacttggagcttttttagctggtctgttactagcagaaacagagttctcattgcaggttgagtcagatatagctccctatcgtggtcttctgttaggacttttctttatgacggttggaatgtctattgacccaaagctgcttctgtcaaacttcccagcgatctctgtgatattgagtctcttgataattggaaagacattgttagttacatttgtcggcagggtgtttggggtttctgctatagctgccattcgtgttggcctcttgcttgcacctggtggtgagtttgcttttgttgcctttggagaagctgtcaaccagggtcttctatcacctcaattaacatcgttgctatttttagtcgttggcatttcaatggctctgacaccatggttagctgctggagggcagtttctggcatcaaaatttgagcagcatgatgtgaggagtttattgcccgtggaaagtgagactgacgatttgcaagaccatatcattatattaggctttggacgtgttgggcagatcattgcacaactcctgtcagagcggttaattccttttgttgcacttgatgctggaagtgatcgggttgcagctgggcgtgcacttgatcttccagtgtattttggtgattctggaaagcagagaggtactgcacaaaaattggagctgaaagagcttgtgctgctgcaattactttggatactcctggtgcaaactacagagctgtctgggcgttgaacaaatatttcccaaatgtgaagacatttgttagagcacatgatgttgatcatggtgttaatttggagaaagctggtgcaacggcggttgtccctgagaccttggagccaagtcttcagctagctgctgctgtccttgcacaagcaaaactcccaatgtcagagattcaggaaaccatcaacgagttccggaatcgtcatctgtcagagcttacagagttgtgtgctacgtcaggaagttctcttggctatggattttccagagctacgtccaaatcgaagtctttcacctccgacgacgaaaaccaaacagtggatggcacactagcaatctgatgctgatgagataaaatgggatccccttgctagcgctagattggttgcattgttcagtagataatcctgtttcatgtggaaggagggtggaataattattcatataagagctgtcataaaagttggcgtccatttttgtatgttagacacttagtgcttgtttgagagtaatggaagggactgagagggccaaaatcctttatgccccgtttgtttccttttattttgaggacttggaatctaactattggaataggctatttttttaaaatgtgacattccaccacttccaaagttatcatatgagcctatctctaattattcataggatgagatatgtaatttgattctatagatttacatgctatttttcc

SEQ ID NO: 18201 - DNA, 4092 bp, Zea Mays
cccaagaccacaaggaaacacgagcgctagtggcaggtggcagcgagtgagaaggtgagctcgcctccctcgcgcctcccattcccccctcgcgcagtcctatcgtaggaatgggatgaggccggggcccctccctccttcctcctcggcgcttctcccgtgacaagcctccattctccagataggggaggatggatttgtccaggttcgcctccggcgtcgggcccagccgcgtggccccgcgggcgggcctgcagatcggcgccgccgagaatggcttccgggcctgctccctgcggcgagcacggcaccgcggcggcgggaacgggaacctcacggccgccgcgtccaccctccgcggccgcggcgggctcttctacctggctcccacgcgccggagtcatcccagtctccggctcttctacctgcttcccacgcgcgggagtcatctcagtctccgcgccagatggcggccgcgctgccagggcaacgactcattggcctacgtcgacggccccttggagaccgctaagggctccggcgaggtcgacgacaacgtgcccaccagctcggggtccgacgacgacaggggcctcgccgacgtcgacggcctcagggagatgctgcagaggtccaggaacgagctggaggtggccagggtcaacagcaccatgttcgaggagaaggcgcagcggatatccgagtcggccatcgcgttcaaggaccgcgccgacggcgcccagagggatgtgtgcgcggccgtagccaccgtgcaggagatcatcagcaaggaggcggacgccaaggaggccgtccagaaggctaccatggcgctgtccatggccgaggcgaggctgcagctggccgcggaggcgctggaggccaaccggggctcggtaggcccgacggaggttagcatcgaaggcatggagcaggaggccctcctgtctgcacaggaagagattaaggattgtcgggcagccctgtcgcggtgcgcggaggagctgagtcgtgtccaggacaagaaaatggagctgcagaaggaggttgataggctgacggatctcgctgggaaggcccagatggatgcgtccaacgccgaagaagatgttgccaatataatggtgctggctgagcaggcggtggctcttgagatggaagcctcacagcgtgtcaacgatgcggaaatggtgctgctgaaagcggagaaggccatagcctcgattgataccgtggtggagctaccgtcacctgctgaagagcagagaagcactgaagaagacagcgtttctgaagggtacgagtatagcagcgatgtcactgatgatgtttatgtaagggatgaggtgtcaagtatcgagcgcctaatggtcggtgacttgactgttcagggctttgagcagcttgaaccatcccgtgaaatatatgatgaagaaagcagtaataagatgtctgttgagcctcagaaagaagctgagtctgattcagataagtcgaaacaagggaagaagcaagaaatggaacgaaaggagcacaccaaggaaccactgagtgctccaaaagcactggtgaagagatcatcccgtttcttctcggcatctttcttctcctccaaagttgatggagagtttacacctacatctgtcttccgagggttaatgaaatcagtgcaaaaacaagctccgaagcttgttgttgggatattgcttctcggtgcaggggcattcttcttaaatagggctgagaagagtcaactatttcagcagcaaggcattgccacaagtattggaaaggtaacctccacaacaaagcccatagttcttgagatacggcgaattccacagagagtaaagaagctaatagagctcttacctcatcaagaggtaaatgaggaagaagcttcacttttcgacatactatacttgcttctggccagtgttatttttgtaccattatttcagaaaatccctggaggcagtcctgttcttggatatcttgctgctggtgtcctcattggtccatatgggctgtccatcatccgtaatgtgcatgagacaaaggcaattgcggaatttggagttgtgttcttactatttaacattggacttgagctttctgtggaaagactaagctcgatgaagaagtatgtctttggcttgggatctgctcaggtgctggctactactgctgctgttggtgtgatagctcattgttttgccgcactaccaggaccagcagcaattgttgttgggagtggcttggctctgtcatccacagctgttgtcttgcaagtattgcaagagcgtggtgaaagtacgtcacgtcatggacgtgctacattttctgtgttattgttccaggatttggctgtggtggttctgttgatattaatacctctcatatcacctaattcttcaaaaggaggggttggtttccaagcaatagcagaagccatgggaatggctgcagtcaaagcagtagctgctataactgccataattgctggaggtcgtctgttgctccggcctatttacaaacaaattgctgaaaatcagaatgctgagatattttcagcaaatacactccttgttatttttggcacaagtcttcttacagcccgggctgggttatcgatggcacttggagcttttttagctggtctgttactagcagaaacagagttctcattgcaggttgagtcagatatagctccctatcgtggtcttctgttaggacttttctttatgacggttggaatgtctattgacccaaagctgcttctgtcaaacttcccagcgatctctgtgatattgagtctcttgataattggaaagacattgttagttacatttgtcggcagggtgtttggggtttctgctatagctgccattcgtgttggcctcttgcttgcacctggtggtgagtttgcttttgttgcctttggagaagctgtcaaccagggtcttctatcacctcaattaacatcgttgctatttttagtcgttggcatttcaatggctctgacaccatggttagctgctggagggcagtttctggcatcaaaatttgagcagcatgatgtgaggagtttattgcccgtggaaagtgagactgacgatttgcaagaccatatcattatattaggctttggacgtgttgggcagatcattgcacaactcctgtcagagcggttaattccttttgttgcacttgatgctggaagtgatcgggttgcagctgggcgtgcacttgatcttccagtgtattttggtgattctggaaagcagagaggtactgcacaaaaattggagctgaaagagcttgtgctgctgcaattactttggatactcctggtgcaaactacagagctgtctgggcgttgaacaaatatttcccaaatgtgaagacatttgttagagcacatgatgttgatcatggtgttaatttggagaaagctggtgcaacggcggttgtccctgagaccttggagccaagtcttcagctagctgctgctgtccttgcacaagcaaaactcccaatgtcagagattcaggaaaccatcaacgagttccggaatcgtcatctgtcagagcttacagagttgtgtgctacgtcaggaagttctcttggctatggattttccagagctacgtccaaatcgaagtctttcacctccgacgacgaaaaccaaacagtggatggcacactagcaatctgatgctgatgagataaaatgggatccccttgctagcgctagattggttgcattgttcagtagataatcctgtttcatgtggaaggagggtggaataattattcatataagagctgtcataaaagttggcgtccatttttgtatgttagacacttagtgcttgtttgagagtaatggaagggactgagagggccaaaatcctttatgccccgtttgtttccttttattttgaggacttggaatctaactattggaataggctatttttttaaaatgtgacattccaccacttccaaagttatcatatgagcctatctctaattattcataggatgagatatgtaatttgattctatagatttacatgctatttttcc

SEQ ID NO: 18202 - DNA, 3654 bp, Zea Mays
aagacacgcaaaacaaaaccccaagaccacaaggaaacacgagcgctagtggcaggtggcagcgagtgagaaggtgagctcgcctccctcgcgcctcccattcccccctcgcgcagtcctatcgtaggaatgggatgaggccggggcccctccctccttcctcctcggcgcttctcccgtgacaagcctccattctccagataggggaggatggatttgtccaggttcgcctccggcgtcgggcccagccgcgtggccccgcgggcgggcctgcagatcggcgccgccgagaatggcttccgggcctgctccctgcggcgagcacggcaccgcggcggcgggaacgggaacctcacggccgccgcgtccaccctccgcggccgcggcgggctcttctacctggctcccacgcgccggagtcatcccagtctccggctcttctacctgcttcccacgcgcgggagtcatctcagtctccgcgccagatggcggccgcgctgccagggcaacgactcattggcctacgtcgacggccccttggagaccgctaagggctccggcgaggtcgacgacaacgtgcccaccagctcggggtccgacgacgacaggggcctcgccgacgtcgacggcctcagggagatgctgcagaggtccaggaacgagctggaggtggccagggtcaacagcaccatgttcgaggagaaggcgcagcggatatccgagtcggccatcgcgttcaaggaccgcgccgacggcgcccagagggatgtgtgcgcggccgtagccaccgtgcaggagatcatcagcaaggaggcggacgccaaggaggccgtccagaaggctaccatggcgctgtccatggccgaggcgaggctgcagctggccgcggaggcgctggaggccaaccggggctcggtaggcccgacggaggttagcatcgaaggcatggagcaggaggccctcctgtctgcacaggaagagattaaggattgtcgggcagccctgtcgcggtgcgcggaggagctgagtcgtgtccaggacaagaaaatggagctgcagaaggaggttgataggctgacggatctcgctgggaaggcccagatggatgcgtccaacgccgaagaagatgttgccaatataatggtgctggctgagcaggcggtggctcttgagatggaagcctcacagcgtgtcaacgatgcggaaatggtgctgctgaaagcggagaaggccatagcctcgattgataccgtggtggagctaccgtcacctgctgaagagcagagaagcactgaagaagacagcgtttctgaagggtacgagtatagcagcgatgtcactgatgatgtttatgtaagggatgaggtgtcaagtatcgagcgcctaatggtcggtgacttgactgttcagggctttgagcagcttgaaccatcccgtgaaatatatgatgaagaaagcagtaataagatgtctgttgagcctcagaaagaagctgagtctgattcagataagtcgaaacaagggaagaagcaagaaatggaacgaaaggagcacaccaaggaaccactgagtgctccaaaagcactggtgaagagatcatcccgtttcttctcggcatctttcttctcctccaaagttgatggagagtttacacctacatctgtcttccgagggttaatgaaatcagtgcaaaaacaagctccgaagcttgttgttgggatattgcttctcggtgcaggggcattcttcttaaatagggctgagaagagtcaactatttcagcagcaaggcattgccacaagtattggaaaggtaacctccacaacaaagcccatagttcttgagatacggcgaattccacagagagtaaagaagctaatagagctcttacctcatcaagaggtaaatgaggaagaagcttcacttttcgacatactatacttgcttctggccagtgttatttttgtaccattatttcagaaaatccctggaggcagtcctgttcttggatatcttgctgctggtgtcctcattggtccatatgggctgtccatcatccgtaatgtgcatgagacaaaggcaattgcggaatttggagttgtgttcttactatttaacattggacttgagctttctgtggaaagactaagctcgatgaagaagtatgtctttggcttgggatctgctcaggtgctggctactactgctgctgttggtgtgatagctcattgttttgccgcactaccaggaccagcagcaattgttgttgggagtggcttggctctgtcatccacagctgttgtcttgcaagtattgcaagagcgtggtgaaagtacgtcacgtcatggacgtgctacattttctgtgttattgttccaggatttggctgtggtggttctgttgatattaatacctctcatatcacctaattcttcaaaaggaggggttggtttccaagcaatagcagaagccatgggaatggctgcagtcaaagcagtagctgctataactgccataattgctggaggtcgtctgttgctccggcctatttacaaacaaattgctgaaaatcagaatgctgagatattttcagcaaatacactccttgttatttttggcacaagtcttcttacagcccgggctgggttatcgatggcacttggagcttttttagctggtctgttactagcagaaacagagttctcattgcaggttgagtcagatatagctccctatcgtggtcttctgttaggacttttctttatgacggttggaatgtctattgacccaaagctgcttctgtcaaacttcccagcgatctctgtgatattgagtctcttgataattggaaagacattgttagttacatttgtcggcagggtgtttggggtttctgctatagctgccattcgtgttggcctcttgcttgcacctggtggtgagtttgcttttgttgcctttggagaagctgtcaaccagggtcttctatcacctcaattaacatcgttgctatttttagtcgttggcatttcaatggctctgacaccatggttagctgctggagggcagtttctggcatcaaaatttgagcagcatgatgtgaggagtttattgcccgtggaaagtgagactgacgatttgcaagaccatatcattatattaggctttggacgtgttgggcagatcattgcacaactcctgtcagagcggttaattccttttgttgcacttgatgctggaagtgatcgggttgcagctgggcgtgcacttgatcttccagtgtattttggtgattctggaaagcagagaggtactgcacaaaaattggagctgaaagagcttgtgctgctgcaattactttggatactcctggtgcaaactacagagctgtctgggcgttgaacaaatatttcccaaatgtgaagacatttgttagagcacatgatgttgatcatggtgttaatttggagaaagctggtgcaacggcggttgtccctgagaccttggagccaagtcttcagctagctgctgctgtccttgcacaagcaaaactcccaatgtcagagattcaggaaaccatcaacgagttccggaatcgtcatctgtcagagcttacagagaaagcttctggcaaacaaaaggatatgcagcgaa

SEQ ID NO: 18203 - DNA, 3591 bp, Zea Mays
caccgctcacatggctccgctcggcttgttttcgggcgggctttgcctgctccaccgccgcagctgccgagaagacacgcaaaacaaaaccccaagaccacaaggaaacacgagcgctagtggcaggtggcagcgagtgagaaggtgagctcgcctccctcgcgcctcccattcccccctcgcgcagtcctatcgtaggaatgggatgaggccggggcccctccctccttcctcctcggcgcttctcccgtgacaagcctccattctccagataggggaggatggatttgtccaggttcgcctccggcgtcgggcccagccgcgtggccccgcgggcgggcctgcagatcggcgccgccgagaatggcttccgggcctgctccctgcggcgagcacggcaccgcggcggcgggaacgggaacctcacggccgccgcgtccaccctccgcggccgcggcgggctcttctacctggctcccacgcgccggagtcatcccagtctccggctcttctacctgcttcccacgcgcgggagtcatctcagtctccgcgccagatggcggccgcgctgccagggcaacgactcattggcctacgtcgacggccccttggagaccgctaagggctccggcgaggtcgacgacaacgtgcccaccagctcggggtccgacgacgacaggggcctcgccgacgtcgacggcctcagggagatgctgcagaggtccaggaacgagctggaggtggccagggtcaacagcaccatgttcgaggagaaggcgcagcggatatccgagtcggccatcgcgttcaaggaccgcgccgacggcgcccagagggatgtgtgcgcggccgtagccaccgtgcaggagatcatcagcaaggaggcggacgccaaggaggccgtccagaaggctaccatggcgctgtccatggccgaggcgaggctgcagctggccgcggaggcgctggaggccaaccggggctcggtaggcccgacggaggttagcatcgaaggcatggagcaggaggccctcctgtctgcacaggaagagattaaggattgtcgggcagccctgtcgcggtgcgcggaggagctgagtcgtgtccaggacaagaaaatggagctgcagaaggaggttgataggctgacggatctcgctgggaaggcccagatggatgcgtccaacgccgaagaagatgttgccaatataatggtgctggctgagcaggcggtggctcttgagatggaagcctcacagcgtgtcaacgatgcggaaatggtgctgctgaaagcggagaaggccatagcctcgattgataccgtggtggagctaccgtcacctgctgaagagcagagaagcactgaagaagacagcgtttctgaagggtacgagtatagcagcgatgtcactgatgatgtttatgtaagggatgaggtgtcaagtatcgagcgcctaatggtcggtgacttgactgttcagggctttgagcagcttgaaccatcccgtgaaatatatgatgaagaaagcagtaataagatgtctgttgagcctcagaaagaagctgagtctgattcagataagtcgaaacaagggaagaagcaagaaatggaacgaaaggagcacaccaaggaaccactgagtgctccaaaagcactggtgaagagatcatcccgtttcttctcggcatctttcttctcctccaaagttgatggagagtttacacctacatctgtcttccgagggttaatgaaatcagtgcaaaaacaagctccgaagcttgttgttgggatattgcttctcggtgcaggggcattcttcttaaatagggctgagaagagtcaactatttcagcagcaaggcattgccacaagtattggaaaggtaacctccacaacaaagcccatagttcttgagatacggcgaattccacagagagtaaagaagctaatagagctcttacctcatcaagaggtaaatgaggaagaagcttcacttttcgacatactatacttgcttctggccagtgttatttttgtaccattatttcagaaaatccctggagcaaatactggcttaatatcctgcacctgcagctttctgtggaaagactaagctcgatgaagaagtgctggctactactgctgctgttggtgtgatagctcattgttttgccgcactaccaggaccagcagcaattgttgttgggagtggcttggctctgtcatccacagctgttgtcttgcaagtattgcaagagcgtggtgaaagtacgtcacgtcatggacgtgctacattttctgtgttattgttccaggatttggctgtggtggttctgttgatattaatacctctcatatcacctaattcttcaaaaggaggggttggtttccaagcaatagcagaagccatgggaatggctgcagtcaaagcagtagctgctataactgccataattgctggaggtcgtctgttgctccggcctatttacaaacaaattgctgaaaatcagaatgctgagatattttcagcaaatacactccttgttatttttggcacaagtcttcttacagcccgggctgggttatcgatggcacttggagcttttttagctggtctgttactagcagaaacagagttctcattgcaggttgagtcagatatagctccctatcgtggtcttctgttaggacttttctttatgacggttggaatgtctattgacccaaagctgcttctgtcaaacttcccagcgatctctgtgatattgagtctcttgataattggaaagacattgttagttacatttgtcggcagggtgtttggggtttctgctatagctgccattcgtgttggcctcttgcttgcacctggtggtgagtttgcttttgttgcctttggagaagctgtcaaccagggtcttctatcacctcaattaacatcgttgctatttttagtcgttggcatttcaatggctctgacaccatggttagctgctggagggcagtttctggcatcaaaatttgagcagcatgatgtgaggagtttattgcccgtggaaagtgagactgacgatttgcaagaccatatcattatattaggctttggacgtgttgggcagatcattgcacaactcctgtcagagcggttaattccttttgttgcacttgatgctggaagtgatcgggttgcagctgggcgtgcacttgatcttccagtgtattttggtgattctggaaagcagagaggtactgcacaaaaattggagctgaaagagcttgtgctgctgcaattactttggatactcctggtgcaaactacagagctgtctgggcgttgaacaaatatttcccaaatgtgaagacatttgttagagcacatgatgttgatcatggtgttaatttggagaaagctggtgcaacggcggttgtccctgagaccttggagccaagtcttcagctagctgctgctgtccttgcacaagcaaaactcccaatgtcagagattcaggaaaccatcaacgagttccggaatcgtcatctgtcagagcttacagagaaagcttctggcaaacaaaaggatatgcagcgaa

SEQ ID NO: 18204 - DNA, 1493 bp, Zea Mays
gttctgttcatgctagtgcagccatcaaacagctatcattactcaattactccctggaccagcagcaattgttgttgggagtggcttggctctgtcatccacagctgttgtcttgcaagtattgcaagagcgtggtgaaagtacgtcacgtcatggacgtgctacattttctgtgttattgttccaggatttggctgtggtggttctgttgatattaatacctctcatatcacctaattcttcaaaaggaggggttggtttccaagcaatagcagaagccatgggaatggctgcagtcaaagcagtagctgctataactgccataattgctggaggtcgtctgttgctccggcctatttacaaacaaattgctgaaaatcagaatgctgagatattttcagcaaatacactccttgttatttttggcacaagtcttcttacagcccgggctgggttatcgatggcacttggagcttttttagctggtctgttactagcagaaacagagttctcattgcaggttgagtcagatatagctccctatcgtggtcttctgttaggacttttctttatgacggttggaatgtctattgacccaaagctgcttctgtcaaacttcccagcgatctctgtgatattgagtctcttgataattggaaagacattgttagttacatttgtcggcagggtgtttggggtttctgctatagctgccattcgtgttggcctcttgcttgcacctggtggtgagtttgcttttgttgcctttggagaagctgtcaaccagggtcttctatcacctcaattaacatcgttgctatttttagtcgttggcatttcaatggctctgacaccatggttagctgctggagggcagtttctggcatcaaaatttgagcagcatgatgtgaggagtttattgcccgtggaaagtgagactgacgatttgcaagaccatatcattatattaggctttggacgtgttgggcagatcattgcacaactcctgtcagagcggttaattccttttgttgcacttgatgctggaaggtatggtgcatcttataataaattgaattctaaagaaactacagatagcagcagttcagaaccttagcatctgttctgaattaatatttaaccatgagtatggctgcatgaacctatgcagacttaattctgtaaattactgtgtacagttaagatggttgattttaagctaattagggactgcagttggaatgtattaaatccacaaaataaaacaaactttcgggcagactcttccaggaattcaggaaaatgctggcatgaccagcaatatgaggctctctccagcagatcccctatcgcatccctattttatcttctatttaaaacttcactttacaaacagtgttatctacagttccgcgtcccctattttacattacccactggagacagtccgagaagctcctatcttcattggaaccaaatcatccatgtcaata

SEQ ID NO: 18205 - DNA, 3700 bp, Zea Mays
gctagtggcaggtggcagcgagtgagaaggtgagctcgcctccctcgcgcctcccattcccccctcgcgcagtcctatcgtaggaatgggatgaggccggggcccctccctccttcctcctcggcgcttctcccgtgacaagcctccattctccagtccgtgagcactccactccctgtctccgcttttgtttctctcgtcccaacctccccttttctgcgggtttgatccgcacggtacaggataggggaggatggatttgtccaggttcgcctccggcgtcgggcccagccgcgtggccccgcgggcgggcctgcagatcggcgccgccgagaatggcttccgggcctgctccctgcggcgagcacggcaccgcggcggcgggaacgggaacctcacggccgccgcgtccaccctccgcggccgcggcgggctcttctacctggctcccacgcgccggagtcatcccagtctccggctcttctacctgcttcccacgcgcgggagtcatctcagtctccgcgccagatggcggccgcgctgccagggcaacgactcattggcctacgtcgacggccccttggagaccgctaagggctccggcgaggtcgacgacaacgtgcccaccagctcggggtccgacgacgacaggggcctcgccgacgtcgacggcctcagggagatgctgcagaggtccaggaacgagctggaggtggccagggtcaacagcaccatgttcgaggagaaggcgcagcggatatccgagtcggccatcgcgttcaaggaccgcgccgacggcgcccagagggatgtgtgcgcggccgtagccaccgtgcaggagatcatcagcaaggaggcggacgccaaggaggccgtccagaaggctaccatggcgctgtccatggccgaggcgaggctgcagctggccgcggaggcgctggaggccaaccggggctcggtaggcccgacggaggttagcatcgaaggcatggagcaggaggccctcctgtctgcacaggaagagattaaggattgtcgggcagccctgtcgcggtgcgcggaggagctgagtcgtgtccaggacaagaaaatggagctgcagaaggaggttgataggctgacggatctcgctgggaaggcccagatggatgcgtccaacgccgaagaagatgttgccaatataatggtgctggctgagcaggcggtggctcttgagatggaagcctcacagcgtgtcaacgatgcggaaatggtgctgctgaaagcggagaaggccatagcctcgattgataccgtggtggagctaccgtcacctgctgaagagcagagaagcactgaagaagacagcgtttctgaagggtacgagtatagcagcgatgtcactgatgatgtttatgtaagggatgaggtgtcaagtatcgagcgcctaatggtcggtgacttgactgttcagggctttgagcagcttgaaccatcccgtgaaatatatgatgaagaaagcagtaataagatgtctgttgagcctcagaaagaagctgagtctgattcagataagtcgaaacaagggaagaagcaagaaatggaacgaaaggagcacaccaaggaaccactgagtgctccaaaagcactggtgaagagatcatcccgtttcttctcggcatctttcttctcctccaaagttgatggagagtttacacctacatctgtcttccgagggttaatgaaatcagtgcaaaaacaagctccgaagcttgttgttgggatattgcttctcggtgcaggggcattcttcttaaatagggctgagaagagtcaactatttcagcagcaaggcattgccacaagtattggaaaggtaacctccacaacaaagcccatagttcttgagatacggcgaattccacagagagtaaagaagctaatagagctcttacctcatcaagaggtaaatgaggaagaagcttcacttttcgacatactatacttgcttctggccagtgttatttttgtaccattatttcagaaaatccctggaggcagtcctgttcttggatatcttgctgctggtgtcctcattggtccatatgggctgtccatcatccgtaatgtgcatgagacaaaggcaattgcggaatttggagttgtgttcttactatttaacattggacttgagctttctgtggaaagactaagctcgatgaagaagtgctggctactactgctgctgttggtgtgatagctcattgttttgccgcactaccaggaccagcagcaattgttgttgggagtggcttggctctgtcatccacagctgttgtcttgcaagtattgcaagagcgtggtgaaagtacgtcacgtcatggacgtgctacattttctgtgttattgttccaggatttggctgtggtggttctgttgatattaatacctctcatatcacctaattcttcaaaaggaggggttggtttccaagcaatagcagaagccatgggaatggctgcagtcaaagcagtagctgctataactgccataattgctggaggtcgtctgttgctccggcctatttacaaacaaattgctgaaaatcagaatgctgagatattttcagcaaatacactccttgttatttttggcacaagtcttcttacagcccgggctgggttatcgatggcacttggagcttttttagctggtctgttactagcagaaacagagttctcattgcaggttgagtcagatatagctccctatcgtggtcttctgttaggacttttctttatgacggttggaatgtctattgacccaaagctgcttctgtcaaacttcccagcgatctctgtgatattgagtctcttgataattggaaagacattgttagttacatttgtcggcagggtgtttggggtttctgctatagctgccattcgtgttggcctcttgcttgcacctggtggtgagtttgcttttgttgcctttggagaagctgtcaaccagggtcttctatcacctcaattaacatcgttgctatttttagtcgttggcatttcaatggctctgacaccatggttagctgctggagggcagtttctggcatcaaaatttgagcagcatgatgtgaggagtttattgcccgtggaaagtgagactgacgatttgcaagaccatatcattatattaggctttggacgtgttgggcagatcattgcacaactcctgtcagagcggttaattccttttgttgcacttgatgctggaaggtatggtgcatcttataataaattgaattctaaagaaactacagatagcagcagttcagaaccttagcatctgttctgaattaatatttaaccatgagtatggctgcatgaacctatgcagacttaattctgtaaattactgtgtacagttaagatggttgattttaagctaattagggactgcagttggaatgtattaaatccacaaaataaaacaaactttcgggcagactcttccaggaattcaggaaaatgctggcatgaccagcaatatgaggctctctccagcagatcccctatcgcatccctattttatcttctatttaaaacttcactttacaaacagtgttatctacagttccgcgtcccctattttacattacccactggagacagtccgagaagctcctatcttcattggaaccaaatcatccatgtcaata

SEQ ID NO: 18206 - DNA, 3523 bp, Zea Mays
acaaggaaacacgagcgctagtggcaggtggcagcgagtgagaaggtgagctcgcctccctcgcgcctcccattcccccctcgcgcagtcctatcgtaggaatgggatgaggccggggcccctccctccttcctcctcggcgcttctcccgtgacaagcctccattctccagataggggaggatggatttgtccaggttcgcctccggcgtcgggcccagccgcgtggccccgcgggcgggcctgcagatcggcgccgccgagaatggcttccgggcctgctccctgcggcgagcacggcaccgcggcggcgggaacgggaacctcacggccgccgcgtccaccctccgcggccgcggcgggctcttctacctggctcccacgcgccggagtcatcccagtctccggctcttctacctgcttcccacgcgcgggagtcatctcagtctccgcgccagatggcggccgcgctgccagggcaacgactcattggcctacgtcgacggccccttggagaccgctaagggctccggcgaggtcgacgacaacgtgcccaccagctcggggtccgacgacgacaggggcctcgccgacgtcgacggcctcagggagatgctgcagaggtccaggaacgagctggaggtggccagggtcaacagcaccatgttcgaggagaaggcgcagcggatatccgagtcggccatcgcgttcaaggaccgcgccgacggcgcccagagggatgtgtgcgcggccgtagccaccgtgcaggagatcatcagcaaggaggcggacgccaaggaggccgtccagaaggctaccatggcgctgtccatggccgaggcgaggctgcagctggccgcggaggcgctggaggccaaccggggctcggtaggcccgacggaggttagcatcgaaggcatggagcaggaggccctcctgtctgcacaggaagagattaaggattgtcgggcagccctgtcgcggtgcgcggaggagctgagtcgtgtccaggacaagaaaatggagctgcagaaggaggttgataggctgacggatctcgctgggaaggcccagatggatgcgtccaacgccgaagaagatgttgccaatataatggtgctggctgagcaggcggtggctcttgagatggaagcctcacagcgtgtcaacgatgcggaaatggtgctgctgaaagcggagaaggccatagcctcgattgataccgtggtggagctaccgtcacctgctgaagagcagagaagcactgaagaagacagcgtttctgaagggtacgagtatagcagcgatgtcactgatgatgtttatgtaagggatgaggtgtcaagtatcgagcgcctaatggtcggtgacttgactgttcagggctttgagcagcttgaaccatcccgtgaaatatatgatgaagaaagcagtaataagatgtctgttgagcctcagaaagaagctgagtctgattcagataagtcgaaacaagggaagaagcaagaaatggaacgaaaggagcacaccaaggaaccactgagtgctccaaaagcactggtgaagagatcatcccgtttcttctcggcatctttcttctcctccaaagttgatggagagtttacacctacatctgtcttccgagggttaatgaaatcagtgcaaaaacaagctccgaagcttgttgttgggatattgcttctcggtgcaggggcattcttcttaaatagggctgagaagagtcaactatttcagcagcaaggcattgccacaagtattggaaaggtaacctccacaacaaagcccatagttcttgagatacggcgaattccacagagagtaaagaagctaatagagctcttacctcatcaagaggtaaatgaggaagaagcttcacttttcgacatactatacttgcttctggccagtgttatttttgtaccattatttcagaaaatccctggagcaaatactggcttaatatcctgcacctgcagctttctgtggaaagactaagctcgatgaagaagtgctggctactactgctgctgttggtgtgatagctcattgttttgccgcactaccaggaccagcagcaattgttgttgggagtggcttggctctgtcatccacagctgttgtcttgcaagtattgcaagagcgtggtgaaagtacgtcacgtcatggacgtgctacattttctgtgttattgttccaggatttggctgtggtggttctgttgatattaatacctctcatatcacctaattcttcaaaaggaggggttggtttccaagcaatagcagaagccatgggaatggctgcagtcaaagcagtagctgctataactgccataattgctggaggtcgtctgttgctccggcctatttacaaacaaattgctgaaaatcagaatgctgagatattttcagcaaatacactccttgttatttttggcacaagtcttcttacagcccgggctgggttatcgatggcacttggagcttttttagctggtctgttactagcagaaacagagttctcattgcaggttgagtcagatatagctccctatcgtggtcttctgttaggacttttctttatgacggttggaatgtctattgacccaaagctgcttctgtcaaacttcccagcgatctctgtgatattgagtctcttgataattggaaagacattgttagttacatttgtcggcagggtgtttggggtttctgctatagctgccattcgtgttggcctcttgcttgcacctggtggtgagtttgcttttgttgcctttggagaagctgtcaaccagggtcttctatcacctcaattaacatcgttgctatttttagtcgttggcatttcaatggctctgacaccatggttagctgctggagggcagtttctggcatcaaaatttgagcagcatgatgtgaggagtttattgcccgtggaaagtgagactgacgatttgcaagaccatatcattatattaggctttggacgtgttgggcagatcattgcacaactcctgtcagagcggttaattccttttgttgcacttgatgctggaaggtatggtgcatcttataataaattgaattctaaagaaactacagatagcagcagttcagaaccttagcatctgttctgaattaatatttaaccatgagtatggctgcatgaacctatgcagacttaattctgtaaattactgtgtacagttaagatggttgattttaagctaattagggactgcagttggaatgtattaaatccacaaaataaaacaaactttcgggcagactcttccaggaattcaggaaaatgctggcatgaccagcaatatgaggctctctccagcagatcccctatcgcatccctattttatcttctatttaaaacttcactttacaaacagtgttatctacagttccgcgtcccctattttacattacccactggagacagtccgagaagctcctatcttcattggaaccaaatcatccatgtcaata

SEQ ID NO: 18207 - DNA, 3670 bp, Zea Mays
cccaagaccacaaggaaacacgagcgctagtggcaggtggcagcgagtgagaaggtgagctcgcctccctcgcgcctcccattcccccctcgcgcagtcctatcgtaggaatgggatgaggccggggcccctccctccttcctcctcggcgcttctcccgtgacaagcctccattctccagtccgataggggaggatggatttgtccaggttcgcctccggcgtcgggcccagccgcgtggccccgcgggcgggcctgcagatcggcgccgccgagaatggcttccgggcctgctccctgcggcgagcacggcaccgcggcggcgggaacgggaacctcacggccgccgcgtccaccctccgcggccgcggcgggctcttctacctggctcccacgcgccggagtcatcccagtctccggctcttctacctgcttcccacgcgcgggagtcatctcagtctccgcgccagatggcggccgcgctgccagggcaacgactcattggcctacgtcgacggccccttggagaccgctaagggctccggcgaggtcgacgacaacgtgcccaccagctcggggtccgacgacgacaggggcctcgccgacgtcgacggcctcagggagatgctgcagaggtccaggaacgagctggaggtggccagggtcaacagcaccatgttcgaggagaaggcgcagcggatatccgagtcggccatcgcgttcaaggaccgcgccgacggcgcccagagggatgtgtgcgcggccgtagccaccgtgcaggagatcatcagcaaggaggcggacgccaaggaggccgtccagaaggctaccatggcgctgtccatggccgaggcgaggctgcagctggccgcggaggcgctggaggccaaccggggctcggtaggcccgacggaggttagcatcgaaggcatggagcaggaggccctcctgtctgcacaggaagagattaaggattgtcgggcagccctgtcgcggtgcgcggaggagctgagtcgtgtccaggacaagaaaatggagctgcagaaggaggttgataggctgacggatctcgctgggaaggcccagatggatgcgtccaacgccgaagaagatgttgccaatataatggtgctggctgagcaggcggtggctcttgagatggaagcctcacagcgtgtcaacgatgcggaaatggtgctgctgaaagcggagaaggccatagcctcgattgataccgtggtggagctaccgtcacctgctgaagagcagagaagcactgaagaagacagcgtttctgaagggtacgagtatagcagcgatgtcactgatgatgtttatgtaagggatgaggtgtcaagtatcgagcgcctaatggtcggtgacttgactgttcagggctttgagcagcttgaaccatcccgtgaaatatatgatgaagaaagcagtaataagatgtctgttgagcctcagaaagaagctgagtctgattcagataagtcgaaacaagggaagaagcaagaaatggaacgaaaggagcacaccaaggaaccactgagtgctccaaaagcactggtgaagagatcatcccgtttcttctcggcatctttcttctcctccaaagttgatggagagtttacacctacatctgtcttccgagggttaatgaaatcagtgcaaaaacaagctccgaagcttgttgttgggatattgcttctcggtgcaggggcattcttcttaaatagggctgagaagagtcaactatttcagcagcaaggcattgccacaagtattggaaaggtaacctccacaacaaagcccatagttcttgagatacggcgaattccacagagagtaaagaagctaatagagctcttacctcatcaagaggtaaatgaggaagaagcttcacttttcgacatactatacttgcttctggccagtgttatttttgtaccattatttcagaaaatccctggaggcagtcctgttcttggatatcttgctgctggtgtcctcattggtccatatgggctgtccatcatccgtaatgtgcatgagacaaaggcaattgcggaatttggagttgtgttcttactatttaacattggacttgagctttctgtggaaagactaagctcgatgaagaagtatgtctttggcttgggatctgctcaggtgctggctactactgctgctgttggtgtgatagctcattgttttgccgcactaccaggaccagcagcaattgttgttgggagtggcttggctctgtcatccacagctgttgtcttgcaagtattgcaagagcgtggtgaaagtacgtcacgtcatggacgtgctacattttctgtgttattgttccaggatttggctgtggtggttctgttgatattaatacctctcatatcacctaattcttcaaaaggaggggttggtttccaagcaatagcagaagccatgggaatggctgcagtcaaagcagtagctgctataactgccataattgctggaggtcgtctgttgctccggcctatttacaaacaaattgctgaaaatcagaatgctgagatattttcagcaaatacactccttgttatttttggcacaagtcttcttacagcccgggctgggttatcgatggcacttggagcttttttagctggtctgttactagcagaaacagagttctcattgcaggttgagtcagatatagctccctatcgtggtcttctgttaggacttttctttatgacggttggaatgtctattgacccaaagctgcttctgtcaaacttcccagcgatctctgtgatattgagtctcttgataattggaaagacattgttagttacatttgtcggcagggtgtttggggtttctgctatagctgccattcgtgttggcctcttgcttgcacctggtggtgagtttgcttttgttgcctttggagaagctgtcaaccagggtcttctatcacctcaattaacatcgttgctatttttagtcgttggcatttcaatggctctgacaccatggttagctgctggagggcagtttctggcatcaaaatttgagcagcatgatgtgaggagtttattgcccgtggaaagtgagactgacgatttgcaagaccatatcattatattaggctttggacgtgttgggcagatcattgcacaactcctgtcagagcggttaattccttttgttgcacttgatgctggaaggtatggtgcatcttataataaattgaattctaaagaaactacagatagcagcagttcagaaccttagcatctgttctgaattaatatttaaccatgagtatggctgcatgaacctatgcagacttaattctgtaaattactgtgtacagttaagatggttgattttaagctaattagggactgcagttggaatgtattaaatccacaaaataaaacaaactttcgggcagactcttccaggaattcaggaaaatgctggcatgaccagcaatatgaggctctctccagcagatcccctatcgcatccctattttatcttctatttaaaacttcactttacaaacagtgttatctacagttccgcgtcccctattttacattacccactggagacagtccgagaagctcctatcttcattggaaccaaatcatccatgtcaata

SEQ ID NO: 18208 - DNA, 3471 bp, Zea Mays
ctccgctcggcttgttttcgggcgggctttgcctgctccaccgccgcagctgccgagaagacacgcaaaacaaaaccccaagaccacaaggaaacacgagcgctagtggcaggtggcagcgagtgagaaggtgagctcgcctccctcgcgcctcccattcccccctcgcgcagtcctatcgtaggaatgggatgaggccggggcccctccctccttcctcctcggcgcttctcccgtgacaagcctccattctccagtccgtgagcactccactccctgtctccgcttttgtttctctcgtcccaacctccccttttctgcgggtttgatccgcacggtacaggataggggaggatggatttgtccaggttcgcctccggcgtcgggcccagccgcgtggccccgcgggcgggcctgcagatcggcgccgccgagaatggcttccgggcctgctccctgcggcgagcacggcaccgcggcggcgggaacgggaacctcacggccgccgcgtccaccctccgcggccgcggcgggctcttctacctggctcccacgcgccggagtcatcccagtctccggctcttctacctgcttcccacgcgcgggagtcatctcagtctccgcgccagatggcggccgcgctgccagggcaacgactcattggcctacgtcgacggccccttggagaccgctaagggctccggcgaggtcgacgacaacgtgcccaccagctcggggtccgacgacgacaggggcctcgccgacgtcgacggcctcagggagatgctgcagaggtccaggaacgagctggaggtggccagggtcaacagcaccatgttcgaggagaaggcgcagcggatatccgagtcggccatcgcgttcaaggaccgcgccgacggcgcccagagggatgtgtgcgcggccgtagccaccgtgcaggagatcatcagcaaggaggcggacgccaaggaggccgtccagaaggctaccatggcgctgtccatggccgaggcgaggctgcagctggccgcggaggcgctggaggccaaccggggctcggtaggcccgacggaggttagcatcgaaggcatggagcaggaggccctcctgtctgcacaggaagagattaaggattgtcgggcagccctgtcgcggtgcgcggaggagctgagtcgtgtccaggacaagaaaatggagctgcagaaggaggttgataggctgacggatctcgctgggaaggcccagatggatgcgtccaacgccgaagaagatgttgccaatataatggtgctggctgagcaggcggtggctcttgagatggaagcctcacagcgtgtcaacgatgcggaaatggtgctgctgaaagcggagaaggccatagcctcgattgataccgtggtggagctaccgtcacctgctgaagagcagagaagcactgaagaagacagcgtttctgaagggtacgagtatagcagcgatgtcactgatgatgtttatgtaagggatgaggtgtcaagtatcgagcgcctaatggtcggtgacttgactgttcagggctttgagcagcttgaaccatcccgtgaaatatatgatgaagaaagcagtaataagatgtctgttgagcctcagaaagaagctgagtctgattcagataagtcgaaacaagggaagaagcaagaaatggaacgaaaggagcacaccaaggaaccactgagtgctccaaaagcactggtgaagagatcatcccgtttcttctcggcatctttcttctcctccaaagttgatggagagtttacacctacatctgtcttccgagggttaatgaaatcagtgcaaaaacaagctccgaagcttgttgttgggatattgcttctcggtgcaggggcattcttcttaaatagggctgagaagagtcaactatttcagcagcaaggcattgccacaagtattggaaaggtaacctccacaacaaagcccatagttcttgagatacggcgaattccacagagagtaaagaagctaatagagctcttacctcatcaagaggtaaatgaggaagaagcttcacttttcgacatactatacttgcttctggccagtgttatttttgtaccattatttcagaaaatccctggaggcagtcctgttcttggatatcttgctgctggtgtcctcattggtccatatgggctgtccatcatccgtaatgtgcatgagacaaaggcaattgcggaatttggagttgtgttcttactatttaacattggacttgagctttctgtggaaagactaagctcgatgaagaagtatgtctttggcttgggatctgctcaggtgctggctactactgctgctgttggtgtgatagctcattgttttgccgcactaccaggaccagcagcaattgttgttgggagtggcttggctctgtcatccacagctgttgtcttgcaagtattgcaagagcgtggtgaaagtacgtcacgtcatggacgtgctacattttctgtgttattgttccaggatttggctgtggtggttctgttgatattaatacctctcatatcacctaattcttcaaaaggaggggttggtttccaagcaatagcagaagccatgggaatggctgcagtcaaagcagtagctgctataactgccataattgctggaggtcgtctgttgctccggcctatttacaaacaaattgctgaaaatcagaatgctgagatattttcagcaaatacactccttgttatttttggcacaagtcttcttacagcccgggctgggttatcgatggcacttggagcttttttagctggtctgttactagcagaaacagagttctcattgcaggttgagtcagatatagctccctatcgtggtcttctgttaggacttttctttatgacggttggaatgtctattgacccaaagctgcttctgtcaaacttcccagcgatctctgtgatattgagtctcttgataattggaaagacattgttagttacatttgtcggcagggtgtttggggtttctgctatagctgccattcgtgttggcctcttgcttgcacctggtggtgagtttgcttttgttgcctttggagaagctgtcaaccagggtcttctatcacctcaattaacatcgttgctatttttagtcgttggcatttcaatggctctgacaccatggttagctgctggagggcagtttctggcatcaaaatttgagcagcatgatgtgaggagtttattgcccgtggaaagtgagactgacgatttgcaagaccatatcattatattaggctttggacgtgttgggcagatcattgcacaactcctgtcagagcggttaattccttttgttgcacttgatgctggaagttccgcgtcccctattttacattacccactggagacagtccgagaagctcctatcttcattggaaccaaatcatccatgtcaata

SEQ ID NO: 18209 - DNA, 1271 bp, Zea Mays
ttctgatgaatcagcttgattcgtttgcatgttgttgatggaatttataccagaatgggtgattagttctatcaacaaggaataagtaccttccatgaagagatgaaggaagcttcaaacatactgcataactgctcatctcgatccctagttatcatcgatgagcttggtcgaggcacaagcacacatgacgagagaatttgaaggttctgttggggcataccatgtttcatatctagccactaggaagcttttggaagtgaccgataaacaggtggaaactagcccagaggcaaatgatcttggagaaattattttcttgtacaaacttgttgctggagcttcagatagaagctttggacttaatgttgccctgcttgcacagcttccgtctagatgtatcaagagggcatccgtcatggcagccaaactgcaagaggagttaagtccgcgggaggaaatcaagcttcggaggacaacggatgcacaaactgtggacggaccatctgaaagttccgcagaagttggtttgttttgtgcacatccttatcaacgattggcagaaacatgtcgcaggatactgctgaacatcacgttggctcaaagcaataatgatgtaacgaacacacttccttctttgaaaaatgcacaggaaattgcacagaagacgatatgatgcagcggtccatttgacaactgacatattcttcatcagtgtgaagggaacttatcagtgcaagctacgctactctcggctatggcgttggaaaagttgagaagcagaattttaggggttatatgggacacatcacacaacggtgcagtgcaacaattgcagttctagacttctttttagggaaacacttaagtttatgactacactaaacagcacttgatgtacatttggcacatcatgttctccagagctaacattctttggacgcaggtatcatgtacctttttttgctacggaggatccctaatggtggtaagcattttgctggagccgtttgtgtaacccatactctgccaggatagcgtggttaagcattttggtcacaactcaaagcagtgcctgtgtgtagttggagtgaactccgtgatatatactggagtacttagtatgtaactctatattccgttcattaatttatctagaactcgtttcgttgatgtaaatgcagagaagggacgtgtttactttttttatatctcgtgctctacccgttttctttggcatcctggaccagggctggacaaaaaaaactcaa

SEQ ID NO: 18210 - DNA, 1734 bp, Zea Mays
ttctgatgaatcagcttgattcgtttgcatgttgttgatggaatttataccagaatgggtgattagttctatcaacaaggaataagtaccttccatgaagagatgaaggaagcttcaaacatactgcataactgctcatctcgatccctagttatcatcgatgagcttggtcgaggcacaagcacacatgacggtgttgctattgcttactctactttacactatcttctcaaagagaaaaaatgcattgtcatttttgtcactcattatccaaagatccttgatatacagagagaatttgaaggttctgttggggcataccatgtttcatatctagccactaggaagcttttggaagtgaccgataaacaggtggaaactagcccagaggcaaatgatcttggagaaattattttcttgtacaaacttgttgctggagcttcagatagaagctttggacttaatgttgccctgcttgcacaggttcgttatgcttatttggtaggtttcatgatttgctgctttcatctaggtagggactaattttttcattgttatggtgttattggtacctacattggtgtgtctaactctccaaattattaatgcatgtgttctgattatcactcgcaagtgccgaattccaatagtcttgactactataaaaatattgtagacatggttaattttgtcgtttcctcattggaatgttctatgcagcattctaacaaatatgtcctgtgttgattgttccagtagttgggatgaaccctctaatttatatgacaccagctactatttgaagtgtggccttttcacataaggctgtcttcagtagatcatgcatatggtcgtgcaaaatactgttttgcattgtagactacactgtttatagagtggagtttgaaataagagatgagataagaaatatgatgggtaagctgctggagacagcctaatatgttgcaagttgacgaggccctgttgaagttagacagtagtattgatctccactgttgtaccttgattactaaggttgttcactagatccttcttgcagcttccgtctagatgtatcaagagggcatccgtcatggcagccaaactgcaagaggagttaagtccgcgggaggaaatcaagcttcggaggacaacggatgcacaaactgtggacggaccatctgaaagttccgcagaagttggtttgttttgtgcacatccttatcaacgattggcagaaacatgtcgcaggatactgctgaacatcacgttggctcaaagcaataatgatgtaacgaacacacttccttctttgaaaaatgcacaggaaattgcacagaagacgatatgatgcagcggtccatttgacaactgacatattcttcatcagtgtgaagggaacttatcaggtatcatgtacctttttttgctacggaggatccctaatggtggtaagcattttgctggagccgtttgtgtaacccatactctgccaggatagcgtggttaagcattttggtcacaactcaaagcagtgcctgtgtgtagttggagtgaactccgtgatatatactggagtacttagtatgtaactctatattccgttcattaatttatctagaactcgtttcgttgatgtaaatgcagagaagggacgtgtttactttttttatatctcgtgctctacccgttttctttggcatcctggaccagggctggacaaaaaaaactcaa

SEQ ID NO: 18211 - DNA, 930 bp, Zea Mays
ttctgatgaatcagcttgattcgtttgcatgttgttgatggaatttataccagaatgggtgattagttctatcaacaaggaataagtaccttccatgaagagatgaaggaagcttcaaacatactgcataactgctcatctcgatccctagttatcatcgatgagcttggtcgaggcacaagcacacatgacgagagaatttgaaggttctgttggggcataccatgtttcatatctagccactaggaagcttttggaagtgaccgataaacaggtggaaactagcccagaggcaaatgatcttggagaaattattttcttgtacaaacttgttgctggagcttcagatagaagctttggacttaatgttgccctgcttgcacagcttccgtctagatgtatcaagagggcatccgtcatggcagccaaactgcaagaggagttaagtccgcgggaggaaatcaagcttcggaggacaacggatgcacaaactgtggacggaccatctgaaagttccgcagaagaaattgcacagaagacgatatgatgcagcggtccatttgacaactgacatattcttcatcagtgtgaagggaacttatcaggtatcatgtacctttttttgctacggaggatccctaatggtggtaagcattttgctggagccgtttgtgtaacccatactctgccaggatagcgtggttaagcattttggtcacaactcaaagcagtgcctgtgtgtagttggagtgaactccgtgatatatactggagtacttagtatgtaactctatattccgttcattaatttatctagaactcgtttcgttgatgtaaatgcagagaagggacgtgtttactttttttatatctcgtgctctacccgttttctttggcatcctggaccagggctggacaaaaaaaactcaa

SEQ ID NO: 18212 - DNA, 1179 bp, Zea Mays
ttctgatgaatcagcttgattcgtttgcatgttgttgatggaatttataccagaatgggtgattagttctatcaacaaggaataagtaccttccatgaagagatgaaggaagcttcaaacatactgcataactgctcatctcgatccctagttatcatcgatgagcttggtcgaggcacaagcacacatgacggtgttgctattgcttactctactttacactatcttctcaaagagaaaaaatgcattgtcatttttgtcactcattatccaaagatccttgatatacagagagaatttgaaggttctgttggggcataccatgtttcatatctagccactaggaagcttttggaagtgaccgataaacaggtggaaactagcccagaggcaaatgatcttggagaaattattttcttgtacaaacttgttgctggagcttcagatagaagctttggacttaatgttgccctgcttgcacagcttccgtctagatgtatcaagagggcatccgtcatggcagccaaactgcaagaggagttaagtccgcgggaggaaatcaagcttcggaggacaacggatgcacaaactgtggacggaccatctgaaagttccgcagaagttggtttgttttgtgcacatccttatcaacgattggcagaaacatgtcgcaggatactgctgaacatcacgttggctcaaagcaataatgatgtaacgaacacacttccttctttgaaaaatgcacaggaaattgcacagaagacgatatgatgcagcggtccatttgacaactgacatattcttcatcagtgtgaagggaacttatcagagctaacattctttggacgcaggtatcatgtacctttttttgctacggaggatccctaatggtggtaagcattttgctggagccgtttgtgtaacccatactctgccaggatagcgtggttaagcattttggtcacaactcaaagcagtgcctgtgtgtagttggagtgaactccgtgatatatactggagtacttagtatgtaactctatattccgttcattaatttatctagaactcgtttcgttgatgtaaatgcagagaagggacgtgtttactttttttatatctcgtgctctacccgttttctttggcatcctggaccagggctggacaaaaaaaactcaa

SEQ ID NO: 18213 - DNA, 1029 bp, Zea Mays
ttctgatgaatcagcttgattcgtttgcatgttgttgatggaatttataccagaatgggtgattagttctatcaacaaggaataagtaccttccatgaagagatgaaggaagcttcaaacatactgcataactgctcatctcgatccctagttatcatcgatgagcttggtcgaggcacaagcacacatgacgatccttgatatacagagagaatttgaaggttctgttggggcataccatgtttcatatctagccactaggaagcttttggaagtgaccgataaacaggtggaaactagcccagaggcaaatgatcttggagaaattattttcttgtacaaacttgttgctggagcttcagatagaagctttggacttaatgttgccctgcttgcacagcttccgtctagatgtatcaagagggcatccgtcatggcagccaaactgcaagaggagttaagtccgcgggaggaaatcaagcttcggaggacaacggatgcacaaactgtggacggaccatctgaaagttccgcagaagaaattgcacagaagacgatatgatgcagcggtccatttgacaactgacatattcttcatcagtgtgaagggaacttatcagtgcaagctacgctactctcggctatggcgttggaaaagttgagaagcagaattttaggggttatatgggacacatcacacaacggtatcatgtacctttttttgctacggaggatccctaatggtggtaagcattttgctggagccgtttgtgtaacccatactctgccaggatagcgtggttaagcattttggtcacaactcaaagcagtgcctgtgtgtagttggagtgaactccgtgatatatactggagtacttagtatgtaactctatattccgttcattaatttatctagaactcgtttcgttgatgtaaatgcagagaagggacgtgtttactttttttatatctcgtgctctacccgttttctttggcatcctggaccagggctggacaaaaaaaactcaa

SEQ ID NO: 18214 - DNA, 1048 bp, Zea Mays
ttctgatgaatcagcttgattcgtttgcatgttgttgatggaatttataccagaatgggtgattagttctatcaacaaggaataagtaccttccatgaagagatgaaggaagcttcaaacatactgcataactgctcatctcgatccctagttatcatcgatgagcttggtcgaggcacaagcacacatgacgagagaatttgaaggttctgttggggcataccatgtttcatatctagccactaggaagcttttggaagtgaccgataaacaggtggaaactagcccagaggcaaatgatcttggagaaattattttcttgtacaaacttgttgctggagcttcagatagaagctttggacttaatgttgccctgcttgcacagatgtatcaagagggcatccgtcatggcagccaaactgcaagaggagttaagtccgcgggaggaaatcaagcttcggaggacaacggatgcacaaactgtggacggaccatctgaaagttccgcagaagttggtttgttttgtgcacatccttatcaacgattggcagaaacatgtcgcaggatactgctgaacatcacgttggctcaaagcaataatgatgtaacgaacacacttccttctttgaaaaatgcacaggaaattgcacagaagacgatatgatgcagcggtccatttgacaactgacatattcttcatcagtgtgaagggaacttatcaggtatcatgtacctttttttgctacggaggatccctaatggtggtaagcattttgctggagccgtttgtgtaacccatactctgccaggatagcgtggttaagcattttggtcacaactcaaagcagtgcctgtgtgtagttggagtgaactccgtgatatatactggagtacttagtatgtaactctatattccgttcattaatttatctagaactcgtttcgttgatgtaaatgcagagaagggacgtgtttactttttttatatctcgtgctctacccgttttctttggcatcctggaccagggctggacaaaaaaaactcaa

SEQ ID NO: 18215 - DNA, 2109 bp, Zea Mays
  misc_feature (2108)..(2109): n is a, c, g, or t
gcaccgcacgcccccacatttcccgcgccaaccgaccaggcgaacggcggccacgcccacgccatgggcaagcccaagcagcaagtgctctcccgcttcttctcccccaagcccgcgcccgtgctctcgtccgccgcccccgacccgccgcctccgcttcctcccaaccccaaaccctccgcggcgcatccgcccgtctctaccgtcgcctccttctcccccgctaaacgcgcgcgcgcgctctcactctcccccaaatcccccgccgccaaacggcccaatcccacccctcctccttcccgagacgccgtccgccgcaggctcctggagccgctccaccaggagccgcctcgcctcctggaccctacaggtggcggcaagggctacaccccgctggagcagcaggtggtcgacctcaaagcccgccaccccgacgttctcctcatggtcgaggtgggctaccgcttccgcttcttcggcgaggacgccgccgtcgccgccgcggtgctcggcatcgtcgcgcacccggaccgcagcttcctcaccgccagcgtccccaacttccgcctcggcttccacgtccgccgcctcgttgccgcgggccacaaggtcggggtcgtgcgccagaccgagaccgccgccatcaaggccgcggccaggggcgtcggaggcgccccgttctcgcggggcttgtccgcggtctacacgcgcgccacgatcgaggccgcggcaggcgagctggagggtggcggcgccgccgcgcccgaggaggggagcagctaccttgtctgcatcgtggataaggaggtggaggcggcggggagggaggggctccaagtgaaggttgggttggtggcgattgaggtgtccacgggtgaggttgtccacggggagttcctggacagcgactccaggagcggactcgaagctttgctgcttggattggcgcccgtggaggtcatcctcgggacaccactctcttttgccacagagaagattatgatggcatatgtgggacccacctctaatgtgcgggttgagcgtgtatcatgtgaatggtttggcaaagatgctgctttggctgaactgataactttatttgaaaagtctgtaaacaatgcttctagggctgaagatgataggaagctgatagaaacaaatgatgataacaacaattttcatgggattgagggtatcatggcgatgccagagctagttgttcaagcattagcattatcggttcggtatctcaaagaattttccttatcagcaaatgctcttcaacaacttgaggtagtcttttgcagcactttcaaagtaaaagttcctgttttgatatttattacaattctttctcaggtattcaggaacaactcagatggtacaacagaagggtctctgttccaaattatgaacaatacatgcacatcttttgggtctagattgcttagaaactggttaacacgtcccttatgcaatagacatctgatttgtgctcgtcacgatgcggtatctgagatttttgaatcaatgggaccacaacattcagttaacaatctgcaggatggaggggatagatcctgcacagcttcagtgcttagtgatttgtgtattgtcctttcgtcagttttggcattgctgggaaggtcacctgacattcaaagaggaataagtaggatttttcattgcaaagctacagctaaagagtttgttggcgttatccagtctatcctcacatctgggaagcagctacagaagcttgttcttgaggatattggcattgtctcgtctccgcataaatctgtgcactcccctttgctaagaaggctaataaatacagcttcatcatccaccatacttaatagtgctgtgaaacttctgtcttgtcttaacaaagatgcggctgatcaaggagatatgctaaacctgttcattgcatctgtggatcagttcccagaggttgcagaaggtcatgtaaatgtaaaaatggctgaacataaacttgatttgttgattgtggagtaccggaagcaatttgctatgcacaacttggagtttaaaactgtagctggaaccacccatttaatcgaactaccagtagatagaann

SEQ ID NO: 18216 - DNA, 1794 bp, Zea Mays
  misc_feature (1793)..(1794): n is a, c, g, or t
gcaccgcacgcccccacatttcccgcgccaaccgaccaggcgaacggcggccacgcccacgccatgggcaagcccaagcagcaagtgctctcccgcttcttctcccccaagcccgcgcccgtgctctcgtccgccgcccccgacccgccgcctccgcttcctcccaaccccaaaccctccgcggcgcatccgcccgtctctaccgtcgcctccttctcccccgctaaacgcgcgcgcgcgctctcactctcccccaaatcccccgccgccaaacggcccaatcccacccctcctccttcccgagacgccgtccgccgcaggctcctggagccgctccaccaggagccgcctcgcctcctggaccctacaggtggcggcaagggctacaccccgctggagcagcaggtggtcgacctcaaagcccgccaccccgacgttctcctcatggtcgaggtgggctaccgcttccgcttcttcggcgaggacgccgccgtcgccgccgcggtgctcggcatcgtcgcgcacccggaccgcagcttcctcaccgccagcgtccccaacttccgcctcggcttccacgtccgccgcctcgttgccgcgggccacaaggtcggggtcgtgcgccagaccgagaccgccgccatcaaggccgcggccaggggcgtcggaggcgccccgttctcgcggggcttgtccgcggtctacacgcgcgccacgatcgaggccgcggcaggcgagctggagggtggcggcgccgccgcgcccgaggaggggagcagctaccttgtctgcatcgtggataaggaggtggaggcggcggggagggaggggctccaagtgaaggttgggttggtggcgattgaggtgtccacgggtgaggttgtccacggggagttcctggacagcgactccaggagcggactcgaagctttgctgcttggattggcgcccgtggaggtcatcctcgggacaccactctcttttgccacagagaagattatgatggcatatgtgggacccacctctaatgtgcgggttgagcgtgtatcatgtgaatggtttggcaaagatgctgctttggctgaactgataactttatttgaaaagtctgtaaacaatgcttctagggctgaagatgataggaagctgatagaaacaaatgatgataacaacaattttcatgggattgagggtatcatggcgatgccagagctagttgttcaagcattagcattatcggttcggtatctcaaagaattttccttatcagcaaatgctcttcaacaacttgaggtattcaggaacaactcagatggtacaacagaagggtctctgttccaaattatgaacaatacatgcacatcttttgggtctagattgcttagaaactggtttgttggcgttatccagtctatcctcacatctgggaagcagctacagaagcttgttcttgaggatattggcattgtctcgtctccgcataaatctgtgcactcccctttgctaagaaggctaataaatacagcttcatcatccaccatacttaatagtgctgtgaaacttctgtcttgtcttaacaaagatgcggctgatcaaggagatatgctaaacctgttcattgcatctgtggatcagttcccagaggttgcagaaggtcatgtaaatgtaaaaatggctgaacataaacttgatttgttgattgtggagtaccggaagcaatttgctatgcacaacttggagtttaaaactgtagctggaaccacccatttaatcgaactaccagtagatagaann

SEQ ID NO: 18217 - DNA, 1786 bp, Zea Mays
  misc_feature (1785)..(1786): n is a, c, g, or t
gcaccgcacgcccccacatttcccgcgccaaccgaccaggcgaacggcggccacgcccacgccatgggcaagcccaagcagcaagtgctctcccgcttcttctcccccaagcccgcgcccgtgctctcgtccgccgcccccgacccgccgcctccgcttcctcccaaccccaaaccctccgcggcgcatccgcccgtctctaccgtcgcctccttctcccccgctaaacgcgcgcgcgcgctctcactctcccccaaatcccccgccgccaaacggcccaatcccacccctcctccttcccgagacgccgtccgccgcaggctcctggagccgctccaccaggagccgcctcgcctcctggaccctacaggtggcggcaagggctacaccccgctggagcagcaggtggtcgacctcaaagcccgccaccccgacgttctcctcatggtcgaggtgggctaccgcttccgcttcttcggcgaggacgccgccgtcgccgccgcggtgctcggcatcgtcgcgcacccggaccgcagcttcctcaccgccagcgtccccaacttccgcctcggcttccacgtccgccgcctcgttgccgcgggccacaaggtcggggtcgtgcgccagaccgagaccgccgccatcaaggccgcggccaggggcgtcggaggcgccccgttctcgcggggcttgtccgcggtctacacgcgcgccacgatcgaggccgcggcaggcgagctggagggtggcggcgccgccgcgcccgaggaggggagcagctaccttgtctgcatcgtggataaggaggtggaggcggcggggagggaggggctccaagtgaaggttgggttggtggcgattgaggtgtccacgggtgaggttgtccacggggagttcctggacagcgactccaggagcggactcgaagctttgctgcttggattggcgcccgtggaggtcatcctcgggacaccactctcttttgccacagagaagattatgatggcatatgtgggacccacctctaatgtgcgggttgagcgtgtatcatgtgaatggtttggcaaagatgctgctttggctgaactgataactttatttgaaaagtctgtaaacaatgcttctagggctgaagatgataggaagctgatagaaacaaatgatgataacaacaattttcatgggattgagggtatcatggcgatgccagagctagttgttcaagcattagcattatcggttcggtatctcaaagaattttccttatcagcaaatgctcttcaacaacttgaggaacaactcagatggtacaacagaagggtctctgttccaaattatgaacaatacatgcacatcttttgggtctagattgcttagaaactggtttgttggcgttatccagtctatcctcacatctgggaagcagctacagaagcttgttcttgaggatattggcattgtctcgtctccgcataaatctgtgcactcccctttgctaagaaggctaataaatacagcttcatcatccaccatacttaatagtgctgtgaaacttctgtcttgtcttaacaaagatgcggctgatcaaggagatatgctaaacctgttcattgcatctgtggatcagttcccagaggttgcagaaggtcatgtaaatgtaaaaatggctgaacataaacttgatttgttgattgtggagtaccggaagcaatttgctatgcacaacttggagtttaaaactgtagctggaaccacccatttaatcgaactaccagtagatagaann

SEQ ID NO: 18218 - DNA, 2169 bp, Zea Mays
  misc_feature (2168)..(2169): n is a, c, g, or t
agcctgatcacccggtgcaccgtgcaccggtaaaactgatgctgatcggctcgtgaggcccagttggaagccagagcgaccagtcggaagcccttaaaaacccacgtcgcggttgcgggcgcacccgcaccgcacgcccccacatttcccgcgccaaccgaccaggcgaacggcggccacgcccacgccatgggcaagcccaagcagcaagtgctctcccgcttcttctcccccaagcccgcgcccgtgctctcgtccgccgcccccgacccgccgcctccgcttcctcccaaccccaaaccctccgcggcgcatccgcccgtctctaccgtcgcctccttctcccccgctaaacgcgcgcgcgcgctctcactctcccccaaatcccccgccgccaaacggcccaatcccacccctcctccttcccgagacgccgtccgccgcaggctcctggagccgctccaccaggagccgcctcgcctcctggaccctacaggtggcggcaagggctacaccccgctggagcagcaggtggtcgacctcaaagcccgccaccccgacgttctcctcatggtcgaggtgggctaccgcttccgcttcttcggcgaggacgccgccgtcgccgccgcggtgctcggcatcgtcgcgcacccggaccgcagcttcctcaccgccagcgtccccaacttccgcctcggcttccacgtccgccgcctcgttgccgcgggccacaaggtcggggtcgtgcgccagaccgagaccgccgccatcaaggccgcggccaggggcgtcggaggcgccccgttctcgcggggcttgtccgcggtctacacgcgcgccacgatcgaggccgcggcaggcgagctggagggtggcggcgccgccgcgcccgaggaggggagcagctaccttgtctgcatcgtggataaggaggtggaggcggcggggagggaggggctccaagtgaaggttgggttggtggcgattgaggtgtccacgggtgaggttgtccacggggagttcctggacagcgactccaggagcggactcgaagctttgctgcttggattggcgcccgtggaggtcatcctcgggacaccactctcttttgccacagagaagattatgatggcatatgtgggacccacctctaatgtgcgggttgagcgtgtatcatgtgaatggtttggcaaagatgctgctttggctgaactgataactttatttgaaaagtctgtaaacaatgcttctagggctgaagatgataggaagctgatagaaacaaatgatgataacaacaattttcatgggattgagggtatcatggcgatgccagagctagttgttcaagcattagcattatcggttcggtatctcaaagaattttccttatcagcaaatgctcttcaacaacttgaggtattcaggaacaactcagatggtacaacagaagggtctctgttccaaattatgaacaatacatgcacatcttttgggtctagattgcttagaaactggttaacacgtcccttatgcaatagacatctgatttgtgctcgtcacgatgcggtatctgagatttttgaatcaatgggaccacaacattcagttaacaatctgcaggatggaggggatagatcctgcacagcttcagtgcttagtgatttgtgtattgtcctttcgtcagttttggcattgctgggaaggtcacctgacattcaaagaggaataagtaggatttttcattgcaaagctacagctaaagagtttgttggcgttatccagtctatcctcacatctgggaagcagctacagaagcttgttcttgaggatattggcattgtctcgtctccgcataaatctgtgcactcccctttgctaagaaggctaataaatacagcttcatcatccaccatacttaatagtgctgtgaaacttctgtcttgtcttaacaaagatgcggctgatcaaggagatatgctaaacctgttcattgcatctgtggatcagttcccagaggttgcagaaggtcatgtaaatgtaaaaatggctgaacataaacttgatttgttgattgtggagtaccggaagcaatttgctatgcacaacttggagtttaaaactgtagctggaaccacccatttaatcgaactaccagtagatagaann

SEQ ID NO: 18219 - DNA, 1678 bp, Zea Mays
gcaccgcacgcccccacatttcccgcgccaaccgaccaggcgaacggcggccacgcccacgccatgggcaagcccaagcagcaagtgctctcccgcttcttctcccccaagcccgcgcccgtgctctcgtccgccgcccccgacccgccgcctccgcttcctcccaaccccaaaccctccgcggcgcatccgcccgtctctaccgtcgcctccttctcccccgctaaacgcgcgcgcgcgctctcactctcccccaaatcccccgccgccaaacggcccaatcccacccctcctccttcccgagacgccgtccgccgcaggctcctggagccgctccaccaggagccgcctcgcctcctggaccctacaggtggcggcaagggctacaccccgctggagcagcaggtggtcgacctcaaagcccgccaccccgacgttctcctcatggtcgaggtgggctaccgcttccgcttcttcggcgaggacgccgccgtcgccgccgcggtgctcggcatcgtcgcgcacccggaccgcagcttcctcaccgccagcgtccccaacttccgcctcggcttccacgtccgccgcctcgttgccgcgggccacaaggtcggggtcgtgcgccagaccgagaccgccgccatcaaggccgcggccaggggcgtcggaggcgccccgttctcgcggggcttgtccgcggtctacacgcgcgccacgatcgaggccgcggcaggcgagctggagggtggcggcgccgccgcgcccgaggaggggagcagctaccttgtctgcatcgtggataaggaggtggaggcggcggggagggaggggctccaagtgaaggttgggttggtggcgattgaggtgtccacgggtgaggttgtccacggggagttcctggacagcgactccaggagcggactcgaagctttgctgcttggattggcgcccgtggaggtcatcctcgggacaccactctcttttgccacagagaagattatgatggcatatgtgggacccacctctaatgtgcgggttgagcgtgtatcatgtgaatggtttggcaaagatgctgctttggctgaactgataactttatttgaaaagtctgtaaacaatgcttctagggctgaagatgataggaagctgatagaaacaaatgatgataacaacaattttcatgggattgagggtatcatggcgatgccagagctagttgttcaagcattagcattatcggttcggtatctcaaagaattttccttatcagcaaatgctcttcaacaacttgaggtagtcttttgcagcactttcaaagtaaaagttcctgttttgatatttattacaattctttctcaggtattcaggaacaactcagatggtacaacagaagggtctctgttccaaattatgaacaatacatgcacatcttttgggtctagattgcttagaaactggacatctgatttgtgctcgtcacgatgcggtatctgagatttttgaatcaatgggaccacaacattcagttaacaatctgcaggatggaggggatagatcctgcacagcttcagtgcttagtgatttgtgtattgtcctttcgtcagttttggcattgctgggaaggtcacctgacattcaaagaggaataagtaggatttttcattgcaaagctacagct

SEQ ID NO: 18220 - DNA, 804 bp, Zea Mays
ttgaaacggctgcgagatggatcgtacggttcacgttaacagctgcccggtgtcccggaccatcctgtccatccctaaacgaagccctgccccgttctgaattgtgatcgagacgagacccttcgaccttcgcaacgcctccccagcaacctctgctccgccgcctccggcgaccgccggaacccgtggtggaggaggacgtggagagggaagatctcgccagatccaaggaggtggggacaagatggtgagctcctcgtcgtcggtggttaacgtgtacccgctcgccaactacacgttcggcaccaaggagcccaagatggagaaggacacctccgtcgccgaccgcctcgctcgcatgaaggtcaactacatgaaagaaggaatgcgtacaagtgttgaagcaatcctattggtgcaagagcacaaccaccctcacatactgctcctgcaaatcggaaatacattctgcaaacttcctggtggacggttgaagcctggagaaaatgaaatcgaaggtttgaaaagaaagttgtgcagcaaacttgctgtgaactcgccttcctttccacctaactggcaggttggagagtgtgttgctgtgtggtggaggccgaattttgagactgtgatgtatccttactgccctccacatatcaccaagcccaaggagtgcaagaaacttttcatcgttcacctatccgaaagagagtattttgctgttccaaggaatttgaagctgcttgctgttccgctctttgaactctacgataatattcaggaatttgttaaattttgtttctg

SEQ ID NO: 18221 - DNA, 1743 bp, Zea Mays
ctcagctcagccagccgcacaagccccaaacagaaagagactcacccaccgcgccacgcaacagcccatctccgctctgctctctcgcccaccccgattcccccccatggctatggcgacgacggaggccaccacgctgacggcgctgctcaaggaggcggcggccgccttcccgacccgccgcgcagttgccgtaccgggcaggctggagctcacgcacgccgccctcgacgctctcgtcgacgcggcggccgcacgactcgccgccgacgccggagttctcccgggccacgtcgtcgcgctttccttccccaacaccgtcgagctggtgatcatgttcctggcggtaatccgcgcgcgcggcgtggcggcgccgctcaacccggcctacacgcaggaggagttcgagttctacctctccgactcggaggcgcgcctcctcgtcaccaacgcggagggcaacgcggcggcgcaggcggccgctgccaagctcggcctcgcccacgccgccgccagcctccacgacgcggccggccctgtccacctcgccggcctcccggcccatgctccggagaacgggtcccacggcggcggcgcggcgggctctctctcccccaacgacccgtcggacgtggccctgttcctgcacacctccggcacgacgagccggcccaagggcgtgccgctgaagcagcgcaacctggcggcgtcggtgcggaacatccggtccgtgtaccgcctcgccgagacggacgccacggtggtggtgctgccgctgttccacgtgcacgggctcctctgcgccctgctgagctcgctggcttcgggcgcgtccgtggcgctgccggcggcggggcggttctcggcgtccacgttctgggccgacatgcgggcgtcgggcgccacctgctgcagcgcgtcgctggcgccggcgatcctggagcggctggaggcggcgttcagcgcgccggtgctggaggcgtacgcgatgacggaggcgtcgcacctgatgacgtcaaacccgctgccggaggacgggccacggaagcccgggtcagtggggcgcgcggtggggcaggagctggcggtgctggacgaggaggggcggctcgtggcggcggggagccccggggaggtgtgcgtccgcggggacaacgtgacggcgggttacaaggggaacccagaggcgaacgaggcggcgttccggttcgggtggttccacacgggggacatcggcgtggtggatgaccaagggtacgtccggctggtggggcgcatcaaggagctcatcaaccgcggcggggagaagatctccccgatcgaggtggacgccgtgctgctgggcctccccggtgtggcgcaggcggtgtcgttcggggtgcctgacgacaagtacggggaggagatcaactgtgcggtgatcccgcgggacgggtcggcgctgcgggaggaggaggtgctggcgcactgccggcggaacctggcgtcgttcaaggtgcccaagaaggtgttcatcacggacgacctgcccaagacggccaccggaaagatccagcgccgcatcgtggcgcagcacttcgtgcagccgaccagtgcctgatcgttgatcctggtgcttgccaagtcatgggtcgacggattggaatttcgctacactagctagcattttgccgttgttcccgcattgcgaggtggacatggcctgactgaacctgaataaacaaacacatgcatcgtcaaata

SEQ ID NO: 18222 - DNA, 932 bp, Zea Mays
atatatacgcacacgcggtgggagtgggagggggagactctgccctgaccacagcaaacaacctcctctttcctttccatccatcggaccatcgatcacaattttcatggcggtcaaggactgcggcgggcacaagggctgcgagtgcgagcgggagcggctgtaccggcggtgctgcgcggcggtcgtggctctgatcctcctggtcctcttcatcgtgctcgtcgtgtggctggcgacggtggcggcgcgcaacccgaacgagcgcgtgggcgtgtactacgaccaggcggacgcgtacgcggagtacaagggcgtggcgatcacggtgccgacgcggctgcccgtgcagtaccaggggccccgggacgcgtccgtgtggtccccgttcctgcgcgccccggaaggcggcgtgcagctcccgccgcagctggccgtggcgctggcgcaggacgagacggcgggctacgtgctcgtcgacgtccgcgtcgacggctgggtccgctggaaggtcggtaccagctggatctcgggtcactaccacctccgcgtcaactgccccgcgctgctcaccgtcaacgacggcaggggcagctacggcgccaacaccggcggcggcaccggatacttccgcttccagcaggcagcggcatgcgccgtagacgtctagcagtgctctctctctctctgtaccagctagctgtgtttgccaattcgtcgatcgaatcaaaggacgatgcttccttcgtcggtgttcatcactcacgcactagctagcttctttctgcgactgccgacttttcgtccggttggttggttggttggttggttgattgattgatatcactactatatcagctagcttttcgatcgatcgattcgtgtaaaagcaaagcaaaggaaaggaaatgaaaaaggctatcttttttttt

SEQ ID NO: 18223 - DNA, 955 bp, Zea Mays
atctcttttccaataacagggccgttccaaatttgaaactgacaggtcctagccgtgctgttctgctggtggatcctgtgactattgaggctgacctgaaagttaaaggccgtactgaatctgaggataaacacttgagctttctagcagtgccattcttggtcatgatcccgctcgagtcatgcctgcgtacaagagatttcaccagcaagcttagcacgctgaggtttgctctcgcaattgttgttctctcagtggaggctacaattagtgtgcgagttcgtggtgggtcatggcctgatggtctccgtgcccagtttgctgcccacacggtgagtataggtcgtgaggaagttgtcttgcttgattctggggacgataaactgcctgtttctgatgatggcactatcaaacttggtcgtcgagttgcatctgttgaagtgagtggggagctgaacgtttctgtcaaggcatggcaaggtggtgaagtctttacgcacagagagaggggtttcaaacctaaagaggcaggttggagttatggcactcttgacgttggcttctgccaaatggatgtatctgtggcctggtcgcttctttcgtcgtacggtgaaaatgaagctttgtaagagtcggtgttagccgtggtcgttgcttcgattctctagcatgtaatgataagttcacattgggatatgcttgctgttttgctgtaatgataagttcacattgggatatgcttgctgttttgctttttatttatttttcttgatcctctagcatgtaatagagtatcctccaagtagagtttttttttccttgatctccctgcataaagcccaagttgctcattgcttatcctaattgttttcttgtttctagtactgcaaggctaaacctggaattatgagtaactactgcacactggttgagcaaaaaaaaaaaaaataccaga

SEQ ID NO: 18224 - DNA, 5417 bp, Zea Mays
gtgatattgtggtctattagtgttagaacttgaagactgaacactgaagtttctaggtttgatggcctaaactttatctatgtactatttgtgaaattgtgtggtccactatttcagcatttaattttatttataatatttacgtatcgccgtatcggtgttttttgagaaatggcgtatcggggtatcggcgtatcgcgtatccgtatcgccgtatcagggcaacacagttgagcacccatttagggaggtccaaccgtccaaggctagcatagagtacacagggatggaagactaccactctcaccatcacaaggcgaccagcacggctcatgagcgatgccttccagcctggcagtttgttggatactttatcaacaaggggctgcagcgctgcatttgtcagtttccgaattgacagaggaagtcctaggtaattgcatggaaactcctttaactcacaaggcaacagctcagagataacagccaaatcatcgtctccacactggataggtgtgactgaacttttggtaatgttggtcttgaggcctgtagaatgcccaaaaatatcaaggagccgagtgaccataaggaggtcagatcttagtggccggaggaatatgacaacatcatccgcataaaaagaaatacgatgtttagcctgctgatgagcaatgggctgtaagagatgctcctgagttgcaaaatgaacaatagaatttagaacttccatgaccagtataaatagcatgggtgacagagggtccccttgacgaaggcctcgacggtgagagatgcagtccccaggttcaccattgattagaattctggtagaggatgtggacagcagcaaactgatcagattacaccacttgcgaccaaaaccaagatgttgcagaagctccaacaagaaagcccaggacacagaatcaaaggccttggaaatatccagttttaagagcacatgaggctccttatgatgtaacgtccttgcaagctgctgcaccatcaaaaaattatccaggatgctcctccctttgacaaaagcactttgattgatggtgacaagcttgggcagatgaggagccagacggttagcaaggagtttagccaccagtttagcaaaactgtgaattagactaataggcctgaaatccttgacatgtagggcttcagtctttttaggcacaagagtgatgaaagcggagttgataagcctgaaattgaaaacatggcccctctgcacagcgaggagcgcagccaagacgtcatccttgattgaattccaacagaccttatagaatcggcccgtgaaaccgtcaggccctggagctttgtccaatggaatctctctgatagtagcccagacctcttcctcagtaaatggcacctcaagctcagagaggtcatgctgctgcacgcctaaggaaagaaaatccagagtgaagtctctttgctcagccgaaccgatcaaagcatcataaaaatcgagggctgctcgaagtttgtcttccggagatgtgacaacccgatcattaacaataaacttggcaatgatttttttttcttgcggtaatgtgcctgttggtgaaaaaaggaggtattgtcatcgccctcccggaggtaaagaatacgggaacgtaatcttgcaaccgtgtgctcaagagaggccagatcgagggaatgcatctttaatttttttttctaaaacgctcctcatcagctgagagggcacggctatctcttgcaatttccaagcgatgtaagatttcattagccatttcaagctgcagcctaatgttgccgactttgtgttgactccatttttgtaagcctttactaaggcgctgaagtttcagaaatatgcgctccaccgggtagctagaagcaactggagcattccaattttgtgagacagcatccatgaaaccaggaagtttgggccagaaactttcgaaatggaaacgtcgtttgccctgagtgacaatattcagacccaggaccagagggcaatgatcagatactccagaagctgcactctggaggagagaatcaggaaaaatatcatcccagtcagcacagcaaaaggctctatcaagccgcacaagggtgggggacgacctctcatttgaccagcttggtagatcatgttgaagtcgcctgccagcaaccaagggccaacacagagagctctgacctctcttagctcctgcaagaattgtagcttcagatcatcctcttgggggccatagacaccagtgaaccaccaattcctaccctcttgctcacaaactggacagaaaccgaaaatctgtccacacgggaagagattgcatgacagcaggcccctttccaagcaatgaacacgccacctcgagtaccatcagcggggagagccacgaacttgtcaaaagcagacccaagagcagagaggaggagctgtgacgacacgcttgcaatcttggtttcttgaagacacacgatgtcagcgctggaggaaaggacagtgttgcgtacagagtttcgcctggccgtcagattgaggccccccgggtgttccagactaggatggatgacagattcatgaggaacacgaggcacgaccaaaaggacaaaggttcctcagaaaccgatcagcagctccctctccaggacgtcctcatcatgatctgtctgccaaccgaaaatagcagcaagagcagcaagctccacatcagacagaggcgtctcgaataattactatatacaatgtcgtgcaacaaaacgttcacccgtaacgccacgtcgccttcttaatatcagccatctgatatgcatcacacggttgttcctactcttccgcttatctctgctaggctgccctcgctccttttggaagcggcttcgtcgctttttcaccgacgacgccatcctttttcgccgccggcaacatctgtgagactgtgaccgcgtaaggttcctgcttcacttcgcgtcgcttgcgatttctctctcttcttctactttccagcctctctggcgatgcaccacagaggacacagcacgcatgcgacgagctccaagcagcttgcattatttggagctttgtctgcaagacgggagccttcggctgccttactcctcttcttcgccctgggcccgagctaggccggcgtggctgcaccgctccgtcctcgacaagcccgcgtcaccgagtgcctcgtcggagacagcactggcactgtcctcgtcgccgcccgcacgatcaggaatgttgcttgcggctcgctttgctctcctctctcgtcccggcgtggtcgcacccgcgcagcgcctccaatggcgacgacgacgaagacagcaagtctcagcatggggcgagtctgagtgcataggctacgccctagcaaagtcactgctaaggccgaacattgtacaccatggtggttatctctctccaattccatctactcaagaatgtctcactcatggatgatgcacaccacgtgctcgatgatttggctctataacaatttttggtgctagcctcagattatttctgtttgagagttatgtaaggtactactaactctgcattttttagttatggtttcgaaacatgtattttcaaaccatgactaatcaagtatattctccaccattaattcctctaggcatgacctggaaaactgcttagctgatgctgtaacattttgatgtctctgttctctgctttctggaggtgccatcccctctctttggggaggcttctggttaaacttgcttcagtcacgatgttactgtgctggataaagaagatgccaaagctgaactttgaggttgctaaaccatgcacccagaatcggagttttgtagttgaagctccatgtgagttgagatacttgcaactatacacaatagaatgttcttcgaacctcaagctgcagctcttgctccaactattacttgcctactttgtttttcctatcagtaatgcttgctgactcattgaaacaaaccagtctttcctttgtttggttttacattttgagagcttttcttaaaaacaaccggaggctggattggttatgtgcaaaactattatagaggccggaataaaatttctattttctaagaaaatagaaataaaccaaatacgagtccgagtccgactatgtgcaatgtacaagaatatcttaaaataagggagatactatcctacaggtgtttggttttcattttttcatgtttattatctatatgatcatgactcatatggctcaggtcatgttatctattgtagcgtcttcttgtctccctcgacattgcccgtctgcttccttgcgccttgcttgtgctgtgggctcccttgtctcgcctcttttccagccgtggccaattgtgtccattgctgggtttgccaccaccttcccgtgtcaaggcaaacccctccatttcgagcacgttccaaacccaaacttcacattgccttcttttgagagctacgttccaaatttgaaactgacaggtcctagccgtgctgttctgctggtggatcctgtgactattgaggctgacctgaaagttaaaggccgtactgaatctgaggataaacacttgagctttctagcagtgccattcttggtcatgatcccgctcgagtcatgcctgcgtacaagagatttcaccagcaagcttagcacgctgaggtttgctctcgcaattgttgttctctcagtggaggctacaattagtgtgcgagttcgtggtgggtcatggcctgatggtctccgtgcccagtttgctgcccacacggtgagtataggtcgtgaggaagttgtcttgcttgattctggggacgataaactgcctgtttctgatgatggcactatcaaacttggtcgtcgagttgcatctgttgaagtgagtggggagctgaacgtttctgtcaaggcatggcaaggtggtgaagtctttacgcacagagagaggggtttcaaacctaaagaggcaggttggagttatggcactcttgacgttggcttctgccaaatggatgtatctgtggcctggtcgcttctttcgtcgtacggtgaaaatgaagctttgtaagagtcggtgttagccgtggtcgttgcttcgattctctagcatgtaatgataagttcacattgggatatgcttgctgttttgctgtaatgataagttcacattgggatatgcttgctgttttgctttttatttatttttcttgatcctctagcatgtaatagagtatcctccaagtagagtttttttttccttgatctccctgcataaagcccaagttgctcattgcttatcctaattgttttcttgtttctagtactgcaaggctaaacctggaattatgagtaactactgcacactggttgagcaaaaaaaaaaaaaataccaga

SEQ ID NO: 18225 - DNA, 4738 bp, Zea Mays
gtgatattgtggtctattagtgttagaacttgaagactgaacactgaagtttctaggtttgatggcctaaactttatctatgtactatttgtgaaattgtgtggtccactatttcagcatttaattttatttataatatttacgtatcgccgtatcggtgttttttgagaaatggcgtatcggggtatcggcgtatcgcgtatccgtatcgccgtatcagggcaacacagttgagcacccatttagggaggtccaaccgtccaaggctagcatagagtacacagggatggaagactaccactctcaccatcacaaggcgaccagcacggctcatgagcgatgccttccagcctggcagtttgttggatactttatcaacaaggggctgcagcgctgcatttgtcagtttccgaattgacagaggaagtcctaggtaattgcatggaaactcctttaactcacaaggcaacagctcagagataacagccaaatcatcgtctccacactggataggtgtgactgaacttttggtaatgttggtcttgaggcctgtagaatgcccaaaaatatcaaggagccgagtgaccataaggaggtcagatcttagtggccggaggaatatgacaacatcatccgcataaaaagaaatacgatgtttagcctgctgatgagcaatgggctgtaagagatgctcctgagttgcaaaatgaacaatagaatttagaacttccatgaccagtataaatagcatgggtgacagagggtccccttgacgaaggcctcgacggtgagagatgcagtccccaggttcaccattgattagaattctggtagaggatgtggacagcagcaaactgatcagattacaccacttgcgaccaaaaccaagatgttgcagaagctccaacaagaaagcccaggacacagaatcaaaggccttggaaatatccagttttaagagcacatgaggctccttatgatgtaacgtccttgcaagctgctgcaccatcaaaaaattatccaggatgctcctccctttgacaaaagcactttgattgatggtgacaagcttgggcagatgaggagccagacggttagcaaggagtttagccaccagtttagcaaaactgtgaattagactaataggcctgaaatccttgacatgtagggcttcagtctttttaggcacaagagtgatgaaagcggagttgataagcctgaaattgaaaacatggcccctctgcacagcgaggagcgcagccaagacgtcatccttgattgaattccaacagaccttatagaatcggcccgtgaaaccgtcaggccctggagctttgtccaatggaatctctctgatagtagcccagacctcttcctcagtaaatggcacctcaagctcagagaggtcatgctgctgcacgcctaaggaaagaaaatccagagtgaagtctctttgctcagccgaaccgatcaaagcatcataaaaatcgagggctgctcgaagtttgtcttccggagatgtgacaacccgatcattaacaataaacttggcaatgatttttttttcttgcggtaatgtgcctgttggtgaaaaaaggaggtattgtcatcgccctcccggaggtaaagaatacgggaacgtaatcttgcaaccgtgtgctcaagagaggccagatcgagggaatgcatctttaatttttttttctaaaacgctcctcatcagctgagagggcacggctatctcttgcaatttccaagcgatgtaagatttcattagccatttcaagctgcagcctaatgttgccgactttgtgttgactccatttttgtaagcctttactaaggcgctgaagtttcagaaatatgcgctccaccgggtagctagaagcaactggagcattccaattttgtgagacagcatccatgaaaccaggaagtttgggccagaaactttcgaaatggaaacgtcgtttgccctgagtgacaatattcagacccaggaccagagggcaatgatcagatactccagaagctgcactctggaggagagaatcaggaaaaatatcatcccagtcagcacagcaaaaggctctatcaagccgcacaagggtgggggacgacctctcatttgaccagcttggtagatcatgttgaagtcgcctgccagcaaccaagggccaacacagagagctctgacctctcttagctcctgcaagaattgtagcttcagatcatcctcttgggggccatagacaccagtgaaccaccaattcctaccctcttgctcacaaactggacagaaaccgaaaatctgtccacacgggaagagattgcatgacagcaggcccctttccaagcaatgaacacgccacctcgagtaccatcagcggggagagccacgaacttgtcaaaagcagacccaagagcagagaggaggagctgtgacgacacgcttgcaatcttggtttcttgaagacacacgatgtcagcgctggaggaaaggacagtgttgcgtacagagtttcgcctggccgtcagattgaggccccccgggtgttccagactaggatggatgacagattcatgaggaacacgaggcacgaccaaaaggacaaaggttcctcagaaaccgatcagcagctccctctccaggacgtcctcatcatgatctgtctgccaaccgaaaatagcagcaagagcagcaagctccacatcagacagaggcgtctcgaataattactatatacaatgtcgtgcaacaaaacgttcacccgtaacgccacgtcgccttcttaatatcagccatctgatatgcatcacacggttgttcctactcttccgcttatctctgctaggctgccctcgctccttttggaagcggcttcgtcgctttttcaccgacgacgccatcctttttcgccgccggcaacatctgtgagactgtgaccgcgtaaggttcctgcttcacttcgcgtcgcttgcgatttctctctcttcttctactttccagcctctctggcgatgcaccacagaggacacagcacgcatgcgacgagctccaagcagcttgcattatttggagctttgtctgcaagacgggagccttcggctgccttactcctcttcttcgccctgggcccgagctaggccggcgtggctgcaccgctccgtcctcgacaagcccgcgtcaccgagtgcctcgtcggagacagcactggcactgtcctcgtcgccgcccgcacgatcaggaatgttgcttgcggctcgctttgctctcctctctcgtcccggcgtggtcgcacccgcgcagcgcctccaatggcgacgacgacgaagacagcaagtctcagcatggggcgagtctgagtgcataggctacgccctagcaaagtcactgctaaggccgaacattgtacaccatggtggttatctctctccaattccatctactcaagaatgtctcactcatggatgatgcacaccacgtgctcgatgatttggctctataacaatttttggtgctagcctcagattatttctgtttgagagttatgtaaggtactactaactctgcattttttagttatggtttcgaaacatgtattttcaaaccatgactaatcaagtatattctccaccattaattcctctaggcatgacctggaaaactgcttagctgatgctgtaacattttgatgtctctgttctctgctttctggaggtgccatcccctctctttggggaggcttctggttaaacttgcttcagtcacgatgttactgtgctggataaagaagatgccaaaggttccaaatttgaaactgacaggtcctagccgtgctgttctgctggtggatcctgtgactattgaggctgacctgaaagttaaaggccgtactgaatctgaggataaacacttgagctttctagcagtgccattcttggtcatgatcccgctcgagtcatgcctgcgtacaagagatttcaccagcaagcttagcacgctgaggtttgctctcgcaattgttgttctctcagtggaggctacaattagtgtgcgagttcgtggtgggtcatggcctgatggtctccgtgcccagtttgctgcccacacggtgagtataggtcgtgaggaagttgtcttgcttgattctggggacgataaactgcctgtttctgatgatggcactatcaaacttggtcgtcgagttgcatctgttgaagtgagtggggagctgaacgtttctgtcaaggcatggcaaggtggtgaagtctttacgcacagagagaggggtttcaaacctaaagaggcaggttggagttatggcactcttgacgttggcttctgccaaatggatgtatctgtggcctggtcgcttctttcgtcgtacggtgaaaatgaagctttgtaagagtcggtgttagccgtggtcgttgcttcgattctctagcatgtaatgataagttcacattgggatatgcttgctgttttgctgtaatgataagttcacattgggatatgcttgctgttttgctttttatttatttttcttgatcctctagcatgtaatagagtatcctccaagtagagtttttttttccttgatctccctgcataaagcccaagttgctcattgcttatcctaattgttttcttgtttctagtactgcaaggctaaacctggaattatgagtaactactgcacactggttgagcaaaaaaaaaaaaaataccaga

SEQ ID NO: 18226 - DNA, 3160 bp, Zea Mays
gacattccttgcccccctctgatttaccagcattcagcagcccccctctctccttccccaacactccaagctagtccaagaggcgagcagcagagagggaaagcgaatcccctcctctcctcctcccactcttcaatgctctccccgtcccctccgccatggacgccgccgccctcgccctctccatcatcctgctcgccgccgccgccgccaccactctcgcccgcggggccacgcacccggcggaccaggcggcgctggaggaccttcggaaatcgctgacgaacccggacgcgctggggtggcccgacgacggggacgcgtgcgcgtggccgcacgtctcctgcgaccgcaccggccgcgtcgacaacctcgacctcaagaacgccggcctggcggggacgctcccgccgtcgctcccctcgctcgcggcgctgcgcgacctcagcctccaggggaacagcctctctggcgcgctcccgtccttccggggcatggcgtccctccagcgcgccttcctcaacgacaacgacttcgacgccatcccgcccgacttcttcgacggcctcgccgacctgctcgagatctcgctcgccaacaacccgcgcctcaacgcgtcccagggcggctggacgctcccgcggggcctcgccgactcgtcgctgcagctgcaggcgctctccctcgacaactgcagcctcaccggcgggatcccggactccctcgcccgcctcacgggcctccagaacctcacgctctcctacaacaacctctccggccccgtccccgccgcgctcaacggctccgccatccagaggctgtggctcaacaaccagcaaggggacgccaagctctccggcaccctcgacgtcgtcgccaccatgaccggcctccaggagctctggctccacggcaacgacttctccggcccggtccccgacgccatcgccagctgcaaggaactctacaccgtcaggctcaacaacaaccagctcctcggcctcctgccgcccggcctcgccgcgctccccgcgctccgggagctcaagctcgacaacaacaacctactgggccccgtcccggcgctcaaggcccccactttcaccttctccgggaacgagttctgcgccgccaaacccggggaagcctgcgccccggaggtcatggcgctgctgcacttcctcgccgaggtgcagtacccgaacaggctggtcgggacctggtccgggaacgacccctgcgcgggctggctcggcgtcacctgcgtccagggcaaggtcactatgctcaacctgccggggtacggcctcaacggcaccgtcagccagagcctcgccaacgtcaccacgctctccgaagtgaacctcgccgggaacaacctcaccggccgagtgccggacagcctcaccaggctggcctcgctccagaagctggacctgtccatgaacgacctgtatggcccgctgcccgcattcagtcccaccgtggatgtgaacgtcaccggcaatctcagcttcaacacaacggatacgcagccaacggatgcgcagccaaacggcgagtccccgcggcctcgtcctacgcctggcgcatctgctggtgctgggggtaatactagtgcaggggggatccctgggagtgggaagaaggcctcatcagctgtgttgctgggcacaaccattccagtcgcggtgagcgtggtcgcactggtctccgtgggcgccgtgttcttgtgcaagagaagagcgtcggtgccgccgcaggcagcctccgtggtggtgcatccccgtaatagctctgatccggacaacctggccaagatcgtggaagaagcgtctcaacatcgccctggatgttgcccgtgggatggagtacctgcacaacctggggcaccaccgcttcatacatagggatctcaagtcagcgaacattctcctcggcgacgacttccgggccaaggtggcggacttcgggctcatgaaagatgcgccggatgggaactactctgtggcgaccagacttgccgggacgttcgggtacttggctcctgagtatgcagatctcgacgaaagcagacgtgttcagcttcggtgtagtgctgctggagctgataacagggacgacggccatcgacgacagccgcgtgggcgagggcgaggagacccggcacctggcgtactggttcagccagatacggaaggacgcggagcagctgcgcgcggcgatcgacccggccctggacgtgggcgacggcgagacaatggagagcatcggcgtgatcgcggagctggcggggcactgcacggcccgggagccgtcgcagcggccggacatggggcacgcggtgaacgtgctggtgcccatggtggagaagtggaggcccgtgaaggacgaggccgaggactacctgggcatcgacctgcacctgccgctgctgcagatggtgaagagctggcaggacgcggaggccggcggcctgacggacggcggcgggagcgtcatgagcctggacgacagcaagggcagcatccccgcccgccccgccggcttcgccgagtccttcacctcggccgatggccggtgatcggatgcatgcaatgcatgcatccatgtgtctctcaaatgtctctcgtctcccggtccctcccttgcctgttttcgcacattcgttgctgtaggtacaaaagaaagcagtacatgggatcgtcgtccatgtgcacaaccttgtgcttcttcttcttctcctgctctgctttgcctgtgcttcttcctctcctgctctgctctgctctgctttgtagatacatgattttttttttgcattggtggtaggcatctcttttgcttcttttttctgtgtaattccagtcagtgttgagactcgagtctctggctttttccgtcgaacagaatctggtcgctggtcggtcaagacataatgcttcctccatacctgatgaagcatgcatgcaaatggatggaggtggtagcagcagcaggagtactgcacgcacaatgaatggaccgtctagtctagtccggtccagcaatgatcaatgagtgtcatttttcttttttgctgaggggacacatcatcgtcatcaacctacattacatgatgtagaatcagatgggccagctggcatgcaatgcattaact

SEQ ID NO: 18227 - DNA, 1173 bp, Zea Mays
ctggaacttcatttaaccacacttccagcgatcatgattcatgaatattttgtctccctccatgtcccaattgacttgtactctagtaaagtgaacatcacagacatgttggaatatatctgcctagttacgatttattgcgcaattggattgaagaatactcggaccgcaattgtcccaagcttagaccatatgctcctcttatttctggctctattgcacgatcattggcatgcataacttgttgccctattgagttagcaagaacacgtatgcaggccttcaaagaatcaaatgttggagggaagccccctggaatgtggaagaccttgataggtgtgctttcatcaagacagagcatcaagagccctgaaaacgtgcgaggataccacctcctatggactggtctgggagcgcaactagcacgcgatgcgccctactcagctatatgctggacagttcttgaaccaattagacgacatgtgacacgactattcggtgatcaaagcaacgcgacagttatattgggggcgaacttttctgcaggctttattgctggggttatctctgcgggcgctacctgccctcttgatgttgccaagacacgcagacaaatagagaaggatcctgaaagggtattgagcatgaacacaaggcgcatattgcttgaggtttggaggaaggaaggtgtggaaggtctgttcagaggcgcaggccctcgaatggggcgcgcaggcccgtcggtgggcatcgtcgtctcctcctacgaagttgtgaagcacctcatgcacaagaacacgagcaatgcagcagacctatgattcgatgagctcgattagcacgccctaatggcacaagtaggattaggaatgtcgctattcaaagaaacacatttttttacggtagtccatgacagataaatgttatccctccattccattacaaactgttacttctaagatgggtttttatgcatctagtggctagcttataacctgagttatatcgcaacgagatctacgtatctagccacgtatgtagtggctaggattttatgtacaagtggcaaaggtttatgttctaacagattgctcaacacatgagtcgcacactatgtaattaaaattaaggtggtgaaccgaaatataacgtaaatgtgctatttggttcctt

SEQ ID NO: 18228 - DNA, 1610 bp, Zea Mays
gtcgcgaacttgttacgtgtcactttctctcgggaggcgacgtgtcgagtggagcgacgtctccaccatcttcttgccttttcctccatccccgcccttacgaatttctccgcgatttcagcgcgcttcctcccgccggctcctccccccgcctccgctctcaccgcggccggccagccatggagcaaggccaggggccgccgccgccgaagccgcctgcgacggagcgcgacatcggattcgccgagcgggccgtggcggcggcaggcgcggccgtcgtgtcagccgtcctcgtcaaccccctcgacgtcgccaagacgaggttgcaagcacaagctgctggagttgtttataacccgattttaggtgctatccatcatgcagcactggtggaatcaatggtttaggcccatgctcgtcctgcagtcctgaatgctttcagtacagaggaactatggatgtgttctctaaagtcactagacaggaaggaatttttagactatggagaggtactggtgcaagcctggcattggctgtaccaacggttggaatatatctgcctagttacgatttattgcgcaattggattgaagaatactcggaccgcaattgtcccaagcttagaccatatgctcctcttatttctggctctattgcacgatcattggcatgcataacttgttgccctattgagttagcaagaacacgtatgcaggccttcaaagaatcaaatgttggagggaagccccctggaatgtggaagaccttgataggtgtgctttcatcaagacagagcatcaagagccctgaaaacgtgcgaggataccacctcctatggactggtctgggagcgcaactagcacgcgatgcgccctactcagctatatgctggacagttcttgaaccaattagacgacatgtgacacgactattcggtgatcaaagcaacgcgacagttatattgggggcgaacttttctgcaggctttattgctggggttatctctgcgggcgctacctgccctcttgatgttgccaagacacgcagacaaatagagaaggatcctgaaagggtattgagcatgaacacaaggcgcatattgcttgaggtttggaggaaggaaggtgtggaaggtctgttcagaggcgcaggccctcgaatggggcgcgcaggcccgtcggtgggcatcgtcgtctcctcctacgaagttgtgaagcacctcatgcacaagaacacgagcaatgcagcagacctatgattcgatgagctcgattagcacgccctaatggcacaagtaggattaggaatgtcgctattcaaagaaacacatttttttacggtagtccatgacagataaatgttatccctccattccattacaaactgttacttctaagatgggtttttatgcatctagtggctagcttataacctgagttatatcgcaacgagatctacgtatctagccacgtatgtagtggctaggattttatgtacaagtggcaaaggtttatgttctaacagattgctcaacacatgagtcgcacactatgtaattaaaattaaggtggtgaaccgaaatataacgtaaatgtgctatttggttcctt

SEQ ID NO: 18229 - DNA, 1534 bp, Zea Mays
acacgtcgtcgcgaacttgttacgtgtcactttctctcgggaggcgacgtgtcgagtggagcgacgtctccaccatcttcttgccttttcctccatccccgcccttacgaatttctccgcgatttcagcgcgcttcctcccgccggctcctccccccgcctccgctctcaccgcggccggccagccatggagcaaggccaggggccgccgccgccgaagccgcctgcgacggagcgcgacatcggattcgccgagcgggccgtggcggcggcaggcgcggccgtcgtgtcagccgtcctcgtcaaccccctcgacgtcgccaagacgaggttgcaagcacaagctgctggagttgtttataacccggtgctatccatcatgcagcactggtggaatcaatggtttaggcccatgctcgtcctgcagtcctgaatgctttcagtacagaggaactatggatgtgttctctaaagtcactagacaggaaggaatttttagactatggagaggtactggtgcaagcctggcattggctgtaccaacggttggaatatatctgcctagttacgatttattgcgcaattggattgaagaatactcggaccgcaattgtcccaagcttagaccatatgctcctcttatttctggctctattgcacgatcattggcatgcataacttgttgccctattgagttagcaagaacacgtatgcaggccttcaaagaatcaaatgttggagggaagccccctggaatgtggaagaccttgataggtgtgctttcatcaagacagagcatcaagagccctgaaaacgtgcgaggataccacctcctatggactggtctgggagcgcaactagcacgcgatgcgccctactcagctatatgctggacagttcttgaaccagctttattgctggggttatctctgcgggcgctacctgccctcttgatgttgccaagacacgcagacaaatagagaaggatcctgaaagggtattgagcatgaacacaaggcgcatattgcttgaggtttggaggaaggaaggtgtggaaggtctgttcagaggcgcaggccctcgaatggggcgcgcaggcccgtcggtgggcatcgtcgtctcctcctacgaagttgtgaagcacctcatgcacaagaacacgagcaatgcagcagacctatgattcgatgagctcgattagcacgccctaatggcacaagtaggattaggaatgtcgctattcaaagaaacacatttttttacggtagtccatgacagataaatgttatccctccattccattacaaactgttacttctaagatgggtttttatgcatctagtggctagcttataacctgagttatatcgcaacgagatctacgtatctagccacgtatgtagtggctaggattttatgtacaagtggcaaaggtttatgttctaacagattgctcaacacatgagtcgcacactatgtaattaaaattaaggtggtgaaccgaaatataacgtaaatgtgctatttggttcctt

SEQ ID NO: 18230 - DNA, 518 bp, Zea Mays
cttactttctctccccagctcctttcctcaaacatcatcctcaattatactgtttatcagctttcctttaattaattgttttgagcggctgttttctgcattttagagagaaatacatagtcgacaagacgcctgcagtttagaaagggtgaagaagttttcgctggcagaaccaagctccaccacaaccaccgaagctctgaagagcgatacgaagccctgagcattctgcaaagaaaactgtatcatctgattgggcgcggttgatgataagtctatgcctgttaatgtagcgttagatttgtacttttgaacccatgccagatgtacttgtgccagaaatcaccaatctgttgaactgaaaacgttacccgatgtccacacaaatgatacagtccatgatgccatttcgataagaaaggcaccatccatccaaggttttctaacattttgctgcgctgttgcttgaccgatgaatgttatgctggcccaatgcaatgcaactcagatttgcatca

SEQ ID NO: 18231 - DNA, 4908 bp, Zea Mays
ccgctccgccgccggcactcaccccagctgcactcccgtgggccgtgccgccgtggcacgccggcgcggcggatgcagtcgccacgaatcaggacaagcagcaggcgccaaaacccaaaccaattccctcccttccgttcctactacgatacccacctcgacgcgccgtctcgccggcgacgtcactggcaagtaccaaactgcccctacctcctcccgcttagttctataaatacgggggggtcgtcttcctccacaagattctgccaaaagatcctctcggatgcccccgcccccgcccacccatttcgccagtcgccatcgagctctcgcttccgccgcccgctgccgctctatcaccccggtgctgagccctaggatgtgactggcggacgtctctatggccgagccgtaggtggaggcggcacctcggcgccgtgggagatggaggacgatgacaccgagggtgtaggcgagagcacctgtccccccgccgccgaccgaggaggctcctcctcggccggcggcggcggcggcgactcgcacagttacactgacatagagaaggaggtcttcgaccgtctcatggagaagagaatcccggaggtcgtcgcggacccggtggccttccgcgaagagctccgccgccacttcgagcgcctgccgctgagctacgccgtcgatgtgaacgtcgacaaggcggaggacgtgctgctgcaccggaggattctcaacgagtgcgctcaccctgaaaatcgccccatcttccatgtgggcttcctgaactgcatcccgccctcggtggatccacagtataacactcagtccatctctacgagcgaaaacggtaattgtgggggttctcaggattccactttgagaaaatttgagccatgcgaagggatcgaggacctcagtttaactggacaaaaagttgtggttgactctgtggccagttcttcgaggggagatgaagaaatcctccatgttcatgaaattattttttctaccattgacaaaccaaagctcctcgctcagctatctgctttgttgtctgaagttggactgaacatccgtgaagctcatgtcttctcaacgactgatggcttttgtttggatgtatttgttgttgatggctgggatacaaaggagacagatactttgctacagattctcaaggagacagcggcacgaaatcatgcctcattatcaaacccaaccaattctgcagcctcagaaagagtactggaactacaagagaagattggtgattcaaatattgacaggaattttctgcagattggggagaagattgcatctggatcttccggggacttgcatcgaggaacttatcaaggtatggatgttgcagtaaagttcctcagaaccgaacatgttaatgactcgtcaaaggtggagtttttacaagaaataattattctaaagagtgttaatcatgataatgttgttcgattctacggggcatgcacaaagcagagaaaatatgtcatcgtgacagagtatatgcctggaggcaatctgtatgattttcttcacacgctaaaaaatactttggatctcccaacggttctcaggattgctatcggcatctccaaggggatggattatttgcaccaaaataacatcatccatcgggacttgaagactgccaatttgcttatgggctctgattatgttgtgaagattgcagactttggagtctcaaggaatccatctcaaggtggagacatgactgctgaaactggtacctacagatggatggcacctgaggtaataaaccataagccgtacgatcacagggcagatatcttcagctttgctgtggttctgtgggagctggtcacttcaaagataccatacagaaatctgacacccttgcaagctgcactgggagtaaggcagggaatgcggttggagatcccgtcatgggtcaatccacaactgtctaaactgattcagcgttgctgggacgaaaatcctaacctgcgcccctctttctcagagatcactgcagagctggaaggcatgttaagggatcatcaggcctccaagggaagcaacaaacattcgaaggcaaaggcacacaaaaaatcgcagagagaggcagaataacgaggttgtcagttaccaccttgtgaaaagcttagtggagcttggctatcatcgtccaagattctgaggctactacaaagatgctgctagtgtacaattgtcaaatattgtatatgattggtgtgtgtgtgtgtttctattactcccaaaaacactatatacgggagaagcgtcgacaatacagcgggacaagcaaagacacggaatccttgtacaaaatggcttgcaagcagcataaaatgccctctagtttttgtatacaaaacatgaaaaatatatgtgcatgagccgtgcgtgcttcctgtgattctgtatctccatgaatcctgttctttgattctacatctcctgccaaagttacatttcttcttgaatctgaaagtagctctgacgttttctttctgtttcatgagccattgcattcttgggcctggtctgtttgctctataagggcagtaggagaaagggcccacataacgatcatgggccgttatcgtatttacttacgtgatttgccgtgctctcccgtcttctcgcgatggggagcaccggcgacacgacgatggccgaggcggaggcgccggcgccggtgggtgactacgagctgctggagcgcctgggggggcgtcccccgtacacgtccgtgtggcgagcggtctcccggtccaccggcacgcccgtggctgtgaagcaggtgcggctcaccggcctccccgcgcgcctccgcgacagcctcgactgcgaggtccgcttcctcgccgccgtcagccaccccaacatcatccgcctcatcgacgtcgtccagacccagagctgcctttacctcgtcctggagctctgcgagggcggggacctggcggccttcatccggcgcaatgggagcgtagacgagcgcgtggccagaaattttatgaaacagatcggagctggcttacaagtgctgcaccggcaccatgtcgtccaccgggacttgaaacctcagaatatcctgctctcttctccgagaagcagcgatgcgatcctcaagatatctgattttggtcttgcaaggtttcttggacccggggagtacgcagacacatcttgtggttcttgtttgtacatggccccagaagtgatgctgtttcaaaagtacaatgacaagacatgtggagcatcggcgcgatcctatttgagctcttgaatggctacccgccattctatggcagaagcaacgtgcaggtggctgcccctcttgtctatctggaattctgaattcaacaacactgatggccgtctcccttcagctgcttcagtacatcaacagaagcacgtctctcccgttctcggaaccactggcgtctaccttaggccccgattgtgtcgatatatgcaccaggctactatgcactaatccagtgaagcgtctgtccttccaagagttcttggaccaccgcttcttcagagtatgagtgcccaagccatggggaccaccgggcagcgacatgatctgaagaacatcaagaagtttcttgtccttggagtgctgactgactctgttataaagcgttcagaaattgatgcccagtgctcgtcgtcttggttttctgttcgcgtccatttccttctccaaagagccatgtggccaacgtttcaatctgttgtgatctggtctgtactgtttcaatctgctaacagtaggagttttaaagatatttagtccaaaacagaactccatcttttattcaaagcggcataaactatcccattttattgagcaaacatatgcctatcctttccttgtaccaaagaaaaaactacagggagacaaacaaaccacagaaatgcgaagtggctatcggttcagccactaaactttcaattcaacatcaacaataacccagacaccatgctctcttacgctcggctcgacttctaataaaatgcaatgaatcaagtaccagcatgcatcagttcacagcagccacttccttcagtgactccactgtcttcaagacttcctcccccatccgcttgcatccaaccagtgtctgccaattgataacatgagccactcagaacgagatgaatcaaaattcaaatacaattcatgacttcgcaaactagccactattttcttccacgagactacgaaagagttaatatacttgaggcactatgaaccagagccaacaaagatactatattacactacctgaatgtttgactaatgaggatcttcataccttgtctaggtgaggaccaagtacttgacattaaacatgtagagtataaagctaaaacgctttagccttttttttaatagaggtgggaatagaacttcattaagagaactaaacaatgcaaaagcatgaatgttggattcactccaccaaaattcatgggatggactcatgatggaccatcacaatctcaactaaggatggggtgattcctcaaaccagacacactcgtaatccattgataatggttctgcaagaaaatctatcttactgttccaggagaatatatgtccccagttcggaacccatggttcagtgtttctgtaactgcagcttcaattctcctcgcagcattttcttctcctaggccatatcgcaatagcatcgctgcgctaagaattgtagctaatggattggccttgtcctgcactcaacacataataacaggaggggaagcaaattccaaacacacataatttaaaccccatcaagtattctggtgtcagaaatttttgaaacagaagtcatctcaacctgtccagcaatatcaggg

SEQ ID NO: 18232 - DNA, 4932 bp, Zea Mays
ctccgctccgccgccggcactcaccccagctgcactcccgtgggccgtgccgccgtggcacgccggcgcggcggatgcagtcgccacgaatcaggacaagcagcaggcgccaaaacccaaaccaattccctcccttccgttcctactacgatacccacctcgacgcgccgtctcgccggcgacgtcactggcaagtaccaaactgcccctacctcctcccgcttagttctataaatacgggggggtcgtcttcctccacaagattctgccaaaagatcctctcggatgcccccgcccccgcccacccatttcgccagtcgccatcgagctctcgcttccgccgcccgctgccgctctatcaccccggtgctgagccctaggatgtgactggcggacgtctctatggccgagccgtaggtggaggcggcacctcggcgccgtgggagatggaggacgatgacaccgagggtgtaggcgagagcacctgtccccccgccgccgaccgaggaggctcctcctcggccggcggcggcggcggcgactcgcacagttacactgacatagagaaggaggtcttcgaccgtctcatggagaagagaatcccggaggtcgtcgcggacccggtggccttccgcgaagagctccgccgccacttcgagcgcctgccgctgagctacgccgtcgatgtgaacgtcgacaaggcggaggacgtgctgctgcaccggaggattctcaacgagtgcgctcaccctgaaaatcgccccatcttccatgtgggcttcctgaactgcatcccgccctcggtggatccacagtataacactcagtccatctctacgagcgaaaacggtaattgtgggggttctcaggattccactttgagaaaatttgagccatgcgaagggatcgaggacctcagtttaactggacaaaaagttgtggttgactctgtggccagttcttcgaggggagatgaagaaatcctccatgttcatgaaattattttttctaccattgacaaaccaaagctcctcgctcagctatctgctttgttgtctgaagttggactgaacatccgtgaagctcatgtcttctcaacgactgatggcttttgtttggatgtatttgttgttgatggctgggatacaaaggagacagatactttgctacagattctcaaggagacagcggcacgaaatcatgcctcattatcaaacccaaccaattctgcagcctcagaaagagtactggaactacaagagaagattggtgattcaaatattgacaggaattttctgcagattggggagaagattgcatctggatcttccggggacttgcatcgaggaacttatcaaggtatggatgttgcagtaaagttcctcagaaccgaacatgttaatgactcgtcaaaggtggagtttttacaagaaataattattctaaagagtgttaatcatgataatgttgttcgattctacggggcatgcacaaagcagagaaaatatgtcatcgtgacagagtatatgcctggaggcaatctgtatgattttcttcacacgctaaaaaatactttggatctcccaacggttctcaggattgctatcggcatctccaaggggatggattatttgcaccaaaataacatcatccatcgggacttgaagactgccaatttgcttatgggctctgattatgttgtgaagattgcagactttggagtctcaaggaatccatctcaaggtggagacatgactgctgaaactggtacctacagatggatggcacctgaggtaataaaccataagccgtacgatcacagggcagatatcttcagctttgctgtggttctgtgggagctggtcacttcaaagataccatacagaaatctgacacccttgcaagctgcactgggagtaagggaatgcggttggagatcccgtcatgggtcaatccacaactgtctaaactgattcagcgttgctgggacgaaaatcctaacctgcgcccctctttctcagagatcactgcagagctggaaggcatgttaagggatcatcaggcctccaagggaagcaacaaacattcgaaggcaaaggcacacaaaaaatcgcagagagaggcagaataacgaggttgtcagttaccaccttgtgaaaagcttagtggagcttggctatcatcgtccaagattctgaggctactacaaagatgctgctagtgtacaattgtcaaatattgtatatgattggtgtgtgtgtgtgtttctattactcccaaaaacactatatacgggagaagcgtcgacaatacagcgggacaagcaaagacacggaatccttgtacaaaatggcttgcaagcagcataaaatgccctctagtttttgtatacaaaacatgaaaaatatatgtgcatgagccgtgcgtgcttcctgtgattctgtatctccatgaatcctgttctttgattctacatctcctgccaaagttacatttcttcttgaatctgaaagtagctctgacgttttctttctgtttcatgagccattgcattcttgggcctggtctgtttgctctataagggcagtaggagaaagggcccacataacgatcatgggccgttatcgtatttacttacgtgatttgccgtgctctcccgtcttctcgcgatggggagcaccggcgacacgacgatggccgaggcggaggcgccggcgccggtgggtgactacgagctgctggagcgcctgggggggcgtcccccgtacacgtccgtgtggcgagcggtctcccggtccaccggcacgcccgtggctgtgaagcaggtgcggctcaccggcctccccgcgcgcctccgcgacagcctcgactgcgaggtccgcttcctcgccgccgtcagccaccccaacatcatccgcctcatcgacgtcgtccagacccagagctgcctttacctcgtcctggagctctgcgagggcggggacctggcggccttcatccggcgcaatgggagcgtagacgagcgcgtggccagaaattttatgaaacagatcggtaatcaagttgttgatccatgattgtttgactcaattgtgtcgtccaccgtctggggatgtgatctgtgagaaatggcccctgtggcaggagctggcttacaagtgctgcaccggcaccatgtcgtccaccgggacttgaaacctcaggtttcttggacccggggagtacgcagacacatcttgtggttcttgtttgtacatggccccagaagtgatgctgtttcaaaagtacaatgacaaggtagacatgtggagcatcggcgcgatcctatttgagctcttgaatggctacccgccattctatggcagaagcaacgtgcaggtggctgcccctcttgtctatctggaattctgaattcaacaacactgatggccgtctcccttcagctgcttcagtacatcaacagaagcacgtctctcccgttctcggaaccactggcgtctaccttaggccccgattgtgtcgatatatgcaccaggctactatgcactaatccagtgaagcgtctgtccttccaagagttcttggaccaccgcttcttcagagtatgagtgcccaagccatggggaccaccgggcagcgacatgatctgaagaacatcaagaagtttcttgtccttggagtgctgactgactctgttataaagcgttcagaaattgatgcccagtgctcgtcgtcttggttttctgttcgcgtccatttccttctccaaagagccatgtggccaacgtttcaatctgttgtgatctggtctgtactgtttcaatctgctaacagtaggagttttaaagatatttagtccaaaacagaactccatcttttattcaaagcggcataaactatcccattttattgagcaaacatatgcctatcctttccttgtaccaaagaaaaaactacagggagacaaacaaaccacagaaatgcgaagtggctatcggttcagccactaaactttcaattcaacatcaacaataacccagacaccatgctctcttacgctcggctcgacttctaataaaatgcaatgaatcaagtaccagcatgcatcagttcacagcagccacttccttcagtgactccactgtcttcaagacttcctcccccatccgcttgcatccaaccagtgtctgccaattgataacatgagccactcagaacgagatgaatcaaaattcaaatacaattcatgacttcgcaaactagccactattttcttccacgagactacgaaagagttaatatacttgaggcactatgaaccagagccaacaaagatactatattacactacctgaatgtttgactaatgaggatcttcataccttgtctaggtgaggaccaagtacttgacattaaacatgtagagtataaagctaaaacgctttagccttttttttaatagaggtgggaatagaacttcattaagagaactaaacaatgcaaaagcatgaatgttggattcactccaccaaaattcatgggatggactcatgatggaccatcacaatctcaactaaggatggggtgattcctcaaaccagacacactcgtaatccattgataatggttctgcaagaaaatctatcttactgttccaggagaatatatgtccccagttcggaacccatggttcagtgtttctgtaactgcagcttcaattctcctcgcagcattttcttctcctaggccatatcgcaatagcatcgctgcgctaagaattgtagctaatggattggccttgtcctgcactcaacacataataacaggaggggaagcaaattccaaacacacataatttaaaccccatcaagtattctggtgtcagaaatttttgaaacagaagtcatctcaacctgtccagcaatatcaggg

SEQ ID NO: 18233 - DNA, 4902 bp, Zea Mays
cccgatcctccggcgccacatctgcaccgtccatctatcatcctccgtgggcgcgtgggggcaccctccgcctcctccggttagccggaaagcggttttccaatcggatagaagaggggccctccgctccgccgccggcactcaccccagctgcactcccgtgggccgtgccgccgtggcacgccggcgcggcggatgcagtcgccacgaatcaggacaagcagcaggcgccaaaacccaaaccaattccctcccttccgttcctactacgatacccacctcgacgcgccgtctcgccggcgacgtcactggcaagtaccaaactgcccctacctcctcccgcttagttctataaatacgggggggtcgtcttcctccacaagattctgccaaaagatcctctcggatgcccccgcccccgcccacccatttcgccagtcgccatcgagctctcgcttccgccgcccgctgccgctctatcaccccggtgctgagccctaggatgtgactggcggacgtctctatggccgagccgtaggtggaggcggcacctcggcgccgtgggagatggaggacgatgacaccgagggtgtaggcgagagcacctgtccccccgccgccgaccgaggaggctcctcctcggccggcggcggcggcggcgactcgcacagttacactgacatagagaaggaggtcttcgaccgtctcatggagaagagaatcccggaggtcgtcgcggacccggtggccttccgcgaagagctccgccgccacttcgagcgcctgccgctgagctacgccgtcgatgtgaacgtcgacaaggcggaggacgtgctgctgcaccggaggattctcaacgagtgcgctcaccctgaaaatcgccccatcttccatgtgggcttcctgaactgcatcccgccctcggtggatccacagtataacactcagtccatctctacgagcgaaaacggtaattgtgggggttctcaggattccactttgagaaaatttgagccatgcgaagggatcgaggacctcagtttaactggacaaaaagttgtggttgactctgtggccagttcttcgaggggagatgaagaaatcctccatgttcatgaaattattttttctaccattgacaaaccaaagctcctcgctcagctatctgctttgttgtctgaagttggactgaacatccgtgaagctcatgtcttctcaacgactgatggcttttgtttggatgtatttgttgttgatggctgggatacaaaggagacagatactttgctacagattctcaaggagacagcggcacgaaatcatgcctcattatcaaacccaaccaattctgcagcctcagaaagagtactggaactacaagagaagattggtgattcaaatattgacaggaattttctgcagattggggagaagattgcatctggatcttccggggacttgcatcgaggaacttatcaaggtatggatgttgcagtaaagttcctcagaaccgaacatgttaatgactcgtcaaaggtggagtttttacaagaaataattattctaaagagtgttaatcatgataatgttgttcgattctacggggcatgcacaaagcagagaaaatatgtcatcgtgacagagtatatgcctggaggcaatctgtatgattttcttcacacgctaaaaaatactttggatctcccaacggttctcaggattgctatcggcatctccaaggggatggattatttgcaccaaaataacatcatccatcgggacttgaagactgccaatttgcttatgggctctgattatgttgtgaagattgcagactttggagtctcaaggaatccatctcaaggtggagacatgactgctgaaactggtacctacagatggatggcacctgaggtaataaaccataagccgtacgatcacagggcagatatcttcagctttgctgtggttctgtgggagctggtcacttcaaagataccatacagaaatctgacacccttgcaagctgcactgggagtaaggcagggaatgcggttggagatcccgtcatgggtcaatccacaactgtctaaactgattcagcgttgctgggacgaaaatcctaacctgcgcccctctttctcagagatcactgcagagctggaaggcatgttaagggatcatcaggcctccaagggaagcaacaaacattcgaaggcaaaggcacacaaaaaatcgcagagagaggcagaataacgaggttgtcagttaccaccttgtgaaaagcttagtggagcttggctatcatcgtccaagattctgaggctactacaaagatgctgctagtgtacaattgtcaaatattgtatatgattggtgtgtgtgtgtgtttctattactcccaaaaacactatatacgggagaagcgtcgacaatacagcgggacaagcaaagacacggaatccttgtacaaaatggcttgcaagcagcataaaatgccctctagtttttgtatacaaaacatgaaaaatatatgtgcatgagccgtgcgtgcttcctgtgattctgtatctccatgaatcctgttctttgattctacatctcctgccaaagttacatttcttcttgaatctgaaagtagctctgacgttttctttctgtttcatgagccattgcattcttgggcctggtctgtttgctctataagggcagtaggagaaagggcccacataacgatcatgggccgttatcgtatttacttacgtgatttgccgtgctctcccgtcttctcgcgatggggagcaccggcgacacgacgatggccgaggcggaggcgccggcgccggtgggtgactacgagctgctggagcgcctgggggggcgtcccccgtacacgtccgtgtggcgagcggtctcccggtccaccggcacgcccgtggctgtgaagcaggtgcggctcaccggcctccccgcgcgcctccgcgacagcctcgactgcgaggtccgcttcctcgccgccgtcagccaccccaacatcatccgcctcatcgacgtcgtccagacccagagctgcctttacctcgtcctggagctctgcgagggcggggacctggcggccttcatccggcgcaatgggagcgtagacgagcgcgtggccagaaattttatgaaacagatcggagctggcttacaagtgctgcaccggcaccatgtcgtccaccgggacttgaaacctcaggtttcttggacccggggagtacgcagacacatcttgtggttcttgtttgtacatggccccagaagtgatgctgtttcaaaagtacaatgacaaggtagacatgtggagcatcggcgcgatcctatttgagctcttgaatggctacccgccattctatggcagaagcaacgtgcagctgcttcagtacatcaacagaagcacgtctctcccgttctcggaaccactggcgtctaccttaggccccgattgtgtcgatatatgcaccaggctactatgcactaatccagtgaagcgtctgtccttccaagagttcttggaccaccgcttcttcagagtatgagtgcccaagccatggggaccaccgggcagcgacatgatctgaagaacatcaagaagtttcttgtccttggagtgctgactgactctgttataaagcgttcagaaattgatgcccagtgctcgtcgtcttggttttctgttcgcgtccatttccttctccaaagagccatgtggccaacgtttcaatctgttgtgatctggtctgtactgtttcaatctgctaacagtaggagttttaaagatatttagtccaaaacagaactccatcttttattcaaagcggcataaactatcccattttattgagcaaacatatgcctatcctttccttgtaccaaagaaaaaactacagggagacaaacaaaccacagaaatgcgaagtggctatcggttcagccactaaactttcaattcaacatcaacaataacccagacaccatgctctcttacgctcggctcgacttctaataaaatgcaatgaatcaagtaccagcatgcatcagttcacagcagccacttccttcagtgactccactgtcttcaagacttcctcccccatccgcttgcatccaaccagtgtctgccaattgataacatgagccactcagaacgagatgaatcaaaattcaaatacaattcatgacttcgcaaactagccactattttcttccacgagactacgaaagagttaatatacttgaggcactatgaaccagagccaacaaagatactatattacactacctgaatgtttgactaatgaggatcttcataccttgtctaggtgaggaccaagtacttgacattaaacatgtagagtataaagctaaaacgctttagccttttttttaatagaggtgggaatagaacttcattaagagaactaaacaatgcaaaagcatgaatgttggattcactccaccaaaattcatgggatggactcatgatggaccatcacaatctcaactaaggatggggtgattcctcaaaccagacacactcgtaatccattgataatggttctgcaagaaaatctatcttactgttccaggagaatatatgtccccagttcggaacccatggttcagtgtttctgtaactgcagcttcaattctcctcgcagcattttcttctcctaggccatatcgcaatagcatcgctgcgctaagaattgtagctaatggattggccttgtcctgcactcaacacataataacaggaggggaagcaaattccaaacacacataatttaaaccccatcaagtattctggtgtcagaaatttttgaaacagaagtcatctcaacctgtccagcaatatcaggg

SEQ ID NO: 18234 - DNA, 4997 bp, Zea Mays
cggcctgatcctcgcggacgccagccgcccgatcctccggcgccacatctgcaccgtccatctatcatcctccgtgggcgcgtgggggcaccctccgcctcctccggttagccggaaagcggttttccaatcggatagaagaggggccctccgctccgccgccggcactcaccccagctgcactcccgtgggccgtgccgccgtggcacgccggcgcggcggatgcagtcgccacgaatcaggacaagcagcaggcgccaaaacccaaaccaattccctcccttccgttcctactacgatacccacctcgacgcgccgtctcgccggcgacgtcactggcaagtaccaaactgcccctacctcctcccgcttagttctataaatacgggggggtcgtcttcctccacaagattctgccaaaagatcctctcggatgcccccgcccccgcccacccatttcgccagtcgccatcgagctctcgcttccgccgcccgctgccgctctatcaccccggtgctgagccctaggatgtgactggcggacgtctctatggccgagccgtaggtggaggcggcacctcggcgccgtgggagatggaggacgatgacaccgagggtgtaggcgagagcacctgtccccccgccgccgaccgaggaggctcctcctcggccggcggcggcggcggcgactcgcacagttacactgacatagagaaggaggtcttcgaccgtctcatggagaagagaatcccggaggtcgtcgcggacccggtggccttccgcgaagagctccgccgccacttcgagcgcctgccgctgagctacgccgtcgatgtgaacgtcgacaaggcggaggacgtgctgctgcaccggaggattctcaacgagtgcgctcaccctgaaaatcgccccatcttccatgtgggcttcctgaactgcatcccgccctcggtggatccacagtataacactcagtccatctctacgagcgaaaacggtaattgtgggggttctcaggattccactttgagaaaatttgagccatgcgaagggatcgaggacctcagtttaactggacaaaaagttgtggttgactctgtggccagttcttcgaggggagatgaagaaatcctccatgttcatgaaattattttttctaccattgacaaaccaaagctcctcgctcagctatctgctttgttgtctgaagttggactgaacatccgtgaagctcatgtcttctcaacgactgatggcttttgtttggatgtatttgttgttgatggctgggatacaaaggagacagatactttgctacagattctcaaggagacagcggcacgaaatcatgcctcattatcaaacccaaccaattctgcagcctcagaaagagtactggaactacaagagaagattggtgattcaaatattgacaggaattttctgcagattggggagaagattgcatctggatcttccggggacttgcatcgaggaacttatcaaggtatggatgttgcagtaaagttcctcagaaccgaacatgttaatgactcgtcaaaggtggagtttttacaagaaataattattctaaagagtgttaatcatgataatgttgttcgattctacggggcatgcacaaagcagagaaaatatgtcatcgtgacagagtatatgcctggaggcaatctgtatgattttcttcacacgctaaaaaatactttggatctcccaacggttctcaggattgctatcggcatctccaaggggatggattatttgcaccaaaataacatcatccatcgggacttgaagactgccaatttgcttatgggctctgattatgttgtgaagattgcagactttggagtctcaaggaatccatctcaaggtggagacatgactgctgaaactggtacctacagatggatggcacctgaggtaataaaccataagccgtacgatcacagggcagatatcttcagctttgctgtggttctgtgggagctggtcacttcaaagataccatacagaaatctgacacccttgcaagctgcactgggagtaaggcagggaatgcggttggagatcccgtcatgggtcaatccacaactgtctaaactgattcagcgttgctgggacgaaaatcctaacctgcgcccctctttctcagagatcactgcagagctggaaggcatgttaagggatcatcaggcctccaagggaagcaacaaacattcgaaggcaaaggcacacaaaaaatcgcagagagaggcagaataacgaggttgtcagttaccaccttgtgaaaagcttagtggagcttggctatcatcgtccaagattctgaggctactacaaagatgctgctagtgtacaattgtcaaatattgtatatgattggtgtgtgtgtgtgtttctattactcccaaaaacactatatacgggagaagcgtcgacaatacagcgggacaagcaaagacacggaatccttgtacaaaatggcttgcaagcagcataaaatgccctctagtttttgtatacaaaacatgaaaaatatatgtgcatgagccgtgcgtgcttcctgtgattctgtatctccatgaatcctgttctttgattctacatctcctgccaaagttacatttcttcttgaatctgaaagtagctctgacgttttctttctgtttcatgagccattgcattcttgggcctggtctgtttgctctataagggcagtaggagaaagggcccacataacgatcatgggccgttatcgtatttacttacgtgatttgccgtgctctcccgtcttctcgcgatggggagcaccggcgacacgacgatggccgaggcggaggcgccggcgccggtgggtgactacgagctgctggagcgcctgggggggcgtcccccgtacacgtccgtgtggcgagcggtctcccggtccaccggcacgcccgtggctgtgaagcaggtgcggctcaccggcctccccgcgcgcctccgcgacagcctcgactgcgaggtccgcttcctcgccgccgtcagccaccccaacatcatccgcctcatcgacgtcgtccagacccagagctgcctttacctcgtcctggagctctgcgagggcggggacctggcggccttcatccggcgcaatgggagcgtagacgagcgcgtggccagaaattttatgaaacagatcggagctggcttacaagtgctgcaccggcaccatgtcgtccaccgggacttgaaacctcagaatatcctgctctcttctccgagaagcagcgatgcgatcctcaagatatctgattttggtcttgcaaggtttcttggacccggggagtacgcagacacatcttgtggttcttgtttgtacatggccccagaagtgatgctgtttcaaaagtacaatgacaaggtagacatgtggagcatcggcgcgatcctatttgagctcttgaatggctacccgccattctatggcagaagcaacgtgcagctgcttcagtacatcaacagaagcacgtctctcccgttctcggaaccactggcgtctaccttaggccccgattgtgtcgatatatgcaccaggctactatgcactaatccagtgaagcgtctgtccttccaagagttcttggaccaccgcttcttcagagtatgagtgcccaagccatggggaccaccgggcagcgacatgatctgaagaacatcaagaagtttcttgtccttggagtgctgactgactctgttataaagcgttcagaaattgatgcccagtgctcgtcgtcttggttttctgttcgcgtccatttccttctccaaagagccatgtggccaacgtttcaatctgttgtgatctggtctgtactgtttcaatctgctaacagtaggagttttaaagatatttagtccaaaacagaactccatcttttattcaaagcggcataaactatcccattttattgagcaaacatatgcctatcctttccttgtaccaaagaaaaaactacagggagacaaacaaaccacagaaatgcgaagtggctatcggttcagccactaaactttcaattcaacatcaacaataacccagacaccatgctctcttacgctcggctcgacttctaataaaatgcaatgaatcaagtaccagcatgcatcagttcacagcagccacttccttcagtgactccactgtcttcaagacttcctcccccatccgcttgcatccaaccagtgtctgccaattgataacatgagccactcagaacgagatgaatcaaaattcaaatacaattcatgacttcgcaaactagccactattttcttccacgagactacgaaagagttaatatacttgaggcactatgaaccagagccaacaaagatactatattacactacctgaatgtttgactaatgaggatcttcataccttgtctaggtgaggaccaagtacttgacattaaacatgtagagtataaagctaaaacgctttagccttttttttaatagaggtgggaatagaacttcattaagagaactaaacaatgcaaaagcatgaatgttggattcactccaccaaaattcatgggatggactcatgatggaccatcacaatctcaactaaggatggggtgattcctcaaaccagacacactcgtaatccattgataatggttctgcaagaaaatctatcttactgttccaggagaatatatgtccccagttcggaacccatggttcagtgtttctgtaactgcagcttcaattctcctcgcagcattttcttctcctaggccatatcgcaatagcatcgctgcgctaagaattgtagctaatggattggccttgtcctgcactcaacacataataacaggaggggaagcaaattccaaacacacataatttaaaccccatcaagtattctggtgtcagaaatttttgaaacagaagtcatctcaacctgtccagcaatatcaggg

SEQ ID NO: 18235 - DNA, 3062 bp, Zea Mays
gtcctccgccttcttctcactgacatccgggcctccctgcacagcgacagtgaaggacccacatcagtcgggaaacggagcccacagccacagcgtgtggtacgcgagtggattgaactaaccacccccggcctcgtcttcttctccgcgccccggtgtgttccccacctaaccccaccccgaatccaccatggccgccggttctggccccgccccgcccgcggaagcgcagcccccgccgccgatccaccacctgccgccggacgcgctccacaacgtgctgctccgcctgcagctgcgcgacgccgtcgtgtgccgccccgtctcgcgcctcttccacgagaccctctcgccgcagctcctcgcgctgctccccagcctgcgcctcctcctcctccgccacccgcgtcccgacggcggcggctgcctccacgccttcgaccccgcgcgccgcacctggctccgcctccccttcgcccacttcctcccctaccactccttctcccccgtcgcctcatccacgtccctcctctacctctgggtcgagacctcctcctccacctcgcccctggccctccccccgtccacctcctccgcgtcttccgcctcgcccgtgcacccgcccaaatcgctcgccgtctgcaaccccttcgccggcacgtaccgcctcttgccccagctcggatccgcctgggcgcgccacggcaccgtcctcgccggccccgccggcacggtgctcgtcctcaccgagctcgccgcgctatcctacaccccctccggatccgccaagtggatgaagcatcccctctctctgccgtccaagccgcggagccccatactggcctccgacgccgtcttcgcgctctgcgacgtcggcacgccgtggcgcagccagtggaagctcttctcctgcccgcttgccatgctcacggggggctgggcgcccgtggagcgagcggcgtggggagacgtcttcgaggtcctcaagcgtccccggctcctggctggggccggcggccgccgggtccttatgatcggcgggctcaggtcctcctttgccatggacgcgccatgctccacggtcttaatactccgcctagatctggccaccatggagtgggaggaagctgggcgcatgccgcccaatatgtaccgctgcttcactggcctatgcgaggctgcctcgcagggaggcgccataccggccgctgctgccgggggtaacaataaggtcaaagttttcggaggcgatgggaaggtgtggttcgctggtaagcgagtgcgcgggaagcttgcaatgtgggaggaagatgagatggggagcagtgggaagtgggactgggtggatggtcttcctggctatggtgatggtgtataccgtggatttgtgttcgatggcgggttcacagcgattccttgaaaacgaatcctagtctggtgggtgtccgctcaaattgcgccggtttactttgacccaggacatctacctatcttatctcatgcatgatgaaaactctagttgttgtacttgattattggaaaagatcagtaagctgtgtgtttcagacaataaaatgatgtagaccatactctatttacatatcaaaaacttgaaatagtgcctgccatttggtaagcatttcccatcttggtcatatgcaaggtaagtagacacatcatcataataccttgatatgtcaaagctgttaatcggatgtttgctttaaaatgcagttgtgagttactctgggttgtcaagggttttgatatatattatagggctagtgatggtgttagcctaacacttgcattgcatcatacagtaacacacggtttcatgtctttccctgctagttctccactggatgatgcttattttgtttaatataaactgtggttacctacctattatttgatccacttaggcctttgatgattagctctaggctctatagctggtcgatatagtgatatatatgacaaattacgtgggccttcagaggatattagtaagtaataggcgtaggctatcctattctcaatgtgttaccttgatggagcacaacatttgttgatgtaattgagctgggatgaaccattgacctatcctattcctagactcttctgtttacatctttaactgctgacattgtggggatggatttttttggggggggagacctgcaattttctatgtaactaattgaaataattcatttctttcggccattctttacttgcttgttgaaaacttgaaaggtttgctttgatagtgtcaaaatttacagcgtttgatcattattgagctcgatcgtatattcatattataccgtggtatatcaatgttgttcactggatgtttgctttgaaaaaaaaaatgtcgtagtgttaaccttgttactagttgtctttaatttcttgtgaactgacaaccatatttgaagttgtgagttactgggttcatatggctaggtccttttttatttacatgtggtttcaatgtagtaattagtaacaggacatgctccactgttatcactatcggtcttcagctatacatgtcaataataacatctatgctatgtaaccactgctcgattgttggatagaaagaaaagaaaaaaactggcaagaggcactgatatgagaaaaaaaggaaaaggaacatttcaaagtcatcgctgtgttgccatcatgatgcttaaaagttagagtagggatccaatccaaatagacgattgtagaatctaaaggcattgtgtgcgcgttgatttggattctagcatagtgattgaattccttgcgtgatctaagcttccatggtctctttgtccactgcctggtgtctttgttgcggtggcaagcactgagagagctcatcgatggagtggagctgctgggcattcaatggcggctagtgcagactagacgagacaggagtaataatgtatccggaaatgactcggcacgggattctttcgcatcagcgggcggtttgtccacttggttccgtccccatcgctcctaataatactctacattgggttgtatctatgatctcg

SEQ ID NO: 18236 - DNA, 1814 bp, Zea Mays
aactagggactggaaagagaaaagagaacgagcagacggggtgataagttaaaaaagagaataaggacgggggttttaagtgaaaaaggccagccaacagaggccggtggaaaggagagaatcgagcagagccacccggttgctcctcatttccactttccactctgcctccgctgccgatcgccgtccccgaccgcagcgcaggtgaggatccaaccccaacaaacttccaggcgacggtgagatccatggctcccgtttttttcttagatcaaggggcgggagggaggcaaggacggactggcggggtgggagacggccggggggcccagacggggcgaggcaacttgaccggagcggttgccgtggcaggggcggagccggagccggtggcagctctccgccgctggcgacgggtgctggatggtggggcggggccggaccgggtagcgactggctggactcgtgtttctgtcgtgacttctgaagagagcgaccgccgcacgggaggacggagggaaggaacgaggccgtgggatcgcaggactgaggatgagtgaagaggataaggctgctgcttctgctgagcagcctaagagggcccctaagctcaatgaaaggatcctctcctctctgtccaggaggtccgtagctgctcatccatggcatgatctcgagatcggtcctggtgctcctgctgtattcaatgttgttgttgagatcacaaagggaagcaaagtcaaatacgagcttgacaagaaaactggactgattaaggttgatcgagtcctttactcatcagttgtataccctcacaattatggtttcattccaaggactctttgtgaagacaatgacccaatggatgtgttggtcctgatgcaggagcctgttgttcctggttcgttcctgagagctagagcaattggccttatgcccatgattgaccagggtgaaaaggatgacaagataatagcagtatgtgctgatgatcctgaataccgtcactacaacgacatcagcgagctgtctcctcaccgcctgcaagagatcaagcgcttctttgaagattacaagaaaaacgagaacaaagaagtcgcagttgatgcattcttgcccgcgacaacagctcaagaagccattcagtactccatggacctgtatgcccagtatattttgcaaagcttgaggcagtagattgcaagcaacaatttatctatcatgcgtcttggatgggggcgtgattttaataagccaaatcgcttgctatattgggaaccttggaattgagaacagcgtcactagctgtgattcgctcctttctcgttaaattatcatatgaataggccaagtccatacgtttaccgtgtggcgctctgtcagtcttcgtctacccaagtagctagctgcatggagggatgtctagcgttgctatgagatggcactcgtgggtctgcgggctggctacatgggtccgttcctgtgttttccgtaaaataaaattataattctatataattgaatcatttaatttatgtgatctttttgtgtattccaatcagttattgagtgtgacgacggtgtttttggctaaaattgcatcgcgtggtgatgtcatgaagcaagtgtgtgtgtttgttatactgagatccatccatataccaaaccccatagagatgtgtttgttaagcaagtgttagcgggtgctcggtttctgtccctaaagttttctatcatattagatgtttgaatgctaattataaatattaaatatagtttaattataaaaaacaaattatacaaatgaagactaa

SEQ ID NO: 18237 - DNA, 7370 bp, Zea Mays
  misc_feature (3702)..(3801): n is a, c, g, or t
gcagagttgcagacttgtttcattcaatatcttgagttacgtgcagctgacccaacgttcaataacacgaacacaaggagcacatttacaattgggaagctggccaatttgctccgggacaatgacgagttttatgagttggtgttttgtaaattcttgtccgacacctcctactctgttgctgtacaagccgctgctgctaggctgctcttgagctgtcactctgcctggacgcctccgtatcctcatgtctttgaagactctatcatagataatattaaaaagtgggtaatgaaggatcctgaagcatctaatgaatgtgagtggaagtatctaggaaaaaataaacccacagatgctgagatgctgagaacatatgcgattgggttgcttgctatggcattgtgcagtggtgggcaattggtagaggatgtcttgactttgggggtgccagcaaagctcatgcactttctgcgcataagagtccttggtgatgcctcatcttctcaaagagatgctaatcatccacaagacaccaaatatcctcgaggcagagacgataataggggtaaatcacgtctggcccaagatggttctcggttggatggaacaagggttgggtatggaatattgaccaacccaacagcagagaaggacaatgaacctggtgttgtaatgaggcaagcatatggagaaaggtcattggatggcacttttgcctcatcagataattctgacgtccctgaggttgattggaccaatgataactcttatggcacaattgtttgtgacacaaagtcaaaatatggggaaaagacttctgtgacaagggctcttaaagatgaagagatcagcgaaaatggtgaactgttgaagagaaagctgagtcgagccccctctcgacttagagtgaagggaaaagcaggagacaacttgcctgaatgtgaaatgacacctttatcaccaacctctggattgagaatcggaggtcgggcttccagagacaggaatgtggtgagggttgatgacccaaagaaggcaactgatgtgaacaatagttctgcaggcctcgagttgtttagcgctatttccaaagaagaatatgaagatcgtttgagggattgcattattggcttgaaggatatatctgacatcgttttgaaggcagtgagagctgctgaggctgaggccagatctgcaaatgcacctgatgaagctgtgaaagcagcaggtgatgctgctgccgagcttgtgaaatctgctgctttggaggtttggaaagccgaaaataatagtgatgcggttatagtagcggcagagaaagctgcatctgcagttgtagaggctgcagtgtcgactagtgtctcacgaagcacaaatcaagttggtgaagaacgtgcagcggaagaagctgtacaaaccagcgaagaccaggatttggaaaattttgttatcagtgacaaatcacagctcttacaacttagagaaaaatatagcatccagtgtctacagattttgggagagtatgttgaagctttgggtcctgttctccatgaaaaaggtgttgatgtttgcctcacattattgcaaatgagcatgaaagaccaggagggatgtgaccactttgctcaactccctgatgttcttaaattaatttgtgcattggctgcccatcgaaaatttgctgcactctttgttgatcgtggtggtatacagaagatcctctctattcctagaattacccagacatatatgggtctttctgcctgcttattcactttcgggtctcttcagtctaccatggaacgtgtttgtgcgctctcctctgacacacttgacagtgttgttgaattagcacttcaacttcttgagtgcccacaagatttagctagaaaaaatgtgggcatctttttcgctgctgcttttgtgttcaaagctgttcttgatctatttgatgcacgagatgggatgcaaaagcttctcgatatcctatatggttgcgcatctggaagatctggcagtaattctggaggagcaggatcctccaatgtaaatcaagggaatgatcggtcacctgctgaagctttgactgcatcagagaagcaagttgcataccatacttgtgttgctctacggcaatactttagagctcatctccttcagcttgttgactccattcggccaagcaaaagcatccgcagtattgctcggaacacttctagtgcacgagctggctacaaaccttttgacattagcaatgaagctatggatgctgtctttcgtcagatccagcgggacagaaagttaggccttgctcttgtgagagttcgttggcctgtgttagacaaattttttgcctcaaatggtcacgtgactatgctggagttgtgtaagtttcaggcacatggtgatcgctatttgcgtgatttaactcaatatgcaattggagttcttcacatcataacacttatgccacaaccacatgtccgcaaatcaatagtgcagggaacattaagcaacaatcgtgctggtatggctgtcttattagacacggtgaaaagttttgactacattgatcatgaggtgatctgtccagcactgaatgtcctcgtcaatcttgtatgcccgcctccttctatcagcaacaaaccattgtcaactgccaatcagcaacctgcagccgcgcaagcacttgcttcagaaagcagagataggaacttcgaaaaaagtatttcagataggaatctactagcaaatcagggtgaatatcgtgaaagatctggtgatggcaaccctgctgaaaggaacaataccttgcatcaaggaactcctaacacacctgttgtgacatctggagtagtcggtgatcgaagaataacattaggtgttggaggtggtggtcctggtcttgctgctcaattggagcaaggataccgtcaagctcgagaagttattctattcgagcgcttgcctgccgtgtcctgcttggcctggctagagatgatacaattgcacatatactgaccaagctccaggtggggaagaaattatcagaactgatccgtgataccagtgcccagacatctgcgggcgatagtggaagatggcaagctgagctgacccaagtggcaattgaactaattgcggtattgacaaattctggaaaagaaacaacattagcagcaactgatgctgctgctccagcattgaggcgcatcgagcgagctgggatagctgctgctactcctatctcctaccactcaagggaactgatgcagttgatacatgaacatcttcttgggtctggtttcactgccactgctgccatgctgcagaaggaggctggccttgcacctttaccattgatagcagcggtgcttcctgcccaccaagttgctgccctggaagcatcatctgttcagcaacagtggccctctggacgtgttcagggatttctctcagataaaataaatatgtcgacagatcaatctgcccatagatcagattctatcccgccttcatctaagaaaaaagcactgaccttctcatccagtttctcacgaagagctcagactccacattctgtttctggcagcagaacaagcaacatccttaaaagtcctgtacctattgcggctgatactagagatgcagaaatgttgaataagacaccactgtcgctgccacttaagaggaagcttnnnnnnnnnnnnnnnnnnnnnnnnnnnnnnnnnnnnnnnnnnnnnnnnnnnnnnnnnnnnnnnnnnnnnnnnnnnnnnnnnnnnnnnnnnnnnnnnnnnnaagcttgtggatgtgaaggataataattctgtatcagcaacgaagcgcctcgcaacaactgatcaaacgtaccaaccctctgtattccaaactcctgctcctactcgcaaaggtctgtcagtagcagtagattctcctacttcatttcattgtggccggacaaacttcaactatgtttctactgaaaacttggacaattctcaaagcacaccaggaacgttgatcaccacaacacttcctggtgtgaatgatcaacaatcaggaaatttggaacgtatgacacttgactcactggttgtacaatacttgaaacatcaacaccgccagtgtcctgctccagttacaactttgccaccactttctcttttgcaccctcatgtttgccctgagcctagtcgcagccttagtgcacctgcaaacatagctgctcgtatgggtagccgtgagataagaaggcagtttagtgggatccagatacctcgtagggatcgtcattttatatacagtaggttcaagcagtgtcgggtttgccgtgatgaggcatcactattgacttgcatgacatttcttggagatgcatctcgagttgtggctggtaaccacacaggtgaattaaggatatttgactgcaacacggcaaatctcctagagacccaaacatgccacctacatcttgttacaacgatggaggcgacatgttctggtggacacgagcttattctcacatccagcctaaatgaggttaagatctgggatgccttctcggtatctgcagggcctttgcacacatttgaggcctgcaaagctgctaggtttaaccactctggaacttcatttgctgccctttctactgatacagctcaacgggaggttcagttgtatgatgtgcagacatatactcttgctacacagcttcctgataacactagcagttcaggttcgggccggggttacatacaacccattatacatttcagtccttcagacacaatgttgctttggaatggagtcctgtgggatacaaggcagccaaattttgtacatcagtttgaccagttcacagattactgtggtggtggcttccatccggcaggaaacgaggtgatcttaaattcggaggtgtgggatctgaggaagttcaagcttttacggagtgtcccttccctggaccagacagtaataaagttcaacggcactggtgatgttatctatgccatcctgaggcgtaatcttgatgacgtgacatcatccatcaatgctcggagggtcaggcatcctcttttccctgcattccgcacgattgatgcggtgacttactcggatattgcaaccgtccaaatcgaccgctgcgtacttgatcttgccactgagcccaatgattctcttattggggtggttgctatggacgatcaccaggagcttttctcttctgcccgcttgttcgaagttggcaggaagcgaataaccgatgacgattcagacccggaggatgcaggtgaaaccgacgatgacgacgacgacgatggcgactctgatgatgatgttctccttgcgccggtgctggaaggggatacagattccgaagagattagtagcagcagcgatgatggtgatgaagatggtggtgacgatgatatccccagttcggatgacattgaagatgacccagagtacattgatggtggtggtgattttgaagggggagggggcttgatggatattttgggtgatgacgaaggggaaggcgatgagagtgatatgatggaatcctttagcagtggcgacgaggagggttggatcatgtagtttttttttgggtagtgcagccctgccgaagatggagcatggccctgtacaagtcaatatttatacgctcacattatgattgtaattattatttcctggttcttttgagcagctcctgccctgctagggaaatgtggaacataatggaagatggtgtaagtaaaggtgggaagagaacaatctaataccaatcgattaaaaatctatctatctattaattaattaatttatttgtggtgtgtgatctgactttggttgtggtgctcactgtcaatgaaggtcgatgctaactgctgatacctgcttccttttcttgttaagatgtcatgagagagaatcctaccactgaatattttcatcaataccatcaccattatgatagtgtatagtttgactgaaattcatgttacaggcacgcattacaacacaaaactaccaatggcaggcaagatactaagagtcagatttggagtctgctcataatcatgtcgaactctccgctggcgtgcacctgccgcaccgttctgtcgtagtcgtcgtcatcgtcatggtcgtcttcttcttcctgttgctctgcttcgtcgggcctggacggtggcttgggcaccgtctgcgcctcctgcacgatcctcaagatctcctccacgctctgcgacgagtaggcgggtgctgctgtcgcattattgctgctgctgctgctgctgtctccctggcggctgtagtagtaggctgcctgcgcctcctccttgagctccctcggcaggttcttgaggtaccaggggtgggtcttgatctcgctcatggtgatcctcttgtacgggttctggacgaagatgcgggagaggaggtggcggcagttgtgggagacgtgcacgtactcggggatcttgtactgaaccgacatgatgcgctgtattgtcttcctgaagttctttgggtcctttggatcctcgaacgggtacgcccccaccagcatgacgtagagcgtgactccgcacgaccagacgtcggcgtgcttcccgtcgtactctcgccgcgacagcacctcgggcgcgatgtacgccggcgtgcccaccgttgacttcggtcgcgagtgcagcaccgaggacttggagtagccgaagtcgcagatcttgaggcgcggcgccgggctgccgtccagcagcgtgttctccagcttgaggtcccggtggcagatgttcatggcgtggcagaagctgacgccgcaaaccagctgctggaagaagtagcgcgcctcgtcctcgtggaaccgcccggcgtcgcagatgcgctcgaacagctccccgcccgcagcgtactccatcacgatcgcaaggtgcgtgggagtcagcaccacctccttgaaccggatgatgttggggtggcggagggagcggtggttcacgatctcgcggaacacgttctcgtcgatctatcaattaatccatcaattagatactagctagcaaagaagacgcgacggctagactgactactcaccctgtttcctcgctctatgaacttcatggccaccagctccctcgtgtccttgttcctcatcagcttggccaccccgaagttgcccgccccgatctcgcgaacgggctcgtacttgtccatcggatcccttgccttcctagctagcttatcttgccttatcgtggattggaggtcagctagcagggagggagaagacgacgaagggggatgtgggtggagctgagtcactagtcagtcagtccagacggaggagcaggtgctgc

SEQ ID NO: 18238 - DNA, 4753 bp, Zea Mays
  misc_feature (1085)..(1184): n is a, c, g, or t
gcgagagcaggttacttgcgggctgcgccgcgccgcgccgcgccgcctttgccccttcccttccatcgcgacttgcgaggggagagtttgggactcgctgcccctcttcgcttcccaccaacctcctcttctccgtcgattccattcgattcgaattcgcgatcgcccaccaccgcaccaagcgccaaaccctgaccctgatcctaatcctgtgcgccacaatggcggagtcggagaagggcgccgccgcaaccaccaccgccgccgccgagcctgggtccggcccgccgcacgaggacgaggatgcgctgctcgcccgtgcccacactgtcatctccaggatcctcgaccgcgagctcgaccccaaccctcgcctcctccacaccctcgccaccatgtgcgagctccacgaagccaggtggggaagaaattatcagaactgatccgtgataccagtgcccagacatctgcgggcgatagtggaagatggcaagctgagctgacccaagtggcaattgaactaattgcggtattgacaaattctggaaaagaaacaacattagcagcaactgatgctgctgctccagcattgaggcgcatcgagcgagctgggatagctgctgctactcctatctcctaccactcaagggaactgatgcagttgatacatgaacatcttcttgggtctggtttcactgccactgctgccatgctgcagaaggaggctggccttgcacctttaccattgatagcagcggtgcttcctgcccaccaagttgctgccctggaagcatcatctgttcagcaacagtggccctctggacgtgttcagggatttctctcagataaaataaatatgtcgacagatcaatctgcccatagatcagattctatcccgccttcatctaagaaaaaagcactgaccttctcatccagtttctcacgaagagctcagactccacattctgtttctggcagcagaacaagcaacatccttaaaagtcctgtacctattgcggctgatactagagatgcagaaatgttgaataagacaccactgtcgctgccacttaagaggaagcttnnnnnnnnnnnnnnnnnnnnnnnnnnnnnnnnnnnnnnnnnnnnnnnnnnnnnnnnnnnnnnnnnnnnnnnnnnnnnnnnnnnnnnnnnnnnnnnnnnnnaagcttgtggatgtgaaggataataattctgtatcagcaacgaagcgcctcgcaacaactgatcaaacgtaccaaccctctgtattccaaactcctgctcctactcgcaaaggtctgtcagtagcagtagattctcctacttcatttcattgtggccggacaaacttcaactatgtttctactgaaaacttggacaattctcaaagcacaccaggaacgttgatcaccacaacacttcctggtgtgaatgatcaacaatcaggaaatttggaacgtatgacacttgactcactggttgtacaatacttgaaacatcaacaccgccagtgtcctgctccagttacaactttgccaccactttctcttttgcaccctcatgtttgccctgagcctagtcgcagccttagtgcacctgcaaacatagctgctcgtatgggtagccgtgagataagaaggcagtttagtgggatccagatacctcgtagggatcgtcattttatatacagtaggttcaagcagtgtcgggtttgccgtgatgaggcatcactattgacttgcatgacatttcttggagatgcatctcgagttgtggctggtaaccacacaggtgaattaaggatatttgactgcaacacggcaaatctcctagagacccaaacatgccacctacatcttgttacaacgatggaggcgacatgttctggtggacacgagcttattctcacatccagcctaaatgaggttaagatctgggatgccttctcggtatctgcagggcctttgcacacatttgaggcctgcaaagctgctaggtttaaccactctggaacttcatttgctgccctttctactgatacagctcaacgggaggttcagttgtatgatgtgcagacatatactcttgctacacagcttcctgataacactagcagttcaggttcgggccggggttacatacaacccattatacatttcagtccttcagacacaatgttgctttggaatggagtcctgtgggatacaaggcagccaaattttgtacatcagtttgaccagttcacagattactgtggtggtggcttccatccggcaggaaacgaggtgatcttaaattcggaggtgtgggatctgaggaagttcaagcttttacggagtgtcccttccctggaccagacagtaataaagttcaacggcactggtgatgttatctatgccatcctgaggcgtaatcttgatgacgtgacatcatccatcaatgctcggagggtcaggcatcctcttttccctgcattccgcacgattgatgcggtgacttactcggatattgcaaccgtccaaatcgaccgctgcgtacttgatcttgccactgagcccaatgattctcttattggggtggttgctatggacgatcaccaggagcttttctcttctgcccgcttgttcgaagttggcaggaagcgaataaccgatgacgattcagacccggaggatgcaggtgaaaccgacgatgacgacgacgacgatggcgactctgatgatgatgttctccttgcgccggtgctggaaggggatacagattccgaagagattagtagcagcagcgatgatggtgatgaagatggtggtgacgatgatatccccagttcggatgacattgaagatgacccagagtacattgatggtggtggtgattttgaagggggagggggcttgatggatattttgggtgatgacgaaggggaaggcgatgagagtgatatgatggaatcctttagcagtggcgacgaggagggttggatcatgtagtttttttttgggtagtgcagccctgccgaagatggagcatggccctgtacaagtcaatatttatacgctcacattatgattgtaattattatttcctggttcttttgagcagctcctgccctgctagggaaatgtggaacataatggaagatggtgtaagtaaaggtgggaagagaacaatctaataccaatcgattaaaaatctatctatctattaattaattaatttatttgtggtgtgtgatctgactttggttgtggtgctcactgtcaatgaaggtcgatgctaactgctgatacctgcttccttttcttgttaagatgtcatgagagagaatcctaccactgaatattttcatcaataccatcaccattatgatagtgtatagtttgactgaaattcatgttacaggcacgcattacaacacaaaactaccaatggcaggcaagatactaagagtcagatttggagtctgctcataatcatgtcgaactctccgctggcgtgcacctgccgcaccgttctgtcgtagtcgtcgtcatcgtcatggtcgtcttcttcttcctgttgctctgcttcgtcgggcctggacggtggcttgggcaccgtctgcgcctcctgcacgatcctcaagatctcctccacgctctgcgacgagtaggcgggtgctgctgtcgcattattgctgctgctgctgctgctgtctccctggcggctgtagtagtaggctgcctgcgcctcctccttgagctccctcggcaggttcttgaggtaccaggggtgggtcttgatctcgctcatggtgatcctcttgtacgggttctggacgaagatgcgggagaggaggtggcggcagttgtgggagacgtgcacgtactcggggatcttgtactgaaccgacatgatgcgctgtattgtcttcctgaagttctttgggtcctttggatcctcgaacgggtacgcccccaccagcatgacgtagagcgtgactccgcacgaccagacgtcggcgtgcttcccgtcgtactctcgccgcgacagcacctcgggcgcgatgtacgccggcgtgcccaccgttgacttcggtcgcgagtgcagcaccgaggacttggagtagccgaagtcgcagatcttgaggcgcggcgccgggctgccgtccagcagcgtgttctccagcttgaggtcccggtggcagatgttcatggcgtggcagaagctgacgccgcaaaccagctgctggaagaagtagcgcgcctcgtcctcgtggaaccgcccggcgtcgcagatgcgctcgaacagctccccgcccgcagcgtactccatcacgatcgcaaggtgcgtgggagtcagcaccacctccttgaaccggatgatgttggggtggcggagggagcggtggttcacgatctcgcggaacacgttctcgtcgatctatcaattaatccatcaattagatactagctagcaaagaagacgcgacggctagactgactactcaccctgtttcctcgctctatgaacttcatggccaccagctccctcgtgtccttgttcctcatcagcttggccaccccgaagttgcccgccccgatctcgcgaacgggctcgtacttgtccatcggatcccttgccttcctagctagcttatcttgccttatcgtggattggaggtcagctagcagggagggagaagacgacgaagggggatgtgggtggagctgagtcactagtcagtcagtccagacggaggagcaggtgctgc

SEQ ID NO: 18239 - DNA, 7891 bp, Zea Mays
  misc_feature (4223)..(4322): n is a, c, g, or t
aaagaagaagaagacaaaccccagtccgtattcattgttgggccgaattctcataggccgagccgaaccctacaccaatactctctgtccaaccgtggcgagcgaagaagggaaaacctgagaaggttcgcgagagcaggttacttgcgggctgcgccgcgccgcgccgcgccgcctttgccccttcccttccatcgcgacttgcgaggggagagtttgggactcgctgcccctcttcgcttcccaccaacctcctcttctccgtcgattccattcgattcgaattcgcgatcgcccaccaccgcaccaagcgccaaaccctgaccctgatcctaatcctgtgcgccacaatggcggagtcggagaagggcgccgccgcaaccaccaccgccgccgccgagcctgggtccggcccgccgcacgaggacgaggatgcgctgctcgcccgtgcccacactgtcatctccaggatcctcgaccgcgagctcgaccccaaccctcgcctcctccacaccctcgccaccatgtgcgagctccacgaagccagatatcttgagttacgtgcagctgacccaacgttcaataacacgaacacaaggagcacatttacaattgggaagctggccaatttgctccgggacaatgacgagttttatgagttggtgttttgtaaattcttgtccgacacctcctactctgttgctgtacaagccgctgctgctaggctgctcttgagctgtcactctgcctggacgcctccgtatcctcatgtctttgaagactctatcatagataatattaaaaagtgggtaatgaaggatcctgaagcatctaatgaatgtgagtggaagtatctaggaaaaaataaacccacagatgctgagatgctgagaacatatgcgattgggttgcttgctatggcattgtgcagtggtgggcaattggtagaggatgtcttgactttgggggtgccagcaaagctcatgcactttctgcgcataagagtccttggtgatgcctcatcttctcaaagagatgctaatcatccacaagacaccaaatatcctcgaggcagagacgataataggggtaaatcacgtctggcccaagatggttctcggttggatggaacaagggttgggtatggaatattgaccaacccaacagcagagaaggacaatgaacctggtgttgtaatgaggcaagcatatggagaaaggtcattggatggcacttttgcctcatcagataattctgacgtccctgaggttgattggaccaatgataactcttatggcacaattgtttgtgacacaaagtcaaaatatggggaaaagacttctgtgacaagggctcttaaagatgaagagatcagcgaaaatggtgaactgttgaagagaaagctgagtcgagccccctctcgacttagagtgaagggaaaagcaggagacaacttgcctgaatgtgaaatgacacctttatcaccaacctctggattgagaatcggaggtcgggcttccagagacaggaatgtggtgagggttgatgacccaaagaaggcaactgatgtgaacaatagttctgcaggcctcgagttgtttagcgctatttccaaagaagaatatgaagatcgtttgagggattgcattattggcttgaaggatatatctgacatcgttttgaaggcagtgagagctgctgaggctgaggccagatctgcaaatgcacctgatgaagctgtgaaagcagcaggtgatgctgctgccgagcttgtgaaatctgctgctttggaggtttggaaagccgaaaataatagtgatgcggttatagtagcggcagagaaagctgcatctgcagttgtagaggctgcagtgtcgactagtgtctcacgaagcacaaatcaagttggtgaagaacgtgcagcggaagaagctgtacaaaccagcgaagaccaggatttggaaaattttgttatcagtgacaaatcacagctcttacaacttagagaaaaatatagcatccagtgtctacagattttgggagagtatgttgaagctttgggtcctgttctccatgaaaaaggtgttgatgtttgcctcacattattgcaaatgagcatgaaagaccaggagggatgtgaccactttgctcaactccctgatgttcttaaattaatttgtgcattggctgcccatcgaaaatttgctgcactctttgttgatcgtggtggtatacagaagatcctctctattcctagaattacccagacatatatgggtctttctgcctgcttattcactttcgggtctcttcagtctaccatggaacgtgtttgtgcgctctcctctgacacacttgacagtgttgttgaattagcacttcaacttcttgagtgcccacaagatttagctagaaaaaatgtgggcatctttttcgctgctgcttttgtgttcaaagctgttcttgatctatttgatgcacgagatgggatgcaaaagcttctcgatatcctatatggttgcgcatctggaagatctggcagtaattctggaggagcaggatcctccaatgtaaatcaagggaatgatcggtcacctgctgaagctttgactgcatcagagaagcaagttgcataccatacttgtgttgctctacggcaatactttagagctcatctccttcagcttgttgactccattcggccaagcaaaagcatccgcagtattgctcggaacacttctagtgcacgagctggctacaaaccttttgacattagcaatgaagctatggatgctgtctttcgtcagatccagcgggacagaaagttaggccttgctcttgtgagagttcgttggcctgtgttagacaaattttttgcctcaaatggtcacgtgactatgctggagttgtgtaagtttcaggcacatggtgatcgctatttgcgtgatttaactcaatatgcaattggagttcttcacatcataacacttatgccacaaccacatgtccgcaaatcaatagtgcagggaacattaagcaacaatcgtgctggtatggctgtcttattagacacggtgaaaagttttgactacattgatcatgaggtgatctgtccagcactgaatgtcctcgtcaatcttgtatgcccgcctccttctatcagcaacaaaccattgtcaactgccaatcagcaacctgcagccgcgcaagcacttgcttcagaaagcagagataggaacttcgaaaaaagtatttcagataggaatctactagcaaatcagggtgaatatcgtgaaagatctggtgatggcaaccctgctgaaaggaacaataccttgcatcaaggaactcctaacacacctgttgtgacatctggagtagtcggtgatcgaagaataacattaggtgttggaggtggtggtcctggtcttgctgctcaattggagcaaggataccgtcaagctcgagaagttattctattcgagcgcttgcctgccgtgtcctgcttggcctggctagagatgatacaattgcacatatactgaccaagctccaggtggggaagaaattatcagaactgatccgtgataccagtgcccagacatctgcgggcgatagtggaagatggcaagctgagctgacccaagtggcaattgaactaattgcggtattgacaaattctggaaaagaaacaacattagcagcaactgatgctgctgctccagcattgaggcgcatcgagcgagctgggatagctgctgctactcctatctcctaccactcaagggaactgatgcagttgatacatgaacatcttcttgggtctggtttcactgccactgctgccatgctgcagaaggaggctggccttgcacctttaccattgatagcagcggtgcttcctgcccaccaagttgctgccctggaagcatcatctgttcagcaacagtggccctctggacgtgttcagggatttctctcagataaaataaatatgtcgacagatcaatctgcccatagatcagattctatcccgccttcatctaagaaaaaagcactgaccttctcatccagtttctcacgaagagctcagactccacattctgtttctggcagcagaacaagcaacatccttaaaagtcctgtacctattgcggctgatactagagatgcagaaatgttgaataagacaccactgtcgctgccacttaagaggaagcttnnnnnnnnnnnnnnnnnnnnnnnnnnnnnnnnnnnnnnnnnnnnnnnnnnnnnnnnnnnnnnnnnnnnnnnnnnnnnnnnnnnnnnnnnnnnnnnnnnnnaagcttgtggatgtgaaggataataattctgtatcagcaacgaagcgcctcgcaacaactgatcaaacgtaccaaccctctgtattccaaactcctgctcctactcgcaaaggtctgtcagtagcagtagattctcctacttcatttcattgtggccggacaaacttcaactatgtttctactgaaaacttggacaattctcaaagcacaccaggaacgttgatcaccacaacacttcctggtgtgaatgatcaacaatcaggaaatttggaacgtatgacacttgactcactggttgtacaatacttgaaacatcaacaccgccagtgtcctgctccagttacaactttgccaccactttctcttttgcaccctcatgtttgccctgagcctagtcgcagccttagtgcacctgcaaacatagctgctcgtatgggtagccgtgagataagaaggcagtttagtgggatccagatacctcgtagggatcgtcattttatatacagtaggttcaagcagtgtcgggtttgccgtgatgaggcatcactattgacttgcatgacatttcttggagatgcatctcgagttgtggctggtaaccacacaggtgaattaaggatatttgactgcaacacggcaaatctcctagagacccaaacatgccacctacatcttgttacaacgatggaggcgacatgttctggtggacacgagcttattctcacatccagcctaaatgaggttaagatctgggatgccttctcggtatctgcagggcctttgcacacatttgaggcctgcaaagctgctaggtttaaccactctggaacttcatttgctgccctttctactgatacagctcaacgggaggttcagttgtatgatgtgcagacatatactcttgctacacagcttcctgataacactagcagttcaggttcgggccggggttacatacaacccattatacatttcagtccttcagacacaatgttgctttggaatggagtcctgtgggatacaaggcagccaaattttgtacatcagtttgaccagttcacagattactgtggtggtggcttccatccggcaggaaacgaggtgatcttaaattcggaggtgtgggatctgaggaagttcaagcttttacggagtgtcccttccctggaccagacagtaataaagttcaacggcactggtgatgttatctatgccatcctgaggcgtaatcttgatgacgtgacatcatccatcaatgctcggagggtcaggcatcctcttttccctgcattccgcacgattgatgcggtgacttactcggatattgcaaccgtccaaatcgaccgctgcgtacttgatcttgccactgagcccaatgattctcttattggggtggttgctatggacgatcaccaggagcttttctcttctgcccgcttgttcgaagttggcaggaagcgaataaccgatgacgattcagacccggaggatgcaggtgaaaccgacgatgacgacgacgacgatggcgactctgatgatgatgttctccttgcgccggtgctggaaggggatacagattccgaagagattagtagcagcagcgatgatggtgatgaagatggtggtgacgatgatatccccagttcggatgacattgaagatgacccagagtacattgatggtggtggtgattttgaagggggagggggcttgatggatattttgggtgatgacgaaggggaaggcgatgagagtgatatgatggaatcctttagcagtggcgacgaggagggttggatcatgtagtttttttttgggtagtgcagccctgccgaagatggagcatggccctgtacaagtcaatatttatacgctcacattatgattgtaattattatttcctggttcttttgagcagctcctgccctgctagggaaatgtggaacataatggaagatggtgtaagtaaaggtgggaagagaacaatctaataccaatcgattaaaaatctatctatctattaattaattaatttatttgtggtgtgtgatctgactttggttgtggtgctcactgtcaatgaaggtcgatgctaactgctgatacctgcttccttttcttgttaagatgtcatgagagagaatcctaccactgaatattttcatcaataccatcaccattatgatagtgtatagtttgactgaaattcatgttacaggcacgcattacaacacaaaactaccaatggcaggcaagatactaagagtcagatttggagtctgctcataatcatgtcgaactctccgctggcgtgcacctgccgcaccgttctgtcgtagtcgtcgtcatcgtcatggtcgtcttcttcttcctgttgctctgcttcgtcgggcctggacggtggcttgggcaccgtctgcgcctcctgcacgatcctcaagatctcctccacgctctgcgacgagtaggcgggtgctgctgtcgcattattgctgctgctgctgctgctgtctccctggcggctgtagtagtaggctgcctgcgcctcctccttgagctccctcggcaggttcttgaggtaccaggggtgggtcttgatctcgctcatggtgatcctcttgtacgggttctggacgaagatgcgggagaggaggtggcggcagttgtgggagacgtgcacgtactcggggatcttgtactgaaccgacatgatgcgctgtattgtcttcctgaagttctttgggtcctttggatcctcgaacgggtacgcccccaccagcatgacgtagagcgtgactccgcacgaccagacgtcggcgtgcttcccgtcgtactctcgccgcgacagcacctcgggcgcgatgtacgccggcgtgcccaccgttgacttcggtcgcgagtgcagcaccgaggacttggagtagccgaagtcgcagatcttgaggcgcggcgccgggctgccgtccagcagcgtgttctccagcttgaggtcccggtggcagatgttcatggcgtggcagaagctgacgccgcaaaccagctgctggaagaagtagcgcgcctcgtcctcgtggaaccgcccggcgtcgcagatgcgctcgaacagctccccgcccgcagcgtactccatcacgatcgcaaggtgcgtgggagtcagcaccacctccttgaaccggatgatgttggggtggcggagggagcggtggttcacgatctcgcggaacacgttctcgtcgatctatcaattaatccatcaattagatactagctagcaaagaagacgcgacggctagactgactactcaccctgtttcctcgctctatgaacttcatggccaccagctccctcgtgtccttgttcctcatcagcttggccaccccgaagttgcccgccccgatctcgcgaacgggctcgtacttgtccatcggatcccttgccttcctagctagcttatcttgccttatcgtggattggaggtcagctagcagggagggagaagacgacgaagggggatgtgggtggagctgagtcactagtcagtcagtccagacggaggagcaggtgctgc

SEQ ID NO: 18240 - DNA, 2650 bp, Zea Mays
ctcatggttgcactgttatcccgggtggtctctcaacgaacaggtccttacggagaggtactcgggaaacaacccgagtcccctaaatgccacaagtatatcatcatatccagaataaaatcatagcatcatcattgtatctcatcatgttcattgattaaagtaaagcgctagcatgtagctaaccatagtaacccaaaaggtaaatcaaggacaaggtaaatagaaagctagtaaatccttaggttgttcatagtatgtgggacagtgtattataaagtaaatgggacataatgggtcagaggacacttgccttcaccaaacagatgctcagggtcttcaatcacgtagaactcgaagagttcgatcactctgtcgccatgcttgatcatcgattcctcgaagctcataaacgaatcgcgatctaatcgcacgcgaagcaaagatgaacaggcacaagcaaataaacatatacataagaacattacaccatacgagataagatgttataaaaacatgcagcataaaatagagagcgcttctacggttacgcggggatgagaaacgtgacggtcaaagttacattcgagaagtcgtaacgtttacactaaataaatattaactaaaacgtttaattcgacattatcaaatataaataatatctaccatttagttttgattaacttgttacattagcggctatcagttaaaccagtaatttaattaaggcgagagattctaagcgaggcgaatttacgacgagcgaaacaacatgacaacgtgcgaaagacgcgcggacacgctcgacatagcacgccgacgacacacgaaacagcacgcgaccagcgcgaacgagaacgccaccacacgcggaaaaacacgcgcgacaggcaaaaaaacaaaataggtgagacgtttatactaaatgaatattaaataaataaaaggtagttaagttgatattagtcatgttaatgtttattataaaaacgcaagttgacaactatatatatttaatatttaatttaattgaactactaatctaataaacattagacgagcaaacattaaacaaattcattagaatatgcgaccagatgaatgtgttatactcatgagtatttaacgaaaacaatatattatgacgcgtggacgccacgtgacacacgtgagatacgcgctaacgacgcgtggtagggcgagcagcacgtggacggcacgcgacgacgcgcgtgaacaacatcgcgaatagcgcgcgacgacgcccacagacagcgacgacacgagaatcactacatttatcgatttatgctaaagcatggccgacaattaattaattaattaactaaagcatgaggtacgataaaataatattttaacgtgtacataatattattgtgaaggtgaaacaattagaatagagtaaatcggacgaccataaaagttcacgtgtatttactgaaccgttgatttaatattacgcgcggacagcgcgcgacaagcgacaatgtgcgaaaacaacccgcggcaacgcgtgcgaatagcacgcgcgacgacacgcgcgaggaaataacgttactagcaggttgacgacgaggttacgaagttaaagccactgaaacgaatagaaacaggattatggcgcattatatatggaatagctaacaattcataggtaataaacaattttattaaagcgcgcgaatcgcgactcgcgcgaacgatgacacgtgaacagcacgcacgaacgtcgtgtggacacacgcgacacgcgagcattgcatatattgcgtctatactaagtaagtacctattcagaaacatttgatttgatataataatattaacatgtattttaaaatcgcaaagtaagaatatagattaattttaattgcaacactactttaataatcattgaatagacaagagattaaataactatttaaaatatacgatatgacaaaataatattttaatatgcagatgacgtggttatggaattagcgtaattagaatggtccaaaacgtatttataatcgcaacatatactgaatgaataatattccgcggattataggtgacgtgtcacgaactagttggttgaaccgaagccacatgaagggtcacatggggacacaaccacataggatgaaagggagtaggatctaatgtggctgctccctttcttcaacctctcaccacgcacacacacacaggggaacaaccggctctgggatttctgcgcaggggcggggctgtgggccggacgcgtcctggatctctcttctgcggcaagcaggccgctcggtcaggggaggcacgaggcgcaaggcaagctaccagctgggcgccgagcacgccgccgcgcgggattagggagggagcagggactgggcgggctggtcggccatggctagaatgggcagacgacgtcgcttgttggggcaacaggacaggggcgccacgcgggttctcgctgggaggaggtgccttaccacgggcaaagccgcgacaccgtgccaggttgccaggcttggccgcgctgcaggggaggggaagaatgcgtggggagggagggagcagccagagaagaagagggataaagggagaagaagagggagcctcacccggccactaacctcggcaacga

SEQ ID NO: 18241 - DNA, 780 bp, Zea Mays
gcttgagaccggggagcagagtgccgtgttcagttacattgcagaaggcgggtattatgcagtgacgatggagaagacgacggagaagcacaccattcgtttcatagagcagaatatgaatatagtagtagcagcagcaacagtaattaagagcagtagcacaaacaaaaaaaatcaaaaagacagacaggtgatgattactaaccaggacgtagagggtgcaggcgatgatgacggatcggtagcggcccaggtaggcgtcggcgaggaaggcgccgagcaggggcatgatgcaggccgtgccggaccaggcgttgacggaggcggcggcggaggcgttggactgtcgtagcggaccagtcaggtacgtgattaggttggcagagatgccgaagtaggcgaagctaccggcgatctcgacgcctgattaatttggaggcggggcgggggattattatggccgattggatatccagtttcaaacaaacaagagcaagcaaatactgtacccacgacgaagagcgcggatctccatcccccggagcttccgcggtgcacggaccgcccaaggtagtcggagacgccggcgagaggatcctgctgctgcttgctggactgcgagaggggaaggaggggatcgccgaggatggtgtcgccgccgccgttggggtccatagccacggcctcggcgcgccgcctaaacgaccttcccttccctttcgttcgtggatggtatttgggaggtttggttgttatccccgtggtggtcgtcgtctacct

SEQ ID NO: 18242 - DNA, 3438 bp, Zea Mays
catgaacaatcataaatcattagattatttatattctcattatatgatcatgaacaaacattaataatattgaattacatttgtatcttcggcttgacagaatgtaagaatccaagagcgacgtgcgagtgattacaaatcagcgtgaacaatattgtgttactgttcatctatttataggcacaggacgcagcctgggtaaaattacattcatgtccttgacatttactattgactaaggagtaatctgtcgaggactaagcagtcttttcccctttaggtcggtttcattctccatcaccgtctttgcgctaagccgaagcttcttcatccatagcttcggaactgattcatcaatcttccagaccgtgcctttcataccgtgcgcatcttcatctcaaagtcgaaggttcctgtaacagtatattatacttgaaaaacatgttagtcgtgtttttgaggacctttggaagacgaaggcccccaacaattacctttccctacttttttgcattttgtgttccaccatgtgttcctcgaatccttacatgttaatatgtttaatgcaggccaactgaaatccatgaaaagcttggtgttgctgtgaaagaaggtgataccgattgtgatgcttaattgattgagaagatgtaaagaaataaaaatcaacatgcttattgtaaaaaaatcagtaagattttgttgatgtaatcctttagtaacatgttatctttattagcaagtgaagtatggtattggatagactgcaaagtgaatggtgagttgtcctagaatagtgaattgcccatagcatagtatctgaatttgctcctggttgtattctatataatgccatgtaatatatttgagcactagatatctgccttcaatttgctcctgacgttcccttgcattattatatattccttattaataattaggatctggtgcatgcacgttcccttgcctgattattgtggttccttttttattttatgtttccttttctagggcatccatgattattatattccttaattaggatgtgttgcatgcatgattgacgattccttaattaggatcgggtgcatgcacattccctttgcctcattattgtgtttctttttttattctctgtttcctttttagggcatgcatgattatattccttaattaggatatgttgcatgtatgattgatgtttccttgtctgacttattgtgtttctctatttatactgtgtttcccatctgtagggtcgttggagtctcatcaatttttctgtagcataccacgggcacgtacgtagtttcaaattaacccgctgcacgtcagttccctccgcgcaaccaacctccacgtcctaaaacacacctccgcatatagatggccaaacgatatcaaggcacgggtccgacgtccgtaggccacaactctggcctaggcacggccggcctgctgattgttttttcaaattcttgggtggttatcaagtagccctactgatatagaaagtcatattagaatattaaagcatcactttcaatggtcgtcccatatcatctttttataaataacccctcgcatatatttcaaattaactcgatgcacacttgttccctccgcacaaccaacctccacgtcccaaagcacacctccgcatatagatggccaaacgataaccaggcacgggcccgacgcccgcgtgccacaactctagcccaggcacggcatgccggcctgctaactgtgacgggctggcccgttagcccgttgggctatttggttaaatcagcgtaaaatgtttaaaaaagcggtgcatgaggtggggttcgaacccacgccctgatagaagaagagcgagagacactgggtgaagttgtctaaccagtagaacatcatgatcaagtacctttaatattgaatataaattgtagatatgtatatacatttttagtaaaataaaaatatataattgtgtcgggccggaccagcactacgggccgaggctacagcccaagcacagcgctcgtgccgggctggcccaggtacggcccgtcaaacacaacccatttggccatctatacctccgcacgataatgatggttctcgcctcagttgccgccacctcgttcgtcatcctgcttcttttctctctcccctcatgcctccgcttccgcaccactccattctcggcagagggtgtggaagcagacgcctcctccccgtatttgtccgacaccagccccgacaccgacccgcgcagtggctattgcacgtccacgaggacgtttcacagcatgcgcgcaccatcatcggacgtcccgttcgtcttctcggccttcgccatcgtcggatgtctcattcgtcttctcggccttcgccttgttcttcctccccaacctaccgccatcgcccacggtcacagtcgcgagccaaccgacttattttagaaactagagcttacaaacttcttttgtctctgtatggtaaaattatgtcattatataatctccatacattcagtcaatcgttgtgaactctattataatcgatccttttattggctgtgttgtaccaagacatattggatgaagtaaacaatattaattagtcaaataaaaaaatattatgcggagagtagagacaatcaataaaaaaatcttaggatctttttggtggatagtttacgtggatattattgtgagccgtggtaatgcacggacaaccaactggtataccttggtcgtgtggtttcatcaatatttttcaaaaaaacaccttaagagtgtagattaaatatggactagttatatggccgtgcattgctacggtttttatatataacatagaataaattttattttaataaaacataaaatatatgttattgattatgtgggtgtgaatgtagagccaacaaggttcaaacactaacttatacatgatttcaccttattttttatataaactctcatattatagtagtagagaagatattataggagtgcaggttgattctaaagaaatatagatgtttttttaaaaaaatattgacgcaaaacgaccattgaaactgatcctttaatataatagagatctattctatgttatatataaaaaccgtagcaatgtacgggcatatgactagtctatatctaatctacactttacaaacagtacaatctacagtgcaaaacaaacggtgaccgaccacagtgtatagtagtagttctagttcacccatatctatggtctctaaaaatgtcaccgttttgtattgtagattgtactacaaacaagggtatgaataggctgccgaagatggttagtaacagaaacaagggagtgggggataaacaaatcccatggatcttcatcttttattattgggcaaaaatgaattggtaatgtaattttggactcacctgctaagag

SEQ ID NO: 18243 - DNA, 4927 bp, Zea Mays
atggccgccgggagaggccacgcggaggacatgctgggcttcaaggaggacgacgccatgcgcttcatcttcggcgaagacatcatgggaatggaggaccacggcgccttcgacagatccctcatggagcttcaggttttcaaggaggtcttctgcggggccgcccataacgtcgccgccaccacccatctgcccaccgagatggaccttggattcgtccacaccagcgccgccgctgcccacctcaaggccacggagacctcgccctctccatttgtctcccatgcgcagcagcagcagcctgctgccgctgccactgctgatccacagctcacaatggatcgtagccagccaaactatggacctcgccacgaccttcacccccaggttcaggagcacgcgcacactcgtgcgcagcaaaacgggaccgagctggatgatgctgcgttcatgcacagattcatgggttcctggcagcctggggataagcacgcgatccatctgctcggcctatccgatgaccaacacccattcgtcggcgcagatttggatgtgcacgcgcaagatattggagctgggatgtgcaatgctcccgggctgggctgcagcagcagcactagcgcggttgatgaccccatgccttccttcatagaagcgctagcggagatttctgaattccagagtgccactctccttccagatccctttttgcatcagtggttccaggagcagcagcaattccctaccaatgcatgcttctcttacgatcaaggccagatggatgacaccacttatcccctatgtgcaagtacaaaggatttccctgacagagagcagcatctgtgttacagtgaagaagctcatagtactccaacaatacctcatcagtcccatatttggttcagccctggtcagttcacccagctcgatggcaccaccatttgccaggaaggcacgcctgatgcgaatattagttgcccggatgaaattgatgttcatggatgcggcagcagcgcggtacactttggctcggcagctgctgtttccaagaaggccttgggcagggatattcctgaccagctggaagcacatgcgcatcgccttttcaaggacgctggatggactattaagccacggaaaaggaatgacagggctaagatggcgtcctacttcacagctccaaacaaggaagcggttcatacctcactaacccaggcttggaagttttgtggcaaaaagttatatgaagcttccccagatacagaaaggggaaggtatccaaaggagtggtcagatgttgattcgttttggaaggatctcacagatgcaatgacctatgttgataggatgcttgcaaaccagcaaaatgcactcacgcttctccaacgttggcagattttggatccttttgtagctgttgtgttcatcagtaggaaaatcactgctctgcagcaatataaaactcttagagctgtcgacagttcaacctttgttcttgatggcagctcagacacatcatcggtaagtaagatcatgcacaaagccagtgagcttttgacaagccgaatgatccggttgactccactgatcacagactctgattgcagcacacttgcaactgagagctacaacgggcatcaatctttacagagctgtcatgatgtagaagacaacaactatagggatacggacccaaagctttcctgcaatgagagtctgaattacaatgcaagtgacgagacaaaacatcacatcgatgcaagtaatgatggaagacaaacttatgctcaaccaaaaactcttaatagctctgtaaaaatgtcaagcaagaaaccgaaaagaatatttgatattagtgcagatggactggacgagaccaatgtagcaactatggacatggctgacccaggagacactaatgcctttgaggaacacattatgtattcaggtgttagcacactaaaagacgatatgaaagctgaaacaaaatcagaaaagctagataaagatgatcaaagcagcaagtgtgacatgctcctctcttcagtggtcaagcaacttaaggattacagtacattctcagatacccattgtactacaagggagtcacagtcagatgccacaacattctgccatgatgacaaggtctggaaaaagatagtcccatcccatggagaattttatgaggattcacagagtgagccaacaggaaatactgcacctgttgaattatcccatgatgttctgggaacttatctaatctgtgactcacaaatctgcgagagaggcactgccaaaatgaaaacgaaggattggttgaagtacatgaagaaaagacctcgcgagttgcggatcaatgatgaggaccttttgatgacagctatagtgaaaaacaaggaccttggcacctgtcacaaatttgcttcaggttcttcagccgcaaagaagtttaagaagctgaagagccacaagaaaggtaacaagctactttctaaaattgggaaagctggcacaaacctattgggtggaaagagagtaagtttggcccgtaaaactgtaatctgctggttgcttgcgactggctttctgagcgtaaaagatgtgatacagtaccgggatccaaaaagtaataaaattataaaggatgggatggttacctgggaaggtattgtttgcaattgctgcaaaaaaaacttatccgtatctgatttcatggctcatgctggtcgtagtcacccacagtcctcattgggcctctttctagagtctggcaagtcatacactttgtgcctggttgaggcttggtctgctgaatctatgagcaggagaagcaatgcatggggtagaaaagttgaggcaatagatgaaagtgatgacacctgtggtttctgtggagatggtggtgaattactttgctgtgacaattgcccatcgacatatcatcaagcttgcttgtctgctaaggagcttccagaaggtagttggtactgccataattgcacttgtcaggtttgtggggggccatttagtgaaaaggaggtttcaacattctcggcgattttcaaatgtttccaatgcggagatgcataccatgacacttgcattgaacaagagaagctacctcttgaggatcaaatatctcagacatggttttgtgggaaatactgtaaagagatattcatagggctgcgtagtcatgtcgggacagataatattcttgacagtgacctttcatggtccatactgagatgcaacaatgacgggcagaagctacattctgttcagaagattgcctgtttggcagaatgtaatatgaaattagcagtggctcttactctattggaggaatgtttcattcgtatggtggatcctagaactggtgtggacatgataccccatgttttatacaacaagggatcaaactttgctcgtgtggattatcagggattctatactgtaatcctggagaaaggtgatgaaatattatgtgtggcttctatcagataaaactttatttttttctcatgcagagtacatggaactaaagccgctgagcttccttttattgctacttctgtagactttcgacggcaaggaatgtgccgaattctaatgagcatcattgaaaagatgctctgttcatttaatgttaagatgttggtcctttctgccatcccagagttggttagcacatgggtgtcaggatttggcttcaaacctatcgaagatgctgaaaggaaacaacttcataatgtaaacttgatgttgtttcctggaacatccttactaacaaagagattggatggatttattatggccacaaaaccaggcgaggaaaaggatatacatgaagtttctggagtgcctaatcttaagcgtatgcctaatgggaaagcaaatgagcatttcaaactccatgaccttgatttgtccgggacagagtttaaagctgaggtttccgtgaatggtccattcagaacactgaaacatgaatgtggttcagcagcatggtttcagtctactaagttagctgttggggaagtgtgatattcttacacaaattatctgggctcatgctctgcatcgatactagctgctttgtgttggccaatttcgtcttcccacttcatggctcaaattaatttgcagcagcaaaatcattcgaacacttgctgctgcatgaactcatccttttcaagtaaagttctcacaagactactgggaaatggttgggatgacgcaggcatccatgaatttgggttgagcaaagttgaagaaaccacagattggtgtggtctgttctgcatcgagaaaatggaaattataactgtctctcctgggtgaagtgctctcctgagactgggtaaagtacgcaacacctgagttgatattgcttgcacgttgaacaaagaggatgtatttgcactccaacgtacaaagtgtaacgcattcggccccttttcaaagtaagccatgataggaattaatctaagctgtttggtatatacatcaaaagggtactgcagtaacatgtttggtaccttctcttgcgagttttattttgatatatgtgttttatatgtgtctagattaatcatcatctatttaaatatagacataaaaagaattatattctggaacggagtgagtattattttgccatatgtgctgttaggttgaggcccaaatggcaatgcaatgcatctgtcggcagttgattttcctgagtgccagattggttttgtaatccttgcggctatggaacgattgttcgtcaagtccttaagttattttggtttgtgattaaataatcgggcgtccgatccatggtgggcaccgttctctctacctgattttcttctgtcgctgcctgcaagcaacagagttttggttgccgtcatttcggtctgctgcaacaaagtttctt

SEQ ID NO: 18244 - DNA, 5219 bp, Zea Mays
ctttgctccactcccatacagagtccagacgcccgccccgtcgccgccggcactcagctaccaagccgccgtcccggaccctcgattttcctcgccggagcggagcgcccacccctcttcgctcgcctcggatctcgcccccgatttgctccgcccgctcatccccaaccactattctctcgtctcgatccagcgcaggctactcgagattcagctgccgccgccctctggatccggccacacaatccgcttccgctcccgctgcctccccgacccgaccgcccatctcgctcaggctccctcctagtccctaccctagctgctagctaccactaccactaccatggccgccgggagaggccacgcggaggacatgctgggcttcaaggaggacgacgccatgcgcttcatcttcggcgaagacatcatgggaatggaggaccacggcgccttcgacagatccctcatggagcttcaggttttcaaggaggtcttctgcggggccgcccataacgtcgccgccaccacccatctgcccaccgagatggaccttggattcgtccacaccagcgccgccgctgcccacctcaaggccacggagacctcgccctctccatttgtctcccatgcgcagcagcagcagcctgctgccgctgccactgctgatccacagctcacaatggatcgtagccagccaaactatggacctcgccacgaccttcacccccaggttcaggagcacgcgcacactcgtgcgcagcaaaacgggaccgagctggatgatgctgcgttcatgcacagattcatgggttcctggcagcctggggataagcacgcgatccatctgctcggcctatccgatgaccaacacccattcgtcggcgcagatttggatgtgcacgcgcaagatattggagctgggatgtgcaatgctcccgggctgggctgcagcagcagcactagcgcggttgatgaccccatgccttccttcatagaagcgctagcggagatttctgaattccagagtgccactctccttccagatccctttttgcatcagtggttccaggagcagcagcaattccctaccaatgcatgcttctcttacgatcaaggccagatggatgacaccacttatcccctatgtgcaagtacaaaggatttccctgacagagagcagcatctgtgttacagtgaagaagctcatagtactccaacaatacctcatcagtcccatatttggttcagccctggtcagttcacccagctcgatggcaccaccatttgccaggaaggcacgcctgatgcgaatattagttgcccggatgaaattgatgttcatggatgcggcagcagcgcggtacactttggctcggcagctgctgtttccaagaaggccttgggcagggatattcctgaccagctggaagcacatgcgcatcgccttttcaaggacgctggatggactattaagccacggaaaaggaatgacagggctaagatggcgtcctacttcacagctccaaacaaggaagcggttcatacctcactaacccaggcttggaagttttgtggcaaaaagttatatgaagcttccccagatacagaaaggggaaggtatccaaaggagtggtcagatgttgattcgttttggaaggatctcacagatgcaatgacctatgttgataggatgcttgcaaaccagcaaaatgcactcacgcttctccaacgttggcagattttggatccttttgtagctgttgtgttcatcagtaggaaaatcactgctctgcagcaatataaaactcttagagctgtcgacagttcaacctttgttcttgatggcagctcagacacatcatcggtaagtaagatcatgcacaaagccagtgagcttttgacaagccgaatgatccggttgactccactgatcacagactctgattgcagcacacttgcaactgagagctacaacgggcatcaatctttacagagctgtcatgatgtagaagacaacaactatagggatacggacccaaagctttcctgcaatgagagtctgaattacaatgcaagtgacgagacaaaacatcacatcgatgcaagtaatgatggaagacaaacttatgctcaaccaaaaactcttaatagctctgtaaaaatgtcaagcaagaaaccgaaaagaatatttgatattagtgcagatggactggacgagaccaatgtagcaactatggacatggctgacccaggagacactaatgcctttgaggaacacattatgtattcaggtgttagcacactaaaagacgatatgaaagctgaaacaaaatcagaaaagctagataaagatgatcaaagcagcaagtgtgacatgctcctctcttcagtggtcaagcaacttaaggattacagtacattctcagatacccattgtactacaagggagtcacagtcagatgccacaacattctgccatgatgacaaggtctggaaaaagatagtcccatcccatggagaattttatgaggattcacagagtgagccaacaggaaatactgcacctgttgaattatcccatgatgttctgggaacttatctaatctgtgactcacaaatctgcgagagaggcactgccaaaatgaaaacgaaggattggttgaagtacatgaagaaaagacctcgcgagttgcggatcaatgatgaggaccttttgatgacagctatagtgaaaaacaaggaccttggcacctgtcacaaatttgcttcaggttcttcagccgcaaagaagtttaagaagctgaagagccacaagaaaggtaacaagctactttctaaaattgggaaagctggcacaaacctattgggtggaaagagagtaagtttggcccgtaaaactgtaatctgctggttgcttgcgactggctttctgagcgtaaaagatgtgatacagtaccgggatccaaaaagtaataaaattataaaggatgggatggttacctgggaaggtattgtttgcaattgctgcaaaaaaaacttatccgtatctgatttcatggctcatgctggtcgtagtcacccacagtcctcattgggcctctttctagagtctggcaagtcatacactttgtgcctggttgaggcttggtctgctgaatctatgagcaggagaagcaatgcatggggtagaaaagttgaggcaatagatgaaagtgatgacacctgtggtttctgtggagatggtggtgaattactttgctgtgacaattgcccatcgacatatcatcaagcttgcttgtctgctaaggagcttccagaaggtagttggtactgccataattgcacttgtcaggtttgtggggggccatttagtgaaaaggaggtttcaacattctcggcgattttcaaatgtttccaatgcggagatgcataccatgacacttgcattgaacaagagaagctacctcttgaggatcaaatatctcagacatggttttgtgggaaatactgtaaagagatattcatagggctgcgtagtcatgtcgggacagataatattcttgacagtgacctttcatggtccatactgagatgcaacaatgacgggcagaagctacattctgttcagaagattgcctgtttggcagaatgtaatatgaaattagcagtggctcttactctattggaggaatgtttcattcgtatggtggatcctagaactggtgtggacatgataccccatgttttatacaacaagggatcaaactttgctcgtgtggattatcagggattctatactgtaatcctggagaaaggtgatgaaatattatgtgtggcttctatcagagtacatggaactaaagccgctgagcttccttttattgctacttctgtagactttcgacggcaaggaatgtgccgaattctaatgagcatcattgaaaagatgttggtcctttctgccatcccagagttggttagcacatgggtgtcaggatttggcttcaaacctatcgaagatgctgaaaggaaacaacttcataatgtaaacttgatgttgtttcctggaacatccttactaacaaagagattggatggatttattatggccacaaaaccaggcgaggaaaaggatatacatgaagtttctggagtgcctaatcttaagcgtatgcctaatgggaaagcaaatgagcatttcaaactccatgaccttgatttgtccgggacagagtttaaagctgaggtttccgtgaatggtccattcagaacactgaaacatgaatgtggttcagcagcatggtttcagtctactaagttagctgttggggaagtgtgatattcttacacaaattatctgggctcatgctctgcatcgatactagctgctttgtgttggccaatttcgtcttcccacttcatggctcaaattaatttgcagcagcaaaatcattcgaacacttgctgctgcatgaactcatccttttcaagtaaagttctcacaagactactgggaaatggttgggatgacgcaggcatccatgaatttgggttgagcaaagttgaagaaaccacagattggtgtggtctgttctgcatcgagaaaatggaaattataactgtctctcctgggtgaagtgctctcctgagactgggtaaagtacgcaacacctgagttgatattgcttgcacgttgaacaaagaggatgtatttgcactccaacgtacaaagtgtaacgcattcggccccttttcaaagtaagccatgataggaattaatctaagctgtttggtatatacatcaaaagggtactgcagtaacatgtttggtaccttctcttgcgagttttattttgatatatgtgttttatatgtgtctagattaatcatcatctatttaaatatagacataaaaagaattatattctggaacggagtgagtattattttgccatatgtgctgttaggttgaggcccaaatggcaatgcaatgcatctgtcggcagttgattttcctgagtgccagattggttttgtaatccttgcggctatggaacgattgttcgtcaagtccttaagttattttggtttgtgattaaataatcgggcgtccgatccatggtgggcaccgttctctctacctgattttcttctgtcgctgcctgcaagcaacagagttttggttgccgtcatttcggtctgctgcaacaaagtttctt

SEQ ID NO: 18245 - DNA, 5217 bp, Zea Mays
ctccactgcagcagcttgcttgcctttgctccactcccatacagagtccagacgcccgccccgtcgccgccggcactcagctaccaagccgccgtcccggaccctcgattttcctcgccggagcggagcgcccacccctcttcgctcgcctcggatctcgcccccgatttgctccgcccgctcatccccaaccactattctctcgtctcgatccagcgcaggctactcgagattcagctgccgccgccctctggatccggccacacaatccgcttccgctcccgctgcctccccgacccgaccgcccatctcgctcaggctccctcctagtccctaccctagctgctagctaccactaccactaccatggccgccgggagaggccacgcggaggacatgctgggcttcaaggaggacgacgccatgcgcttcatcttcggcgaagacatcatgggaatggaggaccacggcgccttcgacagatccctcatggagcttcaggttttcaaggaggtcttctgcggggccgcccataacgtcgccgccaccacccatctgcccaccgagatggaccttggattcgtccacaccagcgccgccgctgcccacctcaaggccacggagacctcgccctctccatttgtctcccatgcgcagcagcagcagcctgctgccgctgccactgctgatccacagctcacaatggatcgtagccagccaaactatggacctcgccacgaccttcacccccaggttcaggagcacgcgcacactcgtgcgcagcaaaacgggaccgagctggatgatgctgcgttcatgcacagattcatgggttcctggcagcctggggataagcacgcgatccatctgctcggcctatccgatgaccaacacccattcgtcggcgcagatttggatgtgcacgcgcaagatattggagctgggatgtgcaatgctcccgggctgggctgcagcagcagcactagcgcggttgatgaccccatgccttccttcatagaagcgctagcggagatttctgaattccagagtgccactctccttccagatccctttttgcatcagtggttccaggagcagcagcaattccctaccaatgcatgcttctcttacgatcaaggccagatggatgacaccacttatcccctatgtgcaagtacaaaggatttccctgacagagagcagcatctgtgttacagtgaagaagctcatagtactccaacaatacctcatcagtcccatatttggttcagccctggtcagttcacccagctcgatggcaccaccatttgccaggaaggcacgcctgatgcgaatattagttgcccggatgaaattgatgttcatggatgcggcagcagcgcggtacactttggctcggcagctgctgtttccaagaaggccttgggcagggatattcctgaccagctggaagcacatgcgcatcgccttttcaaggacgctggatggactattaagccacggaaaaggaatgacagggctaagatggcgtcctacttcacagctccaaacaaggaagcggttcatacctcactaacccaggcttggaagttttgtggcaaaaagttatatgaagcttccccagatacagaaaggggaaggtatccaaaggagtggtcagatgttgattcgttttggaaggatctcacagatgcaatgacctatgttgataggatgcttgcaaaccagcaaaatgcactcacgcttctccaacgttggcagattttggatccttttgtagctgttgtgttcatcagtaggaaaatcactgctctgcagcaatataaaactcttagagctgtcgacagttcaacctttgttcttgatggcagctcagacacatcatcggtaagtaagatcatgcacaaagccagtgagcttttgacaagccgaatgatccggttgactccactgatcacagactctgattgcagcacacttgcaactgagagctacaacgggcatcaatctttacagagctgtcatgatgtagaagacaacaactatagggatacggacccaaagctttcctgcaatgagagtctgaattacaatgcaagtgacgagacaaaacatcacatcgatgcaagtaatgatggaagacaaacttatgctcaaccaaaaactcttaatagctctgtaaaaatgtcaagcaagaaaccgaaaagaatatttgatattagtgcagatggactggacgagaccaatgtagcaactatggacatggctgacccaggagacactaatgcctttgaggaacacattatgtattcaggtgttagcacactaaaagacgatatgaaagctgaaacaaaatcagaaaagctagataaagatgatcaaagcagcaagtgtgacatgctcctctcttcagtggtcaagcaacttaaggattacagtacattctcagatacccattgtactacaagggagtcacagtcagatgccacaacattctgccatgatgacaaggtctggaaaaagatagtcccatcccatggagaattttatgaggattcacagagtgagccaacaggaaatactgcacctgttgaattatcccatgatgttctgggaacttatctaatctgtgactcacaaatctgcgagagaggcactgccaaaatgaaaacgaaggattggttgaagtacatgaagaaaagacctcgcgagttgcggatcaatgatgaggaccttttgatgacagctatagtgaaaaacaaggaccttggcacctgtcacaaatttgcttcaggttcttcagccgcaaagaagtttaagaagctgaagagccacaagaaaggtaacaagctactttctaaaattgggaaagctggcacaaacctattgggtggaaagagagtaagtttggcccgtaaaactgtaatctgctggttgcttgcgactggctttctgagcgtaaaagatgtgatacagtaccgggatccaaaaagtaataaaattataaaggatgggatggttacctgggaaggtattgtttgcaattgctgcaaaaaaaacttatccgtatctgatttcatggctcatgctggtcgtagtcacccacagtcctcattgggcctctttctagagtctggcaagtcatacactttgtgcctggttgaggcttggtctgctgaatctatgagcaggagaagcaatgcatggggtagaaaagttgaggcaatagatgaaagtgatgacacctgtggtttctgtggagatggtggtgaattactttgctgtgacaattgcccatcgacatatcatcaagcttgcttgtctgctaaggagcttccagaaggtagttggtactgccataattgcacttgtcaggtttgtggggggccatttagtgaaaaggaggtttcaacattctcggcgattttcaaatgtttccaatgcggagatgcataccatgacacttgcattgaacaagagaagctacctcttgaggatcaaatatctcagacatggttttgtgggaaatactgtaaagagatattcatagggctgcgtagtcatgtcgggacagataatattcttgacagtgacctttcatggtccatactgagatgcaacaatgacgggcagaagctacattctgttcagaagattgcctgtttggcagaatgtaatatgaaattagcagtggctcttactctattggaggaatgtttcattcgtatggtggatcctagaactggtgtggacatgataccccatgttttatacaacaagggatcaaactttgctcgtgtggattatcagggattctatactgtaatcctggagaaaggtgatgaaatattatgtgtggcttctatcagagtacatggaactaaagccgctgagcttccttttattgctacttctgtagactttcgacggcaaggaatgtgccgaattctaatgagcatcattgaaaagagttggttagcacatgggtgtcaggatttggcttcaaacctatcgaagatgctgaaaggaaacaacttcataatgtaaacttgatgttgtttcctggaacatccttactaacaaagagattggatggatttattatggccacaaaaccaggcgaggaaaaggatatacatgaagtttctggagtgcctaatcttaagcgtatgcctaatgggaaagcaaatgagcatttcaaactccatgaccttgatttgtccgggacagagtttaaagctgaggtttccgtgaatggtccattcagaacactgaaacatgaatgtggttcagcagcatggtttcagtctactaagttagctgttggggaagtgtgatattcttacacaaattatctgggctcatgctctgcatcgatactagctgctttgtgttggccaatttcgtcttcccacttcatggctcaaattaatttgcagcagcaaaatcattcgaacacttgctgctgcatgaactcatccttttcaagtaaagttctcacaagactactgggaaatggttgggatgacgcaggcatccatgaatttgggttgagcaaagttgaagaaaccacagattggtgtggtctgttctgcatcgagaaaatggaaattataactgtctctcctgggtgaagtgctctcctgagactgggtaaagtacgcaacacctgagttgatattgcttgcacgttgaacaaagaggatgtatttgcactccaacgtacaaagtgtaacgcattcggccccttttcaaagtaagccatgataggaattaatctaagctgtttggtatatacatcaaaagggtactgcagtaacatgtttggtaccttctcttgcgagttttattttgatatatgtgttttatatgtgtctagattaatcatcatctatttaaatatagacataaaaagaattatattctggaacggagtgagtattattttgccatatgtgctgttaggttgaggcccaaatggcaatgcaatgcatctgtcggcagttgattttcctgagtgccagattggttttgtaatccttgcggctatggaacgattgttcgtcaagtccttaagttattttggtttgtgattaaataatcgggcgtccgatccatggtgggcaccgttctctctacctgattttcttctgtcgctgcctgcaagcaacagagttttggttgccgtcatttcggtctgctgcaacaaagtttctt

SEQ ID NO: 18246 - DNA, 5406 bp, Zea Mays
ccaccctccactgcagcagcttgcttgcctttgctccactcccatacagagtccagacgcccgccccgtcgccgccggcactcagctaccaagccgccgtcccggaccctcgattttcctcgccggagcggagcgcccacccctcttcgctcgcctcggatctcgcccccgatttgctccgcccgctcatccccaaccactattctctcgtctcgatccagcgcaggctactcgagattcagctgccgccgccctctggatccggccacacaatccgcttccgctcccgctgcctccccgacccgaccgcccatctcgctcaggctccctcctagtccctaccctagctgctagctaccactaccactaccatggccgccgggagaggccacgcggaggacatgctgggcttcaaggaggacgacgccatgcgcttcatcttcggcgaagacatcatgggaatggaggaccacggcgccttcgacagatccctcatggagcttcaggttttcaaggaggtcttctgcggggccgcccataacgtcgccgccaccacccatctgcccaccgagatggaccttggattcgtccacaccagcgccgccgctgcccacctcaaggccacggagacctcgccctctccatttgtctcccatgcgcagcagcagcagcctgctgccgctgccactgctgatccacagctcacaatggatcgtagccagccaaactatggacctcgccacgaccttcacccccaggttcaggagcacgcgcacactcgtgcgcagcaaaacgggaccgagctggatgatgctgcgttcatgcacagattcatgggttcctggcagcctggggataagcacgcgatccatctgctcggcctatccgatgaccaacacccattcgtcggcgcagatttggatgtgcacgcgcaagatattggagctgggatgtgcaatgctcccgggctgggctgcagcagcagcactagcgcggttgatgaccccatgccttccttcatagaagcgctagcggagatttctgaattccagagtgccactctccttccagatccctttttgcatcagtggttccaggagcagcagcaattccctaccaatgcatgcttctcttacgatcaaggccagatggatgacaccacttatcccctatgtgcaagtacaaaggatttccctgacagagagcagcatctgtgttacagtgaagaagctcatagtactccaacaatacctcatcagtcccatatttggttcagccctggtcagttcacccagctcgatggcaccaccatttgccaggaaggcacgcctgatgcgaatattagttgcccggatgaaattgatgttcatggatgcggcagcagcgcggtacactttggctcggcagctgctgtttccaagaaggccttgggcagggatattcctgaccagctggaagcacatgcgcatcgccttttcaaggacgctggatggactattaagccacggaaaaggaatgacagggctaagatggcgtcctacttcacagctccaaacaaggaagcggttcatacctcactaacccaggcttggaagttttgtggcaaaaagttatatgaagcttccccagatacagaaaggggaaggtatccaaaggagtggtcagatgttgattcgttttggaaggatctcacagatgcaatgacctatgttgataggatgcttgcaaaccagcaaaatgcactcacgcttctccaacgttggcagattttggatccttttgtagctgttgtgttcatcagtaggaaaatcactgctctgcagcaatataaaactcttagagctgtcgacagttcaacctttgttcttgatggcagctcagacacatcatcggtaagtaagatcatgcacaaagccagtgagcttttgacaagccgaatgatccggttgactccactgatcacagactctgattgcagcacacttgcaactgagagctacaacgggcatcaatctttacagagctgtcatgatgtagaagacaacaactatagggatacggacccaaagctttcctgcaatgagagtctgaattacaatgcaagtgacgagacaaaacatcacatcgatgcaagtaatgatggaagacaaacttatgctcaaccaaaaactcttaatagctctgtaaaaatgtcaagcaagaaaccgaaaagaatatttgatattagtgcagatggactggacgagaccaatgtagcaactatggacatggctgacccaggagacactaatgcctttgaggaacacattatgtattcaggtgttagcacactaaaagacgatatgaaagctgaaacaaaatcagaaaagctagataaagatgatcaaagcagcaagtgtgacatgctcctctcttcagtggtcaagcaacttaaggattacagtacattctcagatacccattgtactacaagggagtcacagtcagatgccacaacattctgccatgatgacaaggtctggaaaaagatagtcccatcccatggagaattttatgaggattcacagagtgagccaacaggaaatactgcacctgttgaattatcccatgatgttctgggaacttatctaatctgtgactcacaaatctgcgagagaggcactgccaaaatgaaaacgaaggattggttgaagtacatgaagaaaagacctcgcgagttgcggatcaatgatgaggaccttttgatgacagctatagtgaaaaacaaggaccttggcacctgtcacaaatttgcttcaggttcttcagccgcaaagaagtttaagaagctgaagagccacaagaaaggtaacaagctactttctaaaattgggaaagctggcacaaacctattgggtggaaagagagtaagtttggcccgtaaaactgtaatctgctggttgcttgcgactggctttctgagcgtaaaagatgtgatacagtaccgggatccaaaaagtaataaaattataaaggatgggatggttacctgggaaggtattgtttgcaattgctgcaaaaaaaacttatccgtatctgatttcatggctcatgctggtcgtagtcacccacagtcctcattgggcctctttctagagtctggcaagtcatacactttgtgcctggttgaggcttggtctgctgaatctatgagcaggagaagcaatgcatggggtagaaaagttgaggcaatagatgaaagtgatgacacctgtggtttctgtggagatggtggtgaattactttgctgtgacaattgcccatcgacatatcatcaagcttgcttgtctgctaaggagcttccagaaggtagttggtactgccataattgcacttgtcaggtttgtggggggccatttagtgaaaaggaggtttcaacattctcggcgattttcaaatgtttccaatgcggagatgcataccatgacacttgcattgaacaagagaagctacctcttgaggatcaaatatctcagacatggttttgtgggaaatactgtaaagagatattcatagggctgcgtagtcatgtcgggacagataatattcttgacagtgacctttcatggtccatactgagatgcaacaatgacgggcagaagctacattctgttcagaagattgcctgtttggcagaatgtaatatgaaattagcagtggctcttactctattggaggaatgtttcattcgtatggtggatcctagaactggtgtggacatgataccccatgttttatacaacaagggatcaaactttgctcgtgtggattatcagggattctatactgtaatcctggagaaaggtgatgaaatattatgtgtggcttctatcagactttcgacggcaaggaatgtgccgaattctaatgagcatcattgaaaaggtacagtggaatagggaatcagacaaaagcacaaaacagcacaacagtactggaacaagttatggcttcccatgattgtgtatcacacacattaacttggactgcagctgtgcttaaatgttaagatatgatattcctcccatttacctatcgggtccattctttgctaatatgtgatttcttatcaaatcgatatcctttttttatgttactgctaataacttttaactgcatatcactatgtgatttcccctattttctctaatgcagatgctctgttcatttaatgttaagatgttggtcctttctgccatcccagagttggttagcacatgggtgtcaggatttggcttcaaacctatcgaagatgctgaaaggaaacaacttcataatgtaaacttgatgttgtttcctggaacatccttactaacaaagagattggatggatttattatggccacaaaaccaggttcactacctgtttgcttaccactagccacatttgtgccttgtggtttatggatttgggcataccatgacatccttccatttgtttgcatgcccataatactactaattttgaaactatgcaggcgaggaaaaggatatacatgaagtttctggagtgcctaatcttaagcgtatgcctaatgggaaagcaaatgagcatttcaaactccatgaccttgatttgtccgggacagagtttaaagctgaggtttccgtgaatggtccattcagaacactgaaacatgaatgtggttcagcagcatggtttcagtctactaagttagctgttggggaagtgtgatattcttacacaaattatctgggctcatgctctgcatcgatactagctgctttgtgttggccaatttcgtcttcccacttcatggctcaaattaatttgcagcagcaaaatcattcgaacacttgctgctgcatgaactcatccttttcaagtaaagttctcacaagactactgggaaatggttgggatgacgcaggcatccatgaatttgggttgagcaaagttgaagaaaccacagattggtgtggtctgttctgcatcgagaaaatggaaattataactgtctctcctgggtgaagtgctctcctgagactgggtaaagtacgcaacacctgagttgatattgcttgcacgttgaacaaagaggatgtatttgcactccaacgtacaaagtgtaacgcattcggccccttttcaaagttgaggcccaaatggcaatgcaatgcatctgtcggcagttgattttcctgagtgccagattggttttgtaatccttgcggctatggaacgattgttcgtcaagtccttaagttattttggtttgtgattaaataatcgggcgtccgatccatggtgggcaccgttctctctacctgattttcttctgtcgctgcctgcaagcaacagagttttggttgccgtcatttcggtctgctgcaacaaagtttctt

SEQ ID NO: 18247 - DNA, 5271 bp, Zea Mays
ccaccctccactgcagcagcttgcttgcctttgctccactcccatacagagtccagacgcccgccccgtcgccgccggcactcagctaccaagccgccgtcccggaccctcgattttcctcgccggagcggagcgcccacccctcttcgctcgcctcggatctcgcccccgatttgctccgcccgctcatccccaaccactattctctcgtctcgatccagcgcaggctactcgagattcagctgccgccgccctctggatccggccacacaatccgcttccgctcccgctgcctccccgacccgaccgcccatctcgctcaggctccctcctagtccctaccctagctgctagctaccactaccactaccatggccgccgggagaggccacgcggaggacatgctgggcttcaaggaggacgacgccatgcgcttcatcttcggcgaagacatcatgggaatggaggaccacggcgccttcgacagatccctcatggagcttcaggttttcaaggaggtcttctgcggggccgcccataacgtcgccgccaccacccatctgcccaccgagatggaccttggattcgtccacaccagcgccgccgctgcccacctcaaggccacggagacctcgccctctccatttgtctcccatgcgcagcagcagcagcctgctgccgctgccactgctgatccacagctcacaatggatcgtagccagccaaactatggacctcgccacgaccttcacccccaggttcaggagcacgcgcacactcgtgcgcagcaaaacgggaccgagctggatgatgctgcgttcatgcacagattcatgggttcctggcagcctggggataagcacgcgatccatctgctcggcctatccgatgaccaacacccattcgtcggcgcagatttggatgtgcacgcgcaagatattggagctgggatgtgcaatgctcccgggctgggctgcagcagcagcactagcgcggttgatgaccccatgccttccttcatagaagcgctagcggagatttctgaattccagagtgccactctccttccagatccctttttgcatcagtggttccaggagcagcagcaattccctaccaatgcatgcttctcttacgatcaaggccagatggatgacaccacttatcccctatgtgcaagtacaaaggatttccctgacagagagcagcatctgtgttacagtgaagaagctcatagtactccaacaatacctcatcagtcccatatttggttcagccctggtcagttcacccagctcgatggcaccaccatttgccaggaaggcacgcctgatgcgaatattagttgcccggatgaaattgatgttcatggatgcggcagcagcgcggtacactttggctcggcagctgctgtttccaagaaggccttgggcagggatattcctgaccagctggaagcacatgcgcatcgccttttcaaggacgctggatggactattaagccacggaaaaggaatgacagggctaagatggcgtcctacttcacagctccaaacaaggaagcggttcatacctcactaacccaggcttggaagttttgtggcaaaaagttatatgaagcttccccagatacagaaaggggaaggtatccaaaggagtggtcagatgttgattcgttttggaaggatctcacagatgcaatgacctatgttgataggatgcttgcaaaccagcaaaatgcactcacgcttctccaacgttggcagattttggatccttttgtagctgttgtgttcatcagtaggaaaatcactgctctgcagcaatataaaactcttagagctgtcgacagttcaacctttgttcttgatggcagctcagacacatcatcggtaagtaagatcatgcacaaagccagtgagcttttgacaagccgaatgatccggttgactccactgatcacagactctgattgcagcacacttgcaactgagagctacaacgggcatcaatctttacagagctgtcatgatgtagaagacaacaactatagggatacggacccaaagctttcctgcaatgagagtctgaattacaatgcaagtgacgagacaaaacatcacatcgatgcaagtaatgatggaagacaaacttatgctcaaccaaaaactcttaatagctctgtaaaaatgtcaagcaagaaaccgaaaagaatatttgatattagtgcagatggactggacgagaccaatgtagcaactatggacatggctgacccaggagacactaatgcctttgaggaacacattatgtattcaggtgttagcacactaaaagacgatatgaaagctgaaacaaaatcagaaaagctagataaagatgatcaaagcagcaagtgtgacatgctcctctcttcagtggtcaagcaacttaaggattacagtacattctcagatacccattgtactacaagggagtcacagtcagatgccacaacattctgccatgatgacaaggtctggaaaaagatagtcccatcccatggagaattttatgaggattcacagagtgagccaacaggaaatactgcacctgttgaattatcccatgatgttctgggaacttatctaatctgtgactcacaaatctgcgagagaggcactgccaaaatgaaaacgaaggattggttgaagtacatgaagaaaagacctcgcgagttgcggatcaatgatgaggaccttttgatgacagctatagtgaaaaacaaggaccttggcacctgtcacaaatttgcttcaggttcttcagccgcaaagaagtttaagaagctgaagagccacaagaaaggtaacaagctactttctaaaattgggaaagctggcacaaacctattgggtggaaagagagtaagtttggcccgtaaaactgtaatctgctggttgcttgcgactggctttctgagcgtaaaagatgtgatacagtaccgggatccaaaaagtaataaaattataaaggatgggatggttacctgggaaggtattgtttgcaattgctgcaaaaaaaacttatccgtatctgatttcatggctcatgctggtcgtagtcacccacagtcctcattgggcctctttctagagtctggcaagtcatacactttgtgcctggttgaggcttggtctgctgaatctatgagcaggagaagcaatgcatggggtagaaaagttgaggcaatagatgaaagtgatgacacctgtggtttctgtggagatggtggtgaattactttgctgtgacaattgcccatcgacatatcatcaagcttgcttgtctgctaaggagcttccagaaggtagttggtactgccataattgcacttgtcaggtttgtggggggccatttagtgaaaaggaggtttcaacattctcggcgattttcaaatgtttccaatgcggagatgcataccatgacacttgcattgaacaagagaagctacctcttgaggatcaaatatctcagacatggttttgtgggaaatactgtaaagagatattcatagggctgcgtagtcatgtcgggacagataatattcttgacagtgacctttcatggtccatactgagatgcaacaatgacgggcagaagctacattctgttcagaagattgcctgtttggcagaatgtaatatgaaattagcagtggctcttactctattggaggaatgtttcattcgtatggtggatcctagaactggtgtggacatgataccccatgttttatacaacaagggatcaaactttgctcgtgtggattatcagggattctatactgtaatcctggagaaaggtgatgaaatattatgtgtggcttctatcagagtacatggaactaaagccgctgagcttccttttattgctacttctgtagactttcgacggcaaggaatgtgccgaattctaatgagcatcattgaaaagatgctctgttcatttaatgttaagatgttggtcctttctgccatcccagagttggttagcacatgggtgtcaggatttggcttcaaacctatcgaagatgctgaaaggaaacaacttcataatgtaaacttgatgttgtttcctggaacatccttactaacaaagagattggatggatttattatggccacaaaaccaggcgaggaaaaggatatacatgaagtttctggagtgcctaatcttaagcgtatgcctaatgggaaagcaaatgagcatttcaaactccatgaccttgatttgtccgggacagagtttaaagctgaggtttccgtgaatggtccattcagaacactgaaacatgaatgtggttcagcagcatggtttcagtctactaagttagctgttggggaagtgtgatattcttacacaaattatctgggctcatgctctgcatcgatactagctgctttgtgttggccaatttcgtcttcccacttcatggctcaaattaatttgcagcagcaaaatcattcgaacacttgctgctgcatgaactcatccttttcaagtaaagttctcacaagactactgggaaatggttgggatgacgcaggcatccatgaatttgggttgagcaaagttgaagaaaccacagattggtgtggtctgttctgcatcgagaaaatggaaattataactgtctctcctgggtgaagtgctctcctgagactgggtaaagtacgcaacacctgagttgatattgcttgcacgttgaacaaagaggatgtatttgcactccaacgtacaaagtgtaacgcattcggccccttttcaaagtaagccatgataggaattaatctaagctgtttggtatatacatcaaaagggtactgcagtaacatgtttggtaccttctcttgcgagttttattttgatatatgtgttttatatgtgtctagattaatcatcatctatttaaatatagacataaaaagaattatattctggaacggagtgagtattattttgccatatgtgctgttaggttgaggcccaaatggcaatgcaatgcatctgtcggcagttgattttcctgagtgccagattggttttgtaatccttgcggctatggaacgattgttcgtcaagtccttaagttattttggtttgtgattaaataatcgggcgtccgatccatggtgggcaccgttctctctacctgattttcttctgtcgctgcctgcaagcaacagagttttggttgccgtcatttcggtctgctgcaacaaagtttctt

SEQ ID NO: 18248 - DNA, 5221 bp, Zea Mays
ccaccctccactgcagcagcttgcttgcctttgctccactcccatacagagtccagacgcccgccccgtcgccgccggcactcagctaccaagccgccgtcccggaccctcgattttcctcgccggagcggagcgcccacccctcttcgctcgcctcggatctcgcccccgatttgctccgcccgctcatccccaaccactattctctcgtctcgatccagcgcaggctactcgagattcagctgccgccgccctctggatccggccacacaatccgcttccgctcccgctgcctccccgacccgaccgcccatctcgctcaggctccctcctagtccctaccctagctgctagctaccactaccactaccatggccgccgggagaggccacgcggaggacatgctgggcttcaaggaggacgacgccatgcgcttcatcttcggcgaagacatcatgggaatggaggaccacggcgccttcgacagatccctcatggagcttcaggttttcaaggaggtcttctgcggggccgcccataacgtcgccgccaccacccatctgcccaccgagatggaccttggattcgtccacaccagcgccgccgctgcccacctcaaggccacggagacctcgccctctccatttgtctcccatgcgcagcagcagcagcctgctgccgctgccactgctgatccacagctcacaatggatcgtagccagccaaactatggacctcgccacgaccttcacccccaggttcaggagcacgcgcacactcgtgcgcagcaaaacgggaccgagctggatgatgctgcgttcatgcacagattcatgggttcctggcagcctggggataagcacgcgatccatctgctcggcctatccgatgaccaacacccattcgtcggcgcagatttggatgtgcacgcgcaagatattggagctgggatgtgcaatgctcccgggctgggctgcagcagcagcactagcgcggttgatgaccccatgccttccttcatagaagcgctagcggagatttctgaattccagagtgccactctccttccagatccctttttgcatcagtggttccaggagcagcagcaattccctaccaatgcatgcttctcttacgatcaaggccagatggatgacaccacttatcccctatgtgcaagtacaaaggatttccctgacagagagcagcatctgtgttacagtgaagaagctcatagtactccaacaatacctcatcagtcccatatttggttcagccctggtcagttcacccagctcgatggcaccaccatttgccaggaaggcacgcctgatgcgaatattagttgcccggatgaaattgatgttcatggatgcggcagcagcgcggtacactttggctcggcagctgctgtttccaagaaggccttgggcagggatattcctgaccagctggaagcacatgcgcatcgccttttcaaggacgctggatggactattaagccacggaaaaggaatgacagggctaagatggcgtcctacttcacagctccaaacaaggaagcggttcatacctcactaacccaggcttggaagttttgtggcaaaaagttatatgaagcttccccagatacagaaaggggaaggtatccaaaggagtggtcagatgttgattcgttttggaaggatctcacagatgcaatgacctatgttgataggatgcttgcaaaccagcaaaatgcactcacgcttctccaacgttggcagattttggatccttttgtagctgttgtgttcatcagtaggaaaatcactgctctgcagcaatataaaactcttagagctgtcgacagttcaacctttgttcttgatggcagctcagacacatcatcggtaagtaagatcatgcacaaagccagtgagcttttgacaagccgaatgatccggttgactccactgatcacagactctgattgcagcacacttgcaactgagagctacaacgggcatcaatctttacagagctgtcatgatgtagaagacaacaactatagggatacggacccaaagctttcctgcaatgagagtctgaattacaatgcaagtgacgagacaaaacatcacatcgatgcaagtaatgatggaagacaaacttatgctcaaccaaaaactcttaatagctctgtaaaaatgtcaagcaagaaaccgaaaagaatatttgatattagtgcagatggactggacgagaccaatgtagcaactatggacatggctgacccaggagacactaatgcctttgaggaacacattatgtattcaggtgttagcacactaaaagacgatatgaaagctgaaacaaaatcagaaaagctagataaagatgatcaaagcagcaagtgtgacatgctcctctcttcagtggtcaagcaacttaaggattacagtacattctcagatacccattgtactacaagggagtcacagtcagatgccacaacattctgccatgatgacaaggtctggaaaaagatagtcccatcccatggagaattttatgaggattcacagagtgagccaacaggaaatactgcacctgttgaattatcccatgatgttctgggaacttatctaatctgtgactcacaaatctgcgagagaggcactgccaaaatgaaaacgaaggattggttgaagtacatgaagaaaagacctcgcgagttgcggatcaatgatgaggaccttttgatgacagctatagtgaaaaacaaggaccttggcacctgtcacaaatttgcttcaggttcttcagccgcaaagaagtttaagaagctgaagagccacaagaaaggtaacaagctactttctaaaattgggaaagctggcacaaacctattgggtggaaagagagtaagtttggcccgtaaaactgtaatctgctggttgcttgcgactggctttctgagcgtaaaagatgtgatacagtaccgggatccaaaaagtaataaaattataaaggatgggatggttacctgggaaggtattgtttgcaattgctgcaaaaaaaacttatccgtatctgatttcatggctcatgctggtcgtagtcacccacagtcctcattgggcctctttctagagtctggcaagtcatacactttgtgcctggttgaggcttggtctgctgaatctatgagcaggagaagcaatgcatggggtagaaaagttgaggcaatagatgaaagtgatgacacctgtggtttctgtggagatggtggtgaattactttgctgtgacaattgcccatcgacatatcatcaagcttgcttgtctgctaaggagcttccagaaggtagttggtactgccataattgcacttgtcaggtttgtggggggccatttagtgaaaaggaggtttcaacattctcggcgattttcaaatgtttccaatgcggagatgcataccatgacacttgcattgaacaagagaagctacctcttgaggatcaaatatctcagacatggttttgtgggaaatactgtaaagagatattcatagggctgcgtagtcatgtcgggacagataatattcttgacagtgacctttcatggtccatactgagatgcaacaatgacgggcagaagctacattctgttcagaagattgcctgtttggcagaatgtaatatgaaattagcagtggctcttactctattggaggaatgtttcattcgtatggtggatcctagaactggtgtggacatgataccccatgttttatacaacaagggatcaaactttgctcgtgtggattatcagggattctatactgtaatcctggagaaaggtgatgaaatattatgtgtggcttctatcagactttcgacggcaaggaatgtgccgaattctaatgagcatcattgaaaagatgctctgttcatttaatgttaagatgttggtcctttctgccatcccagagttggttagcacatgggtgtcaggatttggcttcaaacctatcgaagatgctgaaaggaaacaacttcataatgtaaacttgatgttgtttcctggaacatccttactaacaaagagattggatggatttattatggccacaaaaccaggcgaggaaaaggatatacatgaagtttctggagtgcctaatcttaagcgtatgcctaatgggaaagcaaatgagcatttcaaactccatgaccttgatttgtccgggacagagtttaaagctgaggtttccgtgaatggtccattcagaacactgaaacatgaatgtggttcagcagcatggtttcagtctactaagttagctgttggggaagtgtgatattcttacacaaattatctgggctcatgctctgcatcgatactagctgctttgtgttggccaatttcgtcttcccacttcatggctcaaattaatttgcagcagcaaaatcattcgaacacttgctgctgcatgaactcatccttttcaagtaaagttctcacaagactactgggaaatggttgggatgacgcaggcatccatgaatttgggttgagcaaagttgaagaaaccacagattggtgtggtctgttctgcatcgagaaaatggaaattataactgtctctcctgggtgaagtgctctcctgagactgggtaaagtacgcaacacctgagttgatattgcttgcacgttgaacaaagaggatgtatttgcactccaacgtacaaagtgtaacgcattcggccccttttcaaagtaagccatgataggaattaatctaagctgtttggtatatacatcaaaagggtactgcagtaacatgtttggtaccttctcttgcgagttttattttgatatatgtgttttatatgtgtctagattaatcatcatctatttaaatatagacataaaaagaattatattctggaacggagtgagtattattttgccatatgtgctgttaggttgaggcccaaatggcaatgcaatgcatctgtcggcagttgattttcctgagtgccagattggttttgtaatccttgcggctatggaacgattgttcgtcaagtccttaagttattttggtttgtgattaaataatcgggcgtccgatccatggtgggcaccgttctctctacctgattttcttctgtcgctgcctgcaagcaacagagttttggttgccgtcatttcggtctgctgcaacaaagtttctt

SEQ ID NO: 18249 - DNA, 5064 bp, Zea Mays
ctccaccctccactgcagcagcttgcttgcctttgctccactcccatacagagtccagacgcccgccccgtcgccgccggcactcagctaccaagccgccgtcccggaccctcgattttcctcgccggagcggagcgcccacccctcttcgctcgcctcggatctcgcccccgatttgctccgcccgctcatccccaaccactattctctcgtctcgatccagcgcaggctactcgagattcagctgccgccgccctctggatccggccacacaatccgcttccgctcccgctgcctccccgacccgaccgcccatctcgctcaggctccctcctagtccctaccctagctgctagctaccactaccactaccatggccgccgggagaggccacgcggaggacatgctgggcttcaaggaggacgacgccatgcgcttcatcttcggcgaagacatcatgggaatggaggaccacggcgccttcgacagatccctcatggagcttcaggttttcaaggaggtcttctgcggggccgcccataacgtcgccgccaccacccatctgcccaccgagatggaccttggattcgtccacaccagcgccgccgctgcccacctcaaggccacggagacctcgccctctccatttgtctcccatgcgcagcagcagcagcctgctgccgctgccactgctgatccacagctcacaatggatcgtagccagccaaactatggacctcgccacgaccttcacccccaggttcaggagcacgcgcacactcgtgcgcagcaaaacgggaccgagctggatgatgctgcgttcatgcacagattcatgggttcctggcagcctggggataagcacgcgatccatctgctcggcctatccgatgaccaacacccattcgtcggcgcagatttggatgtgcacgcgcaagatattggagctgggatgtgcaatgctcccgggctgggctgcagcagcagcactagcgcggttgatgaccccatgccttccttcatagaagcgctagcggagatttctgaattccagagtgccactctccttccagatccctttttgcatcagtggttccaggagcagcagcaattccctaccaatgcatgcttctcttacgatcaaggccagatggatgacaccacttatcccctatgtgcaagtacaaaggatttccctgacagagagcagcatctgtgttacagtgaagaagctcatagtactccaacaatacctcatcagtcccatatttggttcagccctggtcagttcacccagctcgatggcaccaccatttgccaggaaggcacgcctgatgcgaatattagttgcccggatgaaattgatgttcatggatgcggcagcagcgcggtacactttggctcggcagctgctgtttccaagaaggccttgggcagggatattcctgaccagctggaagcacatgcgcatcgccttttcaaggacgctggatggactattaagccacggaaaaggaatgacagggctaagatggcgtcctacttcacagctccaaacaaggaagcggttcatacctcactaacccaggcttggaagttttgtggcaaaaagttatatgaagcttccccagatacagaaaggggaaggtatccaaaggagtggtcagatgttgattcgttttggaaggatctcacagatgcaatgacctatgttgataggatgcttgcaaaccagcaaaatgcactcacgcttctccaacgttggcagattttggatccttttgtagctgttgtgttcatcagtaggaaaatcactgctctgcagcaatataaaactcttagagctgtcgacagttcaacctttgttcttgatggcagctcagacacatcatcggtaagtaagatcatgcacaaagccagtgagcttttgacaagccgaatgatccggttgactccactgatcacagactctgattgcagcacacttgcaactgagagctacaacgggcatcaatctttacagagctgtcatgatgtagaagacaacaactatagggatacggacccaaagctttcctgcaatgagagtctgaattacaatgcaagtgacgagacaaaacatcacatcgatgcaagtaatgatggaagacaaacttatgctcaaccaaaaactcttaatagctctgtaaaaatgtcaagcaagaaaccgaaaagaatatttgatattagtgcagatggactggacgagaccaatgtagcaactatggacatggctgacccaggagacactaatgcctttgaggaacacattatgtattcaggtgttagcacactaaaagacgatatgaaagctgaaacaaaatcagaaaagctagataaagatgatcaaagcagcaagtgtgacatgctcctctcttcagtggtcaagcaacttaaggattacagtacattctcagatacccattgtactacaagggagtcacagtcagatgccacaacattctgccatgatgacaaggtctggaaaaagatagtcccatcccatggagaattttatgaggattcacagagtgagccaacaggaaatactgcacctgttgaattatcccatgatgttctgggaacttatctaatctgtgactcacaaatctgcgagagaggcactgccaaaatgaaaacgaaggattggttgaagtacatgaagaaaagacctcgcgagttgcggatcaatgatgaggaccttttgatgacagctatagtgaaaaacaaggaccttggcacctgtcacaaatttgcttcaggttcttcagccgcaaagaagtttaagaagctgaagagccacaagaaaggtaacaagctactttctaaaattgggaaagctggcacaaacctattgggtggaaagagagtaagtttggcccgtaaaactgtaatctgctggttgcttgcgactggctttctgagcgtaaaagatgtgatacagtaccgggatccaaaaagtaataaaattataaaggatgggatggttacctgggaaggtattgtttgcaattgctgcaaaaaaaacttatccgtatctgatttcatggctcatgctggtcgtagtcacccacagtcctcattgggcctctttctagagtctggcaagtcatacactttgtgcctggttgaggcttggtctgctgaatctatgagcaggagaagcaatgcatggggtagaaaagttgaggcaatagatgaaagtgatgacacctgtggtttctgtggagatggtggtgaattactttgctgtgacaattgcccatcgacatatcatcaagcttgcttgtctgctaaggagcttccagaaggtagttggtactgccataattgcacttgtcaggtttgtggggggccatttagtgaaaaggaggtttcaacattctcggcgattttcaaatgtttccaatgcggagatgcataccatgacacttgcattgaacaagagaagctacctcttgaggatcaaatatctcagacatggttttgtgggaaatactgtaaagagatattcatagggctgcgtagtcatgtcgggacagataatattcttgacagtgacctttcatggtccatactgagatgcaacaatgacgggcagaagctacattctgttcagaagattgcctgtttggcagaatgtaatatgaaattagcagtggctcttactctattggaggaatgtttcattcgtatggtggatcctagaactggtgtggacatgataccccatgttttatacaacaagggatcaaactttgctcgtgtggattatcagggattctatactgtaatcctggagaaaggtgatgaaatattatgtgtggcttctatcagagtacatggaactaaagccgctgagcttccttttattgctacttctgtagactttcgacggcaaggaatgtgccgaattctaatgagcatcattgaaaagatgctctgttcatttaatgttaagatgttggtcctttctgccatcccagagttggttagcacatgggtgtcaggatttggcttcaaacctatcgaagatgctgaaaggaaacaacttcataatgtaaacttgatgttgtttcctggaacatccttactaacaaagagattggatggatttattatggccacaaaaccaggcgaggaaaaggatatacatgaagtttctggagtgcctaatcttaagcgtatgcctaatgggaaagcaaatgagcatttcaaactccatgaccttgatttgtccgggacagagtttaaagctgaggtttccgtgaatggtccattcagaacactgaaacatgaatgtggttcagcagcatggtttcagtctactaagttagctgttggggaagtgtgatattcttacacaaattatctgggctcatgctctgcatcgatactagctgctttgtgttggccaatttcgtcttcccacttcatggctcaaattaatttgcagcagcaaaatcattcgaacacttgctgctgcatgaactcatccttttcaagtaaagttctcacaagactactgggaaatggttgggatgacgcaggcatccatgaatttgggttgagcaaagttgaagaaaccacagattggtgtggtctgttctgcatcgagaaaatggaaattataactgtctctcctgggtgaagtgctctcctgagactgggtaaagtacgcaacacctgagttgatattgcttgcacgttgaacaaagaggatgtatttgcactccaacgtacaaagtgtaacgcattcggccccttttcaaagttgaggcccaaatggcaatgcaatgcatctgtcggcagttgattttcctgagtgccagattggttttgtaatccttgcggctatggaacgattgttcgtcaagtccttaagttattttggtttgtgattaaataatcgggcgtccgatccatggtgggcaccgttctctctacctgattttcttctgtcgctgcctgcaagcaacagagttttggttgccgtcatttcggtctgctgcaacaaagtttctt

SEQ ID NO: 18250 - DNA, 5652 bp, Zea Mays
ctggcttgcttgacctcttctcgtcttgtccagctccaccctccactgcagcagcttgcttgcctttgctccactcccatacagagtccagacgcccgccccgtcgccgccggcactcagctaccaagccgccgtcccggaccctcgattttcctcgccggagcggagcgcccacccctcttcgctcgcctcggatctcgcccccgatttgctccgcccgctcatccccaaccactattctctcgtctcgatccagcgcaggctactcgagattcagctgccgccgccctctggatccggccacacaatccgcttccgctcccgctgcctccccgacccgaccgcccatctcgctcaggctccctcctagtccctaccctagctgctagctaccactaccactaccatggccgccgggagaggccacgcggaggacatgctgggcttcaaggaggacgacgccatgcgcttcatcttcggcgaagacatcatgggaatggaggaccacggcgccttcgacagatccctcatggagcttcaggttttcaaggaggtcttctgcggggccgcccataacgtcgccgccaccacccatctgcccaccgagatggaccttggattcgtccacaccagcgccgccgctgcccacctcaaggccacggagacctcgccctctccatttgtctcccatgcgcagcagcagcagcctgctgccgctgccactgctgatccacagctcacaatggatcgtagccagccaaactatggacctcgccacgaccttcacccccaggttcaggagcacgcgcacactcgtgcgcagcaaaacgggaccgagctggatgatgctgcgttcatgcacagattcatgggttcctggcagcctggggataagcacgcgatccatctgctcggcctatccgatgaccaacacccattcgtcggcgcagatttggatgtgcacgcgcaagatattggagctgggatgtgcaatgctcccgggctgggctgcagcagcagcactagcgcggttgatgaccccatgccttccttcatagaagcgctagcggagatttctgaattccagagtgccactctccttccagatccctttttgcatcagtggttccaggagcagcagcaattccctaccaatgcatgcttctcttacgatcaaggccagatggatgacaccacttatcccctatgtgcaagtacaaaggatttccctgacagagagcagcatctgtgttacagtgaagaagctcatagtactccaacaatacctcatcagtcccatatttggttcagccctggtcagttcacccagctcgatggcaccaccatttgccaggaaggcacgcctgatgcgaatattagttgcccggatgaaattgatgttcatggatgcggcagcagcgcggtacactttggctcggcagctgctgtttccaagaaggccttgggcagggatattcctgaccagctggaagcacatgcgcatcgccttttcaaggacgctggatggactattaagccacggaaaaggaatgacagggctaagatggcgtcctacttcacagctccaaacaaggaagcggttcatacctcactaacccaggcttggaagttttgtggcaaaaagttatatgaagcttccccagatacagaaaggggaaggtatccaaaggagtggtcagatgttgattcgttttggaaggatctcacagatgcaatgacctatgttgataggatgcttgcaaaccagcaaaatgcactcacgcttctccaacgttggcagattttggatccttttgtagctgttgtgttcatcagtaggaaaatcactgctctgcagcaatataaaactcttagagctgtcgacagttcaacctttgttcttgatggcagctcagacacatcatcggtaagtaagatcatgcacaaagccagtgagcttttgacaagccgaatgatccggttgactccactgatcacagactctgattgcagcacacttgcaactgagagctacaacgggcatcaatctttacagagctgtcatgatgtagaagacaacaactatagggatacggacccaaagctttcctgcaatgagagtctgaattacaatgcaagtgacgagacaaaacatcacatcgatgcaagtaatgatggaagacaaacttatgctcaaccaaaaactcttaatagctctgtaaaaatgtcaagcaagaaaccgaaaagaatatttgatattagtgcagatggactggacgagaccaatgtagcaactatggacatggctgacccaggagacactaatgcctttgaggaacacattatgtattcaggtgttagcacactaaaagacgatatgaaagctgaaacaaaatcagaaaagctagataaagatgatcaaagcagcaagtgtgacatgctcctctcttcagtggtcaagcaacttaaggattacagtacattctcagatacccattgtactacaagggagtcacagtcagatgccacaacattctgccatgatgacaaggtctggaaaaagatagtcccatcccatggagaattttatgaggattcacagagtgagccaacaggaaatactgcacctgttgaattatcccatgatgttctgggaacttatctaatctgtgactcacaaatctgcgagagaggcactgccaaaatgaaaacgaaggattggttgaagtacatgaagaaaagacctcgcgagttgcggatcaatgatgaggaccttttgatgacagctatagtgaaaaacaaggaccttggcacctgtcacaaatttgcttcaggttcttcagccgcaaagaagtttaagaagctgaagagccacaagaaaggtaacaagctactttctaaaattgggaaagctggcacaaacctattgggtggaaagagagtaagtttggcccgtaaaactgtaatctgctggttgcttgcgactggctttctgagcgtaaaagatgtgatacagtaccgggatccaaaaagtaataaaattataaaggatgggatggttacctgggaaggtattgtttgcaattgctgcaaaaaaaacttatccgtatctgatttcatggctcatgctggtcgtagtcacccacagtcctcattgggcctctttctagagtctggcaagtcatacactttgtgcctggttgaggcttggtctgctgaatctatgagcaggagaagcaatgcatggggtagaaaagttgaggcaatagatgaaagtgatgacacctgtggtttctgtggagatggtggtgaattactttgctgtgacaattgcccatcgacatatcatcaagcttgcttgtctgctaaggagcttccagaaggtagttggtactgccataattgcacttgtcaggtttgtggggggccatttagtgaaaaggaggtttcaacattctcggcgattttcaaatgtttccaatgcggagatgcataccatgacacttgcattgaacaagagaagctacctcttgaggatcaaatatctcagacatggttttgtgggaaatactgtaaagagatattcatagggctgcgtagtcatgtcgggacagataatattcttgacagtgacctttcatggtccatactgagatgcaacaatgacgggcagaagctacattctgttcagaagattgcctgtttggcagaatgtaatatgaaattagcagtggctcttactctattggaggaatgtttcattcgtatggtggatcctagaactggtgtggacatgataccccatgttttatacaacaagggatcaaactttgctcgtgtggattatcagggattctatactgtaatcctggagaaaggtgatgaaatattatgtgtggcttctatcaggtgaattgtttttaatcaggtcttcgttagaaattgaacctacttttctgtctgaagtgttcttttaatgaatttatgcgtgttatttctacccatttgcttgtcattaactgctgttttggttttatcagttcaatatattattttacaactacaacatgcatactaacagcatatgccttgttagctttcaaaaaatcccacatagtatagaataacatgatgggataaccataaacaacaacaacaacaaaataataataaaaataactatctgtttcttccattttcagtgtgtattcgagaaaatatactatagataaaactttatttttttctcatgcagagtacatggaactaaagccgctgagcttccttttattgctacttctgtagactttcgacggcaaggaatgtgccgaattctaatgagcatcattgaaaagatgctctgttcatttaatgttaagatgttggtcctttctgccatcccagagttggttagcacatgggtgtcaggatttggcttcaaacctatcgaagatgctgaaaggaaacaacttcataatgtaaacttgatgttgtttcctggaacatccttactaacaaagagattggatggatttattatggccacaaaaccaggcgaggaaaaggatatacatgaagtttctggagtgcctaatcttaagcgtatgcctaatgggaaagcaaatgagcatttcaaactccatgaccttgatttgtccgggacagagtttaaagctgaggtttccgtgaatggtccattcagaacactgaaacatgaatgtggttcagcagcatggtttcagtctactaagttagctgttggggaagtgtgatattcttacacaaattatctgggctcatgctctgcatcgatactagctgctttgtgttggccaatttcgtcttcccacttcatggctcaaattaatttgcagcagcaaaatcattcgaacacttgctgctgcatgaactcatccttttcaagtaaagttctcacaagactactgggaaatggttgggatgacgcaggcatccatgaatttgggttgagcaaagttgaagaaaccacagattggtgtggtctgttctgcatcgagaaaatggaaattataactgtctctcctgggtgaagtgctctcctgagactgggtaaagtacgcaacacctgagttgatattgcttgcacgttgaacaaagaggatgtatttgcactccaacgtacaaagtgtaacgcattcggccccttttcaaagtaagccatgataggaattaatctaagctgtttggtatatacatcaaaagggtactgcagtaacatgtttggtaccttctcttgcgagttttattttgatatatgtgttttatatgtgtctagattaatcatcatctatttaaatatagacataaaaagaattatattctggaacggagtgagtattattttgccatatgtgctgttaggttgaggcccaaatggcaatgcaatgcatctgtcggcagttgattttcctgagtgccagattggttttgtaatccttgcggctatggaacgattgttcgtcaagtccttaagttattttggtttgtgattaaataatcgggcgtccgatccatggtgggcaccgttctctctacctgattttcttctgtcgctgcctgcaagcaacagagttttggttgccgtcatttcggtctgctgcaacaaagtttctt

SEQ ID NO: 18251 - DNA, 1733 bp, Zea Mays
gtaaaattgtatttcctctggctggcgagcggaggacgacggagcagaagcagctggcctcagccgctggacagtgggcctcgactagcagcagataggaaaccgggatagagctgccttccccttccggctccgctcagtcaggcctcagatcggtcgaatccagcaccccctccagatttgcgtcaccaatcttcttcttcttccgccgccgccgccgctcccccacaaggagcctcgtccctcgctgcgtatctgctgcactttcatcaacaccagtctttctcctcctggattgcattgcccaggcaagagaacgcacgcacaccgaccggaatagccatgatcttctgatccaatccaagatgggcctcaaggagcagcagctagacgccactgaccaaactcgtgatgccgccaactccctcgcttctgtttctgacgagcaccacgagggaccccgtgtctcaagctgcagcaccgacaaggattctggccttccaagttgccgagtctgccattgcgtggaacccgatctaagaggcgagtccgccctcggattcttgggcatcgtgcccccttcccctcccaggactgacactggggggccaaaggatgatgctgccaccagccccaagggggagatattcgtgtgcgctactgacgtcgaattgcagcagcagcaggaccatcttgtggatctagggtgttgttgcaagaacgagcttgcccttgcgcactatgcctgtgcgttgaagtggttcatcagccatggatccaccgcctgcgagatctgtggaactgttgctgcaaatgtaaggcctgacgatttcaacaaggttctcgcgtccctcaaggattaccaagctctcagggaaagtacatccacatactggtggttgcagcagcatagtggtgttgatccagacgctgttgcagcaatacgaaggcacgagatctcatcctggttcaatcctcacgtgcctatctcccaaggccacattgatcaaccgcatccctcaaccaataattcttctgttcttgagcagcatactagtgttgtggcaaacacaagatggagtttggagagtactggagtttttattgctatctgcctggttgtcattattcttgcatggttggtcgctccacatgttggcaagaaagctgctgtaatctgtcttcatatgcttcttggaggtctatgcatattgactgtagtaatatccctgagatttgttttcccgagaatccagtatgggtctatgcaatattgggcaatcttgtttgtgtcctggttccttgtgtttggtgtttgggcttcacgaacacgcggcgcgcgttcctcatgagtatattcttgtgtacttgctatgtaaaataatgcttgtcttttctccgacttgttatatatatatatatatatataaactgcctgtatatgcttgattttggaagatcatgtccatgctacaagagaagaagttggtcagtagtctgtattgggttggttgcttcttatttatccatagatcgtgactgttttacactactgcattgcttgcttgtatagtgagatgacctccatccttgggcagatccacacgaatttgagatggatgtatatgtatgtgcctgcgccctgcctgagaaactaatatgcagttttcgtcaataccatcaggcaagccgatgtaatatggtttaaaattttaataaaatctttctttatt

SEQ ID NO: 18252 - DNA, 1605 bp, Zea Mays
gttgctattaggtcaactattagactaaccactttgcttgctctagtaaaattgtatttcctctggctggcgagcggaggacgacggagcagaagcagctggcctcagccgctggacagtgggcctcgactagcagcagataggaaaccgggatagagctgccttccccttccggctccgctcagtcaggcctcagatcggtcgaatccagcaccccctccagatttgcgtcaccaatcttcttcttcttccgccgccgccgccgctcccccacaaggaggcaagagaacgcacgcacaccgaccggaatagccatgatcttctgatccaatccaagatgggcctcaaggagcagcagctagacgccactgaccaaactcgtgatgccgccaactccctcgcttctgtttctgacgagcaccacgagggaccccgtgtctcaagctgcagcaccgacaaggattctggccttccaagttgccgagtctgccattgcgtggaacccgatctaagaggcgagtccgccctcggattcttgggcatcgtgcccccttcccctcccaggactgacactggggggccaaaggatgatgctgccaccagccccaagggggagatattcgtgtgcgctactgacgtcgaattgcagcagcagcaggaccatcttgtggatctagggtgttgttgcaagaacgagcttgcccttgcgcactatgcctgtgcgttgaagtggttcatcagccatggatccaccgcctgcgagatctgtggaactgttgctgcaaatgtaaggcctgacgatttcaacaaggttctcgcgtccctcaaggattaccaagctctcagggaaagtacatccacatactggtggttgcagcagcatagtggtgttgatccagacgctgttgcagcaatacgaagcatactagtgttgtggcaaacacaagatggagtttggagagtactggagtttttattgctatctgcctggttgtcattattcttgcatggttggtcgctccacatgttggcaagaaagctgctgtaatctgtcttcatatgcttcttggaggtctatgcatattgactgtagtaatatccctgagatttgttttcccgagaatccagtatgggtctatgcaatattgggcaatcttgtttgtgtcctggttccttgtgtttggtgtttgggcttcacgaacacgcggcgcgcgttcctcatgagtatattcttgtgtacttgctatgtaaaataatgcttgtcttttctccgacttgttatatatatatatatatatataaactgcctgtatatgcttgattttggaagatcatgtccatgctacaagagaagaagttggtcagtagtctgtattgggttggttgcttcttatttatccatagatcgtgactgttttacactactgcattgcttgcttgtatagtgagatgacctccatccttgggcagatccacacgaatttgagatggatgtatatgtatgtgcctgcgccctgcctgagaaactaatatgcagttttcgtcaataccatcaggcaagccgatgtaatatggtttaaaattttaataaaatctttctttatt

SEQ ID NO: 18253 - DNA, 1964 bp, Zea Mays
aacccctactgccttgccagcgcgaagaaccttcgcctcgatatcaatctcttcctgtaaaaaaacatctcatgtctgtcagtgtcaatcataccaattgggtaatcttgttgcagtcaatcataccaattggataatttgcttactcacatcagcaaaagcagcatcaaggtaggagatgttcatctcaaggggtgagcccctggtgcgtagcccggcagtggcgaaggcggcggaggcaaccagatccacgagggaggcggttgcgccgccgtgcaggaagccgcccgagttctgcctcattcagggatcagggaggattcagaactcgactcgggggcagagagagagagagagagagagagagagagttggctcacgagtagtctggagggcacgttgaagtggcagaggagtgtgccgggctggagggcctggacgacgcggattcccctcaggacgaaggcgtcgtagaaccccgagggcaagctcggtagcgcctccgcctctgcctcactcgtgaaggtctcctccagcagccgcctcgccgtttccaacgacttgttctccccaccgaaatcgcccgagtcggaggccatcgcaattggattcccctcccgctcccgttccctttccctccccaccagaatcgttaatcgaggaggacgaccaaagcgagaaagaaagagacaggcggagaggcgcccgccacgtctttacgctttcaaaggcaactcacgtaatccctacgtgaacagcgtcttccttcctgccggcgccgatggcgagcatggcagccgtcttcggcgaggccaagccggacaaatccaacaaagatgccgatgctctcctgcgccgacccgtgctcttccacgcccactcccagggcggcctccgcgtcgtcgccaccgacctccactccttcgcttggcatcgctccctcgacctcgacggcctccgcgacctccaagatgacgttggcatcgctggctcctgctccgacttcctcgactacctctattcttccttgtcttccgaccaagtcaggctcttcttccctgccgcggccctaggtcctgatactgctgagcttgtggctaccaaggcaaagggactacctcgcatcactctctctctcgatagagttgccgcatctgcgctcaaagatgtcattgctgatttctcccttgcgctctatgaatcttacaagaccaggcaggaacatgcatccagagaacaagaacgagtgtcacagctcatggaaaatctagactctgaaagagaaaaaaacgaagtaatgcaaaagcaacttgaagccctttcattcctcgacaaaagaaaggctacaaagccaaagcttgtgactgataagtttccaagtgtgtcgggtgcacctccaagctctgatcaaatgattgttgctgtacagcagcaaacaccagtggctttacctagcaaagttcctcctgctaaagggcaagagtacgaggagctttgttgcaagatactgaagaaaatgctgatgataatacttagatattgctgatttatcagcattgattaactctttggcatgtaaacttattagtacatttctgctggacttatgtcaaacttgtggaattaaagtacacgcagctcatggtgtagaaaaggtatgagactgtgttcctacaagaaaggattgtttccctagaatattgtggcttttgaactcgtctgtgatgctgctttgatctcgatgagcttagggtgcctatcaatacacatctatagctgtttcagtgaagttttcttctattctttaaaaatttaaatagtgtattgtggattgtgaactttattaaagatgagtagcgtgaacaagttgagcagccgttttgccgtgctagcaacttggggcagctacgaatagaatgtaactttgaacgactgtacaaatgaaggttcctattggttgatcc

SEQ ID NO: 18254 - DNA, 1991 bp, Zea Mays
aacccctactgccttgccagcgcgaagaaccttcgcctcgatatcaatctcttcctgtaaaaaaacatctcatgtctgtcagtgtcaatcataccaattgggtaatcttgttgcagtcaatcataccaattggataatttgcttactcacatcagcaaaagcagcatcaaggtaggagatgttcatctcaaggggtgagcccctggtgcgtagcccggcagtggcgaaggcggcggaggcaaccagatccacgagggaggcggttgcgccgccgtgcaggaagccgcccgagttctgcctcattcagggatcagggaggattcagaactcgactcgggggcagagagagagagagagagagagagagagagttggctcacgagtagtctggagggcacgttgaagtggcagaggagtgtgccgggctggagggcctggacgacgcggattcccctcaggacgaaggcgtcgtagaaccccgagggcaagctcggtagcgcctccgcctctgcctcactcgtgaaggtctcctccagcagccgcctcgccgtttccaacgacttgttctccccaccgaaatcgcccgagtcggaggccatcgcaattggattcccctcccgctcccgttccctttccctccccaccagaatcgttaatcgaggaggacgaccaaagcgagaaagaaagagacaggcggagaggcgcccgccacgtctttacgctttcaaaggcaactcacgtaatccctacgtgaacagcgtcttccttcctgccggcgccgatggcgagcatggcagccgtcttcggcgaggccaagccggacaaatccaacaaagatgccgatgctctcctgcgccgacccgtgctcttccacgcccactcccagggcggcctccgcgtcgtcgccaccgacctccactccttcgcttggcatcgctccctcgacctcgacggcctccgcgacctcatgacgttggcatcgctggctcctgctccgacttcctcgactacctctattcttccttgtcttccgaccaagtcaggctcttcttccctgccgcggccctaggtcctgatactgctgagcttgtggctaccaaggcaaagggactacctcgcatcactctctctctcgatagagttgccgcatctgcgctcaaagatgtcattgctgatttctcccttgcgctctatgaatcttacaagaccaggcaggaacatgcatccagagaacaagaacgagtgtcacagctcatggaaaatctagactctgaaagagaaaaaaacgaagtaatgcaaaagcaacttgaagccctttcattcctcgacaaaagaaaggctacaaagccaaagcttgtgactgataagtttccaagtgtgtcgggtgcacctccaagctctgatcaaatgattgttgctgtacagcagcaaacaccagtggctttacctagcaaagttcctcctgctaaaggtacgaagcgcgtggcccctttgcctcggagggcaagagtacgaggagctttgttgcaagatactgaagaaaatgctgatgataatacttagatattgctgatttatcagcattgattaactctttggcatgtaaacttattagtacatttctgctggacttatgtcaaacttgtggaattaaagtacacgcagctcatggtgtagaaaaggtatgagactgtgttcctacaagaaaggattgtttccctagaatattgtggcttttgaactcgtctgtgatgctgctttgatctcgatgagcttagggtgcctatcaatacacatctatagctgtttcagtgaagttttcttctattctttaaaaatttaaatagtgtattgtggattgtgaactttattaaagatgagtagcgtgaacaagttgagcagccgttttgccgtgctagcaacttggggcagctacgaatagaatgtaactttgaacgactgtacaaatgaaggttcctattggttgatcc

SEQ ID NO: 18255 - DNA, 939 bp, Zea Mays
gcatagcatagcaccagcacgctaaaatttattaggttacatacttgttccggaggccatctattggggatatagtgtttttcaaagtaccgactgctgtgcagaattatggtgtcaataaggatgttgtctttattaagagagtattggcaacaccaggagacttcattgaggtaaaataaaatgcatcactagctccattgaggtaaaaacgcatcctcctcctcttatgttgtttacaggtccgacaagggcagcttattgtaaatggtgtcgcactaaaggagcattacgcagcagcaacgtcattgtacacaatggaagcaatgcgccttcctgaaggtcacgtatttgtcatgggtgacaaccgcaataacagctgtgattctcgtgcctgggggcctcttcccgttgccaacatcgttggaaggtacatgacatcatttacaagatcctctttccagtaactggggttccactcaatgttcgtcctcataaatcaatcatagttagagagttgtggagccaggcggctgctatcttgtcaatttgtagcgatgtttgttgtatatgattctcacttaatttggacatgcatgattgtgtacttgtgttgttataaagtaagcatgttttgttgttgtatatgatcgcacttaatttggacatgcatgattgtgtacttgtgttgttataaagtaagcatgttttgttccaacactccacaaattgggcgctatttttaatgggaatttcacagcactctttctaacaccgccacatcatcaaaattagtaactaaggatgtctttcaatgcaaggtttcacctcactattctatagactaaatatcaattaaatgttgcaactcagtaaccaatagaaattagtaaaatatgtgaaggtaaagcagattactctctcaaatggaggtttgtg

SEQ ID NO: 18256 - DNA, 1600 bp, Zea Mays
agcaaccaggaagagcacacggaagaagagtagtgagcacggaaccccaccaggcagaggcagtaagccaccagctgcagccgccagcacagcgcagggcagagggagagggagggcaccggcacaccatggccgtggggggccttctgcggggcctcgtttcgccccccgcctggctaccctgccatgagctcttcgcctcctggcaccactggcttccctccctcccgcgcctccgcccgcccgcatccgacggcttcaagcttctcttggtgctgctgctcttctccgccgctctagccgaggtccgctacatcgcctcctcctccatggcgcccacgcttcgtccaggcgaccgagccgtcgccgagaaggtcaatccgccttgtctgctcgcccctttccttcccttcccttcccactgcttttatttctagtgctacaataagggcaatgcgtgcgctgttctttcaattcttagactagtactgtatacatggatccctgcttcttagattggtttggtagtgtagtagatccacgctgcctgcctgataccacaggttacatacttgttccggaggccatctattggggatatagtgtttttcaaagtaccgactgctgtgcagaattatggtgtcaataaggatgttgtctttattaagagagtattggcaacaccaggagacttcattgaggtccgacaagggcagcttattgtaaatggtgtcgcactaaaggagcattacgcagcagcaacgtcattgtacacaatggaagcaatggtccagagatctttaaaagtcacaagaaagaagatgatcaaaaactggactggctgctccatgttgttgacttcttgagtgccccgttgtaatcaatcgatcaatgggcctcagatggtggatgatctttttcttattggatggatgggtgggtacctggatcctcagtcagctgaaagtaagtattctcgtactcctgcagcgccttcctgaaggtcacgtatttgtcatgggtgacaaccgcaataacagctgtgattctcgtgcctgggggcctcttcccgttgccaacatcgttggaaggtacatgacatcatttacaagatcctctttccagtaactggggttccactcaatgttcgtcctcataaatcaatcatagttagagagttgtggagccaggcggctgctatcttgtcaatttgtagcgatgtttgttgtatatgattctcacttaatttggacatgcatgattgtgtacttgtgttgttataaagtaagcatgttttgttgttgtatatgatcgcacttaatttggacatgcatgattgtgtacttgtgttgttataaagtaagcatgttttgttccaacactccacaaattgggcgctatttttaatgggaatttcacagcactctttctaacaccgccacatcatcaaaattagtaactaaggatgtctttcaatgcaaggtttcacctcactattctatagactaaatatcaattaaatgttgcaactcagtaaccaatagaaattagtaaaatatgtgaaggtaaagcagattactctctcaaatggaggtttgtg

SEQ ID NO: 18257 - DNA, 1926 bp, Zea Mays
cacgaaatagagaagctgaccttgtagagctgactatcggattcacggaccaatcctcgtcttctcccaattctcattgcatcgaatcgggctcgatgctgcccctctccctcttcgtttccctcttggtgctccatctcccccacgcatccgccgacggcgacatctgcatcatcggcggtggcatctccggcgcctccaccgccttcttcctcaccagctacaccagcaccctcggtggagcgcagctgcgcgtttttgagcgccgtcagaaggtgggcggccgcctgggcaccgtcactctcgcgggcgacagcttcgaggccgggggctccatcatccacccccgcaacctccacgcgcgccgcttcgccgacctcctgggactcgccgtgaagaccggcggcgacgactggctagggatctgggacggcaaaagcttcgtcttccagacggcccgcccacctcctgtcggcagctcctggtggcggcgcaagctgcacagtctcgtcaactcgctgctgctgctcaggcgatatggtctgtccctgctaaagatggacaagtttgtccaggttatcacaaggatcaactatgggcaaagcacacacataagtggcctggcaggcgccgtgtccttagctggatctgagtcaggattatgggctgtcaaagggggcaactggcagctagctgccggattgctcaagacctctaatgctaccttgcatcttcaagaaggcatagactccatcactgatgccggggatcactacgttctgagatccaatagtgggagcgaatacgagtgtatggtgacggtggtggcaaccccactcgacgagctgaacattacgtttagccctccaatctccattccgccgaggaagatgcagcacacacatgcgacctttgtgagaggcatattgaacccgggatattttggtctgaactcggcatcagatattccagagctgattggtaccctagagctccctgatatccctttctcctgcatctctgttctgaagaggtacagcgaaggcgacatggcggcgtacaagatgttttcacgggcaaagctggatgatggtttgctggatcagatcttcaggtacgtagcagcttgattgatcttcagggctcggatagagacgatccggatcaactgggctgcttacccgcactaccaagccccagaggagtttgctccgatagtgttggacgggaagcagctgtactacgtgaacacctttgagagcgccgcgagcgccatagagacgggtgctgtagcagcagagaacgtggcgcggctcatcatctccaggctctctctactaccgcaggcacagcagcagcagcctcatatcatcaagtcattcgccgaacaagaatcccagcgtcgccatgtagacctgtgaaatgttgtaatggcattgtagccagttttatcccagctagcattttggtacatttatttatgtatttgaccaatggtttggtttgtaaatggatgatatagttagtaattgttagcgccgatctagatgtctagacgtcgatcattgcgatgagtatcggcgatggtgctctctgtggaagcgttaacagtccacgaccgagggtccacgaccgagggtcggatggtccgcacgtgcgcagaggcgacgtagtttgccaacaacacctggatcttgctctcgggggatctagtcgaggaggagagatcctaaggtttgtcttaggatcgacataccactcaagacgcctctaaacgacgtagagcaggagagaggtgaagattagagggagaaaactatgttattgtctactctagaatacaatgtaaagaaaagatatattgattgtttggtcgattgttggtgattgcaatcgatcgtacttcttaatatatataaggagagg

SEQ ID NO: 18258 - DNA, 1830 bp, Zea Mays
ctttaattatgtactcagatcacaaaccacgaaatagagaagctgaccttgtagagctgactatcggattcacggaccaatcctcgtcttctcccaattctcattgcatcgaatcgggctcgatgctgcccctctccctcttcgtttccctcttggtgctccatctcccccacgcatccgccgacggcgacatctgcatcatcggcggtggcatctccggcgcctccaccgccttcttcctcaccagctacaccagcaccctcggtggagcgcagctgcgcgtttttgagcgccgtcagaaggtgggcggccgcctgggcaccgtcactctcgcgggcgacagcttcgaggccgggggctccatcatccacccccgcaacctccacgcgcgccgcttcgccgacctcctgggactcgccgtgaagaccggcggcgacgactggctagggatctgggacggcaaaagcttcgtcttccagacggcccgcccacctcctgtcggcagctcctggtggcggcgcaagctgcacagtctcgtcaactcgctgctgctgctcaggcgatatggtctgtccctgctaaagatggacaagtttgtccaggttatcacaaggatcaactatgggcaaagcacacacataagtggcctggcaggcgccgtgtccttagctggatctgagtcaggattatgggctgtcaaagggggcaactggcagctagctgccggattgctcaagacctctaatgctaccttgcatcttcaagaaggcatagactccatcactgatgccggggatcactacgttctgagatccaatagtgggagcgaatacgagtgtatggtgacggtggtggcaaccccactcgacgagctgaacattacgtttagccctccaatctccattccgccgaggaagatgcagcacacacatgcgacctttgtgagaggcatattgaacccgaggtacagcgaaggcgacatggcggcgtacaagatgttttcacgggcaaagctggatgatggtttgctggatcagatcttcagggctcggatagagacgatccggatcaactgggctgcttacccgcactaccaagccccagaggagtttgctccgatagtgttggacgggaagcagctgtactacgtgaacacctttgagagcgccgcgagcgccatagagacgggtgctgtagcagcagagaacgtggcgcggctcatcatctccaggctctctctactaccgcaggcacagcagcagcagcctcatatcatcaagtcattcgccgaacaagaatcccagcgtcgccatgtagacctgtgaaatgttgtaatggcattgtagccagttttatcccagctagcattttggtacatttatttatgtatttgaccaatggtttggtttgtaaatggatgatatagttagtaattgttagcgccgatctagatgtctagacgtcgatcattgcgatgagtatcggcgatggtgctctctgtggaagcgttaacagtccacgaccgagggtccacgaccgagggtcggatggtccgcacgtgcgcagaggcgacgtagtttgccaacaacacctggatcttgctctcgggggatctagtcgaggaggagagatcctaaggtttgtcttaggatcgacataccactcaagacgcctctaaacgacgtagagcaggagagaggtgaagattagagggagaaaactatgttattgtctactctagaatacaatgtaaagaaaagatatattgattgtttggtcgattgttggtgattgcaatcgatcgtacttcttaatatatataaggagagg

SEQ ID NO: 18259 - DNA, 2009 bp, Zea Mays
cgttactttaattatgtactcagatcacaaaccacgaaatagagaagctgaccttgtagagctgactatcggattcacggaccaatcctcgtcttctcccaattctcattgcatcgaatcgggctcgatgctgcccctctccctcttcgtttccctcttggtgctccatctcccccacgcatccgccgacggcgacatctgcatcatcggcggtggcatctccggcgcctccaccgccttcttcctcaccagctacaccagcaccctcggtggagcgcagctgcgcgtttttgagcgccgtcagaaggtgggcggccgcctgggcaccgtcactctcgcgggcgacagcttcgaggccgggggctccatcatccacccccgcaacctccacgcgcgccgcttcgccgacctcctgggactcgccgtgaagaccggcggcgacgactggctagggatctgggacggcaaaagcttcgtcttccagacggcccgcccacctcctgtcggcagctcctggtggcggcgcaagctgcacagtctcgtcaactcgctgctgctgctcaggcgatatggtctgtccctgctaaagatggacaagtttgtccaggaaatgttgcggcggtttatgctcttctacaatggcatggagtctcgccctgtgtttgccacggttgaggagatgctccaatggacgggtctctatggcctcacccgcaggacccttgaggaggagctgctggatgccggcctcaacacccgaacgatagcagagcttgtcactgttatcacaaggatcaactatgggcaaagcacacacataagtggcctggcaggcgccgtgtccttagctggatctgagtcaggattatgggctgtcaaagggggcaactggcagctagctgccggattgctcaagacctctaatgctaccttgcatcttcaagaaggcatagactccatcactgatgccggggatcactacgttctgagatccaatagtgggagcgaatacgagtgtatggtgacggtggtggcaaccccactcgacgagctgaacattacgtttagccctccaatctccattccgccgaggaagatgcagcacacacatgcgacctttgtgagaggcatattgaacccgaggtacagcgaaggcgacatggcggcgtacaagatgttttcacgggcaaagctggatgatggtttgctggatcagatcttcagggctcggatagagacgatccggatcaactgggctgcttacccgcactaccaagccccagaggagtttgctccgatagtgttggacgggaagcagctgtactacgtgaacacctttgagagcgccgcgagcgccatagagacgggtgctgtagcagcagagaacgtggcgcggctcatcatctccaggctctctctactaccgcaggcacagcagcagcagcctcatatcatcaagtcattcgccgaacaagaatcccagcgtcgccatgtagacctgtgaaatgttgtaatggcattgtagccagttttatcccagctagcattttggtacatttatttatgtatttgaccaatggtttggtttgtaaatggatgatatagttagtaattgttagcgccgatctagatgtctagacgtcgatcattgcgatgagtatcggcgatggtgctctctgtggaagcgttaacagtccacgaccgagggtccacgaccgagggtcggatggtccgcacgtgcgcagaggcgacgtagtttgccaacaacacctggatcttgctctcgggggatctagtcgaggaggagagatcctaaggtttgtcttaggatcgacataccactcaagacgcctctaaacgacgtagagcaggagagaggtgaagattagagggagaaaactatgttattgtctactctagaatacaatgtaaagaaaagatatattgattgtttggtcgattgttggtgattgcaatcgatcgtacttcttaatatatataaggagagg

SEQ ID NO: 18260 - DNA, 2238 bp, Zea Mays
agagattttgggagctcaatggtttaacatttaagtagattttttttatttttagaaccacttcaatctacataaaatcaatgtaaatggcaataaattagaaagagagcgactccattacctggaaaccaaacgttactttaattatgtactcagatcacaaaccacgaaatagagaagctgaccttgtagagctgactatcggattcacggaccaatcctcgtcttctcccaattctcattgcatcgaatcgggctcgatgctgcccctctccctcttcgtttccctcttggtgctccatctcccccacgcatccgccgacggcgacatctgcatcatcggcggtggcatctccggcgcctccaccgccttcttcctcaccagctacaccagcaccctcggtggagcgcagctgcgcgtttttgagcgccgtcagaaggtgggcggccgcctgggcaccgtcactctcgcgggcgacagcttcgaggccgggggctccatcatccacccccgcaacctccacgcgcgccgcttcgccgacctcctgggactcgccgtgaagaccggcggcgacgactggctagggatctgggacggcaaaagcttcgtcttccagacggcccgcccacctcctgtcggcagctcctggtggcggcgcaagctgcacagtctcgtcaactcgctgctgctgctcaggcgatatggtctgtccctgctaaagatggacaagtttgtccaggaaatgttgcggcggtttatgctcttctacaatggcatggagtctcgccctgtgtttgccacggttgaggagatgctccaatggacgggtctctatggcctcacccgcaggacccttgaggaggagctgctggatgccggcctcaacacccgaacgatagcagagcttgtcactgttatcacaaggatcaactatgggcaaagcacacacataagtggcctggcaggcgccgtgtccttagctggatctgagtcaggattatgggctgtcaaagggggcaactggcagctagctgccggattgctcaagacctctaatgctaccttgcatcttcaagaaggcatagactccatcactgatgccggggatcactacgttctgagatccaatagtgggagcgaatacgagtgtatggtgacggtggtggcaaccccactcgacgagctgaacattacgtttagccctccaatctccattccgccgaggaagatgcagcacacacatgcgacctttgtgagaggcatattgaacccgggatattttggtctgaactcggcatcagatattccagagctgattggtaccctagagctccctgatatccctttctcctgcatctctgttctgaagaggtacagcgaaggcgacatggcggcgtacaagatgttttcacgggcaaagctggatgatggtttgctggatcagatcttcagggctcggatagagacgatccggatcaactgggctgcttacccgcactaccaagccccagaggagtttgctccgatagtgttggacgggaagcagctgtactacgtgaacacctttgagagcgccgcgagcgccatagagacgggtgctgtagcagcagagaacgtggcgcggctcatcatctccaggctctctctactaccgcaggcacagcagcagcagcctcatatcatcaagtcattcgccgaacaagaatcccagcgtcgccatgtagacctgtgaaatgttgtaatggcattgtagccagttttatcccagctagcattttggtacatttatttatgtatttgaccaatggtttggtttgtaaatggatgatatagttagtaattgttagcgccgatctagatgtctagacgtcgatcattgcgatgagtatcggcgatggtgctctctgtggaagcgttaacagtccacgaccgagggtccacgaccgagggtcggatggtccgcacgtgcgcagaggcgacgtagtttgccaacaacacctggatcttgctctcgggggatctagtcgaggaggagagatcctaaggtttgtcttaggatcgacataccactcaagacgcctctaaacgacgtagagcaggagagaggtgaagattagagggagaaaactatgttattgtctactctagaatacaatgtaaagaaaagatatattgattgtttggtcgattgttggtgattgcaatcgatcgtacttcttaatatatataaggagagg

SEQ ID NO: 18261 - DNA, 2111 bp, Zea Mays
aagaaacgggaaagggcccggcccaccgtctacctacggccgccctcgagtatttggagccgctccgcttccgccagcgcccagcagagcagcctgagccagcagcccgagttcgattacctcttcaagctgctgcttatcggcgactccggcgtcggcaagagcagcctcctcctccgtttcaccgccgactcctttgaggacctttcccccaccataggtgttgacttcaaggtgaagatggttaccattggtggcaaaaaactcaagcttgccatctgggacacagccggacaagagagatttaggaccttgaccagctcttactacagaggggcacagggggttattatggtgtatgatgtcactcggcgggaaacgtttactaatctttctgatatatgggcgaaggaaattgacctgtattcaaccaaccaggactgtataaagatgcttgttggaaataaagtagataaggaaagtgagagagctgtgacaaaaaaggaggggattgaatttgctagggaatacggttgtttgtttctagaatgcagtgcgaaaacaaaagtaaatgtagaacagtgctttgaggaacttgtgctaaagatattagacacgccaagcctcctcgctgatgcttcgtctggggccaagaagaacatcttcaagcagaagcctccggaagccgatgccgctgcaagcagctgctgttaacatgcttttgccatgctaattccgcgtcctcccgtggatgatgacgatgatatctttgtttggtgtgtcggtttattgtttcttcttcttttggtcctgtatatgctgaatttattacacccacacataactgtacgttggcagcagctatataatatatcgttttttgttgtttctttttgttttgtttaaaagagagagagagagaatagtatatgttttgttttgtttccgtgctccagttgagagagagagagagagagaaatgaagatatttgagaggagtatggatggattcacgggtgggcaagggcaagggaagaggccaggccatcgcaggcaacacccgtgccgtgtgtcgtgtcgtgcgaggtcacgggtcactccagccaaaaaacagatgatgatgatgatgatgtgccatgctgcggggcaacaagaaactgaacaccacggaaatccaaggaccagccagcgcccgccctcgtcccttttgtatgtctggagcagatcagacgacgacgtccattcccaagaccaccacagcgtcgtccgccaggtgctccgggacgtctcctgccgcgcgcgccccggcgagctgctcgccatcgtcggccccagcggcgccggcaagtccaccctgctcgagatcctcgcggggcgcctctccccgtccccgccgccccacctgctacgcatcgacggcgccgccgcccacagcgccgacctccgccgcgtctccgcctacgtcacccagcaggacgtcctcttcccgctgctcaccgtgcgcgagacgctgctcttcagcgcgcgcctccgcctaggcgcgcgcctgccctccaaggacatgcacgcccgcgtcgaggcgctcctcgacgacctcaccctgcgccgcgtcgccgccaccaggatcaaggacctctccggcggagagcgcaggcgcgtctccatcggcgtcgaggccgtgcgtgacccgcccgtgctcatcctcgacgagcccacctccggcctcgacagcgcctccgcgctccacatcgtcggcgcgctccgcgccatggccgaggcgcgtggacgcaccgtgctgctcagcatccaccagccgggagcgcgcatcgtcaagatgttcgactccgtcctcctgctagccgccggctccgtcctccaccatggcaccgtcgaccagctccgcgccctgctcggggacgcgggccttcacctgcccccgcacgtcgatgacgtcgagttcgccatcgactccgtggacgcgcttcgccgccacgccagcagcagcctgcaggcgccgtcctccggagaccgagagggccggtgcacgctgcagcgtctgttccagctgcacggcaagcaggtggcggacgcccccgtggccgtgaccatga

SEQ ID NO: 18262 - DNA, 2671 bp, Zea Mays
aagaaacgggaaagggcccggcccaccgtctacctacggccgccctcgagtatttggagccgctccgcttccgccagcgcccagcagagcagcctgagccagcagcccgagttcgattacctcttcaagctgctgcttatcggcgactccggcgtcggcaagagcagcctcctcctccgtttcaccgccgactcctttgaggacctttcccccaccataggtgttgacttcaaggtgaagatggttaccattggtggcaaaaaactcaagcttgccatctgggacacagcatgactccttttcctcttgggtggctgtgtgtgacacacaggcgagatggctggtggtacgagcagcatggcaacgtggcggccggcatggcttgtgcgcggggcgataacgcgggagaccagtgtgggctccatcctctcctggctggctcaacttccaggcatctggggaggagcattagggctgcagtggcgcgtggtgagggctgtggcggtgcggtgcgggacagcaagaagcctcgttgtgcagcatgaatggatgttgcactttcttttctaagcaataggatggtgttggatggtgcatagaggcacgaaagttacatggggacttaccagagggcagaggcaggttaccgaatccgagatcaataataccataaaagaatcgttttggtctgtccttttcccccacaattatttcgaagagctaaccattccactggacagtgtcattctcgttctgattttgcccagctttatcctatctatttatacatcttccattctttgagtatgatcgtgtatttgttatcgctgatgattacctgttatgcagccggacaagagagatttaggaccttgaccagctcttactacagaggggcacagggggttattatggtgtatgatgtcactcggcgggaaacgtttactaatctttctgatatatgggcgaaggaaattgacctgtattcaaccaaccaggactgtataaagatgcttgttggaaataaagtagataaggaaagtgagagagctgtgacaaaaaaggaggggattgaatttgctagggaatacggttgtttgtttctagaatgcagtgcgaaaacaaaagtaaatgtagaacagtgctttgaggaacttgtgctaaagatattagacacgccaagcctcctcgctgatgcttcgtctggggccaagaagaacatcttcaagcagaagcctccggaagccgatgccgctgcaagcagctgctgttaacatgcttttgccatgctaattccgcgtcctcccgtggatgatgacgatgatatctttgtttggtgtgtcggtttattgtttcttcttcttttggtcctgtatatgctgaatttattacacccacacataactgtacgttggcagcagctatataatatatcgttttttgttgtttctttttgttttgtttaaaagagagagagagagaatagtatatgttttgttttgtttccgtgctccagttgagagagagagagagagagaaatgaagatatttgagaggagtatggatggattcacgggtgggcaagggcaagggaagaggccaggccatcgcaggcaacacccgtgccgtgtgtcgtgtcgtgcgaggtcacgggtcactccagccaaaaaacagatgatgatgatgatgatgtgccatgctgcggggcaacaagaaactgaacaccacggaaatccaaggaccagccagcgcccgccctcgtcccttttgtatgtctggagcagatcagacgacgacgtccattcccaagaccaccacagcgtcgtccgccaggtgctccgggacgtctcctgccgcgcgcgccccggcgagctgctcgccatcgtcggccccagcggcgccggcaagtccaccctgctcgagatcctcgcggggcgcctctccccgtccccgccgccccacctgctacgcatcgacggcgccgccgcccacagcgccgacctccgccgcgtctccgcctacgtcacccagcaggacgtcctcttcccgctgctcaccgtgcgcgagacgctgctcttcagcgcgcgcctccgcctaggcgcgcgcctgccctccaaggacatgcacgcccgcgtcgaggcgctcctcgacgacctcaccctgcgccgcgtcgccgccaccaggatcaaggacctctccggcggagagcgcaggcgcgtctccatcggcgtcgaggccgtgcgtgacccgcccgtgctcatcctcgacgagcccacctccggcctcgacagcgcctccgcgctccacatcgtcggcgcgctccgcgccatggccgaggcgcgtggacgcaccgtgctgctcagcatccaccagccgggagcgcgcatcgtcaagatgttcgactccgtcctcctgctagccgccggctccgtcctccaccatggcaccgtcgaccagctccgcgccctgctcggggacgcgggccttcacctgcccccgcacgtcgatgacgtcgagttcgccatcgactccgtggacgcgcttcgccgccacgccagcagcagcctgcaggcgccgtcctccggagaccgagagggccggtgcacgctgcagcgtctgttccagctgcacggcaagcaggtggcggacgcccccgtggccgtgaccatga

SEQ ID NO: 18263 - DNA, 2897 bp, Zea Mays
aagaaacgggaaagggcccggcccaccgtctacctacggccgccctcgagtatttggagccgctccgcttccgccagcgcccagcagagcagcctgagccagcagcccgagttcgattacctcttcaagctgctgcttatcggcgactccggcgtcggcaagagcagcctcctcctccgtttcaccgccgactcctttgaggacctttcccccaccataggtgttgacttcaaggtgaagatggttaccattggtggcaaaaaactcaagcttgccatctgggacacagcatgactccttttcctcttgggtggctgtgtgtgacacacaggcgagatggctggtggtacgagcagcatggcaacgtggcggccggcatggcttgtgcgcggggcgataacgcgggagaccagtgtgggctccatcctctcctggctggctcaacttccaggcatctggggaggagcattagggctgcagtggcgcgtggtgagggctgtggcggtgcggtgcgggacagcaagaagcctcgttgtgcagcatgaatggatgttgcactttcttttctaagcaataggatggtgttggatggtgcatagaggcacgaaagttacatggggacttaccagagggcagaggcaggttaccgaatccgagatcaataataccataaaagaatcgttttggtctgtccttttcccccacaattatttcgaagagctaaccattccactggacagtgtcattctcgttctgattttgcccagctttatcctatctatttatacatcttccattctttgagtatgatcgtgtatttgttatcgctgatgattacctgttatgcagccggacaagagagatttaggaccttgaccagctcttactacagaggggcacagggggttattatggtgtatgatgtcactcggcgggaaacgtttactaatctttctgatatatgggcgaaggaaattgacctgtattcaaccaaccaggactgtataaagatgcttgttggaaataaagtagataaggaaagtgagagagctgtgacaaaaaaggaggggattgaatttgctagggaatacggttgtttgtttctagaatgcagtgcgaaaacaaaagtaaatgtagaacagtgctttgaggaacttgtgctaaaggtatgtactgggctatagcatttagatttataataataatattttaattttcacaatatcatgcatgccttgttgttcacaatattccaagcggcacatatgttggactcaagtattgcttgtttagccatggattggctttgactgaaatgaggaagggggcttttatgcatgtgtgagtgtcctcgaagaaattagattgctttatgcatgcttgttgttgcagatattagacacgccaagcctcctcgctgatgcttcgtctggggccaagaagaacatcttcaagcagaagcctccggaagccgatgccgctgcaagcagctgctgttaacatgcttttgccatgctaattccgcgtcctcccgtggatgatgacgatgatatctttgtttggtgtgtcggtttattgtttcttcttcttttggtcctgtatatgctgaatttattacacccacacataactgtacgttggcagcagctatataatatatcgttttttgttgtttctttttgttttgtttaaaagagagagagagagaatagtatatgttttgttttgtttccgtgctccagttgagagagagagagagagagaaatgaagatatttgagaggagtatggatggattcacgggtgggcaagggcaagggaagaggccaggccatcgcaggcaacacccgtgccgtgtgtcgtgtcgtgcgaggtcacgggtcactccagccaaaaaacagatgatgatgatgatgatgtgccatgctgcggggcaacaagaaactgaacaccacggaaatccaaggaccagccagcgcccgccctcgtcccttttgtatgtctggagcagatcagacgacgacgtccattcccaagaccaccacagcgtcgtccgccaggtgctccgggacgtctcctgccgcgcgcgccccggcgagctgctcgccatcgtcggccccagcggcgccggcaagtccaccctgctcgagatcctcgcggggcgcctctccccgtccccgccgccccacctgctacgcatcgacggcgccgccgcccacagcgccgacctccgccgcgtctccgcctacgtcacccagcaggacgtcctcttcccgctgctcaccgtgcgcgagacgctgctcttcagcgcgcgcctccgcctaggcgcgcgcctgccctccaaggacatgcacgcccgcgtcgaggcgctcctcgacgacctcaccctgcgccgcgtcgccgccaccaggatcaaggacctctccggcggagagcgcaggcgcgtctccatcggcgtcgaggccgtgcgtgacccgcccgtgctcatcctcgacgagcccacctccggcctcgacagcgcctccgcgctccacatcgtcggcgcgctccgcgccatggccgaggcgcgtggacgcaccgtgctgctcagcatccaccagccgggagcgcgcatcgtcaagatgttcgactccgtcctcctgctagccgccggctccgtcctccaccatggcaccgtcgaccagctccgcgccctgctcggggacgcgggccttcacctgcccccgcacgtcgatgacgtcgagttcgccatcgactccgtggacgcgcttcgccgccacgccagcagcagcctgcaggcgccgtcctccggagaccgagagggccggtgcacgctgcagcgtctgttccagctgcacggcaagcaggtggcggacgcccccgtggccgtgaccatga

SEQ ID NO: 18264 - DNA, 3659 bp, Zea Mays
aagaaacgggaaagggcccggcccaccgtctacctacggccgccctcgagtatttggagccgctccgcttccgccagcgcccagcagagcagcctgagccagcagcccgagttcgattacctcttcaagctgctgcttatcggcgactccggcgtcggcaagagcagcctcctcctccgtttcaccgccgactcctttgaggacctttcccccaccataggtgttgacttcaaggtgaagatggttaccattggtggcaaaaaactcaagcttgccatctgggacacaggtaccaaaccattgcccccccttacattttttagattaaggaacacaatgtttccggcctacccattcgcaaacgaatgagtacagccacacagcaggactcgaaggatgcttagatctaaatccattaaatgacactcaaaagaacaccagaacttagttctcaattcttctcctatgtctcaactgaaacccaacgactcagcacgtttcaagcagcatatacaggatgaggacttaggattttcagcaaacaaagcacgacaccggttgcacatgtaggaggagagcacagcggcgcgtaggaggagagcaccacaagtgaaccgaaacatcatgagcatgaaactatggcgccagcaccacggcgacctccttggtgaacttggtgccgaggcattagatagcaacctgagacctcatgaagtccaggggtttcaccgtcatctctcaagtcatcatcctatataatgaatagaagtgttgtagtgcagcagcgagagtccttaaacttagcagctcatgcagtgtgaagtcattggagatgtcgaaggcaccattgttgtagaagaacagtcgccgcaccgcggcaagtcgatgtcgaatttaagaatgtgaatggcatgccgttagtgctcatggttgcctgccaacgacgccgagacgtcccacattggcgctggatgtgatggcatcccccaaatgcctatgacagcgcgaaagtgaactaacaccggcgacgatatttcttcctccattgcagcatgactccttttcctcttgggtggctgtgtgtgacacacaggcgagatggctggtggtacgagcagcatggcaacgtggcggccggcatggcttgtgcgcggggcgataacgcgggagaccagtgtgggctccatcctctcctggctggctcaacttccaggcatctggggaggagcattagggctgcagtggcgcgtggtgagggctgtggcggtgcggtgcgggacagcaagaagcctcgttgtgcagcatgaatggatgttgcactttcttttctaagcaataggatggtgttggatggtgcatagaggcacgaaagttacatggggacttaccagagggcagaggcaggttaccgaatccgagatcaataataccataaaagaatcgttttggtctgtccttttcccccacaattatttcgaagagctaaccattccactggacagtgtcattctcgttctgattttgcccagctttatcctatctatttatacatcttccattctttgagtatgatcgtgtatttgttatcgctgatgattacctgttatgcagccggacaagagagatttaggaccttgaccagctcttactacagaggggcacagggggttattatggtgtatgatgtcactcggcgggaaacgtttactaatctttctgatatatgggcgaaggaaattgacctgtattcaaccaaccaggactgtataaagatgcttgttggaaataaagtagataaggaaagtgagagagctgtgacaaaaaaggaggggattgaatttgctagggaatacggttgtttgtttctagaatgcagtgcgaaaacaaaagtaaatgtagaacagtgctttgaggaacttgtgctaaaggtatgtactgggctatagcatttagatttataataataatattttaattttcacaatatcatgcatgccttgttgttcacaatattccaagcggcacatatgttggactcaagtattgcttgtttagccatggattggctttgactgaaatgaggaagggggcttttatgcatgtgtgagtgtcctcgaagaaattagattgctttatgcatgcttgttgttgcagatattagacacgccaagcctcctcgctgatgcttcgtctggggccaagaagaacatcttcaagcagaagcctccggaagccgatgccgctgcaagcagctgctgttaacatgcttttgccatgctaattccgcgtcctcccgtggatgatgacgatgatatctttgtttggtgtgtcggtttattgtttcttcttcttttggtcctgtatatgctgaatttattacacccacacataactgtacgttggcagcagctatataatatatcgttttttgttgtttctttttgttttgtttaaaagagagagagagagaatagtatatgttttgttttgtttccgtgctccagttgagagagagagagagagagaaatgaagatatttgagaggagtatggatggattcacgggtgggcaagggcaagggaagaggccaggccatcgcaggcaacacccgtgccgtgtgtcgtgtcgtgcgaggtcacgggtcactccagccaaaaaacagatgatgatgatgatgatgtgccatgctgcggggcaacaagaaactgaacaccacggaaatccaaggaccagccagcgcccgccctcgtcccttttgtatgtctggagcagatcagacgacgacgtccattcccaagaccaccacagcgtcgtccgccaggtgctccgggacgtctcctgccgcgcgcgccccggcgagctgctcgccatcgtcggccccagcggcgccggcaagtccaccctgctcgagatcctcgcggggcgcctctccccgtccccgccgccccacctgctacgcatcgacggcgccgccgcccacagcgccgacctccgccgcgtctccgcctacgtcacccagcaggacgtcctcttcccgctgctcaccgtgcgcgagacgctgctcttcagcgcgcgcctccgcctaggcgcgcgcctgccctccaaggacatgcacgcccgcgtcgaggcgctcctcgacgacctcaccctgcgccgcgtcgccgccaccaggatcaaggacctctccggcggagagcgcaggcgcgtctccatcggcgtcgaggccgtgcgtgacccgcccgtgctcatcctcgacgagcccacctccggcctcgacagcgcctccgcgctccacatcgtcggcgcgctccgcgccatggccgaggcgcgtggacgcaccgtgctgctcagcatccaccagccgggagcgcgcatcgtcaagatgttcgactccgtcctcctgctagccgccggctccgtcctccaccatggcaccgtcgaccagctccgcgccctgctcggggacgcgggccttcacctgcccccgcacgtcgatgacgtcgagttcgccatcgactccgtggacgcgcttcgccgccacgccagcagcagcctgcaggcgccgtcctccggagaccgagagggccggtgcacgctgcagcgtctgttccagctgcacggcaagcaggtggcggacgcccccgtggccgtgaccatga

SEQ ID NO: 18265 - DNA, 1607 bp, Zea Mays
cgcaaagtaggaaaccgatcctttctcaagtgcaaccaaaccatatcacctgatgaacccaacgggtagaagggtgcccgatctttcgatgagagaggatggaggtggaaaacttgttggagaacgacgttggctgcccgactaccacaaccaagatggtgtggcgccttgagcgacaggtacaccgtttcctgataactacgatttggggtggaggtcgacgttgtgttatccgactacaacaaccacaagggtgctgcgccttagcgatagttacaccggctcctgttgttgctgctcttgccgtgccaagaacagccttgaacctgcaagcaatcgagaacaagcaagaacaagataaaaagcagacgctcacggatctagtagagttggggttctgtttcaagtatccgggtggtctagccgacacacgcgtttacaaggaagtagcaaaggctaaacttacatcaaacaaaaacccaagttctttggtggctgctagttgcttaaatagagaaataggaagaaggaattctggtggagtcatgaagttccctcggcagttcctggacgcctcgggtgtcgtctcccattaattcttgatccaccagcaagtagacgaagggagctttccaacaagtatttatttgcattaaacggccttggaagttggaagatatgccccatttaaacttgtacttggtgctgttacgaaatcctctcgggtgcagcagcctttattgccttgttgccttctccagttcaagatggttcacctcccaaacacctgagcataataaagtcatcgcaaggctttagtacctcatttaaagaagaattagcttcaatagcaaggaacgagttcacctgataattaagtttacgtgcacgggctcgtgtcattggtccttgattagctacgaatggtgaagtggtcactggtatggttgtatcaaagatagtgatgtcctcatcatcctccccttcttgcaacaaagtcgtcctcgactcaaacgtgtcattctctcccaagtatggtgctaaatctgcaatgttaaaagaggaactgaccccaaattctgcaggcaactgaactttatatgcattatcattaattttgtgaagcactttgaagggtccagcagctcttggttgtaatttagatttgcgcatatcaggaaatctatctttccttaaatgcacccatactaaatcaccaggttcaaaggtaatatgctttctacccttgctacctgcttctgcatacttagcattcatggctttaatatttgctttagtttgttcatgcagctttataatcagttcagcacgacgagaagcatcaaaattcattatttcagaatgtgggatggcgataagatcaataggagcacgagggacaaaaccatacacaattttaaaagggcataatttagttgtagaatgctgagaacgattataagcaaattcaatgtgaggcaaacattcttcccacaatttgatgttatgtttcagaacagccctaagcatggtagataaactacggtttacgacttcggtttgtccatcggtttgagggtgacaagtagtagaaaagagcaatttag

SEQ ID NO: 18266 - DNA, 397 bp, Zea Mays
ggtaaagttctacatgatccccatactgatttcccttaattcctcacgaaaaaatacagaaactgctagactactgctgttcacccaccacctaaaattctggacagcccccctctaccccaatcgcaaacgcaacctctaatcaattaaattgcagcgcaaatgaacaagggataaacacaaaaatcaccttggattctccccctttccttcctcccttcttccctccaccaaaacgattgaagactcgcaccacgacgacgatgatccgagcggcaatgattggcaccttgggaggaggggattgagaggggcggcggctagggtttggtggctgcaagaattgagagaggaggagatgggcagggggggcggccaagggggaagagaagtgggg

SEQ ID NO: 18267 - DNA, 272 bp, Zea Mays
gtgctttcgcgtcatttgttgctggttgcattgtgttcttccaccattcaaaccctagcgccgccaccatctcccgtttgatcacgccacaaatcgagtcaacattgtttccttatttttctccttcggttacgtcaaaaaaaaacagaaaaaaacaaaccgagtcaacggccgtttccttgattttctccttcggttacaaaaaaaacagaaaaaaaaaacaaaccgagtcaacgaccgcttccttgtttttctccttcggttacataaaa

SEQ ID NO: 18268 - DNA, 667 bp, Zea Mays
gctggtcttagtttattcctttagagttttgagttctaccacgttttggtcaccacgagatccaccatcaccaaaaacatctctggttcgtttttgccaccacggatacatatcatatccgatttggaagtttaaatacaatctggaaagcttatcttatcttctttccaacggatctgaccttatctcaaaattcgttctgagcgctccgcaatcatcgtagagatttctggactttctatattaacaagatttgttaaatctgatttaaaggggctgttagcaatatctttattgtttgggttgtcatagtgaaaaaagggtttaagcccctgcaaaaaaaaacagaagaagaagaagaaaaaaaaaagaatagaaaaaaaaggaaaagaagaagaagggggctgaatctctaaatctgttgtttctctttgtgctgtgctagttgttctttttcagtgactacctttgtgcctaggctcacgtctctaacctggtttagcctaggaccagcacagtaccaccgttgaacgattattcagcttgcttttgtaactaacgtggtactagtgtattccttgcttcagcccacctacaactctacatatttcgactacagtttgacaggtcgtgttgctgcggcaccgatacacttattccacggttg

SEQ ID NO: 18269 - DNA, 277 bp, Zea Mays
tggtgctcatgttttctccccctagtacggagagttgcttggatcaacggcgaaggatgagttacgtagtggaagcctttgtcttcgccgaagacttcaatttcctttcaatacacctatgacttggtttgaaatagacttgagaacacattagtcatagcatatgaaagagatatgatcaaaagtatataaaaagaacaatgtgtgcaatttaacaaaagaagttcctagaatcaagaatactgagctcatgcctaagtttgttaaaagattgttc

SEQ ID NO: 18270 - DNA, 480 bp, Zea Mays
cttttttgtttggtttatggagttgaataggttcatctgccaccaccctatcccttgcaaactaataattagtacaaacatgagggatgtactcattggttggttcctcaaaatacattcgaagtgcacccaccccaatagctgtggcaatgcccatttctcctttgagactctctaagaaggcatttttagatgttcgaactgatataggtttgaaaagttttcctagctgaaaattacaattgacggcttattgacagttatcatgtgcgcatggggctgcaaaattacagatagcgtactgctggttttacagttacatgtctttagagtctcaacattcttacaaagaaagaaacatgtggattgtactaaagtataataactcaacctttacttgctcatgaaataatttttatttttcgaagttccaatttctgtacaagtaaactcaaagaatgggttagtgcgattataaaa

SEQ ID NO: 18271 - DNA, 257 bp, Zea Mays
gccgtaattgtggacgaacttgcgatagtagcctgccaaaccgaggaagccacgcacagctcgcgccgaacgaggttggggccagtcgtggatggcctgaaccttcacggggtccatagcgacgccagccgctgaaatgacgtggccgaggtaggcgacggagtcaacaccaaaggagcacttggacctcttgacaaagagtcggtgctggcgcagggtgttgaggacgacgcagaggtgccggaggtggtccgccc

SEQ ID NO: 18272 - DNA, 295 bp, Zea Mays
agcggatggaggtgccacgccgcgccaacagacgtcccgcccctcccactggaatgccatggttcgggcggtgaagtcccatacaatgggcccgagcgtggccatccagtgtgtgccgaggacgacgtcgtacccggctaagggcattacgaagaggtcgacgccgaataccatgccgcccacgtcgaccggagcttggtgaagaacgcccgggcaggccacgcgctcccctttggccaccgttgccgtgagtcgaggtcgcggctcgatggtcagcccggagcgtcgtgcagcc

SEQ ID NO: 18273 - DNA, 740 bp, Zea Mays
tgcgatagagatagactaaccaccatcagtatcgcaataacagagaaaatttaggatgtggttggttggtagcgacaaatctctcacaagcctcgtagaatttactagaatcgtagagtaacaataatatcaaaaagatacaagaaatgtatatatatacaggcaaacgagcctttggccggcctgcccggctcggacccgatgaagtctgttctgttttaggctcgatccgctagacatggttaaaaaatcgggtcgagccgtctaagctcgcgggctcgtttccctgttcgagttcggcccgctgcgggtgtcgggccagtccgttaagtagaaaaaccgggtcaaacagtgcggtaagcacggtttaagtacaaaaaacgggtttaaaggtaaacgggtcggactagcccgttatgcttagtttcctgtccgagtttggcccgcttattcgtgctggactggcccgagcccatataaaagtgagccagaccaggctcatatcaggcaaaaaaaacttgctttggaccgagctttcgtgcttcgtgctttatgttcatctatatactatatatagatgtagctgaaacgtagctgtcatccaactctggcaacctttttcctacatacacacggcggaataaattgccttgagtgagtcctatagtcaaacagttcctccaggtaatctatccttgcttttgaagtgtcaatttctatggttcatgcatcatgtgaag

SEQ ID NO: 18274 - DNA, 73 bp, Zea Mays
gctcgtggaacgccgccgggcgagggcgaccctcgagcatcaggcagaccgtacgtactcccgtgctggacca

SEQ ID NO: 18275 - DNA, 379 bp, Zea Mays
  misc_feature (379)..(379): n is a, c, g, or t
gttaattggtttttgtatactaatgtgtttgtctaagtgctagaaacagtgacaaaagaaaaggaaaaagagttggctatgtgcagccaacaccaactttggccaggtgcaccggactgtccggtggtgccagaatggccgacggtgaaccggctgctctcgggaaacgcagaggcatacgactataattcaccggaccgtccggtggtgcaccggactatccggtgagtcatccgcgacgaactcgtcggtctcgggaaaaggaaaaaggcgacgtggctataattcaccggactgtccggtgagccaacggtcgctagagccaacggtcggccgcgcgatcaacgcgcgacacgtggtcgcgccaatggtcggttgn

SEQ ID NO: 18276 - DNA, 488 bp, Zea Mays
gtgattgtttatgttcgcaagagctcgcctcatagacttgattaactcgcactaatatctttataatcaagcttgtgggaatttagtgtttatttttacatgatcacctattcaccccccctctaggtgctctcattggtatcagagtcgtactcttcatctaagggactaaccgcccaaagaaatggatcctaagggaaaggggatggtggtcaacgacaaggagaaggagtccatcttcaatgagcctagagatgacaagcccactgactcaggctcgagtcacaagaagaaggacgggaagaagaagaggcgcatcaagaagatcatctactatgacaacgatgcatcttcttcttcaccaagagacgacgatgatgatgacgattctttgtcaaagaaaaagacggttaatcaaaactattcctttgattattcccgtattccgtacaattcaaatgccatttactttctattcctcttggaaa

SEQ ID NO: 18277 - DNA, 2327 bp, Zea Mays
gggaaattgtggaaaatgggatgcattttgatagtacggataaccctgtgatgattaatgaacaaattcataaaaatgcccaagctactactgtcttactagcttcactttgcagggatgagtacaacaaagtaagtggcttggacaacgccaaacagatctgggataccctcaaaatatcacatgagggaaatgatgccaccatgattactaagatggaactggtggggggagaattaggaaggttcgcaatgatcaggagagaggatccaactcagacctacaataggctcaagaccctagtcaacaagatccgaagctacggaagcacaagatggacggaccatgatgtcttccgactcatgctaaggtcatttactataattgaccccccatcttgtcaatcttattcgtgaaaatcctaggtacaccaagatgacgcccgaggagattcttggaaaaatcatgagcgggcgcatgatggtgaaagaggcgtgatacgtagacgatgcacttaatggtccactacccgtctacgagccacagcccgttgctctcaaagcaacaagcagcagggaggcgctaccaagcaaggtggcacaagtggaggctgctgggctaaatgaagatgagatggccctcatcatcaaacgcttcaagaccgcactcaaaggacgcaaagagtacccctccaagaacaaaacaaggggaaatcgctcttccttcaaatgcggtaagactggtcattttattgctcaatgccccgataatgataatgaccaggaataagaaaagtacgggaagagggagaagaagaaggtctacaagaaggcgaagggcgaggcgcaccttggaaaagaatgggattcagactgctcttcatccgactccgacgatgaaggactggcagcctcggccttcgacaaatcttcgctcttccccaacgaaaaccacacttgcctcatggccaaggagaagaaggtacgtattcgagactctccaaagtactcttcttccagtgatgaagattcttccgatggtgaagtagattactctggtttatttaaaggtttagatagagccaaagtagaaaaaattaatgaattaattgatgctctaaatgaaaaagatagactgttagaaaagcaagaggacattctgtatgaggaacatgataaatttgttagtgtgcaaaaatctcttgctttagaaactaagggaatgaaatgttatcttctgagttatctgcttgccatgaatctatctctagtttaaagagtttaaatgatgaattaaatgctaagctagagaaagtaaataaaactagttcatgtgtggaacatgtagttatttgcaatagatgcaaggactttgatgttaatgcttgtgatgaacatcttatgtctattgccaaattaaacaatgaggtggcaagtcttaatgctcaacttaagacttgcaaagttgattttgaaaaactaaagtttgctagggatgcctacactattggtagacacccctcaattaaggatggacttggatttcaaaaggaaaccaagaacttaacaagccaaaaggctcccgttctcaacaaggagaaaggaaaggtcccaatggctagtagtcctcaaaggaaccatgcttttatttatgataggaaaattgctagttgttctaattataataagagttatgttcataacgattcacatgctatgtttgcctctagctctacttttgtgcatggtagaagtaggcctaggaaaaatgttgtgtctcatgtgcctaagaaaatgtgcaatgaacctactactgtttttcatgcttgcaacacttcttttgttctttcatgtaagaatgcaaaagtagttgctagaaagttgggatctaaatgcaagggagacaaaacttgcatatgggttccaaaaactatattgactaaccttgtaggacccaacaagagttgggtacctaaaacccaagcgtaaattgccttgcaggtttatgcatccgggggctcaagctggattatcgacaacggatgcacaaaccacatgacgggggacaagaaaatgttcacctcctacgtcaagaacaaggattcccaggattcgatcatctttggagatgggaaccaaggcaaggtcaaaggattaggaaaaatagccattacatccgagcattctatctctaatgtgtttttagttgaatcgctcgggtataatctgttatctgtgagtcaattgtgtaacatgggttataattgtttattcataaatgtagatgtatatgtttttagaagaagtgatggttcactagcttttaag

SEQ ID NO: 18278 - DNA, 55 bp, Zea Mays
gaggagtaacccaagcattcactaagcatcctaagactcccagactccgcctcca

SEQ ID NO: 18279 - DNA, 301 bp, Zea Mays
tatatattagtgttgatatacattatttggacttattagtgttgatttattttgtaaaaatatagtgtgttgataaataatctttttcccgagaaatatgtcctatttatgttaatattactttcataatttttcctgtattataaatattatatatatatatatatttcaaatattaaagaaaaaaggaattagaaaaaaaaagaaaaaaaaacacaaaaaacaaacccacacacgcatcatttttttgaaaaaaagaaaaaaaatggcaaaatcaatcatcgtgctcacggatgggact

SEQ ID NO: 18280 - DNA, 284 bp, Zea Mays
attaatttcccaccgaaagttgtcgacggtcctgatgaggtgccaaagtcgacagctttattaatttcccaccgcaagttgtcgacggtctcatgccatgccaaagtcgacagctttatttcccaccgcaagttgtcgacatctttaataaagagtgtctatattaaattttatgtttttatctttatttaccttttaaaataatagacctaatagatactccatattctatatttattctatatttagttacagcaaagttattaattaccatttaagggggc

SEQ ID NO: 18281 - DNA, 284 bp, Zea Mays
gtaatagatcagatacaaatgtctctacacaaaagttagagcttttaaataattttagttcaatattaaataggaatagagctcgatcctaatccgatttgatccttaaaatttataatgtaaaatctagagcaaattattacctctaataataatctgtcaggatactagaggtactcgagggaagattgttagagaagtggagtgtgatctctcgtaccgctgagtatgtctactaagttcaaataatatgctaatttttttaatagaggtttgagatgttg

SEQ ID NO: 18282 - DNA, 1338 bp, Zea Mays
atctctcctcaattaacgtgattataggactcgttgttggagtaaagaaattttgttgggtcccatatcacttaaatcaagtcttattttgatttttaggacccaattgtagaactctcgtttgaagatgttcttacattattgtaattattgtatgaaaaatgtgcatacaagattacaaaccctaagtttaagggagaaaaagagactacctctttgaaaaaaaattataaattttaatgtgtttttatttggtggcttggtccttaggttgtctttagttaatagtgtatatggtcgtgcaaaacactattttgcactgcagattatactgttctgttcatagtgtgaagtttaaagtacaagataggataggagataagatgggtaagctgttgtagacaaccttagaacaactccaaaaaaaaattaaccaaatttactgatgaatagctagtctaacagactctataaaccaacaggacgaatggagcagactatccaaaaatatagagcgaagggatgaaaaacttctaaatttgaagagtaatttgtagagtttattggggatattttttttatatataatagctaaaattagcttaataaaattatctaactagttttttagaatctctactcctttaaagcatcagtttcgtcgtcatgcaccacatgtgaagcgtgtagatatattcctttctctgtttatcgtctaacaatggcctaatggactattacaccatagataggagtatgggacgttacaccagatatgccttgtgagaaagcatcaaagctcaacatgacaaaagcaacacgcaacgcagacagtaccacttcgctagatgaaggagctcgaacgatcgagcgaactctgaaaaatgggatgatgtgcttcttttcaactcatatatttctcggtcttttgaataaaataaaatataatatttattcttattaatttaatatctaatatatgaaccatatgttgactttaacattaaatttattttttatagttaataagtataattatatatcatcgtatagacattgctcttaaagcaagctttatttcccaccgcgggttgtccaggtacatgccatgtgtgctgatatagaagacatttatgcgagggaccagattccatatgtcgtgagcagtatgccagtaccacataaatagacagcttatcagacattgctagtccaaccgtccgatttttttgtattttaatctttttttgaaaaatattcacgtttagactcttaaatgacttaatctcatttttaatcctttagtcggcgctgtaagctgtggcgccgaggtaacac

SEQ ID NO: 18283 - DNA, 208 bp, Zea Mays
tgatgaatcatggcacaggatcaaatgtcacaactttactatataataggagttctatacaaaataaataaataaatacattataaggagacaacggtccaacaacccaaagttgactgggagatgacggcctagacctctcacgaactcgtcacagcatcctccatgcgccccatcctgtggtacctgttcttgacctgtggggggt

SEQ ID NO: 18284 - DNA, 1207 bp, Zea Mays
gtgtggtgcggaacgctggcatcgaagtcccacggcggcggcgatctgacgaggcaggctggtagagagctcgcggcgcgaggagagacaagagaggggtcggcacggaggcgagcactaaggcgggagatggcaaggttagcagcggcggcacgactggtgatatggctcagcggacgcggcagcgacacccacggcgccgggagatggagaccgagcggtcgaccaccaggcggattgcacgaggaagaggagaaggctgggtgggagagaaggcaggaggaagcccagcacacagcttatagccccgcgcgggtcagttccggttgcaagcaacggactccgagttccctggaggtaataccgtgagtttgttgcatgaggagatcacggggaggaagacgtaacgcccgacaaccgggcccatgttgtcagccagcaaggcaggggtgggctggcgcaagtgaaaagtgggccggccagggagatttggccacacggctgaagtggtttctctttttttatttttctcctttttctattttctctcattttctattttcaagtttctccaaattagattttaatttctcatttgttttcaaagtctaactccaaatcaaatgcataactcatgaacttcagtatgaatgcaagaatattactttcattctttatttgcttattatttatttccttaaaataaatacttcttgatataaggataaaccaataaatggttatttattttagggaatatgttctaatgtataactacaccaagctatgctattagcttaaatctttcatgagagtacttataattcaataatggtataactaatttcatatgggtacctttttaattaactctttattatgagggatatttattttaggggatatgatttcaaaaatattctaaagaaactttggagaattctacccgattcaaaatgagatttttgaggtgttacaagattcgcatttttgggcagacctgttaggtgttaaggatatctttcttcgcctaggccttttcaaaattggggatgggactcaagtctgtttttgggaggacaaatggcgtggtaacgcaatgtttaaggaacttttccatggactctatgatatagtccgcaaaaagagagcttttgttgcttctgttttaagatcaaatacaataaatgtggccttttgtcgatcc

SEQ ID NO: 18285 - DNA, 271 bp, Zea Mays
aaaagatagtggtttaccagagagggcacttgtgcccaaattggcctagagcatagcgactcattatccttccaccgttggtggcgggcggtactctctgctctgtgaggccagcctcacgcaatgtccaccactttaggtgttgggatataaaggctttcgccaagacacccgaaacccactacacaacttggaatgggtggtccacagtttgtagcactagacccaggcacacgctccacaattgacatccacactaccttattgcccc

SEQ ID NO: 18286 - DNA, 715 bp, Zea Mays
aaccatcagtatcatacagacttcaatatataccatgatttacatggtctcatcattggagagcacgtgccacacctatcggtagaagttccctcgtacatcgtcagtcatcaggcacgcacaaccatacatgtttgcttaaataaaaaggcaagtgtgtgcgtttgcgaagagaattaaaggcaggtcagcacaaaagctacatcggcgatggcaagtggtcattgttgtcggtcctcctctgcgtcacctctgtcgctaagatgactcaacagtctttgatatagtagtcgtcgaacgcgcgtgacatggcgagtaccgatgacttttggctgggctgctaaacgaagtgcaccccgggctcatcagcgaggtagtacacctagccgttgcacctctagatgtgctactcctctacatacatcttgttcgaggacactcacacaacatcaacaacaaccgtcgtcccagcgcacaagaatttatggccggtcagtagcgacttacgtggccggttgagcttcaggtggatgatgagctagatggcgtgacggcgccgtcgtcggatgcggtgcccagaacaacccgagagtcgccggcgttggcaacgactatgaggtccctcgtttgaatatgaacagcggtgtagccgctctggacctcgtccaagcgacggctgcgccggagcttgccgaacatagcgacgcatgcggcc

SEQ ID NO: 18287 - DNA, 394 bp, Zea Mays
tcccctcacgtaaaccatatattatcccatcatacatgctaagcttattcctcccgaatccaaagtaacatattctttttaatatagtctatataagcattttatatgtaaatttgtgtggtgcgttttaaggctcggatggtgtacaagtagaacacaagaggctaagttggttcgggtagaatcatcctactccacggtcttcgacatcttgtgctactggcactggtcttcgacatcttgtgctactggcactagattactctgcgggcatgggatttttaacctcgacaacaagagaggtaagaaaaaaaagataggttattccatacagcttatccatttccatatccatattcaaacttcactttagaaatattgtagtctaaagtac

SEQ ID NO: 18288 - DNA, 178 bp, Zea Mays
gtactagtagacggatgacaacgtccgtccggatgttaattaattagccgcagcagcgttcatctaggtagcattctagcaagtgattataaaatattccctccacaaaccaactttttccgtaggggggccgtagcactagcagagtcgaagtgccgaaccgagacggtggcctgca

SEQ ID NO: 18289 - DNA, 392 bp, Zea Mays
ggcgaatcaaaggaggagatagaatggcccattgtggtaatggcggctggattgcaggatgggctagatgaccgccgagctgggccaagtcagggaaggtggcccaggtgcagttccctcactctctttttttttatttttttcttttattctcttttctaagttcaagactctattcaaatttaaattcctatttgaacttcgactttggatattacacacaaatctaatataaataatgattttactacctggcataatattatatacatttttttatcttatactgtttattctttcttctcttttcctagttccggaactccatttttgacatttatattcacctccaatgttcagtttgatcatagtttgaattttataagtttttt

SEQ ID NO: 18290 - DNA, 494 bp, Zea Mays
aggagccaacactttagcaagatcttgaggcaagtatccaagcatctcctcacattcagaccctgcatacaacacctacctgttctagaatgatttcagaacatttttcagtaggtactttttacagttatgttatgtactagaatgatttcggagaccatgtagatatccaaaatgaatctttttgttgtgaccgaagggagtaactttttaggttttgtggttactttttcaaaaattaactctttcgttcactataactacaaaatagtaagccaatgtactgcaagaacaatgttcttcttgaatactcaaaagaacaatgtccatcatggattctgctacgtgaccatgtggtccagcttgtttggtacacgaggccatatctttgtgttcgctttatgtatatgttccctttttattcctcagtttattcacttttatcttgtagttgtaggtttcttactcctgggtaggttccatttgtcttaaac

SEQ ID NO: 18291 - DNA, 142 bp, Zea Mays
ctcaggttcgtcgtcctgcactgcacccatggtttcaatgcgaataatgcagcagcaattgccatagtcagccacagctagccacagggccttcaattcaatatatgggactggccgagcccttgatggtgttgaatctgag

SEQ ID NO: 18292 - DNA, 370 bp, Zea Mays
ggcatttatccctgtgcaggctctctgggcatgcatccatgcatgcatgtcgttgttcgcaggaaagcagtgtggtcgagtacagtgctggttccaattaagttttcagcctttgatttgatctatatatatatatctcatggcgggacggaatcagcaaccatccatcggaccaaccaactaatgctacagcaaaaaaaaaaaaaaaatcggcaaacctcttattttagcggctctgagtgatgctgaaacggaaacagcacactaattaattaaaatctctgatgctgtaccaaccatttattaatttaagatgtccagctagcgccgcaagcaacatgatggatggtccaggagtcgatcagatggg

SEQ ID NO: 18293 - DNA, 400 bp, Zea Mays
caaaaatgaagattctcttggagatgctcttacaggtgaattttggtgcgaaacaacttgccaaattttgaacttggcatcccttgtgctggagaagctgtgtctcgtctaccaaaagaaaaaggaaaaatggcacagttctctttgaaaaacaaaggaagaaatggcacagtcgtctcttgcgcccaatggcgtccagtctgctaatcaccatctaattaacgaacagaagcacaggtacgggcatcatatgcatgagccacgggcccacccccatgttcttctcgcttcctcccttaattgcagccagccagccagagcttgcttgcacgcgctcagctgcctcgcctcagtcctcctctccggccgcttgctgttgctgctcccacccatctcctca

SEQ ID NO: 18294 - DNA, 235 bp, Zea Mays
tggccgtccgcgagggaggaccccggccgccgcggccgccgctggcgcggctccctctgccgcaagctgctcggctgcctcagcttcatcggggcgctcttccgaccttgatgactcgtccgtccggacacacccgtctgtgcgtgacacttcttgcttgcggattctctggtccttctggaacgctgctcttccggttctcgagtgatcagaatttttcttattaggatttttc

SEQ ID NO: 18295 - DNA, 301 bp, Zea Mays
ctcaagttatccaatgatcaacttgagtaccatggttctttttcttatctcaagtttttccgttgtgaggaatctccacaatttagagtctctcacgccttacacaattgatcttaaacaaaccataagagtaagagagagtagagacacacacaagacaaaatcacagcaacacacacaagttgagagaagagcacatgagacaacacaacggagttacaactcaaaaacatatgctcgaatctcaatccatcaaagcaaaagtgtggtcgcattgtctcgatgtcgtaggatgttcaag

SEQ ID NO: 18296 - DNA, 768 bp, Zea Mays
atttctctgataccactgctgatccatgtgttcccctttcttgaggccaatgcatcaggttttcagtggtgctgtgtgggggcaaaccaaaacaaggcaggcttcaaatcagaggaactgtttccctctagcccagggctcttattacagctggtattatttgcaagacgccaaggtcaagattctcatactgatcgtgtcctgtagtgtgggttggtgcctttttctccatctcactcatccggcaacagttctgcccttccaagcaaacttcgtattggcggctctgatattttaggcacaattccttttctgactgggagggagcatttgtactgaatttagctgccaaaaaggagaactgttctgtataattttttttcttggtcaccaatttgcagttcttctgtgatgttgttaaaatcagccaaatatatgcaccacccttcccatattttctaccttttttttcctgagctgatgccactctttttcttgattgcatgatctcactctttttcattatgtatctgtctgactgatgatctcatctcatccgttctcacctgaatgagttgctggttatccaacttccggtacccagcttcatggcaccaccaaagaatgaagtggccgtctaatttgggctctactgccttggattccaacagaggcttgattattcttatccaatgtggattatatgggattgaaaaaaaagtataactttttttgatttgtttggaaatcaaagccacccaatctcat

SEQ ID NO: 18297 - DNA, 941 bp, Zea Mays
cttggtttaggccacctctgaataaaaaacccccgatgaaactagatgccaccacacatccaaggacgatggatacgtttcgttccaagtcccgttgctgagaaaaggacggataggttaaaacctgaaaagtttttggtcttgaggtttccaaactgttgcaaaagctggttagtttttgtcccgcagtttgaaagctggctaataaactagcaaattcggccacagttttaaaagctggctaatctttgtcctgaggctcttggctttctgactggaatggagaagcaacaatcttggaccggagctcgagtaacactgttgtggctgtgagttccagcacagacactgccctcctgatggatctttttcttgtgttttccagacccctgtgttcagttcaggcttcagtctgaaactctgaatggatatatagccaagattgtggaatgcaggaaagttcacatgcatggaggttttatgagactaatcttgccgttgccgtgtttattatctgtagaggaccaatcaataacgaaaaaaaattaaaatggaataaaaaatccttgatttatcatcaatgggtgagcagccacaagatctgaaaaccaagcagctaaggccaaacccttctctcagaatgaaaggccaagatcgaactgtgtgatcatataatagcatatctttctaacaaaaagcagggtcagtcagagttccattcaaaaacaaactaagatctcacaaagcacctcattatgaaatgttcccccctgcaaaaagatagccaatagaaaaaagaggggggtgctaggtgtacacctctgatgcggctatgccagctgacagcgggtccctgtgcaggcagattattccaggcccacacaccagtgtctgcggggatcaggcatgtccaaccacgacagtgagagaagaacactgtt

SEQ ID NO: 18298 - DNA, 937 bp, Zea Mays
gtcaaatttatcttcaaattgcgtagaatctaaagcctatcctctgataccaactgtaacaccccggggtccaccaacaccccggaatgctactaaacaacacttctgacatctatatataaaattttggcagcatcccccttgcaaaattgcataaatgagggagcaacagtgtataaacatatatcatgacaaaaacatactaaatattattaatcggctagcaaagagaagttaaacatacgacatgaagtgaattaactagtgcgcacgactagttaaaaaaataaacttcctttgacaataagtttctaattaaatcatggctgtgtctgggcagcgttattgtgagagtgaaagtggacgtgctgctactcccctcattcccaacatgaatcaagtacctgcattgagtaatgcaagagtgagatgacacatctcagcaagtaaaataatatcaaactgtttaaccacataagaacattgttttaccaccacttgattccacaaccttcttattacgaaggtgcagcacgtatacaacgtacaacacacctagtcaccacacctcgcaggtagaaaccacaatagtaacatagtaatgtcacacttcatatatacctcatgagtgcaaatgtctgcaaatgcaaggatgacttctgccttcatacctctaaggatatgaagccgcatcgtacccctcctcgggcaacgtacgatgctaaaaatgtaccggtacggtcggaccataagatcacgacataacttcaaaatgcaagatggatgatgcgatgagcatgtcatgcctacaacacttcatataacgtgattcaaaaaaatacttcaacttcatccaagatgggaatcaaccacatatatcattaccaaattatgatcatccacaatattagacaattgagaattaatacttccaaac

SEQ ID NO: 18299 - DNA, 2994 bp, Zea Mays
agaaggttggccgcgcggggacgaggacggggacatgcgctctcttggggccgctcgcttccctcacccgcgtggacgcttgtaaccccctactgcaagcgcacccgacctgggcgcgggacgaacacgaaggccgcgggattcccacctctctctcgccggactccggcctcctcgctcctttcccccttcgcgctcgcccacgcgctcgacccatctgggctggggcacgcggcacactcactcgtcggcttagggaccccccggtctcgaaacgccgacaaaaaccagttgaaggagttctacacaatacatggtagtcagttttacttgaattgtttcatattaattttggtttatctccattgcttctttcaaatatttaaatagatcgtgtatttgcatcaaacatctggccgagcaagggaaaacgaaaaaatagccccttttgataattgttttgtttgttctatattctccttaacaagtgctatgtgccaaggcaaaatttagctatgtgttctccaaatatacttgttctccgtcaatgattacatatacttgttctccattagtgccttctgattcactattatttgtgttgtttaggttattgctatgcaccacacctctttccttagattatttactctacctggtatggtgaccgccttagaattaatgtgttaaataattaggcacattcatgttgaattctgatcggtgtttatttcagctatggcaaaactaatgtgctactgaatatatatatatataaaggtcactggaaattctagaaaataacaaattattatttcagaagtggttgaacagaaatgttaccttctctaattgttgatcatacatatgatgttaagcagaaaaaaacagacaccaagtatgtccaactgtgttcagtaaaaacacggatagaaggtgaagccccatgactctcaggttccctttgttatatgaatcagcagcagaagattatagtatatcaattagaaaattaaacaaataagcaattagaaacttacataactatctataagttttcgaagtcccaagtcaagtggcctcctcttgttcccaatcccctcaatggagatgaagctacgggggcgacttgccagccagcctggcggacagtgtcctccatgttaccctcggcacacagataggcacgcatggccttgaacgggcctgggaacagctcgaccacacgcaaataaaaatccagggacaccagcacatcgtactacccaagtgcagtggcctcctctagatgaagtggacggggatgaagtagtatgtccaggcacaccaccacatcgtaccacaggagtgggcggggatgaagaagcgggcgtgggcacgcagaataggatgaggatggggacgggccaccaaacacagatctgacctgacccaagtgcgtacaacgatggagatcatgggcgaggatggttaagacgcggcggcggagatccggggcaagcctgggtgggggcgtgcagatgaggatgaggacggggatgggccaccaaatgcagatctgacctgacccaagtgcggacggcggcggagatcacgagcttgggtggtgaagacgtggcgatggagatcgcgggagagcgtgggcgggggaatgacgcgcgtggttgacgggggcgggggcacggtgtagttgtggacgccctcgttaggctcatatagaatagtagagattagtggattagggtgtggacatgcatcaaatccatcgctgaagtggaatgcaaagcgtacagctcaagcggatgtcggatcagaagctaaaataaacagctagctttttttggtttagctcttcgaaagcgaggagctcagaaaagtttagcttacatgaaaagctggaaaaactgattttatgagctctctataatttttcgagtttagtaaactaataacattgttgaaaaattatcattggcttctcggaagaagaaaaaacctacaataacttttcgaaaaagcttcaaaagctacgactcaaacaaacactgaccctagtatttgtcgacactacatattgatgtgatgaactcatcccacaaaataaactatgatcgtttcagagggatggaagcatttaaaaagcagaaaaaccccatacagactaaacttccacacaaacctcaccagacacttaaccatcaaacacaaacagtacagaacccaaggttagcatcccatctctcaagtaaaataataacctcttaaggcaatcccaatttcacagccgcattaacacaacattctcccacaacatcagaacacatacaaggtgaaactaatgatagttcaaaaccagaacggaagaaatttaaaacctgtagtatttctggcgtcccaaactatgaactatctaagcgactcagcataaaaaaccatcattttcttgggtcaaaaataaaatcagactttgtatctcatgtgaaggcaacttctgggtacaatatgatatctgtaatctaatattaaaacttgcagtgaataccatgtgggagatattcctaagcaataaggcccagttcaaaagcacactatataacagatcatgaagtgacacatatcacaacactcggcaaacatttagcatttatgttccctactatgaagaatattggttaattcctctatttctaaaatactttatcaatcggttttggagaatactactatataatactactaaccaatttagatcattcctttgagatacgcactagaatgttaaatacagaaatgcttagcagaccaacatagaagactgtcacaaaatggaagtggacgtgccttcatgtacctcccgacttgcctcaggagccagattggtgccctctcgacctttttccctctgattgcgctcaccagcagtggctcctccaccgtcccgggcgatgcctcctccattaccgtctctgaaccgcaccatcacgtcaaaaagag

SEQ ID NO: 18300 - DNA, 742 bp, Zea Mays
caggacatcgtcttctccacgcttctcctcatcgtacgcagattcttggccgtgggagctccccacgccatctcccatggcgcttggcctcccagcccctccccagccgcgagctcgccgagctctccctctccccatggccacgccgcgccctgctccctctgtcttccctggcgcgcgctggtcgttcctaccaatttccttggcctcgctcggtacttctctggtcgtccttactcctgctctctgctcaagcacgccggccgccagatcttcaccgccctgctccatggcgcgccctcccgttttctgctcgctcgcgcacggctcagagccccctggtggtcgcgcgtcttctcccagccagccgagtagttcgccgagctccctccctagcggtccctggctccagctcggccggccctgttccccatggtcgccggctgcttgaccccagctccttgccgtcgcacccctattcctccatggccgcgagctccctctgctgtctgcttcgccgcgcgccaagcccccagccgaggtctcctccctgccgagtcccagccgaactcctccgtacagcgccctgtcgaggcttcccgttcctgcgcgccgtcgccttgctgctcgccttgcgtgcgcggtcctctgtccctgcgcgtagccggtttctcggttcgccgtggagcctgcgcgctcggttctgtccagttcatgtcccgctcggccgtccgcgcgacac

SEQ ID NO: 18301 - DNA, 96 bp, Zea Mays
cctgtgtcgcgttccattcacctaaaccggagttcgccagccgtccatacttgccggtgtgctgctgctctagttcggatctcgcccaagtcgctg

SEQ ID NO: 18302 - DNA, 529 bp, Zea Mays
acagagtctttgattattgaaaagccttaccttgacacccttaagccagcatacccttgagagtcttttctttagtcgggtaagtcttgctgagtaattccatactcagggttttattccctgttgtttttcaggttctaactttgtgctgttgttgatggtgttaagtgccggtgggctcggccttcttataagtctaagtactccttctatacttcttactgaggatggtcatttgagctagcatatatttcaaacttatacttttataatcactccgataaaataatgtaaaatttttgtaacttgtaaaatttggtaataagatttccgctgcaaaaatgttgtgtgtgtgatttgtattacttaatcccgcggttctggttgaaagtggtttatccgatgtccttggggcaatcggacagatcctgttaagttatctggtgcacatgcatagccgtctgaggtctttgggacaaggacaggtgcatgtgggcccaataacttgggaggttctgccacaaatgat

SEQ ID NO: 18303 - DNA, 327 bp, Zea Mays
aaatccttgagttgattatacattcaaaacaatgactcctttgaaataaataaacaaaataggtgtatgtggtttatatttgaagcatgtggctaaacaagtattaatataaatccaataaaacctttgcatttcatgctggagttccatgttgtgcatcttgatcgatgtttaaatttgaaacccaaattaagtttgagtttgaaataggaatttgaaaatttgaaaactaaaatagaaaaaaagaaaagaaaaaaaagagagaaactcaaacctacgatgtgggccgaatttgcctcacccgtcccatttcccttcacccagccg

SEQ ID NO: 18304 - DNA, 1360 bp, Zea Mays
  misc_feature (1)..(2): n is a, c, g, or t
nntcattcaatacaagagcaatacacaacactccaagacacaaatcaaagtctccgatcaaatcgaagtccacaaatcaactctagtttttaggacttgtgagaagatcggcttgtgttcttttgttgttcttgttgcttggttggctttcttctttctctcattattactctcaaagccttgtaagcaaagcaagagacaccaattgtgtggtggtccttgcggggtctaagtgacccgggaaatcaagaaggaaggaagctcactcggtctaagtgaccgtttgagagagggaaagggttgaaagagacccggtctttgtgaccacctcaacggggagtaggtttgcaagaaccgaaccttggtaaaacaaatcaccgtgtcatccgctcttattcgcttgtgatttgttttcgccctctctttcggactagattatatttctaacactaaccccggcttgtagttgtgcttaaactttataaatttcagatttgcctattcaccccccctcttggcgactttcatgatattaatttttgctatactatatatgtattgtgttgatgcgagtagacgagcaagctactgtggatcctgaggttcagcagatagaagttgctgagcaggagctcattgaaggcaagttgtgtccttgatcacttaattttacccaaccatgttcttattattcataatgatctgtataggttatttttgatgggatccaataggttaccccaattttggttatctttataccttgttgccactgaaatatttttggatagtatttgctattgctttatgtggttttgggtatgaagatacattattcatgattacacttttattacttgtttattattatcgttcatgttaagatcattatgttaatgggaacatggagcgaccacccgggaaaacagtgctaccacaagggtagtatgggatgcccttggctgattaactaggaaagctagtggatgactaccttacccgaaagggtaagggcagtaggggagtggtcagtgtagggaggtccttgggttgattttgctgcgatggcgatcaggcgagggattcctgcactggagcttcctataaattgtagcgggttttctaaagctagtggaactttgtaaaggccccgtagtgttaccctgcctcgcctcctcggtagaggtgtatgggattggccgtctcttggcagataggtaacatgacttgtaggtaaagatgtgcaacccctgcagagtgtaaaactagtatactagccgtgctcacggtcatgagcagctcggaccctcacatgattaatctatggaattaaaactcaatttgtcatttgcatcgcatt

SEQ ID NO: 18305 - DNA, 936 bp, Zea Mays
attattactaaggtttggtattcacttacacttagtaactgctaataaaatttggaccaacttataaaagcaatgctcagcttcagcctttattttgttgatcagtcttacactccacatgagctcccacctttggtgagtccatgcatattatttcccataacttgttgagctatgaacgtatgtgagctcactcttgctgtctcacacccccacaggagaagaataggtggtcgaagaggagccgcctagcactgaggctttcgacttgatctaggtggtgtctcccagtcatctttgtggcgccaaggaataatatagttcgctttatttatcatttatttttgtaagactttcgctatgtaataagtacatttatgatatttatgacatttatctctatgcactctgttattatatgtgttgtcttctctgacgcatatatgagatgcacccggctttgttctttaaatccaggtgtgacacttcaccgggctcggacggcccgtttggccatctctgcgccacagtgacatgggcacccacgagacacgcccctagcggtggccgcacgactacaactgcagcttttgccatgccggcttgacgactgcgaacgacgcagagtacgtcacacacgtcgtcgatgagctgaagatctggtgcagttgggcgacacactgacacggtggggcctaggaggcggcgtggtggtagtggccaaacacagcgaggcacgcaaccacacccctcgagtcgtgactgagcacacgacgaaagttggaggagggccagtgccacgacgggtcctcacattttagggcccaagctaaagctaatatggaggtcctctcacctgtctttatatatgtatgtatgaaatatatatttatatataaacttttttaaaacatgattactgatcacaaataaaat

SEQ ID NO: 18306 - DNA, 256 bp, Zea Mays
gggtagccgatggtctcaacttgaggtattacccccgccgtccatctggcagcacaggaggcgtgattgtctcacctgttggtgaggacaatcctaggttgagcagcacaatcaacctagccgccgtgttaaacacggagctggaccatgcactagacgagctgagtagggctcgtgttgagattgcccagctgcgagctgagcgtgcggagcgtcgtcacctagatgatggctcccccgctcccgtcgggactcg

SEQ ID NO: 18307 - DNA, 262 bp, Zea Mays
attttgaaccacagatcgtcagcatcggatcttgtaactaatacgaaaatatatatagaagctatagtcttagcattagtcttgttgttagttagtcttagctagacatggtagtttgcttatcctgtgcatttatgtttgtcatgatgaacaatgttggagttggatctttgtaatgactgtcaccgaagtgtgggtattcccctgcactttggtttacctgttggatgttaataaagttagttacctagttggggaagcc

SEQ ID NO: 18308 - DNA, 375 bp, Zea Mays
ttatattatactatccatctcaccatttagcatatattcgaatcgataaaaactaatttttcctatgctgcaacgattcttgaaggcacatctatgttgtagatcaaatctgtcattttagtttggccatgcaaatagttttatgatatatccctttttcactatgttttgtttttttacgacagatgccacataagtgctttgtttatgttgtttttgttcagtcatcgattattcatttttatttctagagccatataacataattgaggtattctaatgtggggcgagcgtctagaatgtacaattattttatatagtcatttgtttatatgttgatgtatgtaagtcagtaaaatatatgtaaaatcagca

SEQ ID NO: 18309 - DNA, 2301 bp, Zea Mays
ggcagcatctcctttgtaattataagcatcacagaagcaaaagagatatatcaatacaaaatgaatcatactagtatgatataattctcatcaaggacaattaaccatgaatgaaccagcttatgactatgtcatactctaaagtatgaacctcaaaagtcaataacccaagataattatttggttctttaagcaatgagtgcaacatgccgctacttcccactccccttgataagcatcaagcacctgcattgagtaatgcaagagtgagatgaaacatctcagcaagcaaaatgttttgacgagatatttaaaccacaagataaattaatcaacattttataggaatcacaagtaagattagaaatacttatagatatagaactcaatagtcccaatataaccaataccatctcatttcctcgaacaaccacaatagtttgtataacacttccctgcgtccacaatatctgcaaatatcacttcaatgaatgcatgggaatacaatgcatatgtcatctgccttcatatcttaaagggtatgaagccgcatcgtacccctcctagggcaacgtatgatgctaagttgtaccggtacggtcggaccataggtcacgataaaacttcagatgcaaatgaatcatgcaatgcatatgacatgctgcatttatcaatatacttcacttccttcacatacaatacaaacctcaaataatacttcatcttccttcagatacaagacaaaccacaaaaaatactttaccttccttcagatacaatacaaacctcaaataatactttaccttccttcagatataatacatacctcaaatattacttcatcttccttgaggggtgtgaattaatctcatgggtcatactcgaatcataatcatcatcaatatatgattgagcatcaatataatacaatcaagtaaagcatcatcagagttctattatgaatgaattcaataattctgaatattagagtgcaggcgataaaaataacaagtcaaaacggtagcaaccacagctacattcacttgccttcatcgaagaagaaaaatgtactaggcatgattcggagtgtagccacctactgcggggcataaagcttagtacaaatattccacaaacatttgccaacaatcaacaaatcgctcatacacatgaaaccaagacccggtggaaagacttccaccctgaaccacatgctaaacagcagcggcgctgtttgttaattttgtatctttaaaactataacagtggtgatatcaaacaaatactctagaagtatctacacaaaatactctacaacttcggtattcaatggataattaaattttgccttctatatgttctaaaacatctgacaaggtaactgactgaatctattttagacagcagcatagttaacttcaaaattctgtatctcccaatctacacaaccgaaaattatgaaattatgctggaagaaagaacttttatccctctacaaaagtctccatagttggaagagccaattcggccatttactagatgaaacccaccagtgaacagacccgctcatttttgccaggcaaacagaaacaaccacagtaaaatgaacataactggagttaaaattcatatgaatacactctttatcaatctaaaaatcttatgaaattatctacaactttgcttacaaaccctaggtttaattctgttgataaaattgcctaaatcttaagagaacagattctgcacagaattatgagactgaaaaactgctataatcaaactagaataactctctgatctgatgtccaattgaggtgtttttcgcggacacggaaagatctacaaattatatacgactcatgtatagaccttttatttttttgaggccactaagaccacggaaaactggcatgaacagaaactatcgaatctgccattctgcagaaattaaatttgagaccaaaatctaaccccacatctaatccaacctctaatcctttaatcccaatgatccaaaacctccaaaaacacttaattgcagggaggaacatggatctcatccttacctagggtttccccaagaaaatctgcaagtagagatggggatagaacgtctccatggtcatatcttcctcttcaatccaacttgctcctcctcttctcgatccttgctgcttgggggagagttctagaaggaggaggaagccgtggagagggtagagggaagctgccatgggaggagagggggcagccagccaaggggaagggtaggggcggccaagtgtggggaaagggggg

SEQ ID NO: 18310 - DNA, 377 bp, Zea Mays
atcaatttaggtatatattagtcttgtttaatgttatatgctatatgtgaagatgttatatgctatatatgaagatgaaacccatagctcaagttaagtttagacatttagtggtcaattttggtttcatttcctgtctaagatggattccatggatcaagtagcttcagttcttctaataagtattcgtctgtacaaaactcaatcttgaacccttagctccagttcttctgtatgtgttcctaagatttgctgagcatgagaaaagttcaacacttggtgaggtgcatatgcaatacacaaacaccaaacacacataccgatatgtttttttttgctttgtggataagtatttgtttgtcgttcttgttttctcg

SEQ ID NO: 18311 - DNA, 338 bp, Zea Mays
cacagtttatggaggcgaacaaaggtgctggtcactacccgaggtagaaccacgacgacggcgaggaatcttcagccctctggtggtgacttccgcccaacgaggtgtccaacacgtctggcaaaacccaccagcgctcccgagctgaccgccaggaccgggaagtcgaccgtggggcaggtctatggcggcggcgcgagctggctatcccagcacgacggcgaaccttggtcggctgaagatggagcgagggcaacacttcgactggtgcttaaataggggcaagctacgaggatctcggtcggggaggttggaggtcaggtcgcagacgcagttgg

SEQ ID NO: 18312 - DNA, 315 bp, Zea Mays
gcaggttcctggcgcgctcggagagagagagagaggagagagagaccgggtgggagagagagtggcggctgggaaggagaccaggggagcgcgcggctgggaacaagggaggcggcgtctaggtcagagtgttgggcctaatgggccggtttagtttaggtttttttgtgttttttttgtttttttttctatttcctttttaaatttcgaaatacattttaaaataaccctaaaaatcataataatcaaaccaaaataaatattaattcttggactaataattatattattaatttactaggattttcatttaac

SEQ ID NO: 18313 - DNA, 1389 bp, Zea Mays
atcttatacgtcctagagactaaatagaatggtcggaaggcgaagaaggtgggcaatactggcttcaagctttggtacatagggacaactacaaatagaaatataggagttttgattgataagagcctcaataacagtgtggtaaatgtgataaggcaaggttataggattatcttagtcaagcttgtcgtgggtgatttggtcttgaacataattagcacctatgcccccaaaatagaccacgatgagaggactatacctattagtgagaagacttagatagttagatggcatggttagagctatacctattagtgagaagtgtttcataggaggtgacttcaatggcatgtaggtacaagtgcaggtttcgacgcagttcatggaggttttgggtacggtggtaggaatcaagagggagagaaagtcttggaccgcggtagcttttgacctattgatagccaacacttcctttaggaagagactcccatttagtgacatataatagtggccaacactatagttagattgactttgtcctcgctagaagagaagacaaacgagcgtgcttggattgtaagatgatacctagggagtgtgttgtctctcaacataagcttgtggtggcggtcttttgttttcaggtgcttgctcgtagggataaacaagccaagattatgagaacaaagtggtggaaaatggaagaggggaaggcaaaagtcttcaaggaaagggccattaaagagggcacttggaaggaaggtgacgcaaacaacatgtgggagaagatgataacctgcattcggaaggtggcctcagaggtgtgtggagcaactaaagggtgtggaggcaaagctaaatatacttggtggtggaataaaaaaagtccaaagggctattaaggagaaaaaagaatactacatgcgtttgtatcatgataggagtatggacaacatagagaagtacaacgaagcaaagaagattgcaaagcgaattgtaagtgtggcaaagggtagggcatatgagaatctttaacaacatttgagcacgaaggaaggagacatgacatatataggatggctagggtccatgagaggaaaacaagggacttcaaaagttaagtgcattaaggaataagaatgaaatagagcacctattagtgatggaggataagaatcaaacatagattgtgagtattttaacaaattgttcaatatggaagatgaggatccaaccttttagttggatctcttttggtgatagcaatagacgctttgtgcttaggatccaagaatctgacgttagaggcattgaaaaagataaaatggggtaaggcgatggactcttatggtatctcaattgaggtatggacatgtctcagggacacag

SEQ ID NO: 18314 - DNA, 596 bp, Zea Mays
gaaaaaccttgcacacctgacttgctttgtgtgcggtgaatctggtcacattgtaacaccccactaaacccacacaatggatgttaccaaaaaaaacctttctacaaaacttatgcaacacatagagaaagaaagtattgcaaaatccggcagcacctcccttgaaagtagcataacatgggaagcatagagtttatacatgatataaaagaaagataattgacatattataatcgaaatgcaacggtagaaatgaacattcatgaccagacaaaagatagacaactcagcccaccaaattaaacagttcaactaccatgaaagattagaatgtaataatcccctagacttgaccctccctgtttaacatcattattaagcagtggttcctttatttaaaagtgtggtggccgtgctgctacatcccttctttcccaaagcaaagatcaagtgcctgcatcagacaatgcaagagtgagatgacacatctcagcaagtaaaaaaacaaacaacagttggaaaatgtaagccaaccgtgcataagcaaccacatggttcccaacttctttcttaaatattaatttgcagcaagtaag

SEQ ID NO: 18315 - DNA, 336 bp, Zea Mays
ctgattcccactaattaacccacgaaaatacccagaaatccctagaactactgctgtccacccactcataaaattcctggacagcacctctaccgattcgcaaagataaacgcataatccaattgattgcagcacaaaaacaacaaaagttaaacatgaattcaccttgagttcttcccttcctccttccttcgtcctccctccaaactccaattgagatcgcagccacacgacggagaaccacgcgggagggctgcaccttggagggggggaagagaaatggggggggctagggtttttggtggtgagggctgcaaaggttttaggaggaagaag

SEQ ID NO: 18316 - DNA, 378 bp, Zea Mays
ctgattcccactaaataacccacaaaaattcccagaaatccctagaactactgctgtccacccactcataaaattcctggacagcacctctaccgattcacaaagataaacgcataatccaattgattgcagcacaaaaacaacaaaagttaaacatgaatttaccttgggttcttcccttcctccttccttcgtcctccctccaaactccaattgagatcgcagccacacgacggagaaccacgcgggagggctgcaccttggcgggggggaagagaaatgggggggctagggtttttagtggtgagggctgcaaaggtttgaggaggaagaagataggagagggggggaggggtggcgtccaagagaaaggggagg

SEQ ID NO: 18317 - DNA, 592 bp, Zea Mays
ctcctcccaagttaagcgaggtaggataattctgaggctcacacggtcgccgtccgactacaattgggccaactgggccgattgcgtctttgccaacgggtaatagtggaggatgtcctcatcattcctaccttcttaaaatgggccctagctctaataccagatgatacacccagcccaggtggggttggccgaggcccaacaaattagggtttcccggagcccaacagttcattaagcacacccaactcaaggaaaggcccaatcgccccaaaagactagtccaatgggagaagggtggctctcccttttaaagtggcttcctcctcccaagttaagcgaggtgggataattctgaggctcacacggtcgtcgtccgactacattgggccaattgggccaattgtgtctttgccaacgggtaatagtggaggatgtcctcatcattcctaccttcttaaaatgggccctagctctgataccagatgatacacctagcccaggtggggttggccgaggcccaacaaattagggtttcctggagcccaacagttcattaagcacacccaactcagggaaaggcccaatcgcc

SEQ ID NO: 18318 - DNA, 496 bp, Zea Mays
cagttctacaccttgcaacctaatttgcaatcgaaacaacaagcaaaaatgtgtaaaagcaatgagtttgtatagctacttctaatggaacagatgtctgcaacgcaaactagtaagttgcatgcataatggctagacaacggatccattgttatccatgcagcgtcatggccggtgggagaaacggacgccctgctatggcggtcgccgactgaggacctcttggattgtccaccatttaccacacgtccacaccagcgcatacgcccctggccaacatcgagaagggtggccccgtggctgcaccggccgagggcgcgaaggcgtcatggccggcggaagaaccggtgtgatgggcagcctgctgcgggggtcgcagatcgaaaacctcctggacccgccgccatttctgagttgacggagggcaacagattcgcgttcccgaaacttacggctgtgttttgtagggggctccaggtggtggaccacactggca

SEQ ID NO: 18319 - DNA, 285 bp, Zea Mays
gaaacactttgcccaataatacccactactatcaactctacttatttttcgagtgtcccagaacactcaacaaatattttatcggtaaaagattctttgccgagtgttttttttcaaagaaaagcactcgataaattaagaatcgcaaaaaaccaaaaaaaaaaaaacaacaaactttgttttaattagcagtgccattgccctacctatcgtcctatcattttcaccgtttttaaattggattcacgtgttttgtgggcggtgagattcgaactcgcaacattt

SEQ ID NO: 18320 - DNA, 1933 bp, Zea Mays
aatctttttctcagcataagattttagtcttacgaagcagtatatttcagacaagtgaaatgctgtaagagggcctcaagtcaacagtataaaaatgcaaaatgtagatgtgttatgtttaaagtttaaacagtggattagtcattggacctcttgagccaaaatggacgagtatgagtttgagaaatatgataatttcagacaagtgaaatgccgtaagagagcctcaagtcgacagtataaaattgcaaaatgtatgtgttatgtttaaacagtggattagtcattggacctcttgagccaaaatggatgagtatgagtttgagaaatatgataattccctcaaaatttactacctaaatattaagacgagtgcactggtactttactacagtctagcatctttaacaggaagacatatattctaaaacagaaattcaaccatgcatccttatcacagagataggcacaagcaaaatcactggaaccctcctagggaaagcctgtaaaggcggtcaaagatgttagatgtattagacaccaggttttatatgaagctttccatatgttccacattggtattggttctacaccactatacactggaaatatataatcttagccttgaaacatttaaatataaattaagagtaagtacaagttgcccccaattaatctgtcgctgaatttgaaagttgccatctggaatcaccgcaaccgctgtgttttcaacggtgcccagccttgtactaacttggtaatcaattgggtcaaggagtctcatctttggtgtagggctggagcccgtggattatctaacatcctagcgctccagcacaccaatcggtgacttctggtttggggtcttcaaggtcacaggtctagctgcctatttttgtaaatctgtatctattatagagtgtgtgggtttttcgtggagttgtatgaggttctctttttacctcatcttttcttcttaatataatgatatgcagctctcctgcgtttttcaaaaaaaaaagacaccatcgaactcaaaccagacagcataccccctccccagctttaaaaaccagacaaatttccaccttaaaatagttcatcatagtggtttcaactgtggttttggctgatgtgatttgtgggatccacatgtcattggttttttagccatgtcgtgttttattgaatatttgggctcctaaatgatcttaaattaaaaataaagtagaaagttttagatctcatcgaacactacaaatttagcatacagcatgtactgatccaaagttaatagaaaaaatcaaaatcttgaatttataatcatagaacttgaatcaaacatttgggcttacaaacaatatcaaacaaaaaacattgtcaactacaaatttataggtcacattcagatctacaactttggtatatagcatgtcaatgtctgaggtcgtctaaaaaataaaaaaaatggatttcagaatctaagaaattaaaatgaatatttgggcctctaaacaatccgagataaaaatgttgtcaagtacaaatttgtatatcacaatgaggaatacaacttcggtatagactatagaccatgtcaacattcgaggtcgtttgaaaaaaataaataaaatggatttcagaatctgataacctaaaacaaatagttggaactttaaacgtcaatgtctgaggacatctaaaaaatggatttcagaatctgagaaattaaaacgaatatttgggcctctaaacaatctgagataaaaatgatgttaattactaatttgtagatcacaatgaggaatacaactttggtatagactatgtcaacattcgaggtcgtttgaaaaaaaatggatttcagaatctgataacctaaaacaaatagttgggactttaacgatctcagataaacaaattgtcaagtaca

SEQ ID NO: 18321 - DNA, 221 bp, Zea Mays
cagctgtgctcacggttacgagcggccttgaccctcacacgataattgaacttgaagatgaaaataaatcgtgttcaattgcactcaagtggttgagattcatgttgatgatattttggttcaagtggttctaagctttatgctgatgaatattgcttatgcttaatatgggtttggtatatacttatacatagaaatcaggtgttgataataaaatgttg

SEQ ID NO: 18322 - DNA, 202 bp, Zea Mays
gtggccctgacgggtgggtcccaccggtcatagagagaggagggggttggggcgcggttgggccacctggtaaccctagtgggcctcggctgggccgaattcggcctggtcgagtgattaggttttttttctttttttttattttctatttaaaaaaataaataaatatatttttaaaataattcaaaaatcataataatta

SEQ ID NO: 18323 - DNA, 208 bp, Zea Mays
cttaaactgtgtaaaaataatttaaaatcacaaggaaggggttgcatgcaccggggcttgcctggaataaacactacgttaagtttgttagacgacgaccacttggcgatcagcctttattccgatacttgcttcgttcatccatcttcgggttaattcatcaacattatcttgcggagaagctcatgctttccagcatcttgtggtc

SEQ ID NO: 18324 - DNA, 1201 bp, Zea Mays
ccgacttcttcacaaaagcgcaaaccagagcacaacatcaatttcacttgatcaaactcaatgcttcggatcctccacttccaccttgagttttagggggtgttaaggcccacacgacccactattatttgctatatctattacacagttctatgaaccacgaatcatccatcaatcctaaggttagtaacaattgtcatttgttagttagtcctgtataacaagtatggcaacaacaaattcaactccaagtcactacaagacatactaccaaaagcagggcagcatcacaagaaatatcttaggtggcattgctacaaggctcaccattaattaggctagaatttgttgggcggttgggccaaagactatgaatggcacttttatgtgcttgtttgttggaaattaggggcgtgtttggatggcgcctaggtgttagagtatatcaggcatgttagagtatattaggcaactcctgatatggttggtttaggattgattgtaatcccggccttttgggtggctcattgcctttggatcttcaaatctgtggtgaaatagcattttttaagcatatatgtgctcaaacaagtcaaaaacacatgtgcacaaaatgttgagtctaatgtcttaattaacatcatcaacgtgaaaggtaacagagtgctcaaagcctcaaactgggtagttcttggatctttcagtggttttttaagttagcttgaactttcgatgtgcacaaacaagtcaaaaacacttgtgcacagaatactgagtctaatgtcttaattgacgtcatcaacatgaaaggaactagatagttcttggacttttcagtggttttttaagttggctcgaactttcgatggtattttacgattttggtggtctttccgtgctaagtacataacttctgcaatctcgaccagcaagtggatagagaagatggagaataaaggaataagccgtaaccatttcggaacccaacaaattcaatacttcaatctttataaagtatgtatatcccaaaataatgcaattcaactgaaattcctcatgatgagattttgtaaaccataaatcatggagaagttttgaagggaccaacataatgaacctgagactaactcaataagtacagaatcataccgcacagataagaaacaccagtaagaaggtaaacaaccgttctatgatgtac

SEQ ID NO: 18325 - DNA, 3171 bp, Zea Mays
tcccgctcccactcgccgagctccttgcgcacaaaagctagccagaggtagaagatgaacattttgtgttttagtccctggctttgtgtagatcttgttcaggtatttttcagttcagaaaccattaaaaagagatccatgtttctttcttgctactccctgatgtatacgtttaattgtgaaccagcacctgcagcaatatttcgatatgggcattttatatttcgaatataaataagttatgttatgatttattaacttcgtaatctagtactagaaacatttgcaattaacttctcgttttaacgcatgaaataatattatgttagtagttgttaagtgtagtgttgtagataagaaattgaaaggggcactaggccacatcttcttcgtcaggttaaggtttagatttttgctagtcatgatacatgtgttcatacgcatattgcttattcactacgaagtagtagaatctctatttatgtcgaaataatatagccatgattatgtttactatagtccaagttagtagtttacattagttttaaaatagtaaggttatgtgatttataaataacattgtaacgatacgtataatttccatttaagatttaaagaataaaactaaaactttgactcgtgttttatgataggaacaattagtaagtaattaaactagtactgtagaatttggttttagtgttgtatctatgttattttaaatgaatttttatatagcatgtgtttccataatttatttgccatatagttttcactagtgaattctcgaaacaaaattagtatattatgtcatagcaaatgagatgaacgtcgatgtgagtagacttgtattatagttacaaatcaggtcctatttcagacgattttcctttataagtatgatttgtattgtgtatgtttattttgtaatgtgtatgtttatgtaatagtgtatgtttatttattggtgtatgttttcttttgtatgtacgatatgtgaatctatattagaagcgggctatgtggtagaagaatcgaatatgttcgaagatgacccgcaagacacgtttgaacaaggcaagtggattctccctctgcatttctgtttgtacccaagtaatgcatataataatgtttacttttcagatatttgcataatttgatgggatttacctaaataggatttcctagaattaccaaccctattccttgattaccctggaataaatactatgcttagcaatttgtgctaccgttcaacttgataaatatgatgtcactctttaatgattctattgttccggaaatgaagtttatattatgatgttaacccgatggttaaacaagatcatttcgtattaaatggaacgtggagtgaccacccaggataacagtgcaaccacgagtgctataatggctctggctttggtaattaactctatagacttagtgcttagcaaccctacctgaaagatggcagtggtttggtgacagctcatgttaacatggggtggtagccttggctaagttacctcgcccagagggccattaattctgacgtggaaaccttagcgggtggctttgtactaaggatattttgtgaaagcctcataatgaatccctatccattcacctcggcagtgtttacgggtccgtacaacccaggctagatgggatacatggcttgtgggtaaagttgtaccactcctgcagagtgtaaaactgatatgtcagtcgtgctcatggttaagagcaaccaggaccctcacatgataagtaaactcaaagatggagaataaatcgtgatccgatgatttataaatggttttcttaagtggtttctttttttctcgaacgcgcaagagaactacgccccattatatattaagcagaaaaaaaaaagaaaaaaacattgatataatcatatgcttattattaattgggatattttgggatacacttacaattagtaagttaggcgttgttaataaaatattcaccaactaaaatgcttaccgcttaaccatagcctaccttgttaaccttgcataactcctcccacttgctaagcccccaccataagtgagctcacccattgctaatattttgatcagaagctgatgaggaagattttgacgaggatatggagttatggacaaatactgagtctagcgacgcgccggcccctaatatttctattgtactttgatgatgaaagtatttaatacatttatgtctggatgatgtaataaagttattatactctctttacgcatttttttctcgaaagcgcaggataattgcgcatcattatattaagtagaaggaaaaaaggtccaaaatagaccgcagtacaaaaaaactcccctaaggaggtttaaaacaaaggaaaagaaaacaatccataataaacaaatacaaccctgcaactaggtgcccctgatggttgcggcaagaaaggagagacccttagctcctgtcatttcccacaactgttgttcctcccttgactgacaaagagttgcggaaacactaggggaaattccatcaaagacaattcgattccgatgattctagagaatccaggctctcaaggcaataagagagttgacacccctcatagccatatctccagaaccattgtcaatcatctcccaccatcccataaaagacgcagtactagggataggagccagagtttgtagtctgaaatggcgcatcagcaggaaccaaaattccctcgcaaaaacacaagaaaccaaaatgtgatccaaagtttcagactcctggtcacaaagcggacacctctccagatggttgagtcctctctttgccaacctatctgttgtccagcacctatttagcaccgtcagccaaaggaagaagtggcatttagaggcggcccaagttttccaaactctttcatagtgaccgaaatgaacagaccttgtgaacagcccatcatatgcagccttagcagaataagcccatggtaattaaaacgtcgcttaaacgacgccggtaaaacgttattagaaactaaaacgcccgaacgttccaaaaaatcagcgtagaacgtctgttttggacgtttaatcgtcatttaaacgtccaaaacacgttttatgtcgttttagatgttctgaggacgttctagttactagtgtgcct

SEQ ID NO: 18326 - DNA, 1386 bp, Zea Mays
cttaattcttataacattaatattctaagaattgattgtaaattactaaatgggacttttaataacctattcatggttattatgacatgaataaatagcttactaattttaaataattaagagatatacttattaatacatttatcgtaaatagtaaaatatatattttcatttgaccgaaaatacgtggcttagcatgtcttctattatcttcatgcaaataagtttacacttaaaatactactaacaattattattctacacactaaagcgaaatcaaatttgtaaacgttttctagtatgaaatcacggaagtagtgaatagtgactatactcatttttaaaattataaaattatacgcatattcaaagtattgttgcggggttcgattttggctacacgtatacatcgcatctctaaaatcaaacacgtgaatcgcatcgataataccacgataaatcataagatccataaagtaatttaaaacaagatttagaaaatacatcaacaatttggggttgccttcaaccttgagtttgctcatgtgcaggaggaagggcagggtggtctcggcagaggtgctgcgtggacggcgaggtacgctccggcgaggctccacgggtggtccgagcactgcagggcagtggatggtccagcgtcggcgaaggcgcggacgacggaacgtgctctactgcgagaaggaggaaggggcgaggtggctggggttgagtgcggatgacggggcacgagctccgacgagctacgtacgacggccgacgaacacgtccgggcgaggtagcgatggagaaaagcttggacaggggagggagaagacagaggagctcggcggattttatagagagagggagagagatgtagggtcggccggggtgcttcatggccaataatggcgtcgacatcaatggagagaggagtaatggcgccaataactcggagaaacgctcggttgacgctccattacacaggtgaggaacggacgcgcggcacttggggtcgcttggtcttctgttgttgctcgatggctcggcttcatggcagcgaggcacatgggcgcggggtcgggtgcacggcgtcgcactggttccttgcggcgcggtcagcgcggtcgaggttggccggctggcgcgtcgggggaagctgcaggggcgccgcggcggctcgaggtcctgggcgcagggtgtcgcgcccggctgctcggcgcggtcggggctggggcgctcggccggtgccctggcagcgcacctgggagagagaaacgagggggaggagagagaggagagagaggcggcggctggctgggagagggcgtgcgcggcaagctcaccagccagggagcggcggctgtgagaggagcaggggcggcg

SEQ ID NO: 18327 - DNA, 345 bp, Zea Mays
ggtaaaaccctaacctctgataccatgtaggaaattgcattgcttgatgtattgataggagatggggtacaatatatagactcacaaccctaaccctaatgggtcggcagcccaacagtggtgccggctcactcacacacacagtctaacaccttcgatagcttatgtgctaatttatcgcagttacaggtctgaattcagatcataggttctatttctgtccatgagttatactcttcatattaaagaatttttaattttgaatgataagcaaatggaagcttcaagccttcaatacttgtaatacgaaggactattggattatggacatgtactcttaagtca

SEQ ID NO: 18328 - DNA, 519 bp, Zea Mays
gtcgcctcgggcaccctggacctgacgtcatgtcccagctttccggccactccgacatatcatatactcggggctcttctgagcacctctgtcatgcttgttagctcggccgtcactcccgtcttccttttaatacttccacgtccagggctgttcaggcctttgatcttgtccactgtgatctctgggcatctcctgtccttagcctctccggctacaaatactacttggtcattctggatgactactcccatttcctttggactttcccccttcggctgaagtccgacacgtttaccaccctcactcactttttcgcctgggtatccacccagttttggcgcccggtccgtgccctgcagtgcgacaatggccgcgagttcgacaacaacgcctcccgctctttcttcctcactcatggcgtccagttgcgtctctcgtgtccctacacctctgctcagaacggccgggccgagcgcatgattcgcaccaccaccaacatgatccgctgccttctct

SEQ ID NO: 18329 - DNA, 491 bp, Zea Mays
cctgggttggcgacggtgatggcgacctcccttctgagcggaagccggcgtgtgtatctagacttcgccgccatctcaaggagcttgcgacgtagaggcaaaccacagaaccggagatatgcggtgcgaagtgcgaacagcaagttcgtagtgtagcgcggccagcaccgtcggggcttctgcggcgtaccaaagctacatcgagcgattgctccagctctggcaactctgccctgcttggcgttgcaacacccgagacccccagcctatggggccattgccagatcgatccccgaacctcgcacgcaagtttagacagccgtcgcagacggcggatctcgtgctcccctgcccgattctctctctccggtgagggctaagcaatggtgcagtgcaacgttgtcgacggcagcaacatatatatatatctctctctcttagttcaggggttacgactagaaatcctggtgcagcacaggctttcagaggag

SEQ ID NO: 18330 - DNA, 304 bp, Zea Mays
ccgggatcgaacaagtatttttcttcttttttttgtcttgttttttttattttcttttccatatttccttttctctattcctttttcagatttgcaaattttcaaattcagtcttgagttgggtttccaaattcaaattaaatgcacaattcaaaatctagcatgatatgcaatatattttattttgtttagttatttataataggtgtttctcaacatatagtttatggagatgcaattcattcatcaaataaaattctttatttatttatcctagaattcagattcaaaagttcaattatcc

SEQ ID NO: 18331 - DNA, 1312 bp, Zea Mays
caaatgggctaggttgggcttggcccaaaacacgaaatcgggctgcgctaaatattttccggaataaaaatgctcctgcggaattcgtctccacggagaacagagcgaaatagagtttcgacgaatgaacgattgagcgattaattcggccgagagttggatttgatttcgctcggaaataattcatcgcgcactattttagaaataaatgtttctctcagatttctgatcggctttgaattttagtcggagaaagcgaatcgtgacattttaaaatcgctgtcggagggagttttgaattcggttttgatacaaagatactgggctgagtcgagtaagaattaattagagggcgacatactgagtattccgtttaagagtacggactcggataaaatagtcggacatcgatcgaagttcgaggaatttagatgcgggctcagattagataacagtcgtcgagagtttgattaaatgagcttcagatgagatttataattcgagaatgattttcgagtttgcattcgtgctgagaataaaagtttttaacaggctccaaaatcggttgtttctcgcgatcgattaactctgaattcggtgaacttccaagagaaagcctgataaacagagaaaggcacgatcgagaaatagaaatttttactgagcatccgagattaggattaatctcccgacatgacgcgaaatagacacctggggtgtcacagccttccccccttaaaaagaatctcgtcccgagattcagatgagggtcttcaagggtggagaagcatgtaacatccaggctaaaggtagatgcaaattcgtgagagggtatctgacaagatactgaagatagatttggatagaatatcgcggcatgttgagacaaaatgcagcgatcactttgagagaatgttaacaaaagatagcacatcagtatagtctcgtaatggatcacgactattaaccatgataccagcgcgtgccgagcagctcaaccatgtgtgcaccatagtaggctctcggtctcgtcgcagcaccatcagtcgttagtcatgacaccattaccaaacgtaaccaataagaaattcacatagcatagatagatggagcccatgagagtatggctcagaaaatgtgactaaagttgaagcaaagattattggcaaaagagcatcagatgagaatttttttttatttaactcagagaactatgttatgatcaacatggagattatcagatcagatattagcacgagatttgatatgaggatgaaccgaccatgagatcaaaatagattgttgagctttt

SEQ ID NO: 18332 - DNA, 960 bp, Zea Mays
atagggtttgcgcaactagacaccaacaacaattttttagacacaacaagtgcacaaggggacttgggtttggtctagcgatcaagctatggaggtctacaagccgtgcaggtgcaacttcaagggggaaacacacaagggttagaaaacaccaacacaagcatgttttacaagggtttcacttgctaaactcaaggttgtttggagggggaaatcttttcacgagaagaacagacaaccttttttttttgtaaaaagggttgaacatttagaataccacctagatagcaaggcaagagaaacacataacacaacctagcaagacttactaattaggcgagagataaggcatttcttatatttcataacacagcaatacaacacattattcacgagtttttattattggaataaaggtgagagaagcatattggtgcacaagagacatttataatgcgacaatcatgatgcatgcttattctagtcgtcttctcagacctaactaatttttcggatgcttctacaacatccttattaatagtagtagtagcctttatggcctaaataactagccacctagctacccatctattcctagggcttcacgtcctaggtctatccttatcgtcctgacgatctatccaactttggtttctaagcaagttttactttagaaaaggttggaatcatgacttattgacttctctgtactggtattcgctccgataccagctgtggcggaaccgcccgaattattccaacttaagtgactaagtcccgccttagaggctagaccacacttaaataggaataacccgtcagtccctcggatctagtccgataaagccacttaaccaggatcgaataccactagctcacacgaaggtgaggcacagagaaatacaataaaacataataccacaaatttaataagtgtcattagtgattacattatccgag

SEQ ID NO: 18333 - DNA, 437 bp, Zea Mays
agactaacggctctcaagtagagcaagttgatcttaatgagataggtgatgaagaggctctgtgcatcgcgctaaggaacatgtccattggggatgtgtgtcctaaggaatccgaagagcctccaaatgcacaagatcaaccatcctcctccacgcaagtatctccaccaactcaaaatgaggacgaggctaaagatgatgaagaagaagatcaaagagatgagccacctcaagatgacgacaatgatcaagggggagatgcaaatgatcaagacaaggaggatgaagaaccaaggccaccacacccaagagtccaccaagcaatccaacgagatcaccccgtcgacaccatcctcggcgacattcataaaggggtaaccactagatctcgtgttgcatatttttgtgagcattactcctttgtttcctctattgag

SEQ ID NO: 18334 - DNA, 2862 bp, Zea Mays
aaagaatttacaaaaagaatttgcaaaaacaaaacatgtggtgcaagtgtggtccaaaatgttaaaattaaagaaacaatccatgcgtatcttataagtatttatattggctcaattctaagtaacctttgcacttacattatgcaaactagttcaattatgcacttctatacttgctttggtttgtgttggcatcaatcaccaaaaagggggagattgaaagggaattaggattacacctatttcctaagtaattttggtggttgaattgcccaacacaaataattggactaactagtttgctctagtctataagttctacaggtgccaaaggttcacaacaagccaataaaaagaccaagaaaagggttcaaacaaagagagcaagggacaaccgaagtgtgccctggactggcgcaccggactgtccggtgttccaccggacagtgtccggtgcaccaagggacttcaagctaaattcaacaccttcgggaattctcagaggcgctccgctataattcaccggactgtccggtgcaacaccggactgtccggtgcaacaccggacagtgtctggtgccccaagggagagcgactctgaactcgccagcttcgggaatccgctccgctataattcaccggactgtccggtgagccagcggagcaacggctacttcgcgcgcaacggtcgactgcaacgcattaaatgtgcgcctgcgcgcgcaggcacaccggacagtctacaggacttgtccggtgcaccaccggacagccaggcgggcccacaagacagagctccaacggtcggaacccaacggccaggtgacgtggctggcgcatcagacactgtccggtggcgcaccggactgtccggtgcgccatgcgacagcagcctccaccaaacggctagtttggtggttggggttataaatacccccaaccaccccacattcaagtcatccaagttttccatcttccaactacttacaagagctatagcattcaattatagacacacccaagtgatcaaatcctctcccaattccacacaaagctttagtgttaagtgagagagatttgttgtgttcttttgagctcttgcgcttggattgcttctttctctcattctttcttgcgatcaactcaattgtaaccgaggcaagagataccaattgtgtggtggtccttgcggggaagtttgattcccgtttgattgagaagagaagctcactcggtccgagggaccgtttgagagagggaaagggttgaaagagacccggtctttgtgaccacctcaacgaggagtaggtttgcgagaaccgaacctcggtaaaacaaatccgtgtgtcatactctttattcgcttgcgatttgttttgcaccctctctctcggactcggttatatttctaacgctaacccggcttgtagttgtgattaagtttgtaaatttcagattcgccctattcaccccccctctaggcgactttcatgggcagtggttcaagtgatgatgatgaggtggacatgtcaatggttgttgcacttgatcgagttaagactttgagaaactttggaccagttatatttggacttggtatgttttacaccgaaacttacttgaacaaatctgtgagatcagaacctttgacgaccagatatgattggccgatgagaacaactagtgagcctacacaatgttatgacatgtttaggatgagtagacagttgtttgaaagtttgcatgatttgttagtatcgtcatatgggttgacatcaagtaaaaatgacatctattgaagctttggtaatgtttctatggattgtttgtgctcctcaatctttggttcatttgaagatttggtttggaaggtctaaagaacccattagtagaaaaataagtgaagtgttggaatgtgtatatcgtatgtctaaggatcttgtgaagcctaatgatcctgatttcctgacatctcatccaaagttgctaggcgatcggtttgcatcacattttaacaattgtatatgtgcaatagatggtacccacattccagtagttgtaccatcatcaaaagttgtccaacacgtgggtcgacacgattagttatttgtgatttcgatataagattcactttcgttgttgcggggtggcccagatcggtgcatgatatgagagtatttaatgatgctttgcacaagcatggcattcctcatcctacacgaggtatgattatttatacacatgttttattttgaatttaaaactatgtttttttaattttatgttgcaaataaattgtatgaaattttacctcgttgactctggatatccaaaccagaaagggttatctagctccatataaaggtgtgagataccatttgacaaagtttagagcggaaccacaggcaagtggaagaaaagaggtattcaaccagttacactcctctcttcataatcatatcgagcattccttcggtgttttgaagatgaaatgaataattttactagatttattgagctatccaatgctgaagcagtcaaaaataatacatgcatgtatggctctacataatttcattcgaggcagcaaactggccgctgaagagtttgagcggtgcaatcgagatgagaactatatgtcaattcctccaacacaacatgatagtacaagtcaattgggagatgatgagggagaggtctacatgaataatattcgagatcaaattgcaaatgcattatttgctatgagaatgtaattttatttatagatactttcttgtgcataaataagatgtacgaactggcagaattctattttcgtatattcaaaatatttgcatgaatcgatagaatgacatacat

SEQ ID NO: 18335 - DNA, 555 bp, Zea Mays
gtccgtggacaagatgctcaacatagcccaatgtaatgatagagaaaagtgctatatgcatcgggtcgcctcactggccccgctgtggattggtgggatgcatactgcgctgctcacgctgctgctgccaacaccattacctgggcaaatttctccactcacttgaggcattaccatattcctgttggtctaatgaaaatcaagaagaaggagtttctatccctcaaacagggaggcatgtctgtaagcgaatacagagaaaattcatccagctatctcgatatgctcctggggaggtcgatgatgatgaaaaaaagtaggagctatttctagaaggtttgatcgggccactacaataccagttgatatcacacacattcccgtccttccagagactactagacaaagctattgctctggaaaacaagagggttgagcttggagaaaagaggaaagctactaaacaggaacaagttagaagtagttctcatccccgttatactgcattcaaggcacaccagctcgtggcagttccgggcaacagactcaagagac

SEQ ID NO: 18336 - DNA, 488 bp, Zea Mays
gaaacactcatctctggagctgactggaatcttcttgccaaaacgactcaaaaactctagagtagagctgctcattcctggagttttagaggaaagttgattcagggtagaatggagctatatcaaacacgctataaaaagctcctcttaatttagtaccgagcgttgtaaccggaattaaagattgctgcctttaattattagttttagttgtccagcaccagctgagaattcgatattgtagcaggcttgttacagcggtagtgatcatccattctccagtaacggatcattggacacgatggttggtgggttttctttcttgaaacaatgagataagcttctaggtcgactcgtgtaaaaaaaaaaaaaaaatgaaacgcgtccagctgaatggagccaagctgatattattacgagtcctgctctggtaaaccactaccccattctaaaatgcatggaccagtagagaaccaacgtgctcgtcg

SEQ ID NO: 18337 - DNA, 157 bp, Zea Mays
agagctgctgcatgttggagctcaggctgtgttgtaactaacggtgcatctgctattccactgtgggagagagactgttgaacgtgcggccaagtccacagaagagataaggatggagaacacctgaattttttatctaaggagcagtggtaggacg

SEQ ID NO: 18338 - DNA, 358 bp, Zea Mays
aaaaataataaaattagtaaaatatggtaataataattttttaagtgtttaattatttatttgcattttgatcattttctttgtatgcgattgattgtttatcggatgtttattatcaactctttttaaagaaaatcctagcaaataatataataatataataattattggtctaaaaataaatattgtatttataaataattttggtgaatttctcggaattttcgagctctttaaaaatacatttcacaatttaaaaagaaaaaagaaaaaaaaaaaaatcctacactaaatcggcccactaggggcccattaccccaaaaccctagactacgcgcgcgcgcctccctgatttcac

SEQ ID NO: 18339 - DNA, 433 bp, Zea Mays
gttgcctttgcactttaaattatgagacaagtttgaataagaatttggaaatagaattaagaagagaaaagataaaggatataaaaatataaataatatatctaaaatatctccaagttagtacttttaactgcacaaatataatttgtaattattgagccacaaggttaaatttaaacttgaattcaaatcgaaaaatggaaaaaggaaagaatattatgtgcaacatgattctcttaaattgaggaggatttaccacagagcaaaattgaattttgaactttgaatttcaaactcaaagaaaaaaagaaaaacagaaaatataacataaaagaaaaaaaagaaaagaaccccagctgggctccctctcacgctttcggcccaacttcatacagcacacgcgtggcccatctacccttctcacgcgcgcagt

SEQ ID NO: 18340 - DNA, 3147 bp, Zea Mays
atacttgctaaaaactaaagatgaggctttagactactttaaaatctataaggctgaagatgaaaatcaactagagagaaagatcaaacgtcttagatcagatcgtggtggcaaattctttcccaaaggctttgatgatttctgtgcagaacatgacattattcatgagaggacgcctccctattcacccgaataaaacgggattgctgaaagaaaaaaccgtacgttgactgacctggtgaatgccatgttagacacttgtggtttatctaagcatggtgggggaggcagtcctgactttttgtcatgttttgaatagaattcctatgggcaaagaagataaaaccccttatgagaagtgggttgggagaaaaccatcactttcatacttgcgcacgtgggggtgcatggcgaaagttaatataccaattaataaaaagtgcaatcttggaccaaggacagtggattgtgtctttcttggatatgcttcgtgtagcatagcatatagacttttagtagttaaatcttaaattcctgatgtgtatgttgatacttattatggaataacgtgatgctactttctttgaacacatatttccaatgaaagacattcatagcaattctagatactcttctgagataactcctgaacataatacacctgttgagagttctgaacagccacatgaaattgtcctagaagaggatgacaatgatgctcctaaaaggaacaagagacaaagggttgaaaaatcctttggtgatgatttcattgtgtaccttgtggacgatactcctactaccattgcagaagcatttgcatctctagatatagatgattggaaagaagcagttcataatgagatggactccattctttcaaatggtacgtgggaagtcactgatcgaccctatggatgtaaacatgtgggttgtaagtgggtgtttaaaaagaagctcaagcctgatggtacaattgagaagtacaaggctaggcttgtggttaaaggctatactcagaaagaaggagaagacttctttgatacttactcacttgttgctagaatgactactattcgagtactactttcctttgctgcctcgtatggtcttcttgtccatcagatggatgtaaagacaacttttcttaatggagagctgtacgaggaaatctatatggaatagcttgatggatttgtagtaaagggtcaagaaagcaaggtgtgcaagttattgaaatctttgtatggtctgaagcaagcaccaaagcaatggcatgagaagtttgacacgattctaacgtctacaggctttgccattaatgaggcagacaggtgtgtatattatcgctgtggtgggggtgaaggtattatattgtgcttatatgttgatgatatattgatatttgggcacaaacattgatgtgatcaatgaagtcaagtattttctatcaaagagttttgatatgaaagatctgggggaagctgatgtgattctaaacatcaagctgattaaggcagatggtgggattactctctcgcaatctcactatgttgaaaaggttttgaagcgatttggcttctctgattgcaaaccttctccaacaccttatgatcccagtgtgacactgcgaaagaacaagagaattggtttagaccaatggagatattctcagatcattggttcactcatgtatcttgctggtgcaacaaggtccgatatttcgtttgctgtgagcaaattgagtaggttcatgtcaaaccctaggactgatcattggcatgcacttgaccgggttatgcactacttgcaaggtacaatgagctatggaattcactattctggtcagcatgcagtacttgaaggatatagtgattcgaactagatatctgatgcagatgagctttatgctaccagtggttatgtctttactattggtggaggtgcggtatcatggaggtcatgcaagcagaccatcttgacgaggtcaaccatggaagccgagctagctacacttgacacagcaaccgttgaggcagaatggttgcgtgaactcttgatggactttccggtggttgagaaaccaataccagctatccttatgaactgtgacaatcagacagtgattgctaaagtgatgagttctaatgataatgggaagtcatcaagacatgtcaaaagacgattgaagtctgtcagaaagttgagaaactccggagatataagtgtgacttatttttcaacaaataaaaatttggtagatccttttacaaagggactaccacgtaatgtggtagaaatcgcatcgagaaagatgggtatgagacccgtataagttgccatggtggaaacccagtctatgtgatcggagatcccgtgaattaggtcctaggaagaacaagtcattggtgaactgaggagagtaacctttgaccctctttaagtaaagatgcaatactctcaaatattgtaaggcaagttggctttgtgccttaatgtgttttgttggcttttattagcgaagatgttgtcctgcagaacattcttgaaagaacacacctatatgagttagactgtctaacgtcgcagtctatgagatctgggtgatctctagtaaactcatgaagagaccttggagtacgacatatatgctccacccgagaaggggactactggtagccaggtactggttatggctttaagtgaaacccatccacacaaaacttgcaattcaaggcatagtccattgtccaagttgtgggttggtgtagcttagagttctagtcggaagttcaacttaacagtctctgctgaaacactagtatattaaacagtagtgaacagtagcaaaactgcagatgggcatttgagatctggtgggggattgttggatttatgggctaggccccaattaagaaattcaattaaatcctagaaaaatctcaaaagcccatgtatgggtatggctagggaatagtggaactattagtaatatattgctagtccaagtggagtgaaactaatttaaatatagagactatacccactcaccaagtcatggatgagaggagatagtgtggagaaccacacgcgtgcgcgcgctcgattgcctgggcggggcgcgggcgcacgacatgcgcgtgaatg

SEQ ID NO: 18341 - DNA, 838 bp, Zea Mays
atcatagttctcttcatcccgaccgccaacgtgtatctgcgatcgggagagtaggtctccggaacccttcgccttcgagatcctgcaccgggagagggcgaataaggtttttgggaagcgtcctcacgcgactacttgcgatcttgtcgtcgaaccctgctgtttcgacgtcatcgaccccgctgcttagacgtcgtcgatcctgctgattctgacccgcgtcatctatcagtatatctgatcagtacgcatcatctgatttgactttatacttcagttcttctgatttggtcatgatttatattcggaatttaatctggaaaatatctaatatttcaacataacacgtgttggaaaacacttctaaaatgtttcactaattagtctagtcaattcatctcacataataaacctagcacataattcagaacgaaaatgctttagtccatctttcagaatgaacatgcgtcgtatcatggactacccattatttttatgtaggaatgaatatacattcgtgaggttataaatgcatattattgctttctaactttatgcatattattgcctccatccccacatttgaaggtagcaacaacattattgctttctaactgtactgtgcagcttgcgcccacaagagatcgcgcgaaatcgagcggcgggatctaggtgcaacaaatgcgagcgggaggagaggaggtggcgcgaaccttgcggacatagtcgcacactcgtactcactctccttctcagagtcagagtcctcgaaggtggtgacgcggtcgccgtatgccatgacgcgaggtggcgacgggggaggggaggcgctgcggct

SEQ ID NO: 18342 - DNA, 702 bp, Zea Mays
catgctcgtcttgcttgttgcggaatacccacttggttcctacaacattttgattaggacgtggaactaaatgtcataccttgttcctagtgaagttgttgagttcctcttgcatcgccaccacccaatccgaatcttgtagtgcttcctctaccctgtgtggctcaatagaggaaacaaaagagtaatgctcacaaaaatgtgcaacacgagatctagtggttacctccttatgaatgtcgccgaggatggtgtcgacggggtgatctcgttggattgcttggtggactcttgggtgtggcggccttggatctttatcctccttgtcttgatcatttacatctcccccttgatcattgtcgtcatcttgaggtggctcattttcttgaccttcttcttcatcatcttgagcctcatcctcattttgagttggtggagatgcttgcgtggaggaggatggttgatcttgtgcatttggaggctcttcggattccttaggacacacatccccaatggacatgttcctaagcgcgatgcacggagcctcttcaccacctatctcatcaagatcaacttgctctacttgagagccgttagtctcatcaaacacaatgtcacaagaaacttcaactagtcctaaggacttgttaaagactctatatgcccttgtgtttgaatcatatcctagtaaaaagccttcta

SEQ ID NO: 18343 - DNA, 857 bp, Zea Mays
atttgttttacggccgtaaggtgagctaccttagggtcggcttggaatcttgcacatttgatttaattggttattcggatgccgattgggcggggtgtaagattaatagaaagagcacatcggggacttgccagttcttgggaagatccttggtgtcttgggcttcaaagaagcaaaattccatcgctctttctaccgctgaagcggagtacattgccgcaggccattgttgcgcgcaactactttggatgaggcaaacccttagggactatggttacaaattaaccaaagttcctcttctatgtgataatgagagtgcaatccgcatggcggataatcccgttaaacatagccgcactaaacacatagccatccggtatcattttctaagggatcaccaacaaaagggagatatcgagattgcatatattaacactaaagatcaattagccgatatctttaccaagccactagatgaacacacttttaacaaacttaggcatgagctaaatattcttgattctaggaatttcttttgatgttttgcacacatagctcataggtatacctttgatcatgtctcttttatatatgatatgactaatatgtttttcaagtgaatttcaaaaccaaatcataggtgtattgaaagggaattggagtcttcggcgaagacaaaggcttccactccactcaataactcatccttcgccggcgctccgagcaaactctccgtatttggtataatcttcactcatatgtcttctaccaaagggggagaaagtagttaggaaagggcttttatttcactcaaagtatccgtttttggtgattcatgccaaagggggagaaagtat

SEQ ID NO: 18344 - DNA, 952 bp, Zea Mays
cagacccgtatttagttgacgcttgtaggaatacggggctacatgtagcgtggtatttgtgtccacgattgcgaagtcatcgtgctgcttagctaagtttaggttatgcaagaaggattaaatcggtgtttcgtatccgatgagtggtcgaattaataatatgaaagataggttaagtattttatctggctagctagtaagttctgatgatgttgccgtgccgatttagtttgcttaaataagttaatgctttgctagtagacattttaattagctggcgggtgatgcgaagtcgaccggtctggtagtttagaagattgacgtgctcctgttcttgttttgaaatttaaaagtcttagactaatgaatttagaattattaagtttttggtgtcgaactttaaaaggcaagtagagcgtgaatatatatattattgattggcgatgtcttgctataggtgtttaattcgtggacatgtagtaatatttagtctcgcactattcttatttatatgcattcatatgcataatgcatttcattcaggtacgttaattaatcgcgtgatgcggaagacgagccaagtcgaccccaagcgcgggctaatccgcaggatgaaactgatgaactaatctgaagatgaatggacaaaacaagtatcaaaacaaggatggtcgtcaagcggacgtcacctaacaacactaacctagtgttacccaggcaagccccggtgcatgcaacccctttccttgtgttttaaatacttttcgcacactttaagcctagtgaaatgtgcattaggttcataggagttgcttggaaccctttgatgcattgctttccttgatatccatacccttatagatacttctgtgaagtatcaaaattatgatttacaaaaatgcttagccttgcttagatcttgtggatagaggttgtcctcagtctaacccgg

SEQ ID NO: 18345 - DNA, 838 bp, Zea Mays
tttccttagtcgggtaagacttgctgagtaattccatactcagggttttattccctgttgtttttcaggttttagttttgtgctgctgatgatggtgttaagtgccggtgggctcggccttcttataagtctaagtaacctttctatacttcttattgaggatgatcccttgagctagcatatatatttcaaacttatacttttgtaatcactccgataaaataatataaaatttttgtaacttgtaaaatttggtaataagatttccgctgcaaaatattgatgtgtgtgatttgtgttacttaatcccgcggttctggttgtaagtggtttatccgatgtcctcggggcaatcggacagatcctgttaagttatctggtgcacatgcatagccgtctgaggtctttgggacaaggacaggtgcatgtgggcccaataacttgggaggttctgccacaactggttcttatttataagttgatttttgctaaagcctctccttgactcctatttatccagcatacccttgagagtcttttccttagtcgggtaagacttgctgagtattccatactcagggtttatccctttgttgtttttaggtgaggaagcgacaaacttttgttgcttctgctccaaggtggtaccaaacgaggaaaaagaagattgaagtgcgggaggactcggtcctccacttaggatcttttgtttattaaacttatcgggaggagtttgtgcctcccctggcttgtataatattactactctgcactcacttttagtctggtctgtaataacctaactcaagcttgcttttgaaataaatgtaagtttatg

SEQ ID NO: 18346 - DNA, 496 bp, Zea Mays
gaaaagagaaggctttaaaggggaggttcaaagtaagcatgaaggtaagggtacgaatatttcaagggttaaaggtgataactgacaagagtgtaagagaggaggtaaatgggcaaaagaacaaaggatttaagtaccatagacgatggagataagacggacctgcaaatggaaaaggagagggtacgtccaagggcagatgggtaaattgccactctcaaattgaggtggaagagaggagatttttaagtaggcataaaggtgagtatcaaggcaagatcgatagatgaccagggaatggtgatagcaaataaaaacacatcaaaggatggaattgggacataacctgtaaggcgacaaggagggaaaagaaattaagggagagataggtaactcacagcctcaaacttgcttgaaggaaaggggaggcttttaaagatgtgttcaaggtaagcatttaggtagaagacatcaatatcgcaaggttcaaaggcga

SEQ ID NO: 18347 - DNA, 571 bp, Zea Mays
attcgctggggccgggagcttagaggggagaatgggttgtgagccgttgattccgcatctagggcattggaggccccctcaccctctaaccctagccaccccctctcattttccccgttgcagccgaccccctctccctctctcacccttgaagccgacccctctccctctatcaccctttgcagccgccacgccctcatcctctccaagcagctgcaccctcctccacatgcaaaccctagccgccacctcccccattccacccctccaaggtgtagccactccctccctaggatcttctttgggtttgtgcaagtctccattggaagattggtgggaggaagaaggatggggtgaagaaggagttcaaggtgatcttgttttctattttgtaattgtgctggaatttcatttggctagctgttctcctaggcgaattcatgtagagcattatcatatctttccatagattacatatgcgtttaatttggtgtaatattataggagatatcacatttttaactcagctaggttgctgttcaaaaaacagaacgcagggtgtactttgtcg

SEQ ID NO: 18348 - DNA, 237 bp, Zea Mays
ctgcttaatattgacattaattaggaacttcgggtcaatgatgttggcctcttttaataagtgtgtgcaagtggtttaatctattctggtcattatggtggtcgttcctttgctagctgaattaataatgttttgtaggtttattcttatcatgcattatgtttatacactgtggtttcctcgtttatgcaactttcaagggagatgctgccgaatttttttatataacagtttgtg

SEQ ID NO: 18349 - DNA, 433 bp, Zea Mays
aaaagggtgtttctctttcccctcgacttgtgcttcttagctaggtccggctagagttttaccgtccctgtttctacgccgtagtagcttggtcacgcagttctttcagtctaaacccaccccttgtcgccgttgccttccaaatctagtgaccacgccggccgtcgctctacccgaggccaggatccttgatcgggaacggggaacttgccgccagaccacgtcgccgcagatcgacgtcatagacagcctcatctccagccgttcaaaccacgtgttcggtgttccccgagtgatttcgtgcacgcaacaggaatttggtgagtctctaatgctccccgtgtacttgggagaggatttactgcggagatgtctcgggatcgggttcgcagtctaggatatcgccggtaacgtggctggaactttgtaaaag

SEQ ID NO: 18350 - DNA, 1160 bp, Zea Mays
cccacctctccttgtgagagtttgcattccatatcattacataagcatacatgtatttgtaattgacttgtagaacacctagaagaagtggtatttgaaggagtctactccagtggctgctaatcaagtggaggagctatctaactgtgtattggatagagggatcgagagcctcttcacagcaacaaaggcaagccacgatgcatttgccccttccttgtatttttaaaagacttttatacactttaagtctagtgaaatgtgcattaagtttataggaattgattggaaactacttgatgcattgactaccttgatatccattcctttatagatacttctagtgaagtatcaaatatgatttacaaaaaatgcttagccctgcttaaatcttgtggatagaggttgtattttgcattaatgcctagctcaggggttatcttaaggaaggatggcttctacctgcaagaatattttcattgggagcatggtgggatcttactgcaaagttccctataatgctcttttcatccttagaggaacacaaaaaaatcctaagggtggaagtaattaactcgagacttgggctaggaacaggtgatgctccatccaggttaattaaggattggatgcgtatgtaggcctatatgatcaaggactatcttagctggccacatgccctggatatgggacagggtaagcttgaacccggccattccatacgtgaaaagacaaccgcgcactgggcgtgggagatggtgggagtagcgtgtaccctcctagctagaggctagacggaggagtactgtgctcccgggtagcacagaacgattcacgttgtggaggatctgtgggaatggttgacatatgcaagggttaagtgctacatatgtcgtgtggttagagatcctcagctgagtaaatcgattcggatcgtcgttatatccccggacagtggagacttgatctctgacctgcaacctaggtcaggatgtaaacattatgaataaaaataatgttgtattgatgagatggtgaaattagactggatgcaaccagagtctattaatatttaatatggccttaaaatattgaaagtaggactcactttagtaagttatttctgcaaaagtatctaagttgattattattaaagcctt

SEQ ID NO: 18351 - DNA, 601 bp, Zea Mays
aggggtttggaacttttaggaagcattcactagtaaaacagtagaattcttgttggactggtgccctgggatcgggaacggacgtgagagcgagtttgggccgtggatctcgatccggcggtggggagcccattagttcttcccccttaaccctagccgcccctcccctattcccctttggttgcagccgccccccccttccctattcccctttgtggccgccaccccccctctctctccctctctttctcccccaagtgattgcagcaccacccctcaaccctagccgccccccctcctcctctccatggtgcatcctccccgcttggtaccccgtcgtgtgggtgcgagtcttccattggagtttggagggaggaagaaggaagaatggaaggaggaaaggaggaacccaaggtgattttaagatcattctttttagtatttgtgctgcaatccaattgtttacatgtttacctatgcgaatcgatataggtgctgtccagatttttgtgggaggacgaacagcagtagttctagggatttctgggaatttttcgtgggcaattagtggggatcagtgggagaatcatgtagatctttg

SEQ ID NO: 18352 - DNA, 928 bp, Zea Mays
cgaggtgtggtaactaggtgtgttgtacgttgtatatgtgctgcatcttggtaataagaaggttgtggaatcaggtggtggtaaaacaatgttcttatgtggttgaatagtttgatattattttacttgctgagatgtgtcatctcactcttgcattactcaatgcaggtacttgatacatgttgggaatgaggggagtagcagcacgtccacttacactctcacaataacgctgcccaggcgcagccatgatttaattagaaacttattgtcaaaggaagtttgttttttttatatagtcgtgcgcactggttaattcagttcaggtcgtacgtttatcttcccttgctagtcgattaataatacttagtatgtttttgtcatgatatatgtttataccctgttgccccccccttatttatgcaatcttgcaaaggggatgctgccgaaattttatatatggacgtcagaagtgtagttcagtagcattctgggttgtttgtggaacctggggtgttacactgcgtctcatgcctataaatagatgaacagtactctcgtactgttcacgctaacttggcatttgcttttgcatcacgctcgtacctttgttttctgtcaagccaaaggtatcaaatgtaattcaatattgtccttatattaatttacgattatatactaagatatatatatatgataatgttattgttcacattgtttcttatgctttacatgcttcattcgttgttaatatttatattcatatatacgttgaaatgatgaaggtaagtgcttcatgaccttcgtccggagatcattatatccttggggaaataatgcttcgaaggacgaagggcattaacaagtaacctgttttggtgttgtcttgttctcaatttatagcatttgagagcaagtccccaacacc

SEQ ID NO: 18353 - DNA, 2079 bp, Zea Mays
gaattttgaagttaactaggctgttgtctaaaaacagattcagtcagttatcttgtcagatgttttagaatatattgatggcagaatttaattatccattgaatactgaagttgtagattgttttgtgtagatactcttagagtatttgtttgatatcaccaatgttttaattttaaagatacaaaattaacaaacagcgctgctgttgtatagcatgtggttcagggtgggagtctttccactatgtcttggtttcaagtgtaggagtgttttgttgattgttggcaaatgtttgtgaaatatttgtactaagttttatgcccactagcaggtggctacactccagatcatgcctagtacatttttcttcttcgatgaaggcaagtgaatgtagcggtggttgctatcgttttgacctgttatttctatcacctacactctaatatgcagaattattggattctttcataattgaactctatgatgatgttttacttgattgtattatgttgatgctctatcatatattgatgattattatggttcaagtatgacccatgagattaattcacacccctgaaggcagatgaagtcttatttgaggtttgcattgtatctaaaggcatacgaagtattatttgaggattgcattgtatctgaaggcagataaagtattatttgaggtttgtattgtatctaaaggaagtgaaatttattgataaatgcagcatgccatatacattgcatgactcatttgcatctgaagttttgtcgtgacctatggtccgaccgtaccggtacaacttagcatcgtacgttgcccgagaaggggtacgatgcagcttcatacccttagaggtatgaaggcagaggacatatgcattgcattcatatgcatacattgaagtgatatttgcagatgatgtggttttataccctcagaggtatgaagatagatgacctacacattgcattcctatgcatacattgaagtgatatttgcaggtattgttgatgcagggaagtgttatacaacatattgtggttgttcgaggaaatgagatggtattggttatattgtgactactgagttctatatctagaagtatttctgatcttgattgtgattcttttaaaatgatgattaattcaatgtggtttaaatatctcgtcaaacaattagcttgctgagatgtttcatctcactcttgcattactcaatgcaggtgcttgttgctcatcaaggggagtgggaagtagcagcacatacaccttcactctcataataacgctgcccaggcgcagtcatgatttaattagaaacttcttgtcaaaggatgtttggttttaactagtcgtgtgcactggttaattcagttcatgtcgttatggtcgtcttcccattgctagcagattattaatgtctattatgttttcttatcatgatatctatttatactttgttgcttccccgtttatgcaattttcaaaggacacactgtcgaaattttatatatgaatgttagatgtgtagtttagtagcattctggggtgtttgtggatcccggggtgttacaccttcccacttgagctgaagcttccccaccatatcagggttggccactctatgaagcaccaaatgtcctagcttaatattcttcaattttacctttctatcacaccatttgattgtttcggcctggtacttattgatgtgttctattgcttgcagtctagttccttctatggcgtcttttgctatttggcaattaccttcatcctctgtcgaagctaaggttcttattgaacccattcttgcttcttccggtgttattgcttcgtcaccaaacagaagctggaacggggtaaatcctgttgaccttgatacaacaatgttgtggttccacaccacttttattaattcgtctggccactttcctttgggttggttgaagattgacttcattattcctgttgttatgattctgtttgctctgtctaccagtccatttgactctggatgtctcactgatgcgaaatgtatttttgtaccaatctggctacaaaatgctttgaat

SEQ ID NO: 18354 - DNA, 378 bp, Zea Mays
gagatttcttgtcggacacgaggacaatgacgatgctgaccattgggtcccacatggcagtggttctggtctagtgcacggacgcggctaggacgctggtgacttgggcccaccagtcggcaccaggcaccagttgggttgtacgagagtgggagctagtgggccaagaagaggaaatcggcccaggtatggtttttttctttttgttcttttctttttcttatttcttttttcgtttttttaaatcagattcaaattcaatttcacaagcttcaaatctatttaaatgaatacacaaaaatccagtgtgtatgcaaagtattatattattaattaatttatttgttatcctatttaaacaaatacttttaaatttgc

SEQ ID NO: 18355 - DNA, 392 bp, Zea Mays
ttatccttgaattctgcacctttctcattctgttttaatgtgtacaggatgatgaagctgaagaatgacgggctgaagcttaacagttgctgcaaaagacttttctgcaaaaaattctggagaaatctttgtaatataattgtagaaaaacttatgtaaatttgtgcataccttgtaatatatcttttcccctttatccgtgtacgatctgctttgatgtggacgaaatttcacttttgagccgaaggcgaaaaacaccttcccttcttttcgtacaaaacgaagcatgaaaatttcctttttctccgaagttttttcctcatagccgaagcatctgccttttctgtatggtatgatgataatgatcctatatatgtctaaatgaatgttta

SEQ ID NO: 18356 - DNA, 252 bp, Zea Mays
tggccgttggattataaaccgacgcataggattaaatctaaacagcgccaaaccggtacactacgcatcccgttggattggagatctgtggcccaaatttaatgaatcgcttaaccatcccctgccaccggatttgggatcgacgaccgctagaggcccaggccgaatcagttttctttggtttgatctagaccatccatctatcaacccatggctagcgatttctgttaaatcccccactcacaagacggt

SEQ ID NO: 18357 - DNA, 167 bp, Zea Mays
ggtagctgctctttaggtaccttgagacatttcttcagctgagatacatggaagacatcatgtacatccgcaagatgattgggtagttctagttgatatgccacttctcccactcgctttaagatcaagaagggcccaatgaagcgaggggacaacttccctttaac

SEQ ID NO: 18358 - DNA, 601 bp, Zea Mays
tctggcaaacatcacatagagcaacatgtgagacaacattcttctttaacccataccaccaatacttctgcttcaagtcttggtacatcttagtactaccagggtggatggaataaactgagtcatgtgcctgcttcaatatggtttcacgaagactgtcgatctcaggaacacaaatccggttcttgaaccatatcgtgccttgctcatcctccgtgaaatctaggcctctaccttccgttatcagatccttgatctcctgaattttggcatcatcgatctgcccttttcgtatttcttgctctaaggtaggttccacttcgatggcaattccttctgtatgagcaactattcctagattaagcctctcaaaatcttttgctaactcatcgggtaactgggtgacaatagctgcatggacctgccccttccgactcaaagcatcaacaaccagattcgccttgcccggatgatagtgaatttccaggtcataatccttgatgagctccaaccatcagcgttgcctaaggttaagatccttctgagtgaaaatgtattttaagctcttgtgatcagtgtagattcgacacttagttcccat

SEQ ID NO: 18359 - DNA, 640 bp, Zea Mays
ccggagttggccgcctatcgaccgtgcgccacgtgtcttagggcgttaccacgtcatagtataccactgaagcgtgtccggtcattgccgttgaccttgccatggtgaaagccacgaatcctttgcgccagtgctctcccctctctccgaccgctagcgcgccattccaaattcaagagccaccgccctcgggccctataaattaagcatgccatcagctccgctaggtagtcacgcatccagcgcacccactcgtgtctcggattgtccaccagagagctctaatttgggatttcccccaaatctgtcaagaacaccacattgtgtgagctcgccgtggccagctctccacaggtccgatcatgccctcctcgctctttttttagcattcctgtgtgctcttgatgctgctcgacccggccaattgagctagaacacgtaggatcaccaggaacacctcggtttgcccgttgatcgcgctgtcaccgtgggcagataaattaggagctaaaactttgcaattgatcgaggggtaatgatcgttaggagtagaattaggtgtcagccacaccggagcaccggtcgttgcgtatttcggctggtacaggctcaccggagatcggcttgtcgccgtccaccg

SEQ ID NO: 18360 - DNA, 986 bp, Zea Mays
aaaaattacaagctatggccccattaaaaacctttctcccctcttcaaaggataatggtgccatagaaaaaatgaaaaaagattacatcagattatacatagtatcgccaaagctcatctgcattccaagatctgggtatgtcgttgccgtccatatccttcaatctataagaatcgagtcttgacgaagatactaccagaaaaggaccttcccacttcatttgcagcttgcccactgtatctgggttggccactctccgaagcactagatgccctagcttgatgtttttcaatcaaacttttctatcacgccactttattgtttcagcctgatatttactgatgtgctctatagcctgaagtctggtcccttctatagtatcttttgttacttgataatcagcttcgtcttctgccgaagctattgttcttattgaccctgtctttgcttcttccggagttattgcttcgtcacaaaataagaacttaaagggtgtaaatcctgttgaccttgacgcagttgtgttgtggctccacaccactttaatcagctcgtctggccactttcctctgggctggttgaagattatcttcattattcctgtcattataatgccatttgctctttctaccaacccatttgattctagatgcaaaatgaatcttcgtaccaattcggtcacaaaaatctttgaatacttcagcatcaaattgtgtaccattatccatagttattgcctttggcacaccgaagcgacaaataatattctgccagaaaaatttttggaccgtgaccgaagttattgtagccaagggctttgcctcaatccacttagaaaaatattctactaccactacaacatatttcaagttgccttgtgctggtgggagtggacccaacaaatctaggccccatctttgcaatgcccaggttggctgtattaactgagttagcgacgaaggttgtttctggtctcttgcacatt

SEQ ID NO: 18361 - DNA, 657 bp, Zea Mays
ctgtgtccaaatatttttcaagcttcggatcccttgccttgctgcttttgtctacatggccagagatgacttgggagtcagttttaaggatcacccttcttattcccattaccttttgcttccgaagccccaacagaaggccttcgtactcaacaatgttatttgtataactaaagtccagccttgctgcatagcatgttctgactttagagggcgcaactagaacatcggccgctcctgcgctgaaggttccccaagaaccatcacagaagattgtccaggctttggcgtcttttgttacttcttcttcctgagcccctagcgtccaatcagcaataaagtccgctaaggcctgagactgaattgaggatctttgtacataagcaatagagaattcattgtgctcagcagcccattttccgatcctcccagtagcttctcgattccacattatgtccttcagaggttgtgacgaaggaacaattatatgatatgcttgaaaataatgtcgaagcttcctggaggccatcaacacagcatataataccttctccaattctgtataatttttctttgacaagcttagaacttcggagacaaaataaactggtgcttgttttttgacttggccatcttgcttctcctatacaagtgctg

SEQ ID NO: 18362 - DNA, 333 bp, Zea Mays
caaggaacttgctcttcttaactccaaaacacacttttctggatttaatttcagaccggcttgcctgaaattggcaaatgtcttttgcaagtcagcaatgtgattctcttgctttgtgctttttactataatgtcagcaacataagtcagcacattcgtgcctatttgagagtgaaggaccttggctgtcattctgctgaagctttctccagcattcttgagcccctcaggcatttgaagatagcaataagtaccactgggagttatgaagctagtctttggttcatcttccttcttcatccaaatttgatgataacctaagtaacactccag

SEQ ID NO: 18363 - DNA, 239 bp, Zea Mays
agtgggctagttagattagggtttgtttttttcttttttttttctaaattgcgaaatgaatttttaaggagctcaaaaattccctaaaaattcaccaaaactatttataaataaaatacttgtttttagactaataactattatattatttaattattatattaattactaggttttttctttaaaaagaattgatgaaaaacattccgataatcaatcaagcgcatacaaagaaaatt

SEQ ID NO: 18364 - DNA, 1466 bp, Zea Mays
ccagcttcctcgcgctcggctccctggtattccagctcgccgtcgcgtctttcgccatcgatctcgcttgtccctgatacccatcgcgtggtatttagatctcgccggttggctgctcttgcccgccattaattccacttcgcagctcacctgctgttgtggtgctgctatcccacgacactcatgccggtgcatcatcgcctggccgagattgtcgccattagttcgctttcgtctaaatcaccgctgcgggtgcctgggtctctggtcgcacgtttttctatctcgcgctcgtctcgtccgatgcctcagcaacaccgtagtcatccttcctcgcggtgttgttatttaccctgctagtgtaatcgtgcctcaggcgctgctcgtctgaaacacccaagtcaagtgagcatcatgtgcgactcaagctcggttcgtcaagatttttcagtcaaagaaagattccaagagtatacggagaaacaagccctagattgatgccccaagtgctcggcgaaaggccggaataaggatcatcgtcgtttggatggattgctagtcgaaatggtaatcatattttgaatcgctattctagcaaattgatttgataaatgaattagagggatacttattaggataattattctatttataacttaaacgtgtcgtgggtatattaatttgatgcatgataaaagtcgtaattatatgctgcttggttactatgggtatattaatttgatgcatgataaaagtcgtaattatatgctgcttggttactatcgtaattatgaagtagtcgcgaggtgtggtaaaatataggtttgaggtatacccactagagcgaacgattaaatatcgtatttgatgtgtaggctatacaagttaatccgatgtaatggcttagaaagctaattatagagtttctattcatattcgaatgtttagatgtccaaggttaatgagttaataaagagctaggaataaaaatagatgttctagtgttgttattcaatttggttaatggatgtagtcgatgccctgctagggatatccatgaagcttaatgcttggttttaagtgtttcatcctttttagtgtagattatctatattatactcgttatactcgtgctcatacatgtgcatcatgcatctcatgacgtacgataaataatcgcgtgatgcggaagatgagccaaagtcgaccccaagcatgggctaatccgcaggatgaagctgatgaactaatctgaagatggatagacgaaacaagtatcagaacaaggatgatcgtcaagtggacgtcacctaacaacactaacctagtgttattcaggcaagccccggtgcattcgccacctccttgttgttttaatatctttatcacctcgtttgatgcattaggtgataggagttgtgtgctaaactgttgatgcatttccttccttggaaaattgattaccc

SEQ ID NO: 18365 - DNA, 462 bp, Zea Mays
gtcacaataatggaaacaaacttatatccaaattcgagagagttaatgagtaacttgaatatttgaaaattagaaataatcaaagaaaagaaaagaagggagaaagaaatactatgaaatatacaataaattcataaataaataaattatgtccataatggcctgatcaaaggatacatacaaaaaggagtacaagttcacaacattgtttaaattcaaatttgaattttgaataagtagaaaagaaaagaaaaagaaaatacaaaagaaaaaaaaggaaaaagatctagttgggccgctagatcaagttggcccagtaaactattaccacgcgcggcccagccctccgttccctcgcgctccacgcgtgcgcgccctacgccctccgctcacagcgaggaatgggacccacccgccagcctcgtcgttcaacggatgccgcctcatgatagttggtcactg

SEQ ID NO: 18366 - DNA, 315 bp, Zea Mays
ataaattatgcccataatggcctgatcaaaggatacatacaaaaaggagtacaagttcacaacattgtttaaattaaaatttgaattttgaataagtagaaaagaaaagaaaacgaaaatacaaaagaaaaaaagaaaaaaagatctagttgggccgccagatcaagtcggcccagtaaaatattaccacgcgcggcccagcccttcgttccctcgcgctccatgcgtgcgcgccctacgccctccgctcacaccgaggaatgggacccactcgtcggtgtattactcatacgcgggccaggggagagttgcgag

SEQ ID NO: 18367 - DNA, 1058 bp, Zea Mays
cgacggttccccaattagacattcggtcgagctcctggcaaatgttgcacaaacttctcttatattttcatttaactcaaggatcactccccggaaaacaaagctgacgatgagccccatggagtgaacgacgtcgttgtgacacccaccacgtaaagacaaacgacgacaattccataacggcttcacagacatggcgaggacgtagggcatgacagctatgccaacacgatcagaactcacgagattggtgacgaagcttagctggagcatttcttcgaacaaatgaggagtgtcacatgtagcttcattcacttctttatctagaataccacagcgacgtgctagctgtgaaggctgagtagagaacccaagttcgacggtgagcagggagacatggcaaaaccccggacgtgacggtggctagcaccggggctcacatcgaggtccgcgcggctaggagaaaattttgcggaggatacggcaagcatagctaaggcgcatggagctcgcaggaccggatcttggcaaggacacgaatccagtgaaggcgagggcgacgcagcgtgggcgaggtgtggagagacgcaggaatgaactccatggcggggtcacggccggcgagcagggaaaccacatggagcagtaaaaacggccgagtagacgaggacgggattcgacggcgccgggatcagaggggcgtacgcagccaccagagcacacgcagcaagcagaggagcctcgcacacggccatgggaggaagacacgcaaggaaacttcgagctacggccagcgcgcagaaagcaaagcacgcgcgcacggagccggagggcgtgccaccaaggaagggcttcggcaggacgcgagcgagcaggagcttgggggaaagccacgacacgcagactggagaactgagcagggagctccggccatggatggagctcggcgcgcgacgcaagagaagcagagaccgagccaggggcacgctcgtgcggcattagggaactcaaccaccatgggagcaggggagcagggagaggatggggctaggcgtgcg

SEQ ID NO: 18368 - DNA, 1089 bp, Zea Mays
ggcaaatgttgcacggacttctcttatattttcatttaactcaaggatcacttcccggaaaacaaagccgacaatgatccccatggagtgaacgacgtcgttgcggcacccaccacgtaaagacaaacgacgacaattccataacggcttcacagacatggcgaggacgcaggacacgacagctatgccaacacgattggaactcacgagattggtgacgaagcttagctagagcatttcttcgaacaactgaggagtgttacatgtagcttcatccacttcttcatctacaataccacaacgacgcgctagctgtgaaggctaagcagagaacccaagttcgacggcgagcggggagacatggcaaaacctaggacgcgacggcggccagcaccagggctcacagcgaggtccacgtggctaggcaaaaaattttgcggaggatacgacaagcgtagctaaggcacgtggagctcgcaggaccggatcttggcgaggacacaaatccagtgaaggcgagggcaacatagcgtggccgaggtgtggagagacgcaggaatgaactccatggcgaggtcacggccgacgagcagggacaccatagggagcagtaaaaacggccgagcagaggaggacgggattcgacaccgctgggataagagtggcgtacgcagccaccagagcacacgcagcaagcagaggagcctcgcgtgcggccatgggaggaagacgcgcagggaaactccgagctgcggctagcgcgcagaaagcaaagcgcgcgtgcacggagccggagggtgcgccaccaacgaagggcttcggcacgacgcgagcgagcagagagcacggccgagcaggagcttgggggaaagccacgacgcgcagactggagaactgagcagggagctctgaccatgggtggagctcggcgcacgacgcaagagaagtagagaccgagccagggggcacactcacgcgtcaccaaggaactcagccaccatgggagcaggggagcagggaggaaggagccgagcacggagaggctagggctggacgtgcgcaacagggagaaggggagggagaagggag

SEQ ID NO: 18369 - DNA, 450 bp, Zea Mays
gaacagagacggcgagcagggcccaagctcaacggtgtccgcgagcgaagaaaaccaagctgaggactggacagagcgcggacggcgggattcgacggctgggagagggacgtgccaccatgggcgagcgccagggaacttaaaggccgagcgaacgcggggaaaacaacatcgtggggaagaaccgcgcagcgggtcgaacaggggctgagcaccagcagggaccgagcagggagattgggcgaccgtgaagctgtacgtcggccatgggaagcggcagaggaagtcgccatgtgaaggaggcccagctacaggagcaagggagaggagtcacggcgccatgggagaggacaggagcagagacggggtgggcgcgtccacggctgctctaggctctcgcgaggccccaattgtgccagacttcagcgcggccagggagatgagcagtct

SEQ ID NO: 18370 - DNA, 620 bp, Zea Mays
gtataaatgataatactattataaggtatttgatattgtgctttattatcttgtattgagacccactcgtaattatttttcttcatgagcttgcggcaaatctcacgcactcattccctaaaatccttacaatttccttcccttaattcccccacattcaattttctaatctcacaacttccttcctcagtagaagcaaagtgaaaaaggaaaccataggctggcagctgcacctccattagtccatccccacttccatgtttgaggcggagaggagcccaacaatgacattcgacaacagcaggttgcaaaagcacaactaattcctgaccctgtctcccttctacaacactgcctacattaacagacgaggcgaggagcaaatggcagcacatggacgatgtcatggctggaccgcatcggcgtttgagggggagtctaagatttggaattcacagaacagaggagatccaagaacgtgctgtggagaagaaagggctagtacccgttcgaagtgccaagaagggaaagtagcgtggcctggcaggcgggggctagcgataacgccggtcggcttttttttaagtggacaacccgggaggcttgaagatcacgcatat

SEQ ID NO: 18371 - DNA, 404 bp, Zea Mays
ggtcacgagcacgctgcacgcgtgtgtctgcagaacggggcccacccattcggtctcccatttccagtagagcgcaggcgcgtatggagctggggcacaggcccactgtcagcggacgaggggagaggcgcactgggccgagcggtaagatacaacccaggtgcagttttctttttttttttcttttttttattttctgttttcttttgaatctcaaatttgaatttgattcttgttatgaggctcaactttgagttaattatacaaattcaaatcttaatgtaggaatactatattttattatatatatttttatactatttctagtcacatagcatttcctttcttcttttccaaactctataatttcttttaagatttaatttcccatttgtatatttaac

SEQ ID NO: 18372 - DNA, 935 bp, Zea Mays
gaataatataatttctcttttagacctttcttacaaagtgggtattacagcacaacactgtcctgtggcaacgtacttggcctcagcggtggatagggcaacagaagtttgtttcttagagcttcaagacaccagagaccttcctaggaactgggaagtccctgatgtgctctttctatcaaccttgcacccggcatagtcggaatccgagtatccgattaagtcaaaggtagacccctttggataccagatcccgaagcaaggcgtagaaactaaatatctaagaattcgcttaacggccacaaggtgacactccttagggtcggattgaaatctagcacacatgcatacacttagcataatatccgatctactagcacaaagataaaataaagatcctatcatagaccggtatgccttttgattaacgaactacctcctttattgaggtcaagatgtccgtccgttcccatcggtgtctttgcgggctttgcatccttcatcccaaacctcttgagcaagtcttgagtgtattttgtttgggatataaaggttccttacttgagttgcttcacttgaaatccaaggaagtagttcaactcgcccatcattgacatctcgaacttttgcatcatcaccctgctaaactgctcataagacttttgattagtagaaccaaatataatgtcatcgacatatattaggcatacaaagagatcaccattgcaagtcttagtaaagagagtaggatcagttttcccaaccttgaaagtattagtaataaggaaatctttaaggcattcataccatgctcttgatgcttgcttaagtccacagagcaccttagagagtttatagacgtggtcgggatacctgtcattctcaaagccagtgagttgttccaccgtagatagattagaataactacatattag

SEQ ID NO: 18373 - DNA, 1636 bp, Zea Mays
ccaaaaaaatgttgaccaaaagttaatctccggtgcgtggatgaggtaaagggttgtgggccattggatgcaaagatagaagtcatctgaggcgtcgtttctttctcccacaaaaaccctaggtggccacccctttttttttcttcacccccctcttggctgccaccccctttttctcccccttggctggacgccccctccccctatggcagccatcctccattgcttcctcccccaagatctcctcctacgcaacaaggatcgagaaaaggaggggcacgttgaattgaagaggaagagaggatcaaggagatgttcttccccatctcctcttgaagatttcttggggaaaccctaggtatggatgagatccttgttcctccctgtaattataggcttttggaggttgtagatcatgggaattaaaggattagaggttggatttgatgtggggttaggttttgatctcgaatttagttttctgcagaatggcagattcgacagtttctgttcatgccagttttccgtggtcttagtggcctcaaaaaaataaaaagtctatgtatgagtcgtagataatttgtagatctttccgtggccgtgaagaacacctcaatcggagatccgaccagagagttattgcagttttactatagcagtttttcagtctcataattctgtgcagaatctgttctcttaagatttaggcaattttatcaacagaattaaactgtgggttggtaaaagaagttgtagataattttataagctttccagattgttaaagagtgcattcatatgatttgtgaaactccagttatgtttgttttactgtggctgttcctgtttacctgacaaaaatgagtgggtctgttcactggtgggtttcatctagtaaatggccgaattggctcttccaactatggagacttttgtagagggataaaagttcttacttccagcagaatttcataatttttggttcagcagttttggagatatcgaattttaaagttaaccatactgctgtctaaaacagattcagtcaggtatcttgtcagatgttttagaacttgtagatggcagaatttaattatctattgaatactgaagttgtagagtattttgtgtagatactcctagagtatttgtttgatatcaccgctgtttcaattttaaagatacaaaattaacaaacagcgttgctgctgtatggcatgtggttcagggtgggagtctttccactgggtcttggtttcaagtgtaggagtgttttgttgattgatggcaaatgtttgtgaaatatttgtactaagttttatgcccactagcaggtggctacactccagatcatgtctagtacatttcttcttcttcgatgaaggcaagtgaatgtagcggtggttgcttccgttctgacctgttatttctatcgcctacactctaatattcagaagtatcatattctttcataattggactctatggtgatgctttacttgcttgaattatactcatgctcaatcatatattgatgatgattatgatttgagtatgactcatgagattaattcacacccctgaaggtaaatgaagtattatttgaggttggtattgtatctgaaggtaaatgaag

SEQ ID NO: 18374 - DNA, 195 bp, Zea Mays
ccccattcccctaccctcttggccgccccccctctcatctcctcctttctcaagcacttgcagccacacatcaaaccctagccgcccccatctcctcctcccatggtgccattcgttgccgctcggatctccgtcgcgtggtgcaaatcttcaacggttttcggtggagggaggaagggaggaagaaaaggggaa

SEQ ID NO: 18375 - DNA, 577 bp, Zea Mays
tggaacgtcaaccaaatccgatgatgaaagattaaagttcggcttgttgacagctctcgcgtgattgcacccggccttcatgaatgctacagctgtgccgtgtgaagccactagagcacataaatctccatgcccagttataacttcatcaagggcctcaacttcattctcgatatgatcgaaggccctggggatatcttcggaagaaggggtgatttctttagaagtggctccgactgagttaaatatccccttcaatcgattaatacatcgagtgtcaaagctggagcatgtatcccaaaggttcttaacagtttcgcttagcttcgcattcttttcagcttcggcttcgacctttgttttcagttccttcatttcatggttgaagcgctctgatctctcgttcaaggttgctcgagctttgtctagctctcggctcatcttatcattctaagacctcacttctacgagggagccttcggctgaatgcagcagactatctttttcttttaaagaatcttcaagtttcttaattttatattctaagccttcaataataacttcattttttctatct

SEQ ID NO: 18376 - DNA, 179 bp, Zea Mays
gttcttacttcctttcttccttcttcctcccaccaaaacttcaattgaaggcttgcaccaacacgaaggagatccaagcagggaggggctgcaacttggagaggaggagatgaggtgggggcggctagggttgtgtgatggggggtggctgcaagaacttgggggcggctgcaagaact

SEQ ID NO: 18377 - DNA, 922 bp, Zea Mays
gttcattcatcagcatcatcctgcagattagcccgcgcttggggtcgacttggcttgtcttccgcatcacgcgattatttatcatacctcatgagatgcatgatgcacatgtatgagcacaagtacaacgtataatatagataatatacgctaaaaaggatgaaacacttaaaaccaagaatggagcaccatggatatcacagcagggcatcgactacatccattaaccaaattgacatattacactagaaaatctatttttattcctaggtttttattaactctttaaactatgtatcttaattacttgatttatcaatttatcaaaattgatcatcacaatatatgcatgctaaattaataacatttattgagaccaataattctatttactctatttacagacctagttaacggggatacgaattaacttaccctgactaattcgacgcgataatcgcaagcacgactacgggttccagttgacgtcatccaggggccttcttttctttggtaatcaattgctggagatctttttcttcgactaaataattttgacgaattgaacttgagtcgcgcaggatatccaagctttttgtcgcgcacttggtgaacaccacgctgctagcttcgtcttcacccgattcttgggatttcttgctgacacgcggaacgacgacgagatcgtgtttggagcgagctggtgaggtggggatcgagctggggatgatggttttgacgactcgactgtgaacgacgtgatgacaagctggggcaggatccgagctaataggcacagtaggggtcaacgaccagcacgatggacgaactaagtcgtggcgaggtcgacaacgcgatagggattaaggtcgagcgagccgagagggcatgctggcgaacagaaagccacgcgagcacaaag

SEQ ID NO: 18378 - DNA, 217 bp, Zea Mays
gtactccatttataaatttttttggtaattttttatgatttttagagttctttaaaaatgaattttggaatttaaaaaaaaaagaaaaaaaaacctaaaactacccagccggcccacttaggggcccaaaactacctaaccctagccttatgcgccgcgcgcccctgggaatttttcccccagccgccgccgcctcccactctctctccctctcttc

SEQ ID NO: 18379 - DNA, 273 bp, Zea Mays
aaaatatataaataaagatatctcttcatgctggtagtttgatttgtacatttaatctaattataaaatccacggcaaaatttggattcaaatttgagattaaaaaataaaaagaaaagaaaacataaaagaaaaaaaaacaaaattcggaaacgcgtgctgggccgccacccagggttttggcccattttccctttccctcaccatgcgcggcccagttaaccggagccagacaccgccaggtggggccatctcgtcatctggccagtcgtg

SEQ ID NO: 18380 - DNA, 91 bp, Zea Mays
gcatttacttcccaaatcatgaacacatacatgtttatcatatgaatcgagtatttcaataattatcctaaaacaactaacttcattacac

SEQ ID NO: 18381 - DNA, 633 bp, Zea Mays
ttcttattatggtttggtatctacttacatttagtaactgctaataaattttgaccaacttattaaaagcaatgctcagatttaacttctattgttgatcagccttacacatcacatgaactcccacctttggtgagttcatgcacattattccccacaacttgttgagtgatgaacatgtgtgagctcacccttgctgtctcacaccccccacaagagaagaacatgtggttcaagaggggccacacaatgaggagttcgatttgatctaggtggcgtctcccagttgactttatggtgccaaggatggattttagttcattttatatttatcttttattttgtaagacttccgctatgtaataagtactctgatgttattgtgacatttatctctatacgctctgttattatttgtgttgtcttcttgggcgcatatatgagatgcacccgactttgtaccttaaatccaggtgtgacaacatgggttacccgaagcttgaacttggactatctacaatgacgaaggaccaactagcaaacaaccttgcttataacagcttgagggtttgtttatttttatttttgcttttattgatttttgttaggcaggtttgcggtaaacgatttgtg

SEQ ID NO: 18382 - DNA, 573 bp, Zea Mays
aaataaaacaaatttggactccaataacataaatcctaataatcatgtatctagctcatataactttaatcctccatctggtatgtgatgtatcttgacaccataaagttggcaggcataaaggaggcacttggctacgattgatgcttaaaatctgataaaggaggctattattttcttatatggacttcttcaaacttgcaatctcatcagattgcttagtaatggtctcataagatgcatgtgtcttagccttcaagctttggacttcgtcccatagccagtctttttcttgcctctcagtctccaatggagactctagttgatgcacctttgcggaaacattacctaaagagcttctgttagcggaggccaaccctacatcctaaaggaatgaacttgatttagggaacacttgggaactactcatgttgaagactttaaatggtgtccatcttcaactggtcctgcttccatatcaacctagcatacaaagatcaacttagtgtgttgcagttccatatcaacatagcacacagacatcaacctagtggattacatattgagagctag

SEQ ID NO: 18383 - DNA, 176 bp, Zea Mays
gttaccatggcttcaacatctgcttatgctactgctagaatccaagtatcagcttatgctaaaatgcatgtattcatttcgttcacaaaaagaatgcatgtatacacaacagtatgcacaaaaagctgaaaataatataaaaaagcaagctataatcctaggctcacaacattccc

SEQ ID NO: 18384 - DNA, 529 bp, Zea Mays
gccctcctccctggcttccctcgcgcaagagcagaagctgccatggacgcctccctccccaagctcaagtgagcgcagggcaacaacaccttcattccccgcggatccatggcgctcagcagctgggtgtctccatggtcggccagcaacctcgttggtcgagctccccagcgtttccctctgctgtccatggagtgggcgagctctctccctccccatggcgccacccccctgcagcttctcctctacctcggcgcccctccctgcttggacgctggccgagctcctttggagcaggcgcctctagcagccatggcgcccttccctgttctccagcgccctccctgttcatcttcctcccagccggctccctctccatgctccctctctagccgagcacctccctgcatcttccccgccatggctcgcgactcggtttcctccctgcttgcgtgctgctgcgcagggccccatggtgcttgctaggtgctcgacgaaatgtgcagcagccccgacgtctccgcgtgct

SEQ ID NO: 18385 - DNA, 135 bp, Zea Mays
acccttgaagttacacctgcacagcttatagacccccacagcttgaccgctagaccaacccaagtctccttgtgcacttgtgtcaaaaaaaaatatttgttgttggtgtctagttgcgcaaaccctatcaaggcc

SEQ ID NO: 18386 - DNA, 280 bp, Zea Mays
gttttttctttgattgcggataaataggatatagaatatacaatacaaatttgtattcttgtttttaacatccagcttgttaagattcataaaaggtaaacctcaaattcatcctacattttctcaaaaaatagatataaacttcggtatggattcggaaacaaattcggtaattttttcaactttttgtgttgtagagagcaaataatatataaaacaacttatataatattttatttatatttgtactaatatgcttgataacatataaaaagatcaa

SEQ ID NO: 18387 - DNA, 1972 bp, Zea Mays
cccatccctgccgcgttgccctctctctcatctccaagccgagaccccagccatgaagctccctggagcctcctcaccgggtgcccagccgtagagttcccctgcgcgcggagcttttccctccctgctcggaccgtgttcttggctccagctcagctctgtcttgtgccggcgtcctctactccatctttttccccagcgcgcgctggtattcgctcgctgctgcgcgcgctctcccctgcctgcttgtcgtggacacgggtcgctgcccatgccgagctccctgtgcgcacaaccatgtcctttgtatgttgtggccggttcccaactcgcgccgcggttctctcctagccccatgtgcacgcctctgttcatggtcgtggtgaggttgtggcgtggcgacgtcgtgtgcgttgcggcagccgtcctggccacggggcagtccgcgccatagagttcgcccgaccacgacctcactttactcctcgcgtcaatgttcgccgagtcttttcccagtccgcgatctctccctgcccgttgttgcgtccttcgtcatcgtgtcgtgtgtgcagcaacgtgattcctccatagtgcctgtcgacgaacttcgctacatcggtttctcgccttcggttcaggtcatgtatgcacgccgaacgcgttcgccgcttaaccctgtgtcgctagagctcgtgacctcgctgtcatcggagtcctcactgaattcgtgtcctcgccagagctcgcgctaacctgctcgaccatacctcgccagctcgctccagaattatctcgttgtcgttttgtgcatcctcaaaaaaaaaacaaagcgtcgggtgaagacaaagctagcagtgtgacgttcaccaagtactcgacgcaagggctgaaccaaaatccttgtcgtattcgtggatagcgcgtcagatttagtatggtaagccaatttatatttctgttagcttaattattgaattagttcgatgaatgcgatgtgattattttcatgattttggagtagtcgcgttgggtagatttgagatgataattatgtgacgtatggtaaattagtgaatggagtttaaatttagtattttaaaatgtctaaacaataatattattagtattaattatgacaaattataattgtttgataaaattaatggtaggctatatatgataacttagagtggtatgtaatttaatccagtcgtgtagtctaaaaagtgatttgcttttattcctgttctagatttaaattccttagaccactgagtctagaatttaattaattaactgataatttgtgtttaggctaatcgtgttaaatgtgtatagtttgttgtttcgtgatgtttgcgttagattcggttaatctagagaagcgtaatcattacacttagtcgtctgtcgataactagtgtttccatatgaaacggtacaacgccttgccgctaggtatttaattcgctatcgcgtagcactatttaggcttgtgatgttcctatctatatgcattcatgtgcataatgcaaatcatttaagtacgttgattaaccatgtgatgcggagaacctgagcctagtcaaccccaagcgcgggctattccgcatggtgatactgatggacgaatctgaagatggataactgaacgagtaccaagaccaaggctgctcgtcaagcatacatcgtctaacaacactaacctagtgttaccaaggcaagccccggtgcatgcaaccccttctttatgtttttaaataatttttacacactttaagtctagcgaaatgtgcattaggtttataggagttgcttggaaaccctttgatgcattggctaccttgaaatccattgcttttatagatacttctggtgaagtatcaaatatgatttacaaaattgcttagccctacatagaggtaaatcttgtggatagagtttgtcctttgcactaatgcctagctcaggt

SEQ ID NO: 18388 - DNA, 432 bp, Zea Mays
cttgggctaggaacaggtgatgttctacccaggttgattattgattatagagaatgtagccctgctgactgaagaccttttaactggtcacatgcctcatcatgggtaagctttgcctcgggcagactaatactagaataagacaacacgcaatgggagtggacagatgacgagagtagtgtgtcccttccgtgccaacaggttggacggtggtgtatctgtgctctcagttggcgtgagcctgatctgatcttaagaaccccgatggtgagttgacatatgcaagggttaagtgctacatatgtcgtgtgattggagatccccagctgggtattaatcgattcaggatcgccattacttctcggatatgaagacttggtcactaacttgcaatctaagtcatggatggaatcataatgagcaaaaatcatg

SEQ ID NO: 18389 - DNA, 336 bp, Zea Mays
gggcccagttcgccagttgtcgagctgttgccccgcgcgtccccttttctctttctgcgctgtgggcctgccttgtcagttccaccttcttcgcgctcgctgtggacctgcgcgtgcgcactcgcacacgtcgccgggtttctcgaccatgacgcccgcccacgcgcccagctccctttttagagccctgccagtgcctcgcgcacacccctcacctcatttcacacaccctcgccctctctcgcgctctgctctcgtcgccagacgccgccggagatccgcgcccgcgttcccgaccatccagctcgccggagaccgcgccaagcctccccgagc

SEQ ID NO: 18390 - DNA, 2041 bp, Zea Mays
cttcaaatccggatggttgaacgcagtacacagtctcgggcaaagtgccatgcagaaaaagcattcttcacatcaagctggtgcgcgggccacctctgggatagagccagggagaggactgtgcgaaccgtagcttggcttcaccacaggacttaatgtctcatagaaatccacaccaggacactggatgaaacctcgaagaacccagcatgccttataccactctagtgtcccatcggcattgaacttatgcttgaagacccatttgcctgtcaccacgatggcttgaggtggccgaggcacgagatcccaagtgtggtcttgggcaccgaggagagttgtgtagcatggaacagcaccggaatgtgaatatgcttagcgtgcgtcgccatcgggtgttggttggtcactggctggacagcagcagcaccgttgagaagcgacgtaggagatgatgcgggtggtgccggaacaggatcagtgtgttcccgacacgtgtagatgttggtgatgacgcgcgccggagcctgaagaggtggaaagcccggcagtgggccgcgcgtggcggcgcccggggacacctgcgccatggaaggtgctggcaacgtgcaagcggggcgcaggtacacatcaggcgatgtcgacaaagtcacatgtggcacgggaaggggcgtcgaggccacgcgtggcacggataaattcagcggtgccacaaggtcctcgagcgcaagcacggaggtgcctgttgtagctactgtcgatccaaggtcgtcggggagagttcctaaagaatgtgttgtggtccaataggactaggcacagtgtcaggagcatcaagaatctccaaagttgaaggagagcctggtccatcgcgatcaccaaagggaaaagcattttcatcaaagatgacatgcctcgagatgatgatgcaattggaagaaagatcaaggcagcggtaacctttgtgatggtcggaatagccaaggaagacacacagggcaaacctgagagctagtttgtggggagctgtgatagacaggttgggataacacttgcaatcgaaaacccgtagatgatcatacaccggtggagtgccatgcaaagcaagatgcggcgtagagaaagcaagggtcttagttggcaagatgttaatcagccttgttgcagtggatatagtgcctcgacccaatacgagggggcatggatgcctggaacaatagagagcgaacaacattattgactgactgaatgatgtgttcagctttaccgttttaaggcgaggtgtaggcacaggacatccagagtggatgccctagctgagacgtaaggtacgggcgctagagttatcaaactcacgcccattgtcgcattggatggccttcacagaggcgcataactgagtggaggtgtaggcaatgaaggtcgtgagcgtgctgaaagtgtcagatttaatacgaagaggaaaagtccacaaataatgtgcaatcatcaaggatgaccaaataatatttataactagacacactgacaattggagatgtccagaggtcacaatatataagatcaaacttattagacacacgggaggtaaacgcatgaaagggcacatggcacccgagctgacaagcatgacataaggtggagcagtcctgtaaatgagtggagacactagacgcgagcttcaacagagcttcatgaccaggttgaccgagacggcggtgccacaggggagaggtggtcatggcgaccaaagactgtgctagaggaaggtgcagggggtacagggccctggagctattgtacctgacgatcacgttccgagtttgcagatccttcacagaaaaaccactagggtcaaactcaacagagcaattgttgtcgatagtaaattgtcgaactaaaataagattcttaataatttgtggagacacaagtataatattaagaaataaagagtgggggtagtgttgttattgctattagaagtgttggtttggagattgatctttgggttttggttggtgcaaagaagctgtccttg

SEQ ID NO: 18391 - DNA, 127 bp, Zea Mays
aagtggtgtttgaaggagtctactccaatgcctgcttatcaagtggatggagctatttaactaaaggttgggtagaaggattttgggatcttctcctgcaacaaggcaagccccggtgcatttgcca

SEQ ID NO: 18392 - DNA, 770 bp, Zea Mays
ctacgatgagtggtcagtgagtcgagtctccataaccgaggagcaacgacgattcgaaccgattatacctagctggggatccctaaccacacgacatatgtagcacttaacccttgcatatgtcaactgttcccatagatcctccacaacgtgaatcggtccgcgctacccgggagcacagtactcctccatccagcttctagccaggagggtacatgctactcccaccatctcccatgcccagtgtgcggttgtcttttcacgtatggaatagccaggttcaggcttaccggagcatgtggttagttgcaaagtctcacctcatcaggcctacatcgaacggtccttaatcgacacagacgggcgaccatgtctgctcaacgtctggtctagatgtattcgaaccattttcccatttttggtacccggcaggggtactcttttccaaatgatgaacccactccggccgaagtggaatcatcaccataagtttgctttgatttttgaaacgaaaagcccataaccaatgttccacaatcattctttttgaaaacaaatgatttttcaatttctaagcagggctaagcattatcaattctttttataaaaccgggattaaggagttgccaaggaatggtaatgcatcaattgtttatcacacaactcctatcacctaatgcatcagataaggtgaaaaagcatttaaaacacaaggaaggggcaaatgcaccggggcttgcctggaataacactacgttagtgtttgttag

SEQ ID NO: 18393 - DNA, 299 bp, Zea Mays
ggtcattctgcctctatgtcggtttaaaacgccgaagctccatgaaaagggaccttcggccatctcttagaaacggctttggccgaagctgcttcttcgtgtgagaccttcggcgtaccgaagcacgaccccaacagtagccccttttgcggtgctagatcgttcttcgtaacgagcttggcccgtgaaaaaaaaaaaaaaaaacctcttcagcttcgggaagccgaaggtccaaaaaacaccttccctgagctcgttgcggagaaacgatccgacttccgagcgcgtgccaagcccac

SEQ ID NO: 18394 - DNA, 265 bp, Zea Mays
ctctttcaataaaactggcatacttcgatatttattatgattattgagttgattcttactagcattactaaacaatggtctgacattactaaacaatggcctatgtgtgcacatatacctgtatatataatcataatattatacgttcccgttgcaacgcacgggcattcacctagtgatcaaatgaaaactgaaaagaaaaaatctaaaacaaaaaaaaaagaaaaaagagaaaacctccatgcggctgggcccaaagtctgca

SEQ ID NO: 18395 - DNA, 1015 bp, Zea Mays
aggagttgattacaaaagaaagtgtttcaaaagagttacacttgaattgttataaaatatttgtaagtttgaaatgcatgctagcttaagtgacaatcctcaattaagaagctaaagatgtgatatacttatataagaaggccgagcccaccggcacttaacatcactcacaatcaaagtgacttgtaacttgtagcaacaatgggaataaaaccctaagtacataagtactcagcaagacttacccgactaaagaaaagactctcaagggtatgctggtcttaaaaggattcaaggtaaggctaatcaagtttcaaagactcgttttggcagaaaagcttactagtagtatatccttatgccaaaatttcacaagttaagtacttttcctgaatctagatttgcctaatctagatcattcacttgtccagatctagctttattttagccaattcatatttcacttgtcaactacgatgagtggtcggaggatagagtctccatgaccgaggagcaacgacgattcgaaccgattatacccagctgggatccataaccacacgacatatgtagcacttaacccttgcatatgtcaaccgttcccacagatcctccacaacgtgaatcggtccgcgctacccgggagcacagtactcctccatccagcctctagccaggagggtacacgctactccaaccatctcccacgcccagggcacgattgtctattcacgtatggaatagccaggttcaggcttaccggagcatgtggctagttgcaaagtctccaccacaacaggcctacatcgaactgtccttaatcgacacagacgggcgaactttcctgctcaacgtctggtctacattacatattatttcccaaaacttgatacctgagagaggtaccctacttgaatgatgaaatcatcgtggccacaatggcttcatcatcacaagtcattttgtttcacaaactcccatatcccatgttacacataatcttttaaaaacaatc

SEQ ID NO: 18396 - DNA, 415 bp, Zea Mays
actaaacaacacttctgacatccatatataaaatttcggcagcatcccatttgcaaaattgcataaatgagggggcaacagtgtataaacatatatcatgacaaaaacatactaagtattattaatcggctagcaaagagaagttaaacatacgacatgatctgaattaactagtgcgcacgactagttaaaaaaaacaaacttcctttgacaataagtttctaattaaatcatggctgcgcctgggcagtgttattgtgagagtgaaagtggacgtgctgctactcccctcattcccagcatgtataaagtacctgcattgagtaatgcaagagtgagatgacacatctcagcaagtaaaataatatcaaactgtttaaccacataagaacattgttttaccaccacttgattc

SEQ ID NO: 18397 - DNA, 272 bp, Zea Mays
attaatgttgaaattgggattaaaacataatttgaaatttagaatttgatgatgaaatagaaaagaaaagagaaggagaaggaaaataatatacaatataaagaggaatatatataaatcaagatagatcttcatgctggaaatttgacgtctacaaaattcacaataaaacttgaattcaaatttgagaatctaaaaaataaaaataaaataaaacagaaaagaaaaaaagaaaatggaaaagagatcacgtgttgggccaccacccaggg

SEQ ID NO: 18398 - DNA, 348 bp, Zea Mays
ctcagctttaacctttactgttgatcagccctacacatcacatgaactcccacctttggtgagttcatgccacattattccccacaacttgttgagcgatgaacatatgtgagctgacccttgatgtctcacaccccccacaggttaaggacaggtaccacaggataaggtgcatggaggatgccgcgatgtgttcgtgtgaggtctagggtgtcgtctcccagttgactttctagcgccaaggatggacttttagttcgatctatatttatcttttattttgtaagacttccgctatgtaataaatactctgattatattgtgacatttatctctatacactctgtt

SEQ ID NO: 18399 - DNA, 226 bp, Zea Mays
tccttgatttggttgatggtgtgacttggccttcatccctgccaccgggatagacggtcgagtgggttactgcttccgcaggagaggaccaggaggagtagtgtggccaggcttcgccatgttactcggttcttctccgttagttatttccgctgcattaaaatttatggttattatttctgaaactccgataatgtaattactactgatacttattaaatttgtg

SEQ ID NO: 18400 - DNA, 202 bp, Zea Mays
tcgtgcatggtggctcggcggtgaaggaggaccttcagagaagaattccggcgactctaaccaagctcaggatgttcatgccctcacacagcgtgccccagcgatgcaccctggccaccctgagactttaaacagcagtcatcgatctgatcgatgatggcggctcctgctggcttcccattggtttccgcccgtgcacgag

SEQ ID NO: 18401 - DNA, 277 bp, Zea Mays
ctgtttttaaaattcccaaattcggcttagaaataggacttctcattttccaaacatttattccgattttaggacaaacttgtagaaattccagaggatgcgtcattgcacaaaaaaatctgaaacttggtgtgttttcttcttatgtgctgattcaaaagagaaaaatataaaaaaaagatttgaaaaaaaatcgcaaaaaaagaaaaaaaaagaatagagtagcacataaacagaaacgccagtcttctgtgcacctctgtgattattttgcccc

SEQ ID NO: 18402 - DNA, 1388 bp, Zea Mays
ttttttatcaacttaaatatctgaagtatttacatctaccacagggttttctcggatttcgactgaagtcggctcgataacgctactcgcttctaatttatttagtaacgacacacactcatctaatatttcggttgataggaataacaaaaatgcgcgccaatattaaattcagctcaaaccgactacatcgattaacgaatactaattcggacttttcgtcgatcacacgttaaatatcgcaatctattccactaattcatttattaaaataaaataatagaagcagagaaccagctcaccctaaaattatccgacttaatatttgcaagaacgacgacagtctccgattgaagtcttcgatcgaacgcctgatgagcgacgcatcggaacgtcgccttcttcttttcccaaacaccctgatatttcttattggtcaaattcgacgcgaactccgcaagaaccacgataattcttagttcaagcttttcatcgagcatttagtggcgtcgcacatgggtcttcttcagctcagcatccaactggcgagtactagagcagcatcttgcgaggtgtgtgcacgaaggcgagaatcgcagctcgtcgacatggtgttgcgacagagagtgatggcgaggcggagaccgaggatgagcacatgaaggtaaaacgacgatgatgttcggcttgcgcatatcaccgatatttgacaagagttgcactggtggttccctttcgtcttctggcacaaacgcaaggtgcgatatagcggctaaaacgacgatgatgtcgggaatggctggagagggagctcgcacgcagaggtcgatggtgatcgaaaggagcaaaaacgtgagcagctcagtgcggtggggagcagcgatggcttgtcgtgtacgacgctgcagagaaacgaagaccgagctaagctcgacgcctgacgaagcactgagcaggacctgggacggcgttcatctgcgcgtgcacaaggggcacggggcgagctgcagcagggagggcgcggccatggtagagagcttaaggtgacgctctgctcggtgacatcggcaagctggagcgagatccgagctaggccgggcgtgacctgagctggagcagcgaagaaggtggtcatggatggagctcgaagcgagctcaccagcgttgaggtcgcgacctgggcgagcatagacaccgcggcgaagccggagctggggctagagttggaggagaagccaacggcagggtactggagcatggtgggagcgcgcaaatttcctaaccgagaggatgcaacggcaagcgagcagctacaagtgacgggcggccgaccggcgagctggaccagagcacgcgcatggcaaggaaacaaaatatcagagagggag

SEQ ID NO: 18403 - DNA, 592 bp, Zea Mays
ggctattgaaagcacgacagccactgaagctgtacattcagaggctgtgcagaagaggccagagccgaagatgccaaatccgaagatattaatttagagagcatagctgttgatattgtaacactccaggtttcacaaacaacccggtatgctactgtactacacttccgacgtccatatataaaatttcggcagcatcccctttgcaagattgcataaaagagggagcaacagagtataaacatatatcatgactaaaacatactaagtattattactcggctagcaaggaaagataaacatacgacctgaactgaattaactagtgcgcacgaccatataaaaaaaataaacaaacttcctttgacaataagtttctaattaaatcatggttgcgcctgggcagcgttattgtgagagtgaaagtggacgtgctgctactccccacattcccaacatgtatcaagtacctgcattgagtaatgcaagagtgagatgacacatctcagcaagtaaaataatatcaaacagtttaaccacataagaacattgttttaccaccacttaattccacaaccttcttattacgaag

SEQ ID NO: 18404 - DNA, 611 bp, Zea Mays
gtttttttggacagcaacataaccggattcaaacaacgatatctcctgaattttaactccgaatcaagcgcataagtacttgttggaaagataacataaagccctacatgattctcatactgattaacactaattatccaagaaaaattcccggaaactgctaatactgctgctgttcatccccctgaaaaatctgttttttttgacagccacatacccggattcaaacggtgataactttcaatttataactccaaattgagcgcataaatactcgttggaaaggtaaggtaaagttctacatgatacccaaactgatttcccttaattcctcacgaaaaaaacacagaaactgctagactactgctgttcacccaccacctaaaattctggacagcccccctctaccccaatcgcaaacgcaacctctaatcaattaaattgcagcgcaaatgaacaagggatgaacacaaaaatcaccttggattctccccatttccttcctcccttcttccctccaccaaaacgattgaagactcgcaccacgaagacgatgatccgagcggcaaggattggcaccttgggaggaggggattgagaggggggggcgg

SEQ ID NO: 18405 - DNA, 803 bp, Zea Mays
ctccaggttccacaaacaacccggtatgctactgtactacacttccgacgtccatatataaaatttcggcagcatcccctttgcaagattgcataaaagagggagcaacagagtataaacatatatcatgactaaaacatactaagtattattactcggctagcaaggaaagataaacatacgacctgaactgaattaaccagtgcgcacgaccatataaaaaaaaataaacaaacttcctttgacaataagtttctaattaaatcatggctgcgcctgggcagcgttattgtgagagtgaaagtggacgtgctgctactcccctcattcccaacatgtatcaagtacctgcattgagtaatgcaagagtgagatgacacatctcagcaagtaaaataatatcaaacaatttaaccacataagaacattgttttaccaccacttaattccacaaccttcttattacgaaggtgcagcacgtatacaacgtacaacgcacctagttaccacacctcgcaggtagaaaccacaatagtaacatagtaatgtcacacttcatatattcctcatgagtgcaaatgtctgcaaatgcaaggatgacttctgccttcatacctctaaggatatgaagccgcatcgtacccctcctcgggcaacgtacgatgctaaaaatgtaccggtacggtcggaccataagatcacgacataacttcaaaatgcaagatggatgatgcgatgtgcatgtcatgcctacaacacttcatataacatgattcaaaaagacacttcaacttcatccagat

SEQ ID NO: 18406 - DNA, 232 bp, Zea Mays
tttttttctgtttttttacgtaaccgaaggagaaaaacaaggaagcggcgttgactcggtttgtggcgtgatcaatcgggagatggtggcagcgcgctaaggtttgaatggtggaagaaagaaggatggtgaaaaaaacacaatgcgaccagcaacaaattcaacaatgcagattattgaaagaaagtgcgaggctcaaaagggtgctgggataaggtctaacctgaatttt

SEQ ID NO: 18407 - DNA, 104 bp, Zea Mays
ccacggcttcctccctctagatctccccccacgcagcaaggatcgagaagaggaggagcacgttgaattgaaggggaagagaggatcaaggagatgttcttccc

SEQ ID NO: 18408 - DNA, 294 bp, Zea Mays
gaagcgaccacgcctgcagcagcggttgcggaggcgatctcgcccccggcgtagaacctaccccacgggtcctctgaggcccccgtgtcacccttcgcttccgtcgccatgaccaccggggcggcggacgacgattccggcacaaccgccagctggccagactctacccctacatcacattcaagtcagaaacatggaccccatacaaaaaaataaaaaaaaaataaaaattcaactcaccagcaggcgtcagccccgtctaggcatcgaacatagtgaccccgcccaccaaat

SEQ ID NO: 18409 - DNA, 824 bp, Zea Mays
gtggaaccggtgaaagattggatgagcgattgcgtggagaaacagaaacctgctcgtcgtagaaatatgtggagttctgggtaggctgcactcaagtcaaggattagcacgatcaaacaataatgcaaagttgaattatagtgcaaaacatgaaactatattgctggccacaggtgcaaagaacggatggaactagcagaatgacaggtgattttttttctttttttgtatgatttttttgatatttttctcagcacaaggagcaacaaaataggagctacacgaagtttcacctaaaacagagttcagatgtggtctacagaaaatcaggaagttctctgaaaagcgtgcgagaactttgacgaatttttttctttattttcctgaatttttttgacaattttgtcgaaaccaaacagaccgaaggtgagtttggccggcctcagaatggtgtcaacaagctcctgtaaaaatttcagattttttggacaaccgagcgaaaagttatgcccggtttaaggaaggtacctcaagttatgtttaaaacgaccgagatgagtcaataagttccttactttttttttgtttgttctctagttctatcctttctctttcgttttttctttttttttcttttgtttctgtttttttttgacgtaaccgaaggagaaaaacaaggaagcggcgttgactcggtttgtggcgttgactcggtttgatgtaaccgaaggagagaaacaaggaagatggttgcggcgcgctagggtttgatgtaaccgaaagagaaaaacaaggaagatggttgcggcgcgctagggtttgat

SEQ ID NO: 18410 - DNA, 1233 bp, Zea Mays
cttttctctgttggccgctgcacagctccagctcggatttcgctgtgcgctccttagttcgacacccggtgctgctccatggatggccgatgttgctccatcggttcgctctcgccgcgcgcggttgagctctctgcgcacatgccacgcgcagccgtgtctctatgctcgtcgtggccggttccctatgttgtgcccgggattttgccgcgcgtccctgcttgccgtctgtccacgcgtcatgcgtggagcaacaaaacaaaaatctgtgcgcgtcgagctcccgcgccgaattctttttcagcttgatcgtgacgcgcgcataatggacttgatgtagtcgctgcgtgtgcttgtgtccgagtccacccggccgcaacctcgctttgctctccgcgtcgctgttcgtcgggtcaagccccatgttgtcgcgtctctgtttcagtttgtcgtgccatgccatcatcacttctgtcgcaagctcgttagccacagttatcttgaccgtgtcagcacgtgactgtggtcgtgttcatcgatttcgccaacgctctgttgccgattcgactgtcgtcgctggtgatagcttcgcgtgttgtcgagccggtcgttttccctgtcctgtgctcgcgcagtttcctattcgctagcgcgccccctcggctcgcttggccttaattcccatcgcgtcgtcgatttcgccggttatcatcgttcatcgtcgcgtcgcgtgtgcagctctatatacgtcaccctcatgtgtcgttgtcgttcagcgcgtcatcaagaaatcccaagaatcaggtgaagacgaagccagcagcatggtgtttcactaagtgcgcgacaaaaagcttgaacatcctacgcgactcaagttcgattcgtcaaaaattattcagtcgaggagaagatcttcatcaattgattaccgaagaaaagaagacccctggatgacgtcaaccggaaaccgtcagagtgcttccgactatcacgtcgaattagtcagggtaagcaaacttgttattcgtattagtggattgatggatggtttggctaggtctaatatttattagattgcctgagtcgctttggtaaattggtcgatgtcgtaggataaaagagatctcaataggtctcagtgttgcgggactgtaggtgttaaaaatggaaagttttactaatatatatgatacacaggttaaccagtaaatcactttagaaagttaataa

SEQ ID NO: 18411 - DNA, 289 bp, Zea Mays
gtttggtttgccaaaagcactagctcagtctaaaatcaagttttagcttttaagttttagtatgatcctttttaaactagatgagtacctagctattcatacatggtatcaaacattatatcaatcaacatcttttgccagtcacctcatttccacttgttactcaatgtagcagcatggatcaagcagtctcattagctgtgagaagcagacgattcgaattgagtttttaaaccttgcaaggtaaacctaaacacacgacatgtaggggcactctgtccccacacac

SEQ ID NO: 18412 - DNA, 101 bp, Zea Mays
ctccggctttggggtagtttcttccccccgaagcgtaatagcttcttctgactttcactgaaaaaacccgactttaccatcttggagagatcagccttcga

SEQ ID NO: 18413 - DNA, 366 bp, Zea Mays
aaaaaagaaaacgaaggagaaagaatacaaagcggttgtctcatctcggtggttttaaacataccttccttaaaccgggcataacttttcgctcggttgttcaaaaaatctaaaatttttacaggagcttgttgacaccattctgaggcccgccaaacccacctacggtctgtttgggtttcgataaaattgtcaaaaaaaatcaggaaaataaagaaaaaaattcgtcaaagttctcgcacgcttttcagagaacttcctaattttctgtagaccacatctcaactctgttttaggtgaaacttcgtgtagctcctattttgttgctccttgtgctgagaaaaatatcaaaaaaatcaaacaaaa

SEQ ID NO: 18414 - DNA, 277 bp, Zea Mays
cttttttttgtttctgtttttttacgtaaccgaaggagaaaaacaaggaaacggtgttgactcggtttgtggcgtgatcaaacgggagatggtggcggcacgatagggtttgaatggtggaaaacacaatgcgaccagcaacaaatgacgtgaaagcacacaaattcaacaatgcagattattgaaagaaagtgcgaggctcaaaagggtgctgggataaggtctaacctgaatttttatgtggttttgtggactgtaggagaaaaaaacactcgat

SEQ ID NO: 18415 - DNA, 456 bp, Zea Mays
gaaacctagatagaactggacaaccgctttgtttcctttccctatttttttgtttattctctggttctatccgttctctttctttttttccttttctttttttttgtttctattttttttgacgtaaccgaaggagaaaaataaggaagcggcgttgactcggtttgtggcgtgatcaaacgggagatggtggcggtgcgctagggtttgaatggtggaaggaagaaggatggtgaaaaaaacacaatgcaaccagcaacaaatgacgcgcaagcacacaaattcaacaatgcagattattgaaagaaagtgcgaggctcaaaagggtgctgggataaggtctaacctgaatttttatgtggttttgtggactgtaggagaaaaaaacactcgataaactcaccgataaccttgaaatctggtaccacttgatatagctgaggtgcccgatctttc

SEQ ID NO: 18416 - DNA, 931 bp, Zea Mays
ctctatgataactcttcgaggtctaatctggtttttcatttttaagtcggtttccttttccgccgctattccgaagctcttctacacacagcttcggctctgcgccaacctttgtgctttttcgtactgtggctctgatccgagtccgaaggtacctgttaatgtactttactccagaaacattgttaaatcatgtttttgaggatcttcggaagccgaaggcccccaacaatgccaaactcccagacgcgacggggaggacataggacgtggggcacacgacacggacaaaagacgagtgccggggctgtcagctcatcgcgcgatcgggtgacgacgacgaacagccgagcgctgcaaggaggtggagaacgacgacggatcaaagatcaaacagtggagcttgcacatgcagggaggaatatgagcgacgacgactgtgtaaggagtgccgagctggggagggtgggattcgacggcaaacacgaacacgtcgaagcccgaagaacgagaagcgagcgcgctgcaatgacgacgagcaggcgcggccgagtctgcgcagagattcaaaaccacgcgcgcagcgatggtgatccagtggcgacaggagcagggacggagctcggcaaggtcgcggccgggcgagcaccagaggagctcgcaacggatccgagtaggggccggacgagcaacagagaaagcagcagcggccagcacccatggcgagctccagccaccagggagccgagcgtgatgaggcgagctgccggatggaatagggacggccggtgccatggctgaaggcagggaggatggccgagcgagctggaacaggggcgcgacggccatggcgagggaggctggagggagctcggcgagctggaatgcgcgcagggagggaaggaactcggctcgacgcgcaggaaaaaat

SEQ ID NO: 18417 - DNA, 770 bp, Zea Mays
aacaatgactcagacccttatggactaaaaggtcattctatctttaagtcggttcgatccttcatcttcggatacgctataacaccgaagcttcatgagtggtagcttcggcatcacgtataagcagctttagccgaagctgtttcttcctgcaggaccttcggcgacgaagcatggtcccaacagttggaaaagcagacgtgaggcgatcgaggtgtgactagaatgatgattaggggttactggccgacttactttcgattcttataaacacttccttacgaggggttgtacaaaagtgagtttagacaactcgacaaaacgatctctaaactcaacctttgttcactgggcagttacaagttagtaaaaccaacttgttgaactacttttgacattgggtaagtcctctcaataccataggcagtccaatggtcgagagttcactcttattaacagttgatcatgcatttgggtagaaatccatttggtcaggtggttcatccgtttcttcatgcgagatgaactggcttgtttcgggaatgcatggattaaataggagagcgaatgaacaaactcctgcatttcagcagcaggggaaaagccaatctccattttgggagctaaccagctatttgctaacactaaaaagctccaaggcttcacctttacacaaaggacataaagggaacttgtatacgtagtcactaccaagatcaaaagaaagaagaccacataagaaagtggtatgcccttttgatccaattgag

SEQ ID NO: 18418 - DNA, 473 bp, Zea Mays
aaccattagtgcctctgttataacatgaaagatgatttaaaatttatctagcacttaatcttgtattaaatacataaaacattggaaaattcataacttaaaatttataactccaaatttaatgattccagttcctatgatcttattttaatgtctagattattactgtgtattttatttatatgtttggtgtaatgttaatttttgctacactatgtatgtattgtattgatgcgagtagacgagcaagccactgtggaatctgaggttcaacaagtagaagtagctgagcaggagctcattgaaggcaagttgtgcccttgatcacttcttttacctattcatgttcttattattcataatgatctgcataggataattttgctgggacccaataggataccctagatttgactatctttataccttgtttcaccactggttttactactaaacttttgggtagtacatgc

SEQ ID NO: 18419 - DNA, 1948 bp, Zea Mays
attattgtgacatttatctctatacactctgttattgtatatgttgtcttcttggcgcatgtatgagatgcacctagctttgttccttaaagccgggtgttacaatgtctttcctagattaggttgataaagcaacatggcgagccttaagaacaggcaaactggattagagacatcaacttacgccaatcgaataaggacgtgatctaggatggagacatgactcgagattcttgttttaagcccgggtacactttatgtctaacaaagaaattatctaagcatttatttatatgtgtttggtcatggagtgataacagaaaaaacaactttgggtcatggttcactaaataagaatatggcctagttttcgatttaagcaaacaaactaccaaccttctatcagcacatcaagcacaagagcaaacacatataacacctaaacagatttcctaaggaatggaggacaactatttcatagaagttcataatactgcattacaccacattatccacagtcaatgtttactggaataaagatgagagaagcattttgggtgtataggtgacaaacatgatgcaacaatcaggatgcatgcatgtcctaagtgtcctcactgattttgccaacataatatggcaataacgttctataccggtggcatacttacgactctcacggtattttgctagtcgtcagctacacatacgttttcgaggttagtgtacctgcagttttcccatgatgcagttcacacatgacagtttatcacagtttatactccatatattgctgtcattaagcgccgagccacgcataggcaccgctgccacactttaaccatagggcagcccattatggtaactcaccttcttacctgagcataggtgcgtcgttacaagtacattacacttctcagtactcccatgtctgtatacccatacacatccatggggtactgaattcccagaaaagtaaatactccacaacgcagctttcatatatacatatgtgtaacatgtatataatcaagcgctttttatgctcttccctagaccgacggttgttcggtcatgctctcacatctcaccttacctgagtgtggatccattcaagactgaatggcctcgaaaataataatacacatgtatgcaataccccattcaagactgaatggcctcgaaaataataatacacatgtatgcaatacccccggttgtgggttagtggtttttaaataaaccacctggtagtccttaatatagggcttaatagaggatgtcgctagcactatagtttttcaaaactgtttttcaaagccaaacaatgtgtttagttgaaaataagttttctaaaaccaaaactttgttttgaaaatacgtatgtgactgtattatacttaatcctgctccgataccagctatggcagaacctcccaagttattgggcccacatgcacctgtccttgtctcaaagacttcagacagctatgcatgtgtaccggataacttaacaggatctgtccgagtgtcccatggaccccggataaaccacttacaaccagaaccgcaggattcagtaaacacaaatcacacaccaacaattttgcaccggaaatcttattaccacattttacaagttacaacaaatttacattatatttatcggagtggttacaaaagtggttcaaagaataaactttgaaatgtaataaattatttataagtttgaaatatatgctagctcagtgacaaacctcaataagaagtatagaagaatacttaaacttataagaaggtcgtgcccaccggcgcttaacaccaatcacaatcaaagtgactcgtaacctgcagcaacaatggaaataaaacactaagtacgcaagtactcagcaagacttacccgactaaagaaaagactctcaaggatatgatggttaaataggaa

SEQ ID NO: 18420 - DNA, 604 bp, Zea Mays
caattaccaatggaagaccttagtgttcaagatgacctgacttatgctgagtaccctatcaagattctggacactttgactcgagttacaagaaataaggtgataaaaatgtgcaaggtacaatggagtcaccatggagaagatgaagccacctgggaaagagaagaagagcttcgtatagattttccccatcttttccctagatcttcttaaatctcgaggacgagattatttttaaggggggtaggatttgtaatacccaatttgtaaaagatcatatataaaagggaaaagttatctcctttaggtatacatgtactttgtatctacttatcatcacatgtgaatagcatatttaaagacaagtaactgataaaaaaaagttgtaccactaaactatgcatcatgctgagttttattttatgtgcattttgaggcaatacaaaaataaagtaaaaataaaaattataaataaaagtaagactagtatgttcaaattgtacaggaaatttgaggagaatttaccaaagaacttgtgtttgaaatttgaactcaaataggaagggaaaatataaataagaataaaggaaagaatggggcgtcg

SEQ ID NO: 18421 - DNA, 599 bp, Zea Mays
gggccccaagaccccgcacctcgcggctagataagggagggtcgccgctccttcctccatgcgcgacgacttcgctgtgagctgcaatccaccgcttgccgatttaaaagctcggtaggtgagagagagagagagaaagtcacaagtgtcgtggatcctagcagcgctgcggcttcaagcaagggccgggggatcgctggggaaagggaagctctgcgtgcgaactaccgtgggtcgacggcgtgacgcggggaccggattgctcgtcggtgccgaggttacgtcgcggaatcgagcgcgtccggtgttgggtgtccgcgccatgtgactataggtgagtagctacctcggaatttcctcctttctctattctatggcttttacgcggtccgtggaggagcggtagccctgagcgaagtgtagatgcggaccgagatctgtgtgcacgccggtggttcaccgggagagggagaaagtgttctggaggccgacgcatgtgcctaggaggctggaggaggaagaaggacagtggatcgtcgatttcaccttcaacggtcgcgattagattagaaataacctttcgctaaggggaaaatctg

SEQ ID NO: 18422 - DNA, 378 bp, Zea Mays
ctggacagttgagtgggacccctacctcaaaaggaggggagcatgaggagtgatgggccaggcttccacatcctccattttctttaccgttagttaattttcgctgcatcgagaacaatggttactacttttgcaaaactccgatgatgttgtaataacattaaatactcctttaaattatggttttatgctttattgtattttctctgtggctcaccttcgagtgagtatgtggtacttgatcctattaatggccttgtcagactagatccgagggactgacggtttattcctatttaagtgtggtctagcctttaaggcgggacttaggcacttaagttggaataattcggacggttccgccacacaagaaacctt

SEQ ID NO: 18423 - DNA, 529 bp, Zea Mays
gtgtaaaactggtatactagccgagctcacagtcatgagcagctcaggactctcgcatgattaatttatggaacttaaattcaatttgtcatttgcattgcataggatttgttattaattttgttctattatttttattatggtttggtatttacttacatctagtaactgctaataaaattttgaccaactgattaaaaggcaatgctcagctttaacccgtattgttgatcagccttacacatcacatgaactcccacctttggtgagttcatgcccactggtttccccacaacttgttgagctatgatcatgtgtgagctcacccttgctgtctcataccccccacaagagaagaacatgcggttcaggaggagccactcaacgaggagtttgatccgatctaggtggcgtttcccagttgacttcctggcgccaaggatggattttagttcgatctatatttatattttattttgtaagacttccgctatgtaataagtactttgattatattgtgacatttatc

SEQ ID NO: 18424 - DNA, 2503 bp, Zea Mays
cccccttttgcccctgcttggccgccaaccctttcccccctccaacacttggccgcccctctctccttttcccttgggctggctgccctctcctcccatggcagcccctctccacggcttcctcctccctctagatctccccccgcgcaacaaggatcgagaagaggaggagcacattgagttgaaggggaagagaggatcaaggagatgttcttccccatctcttcttgcagaatttcttggggaaaccctaggtatggatgagatccttgttcctccctgtaattatgtgcttttggaggttgtggatcatgggaattaaaggattagaggttggattagatgtggggttaggttttgatctcgaatttagttttctgcagaatgacagattcgacagtttctgttaatcccagttttccgtggtcttagaggcctcaaaaaaataaaaaggctatatataagtcgtagataatttgtagatctttccgtggccatgaagaacacctcaatcggacatcagatcagagagttattgcagtttgattataacagtttttcagtctcttaattctgtacagaatctgttctcttaagatttaggcaattttatcaacagaattaaaccttaggtttgtaagaaaagatgtagataatttcataagctttccagattgttaaatagtgcattcatatgaattatgaaactccagttatgtttgttttactgtggctgtttctgttagcctgacagaaatgagcgggtctgttcactggtaggtttaatcaagtaaatggccgaattggctctcccagctatggagacttttgtagagggataaaagttcttactttcagcagaatttcatgatttttggttgagtagtttgtgagatatcgaattttgaaagttaactatgctgctgtctaaaacagattcagtcagttatcttgttagatgttttagaacttatagatggcaggattcaattatccatcgaataccgaagttgtagaatattttgtgtagatactcaaggagtatttgtttgatatcaccactgttataattttaaagatacaaaattaacaaacaacattgctgttgtatggcatgtggttcagagtgggaggttttccgccaggtcttggtttcaggtgtaggaccgatttgttgattgttggaaaatgtttgtgaaatatttgtactaagttttatgcccgctagcaggtggctacactccagatcatgcctagtacatttttcttcttcgatgaaggcaagtgaatgtagcggtggttgcttccgttctgacctgttatttctattgcctacactctaatattcagaagtattggattctttcataattggactctatggtgatgctttacttgcttgcattatactgatgctcaatcatatattgatgattatgattcgagtatgactcatgagattaattcacacccctgaaggtaaatgaagtattatttgaggttggtattgtatctgaaggtaaatgaagtattatttgaggttgtattgtatgtgaaggaactgaagtatattgataaatgcatcatgccatatacattgcatgattcacttgcatctgaagttgggtcgtgacctatggtccgaccgtaccagtacaacttagcatcgtacgttgcccgaggaggggtacgatgcggctacatacccttagaggtatgaaggcagaggacatatgcattgcattcatatgcattcattgaagtgatatttgcatatgatgtggttttataccctcagaggtatgaagacagagtacctacactttgtgttcctatgcatacattgaagtgatatttgcaggtattgttgacgcagggaactgttatacaaactattgtggttgtttaaggaaatgagatggtattggttatattgagactactgagttctatagctacaagaatttctgatcttaattgtgattcttttaaaatgttgattaattaaatttgtggtttaaatatcttgtcaaaacaattcgcttgctgagatgtttcatctcactcttgcattactcaatgcaggtgcttgttgctcatcaagggaagtgggaagtagcagcacatccaccttcactctcataataacgctgcttaggcgcagtcaggatttaattagaaacttcttgtcaaaggatgttgtttctaactagttgtgcgcactggttgatttagttcatgccgttatggttgtctttacattgctagcagattattaatgtctattatgttctcttatcatgatatctatttatattttgttgcttccccgtttatgtaattttcaaaggggatgttgtcgaaattttatatatgaatgttagatgtgtagtttagtagcattctgggtgtttgaggatcccggggtgttacacaacccgacggtactccgagcttgaggagaagtattctcaaggtcagatcgacctggctcgggtttctg

SEQ ID NO: 18425 - DNA, 199 bp, Zea Mays
cccctctctccttttcccttgggctggctgccctctcctcccatggcagcccctctccacggcttcctcctccctctagatctccccccgcgcagcaaggatcgagaagaggaggagcacattgagttgaaggggaagagaggaccaaggagatgttcttccccatttcttcttgcagaatttcttggggaaaccctag

SEQ ID NO: 18426 - DNA, 222 bp, Zea Mays
caggtgcttgttgctcatcaagggaagtgggaagtagcagcacatccaccttcactctcataataacgctgcttaggcgcagtcaggatttaattagaaacttcttgtcaaaggatgttgtttctaactagttgtgcacactggttgatttagttcatgccgttatggttgtctttccattgctagctgttggggactcgttctcaaatgctatgaattaag

SEQ ID NO: 18427 - DNA, 518 bp, Zea Mays
aatctgcattgttgaatttgtgtgctttcgcgtcatttgttgctggttgcattgtgttcttccaccattcaaaccctagcgccgccaccatctcccgtttgatcacgccacaaaccgagtcaacatcgtttccttatttttctccttcggttacgtcaaaaaaaaaacagaaaaaacaaaccgagtcaacggccgtttccttgattttctccttcggttacgaaaaaaaaacagaaaaaaaaaacaaaccgagtcaacggccgcttccttgtttttctccttcggttacgtcaaaaaaaaacagaaaaaaaaagataacgaaggagaaaggatacagttgtttttcatcccggtcgtgtttagaacataacttgaggcaccttccgtaaaacgggcataacttttcgctcgggtgtccaaaaaatctgaaatttttacaggagcttgttgacaccattctgagcccggccaaactcactttcggtctgtttgggttcgacaaaattgtcaaaaaaaat

SEQ ID NO: 18428 - DNA, 1454 bp, Zea Mays
gtttgttaggtgatgtccacttgacgaccatcctttgtcttggcactcgttcaggtcatccatccttaagttcgtccttcagcatcaccatgcggagtagcccactcgttacgtcatcttggggtcgacttggctcatcttccgcatcacgtgatcaattaacgtacctcatgggatgcacgatacacatgtatgagtgctagtataaatattacaatttagatacggctacttgaataatattaaacacctataacaagaaatcgcaaatctagtacgaaaatactaaatgtcgatatcacattaaaactatagctatggcattctaatttaatcggatttaattctaacagcacacaacagtaatctatgtgtaagcattttactctcttaaaacctatcccgacggacttatagaacttaggatcattacttgcttcaattaacttgtataaagcaccaactatcaaatcatcacatttattcttaatcaaacaagtagaacgtcattatacagcctagagttctatacgagactgcctccttaaccgcttagtgtgcactttccactacatagctttaatattctaataaaaactaacttatcgacattattcactttcactcattttggtaatgctagatatttatctagggcacttaattgatcattaacaaaaataccatgactatgaaagcatagcattgacttcactgcacaactaaaattcctcacatgaaatgccgatagcaactactggcaaagcactaaaattactaagcaaataaattcagcataatcaataaggacaaggcttatcggataatcgtgtgaaatactaaatttatctttctcacattattaacttgaccatgtatcacaaacgacgaacccgtttaatcctcctctcataacctacgtctttgaacctaaatttagctacatggcacgactatttcgcaatcgcggacacaatcaccatgctacatgtagcccccgtattccaacaagcgtctaataaacacgtgcccgagctacaagcgagataatcgtcgcgacatacatacctatcaatccatctattaaaccaaatattggaagtggcgaattagcttaccatcattaaatccgacttgaaaccagaaaatcgacgacgcctttcagctctagcatttcaccgaacacatggtgagtgccgcgtcgaatcgcacttcttcttcatccacatcgagaattctccggccgcgtactgatttgtttccttccgcgcctaatcttctcaaatttttggcgtgcacacaagtggaagacgtcatgtaggagccagcatcagggcaaggcgatggatcgatgacaagcaccaaggagggataggcgacgttgttgtagactcggaaaagggacgaacgacgatgtcgaacgcgatctaggtaacagaacagcatgccaacaa

SEQ ID NO: 18429 - DNA, 319 bp, Zea Mays
acacatttgacaaacatattaagctgatgtaaacaccacatcatctaggagtaggtgactagccacacccaaccaactctaggctaggcaaggacttccttcaaaccaatagataggtggtctaaaaaaatggctccacaagcatgcatcgaaaagggaaccatcatatcctcaatgtatcaatacataatcaatggatcaagagaatcaaagatttattctacaattagtatgactaacaggcaaccactttaaaccacatctaggctttgtggcaactagaacacacaatatgagagagacatgtaagccattctgg

SEQ ID NO: 18430 - DNA, 243 bp, Zea Mays
caaaaacatagataacttcaagatcaccttgagttccacctttttcctccttccttcctcccaccaattctccaattgaaacttgcacccacacgaagaagatccgacgaggaagaacgacacttggagaagaggagatgggggggtggcggctagggttgaggtgatggctgctgcaaaaaacttgagaatggagagggggcggctgcagcacttggggaagagagaagagggaagaggggg

SEQ ID NO: 18431 - DNA, 239 bp, Zea Mays
ataaaattcaggttagaccttatcccagcacccttttgagcctcgcactttctttcaataatctgcattgttgaatttgtgtgctttcgcgtcatttgttcttggtcgcattgtgttttccaccattcaaaccctagcacgccgccaccatctcccgtttgatcacgccacaaaccgagtcaacaccgtttccttgtttttctccttcggttacgtcaaaaaaaatagaaacaaaaaaa

SEQ ID NO: 18432 - DNA, 231 bp, Zea Mays
cttcgttgttttttgtttctgtttttttttgacgtaaccgaaggagaaaaacaaggaaacgatgttgactcggtttgtttttttctttttctgtttttttttcgtaaccgaaggagaaaaacaaggaaacggccgttgactcggtttgtttttttctgttttttttacgtaaccgaaggagaaaaacaaggaaacgatgttgactcggtttgtggcgtgatcaaagggtag

SEQ ID NO: 18433 - DNA, 111 bp, Zea Mays
atgggaccgagagatgatgatcgagccagtgatgtggtgccaaccacaagatgccgtggtggacgacctgaagaatggacttaactagtggatgctcgccaagcgagtacc

SEQ ID NO: 18434 - DNA, 1083 bp, Zea Mays
ctcttcttcctcctctcccacacgcacaactctctcctccttgctccatggcgcagcagcaaagtccttcttccccacatccggtcgttgtccccctggtcctgctcggcgatgcccttctcccctaggccggtgagcaggtcttcttcctccctgcttcacggcagcaagcatggacgccgctgctccttttttttcctctcgctctgctcgctcggccgccagcagccatggccgacctccacttccatggagcaggcgcccccaacagccatggcgcccttccctgttctccagcgccctccctgccatcttccctcccatgggcgcgagcttcaccctcggcaatggacgctgcgcgagatcccccttgcgcccctgttttcccagccgtgcagctccctattcgacttccatggtcgcccagctccctgtccacggcgcccaggaattccaacagcagctcatcccctcccagcgcccccttctgctccatggctgcaagaagcctctccatggttgacgcacaggtggccagcagctctgctcgccccttgtaccttgagcagcaagaagcagcgcccctatctccttttccccgcagccccaccaaatcgacgcgccgtaggtgctcgacaaaatgcgcagctccatttctccatggccgcgagcatttccttgccgcgactgcctcccaaggacagcgcgtagcagcctccccgtggccatggtctgcaacatgaagtcgcacgctacatgttcgatgttttgcgcagcagctccgacgtctccacgcggctcgctgctttgtgctgcgcagcgaacagccgtcgacgcccgccgtgtgttcgctgttttgcttagccccaatatcgtcgtcgttcaccccggtgagaccacgacaattcttgtttaatttcacatcgacattattctccggtgattaattgtgtatgtgttgcttgttttgttttgtggaggagacgaaccccgtgttttgcggggagaaggcaagtcgttcgacgctcgtcgacgttcgaagttatgcgcaaatcggaatcgccatcgtccttacaaacaccg

SEQ ID NO: 18435 - DNA, 502 bp, Zea Mays
gttgaatttgtgtgctttcgcgtcatttgttgctggttgcattgtgttcttccaccattcaaatcctagcgccgccaccatctcccctttgatcacgccacaaaccgagtcaacattgtttccttgtttttctccttcggttacgtaaaaaaaaacagaaaaaacaaaccgagtcaacggccgtttccttgtttttctccttcggttacgaaaaaaaaaacagaaaaaaaaaccgagtcaacatcgtttccttgtttttctccttcggttacgtcaaaaaaaaacagaaacaaaaaaaacaacgaaggagaaaggatacggttgtttcatcccggtcgtttgaaaacataacttgaggtaccttccttaaaccgggcataacttttcgctcgggtgtccgaaaaatctgaaatttttacaggagccagttgacaccattctgagcccggccaaactcaccttcggtctgtttgggttcgacaaaattgtcaaaaaattcagg

SEQ ID NO: 18436 - DNA, 405 bp, Zea Mays
aaaaatttcagattttttggacacccgagcgaaaagttatgcccgatttacggaaggtacctcaagttatgttctagtgatgcgaccgggatgaaacaaccgtatcctttctccttcgttatcttttttttctgtttttttgacgtaaccgaaggagaaaaacaaggaagcggcagttgactcggtttgttttttttttctctgttttttttttcgtaaccgaaggagaaaatcaaggaaacggccgttgactcggtttgttttttctgttttttttttgacgtaaccgaaggagaaaattaaggaaacgatgttgactcagtttgtggcgtgatcaaacggaagatggtggcggcgctagggtttgaatggtggaagaacacaatgcaaccagcaacaaatgac

SEQ ID NO: 18437 - DNA, 209 bp, Zea Mays
catagaagctctgaatatggacatgtgcatcttgtcaaataatagagtcgccgtcttgtatgaggttgttacaagaaacaacgctctttgtcctgaattttaccactctgtatccatgctgactggctgacataagctgtcatcccgcaaatcttaaactctcctgacaacttcgggatctcaccaagaatgcaagatagcaagctcgt

SEQ ID NO: 18438 - DNA, 3495 bp, Zea Mays
cactgttcacccttgttggcctccttgcgattgatagcaagttccaacatttggcgcccaccgttcgtgtaatatcccaaaaaaatgttgaccaaaagttaaactttggtgcgtggatgaggtaaagggttgtgggccattggatgcaaagatagaagtcatctgaggcgtcgtttctttctcccacaaaaaaccctaggtggccacccctttttttcccttcaccccccccctcttggccgccaccccctttctcccccttggctggccgccccctccccctatggcagccatcctccattgcttgctcccccaagatctccccctacgcagcaaggatcgagaagaggaggatcacgttgaattgaagaggaagagaggatcaaggaggtgttcttccccatctcttcttgcatattttcttggggaaaccctaggtatgatgggatccttgttcctccctgtaattatgtgcttttggaggtggtggatcatggggattaaaggattagaggttgtattagatgtgaggttaggttttgatctcgaatttagttttctgcagcatggcagattcgacagtttctgttcataccagttttccgtgatcttagtggcctcaaaaaaataaaaagtctatatatgagtcgtagataatttgtagatctttccgtggccgcgaagaacacctcaatcggacatcagaacagaaagttatgacagtttgattatagcagtttttcagtctcataattctgtgcagaatctgttctcttaagagttaggcaattttatcaacagaattaaactgtgggttggtaaaagaagttgtagataatttcataagctttccagattgttaaagagtgcattcatatgatttgtgaaactccagttatgtttgttttactgtgcctgttcctgtttgcctgacaaaaatgagtgggtctgttcactggtgggtttcatctagtaaatggccgaattggctcttccaactatggagacttttgtagagggataaaagttcttacttccagcagaatttcataatttttggttcagtagtttgggagatatcgaattttaaagtgaaccatactgctgtctaaaacagattcagtcagttatcttgtgagatgttttagaacttgtagatggcagaatttaatcatccattgaatactgaagttgtagagtattttgtgtagatactcctagagtatttgtttgatatcaccgctgttttaattttaaagatgcaaaattaacaaacagcgctgctgctgtatggcatgtggttcagggtgggagtctttccactgggtcttggtttcaagtgtaggagtgttttgttgattgatggcaaatgtttgtgaaatatttgtactaagttttatgcccgctagcaggtggctacactccagattatgtctagtacatttcttcttcttcgatgaaggcaagtgaatgtagcggtggttgcttccgttctgacctgttatttctattgcctacactctaatattcagaagtattggattctttcataattggactctatagtgatgctttatttgcttgcattatactgatgctcaatcatatattgatgatgattatgattcgagtatgattcatgagattaattcacacccctgaaggtaaatgaagtattatttgaggttggtattgtatctgaaggtaaataaagtattatttgaggtttgtattgtatctgaaggaagtgaaggttattgataaatgcagcatgccatatacattgcatgactcatttgcatctgaagttttgtcgtgacctatggtccgaccgtaccggtacaatttagcatcgtacgttgcccgaggaggggtacgatgcggcttcatacccttagaggtatgaaggcagaggacatatgcattgcattcatatgcattcattgaagtgatatttgcagatgatgtggttttatactctcagaggtatgaagatagagtacctacacattgcattcctatgcatacattgaagtgatatttgcaggtattgttgacgcggggaagtgttatagaacctattgtggttgttcgaggaaatgagatgatattggttatattgggactactaagttctatatctacaagtatttctgatcttgattgtgattcttttaaaatgttgattaattcaatttgtggtttaaatatctcgtcagaacaattagcttgctgagatgtttcatctcactcttgcattactcaatgcaggtgcttgttgctcatcaaggggagtgggaagtagcagcacatccaccttcactctcataataatgctgcccagacacagtcatgatttaattagaaacttctggtcaaaggatgtttgtttttaactagtcgtgcgcactgattaattccgttcatgttgttatggttgtcttcccattgctagcagattattaatgtcttttatgttttcttatcatgatatctatttatactttgttgcacccccgtttatgcaattttcaaaggagatgatgtcgaaattttatatatgaatgttagatgtgtagtttagtagcattctggggtgtttgtggatcccggggtgttacagttggtatcaaagcataggctttagattcttggcaatttgaagataaatttgacacacttgcacatataggaagggtatgggttcaaatatctttgatatatattaatgtctttggagtgcagatgacaataatttcacccctccctattcctttacggtgatgtggtaagtcgtttatgacttaatgcctaataatttatctctaaatctttatattgttttattaatgcgattgatatcgctggtcttttgagagattgaagttgttattatgcttgtgatatacaagtatgtctatgttgtttacaccatgtttttcaaggttgagttttattacaataatattgttatatatgcttgattgaggatgtttctaagaggagtgtgaattgcgtgttttgggttacaaggtaaccatcaatttgaatttaagttgttgagcggttggtggatagttccaactatctttgcaaagaatgattatttatgtcgagaaaccagttctgaaagaaatgaatgttggtacttttatatgaattttgggggaagtctttacctagctagaatggcttacatgtctctcttctattgtgtgttttagtagccacaaagcctagatgtggtttaaagtggttgcatgttagtcatgctagttgtagaataaacctttgattttctggatccattgattatgtattaatatatggaggatcagatggttctctctccgatgcatgcttgtggagccattgctggaccacctatctattggtttgaatgaagccagtgcctagcctagagtttgttgtgtgtggttagtcacctattcgtaaatgatgtggtttttacatcagcttgagatgtttgtcaaa

SEQ ID NO: 18439 - DNA, 357 bp, Zea Mays
ctgtaacaccccgggatccacaaacaccccagaatgctactaaactacacttctaacattcgtatataaaatttcgatagcatctcctttgaaaattgcataaacggggaagcaacaaagtataaatagatatcatgataagaaaacataatcgacattaataatctgctagcaatgggaagaaaaccataacagcatgaactaaattaaccagtgcgcacaactagttagaaataaacatcctttgacaagaagcttctaattaaatcatgactgcgcctaagcagcgttattatgagagtgaaggtggatgtgctgctacttcccacttccctggatgagcaacaagcacctgct

SEQ ID NO: 18440 - DNA, 1708 bp, Zea Mays
agcaacaaagtataaatagatatcatgataagaaaacataatcgacattaataatctgctagcaatgggaagaaaaccataacagcatgaactaaattaaccagtgcgcacaactagttagaaacaaacatcctttgacaagaagcttctaattaaatcatgactgcacctaagcagcgttattatgagagtgaaggtggatgtgctgctacttcccacttccctggatgagcaacaagcacctgcattgagtaatgcaagagtgagatgaaacatctcagcaagcgaattgttctgacgagatatttaaaccacaaattgaattaatcaacattttaaaagaatcacaattaagatcagaaatacttgtagatatagaactcagtagtcccaatataaccaataccatctcatttcctcgaataaccacactaggttctataacacttccctgcgtcaacaaaacctgcaaatatcacttcaatgtatgcataggagtgcaaagtgtaggtactctgtcttcatacctctgagggtataaaactacatcatctgcaaatatcacttcaatgaatgcatatgaatgcaatgcatatgtcctctgccttcatacctctaagggtatgaagccgcatcgtacccctcctcgggcaacgtacgatgctaagttgtaccggtacggtcggaccataggtcacgacccaacttcatatgcaagtgaatcatgcaatgtatatggcatgctgtatttatcaatatacttcacttccttcacatacaatacaacctcaaataatactttatttgccttcagatacaataccaacctaaaataatatttcatttaccttcagatacaatatcaacctcaaataatacttcttttaccttcaagggtgtgaattaatctcatgagtcatactcgaatcataatcagcgtcaatatatgattgagcatcagtataatgcaagcaagtaaagcatcaccatagagtccaattatgaaagaatccaatacttctgaatattagagtgtaggcaatagaaataacaggtcagaacggaagcaaccaccgctacattcacttgccttcatcgaagaagaaaaatgtactaggcatgatctggagtgtagccacctgctagtgggcataaaatttagtacaaatatttcacaaacatttactaacgatcaacaaaacactcctacacttgaaaccaagacccagtggaaagactaccaccctaaaccacatgccatacagcagcaacactgtttgttaattttgtatctttaaaattaaacagtggtcatatcaaaaaaatactctaggagtatctacacaaaacactctacaacttcggtattcattgcataattaaattctgccatcaataagttctaaaacatctgacaagataactgactgaatctgttttagacatcagcctagttaacttcaaaattcgatatctcccaaactactgaaccagaaattatgaaattctgctgacagtaagaacttttatccctctacaaaagtctctatagttggaagagtcaattcggccatttactagataaaacccaccagtgaacagactcactcatttttgtgaggcaaacaggaacagccacagtaaaacaaacataactggagtttcataaatcatatgaatgcactctttaacaatctggaaagcttat

SEQ ID NO: 18441 - DNA, 1206 bp, Zea Mays
cccacatctaatccaaactctaatccttcaatccacatgatccacaacctccaaaagcacataattatagggaggaacaatgatcccatccttacctagggtttccccaagaaaatctgcaagagatggggatagaacatctccttgatcctctcttcctcttcaatccatcttgctcctcctcttattgatccttgctgcgtgggggagatctagagggaggaggaagcagtggagggcggctgcaaggggaagggggaggggcggccaagggtggggaaaagggggggttggcggccaagaaaagggaaaaagggagggggcgaccactagggttttgtgggagaaagaaacgacgcctcagatgtctcctgactttgcatccaatggcccacaactctttccctcatccacgcatcgaagatcaatttttggtcaatatttttttgggatattacactctatcccccttaaaaagaattcgtcctcgaattcgaccactccaagcaaaacactcaaggtaccccatatagcaccaccattcgaaacatgggtccattattgttcttaattaacacaagaacttctaccttggactaattgtctaaggaaactacacaacctgacatcaagcatgaaccaacatgtaatgaagctcaaaccaagtcatagatgcaatcaacactacgatttcacaacatcgaatttggatgcagccatacatcaacatcaatgtcttaaaacgacactcttttatgaaggggtaatatgcactaagcacaacctttaccaacttcaacaattcattttaagtcaatggtgaaacatccacaccagatgaatgtataagaagatcaaacacctcacctcacagcgccacaaaacaagtagttctattgaaacaaaactcctaatcttcctaaaccttgttcttgccataatgaaaagataatcatgtaatctaacatactttggaccccaccaaaagggagaaaatctacagaactaatggagaaataaagccaacaagaagccaataaaatcttgtgcggcacagttcatcaaagaaatgccaaaaactctacatagagcactggcagcccaacaacaacacaatatttgcttaacccatgtcactatacttcattcagaatctcaactaagaaaaatatccaactagtaaggttaacctacacataatataag

SEQ ID NO: 18442 - DNA, 356 bp, Zea Mays
ttttttcctacagtccacaaaactgcataaaaattcaggttagatcttatcccagcacccttttgagcctcgcactttctttcaataatctgcattgttgaatttgtgtgctttcgcgtcttttgttgctggttgcattgtgttcttccaccatttaaaccctagcgccgccaccatctcccgtttgatcacgccacaaaccgagtcaacattgtttccttgtttttctccttcggttacgtcaaaaaaaaacagaaaaaaacaaaccgagtcaacggccgtttccttgattttctccttcggttacgaaaaaaaaacaaaaaaaaaacaaaccgagtcaacgaccgcttccttgt

SEQ ID NO: 18443 - DNA, 774 bp, Zea Mays
ctggctctttccggaagccagtgcaccaaaatcgctcacgtcttcttatgtcaccaccgaacacatgaggtgtcgaggtcgatctgtttctctcgccgtcgatacaggagctcctgctcctcatccctcatggcctttcccagctatggtgatcaccctccatgccttcttcctcgagcaccaacagaagttcgggtcgctagccgccgtgctgctcgacttcctgcagcacatgtccagcctcatgtggccgtgcgcccagctccgtgcctccgtcctgggctgagcgtgcgagctcctctgtttggctcgtcgtcgttctctagctccttaccccacgctcagctgtttgtcgtcgtcatccggtcgcgcgacgaattgatagcaccggcactcgtcctttgtccgtgtcgtttaggccatggttttcttgtccgagtttcaaatccatggtttgttgctcccgtcatttagctcgccagacctgcagctctatataagtcaccctcccgtatcgtcatcgagcccgtcgaaccccgctcttccttgcttaacctcgtcgaaccccgaatcccggacgttaggcaaaaataagcgagatctgtgtgcatcgcttaccaagtgctcggtcgaagacttcaatcgaaagtcgtcgtcgttccgtgcgtcatcaaaaaatcccaaaagtccggtgaagacgaagctagcagcgtgttgcttaccaagtgctcgacacaagggctgaaccagaatccttgccgtgttcgcggatag

SEQ ID NO: 18444 - DNA, 2243 bp, Zea Mays
caaagtcaggagacatctgaggcatcatttctttctcccacaaaaccctagtggtcgccccccccttttatcccttttcttggccgccaaccccttcttttccctttacttggccgccgctcccccttcccctttgcagccgccctccactgcttcctcctctctctagatctccccccatgtagcaagtatcaagaagaggaggagcaagatggattgaagaggaagagaggatcaaggagatgttctacccccatctcttgcagattttcttgggggaaaccctaggtaaggatgggatccttgttcctctctataattatgtgcttttggaggttgtggatcatgtggattgaaggattagaagttggattagatgtggggttaggttttaatctcgaatttaatttctgcagaatggcagattcaacagtttctgttcataccggttttttgtagtcttagtggcctcaaaaaaataaaacgtctatatatgagttgtagataatttgaagatctttccttggacgcgaagaacacctcaatccgacatcaaaatcaaaagttattgcagtttgattatagcagtttttcagtctcataattctatgcagaatctgttctcttaagagttaggcaattttatcaatagaattaaactacgggttggtaaaataagttgtagataatttcataagctttccagattgttgaagagtgcattcatatgatttgtgaatctccagttatgtttgttttactgtgactgttcctgattgcctgacaaaaatgagcgggtctgttcactggtgggtttcatctagtaaatggccgaattgtctcttccaactatggagacttttgtagagggataaaagttattactgccagcagaacttaataatttttggttcagtagtttgggagatatcgaattttgaagttaactatgctgctgtctaaaatagattcagccagttatcttgtcagatgttttagaacttatagatggcagaatttaattatccattgaatacggaagttgtagagtattttgtgtagatactcctagagtatttgtttgatatcaccactgttttaattattggattctttcataattgagctctatgatgatgttttacttggttgtattatattgatgctctatcatatattgatgatgattatggttcaagtatgacccatgagattatttcaaacccctgaaggcagatgaagtcttatttgaggtttgcattgtatctaaaggcagacgaagtattatttgaggtttgcattgtatctgaaggcagataaagtattatttgaggtttgtattgtatctaaaggaagtgaaatttattgataaatgcagcatgccatatacattgcatgactcatttgcatctgaagttttgtcgtgacctatggtccgatcgtaccggtacaacttagactcgtatgttgctcgaggaggggtacgatgcagcttcatacccttagagatttgaaggcagaggacatatgcatacattgaagtgatatttgtagatgatgtggttttataccctcagaggtatgaagatagaggacctacacattgcattcctatgcatacattgaagtgatatttgcaggaattgttgatgcagggaagtgttatataacctattgtggttgttcgaggaaatgagatggtattggttatattgggactactgagttctatatctacaagaatttctgatcttgattgtgattcttttaaaatggtgatcaattcaatttgtggtttaaatatctcgtcaaaataattagcttgctgagatgtttcatctcactcttgcattactcaatgcaggtgcttgttgctcatccagggaagtgggaagtagcagcacatccaccttcactctcataataacgctgcttaggcgtagtcatgatttaattagaagcttcttgtcaaaggatgtttgtttctaactagttgtgcgcgggttaatttagttcatgtcgttatggttgtcttctcattgctagcagattattaatgtcgattatgttttcttatcatgatatatatttatactttgttgcttccccgtttatgcaattttcaaaggatatgctgtgaaattttatatacgaatgttagaggtgtagtttagtagcattctggggtgtttgtggatccggggtgttacagttggtatcaaagcataggctttagattcttg

SEQ ID NO: 18445 - DNA, 1645 bp, Zea Mays
ctttttttcccttttcttggccgccaacccccccttttccctttacttggccgcccctccccttcccctttgcagccgccctccactgcttcctcctccctctagatctcccccacgcatcaaggatcaagaagaggaggagcaagatggattgaagaggaagagaggatcaaggagatgttttgcccccatctcttgcatattttcttgggggaaaccctaggtaaggatgagatccttgttcctccctataattatgtgcttttggaggttgtggatcatgtggattgaaggattagaggttggattagatgtggggtcaggttttgatctcgaatttaatttctgcagaatggcagattcgatagtttttgttcatgccagttttctgtggtcttagtggcctcaaaaaataaaaatgctatatatgagtcgtagataatttgtagatctttctgtggacgtgaagaacacctcaatcggacatcagaattgaaagttattgcagtttgattataacagtttttcagtctcatagttctatgcagaatctgttctcttaagagttaggaaattttatcaacagaattaaactatgggttggtaaaataagttgtatataatttcataagcttttcagattgttaaagagtgcattcatatgatttgtgaaactccagttatgtttgttttactgtggttgttcctgtttgcctgacaaaaatgagcgggtctgttcactggtgggtttcatctagtaaatggccaaattggctcttcccactatggagacttttgtagagggataaaagttcttactgccagcagaatttaataatttttggttcagtagtttgggagatatcaaattttgaagttaactatgctgctgtctaaaacagattcagtcagttatcttgtcagatgttttagaacttatagatggcagaatttaattatccattgaataccgaagttgtagagtattttgtgtagatactcctagagtttttttatatcaccactgttttaattttaaagatacaaaattaacaaacagcgctgctgctgtatggcatgtggttcagggtgagagtctttccactgggtcttggtttcaagtgtaggagtgttttgttgattgttggcaaatgtttgtgaaatatttgtactatgttttatgtccgctagcaggtggctacacttcagatcatgcctagtacatttttattcttcgatgaaggcaagtgaatgtagcggtggttgctaccgttttgacctgttatttctatcacctacactataatattcagaattattggattctttcataattgagctctatgatgatgttttacttgattgtattatattgatgctctatcatatattgatgacaattgtggttcaagtatgacccatgagattaattcacacccctgaaggcagatgaagtcttatttgaggtttgcattgtatctaaaggcagacgaagtattatttgaggtttgcattgtatctgaaggcagataaagtattatttgaggtttgtattgtatctaaaggaagtgaaatttattgataaatgcagcatgccatatacattgcatgactcatttgcatctgaagttttgtcgtgacctat

SEQ ID NO: 18446 - DNA, 823 bp, Zea Mays
cttaacctcacataaagctagtccactacacccaaacgggacatttgctgagtacgttgatgtgtactcacccttgctttcacaaaacactaggttgactttggtgcaatctatgctcaggtaaggaaggtgtcgaggcggatccccaggagttccaggacgtcgatgagtttgaggattaggttagcgacctccccagtcagctgcctgtggtgggcttgtttacgttggctacgtttctattatgtgcacttgatgcatattatgtaaatgactctagtctttaatattcttacttacactttattgttattcaaagcatggtgctatgatgagtcatttatgtaatcattgtgtacgtggatttctgatcctggtacgtacatggttcgcattcggtttaccttccaaaaccgggtgttgggaccatgcttcatcgccgaaggtcctgcagaaagaaacagcttcggctgaagctgctcgtacgtgacgccgaaggcaccattcatgaagcttcggtattacagcatatccgaagatgaagggttgaaccgacttaaagatagaatgaccttttagcccataaaggtctgagtcattgttgtaaacttttatgaggggtatgattgtaattcctcacaggctgtgtcctgtgcctataaatagtgaacaatattcctttactgttcacgcgttcctgtaattgcaaacgcatcactcgggaattattgtttgtcaaggcaaaggtataaatgtacctaaacgttatattcaaacatcttagattcatataataagatatatgaatgatgttatttatttc

SEQ ID NO: 18447 - DNA, 171 bp, Zea Mays
gtcagtttttcatttttttttcatttttttcttttctaacctagtttggggttcatcttcttaatacaaagatacacaattctcctgtgtgtttgaggaaaaagcacaagttttatttatttatgtattgagaacacaaccaacaagataatacatgtttggaacaatttg

SEQ ID NO: 18448 - DNA, 436 bp, Zea Mays
atttcaaatttaaatttcatacgcatacgaagcgtcttatttcacgatcataaaaccaatagtaaaaatagcgaatcagctcaccgtaattaactcgactcaatatttgtaggaacgacggcagtctctggttgaagtcttcgatcgaacgcttgatgagcgatcggaatgtcgccttcttcagttcagcatccaactggcgagtactagagtagcatcagacgacctgatagcttgcacgaccacaagagtaagcagccgacggtgaggtcaaatgaggagcacggcctcacggccagagaagggctaaaactgacagctaagatgggatgtcgcaggcctgtgcagacaccgacgcagtggcacgaagcgagtcgtcgggccaagcataatggctaggggaggcgatggcgcgtgcgcatagaggacaggcgtg

SEQ ID NO: 18449 - DNA, 766 bp, Zea Mays
ccctagcattttttatcccccaccttggaaacagatgaattattggataaatttgctattgttctacctggttttgggaaactaatattttattatgatcatgttccaattgaaacatggagaaccacctgggacaacagtgctaccacaagggtggaatgggacgtccttgaccaagtaattaggaaagctagggagagattaccttacccggttaagggcaagcggggaggcgtcgctgcacagtatagggagatcctcgggtcaaactgtctgtaaagcttttcggacgagggattccaatgcttccttcttcctgaatctgtagcgggttttcttgaactagtggaactttggaaagacaacgtagtgctaccctgcctcgcttccttggtagaggtgtatggggttcgtacaaccccatggcaaatggataacacgacttgtgggtaaagatgcgcaacctctgtagagtgtaaaactggtatatcagccgtgctcacggttatgagcggctcggacactcacatgattaacttatggaattaaacttaatttgtcatatgcattgcattgtggatgttgttattaatttgatctcttatttaattgggttggtatctacttatacctagtaactgttaataaaattttgacaaactttaaaagcaatgctcagctttaaccatactctttggtaagccttacacttcacatgagctcccactttttgtaagttcatgcatattattccccacaacttatt

SEQ ID NO: 18450 - DNA, 919 bp, Zea Mays
ccacgtcacccggccgttagggttcgacccttggagctctcactggtggggtcgcctggctgtccggtggtgcaccggacaggtactgtagactgtccggtgtgccgtctcgcgcgtgcctgacttctgcgcgctctagcgcgcataatatgcctctgcaggtgaccgttggcgccgtagtagtcgttgctccgctggcacaccggacagtccggtgtgcaccggacactgtctggtgactcaccagacagtccggtgaattatagcggagcggattcccgaagctggcgagttcagagttgctctcccttggggcaccagacactgtccggtggtgcaccggacagtccggtgaattatagcggagctcctctgaaaaatcccgaaggtgaagagttgggcatcgagttccgtggtgcaccggacactgtccggtggcacaccggacagtctggtgcgccagaccaggggactcttcggtatacttggctcctttgttttgaacccctattcttagacttgtattggtttgttgtgaacctttggcacctgtaaagacttatggactagagcaaactagttagttcaataatttgtgttggccaattcaaccaccaaaatcatttaggaaaaaggtgtaagcctatttccctttcaatctccccctttttggtgattgatgccaacacaaaccaaagcaaatataaaagtgtagaattgaactagtttgcatattgtaagtgcaaaaggttacttaaaattgaaaccaatattttcataagatatgcaaggattgattttctttcttatttaacattttggaccacgcttgcaccacatattttgtttttgcaaaggttttggaaattcttttcaaagtcttttgcaaagagtcaaaggtaaatgaataagattcttg

SEQ ID NO: 18451 - DNA, 124 bp, Zea Mays
cttggttcttcatcctccttgtcctgatcatttgcatctcccccttgatcattgtcgtcatcttgaggtggctcatcttgttgatcttctccttcatcaacttgagcctcatcctcattttgag

SEQ ID NO: 18452 - DNA, 417 bp, Zea Mays
atttccctttcaccttcttttctctccaaactcacacctcttgttttccacatcaatagtttgtcaagtagtctttggaaggacaggaatgtgtgcgataccagttgatattgtaggggtccaatgaaaccgtccagaaagagctcctgcttcttctcatcgtcttcaacatccctaggagcatatcgagatagctgaataaatttgtccctatattcgctcatggacatacttccttgcttgagggatagaaactcctttcttttaatcttcatgagtcccgcaggaatatggtaattcctgaattgagtagagaattctgcttaggtaattgtgttgatggcggcatgagcagcgcaataccatcccaccaatccgcagctggacccgtaagacgacctgatgcgtacaacactt

SEQ ID NO: 18453 - DNA, 218 bp, Zea Mays
cgcccccccattctccccacctttggccgccgcctcccctctcatctcctccttttccaaactcttgcagccacacaccaaaccctagccgcccccccatctcctcctcccaaggtgcttttcgttgccgctcggatctacgtcgcgtggtgcaaatcttcgattgttttcagtggagggaagaagggaggaaggaaagggggacaacccaaggtgat

SEQ ID NO: 18454 - DNA, 225 bp, Zea Mays
aaaggaaccactacttaataatgttgttaatcagggagggtcaagtctagagaatttctatgttctagcttctcttggtgattgagcggtttaatttgttggggtgggctgagttacttatctcatttttgttcctgttgggtcatgaatgtgtttttaccagttttgcatttagattctactatgtgaattatctatctttatatcctgtatgaactacatgtt

SEQ ID NO: 18455 - DNA, 966 bp, Zea Mays
gttgggtcccctgatcgatgccagagttcatgaagaaattgttcaatgtatggcttcacctcttcaaggttggtcaatacatatagcatgatatggtgccactcttcatgtctcagggtcttggtggtcgaaccacttgcgcttccgagttggcctcgttgtcgtcatcattgtaacgagggggtggattattcacgctcgacagtttgtcaccatagtaagttgttgtgaagtttgacacctcctatagaatgtatgcctctataatggaagcctcaattttgcatttatttctacatttctttcaaatagtctttatacatctcttgatttgatagcaccaacgtccctgcatggcccccccattcgtgcctcatacgggagatgaagaatcaaatgctgcattagattgaagaagccgggtgtaaatatcttctcaagcttacacaataacacgagtgtcaatcttaccatgtctgcaatcatggttcgagataactcttttgcacaaagctagcggaagaaatagctcaactctgtaagcgctagccagacatgctcagggacatagcctcgaacaatcgcaggaagaatccatttaatccatatgtggaagtcatgactcttcatccctaagactctcagattagataagttcacccccctacttaggttagctgcatacccatcaggaaccatcaacatcttgatccactgaagtatttccttcctctaggccttgcttaggacgaaattggccttaggccttctccatgcctttccaccactaggcagcttcattgccgagtgttagcctggagacactcggcaaagaagcttctttgctgagtgccaaaggtcgacgctcgacaaagttaagagtcgtcagctatagacggctgctaacgaccatttgtcgagcgtcttcgttcgccgagcgtttggcactcagcaaactggtctttg

SEQ ID NO: 18456 - DNA, 561 bp, Zea Mays
cactaattactcccgaaaaatccccagaaactgctaatactgctgctgttcatccccctgaaaatctgtttttttggacagccacatacccggattcaaacggtgataactttcaatttataactccaaattgagcgcataaacactcgttggaaaggtaaggtaaagctctacatgattcccaaactgatttcccttaattcctcacgaaaaaacacagaaactgctagactactgctgttcacccaccacctaaaattctggacagcccccctctaccccaatcgcaaacgcaacctctaatcaattaaattgcagcgcaaatgaacaagggatgaacacaaaaatcaccttggattctccccctttccttcctcccttcttccctccaccaaaacgattgaagactcgcaccacgacgacggtgatccgagcggcaaggattggcaccttggggaggaggggattgagaggggggggcggctagggtttggtggctgcaagaattgagagaggaggagatgggcaggggggcggcagccaaggttgaagagaaatggg

SEQ ID NO: 18457 - DNA, 109 bp, Zea Mays
gctgaaattcagactctgaattctaccaagtctgaaatccagaaactctgttagctctactttggattagtttttctccatgttccaaatagctttagggctaggtgac

SEQ ID NO: 18458 - DNA, 367 bp, Zea Mays
aaaatatttccactaggattctccaacgcgatttagcatctacttattcacattccatatgaggcaaaggttggtagccaatataagtgaatgtatcacattgaaagagcactcaaatacctacgagccatggttggaaataaggcaaaagtagaaggatgcatcgtcgaagttttttttgttaaaggaggtttcatacttcacgagtttgtattttgcagaggaacacaatgtttatgctcctgtgatgtgatgcaatgtcgattatgaacctcctatcagtgatctcaaattttccaatggagaggcacaactgctagtaagggcgtgttctaccaccattgcatggacgaacgaatggctgcct

SEQ ID NO: 18459 - DNA, 338 bp, Zea Mays
gattagattggaacaaagatacatttcgcatcagtaaggcattcagaatccaatggcttggtggagcgagcaaatggaatcatccttacaggaataatgaggtcaatctttaatctaccaaagggaagatggctagataaattaataaaagtggtgtggaaccataacaccatagttttaagatcaacgggtttcactccatttaaacttttgtttggagatgaagcaataactctagaagaggtgaagacaggatcgataaggactctatcttcggcaaaggatgaagatgcttgcaaagtatcaaaagactcaatacaaggggtcatgctttagac

SEQ ID NO: 18460 - DNA, 352 bp, Zea Mays
cattgtcttctatcttcagttttcatgatgacaccttctcattacaccatcttcccattgttattatgacgaagctacattcgttactcttccatcattttacactgaatgtggtctgattctgaaactcctgcaatgcttcacaaatatgctgatgactaatggttagtccgtgtttttaggacctttggaagacgaaggctaccaacatgtacctctgtagcatggttcgtcgcttcgttgactagctctgtgcgtgtgttcggttacccgtatggagttggttcggcctgtactgtatgcacagatgtaactcgcgtatttgcggctacatgcgtggatacgggagaaa

SEQ ID NO: 18461 - DNA, 440 bp, Zea Mays
atccaatgtccgtgagcaaaaacattgcctagtcttgaatgagtataattattttgctatgaaagatgatgagcttgttagagacatgtattctcgtttgaatctaattatcaatgagctcaattctattggcattaataagctaggtgatgcggacattgtgaggaagattatctccctgctaccacaacaaagatatgggagcatcatcaccatccttcacaacatggaggatttgagcaacatgaccccgaccattgtgattgggaaaattgtagcctttgagatgtcacgaaaaatgagtcggggagaggagccaacttcctcaaggccatatgcttttgcatgtgataaaaggaagggcaaaaagaaggctcccactccaagttcctcaagtgaagaagaggaagaagaagaaagtgatgatgatgaagataatc

SEQ ID NO: 18462 - DNA, 1073 bp, Zea Mays
atagattttacataagaaattatattcttttaaataaatatgtgaagattatagatttattttattgtacttctaaaatgtggctatatatttgaattattttctttaataattattatgataatacatcttacatagtgagtttcatttgcttaaatggataaattaattaataaaaaagctttgcattcatgttgagtttttgtttgttgcaatttatgcttgaaatagaaaatttaacttagctctaaactggacttgaattttaatttaaaatagaaagcagaaataagaaataaaatataagctaatataatgtatcgatgtatgtgtggttagtttgtttgtacacgatgttctttagggaaagttgatacaaattagtatatcataataagatatttaagaaaatactactttcaactcgcgtgtgacacccaaaaaaataatttaaaatttaaataaaaatataatctaaaatttattaaaattggaggtctaatatgattagtataaattaacaacaatattattagaataaaagagacaagttagagtgggacatgccgaagctcaagggagagaagaagaagggggaacttgttcggttgccctactattataaattcaagaaacatttcaaagtgccttgcccaagaatggttagatacaatcgaagttatgtgcaacgacattcttggcaattattctaagaaagaagatcaactaatgactgcagccttcggcacccggccaaagcgaaggctaaaccgggtgatggatgctttggactttgagtatcctgattatgagcgactggatcgaggcaccgaaggacagaagagaaagagagttgccagcgtcctgaataaagatgatgaagaaaaactaaaaaagagaaaactcagacctgagtcgaagacagatgcttcgaagaaaagaaaggctgcggctccgaacagagggcaactgatatagaagaagaaaccgctgcaacgccttctgccaccgacgtggaggaaatcctaaaggtaatgactgaatctttgcctatcaagctaagtccactaggg

SEQ ID NO: 18463 - DNA, 500 bp, Zea Mays
aagaattgttactgtgacagaggttattgaagggacaccaccgcaagcttcggcttgaaggtaccagttgttgagagcacaacagcgaccaaaactacacctgtcgaagctgcagctgccgaagctccacgaccgaagatgtacatttagaaagcacaatttcaaacattgataagatacttctagacatggccacagaagaagctgccacagccactgaagaagccgtgctacagtacctgagaaggggaagaaaatagctgaagacgcttcagaagaggaaattttcaactttcaaaacttagttggacaagagttaacgaaggctgagaaagaagaattaaaagaatatgccatatcctgcggatatcaaccaggggcactactcttcggtggtgttgacgatgaaaagttggggtgcatccgagatcaaaccggagcgaaggttatcggtactctatcaaagagtattggtttcccaaagcttgagaccgacataa

SEQ ID NO: 18464 - DNA, 631 bp, Zea Mays
aaaacatgaagttataattgagggtctagaaagtaaaataaaagatcaagcagctgctcttgaaaagaaggatttcgagcttcggacaacagaaggtttattggcaaaagctgaagctaaaattgctcagttaaatacagatcttctttcaaagtcagaaagcttcgaacaggagaagtagaagttaaatgccaaatttaaaactgagatcgagaaaagttcgaatctgcaaaaatcgttgtcagatcttcaaaacaaatgttaggaattcagtagccgatgtatacaacgactgaagcagatcttcaattctgttggagctagctgcgaaaaatttagtccttcggctcaagacttgccaggagccttcgaacatatcgagggtgaaattgatgaccttgatgaaattatagccagacatggtgatttctgtgtcctggtagcttctcggggcatagctgttgccttactgaaatcaggttgtacacatggaaatattgttaataggtccaactttagtttgtcaccagcagatctagttgatattcccaatcttgcccgaagcataggaaacaagtttataaaactgatatggactaagggtggacgaagcatagctggtgacgaagct

SEQ ID NO: 18465 - DNA, 356 bp, Zea Mays
attaaatatcatttcttcttaaaagaaaagttcacataaataatataataaatattagcccaagaataaatattatgtttataaataatttttggattaattattatgatttttaaggttatttaaaaatgaatttcgaatttagaaaaaaaagaaaaaaaaaacacaaaacctaatcctacctgtttggcccatttggcccatgaaaccagccggcctcctcctaccctagccagccgcgccctgttccctctccctgctcccagccgccgccaagagccgtttcctccctctctcttctttctctctccttccctctgctctcacccgcccgcgcgcagctccaaggaccaagc

SEQ ID NO: 18466 - DNA, 460 bp, Zea Mays
gaaaagagtaataccactaatagaaataaattagtggcaaaagcaaggatttaatacctaatttgagagtttgaagaagagaagatatataaaatataaagaaagtttatatatctccaaaattagtaccttaaggtcacagtataactcaaagataaattgagcacaagatttgaatgtaaatttgaattcaagttggaattgggattagagaaaagaaaaaaaataaaaaaaagaaagaaacccctaactaggcctctgtacccaattcggcccaccagaaaccttctccgcgccagcccacaccgttcccgcgcgagactcttggccaccctctgccacatggggccctaccgtcagccacgccggaaccgcgcgcgttgctgtcaatcggggcccacgtgccagttccttcccctcacaccgcgcgctggttgctctacgtgtgggaccaacttgt

SEQ ID NO: 18467 - DNA, 2947 bp, Zea Mays
cgtcaacccaccttcttttcttcctattatttatttcctaactacaaaactatctcatccagacgccatgatgttgttagctcatttccaactagtgccgcttacatgtagggccatgtcgtcagctgcatctgctctggatccaacagatcgcatctgcctgaattcgacagacgttggatcccttcgcaacccaccctcgcataactgtcgggattctagctagtttgttaggatccgcccaccgaatacttaagcaagggtcacgatgccggttccttggacccgttttcctctctacagccgaactcgagccaccatcgccattgcagggaggacgacgccatgagagaccgagcatgttgcactcgagttcataccgtggaggaggttcgcaggggacctctggatccgtcagactacgtcgcacgacgacgagaagtctctgcatctatcgctggtgagtcgccttgagttggttcactgtatcattggctttgttttgcgcccactcaagatagaagcctggctcggagcgtcagggtcggacctcgctggtggccgtcgctgtggaatccacagtgcaccgccatctctcctcgcctcgtttttgtttttggtagatcacgttcctcgtggtttgccatcacctacaccacgtttgtgcaccgtctcattctcgggttagggtctctgtgcgggccgcatgcttcttgctagcgatgctgcatcaccatgggtgtccgccgtcgtcgccaggtgacgtcgggtaagggaagataagcatggaccgttcaatcggggcacgcaactgcgactagaagatggatccctgaccgttgttccggttgttgctgaaccagattagattgtgtttatttaaaacaagaaccgttagattgggatctagtggccagagtcgtgtaccgctttgggacaagtctcatctcatctaagccctctattctagatcgaacgtctgagataaatctgtacctcttcgccgcgcataaattccttgagagtcctcatgattctaggtattcagcccgtcatccatatcagtttgaaagtttatacaaattagtcctaaaaaatgtttttggccctgtggatttagaattttgaaaccgacgttcatgaagccccaaataattataaaagtgattctataatgaactttaggtatacaaataaatctagaaatcttaacttcgattttgatccgttcaagttgtgttaggttcatattaatttttacatacataataataacattgttttaattatactacatggtttaattaattaattgatgttaatttgctagataatctagttaatctaatttatagttctcacctacgcattttattaaaaaaatgttaatgattaataccaactcaaatatcttgatttaatacctgcttagtttaaatgcaatatctgttagatctcagctattagatttattgcgcctaaaatatcgttttatccataaattcttcggtttagctctgattttaatggttctcgaagccacgacctcgtagtagcacgtagattattattatacagtttgttcttatatttggtgtgatgttaattttatctatattctatttgtttgtattgctacgattagcagtgaggtcacgaggatctgaagaatcaccctagtaactggaatctcaagtgccaggcaagttgtgcccttgatcacttttgttacctaataatattctttattatcactattcaatgcataggtttaattttgatgggacccaataggtcaccctagtatgcttatcttaattaccttgtttatccctgaatcacttgggtagcttttgctattgctttacatggttttgggataatatcttgttatatccatgttccagttattttgttattttatttatgttcatgtcaagatcattaatgttaattggaacatgaagcttaacttgagaaacacgtgccaccacaagggtttaatgggacgcccttggccaactaactaggaaagctagtggaagactaccttacccgaaaggggcaagggcagtaggggattgcattcaaggaggttctcgggttgattttgctgcgatggcattcagacaggggattcttgcaagtgctcttcccataaactgtagcgggttttcggaagctagtggaactttataaaggcctcgtagtggatccctagccattcacctcggtagtgtctaagggtctagctaaccctgacgacatgggatacacgacttgtgggtacagggtacaacctctgcagagtgtaaaactggtatactagccgtgctcgcggttatgagcagctcaggactctccgatgattaatttatgtaacttaaactcaattttgtcatatgcatatgcatgggattatgtattaattttgttcttttactttatttaaggtttggtatttatttacatttagtaactgctaataaaattttgaccaactacttaaaagcaatgctcagctttaacccctattgttgatcagccttacacatcacataaactcccacctttggtgagttcatgccacattattccccacaacttgttgagcgatgaacatgtgtgagctcacccttgctgtctcacaccccccacaggagaagaacagatggttcaagtggagccacacatcgaggagttcgattcgatctaggtgttgtctcccagttgactttctggcgccaaggatggattctagatcctgttatatttatcttttattttgtaagacttccgctatgtaataaatactctgattattgtgacatttatcactatacactctgttattatatatgttatcttcttggcgcatgtatgagatgcacttggctttgttccttaaagtcgggtgtgacaaaacatgattaacctaaactgattc

SEQ ID NO: 18468 - DNA, 186 bp, Zea Mays
caaaaatcagagacaaagtgtgtctcatgtgatgaatcgagggggtaaaaagatggaagaggaatataaaggtcgtttgcttgttatatcaggagttataagatttcttttattgcaagcacttgcttttcgtggacatgatgaatcctctacctcaagcaataagtgaaactttttagagttgct

SEQ ID NO: 18469 - DNA, 584 bp, Zea Mays
gcaccgtgaagtttttccagcgtcgtggcttcccagttcctttcagccgcacgcgcgaattttctctgctcggtcttaatccccatcgcgtcgttgaccttgccggttgttgttgttcgtcgtcgcgtcgtgtgtgtagctctatatacgtcaccctctcgtatcgtcgtcaagcccgtcgaacctcgttcttccctattcgacctcgtcgaatcccaaatcccggacgttaggcaaaaaaagcaagatctgtgtgcatcgcttatcaagtgcttggtcgaagacttcaatcaaaggtcgtcgtcgttccatgcgtcatcaagaaatcccaagaatcaggtgaagacgaagttagcggcatgatattcaccaggtgctcgacaaaagctcgaacaagcaattgatcgtcatcctcgtctacgccaagatctgagaagattaggcacaaaagaaaataaatcagtatgcggccggagaattctcgatgtggacaaagaagaagcgcgattcgacgctgcactcaccctattttcggtgaaatgctgatctgaaaggcgtcgtcgatttcatggtttcaagtcgga

SEQ ID NO: 18470 - DNA, 504 bp, Zea Mays
gttaattaatcacgcgatgcggaagacgagccaagtcaaccccaagtgcgggctaatccacaggatgaagctgatggaccaacctgaagatggttaaatcaagcaaatgctcggtcgagggatactcatcaagcggacatcgcctaacaaacactaacctagtgttattcaggcaagccccgatgcatttgccacctccttgctgttttaaaatctttatcaccttatttgatgcattaggtgataggagttatgtgctaaaccattgatgcatttccttccttgaaaaattgattacccttccttgatacccttttcgaaaagaattttatgatgctttgcctttctttagcagacaaaaatgttttgttttaaaacaaaagtgatgcttcagtgggtgggaagttttcgaaaataaaacttgatggtggatccatcatggccgtgatgggttcaacatcggaaaagatgtacctctgccaggtaccaaactttgggttgaaa

SEQ ID NO: 18471 - DNA, 468 bp, Zea Mays
gtgcttgccacattattaatcttattgttaaatctggtttgaagcgcttgaagccttatcttaatgattttagaactgctattactttcttgaatgcttctaatcaacgtattgttgcatacaaaatggtttgtttgagtcagggtgttcgctcttgtaagtttggtgttgacatggatgttagatgaaattctacttacttgatgcataagcatattgttccatatagaagcacattttctatctttatccaaagcaaccatccactaagttcagatggttctcctttgttaactgataatcattggtacattgctgataagttgttgtctttttttgaactgttctatgactcaattgttgcactgtctagtctttactaccctacatctccattaatgttacatcatatactagaaaatggtagacatctaaatgcttttgagaatgatcatctgttcaaacaag

SEQ ID NO: 18472 - DNA, 62 bp, Zea Mays
ccttccttttctctgcaattgccctcgatcctttcctccacccgatgcgaatttctttcccc

SEQ ID NO: 18473 - DNA, 476 bp, Zea Mays
gcgaggggtggctgggcgcgcgcacggctggcgtctcgggtgcgacagagagagcaggggagagggaaagagaaagcaaggggaggagagagaaggtggcagcgcttggctgggagcaggggcgcagctcctagctgggccgaatgggccgattaggttaggtttttatttttttttattttttctattcccttttccaaatttgaaatacatttttaataaacctaaaaatcataataattaaaccaaaattatttataaataaaatatttatttttggactaatattattatatattatttactagtattttcatttaagacgaaatgctattaagtatccgaaaatcaatcatgcgcaatcaaaaattattccaaatgaaataaataatagacacttcaatgaaaaatttattaccatattaataaactaactgcattatatttatttaatgatttttatagtgtcacaaatc

SEQ ID NO: 18474 - DNA, 375 bp, Zea Mays
ccgccccctctctctccctctccttctcccccaagtgattgcagcaccacccctcaaccctagccgcccccccctcctcctctccatggtgcatcctccccgcttggtacccgtcgtgtgggtgcgagtcttccattggagtttggagggaggaagaaggaagaatggaaggaggaaaggaggaacccaaggtgattttaagatcattctttttagtatttgtgctgcaatccaattgtttacatgtttacctatgcgaatcggtataggtgctgtccagatttttttgtgggaggacgaacagcagtagttctagggatttctgggaatttttcgtgggcaattagtggggatcagtgggagaatcatgtagag

SEQ ID NO: 18475 - DNA, 268 bp, Zea Mays
attgattttgaatatggaatatcatttcttcttaaataaaaattcacataaataatataataaatattagtccaagaattaatatgttatttataaaaaattttggtttgattcttacgaattttatgattatttaaatatgtatttcgaaatttgaaaaagaaataaaaaaaagaaaaaaaacaaaacccaatctaacctagctggccgaatcggcccaccaaggcccaacagccggccgccgccccctgctaaccctagccgccgc

SEQ ID NO: 18476 - DNA, 955 bp, Zea Mays
cttccttgtcactgacgtgtggaccgtgactgctcctcgggcgcaaccggctgacgcgaatgcctctactctcgcggaggacttccccggcgtcacttccaggtgggccccacccgtcagagccatctcctcccttgcgcatgccataacagaattccgtgcaaggttagggaaagatccctattccactggaacccgcgcatgcaggacctcctcctctaccttatagcaagctctgcgcgtgctgtaaccacctctgccaggagcaccttgggtggttacaagtccgtggcctccgcttgcttcgtatagcaccatagtcaccccttgctataagccacgggctggcaccttgaataccccaccgtggacggagagaaagagcagaaagaggtagagagagaggacgccagcgggtgccaatcgatcgggcagcacctttggagctcgagcaattgctcaccggggcatagctctgccgtggagccgccatgaaccctggtcgactctccagatccgatccctaactttggtaagccccttgacactttcgcctcattcgtaggattgtgtggcaccgattggattagagattagggattggaggcgccggcaccaccaaccccgcgaacccgccgccgcagggagggcctatgcgccgccattcggccgcctgggttgtgggagcacatctgaccgctaatctggccaccaacggccaggattggggccccgtactggtttggcccagctcatctcggtcgttgatcgtcgggtcggcggacagagtccgatggcgatgatttaaaatccagaacagagattttagatccaatggctcgcagtgcgtaccggttcgatttaagtaaggaacagatccaagcactcgggtcgtgatcggacggtcgaccttacctgtaccccttcgcggcgccaattttacggattagcccct

SEQ ID NO: 18477 - DNA, 472 bp, Zea Mays
cattgttttgtcatgttcttaaaataattaaatacatatacttatagggttaagtgtcctagcctaaggaaaagaggtattttaatttggttcctctgaaattgactaaagtatgatctttaagtggattataaattagagtaaaagttgagttagttatctctttaatatccttactcatatagtttacataatcagcatagaatatagctttacatactttaaccatgaagatcttccataaatcataactcctcaaccgtaactccgaatttagcgattcttgttcccgcgatctcgtagcaatgtgtagaccattattatgaaatttattcttatgtttagtgggatgttaattttgtctataccatgtttgtttgtattgctacaactagctcgaggtcacgagtcacctaaaggtcatcctggtacctggaatctcaagtcccagacatgttgtgtccttgatcac

SEQ ID NO: 18478 - DNA, 487 bp, Zea Mays
attaaattatggaactaaattcaatttgtcatttgcattgcatgagatttattattaattttgttctattattattatggtttggtatttatttacatttagtaactgctaataaaatttgaacaatttattaaaagcatgctcaactttaacccctattattgatcagctttacacttcacatgaactcccaactttggtgagttcatgcacattattccccacaacttgttgagcgatgaacatatgtgagctcacccttgttgtctcacaccccccacaggtcaagaacaggtaccacatgatgaggtgcatggaggatgctgcgatgtgttcatgagaggtctaggtcgtcgtctccagtcaactttgggttgttggatcattgtctccttatgatgtatttatttatttattttgtacagaactcctattctatagtaaagttgtaacatacgtttctgtaccatgattcatcatgtgtgag

SEQ ID NO: 18479 - DNA, 496 bp, Zea Mays
ttacatactttaatcatgaagatcttccataaatcataactccttaaccgttacttcgaatttagcaattcttgttcccgcgatctcgtagcaacgcgtagatcattattatgcaatttattcttatgtttggtgggatgttaattttgtctataccatttgtttgtattgctatgactagcgcgaggtcacgagtcacctaaaggtcatcctggtacctgcaatctcaagtcccaagcaagttgtgcccttgatcacttttattacccaataatgttctttattatcacttactcatgcataggcttaattttgttgggacccaataggtcaccctagtttggttatctttttaccttgttcacccctgaattatttgggtagttttgctattgctctatatggttttggaattaatattacattatgtccatgttccaattattttgttattttatttattgttccatgtcaaaatcattatttttaattggaa

SEQ ID NO: 18480 - DNA, 294 bp, Zea Mays
gaataattaggcccagccatttgttagatggcagctgggtgttagagaagttttaggaggcttatcctccctggagcttatctccttaataatctcctaagttgttccctggagcttatcttcttaataatctcctaagttattaggccccagagctataagggtgcctcagattgtaatagggttttttatcaaaagaagtcgcacctgtgtgggcggctgctggatcacggtggcgacccccacgcgccctggtgatcgtgttcctcagccgcctcgctgcgtgccctattc

SEQ ID NO: 18481 - DNA, 214 bp, Zea Mays
gttttttttctttttttcgaatttcctttttagtgtaacaaatatatatatactctctaaaaataatagtttataaataaaatacataatttttgaatagattctatttaaatcaaacgtgtgtcacaataaaacaataaaagtgagatttttgcaaataattatatacaaaatgattaaccatatcaaaatacatggttccctaaatattttt

SEQ ID NO: 18482 - DNA, 423 bp, Zea Mays
agaagaagcggactatcccctagcggtggctaggagcaggagagaaggggaggcgcggtcggctgggaatgttgggccaagtgggccaaatccggccagggtagattagggttttgtttttttttctctttttttcgaatttcctttttagtgtaacaaatatatatatatatatatactctctgaaaataatagtttataaataaaatacataatttttgaatagattctatttaaatcaaacgtgtgtcacaataaaaacaataaaagtgagatttttgcaaataattatatacaaaatgattaaccatatcaaaatacatggttccctaaatatttttatttttggactaatattatcatatatattatttactaggattttcatttaagacgaaatgctattcaatatctgaaaatcaa

SEQ ID NO: 18483 - DNA, 394 bp, Zea Mays
atttttttgaggccactaagactatggaaaacaggaatgaacagaaacggtagaatctgccattccgcagaaaactaaattcgagatcaaaacctaaccccacatctaatccaacctctaatcctttaatccccatgatccacaacctccaaaagcacataattacagggaggaacaaggatttcaacatacctagggttttccccaagaaaatcttcaataagagatggggaagaacatctccttgatcctctcttcctcttcaattcaacgtgcccctcctcttctcgatccttgctgcgtgggggggatctagagggaggagggagccatggagagggtagggggcggctgccaatggggaggagagcaagagagggagggggcggctgca

SEQ ID NO: 18484 - DNA, 1068 bp, Zea Mays
ctctaccacctcatactcctcacatcctcattttattcaagtaaccattgttgagatgccttcgtggaattcatacattgacacggctaaagacacagtgattgagttgttgcaacaaactataatggatggggcgtcaaagcgtacctccgagtcttccacatcaagaagccgaaggacacagcatcagagctacatcaatccggaccatgaagtcgcccacgactggttgatactagaccactttaacgaccaatgcatctacctgctgctctacttttgttgaaggtttcacatgtgaaggagtttatttcttcaaatcttaggaatgttgggtgggtattcccctagttcactcttagaaccaatgcactcaactccagcaatttctccccaccaccagaaatgcaccgctgccctacacatgcttgcctacaacaatgttgctaactccattgatgagtacaagaatatagggaaaagttctgcctcatagtacctcaaactattctacggaggtgttcttgcatgtttcggtgaggagtatattcgttgtcccagtgttgacaatctcaaacgactgctagataagggggagaaatttgggttcgttggaatgactgggagtacaaattgcaggcattagaagtggtggaactatcccattagatggagaggacagtttacaagaggtacattggatcccctccatcatgctttaggcgattgccttgtatgacttgtagattcaacatgctttttttggtggcgaggtttcaaacaacgatgtcaacgtgttaaccagtcatcgttgttcactaacgtgttcaagggtgaagcatcaaatgtgaactttatggtgaatggtcacaagtacaactatgggtactaccttgccgatggtatctacactcggttagtgtttgtgaagacaattctcctcctacagtcttcaaagtagagaatgtttgcttcatgccaggaggacatacaaatggacgtagggagagcatgatcaggtctaaaataatttaatagggtatattggatctgtatcatgagagttag

SEQ ID NO: 18485 - DNA, 185 bp, Zea Mays
agaccattgacatgatgttttcttggttccattcgattgtgaacaagatgtgtaccaacaaggcacaactaccatatgttgatcatgagagagcgctcaagctaaaccatgctctggatcagagggtttgggaggtgaaggtcttgatgattatcgagtcgcccaactacgaggctttcaccgtg

SEQ ID NO: 18486 - DNA, 395 bp, Zea Mays
gcgggtcgcatggcgtcgcgtggcacaggggcgcggtggcaagcggtcgggcgcctgggtgttggcggctgggagatagagcagggtgggcgcgacttagggttaggcgcggccgccttcatgggcctaatgggccgcttcggctcggtagattaggattaggttttgtttttttttctttttcttttttttctaatttcgaaatacctattcaaataatcataaaatttataataatcaaaccaaaattatttataaataaaatataaattcttggactaatatttattatattatttatgtgaattttcatttaagagaaatgatattccatattcaaaatcaatcatgagcattcaaaaatcattccaaaagcaagtaaataacgaacactt

SEQ ID NO: 18487 - DNA, 391 bp, Zea Mays
gtcgcatggcgtcgcgtggcacaggggcgcggtggcaagcggtcgggcgcctgggtgttggcggctgggagatagagcagggtgggcgcggcttagggttaggcgcggccgccttcatgggcctaatgggccacttcggctcggtagattaggattaggttttgtttttttttctttttcttttttttctaatttcgaaatacctattcaaataatcataaaatttataataatcaaactgaaattatttataaataaaatataaattcttggactaatatttattatattatttatgtgaattttcatttaagagaaatgatattccatattcaaaatcaatcatgagcattcaaaaatcattccaaaagcaagtaaataacgaacactt

SEQ ID NO: 18488 - DNA, 2100 bp, Zea Mays
cccaagtacccaaccctggttagggttagggctttttgtctaatagagacaacctttcagttggatgactcttttgatgcaccacaaaaaattgaggttagataggcattgaaagggatgagaggggtaaggcgatgggccttgatggtatctcaattgaggtatggagatgcctcaggcaaccaagttgttcatctatatcttctggtcgaacaagacgtctgatgagcggagaaatatattagtatcgatctatatgaattagggagatattcaaagatgtactgattattagggaattaaatttacgagctgtactatgaagttatggagagagttatcaagcatcgtctaagaggaataacgaggatctctttgaaccaatttggcttcatgcccggaaggtaaccattgaagccattattttaataagacagtaatggagcaatatagggaatgggaaaaggatcgacccttggttttcattgacttggagaaggcttatcataaaatactaaggaatgttatgtgatgggcatgtacaacaatgttgtgactaatgttcaaacaagtggtggggacacaaatgatttctcaattagaatatgaccacatcaaggatcagctttgagcccttacctttttgccttggtgatggataaggtcacaagggacatataagatgatatcccttggtgtatgttttttgcggacgatgtattactagttgatgaaagttgggaaggagtaaataggaagctagagttctggcaggagactctagaatccaaaggttttagtattagttgaactaaagcaaattattcgagatgtgatttttgcactacacataaggaaggagatgttagtttggaaggtcaagtagtgcctaagaaggacacctttatgtatttagaatcaatgctacagagacacatggatattgatgaagatgttagccatataatcaaagcatggtggattaaatggcatcaatcatctgacgttctatatgacaagagggtaccacagaagctaaaagacacattttattggacgacgattaggcctgctatgttgtatggtgcaaaatgttggcctacaaaaagacaacatgttcaacagataagtgttgcagaaatgcttatgctacattggatttatggccctataaaagagatcgagtccgaaacgatgatatacgtgatagagcaagggtaacataaattgaagaaaagcttttcgaacatcaggggaaatgatttggacatgtccaacactagtgcgtagtgggatcctaaggtgtgatagcaatgggaagagtccctgttttcaagttggcgactagtcgtctggtcggtcctgggagctcgacttggggggctggctcaacttttctggcaagtcgggcgacttgtcaacgaccggaaattctcagtcgactagtcgtcgacttggtctggcaagtcggccgacttgtgccctagttcggcccaagcagcccaaaggcccattacacaacataaaccctaacccccaacacctgaagccgcctccagccattctgcacgccgcccacctctgcacgccgccggccgcccctcctctgcacgccactggccgcccctcctctgcacgtcgctggccgcctttgcagtctggacgacccctcctctgcacgcctctctaaggctgcccctcaagctctggtgactggtgacttggcgagtcctgctccgcctctaccgccctcgcagcaagctcgcccggcctctgctcaccctccctcgccctctcatcaatctgcaggaggccttgaagagatggaagatgcatctgcagatcgaccacaaggggagtctggaagccagcaaccatacgatccagctaaagatcctaagagaggcaaaatcgaaggatccagcatggaactattgttattggccggatttgaacaaaaaagatgtggtgaagtgcatcctttgtggcaaaattgttcatgcaggtgttagaaggttgaagcagcaccttgttggtggtcatggtgatgttgctaagtgcctgaagacaacatcgacaatcagcaaagagatgagtgat

SEQ ID NO: 18489 - DNA, 264 bp, Zea Mays
tggaactcctcaaagtcctccatgttgcctgcatttcctcctgagcactgattgcaatggggacaacctagcgtggggtggttttaaagcaagggtgagtacacatcaatgtactcagcaaatgacccgtttggctaaagtggactagttgtatgtggagttaaggttaaagcgagtgtttttagttggtcaagtatttattactagtagtaagccaagttttagcaataaacccagttattacccaaaagtactccctccaag

SEQ ID NO: 18490 - DNA, 2521 bp, Zea Mays
ttgatgagctagatgatgaagaggctccatacgtcacgctaaagaacatgtctgttggtcacttgttctcaaaagctatgaatcaagaacaaggcaacacaaatattaatggttaaagaccttcgtccttcgaagcattatctcccttaggatataatgatcttcggacgaaggtcatgaaggacataccttcttcattgcaatatacagagagataaacatgatcgtatggaacatagagaaaatatgaataatcattttagatcattagattattcatattattattaaatatctataaacaaacatcaatgatattaaattacatatgtaccttcggcttgatagaaggtaaaaatccaagagtgacgtgcaagtgattacaagtcagcgtgaacagtacagtgttactgttcatctatttataggcatatgacgcagcctgaccaaaattacattcatgtccctgacatttactataagtcaaaaggtaagttgtcgtggactaaatagtcttttcccctttaggtcggtttcattctccaccattgtgccaagccgaagcttcttcatccacagcttcgaaactggttcatccttcttccggatcgcgtctttcataccatgtacacattcatctcaaagtcgaagcttcctgtggcagtatattatactggaaaacatgttagtcgtgttgttgaggaactttgaaagatgaagcccccaacagtagcccctcgtagtattaatttgtttttgtatctaacaaattcagactgcgacgtgaacgaaggcctttagccgaaggtccaaaaaaacaccttcccttagttagaatagcgaaagccaatgacaaatggggcctgccaagttgcaatgcactaggtatataaacagatatccacagcggcagcatttgttgcgccatttcagttgattgtgctgttttctcaaattttaattctcttgccatcagctatcgcttgacttgcaagcttcgttatatacacaagtgcgtgttgaatgtctgaagagaagaagatgtctgatgagaagaaggttatggaccctgctcttgctggattttacgaagctatggaaaaaacgaacacagagaagatcacaaacgaaataatggcagatttgtctgaaaattctgacgatagtgatgactatgatgtgaaaagtggggatgaagatttcgaagatcggccctagtggccaagccataccatcttcggaaagtcgtccattaaacagagtcaaactgacgccatgaagggaagatactttcgtgacatgtctattgtaagggttggaggggacagcaccgcccctacacctgaagaaaatgaggttgttgtctacagaagctttatgaaggcgggtcttcggttcccattgagcagatttttgtttgaagttttgaagacatttgaaatcttccttcatcaaatcactcccgaagctataattagaatgggtatttttgtttgggccatgaggagccaagggctggagctgagcgcgaagtgcttctgcaacatgcatactgtacgagacgaaggccactagtaaagagcaatatcacaacaacatcagttgttatggcttcattcctcgttctgatgtgagttatcccgttccaacctttcgaaaaaggtggccccggagcctggatggaggaatggttttatgtcaagaataatctgattgaaagggaagacataaaggggattattcaacgccccatctggtctcgcttcggccttcgaaggccgaccactgcgcttgaaaatgataccgaagcatgccagaaggctttcaataatgtttgcgccttcattggtatgagagatctggttcaagagcacatagcctacagggtgtggccacttgtcgataagtgggagatgtcgaaggagactgctgccgggtccagtcaggttggcctggtttacttgaaatacaccttcaggtacagagaccggtttgacgaaccaaacgatgaatggctgaaatgtattgaggctactagcgacgagttacttggggcatacactagagccaaagatgatgctcttacctcagccttcggaggtcgaggcaagaaaaggctgaacagggtttttgacgttattggcttcgtgtatccaaactacacttacccctcgcgaaagcaggggaagaaaaggaaaactagcgcctcggccacttctgctgcgccgaacaacaagaaaattaaggtcctgacccaccggccaagatacattgagacgtgtaaagtcctaaaatttgtataaaaaaataaacacatgaatttacataaaagtgttttgggattatggaacctttggagatcatttgatttttttatgtgtgcatattcaagtaagggaaataacaaacaaatttagaaatatatatatatacacatatgtctaatcttgatatctaaataagagtattttctcgtaaaagtaattatatactataaggtatttcctcataaaatataata

SEQ ID NO: 18491 - DNA, 247 bp, Zea Mays
gcttccttggtagaggtgtatggggcccgtacaaccccgtggtagatgggtaacatgacttgtgggtaaagatgtgcaacctttacaaagtgtaaaactggtatatcagctgtgctcacaatcatgagcagctcggaccttcacatgattaatttatggaactaaatttaatttgtcatatgcattgcatcgcgggtgctggtattacttttgttctactacttaattgggttggtatttacttata

SEQ ID NO: 18492 - DNA, 137 bp, Zea Mays
cgacatctctgtttccctccccctgctagctgcaagctgccgtgccctggtggctggtgttcacctacgtcgtccgaccttcaccaagcgcgtgcctgtctgcgctcgttcatagccacgtcacgccgatctgctcg

SEQ ID NO: 18493 - DNA, 188 bp, Zea Mays
acctactcgactcccaagcaaactccctaatccgtgtcctgctcgctgtcgaccctcggcaccaccagcccaccttcccttgcgcacatctccacagaccctgcctcatcacgtgtgtgcgttatcgatcttgtcgtcgttctgtgcatcatcaagaaatagaaagcgtcgggtgaagacgaagctag

SEQ ID NO: 18494 - DNA, 323 bp, Zea Mays
gaaggtcgtagccgccgtccgtgttgccgaccgggttatgcccccaggaacggcggttttcgtcaacgggttatgccccctgttgccgagtagagagaggtaggagatggagataaaactttcttgttctcatcatgggtgcttacaggggtatataaagccataggccagggctactaaaggaagccactaatcactcttattcccttctaaatctatcccagattattaaaggaaagccatcaatcactaatcactcttattcccttctaaatctagcccggactaataaaggaaagccatcaatcacagatcactcctat

SEQ ID NO: 18495 - DNA, 750 bp, Zea Mays
ggcatttctgctggtgactattgtccagatattaaactcactgcaagggtttatctggtggctatcactcatgatatggccatctgctgcacaagggttgcccaagacttaatgtttaggatgccaaatctccatggtgctttggttggcaagcgtttgattcttgaatgtcctggaacatttcttctaacttgtgaagccaagccatgtagcactatgttttcctaatcacaagttttggtggttgacagtgtgattcaatatataggcatgcctataataccaactgaatttgttgctactacctttagagcttattatagtgttgtaattgatgcggtttgcacatcttcattgtcatcaagaatggaatataaacccgttatgactttaaaaagaacaataagagataacaataagacgatgcattcatgttctgtataagctaatctatcctagttggttttttgatgtcttagaagttagaaactgttatcgttgttgtgtcatgtgtcacagctatcttctatatgttaaaagaacttgaccagggagggaaagaccgccctcccgatattatattaagagaccgaaacatggtcttggctgagaaaatcctcgaaccctgccccccatcactagcggtctagccggagagtggcgcgcagtacataacctaggagcgggcggggtacaacgaggggattttttttaaccaagcccgaacttcgcccccgagggggatcgaac

SEQ ID NO: 18496 - DNA, 333 bp, Zea Mays
cacaaatatcataaatgtacttattacatagcggaagtcttacaaaataaatgataaatataaaacaaactaagtattatttccatggcaccacaaagctgactgggagacgccacctagatcaagtcgaactcttcattgtgtggctcctcttcgaccatctgctcttctcctatgggggtgtgagacagcaagagtgagctcacatatgttcatcgctcaacaagttgtggggaataatgtgtatgaacttaccaaagatgggagttcatgtgaaatgtaaggctgatcaataaaataaaggttgaagctgagcattgcttttataagttg

SEQ ID NO: 18497 - DNA, 446 bp, Zea Mays
gtgaaatccatcttctcttagaatagaaaaggtaagaataatcagagtagaatagaataaggtgagacaggatcaagataagtgtagacagaatcggagtaaggtaagtaggtaagggttttgtccatttctatttaggtttcatcctacagtcaatatttgatctgataccacttctgtcacacctggatttaagggacaaagccgggtgcatctcatatatgcgccaaggaagaacaacacatataataacagagtgcatagagataaatgtcacaaatatcataaatgtacttattacatagcggaagtcttacaaaataaatgataaatataaaacgaactaagtattatttccctggcgccacaaagctgactgggagatgccacctagatcaagtcaaactcttcattgtgtggctcctcttcgaccacatgctcttctc

SEQ ID NO: 18498 - DNA, 413 bp, Zea Mays
ggaagctccagtgcagggatccctcgcctgaccgccattgtagcaaaatcaacccaaggacctccccacactgaccactcctctactgcccttgccactatcgagtaaggtagtcatccactagctttcctagttaatcagccaagggtgttccattaaacccttgtggtagcactgttttcccgggtggttctccatgttccgattaacataatgatcttatcatgaacagtaaataataaactgataataaaatgtgtaaacatgagtagtgtatatctctatacccaaaaccacataaagcaatagcatgtactacccaaaaattcagtggtaagacaaggtataaagatagccaaactagggtaacctattgggtcccatcaaaattaacctatgcagatcattatgat

SEQ ID NO: 18499 - DNA, 433 bp, Zea Mays
cacaagtgtaatatatcaaaagacaatgcaataaaggcataaatgagagtgtcataactttattacatcatctagacttaagagacttaaatagtatcataatcaaagtacatcagaaataacatgggcaatctcccacatgaagatgaccggagcatcgctagactcagaactcatcaacatcttcatcgaagtcttcctcatcaccttctgatcaaaatattagcaaggggtgagatcacttatggtgggggctcaacaagtgggaggagttatgcaaggttaacaaggtaggctatggttaagcagtaagcattttagttggtcaatattttattaacaacacccaacttactaattgtaagtgtatcccaaaatatcctaattaatcataagcatgtgactatatcaaaagcacttaagtgaaaccact

SEQ ID NO: 18500 - DNA, 372 bp, Zea Mays
aaagggggagaaaataaaggccaaagcgataaatggatcagctaccacttgagagattttgaaaatagtagaatagagcttgcattgtctcttttgtcaaaagttggcctcttgtggggagaagtgttgattatgggaaaaagggggagttttcaattttctttggaaagcctctctttatgtctctaccagtggatttgacttagagataggattttgaggttgatttgcaaaaacaaaccaagtggtggcaaaggatgatccatatatgccaaattgaatcaaaataaatttgagtttttatttgaaatgatattgcacttgttctagttgctttatgttgtgttggcataaatcaccaaaaagggggag

SEQ ID NO: 18501 - DNA, 1057 bp, Zea Mays
tttactcacaccgcaccctccccatggctggcttctcccaagccgccgccgccccctgctaactccttcctctcccctattctctctcctcccttcttctctctctcacgctcgcgcctgaaaccgccgaagccctgcaccgtcgcgcagccagggagccggccgagcagcgcccgcccgaccgagcgtcccgagccccgcgtgagccccgatggcgccctgcaccgaccggctgcgacgacaggcacgccaaccgaggctgacccacccccgcggcccagaagccgtgcgcgcgcgccagccgacccgacgccgcgacggtccctgcacctgagcgacgtccgagcccgactacagcgccgcgatgcccgcgcaccgaacacccgagccgcaccggccacgacgtccatcaagccgcgccatgaatgtcccgcgtccgttactccctccctattactctctccctcactccattgatgtcgaggaagaaacggacccatcaatggcgccatgaagtccgacggcgcccattgaacagccggccacccctccctctctctggccgactctccctcttccctcctgctctctataaaaggcagcagagcctctctcccttctcctgcctaccaagctcaccccatctctctagctcgccagtacactgctcgacgccgtcgtttgttgccgttcgtcgccggagttcacggagcccgcagttcgtcgccggagccacgcactcgccgtccgtagtcgagccctgctcttcacccggccaaaaccctgttgagtcgtccctgtcgcactcacgaacccaaggttgaagacgacccaaattattttgtgtatcttataaaagtactttttgattcgattcatgagttgtatattttgtttgttgtaatataaacacgtgtgattcgcaatttatgtgtatgtgcgttatagaatttttggtagagatatgcgattgttagtacaccattatatttcatgttattcgtggcgatgatttttggattagagaaatatgacgagaaatggtgataaaaaagat

SEQ ID NO: 18502 - DNA, 275 bp, Zea Mays
cgcccctcccctctctcttccactcttgcagccgccccaatccctctccttcttccccaagtgattgcaatgccacccctcaaccctagcccccccctcttcctcatcaaggtggagcctccccgcttggtgtccgtcgtgtgggtgcgagtcttccatgggagtttggagggaggaagaaggaagaaaagaaggaggaaaggaggaacctaaggtgattttcgtgatcattttgttgtatttgtgctgcaattcaattggttacatgtttacct

SEQ ID NO: 18503 - DNA, 1561 bp, Zea Mays
cgagaatagtaataataatgcagatttgtttcaaatgtctacatatcattggaacacattacttgctactcaatgtgatgttcaattcatccaacataaactaagacaacaacatcaacacacccaacaatagttcaattcacccaaccacaactcggttcactttttaagttgcttcaacagacatctcttcctcagaatcaatggaagtgccaataaggactcgtacttgcgcgcatcacctgttaataataatatagccaatagaaatcaaacatgaagtttttttctgaaaaactgaaacttaccgccacataagcctcccatacagaatcactatcgacggtgatagcaagataattgttgtctatattgattgatgaagagaggagtacatgcgcacatatttatagagggacagagaggtaggagatctcaggtttatagaaacagtaccctgagatctcctggaatggaaggaaactatctctgcccctaaatgggaggattgaatccatatcttcctatatgcggctgtagcttcctatatgtggctgtagctagaaaggcaaggatgcctgcacatgtatggtagggtatcctgcgcctatatggcaggagacacaagtctgatatatcagctaacagacggatatcttgttcttgttccaatcccaaccaaagccacttgtaatgcacaattgtttgaaaaaaagaaacgtggagaaactcaataatctgaaaaactacaagcaaagttacaataatctgaattttcagaatgctgtgcggatttagtacacgataaagttacaataatcgtgtgttagatttaacggccgcgtgatgaacaaatataatgatgatattagttagcgatcgagcgagcgagtggtttgcactgtcttgtctagctatatatatgtgtgtgtccatgaataggacgcaatcatgcactagctggtgccttttaacaagaaaataatcaacagataaatcctctctgccgagagtagctaggtcttctctggaagataatcaatgtctgtactatttttttatcgtgtactcatccatttccaagcacgcacgtgtactaaatccacacagcatgtactctattgtgaattttcagaatgttgtgtaggtttcttgtgcttggatgtgaattctggcaggtggcgtttgctggacaaatcagttactcctccactccacagtccacaccactgcaccgctggtaacgcacgcaggtaagcggccattcttgtgctgtgctgcccagactgacccagaaagacgcaggtagatggtaaccgcagaaagacgcaggtaggcggctgtgctagaaagagatctggtggccggggagaaggcgaggacgagggacagaaaagcagcaactcaccatggcctcgacgaactgccggtgcagctcctccgtccaccgtagacgctcgggcggcgctcaggcgtgcggcgctcgggaggagacggcgcgggcgtgtagcggggctcgggaagagacggcgcgggcgtgtagcgcggggctcgggaggag

SEQ ID NO: 18504 - DNA, 603 bp, Zea Mays
atcgcaaatctctaccaaaaaatccataacgcacatacacgtgtatttcggaccacacatgttcatattacaacaactaaatatacaattcatgaatcgaatcaaaagtaatttataaaatattttgggtcgtcttcaaccttgagtttgcacgtgtgacggggagagtttgacgggggttcggcctggtggagaagagtaggggctcgacttcagatggcggatggcgtagctctggcgaactccatgggctccggcgatgacgaacttcggcgacggcggcggtggctctaacggcgaggagagtgagagagatgggggcgagtttgggtaggggagaagtgagagagagctctgctgccctcttatagagagagggaaggggagaaagggacgtcggcgtcatcaaggaagccatcaatggcgctgctgttacctgctcgtaatggagaggaggaatgagggggaggaagaaacggatgcacgaagtccattaatcgcaaaaaatgaaacggtcgcgggcgtgcagtcgggcgcgctgggcgcggcttggggcacgcgcgcgtcgcgcggcggtgatgcgcgcagggagctcggcggctc

SEQ ID NO: 18505 - DNA, 182 bp, Zea Mays
cacccttggccgcccctaccccttccccttgcagccgccctccacttcttcctcctccctctagatctccccccacgcagcaaggatcgagatgaggaggagcaagatggattgaagaggaagagaggatcaaggagatgttctacccccatctcttgcagattttcttggggaaaccctag

SEQ ID NO: 18506 - DNA, 1879 bp, Zea Mays
cagaaagttattgcagtttgattatatcagttttttagtctcataattctgtgcagaatctgttctcttaagagttaggcaattttatcaacagaattaaaatgtgggttggtaaaagaagttgtagataatttcataagctttccagattgttaaagagtgcattcatatgatttatgaaactccagttatgtttgttttactgtggctgttgctgtttgcctgacaaaaatgagcgggtctgttcactggtaggtttcatctagtaaatggccgaattggctcttcaactatggagacttttgtagagggataaaagttcttactgtcagcagaatttcataatttttggttcagtagtttgggagatatcgaattttgaagttaactaggctgctgtctaaaacagattcagtcagttatcttgtcagatgttttagaacttattgatgacagaatttaattatccattgaataccgaagttgtagagtgttttgtgtagatactcctagagtatttttttgatatcaccactgttttaattttaaagatacaaaattaacaaacagtgttgctgttgtatggcatgtggtttagggtgggagtctttccactgggtcttggtttcaagtgtaggagtgttttgttgatcgttggcaaatgtttgtgaaatatttgtactaagttttatgcccactagcaggtggctacactccagatcatgcctagtacatttttcttcttcgatgaaggcaagtgaatgtagtggtggttgcttccgttctgacctgttatttctattgcctacactctaatattcagaagtatcagattatttcataattggactctatggtgattctttacttgcttgcattatactgatgctcaatcatatattgatgatgattatggttcgagtatgactcatgagattaattcacacccctgaaggtaaatgaagtattatttgaggctggtattgtatctgaaggtaaatgaagtattatttgaggttggtattgtatctgaaggtaaatgaagtattatttgaggttggtattgtatctgaaggtaaataaagtattatttgaggttgtattgtatgtgaaggaagtgaagtatattgataaatgcagcatgccatatacattgcatgattcacttgcatatgaagttgggtcgtgacctatggtccgaccgtaccggtacaacttagcatcgtacgttgcccgaggaggggtacgatgcggcttcatacccttagaggtatgaaggcagaggacatatgcattgcattcattgaagtgatatttgcagatgatgtggttttataccctcagaggtatgaagacagagtacctacacttcgcactcctatgcatacattgaagtgatatttgcaggttttgttgacgcagggaagtgttatagaacctattgtggttgttcgaggaaatgagatggtattggttatattgggactactgagttctatatctacaagtatttctgatcttaattgtgattcttttaaaatgttgattaattcaatttgtggtttaaatatctcgtcaaaacaattcgcttgctgagatgtttcatctcactcttgcattactcaatgcaggtgcttgttgctcatccagggaagtgggaagtagcagcacatccaccttcactctcataataacgctgcttaggcgcagtcatgatttaattagaagcttcttgtcaaaggatgtttgtttctaactagttgtgcgcactggttaatttagttcatgttgttatggttgtcttcccattgctagcagattattaatgtcgattatgttttcttatcatgatatctatttatactttgttgcttccccg

SEQ ID NO: 18507 - DNA, 226 bp, Zea Mays
caaggataaaaactcgattcgaatcgtctgcttctcgcagctaatgagactgcttgatccattgtactgcattgagtaataagtggaaatgaggtgactgagaaaagatgttgattggtaaaaatgtttgataccatgtatgattagctaggtacacatctagtctaaaggattctactaaaacttgaaaagctaaaacttgtttttagactcagctagtgctttt

SEQ ID NO: 18508 - DNA, 140 bp, Zea Mays
taaatcttcatgtgtagtatctcttcattcatgagaattattaggagacttatataaagtggataattcctcaataaaatgtgcatcatgctagagtttagttgtttgtgcatctaataaaatagtaacagggataaaaa

SEQ ID NO: 18509 - DNA, 715 bp, Zea Mays
ccccctttctcccccttggctggccgccccctccccctatagcagccatcctccattgcttcctcccccaagatctccccctgcgcagcaaggatcgagaagaggaggagcacattgagttgaaggggaagagaggatcaaggagatgttcttctccatctcttcttgcagaattttttggggaaaccctaggtatggatgagatccttgttcctccctgtaattatgtgcttttggaggttgtggatcatgggaattaaaggattagaggttggattagatgtggggttaggttttgatctcgaatttagttttctgcagaatgacagattcgacagtttctgttaatcccagttttccgtgatcttagaggcctccaaaaaataaaacgtctatatataagtcgtagataatttgtagatctttccgtggccgcgaagaacacctcaatcggacatcagatcagagagttattgcagtttgattatagcagtttttcagtctcttaattctgtacagaatctgttctcttaagatttaggcaattttatcaacagaattaaaccttgggtttgtaagaaaagatgtagataatttcataagctttccagattgttaaagaatgcattcatatgaattatgaaactccagttatgtttgttttactgtggctgtttctgttagcctgacagaaatgagcgggtctattcactgg

SEQ ID NO: 18510 - DNA, 1924 bp, Zea Mays
ggcagcatctcttttgaaagattgcataaacgaggggcaacagtgtataaacatatatcatgaaaaaaaacatactaagcattattaatctgctagcaaaggaaagttaaacataacgatatgaactgaattaaccagtgcacacgactaggaaaaaacaaacatcatttgtcatcgagtttctaattaaatcatggctgcaagtgggcatcgttattataatagtgaaggtgaacgtgctgctacttccctcattcccaacatgaatcaagtacctgcattgagtaatgcaagagtgagatgatacatctcagcaagcaaattgttttgacgagatatttaaaccacaaattgaattaaacaacattttaaaggaatcacaattgagatcagaaatacttgtagatatagaactcaatagtcccaatataaccaataccatctcatttcctcgaacaaccacaataggttgtataacccttccctgcgtcaacaatacctgcagatatcacttcaatgtatgcataggaatgcaatgtgtaggtcatctgccctcatacctctgagagtataaaaccacatcatctgctaatatcacttcaatgaatgcatataaatgcaatgcatatgtcctctgccttcatacctctaagggtatgaagccgcatcgtacccctcctcgggaacgtacgatgctaagttgtaccggtacggtcggaccataggtcacgaccaaacttcagatgcaaatgaatcatgtaatgcatatggcatgctgcatttatcaatacacttcacttccttcagatacaaaacaaacctcaaataatacttcatctgccttcagatacgatacagacctcaaataatactttatctgccttcacgggtgtaaattaatctcatgggttatactcgaaccataatcatcatcaatatatgattgagcatcagtataatacaatcaagtaaagcatcaccatagagttcaattatgaaagaattccataattctgaatattagagtgttggcgataaaaaaacaacaattcaaaacggtagaaaccactgctacaatcacttgccttcatcgaggaagaaagatgtactaggcatgatccggagtgtagccacctgctagcgggcataaaatttagtacaaatatttgacaaacatttgccaacaatcaacaaatcgctcctacacttgaaaccaagacccggtggaaagactcccaccctgaaccacatgccaaacaacaacaacactgtttgttaattttatatctttaaaattataacagtggtgatattaaacaaatactctaggagtgtatacacaaaatactctacaacttcagtattcaatggataattaaattctgccatctataagttctaaaacatctgataagataaatgtctgaatctgtttcagacagcaacatagttaacttcaaaattcaatatctaccaaactactcaaccaaaaattatgaaattctgctggcagtaagaacttttatccctctacaaatgtctccatagttggaacagccaattcggctatttactatatgaaacccaccagtgaacagacccgctcatttttgtcaggcaaacaggaacatccacagtaaaacaaacatactggagtttcataattcatatgaatgcgctctttaacaatctggaaagcttataaaattgtctacaacttcttttacaatcctaaagtttaattctgtagataaaattgcctaaatcttaagagaacagattctgcacagaattatgagactgaaaaactgctataatcaaactgcaataactttctgatctgatgtccgattgaggtgttcttcgcggccacggaaagatatacaaattatctacgactcatagacagacgttttattttttt

SEQ ID NO: 18511 - DNA, 1005 bp, Zea Mays
gttaacttcaaaattcaatatctaccaaactactcaaccaaaaattatgaaattctgctggcagtaagaacttttatccctctataaatgtctccatagttggaacagccaattcggctatttactatatgaaacccaccagtgaacagacccgctcatttttgtcaggcaaacagaaacatccacagtaaaacaaacataactggagtttcataattcatatgaatgcgctctttaacaatctggaaagcttataaaattgtctacaacttcttttacaatcctaaagtttaattctgtagataaaattgcctaaatcttaagagaacagattctgcacagaattatgagactgaaaaactgctataatcaaactgcaataactttctgatctgatgtccgattgaggtgttcttcgcggccacggaaagatatacaaattatctacgactcatagacagacgttttatttttttgaggccactaagatcacggaaaactggcatgaacagaaactgttgaatctgccatcctgcagaaactaatttcgagatcaaaatctaatctcccatctaatccaaccaaaaaaactaattgcagggcctaaaactcatccaaaacaagagaaagcattcatcaagtggagaaaagagagagacgaaaggaaatccaaccaattcttggagaggaacgacgatgatgagcgacggtatgcccttatctcccctctcttctcttcttttttcttcctctcatctcttggggcaaggcacaaaagggtgacggctgctaggggtgggaggacgtggattctagggttagggaggtataaatagaaggaaacttccacaatcctaatatccaatggctcagatcaaccggcactcggaaagactcatctggacttcaaacaaggcaaactagtgattgatcggaatcatcttgatgagatctatacatctacggcctccgatcatccataggacacaccatatttggattata

SEQ ID NO: 18512 - DNA, 780 bp, Zea Mays
aaaactgatatgtcagctgtgctcacggttaagagcaacctggaccctcacatgataactgaacttaaagatggagaataaatcttgatccgatgatttataaatggtttgcttaagtggtttcacttaagtgtttttgatataatcatatgcttatcgcttaaccatagcctaccttgttgacattgcataactcctcccacttgcagagcccccaccataagtgacctcaccccttgctaatttttttatcagaagttgatgaagaagactgtggcgatggtgatgacgggtactgagtctagcgatgcgcgagtcattttcctgtggaagattacccatgctatttccgttctactttgatgatgatactatttaagacttttatgtctggatgatgtaataaagttattatactctttttacgcatttattgcattgtcttttgatatattacacttgtgatatgtatggaaaattgattcttgcacacatatgctatgcattcggttttgcccctaaaaccgggtgtgatagtgttgctgctacagtcttaggaatgatggtaaaaaagttgagccttcagttttattttaaaatgctctttgttacttgtcatcgttacacaacctatattaatcttagcttctaatatcttttcgtctaaatctgttgcgctgctgtgttgtttagatattacttttactatctaattatttctatactatattaaagcaccagtttaaagggtcgtcctgcgtcatttttttacaaataacc

SEQ ID NO: 18513 - DNA, 292 bp, Zea Mays
cgcacataggtggagagatgggctggtgcgtggggtttggggaatgggccgaaatgggagccgccagcccaacaggtaattctttcctttttcttttatttttttcctttttctttttatttttctaatccctaatccaacttgaattcaactttacattcaaatcttgtactaaatttatctttgagttatattgtgaccttaaggtaataattttggaaatatataaacttcctttatattttatatatcttctctttttctcttctacataatatttccaaaaccctaa

SEQ ID NO: 18514 - DNA, 288 bp, Zea Mays
ttagggttttggaaatattatgtagaagagaaaaagagaagatatataaaatataaaggaagtttatatatttccaaaattattaccttaaggtcacaatataactcaaagataaatttagtacaagatttgaatgtaaagttgaattcaagttggattagggattagaaaaataaaaagaaaaaggaaaaaataaaagaaaaaggaaagaattacctgttgggctggcggctcccatttcggcccattccccaaaccccacgcaccagcccatctctccacctgtgt

SEQ ID NO: 18515 - DNA, 1230 bp, Zea Mays
ccacatgccatacagcagcaacgctgtttgttaattttgtatctttaaaattaaaacagcggtgatatcaaacaaatactctaggagtatctacacaaaatactctacaacttcagtattcaatagataattaaattctgccatctacaagttctaaaacatctgacaagataactgactgaatctgttttagacagcagtatggttaactttaaaattcgatatctccaaaactgctgaaccaaaaattatgaaattctgctggaagtaagaacttttatccctctacaaaagtctccatagttggaagagccaattcggccatttactagatgaaacccaccagtgaacagacccactcatttttgtcaggtaaacaggaacagccacagtaaaacaaacataactggagtttcacaaatcatatgaatgcactctttaacaatctggaaagcttataaaattatctacaacttcttttaccaacccacagtttaattctgttgataaaattgcctaaatcttaagagaacagattctgcacagaattatgagactgaaaaactgctatagtaaaactgcaataactttctggtcgaatgtccgattgaggtgttcttcgcggccacggaaagatctacaaattatctacgactcatacatagactttttatttttttgaggccactaagaccacggaaagctggcatgaacagaaactgtcgaatctgccattctgcagaaaactaaattcgagatcaaaacctaaccccacatcaaatccaacctctaatcctttaattcccatgatccacaacctccaaaagcctataattacagggaggaacaaggatctcatccatacctagggtttccccaagaaatcttcaagaggagatggggaagaacatctcctttatcctctcttcctcttcaattcaacgtgcccctccttttctcgatccttgctgcgtagggggagatcttgggggaggaagcaatggaggatggctgccatagggggagggggcgtccagccaagggggagaaaaagggggtggcggccaagagggggggggtgaagggaaaaaaaggggtggccacctagggtttttgtgggagaaagaaacgacgcctcagatgacttctatctttgcatccaatggcccacaaccctttacctcatccacgcaccagagattaacttttggtcaacattttttttgggat

SEQ ID NO: 18516 - DNA, 1015 bp, Zea Mays
gttaatttttagggaatacaggtggataaacacccttccccgttaacaccatggatctcaatggtaataaagtcttcattcagccaaaagtggccgataaaggtaaaggaaagggtgtcctcatcaacgaccctagggtcctcgatgtaaataagaaaattctctcctggaaagttagtgctaaaagaacactagatgggtgagagacgctgaagatcaccatcaagtccttcagcgctgggggcaggcacaaacaggcacaaacagacagcaggcccaagtcccctattctttgtattgctaacagtccggccctgctgattccggcgcgcgccatctatcagtatgtctaatcagtacgcatcatctaatttggctttttatttcagttcttctgatttagtcatgatttatattcggaatttaatctagaatttgtctaattattcaacaccgccttgtgcagggagtccaggagacgtaggttctcgtatcaccacgcgtgccgtcgtcgccatcgccggaacggaatgagcttgtccgccgctgccttgtctcgtcgcgccggggcgccttttcggggaagcagcgcctctgctcgcggcccggagccgctgggacgccaccgcatccactccccgcggcgcacttggcatggcgatgaatggagatgggcggttgagggcggcgattagctgggacggtacgtaccgcagctgctgccgcgggagcgggctagtcgttggcgcagacggcgacaacggcatggctgtgcgacctggtgctggtgatcggcttcgagtggagcaagctaggcggatcaaggtgtccgtggtcaatctctctctccggtcccttgcgctggcgatgcgatgtctgccgctgctgatgaaaactgaaagcaccgctctactttatactagtaaaatgtaaacccatcgacgagcgcgagaatgaagcaggcagaacgagggtggtgtttgagctgactgctaggcgtgctagctagtcttgt

SEQ ID NO: 18517 - DNA, 317 bp, Zea Mays
cacctaataccctacaaaaaatagtaagaaagtgaccccaaaagggttttagaaaaaccccaaaaggttcaccaaagggaaaaacctaagagaaaaatcagaatttttctaagtccaaaacccaccctcttccaaagatcaaacatgttcaccctatttcaaacttcaaaaccacttggtccatttgacaaaatggcgcctaaagacctctagaacaccctggaaaagtttgaacccaaccctaagttgtttgacacgacttggcacgagttttgtcttggtgtggacagctaggacagagccaacttccaaaccct

SEQ ID NO: 18518 - DNA, 1098 bp, Zea Mays
caaaggaatagtggcgtaggggtataaatgaagtgattgttttaggaaaagcccagggtcttcgatacaaattggttttccagaaaaccttttaatatttatgatttaattacaaacagaacttgaacaattcataacttcagttttgttcacccaaatcaagtcaaaccaattttgccagattctaaataatgtaaactacttaggaaaaatataaaacccctaagtgttgcagaagacttcaaagttttgatttaaatgattatctgatcaaaagctaaatgaaatagggaaaaatagctacactgttagactgaggttaagaaaattcaaagaagtacttaatcactttctaacctgcttaaaaataataaacccctctatacaccaaattaaggtagagtttgtcatttaaatcattttcagcttaaagttaaagaaaatataataggtagtttaaaataagaactagggagcacccacatttttgttagctcccttattcagtacagttcactaaaaaaatttgttagacctttgtttagtaaagaaatgagataccttttattttaggaaaacaaggaaaacttagaaaaaccctagaaaaataaccctgagaagaaaacaccccaaaccttgtgataactaatgttttgttattatagacatagaaaaattatgagttctattgtttgacatttttcaaataacaagttagttgtaagtgtctttttagcattaaactttagaaaatcctaactaaataaccactgagtatccctctgtgatttttggcacagaagcaggttattacctatggataccaacaaaaatgactcttagtgcagaacccacccctagataagagttgtagtgcaaagtgacccctttgccccaacttttgttatttttgtccagggcatattctaattattctggacctcaaatttataggacagactacagtgaccaatagtaaaccactgtaatttttacagaatttttggaataatctaaatcactgttgtagttcaaactcaccctaacatcataaatagaaaatgaaaagggaaattaatagtggggactagtgttacc

SEQ ID NO: 18519 - DNA, 644 bp, Zea Mays
aaagggtcagcttgatactcttaactaaatgatattcttaaataggattatataatctaatgagagtcatttaacaagtgagcactagtgaaataaactagatcctactcctataaaccttgttctcctctcatgcacttaaacctaaattagtgcaacaaactaactcaaccaagagcaaaaagatttaactcaaccagtagaaacatgatgaattgtataatctgactatccccacctaacattaaacatacttttgaactacatcatagagtctatctcacccatatctatctcatcttgataggttctatcttacctttggacattcaccatatacaactagatatcccaatcttgacaaaaaacaaatattaaaccctactgaagaatcttcagatcataaccggttactagcctattcattctactgaccaaataatttcccttgcaaaactattttgccatatgcttctaactctcatggtcaatgccagaaagggaagattatcaagcaatagcaaacaaaatgaatccttcagatcctccaccggttggaatcgaccaagtggttgccacccaaatgatgctaatacaacaaatggcaaacatggttaccgaattgcaaaatcagataagacaag

SEQ ID NO: 18520 - DNA, 601 bp, Zea Mays
ctaccttacccgaaaggggcaatggcagtaagggagtggttagtgtagggaggtccttcggttgattttgttgcgatggcggtcaggcgaggaatccctgtattggagcttcctagaaaccgtagcgggttttctgaagctagtggaactttataaaggcctcgtagtgttaccctgcctcgcttccttgatagaggtgtatgtgattcatgaccccttgccagatgggtaacatgacttgtgggtaaaggtgcacaacctctgcagagtgtaaaactggtatactaatcgtgctcacgatcatgagcagctcagacactcacatgattaatttatgtaacttaaattcaatttgtcatttgcatttgcatgggattatttattaattttgttctattatttattatggtttggtatttacttacacttagtaactgctaataaaatttgaccaatttattaaaagcaatgctcagctttaacccctactgttgatcagctttacacatcacatgaactcccacctttggtgagttcatgtcacattattcccctcaacttgttgagcgatgaacatgtgtgagctcacccttgatgtctc

SEQ ID NO: 18521 - DNA, 1357 bp, Zea Mays
atggcgtctccccaactgactttctagcgccaaggatggattttagttcgatctatatttatattttattttgtaagacttccgctatgtaataagtactctgattaaattgtgacatttatctctatacactctgttattatatgtgttgtcttctttggcgcatatatgagatgcacccggctttgtcccttaaaaccgggtgtgacagaagtggtatgagaggaatgttgactgtagaacgaaacctagatagaactggacaaccattgtctacttatcttactctgattcttttctaaacttatcttaatcttttctcatctatttccgctttactctgattattcttacattttctttctaaagacaaatgtggatttcacactttgaaatcttgtgcctaaagtgacctttaggaataggagacctactcatagaaacaaaaaagaaaactattttttataggtatctatacgcttgattgtttgttcttatgatatttttctgatttggatctttgattgagtgtgattagttgtggagtaatgtccacaattacatctgcatatacgtataggcataaatagaattcataagataactaaacaactcagattatcctccattaaaatgtatctatttcatagtgatccctcttatcttaaaagactctctcttatcttaatagatctatcgtatcttaaaagattccctcttaccttaataaattcgtcttatcttgaagagattctatcctatcataatagatctaactaatatcaaaagattctatcttattcctagagactcatcttgtcctaataagcatacttatccccaccactttgcttatctcctaatagtataacaaacatgatctattccaaaataaatttagtagatcctatctagtctaatctggttacaccaattttctgatcccatctaatctagtcagatctaatctaacggacaaacatgttagataatactagtaaaataagattggatcatactctgataaatatgttttaacctaaaattggagtcttagtccaacctgaccatatgcaactaccttaaccacccgatggttgcataacccctttgttttaacctaaccgagattctgacttacctacccatataatccgtcatatctcaaaagattctaacatgtcctaataatatttaatctaccctggtaggtttatctaacttaagttaagattaatctagttatatccaatctaatctagaccctacctaatctaatatggtctaatctatgttacaagtattaactaaaccatattcttataaatgggtttttaaacctaaacgggtatcttag

SEQ ID NO: 18522 - DNA, 615 bp, Zea Mays
tacctttcttaatctcgaggacgatattatttttaagaggggtagatttatgacactatgaaaatcattaaataaaaataatacatttagttaataatgatatatatggtaattaattttatcttaagtgttcgttatttatttgcctttggaataatttttgatttcgcatgattgattttcggatatttaatagcatttcttgttaaatgaaaatcctagtaaaataataatataattattggtcaaaaaataaatattttagttataaataattttgtctgaattattatgatttttttgaattatttaaaaatatagttatttatattttaaatagaaaagaaaagaaaaaaaagaaaaggaaaaaaagaaaaggaaaaaaacgaaaccctaccgtcgcggccgaatttggcccattaggcccaactcctaaccctaaatcggccgccgccctggctccctacagccgccgtcgccccctggtctctctcacgcgctcccttctccctcctctctcccattcggctctctctctcttctcccctgctctctctcccaggcgccgcaccgaccctgctccgaggaccccgcgccccaacgctagcagcccga

SEQ ID NO: 18523 - DNA, 198 bp, Zea Mays
gagttccaagactacgacgagttctaggcgtgggttagcggcaacccccagtcggctgcctgtgaaggccgcgtttatctacgtttcttttccgcactttgattcattgtaaagactatgtggatgtctcagacatatgatgtaatcgactattatttccctttttaatactatttgagcactgtgtgatgatgtcca

SEQ ID NO: 18524 - DNA, 159 bp, Zea Mays
gtcagaagtactcagagaaatgatacgactactgttcgtggagccaatacctgaataatgaaccgaagctgtttgcttgtcagataaaaaaaattatatatgtgcttttgaaataattgtcacagtcatgtttgaggacatgcatggtgtgatattatg

SEQ ID NO: 18525 - DNA, 208 bp, Zea Mays
tcaacacctacatatatagggttgttgacgcaaataattgtactgtgttcgcaaataattgtactgtgttcttggtctagtgtagtacagcagtcctaatgcttaattgttcacaggttatatttggaaacaaaaaaatgttaccctagctataattgtattgtactttgcatgtattctcagataataaagaactggatttccctat

SEQ ID NO: 18526 - DNA, 76 bp, Zea Mays
cactgaacgggctcccaaaggctgtgccacgaacagtgtttgactttttaaaaccacagataatatgtacaagaat

SEQ ID NO: 18527 - DNA, 234 bp, Zea Mays
gtcacagtcatgtttgaggacatgcatggtgttattatgttacacgaaataaagtcaacacctacatatattgaattgttgacacaaataattgtactgtgttcttggtctagtgtagtacagcagtcctaatgcttaattgttcacaggttatatttggaaacaaaaaaaatgttaccttataattgtattgtactttgcatgtattctcagataataaagaactggatttcc

SEQ ID NO: 18528 - DNA, 382 bp, Zea Mays
cattaacggcatgacgacgaagcaaactacaccccagttcctctaattactcagctaaaagtgtcccactccaccctcatggttgcactgttttccctggtggtcatccaacgaaccagtccttacggagaggcactcgagaaacagctcgagtcccctaattgtcacagtaccatcatcataatcaaaagggaaaacagcgtatcatagataatctcatcatattcattgattaatgtgaagcactagcatatagctaaaccagaataacccaaccagaataggtaaataagggcaagataaacaaaagctagtcaatcctttggtataaagtgtgtaaatgcggggagtgaattataagaatgagtaggacatagatggg

SEQ ID NO: 18529 - DNA, 1749 bp, Zea Mays
ctagccaagagcgctaacgaggaattcggatagtcaaaaatggaggtgcgtcattcttgtatcactgtgctaatattagcagtacaacttttttcaaaagtttgaccacttttacaatttggtcaagggattgttaccatacataaagcatgtcaaaattgatgtcagtttggccttgatgatatgctaggacttgccggtcgctgtcttaggatctacgaagtcaagggcaaaccaaagggttgtattatgtgatcaacgccctttcttgtactgcactcccaaatgaacaacattgtcaaagctagatctacgagtctacacgataggaaacgaagaaattttcaatgggttataagctacatgcctttgaaaataggtaatttccaacgatttatagcttattttcgatggcggacgtccctcgttcataattcatcgaaaattattctatttccgtcgacagcctcggcaaatatgcagaagcataggtacaccgtcttttttatttaggtatataacattagattagatattatttctaattatctcattgggtttttgcagtcggcgtcacatgctggccagccttgctctatcttctcgacttatgctatggtctacaagagcaaggcaacgtccgacgtcccctacaatctggatgatgggcccgagacatatagcaactcagccgtctacagccgcctaagtgagtacactgtcatggcacaggaggtccatgagccagattacgatccgaggaccgaggacatcgacggagatgtcctcatgagggttggagaaggcaagaggaatgggcggtacaggattgccgacggggcaatcgattcgttgtccattctcactctatctcaggtgcgagcaaggagtacgagctcgagcctagccatacgacctcggcgggacagctcacatcatcgcatacaacaactccaggttagtgcttctgtaactcgtcattccttgagttatatatcttctctttgagttcttataacttggactgaaatattacaggcccaactagaagaagagaggagggaacaacaggagatggaggcgaggatgatagcggagcgggaggcccgcttgatagatcagcagaggatggtggagatgttccagtacatgcacagccttgccgctgcacattgttttgctccaccacctccgttgttccctccagttgaccctactcagttccatactcctgtgagtatcaaaattctattcctacatgatatatattcatctgttataacacatacaatctcttctctatgtagggacaatctggggcggcatccaacaaacctcatggattgcccagcccatcgtcgcaccagtccagctgcccacctcgctgatgatcttctcttagcttagtggtgattgtgagacttgtgtgagaaacttgtcctgaacttatgtttgtgaaaaacttatgtttgagagttggtaatacttatgttggtgaaacttggtatgaccatagacatgtttgtcaaaaacttgtgagatttgtggtttttgtgaaatatgtggtctctattatgtatgtgatgattatgtgatatatgtgatgtatatgtgatgattatgtgatatatcttttgtttgtttggatggaatagcaacaacaaataaaaagtgtattctagttactttgccgagtgtaagactcgacaaagaggtactttgtcgagtgtcaaggttatagcactcgac

SEQ ID NO: 18530 - DNA, 166 bp, Zea Mays
gcaccgatatgctacgctctgcggtaaaaaagcagcgttatcggctcaagtagaaatacttcaatggtgtacctgcaaatgagattaggacaacttctcttgtatcttacatgactgatgaacaatggagggcattagttgcaaagtggtctgatccaaagaacat

SEQ ID NO: 18531 - DNA, 575 bp, Zea Mays
gaggctttgagggctgaacctgttgctgaaggtgagatgccagcatccagtgtgcagcttgtgtccaaggtgctgtcccagagcagctcacaccaattcctgaagagcgttggcatcaaaacaccggcatcctccaagtcttcataatcaaatcaaagtgagcttcgggaacaacttgcagctgaagcgatggctgctgttcaaggtgaactcgaccagctcaggaagaaatgtgaagaagctgaggaacaacaggcgaggacacaaagggagttggaggagtacaagaagataacagagaagaacagcaaggagatggaggagaccaatgtgctcatcaagaagctcttgtccttgcatggtaacgcttcttcttcgacatgagggccgctgatcaaagctgctgtgtttggcttgttctttgacaagggtacccaaaaactcaagttgctcgtgggtggcaactttttattatacgattttgtttgtgcaaacgcaactgaaatgttaagtcaagtggtgatgctgtgaactgaaatgttaagtcaagtgatgatgctgtgaactgaattgtg

SEQ ID NO: 18532 - DNA, 364 bp, Zea Mays
aaaaagggttgtgggccgttggatgctgcatcagaagtcatctgaggcgtcacttcttttctcccacaaaataaaccctaggtggccaccctcttccccttcttggccgccaccccctcccctttcttggccgcctcacttttcccccttggctggtcgccctctctcccccattgcagcagccctccaatacttcttcctccctagatctcccccccacgcaacaaggatcgagaagaggatgaacaagatggattgaagaggaagagaggatcaaggagatgtgctacccccatctcttgcagatttttcttagggaaaaccctaggtaaggatgggatccttgtttctccctataattatg

SEQ ID NO: 18533 - DNA, 376 bp, Zea Mays
cacagattggttgtcactacttggagagattgtcaatattgaaagaagggtacacacctaattctttgtattcctcttgcaatcatccgctttcctctgaatttgcttgcgactcatgttgggtacttgggtttcaactatagcctaccacaacttgcttgagactaaattgctttgttgttgctgttgaatcctctgctactccaagcttctttgatgtcgggtgtaatgtcgtaactggctatcgttgttggccgaacatttggctagcgtggatgatatatattgcaatgtgaatccaataagcaggagagtgatcaatgtatgtaaccgttgtacactaacatttgtcgaatattttatatatcgtttcaag

SEQ ID NO: 18534 - DNA, 123 bp, Zea Mays
ctcatacatgcgccaaagaagacaacatatataataacagagtgtatagagataaatgtcacaataacatcagagtacttattacatagcggaagttttacaaaaataaaagataaatataaa

SEQ ID NO: 18535 - DNA, 102 bp, Zea Mays
cgtgcctaagtggttctcgcagccctcgcatcgacgctcatacggtgtcgaccgtgcgtaacagctgcggcggcgctcccaactctctcacttggattttcg

SEQ ID NO: 18536 - DNA, 1551 bp, Zea Mays
ataagctttccagattgttaaagagtgcattcatatgatttgtgaaactccagttatgtttgttttactgtggctgttcctgtttacctgacaaaaatgaatgggtctgttcactggtgggtttcatctagtaaattgccgaattggctcttccaactatggagacttttgtagagggataaaagttcttacttccagcagaatttcataatttttggttcagcagttttggagatatcgaattttaaagttaaccatactgctgtctaaaacagattcagtcagttatcttgtcagatgttttagaacttgtagatggcagaatttaattatctattgaatactgaagttgtagagtattttgtgtagatactcctagagtatttgtttgatatcaccgctgttttaattttaaagatacaaaattaacaaacagcgttgctgctgtatggcatgtggttcagggtgggagtctttccactgggtcttggtttcaagtgtaggagtgttttgttgattgatgtcaaatgtttgtgaaatatttgtactaagttttatgcccactagcaggtggctacactccagatcatgtctagtacatttcttcttcttcgatgaaggcaagtgaatgtagcggtggttgcttccgttctgacctgttatttctatcgcctacactctaatattcagaagtatcagattctttcataattggactctatggtgatgctttacttgcttgcattatactgatgctcaatcatatattgatgatgattatgatttgagtatgactcatgagattaattcacacccctgaaggtaaatgaagtattatttgaggttggtattgtatctgaaggtaaatgaagtattatttgaggtttgtgttgtatctgaaggaagtgaagtttattgataaatgtagcatgccatatacattgcatgactcatttgcatatgaagtttgtcgtgacctatggtccgaccgtaccggtacaacttagcatcgtacgttgcccgagaaggggtacgatgcggcttcatacccttagaggtatgaaggcagaggacatatgcattgcattcatatgcattcattgaagtgatatttgcagatgatgtggttttatacccccagagggatgaagatagagtacctacacattgcattcctatgcatacattgaagtgatatttgcaggtattgttgacgcagggaagtgttatagaacctattgtggttgttcgaggaaatgagatggtattggttatagtgggactactgagttctatatctacaagcatttctgatttttaattgtgactcttaaaatgttgatgaattcaatttgtggtttaaatatctcgtcagaacaattagcttgctgagatgtttcatctcactcttgcattactcaatgcaggtgcttgttgctcatcaaggggagtgggaagtagcagcacacccaccttcattctcataataatgctgcccagacgcagccatgatttaattagaaacttcttgtcaaaggatgtttgttttta

SEQ ID NO: 18537 - DNA, 789 bp, Zea Mays
acatggaataacacggtgcactactaatcgtatatttttaacaaattccgtagcgcacacaaatacataaattggaatcacatgtgttcatattacaacaaacgaactatacaacacatgaatcgaatcgaaagcactttataaaatacataaaataaatttgggtcgccaacaacctcgggttcgtgcgtgtgacggggacggatcgacgggtttcggccggacggagagcggggctcgactacggacagctagtacgcggctccggcgaactcccggcgacgaacggcacactccggcgacgaacggcaacgcactagcgatgagcgaggagtgctagagggagaggcaacttcgagtaggcaggaatggggaggctctgctgtttcccttttatagagagagggaggggagaggaatggtctgccagaggagggagagaggcgccgacgggtcttcatggcgccatagatgcgtcggtttctctccatggcgtcaatggagagcaatgggaaaggaaaaacggatgctttgatgttccattaactcggagacgaagaacggtcgcagcacttgggcttcggggtcgcggctgggcagtcgatgtcgcgccctggcgttgctcggcggcttggcgcgcagcagcaggggcgcggggctcgcggctcgggtggcgcgctcggcgcggctgcctagcgcccgcacgcgagagagcagagagaggagagagtgggagagagagaaacgtgagagagagagacgtgagggagagagggacgtgagggagag

SEQ ID NO: 18538 - DNA, 409 bp, Zea Mays
gtcaatgcgggaaaacaagggagctgcaattggatctgattcaacgtcgacacaggacacatcctcccatttcagaacggagttctccttcacctcgcatttgcattccatcctccaggtctaggttgaggctgatcattgcggtgtggttgaggctgtagattcaaagcagccgtctgtctcgactgggtttcaaagctctagccatcgactctgccgccgcctcctacacttgtgatgcctctcgcgccgccactctccattccttcctcggcacctgaatgaaaaataccgcgggaaaggactagtgaagcgcgcgcaaggatggattggggaaagaccttgctcactgatatttgtgggagggcggaccacggatgcgggacgcaggtaatttaggggaaggaag

SEQ ID NO: 18539 - DNA, 2979 bp, Zea Mays
attttttgcaattttttcgaattttttggactccaaacggtaaaaaacggctagtccacgtggcacacgtggaccaatcacgtcgcgccaccgcactctcgccccgtcagtgcgtcgcccccctctcgcttccctctcgcctccctctcgcccagacgcgcgcgccaacgcgggcgagagcggggcgatatcgcccgctctcgccgggcgtgagtgccgtcgccctctcgcctgcctatcgcctcgcgcggggcggtagagggcccttctcgcctcccttctagcccccattgccaccagccttaggacttgttcggttagctctcaatcaatgtggattgagtgagattggataagtttaaattccaagcaagtgaagcaaatattggggttaaaccgaacaagcacttaggctcactccaacggagcagccatccggccaagcaaagctaaaatagctgccatgtagccactgtagcagtgcaatccttgaagtgaagcaccaagttcaccgaatgtttttagcgtggtaaccgcgtggtggtgctatgagatctcagaaccattgcttagaagcacaagaagtttcttgtcaactcctctttcaatcataatctcaacagccttcaactttccaaccttttatcaaagatgcaagtcttgcaaacacatttttcatacattgctcattttccgcaaataaggagatctacaatttgatccatgggaattcttactaaatttcatcagcaatcacgccatcaacatgctcagataccttaggtagaatagaagagaagttgactagagctgaattatcttcacaggaaccaagaagatcaaataatctatctatggaacctaccatttgaaaaagagcaagatttatgtagtctcctggaacaaacataactgcaattgcggtagtgcagaattgctcattccgtcattaatccgtgttaaaacaacaagactacatgtaacatcgtttgcattgcactaacgacggcgccttgttcacgtagctaggtccccaagaggaagaggaagtgcgacttcttcgttggttggtgttgacacctttttcgggcgccaaacactcaacaagaaccggcggcggtgctctctggtcaggcgcggacggtccgcggcacagggccggacggtccgcgacctggcgcaggggctagggttccctgcctgacggccggacggtccgcacctacaggccggacggtccgcgcgtgcgcagggggcggcgaaagtcgccggcgacgcctggatctcgctcccgggagggaccccgtcgggggaggagagatcctaggtgttgtctaggctcggtaggccgacctagactcctctaatcaacgcagagtcgaagagaggcggagaatttggagattgagaggctaaactagaactagactagaactattcctaatgcgtaaggtaaaaacgagaaatagacttgatttgttcgattgttgggggcttcaatcggccgtagccctttcatctatataaagggggaggtctggatctgtttccaactgtttcccgagttaatcccgcggttttaggtaacaaatctcgcgagaaactaggaaccctaactgacactgcgcgcgcgcggaccgtccgcgccaccaccgcggactgtccggaccgcggaccgtccggcctcagcgccggactgtctgcgctgcttaatttgacttccaacatatgcccccctgccttttggtgaaggttgacgaaccaaaagcatatgaactaaacctgatgtaagtcaccggcttttcaatatggagctcattcaataaagcaccaatgtataaaggccgtttcagattgtatctttctcgtccatgaccgtttgatcaatggatcaataggaatagaatggaggtgccccccaacctggatagacaaagggactatacatataccatggattcatcatcgtaccattccatgtttgaacatgataatataccgacgatgagtaaacgggtggaaagtaccttggtctcataggatgaataggcgatgcttgttgtgtcgcctttcgagccgttttgtttacccgttttgttttagcaggtgaccgatgtttcttcgttgaccgatcacgtagaacggtcttcttgctagtattcttggggagtaactgatcaaaggtagagtcagttttgatcaaccgaccatatgtgctttgccgttgcgtctctttcccttttaaggctttgtgtggaggctgacgcctttggccataagcggattgtccggcagagttagccgaaccgtctgtctgagcaccggactgtccacacgtaggtgtcacaccgtttgtgatgctcaggccaggctgtcgtgcttggctcattaattgtgcctgccccccggtgcctccggactttttagccttatcgtccggagcctttcgagcaatctccttttgcgatatatttgacgtgcgaggatcgtcaatgatgatgtctttgcttttgcttttatcggccatttcgggccgaactaagatctttttgcatgcgatatctattgtattaacaggaaatggttgtgtgtccacttgcatttcctgaaaagccaatcgaccctcatttatggccgattgtacgtgtcgacgaaaaacattacagtcattggtggcatgagaaaaagaattatgccacttacaataagcacgtctctttaattcatctataggaggggtagtatgagttaatttaatgttgccatttttaagtagctcatcaaatatcttatcgcatttggcaacattaaaggtaaatttaatctcttcttgccgattcttttgaaccggctgtaaggaagaacatgctgaagatttggcctttgttggccaaataaactcaacggtatatacatctgcggattcatcatctgaactatcacgctctattagatgtatagtacgggcggccgattttg

SEQ ID NO: 18540 - DNA, 1920 bp, Zea Mays
gaaaattctggtatccttgccccttgtggatatgggacagtgtcaaaccggtgattatacggcttttggtatgattgccctactctggctacactaactccgaacttatctcgaaatagttcagtcatctcttccctaattttctccattgcacccggtggcaaaccaccggatcctgggctgtggggatcatttggtcgggcattagtataccgactttcttgccgtgaccgatcgatagtgttgatcggtctgtgattgtatggtgcgttatggtttaaatatgtagagggcgaaacatactgctgctgtggtgtgtaataatttggtgcatggtgtgccacaacaggttctgcgtatgcgtatccagcttgtccggtggtaaatccgaactgaccggttgcgtttgccattatcgggacgccatgtggtagtcctggtgcgggcccagactgtccggcagggaaagccggacggtccgcgtaagggccggacggtccgggcagaagctcggacggtccgaccgcgtccatggtcaccggtctaccaagcagggacggcggtggtcctagggcggccccagattgtccagcagagcaagccggacggtctgcatatgggccggacggtccgggcagaagctcggacggtccgaccgtgttcatgggtgccgatctaccaagcagggatggcggtggtggtacttgtcctgtatatgagttcatcggcataccatataatggctggggctgtaaattcccatttgttgccgatgtattagacatagatatcctgttactagtctcatatgatggaaaactaggagcaacagacttctccaacgtacgcgttaattttctaattgactcttctaaccccacaatctgttgtttcatttgatcctgctgctgatctacatactgtttaataaattggatgtcgtcgggtttacttacgttgggggactttgaagcgaagatagaagagatgcgacgtcggtctctccatgtttgacaactttctggtggcgatccaccgtgtattgtgataagaatttctccctcgcttgacgcatgtagtcctcgtattgttgttgctcatcggtcgtcagactttcaacagccggcttcaggatattgtccggggagatatcggtgtgatctttagaaccggccatttgagggcctgatttttagtagatctaaacaccttccccagcggagtcgccaaaagtatgttgacacctttttcgggcgccaaacactcaacaagaaccggcggcggtgctctctggtcaggcgcggacggtccgcggcacagggccggacggtccgcgacctggcgtaggggctagggttccctgcctgacggccggacggtccgcacctacaggccggacggtccgcgcgtgcgcagggggcggcgaaagtcgccggcgacgcctggatctcgctcccgggagggaccccgtcggggaggagagatcctaggtgttgtctaggctcggtaggccgacctagactcctctaatcaacgcagagtcgaagagaggcggagaatttggagattgagaggctaaactagaactagactagaactattcctaatgcgtaaggtaaaaacgagaaatagacttgatttgttcgattgttgggggcttcaatcggccgtagcccttcatctatataaagggggaggtctggatccgtttccaactgtttcccgagttaatcccgcggttttaggtaacaaatctcgcgagaaactaggaaccctaactgactctgcgcgcgcgcggaccgtccgcgccaccaccgcggactgtccggaccgcggaccgtccggcctcagcgccggactgtccgcgctgctcaatttgacttccaacagttagggcggcacctaataataaggtttggt

SEQ ID NO: 18541 - DNA, 824 bp, Zea Mays
atgaaggtggatgtgctgctacttcccactccccttgatgagcaacaagcacctgcattgagtaatgcaagagtgagatgaaacatctcagcaagctaattgttctgacgagatatttaaaccacaaattgaattcatcaacattttaaaagagtcacaattaaaaatcagaaatgcttgtagatatagaactcagtagtcccactataaccaataccatctcatttcctcgaacaaccacaataggttctataacacttccctgcgtcaacaatacctgcaaatatcacttcaatgtatgcataggaatgcaatgtgtaggtactctatcttcatacctctgggggtataaaaccacatcatctgcaaatatcagttcaatgaatgcatatgaatgcaatgcatatgtcctctgccttcatacctctaagggtatgaagccgcatcgtaccccttctcgggcaacgtacgatgctaagttgtaccggtacggtcggaccataggtcacgacaaaacttcatatgcaaatgagtcatgcaatgtatatggcatgctacatttatcaataaacttcacttccttcagatacaacacaaacctcaaataatacttcatttaccttcagatacaataccaacctcaaataatacttcatttaccttcaggggtgtgaattaatctcatgagtcatactcaaatcataatcatcatcaatatatgattgagcatcagtataatgcaagcaagtaaagcatcaccatagagtccaattatgaaagaatctgatacttcttaatattagagtgtaggcgatagaaataac

SEQ ID NO: 18542 - DNA, 983 bp, Zea Mays
ggagtatctacacaaaatactctacaactttagtattcaatagataattaaattctgccatctacaagttctaaaacatcttacaagataactgactgaatctgttttagacagcagtatggttaactttaaaatttgatatctccaaaactgctgaaccaaaaattatgaaattctgctggaagtaagaacttttatccctctacaaaagtctccatagttggaagagccaattcggccatttactagatgaaacccaccagtgaacagacccactcatttttgtcaggtaaacaggaacagccacagtaaaacaaacataactggagtttcacaaatcatatgaatgcactctttaacaatctggaaagcttataaaattatctacaacttcttttaccaacccacagtttaattctgttgataaaattgcctaaatcttaagagaacagattctgcacagaattatgagactgaaaaaactgctctagtaaaactgcaataactttctggtcggatgtccgattgaggtgttcttcgcggccacggaaagatctacaaattatctacgactcatacatagactttttatttttttgaggccactaagaccacggaaaactggcaggaacagaaactgtcgaatctgccattctgcagaaaactaaattcgagatcaaaacctaaccccacatcaaatccaacctctaatcctttaattcccatgatccacaacctccaaaagcctataattacagggaggaacaaggatctcatccatacctagggtttccccaagaaatcttcaagaggagatggggaagaacatctccttgatcctctcttcctcttcaattcaacgagcccctccttttctcgatccttgctgcgtagggggagatcttgggggaggaagcaatggaggatggctgccatagggggagggggcgtccagccaagggggagaaaaaagggggtggcgg

SEQ ID NO: 18543 - DNA, 254 bp, Zea Mays
gggtgtcgcgaccaccaccgacagatcttccccgctcgatatgcgtccgccggggagcatcgttgcacgccttcatctctagcatgtgctcgcgtccgcttggggctcccgcaccatcatctggtcaaactggaccaaagttcttcgtcgacttgaaccaatctggcctggttgtagggcactgtggccacctcctttgtcatttgctgtgctagccgtcgggtgcaacgttttcaccatagtcgtcttgtcgt

SEQ ID NO: 18544 - DNA, 233 bp, Zea Mays
gtcccaaacagcaagcaataaatttattcaggttctatactcttctaagattaagcgttcatcgaaggactaataactttaggttcttcattacaagacacttagagccaacataagggtagaagcaatatgtttactttttaaatcattttaagcctgatctcacatcatccaagcacattctatacattatatcatcccatcgaagaaatctctcttttttttaattatac

SEQ ID NO: 18545 - DNA, 493 bp, Zea Mays
cacataaccaagctaccttgattaacctcacataccacaaaacctactattactgcacttgaacaatttgtacctcgtgatatcacaggatgcattcaaagtagtagacatacatgatctatcaaaccatcattcatataagaaaaatttcaatccgatgcaacaaccccatcattaaagagatagaagactaacaaacataagcaactcccagttaagcattgacttcgtttaagataaagcggtccaaataatgattcaacaagcgtgcatagagaaactgctcataaaaaatcgaactgccatacaatgttggcaaataaaaaaatataaaacgggttgtcaatatcgcccacatgactagcctgcaacaactaaaaaactatgcatagcctttatggctattgaaacaagccatagaaggaaaacatgcacgacataaaatccacttgaaaccaccctatttattgttaaaaataaggttgcacataat

SEQ ID NO: 18546 - DNA, 177 bp, Zea Mays
acaggagaagagcaggtggtcgaagaggagccacctaacactgaggctttcgacttgatctaggtggcgtctcccagtcagctttgtggcgccagggaataacatatagttcgctttattttatcatttacttttgtaagacttccgctatataataagtacatttatatatttatg

SEQ ID NO: 18547 - DNA, 336 bp, Zea Mays
ctaccacttgagagattttgaaaatagtagaatagagtttttgttttgtcaaaagcttttattgtctctattttcaaaagttggcttcttgtggggaaaagtgttgattatgggaaatagggggagttttttgaaatctttgatcaatctcttttggaatgactctctttatacttcaacatgtgtgtttgacttagagatagagatttgaatttgatttgcaaaaacaaaccaagtagtggcaaaagatgatccatatatgccaaaattgaataaaactcaaagtcagtttttatttgaagtgattttgcacttgttctagttgctttatgttgt

SEQ ID NO: 18548 - DNA, 239 bp, Zea Mays
gccatttctaagtattttggtgattgagtacaaacacaagtgcttaaatgtgaaaatatgcccattgatgaacaaagtgcaaatcacaagtaaaggtatgtttctaagccttagtacattagttttgtgtactaacatattgtctaagtgttagaaacaggagaaagaagaaaagaaaagaagtggagagtggctgtgtacagccaaaggctgtttcgggctggggcaccggactgtcc

SEQ ID NO: 18549 - DNA, 376 bp, Zea Mays
atttcggcaacatcccccttgcaaaattgcataaatgagggggcaacagtgtataaacatatatcatgacaaaaacatactaagtattattaatcggctagcaaagagatgttaaacatacgacatgaagtgaattaactagtgcgcacgactagttaaaaaaacttcctttgacaataagtttctaattaaatcatggctgcgcctggtcagcgttattgtgagagtgaaagtggacgtgctgctactcccctcattcccaacatgtatcaagtacctgcattgagtaatgcaagagtgagatgacacatctcagcaagtaaaataatatcaaactgtttaaccacataagaacattgttttaccaccacttgat

SEQ ID NO: 18550 - DNA, 116 bp, Zea Mays
aagtgattcaaagaaataactttgaactgttataaattatttatagttttgaaatatatgctagctcaagtgaccatcctcaataagaagataaagacggggtatacttatataag

SEQ ID NO: 18551 - DNA, 258 bp, Zea Mays
cccctttctcttggacgcccccccctctcccatcttcttcctcctcaaacctttgcagccctcaccacccaaaaccctagccgccccctccatttctccccctcctccaaggtgcagccctcccgtgtggttctccgtcgtgtggctgcgatctcaattggagtttggagggaggaagaacgaaggaggaagggaagaacctaaggtgaatttgtgattaacttttgttgtttttgtgctgcaatcaattcgattatg

SEQ ID NO: 18552 - DNA, 264 bp, Zea Mays
ggaacctctgtgtcggagtcgtgccggtgaagaaaatagagagaggtaaaacaagggagggccgccgccaggggcaattccttcgtaggtcgccgattttgcctctgtcggtggtcagggagcttcgcctcgatacgtgggtgatgtccgtggcatcgtcgtgcagctaggagctccggctgcgggcaatttcgcgccggcgttggtcctacgcggcagatccgccttgtgccgcgagtggtgctcctctgcgcgtcatccgtg

SEQ ID NO: 18553 - DNA, 2235 bp, Zea Mays
agacgtggccggatctcggacgatgataccggatccaagggactgggttgcgtacaggtataggcgctggtagatctaattgtgaccgtaggttttaatccaacggctgatcgcggccgataccccttcggtcgtggcaaattcttaaagagcccctgacttatctgggaattaacccgcggtcccatacagctctggaatcattacaactaagctctgtttttatcattctagcccctgagccttcctagaattaggactcgtccagagccgtgtgataatgggaaaaagtaatataggagatagtttttaaaataaaaataattccataatagtatttaatctctagaaagttcatattagcttctttttagtccgtttcagttcctataattttgtaatattattgttcatcatatagtgccactgttttgacatgaaaatcgtattaaaattaatctcttggttaatcttgtattggatacataaaaccttaggaaattcataactcctctgttttaactccgatttgatccgttcaagttgccttagtctcgtataaataattactatgcaataacaacacttattataccatgtctcattcttttttaattaggtttttatttaacttatgttggttagtcttgttaatctacttaccattataatctactaaaatatgatctatgatcaatttagattaaagttgaattaattactactttaggttatcttttctctgtaattttaaaataaatatagaacctggtgttaatcatttaatcacatcataacttgatgaccacgactctgatcttagtagttctcgttcccatgatatcgtagcaacgtgtatattattattattattcagtttgtacttatggttggtgtgatgttaattttgtctataccatgtctgtttgtattgctacgactagtagtgaggtcacgagaatctgaagaatcaccctggtatctggaatctcaagtgccaggcaagttgtgcccttgatccacttttgttacccaataatattctttattatcattattcatgcataggtttaattttgatgggacccaatagatcaccctagactgtttatctttttaccttgtttacccctgaatcattcggtagttatgctattgctttacacggtttttgggttaatatttcattatatccatgctcctattattctattatgttatttatgttcatgataagatcattatgttaacgggaacatagagaaccacccgggaaattagtgctaccacaagggtagtatgggatgcccttggctgactaattaggaaagctagtggatgactaccttacccgaaaggggcaagggcagtaggggagtggtcagtgtagggaggtccttgggttgattttgctacgatggcggtcaggcgagggatccctgcattggagcttcctaaaaactgtagcgggttttctgaagctagtggaactttgtaaaagcctcgtagtgttaccctgcctcgcttcctaggtagaggtgtatgggattcatgaccccttggcagatgggtaacatgacttgtgggtaaagatgcgcaacctctgcagagtgtaaaactggtatactagtcgtgcacacggtcatgagcggctcagacactcacatgattaatctatggattaaaactcaatttttcatttgcatttgcatgtgattatttattaattttgttctattacttattatggtttggtatttacttacatttagtaactgctaataaaatttgaccaacttattaaaagcaatgcccagctttaaccattcttttttataagtcttacacttcatgagctcctacctttggtgagttcatgcacattattccccacaacttgttgagctatgatcatgtgtgagctcacccttgctgtctcacaccccccacaggagaagaacaggtggttcaagaggagccacacaacgaggagtttgattcgatctaggtggcgtctccgagttgactttctggcgccaaggatggattttagttcaacctgtatttatattttattttgtaagacttccgctatgtaataagtactctaactattgtggtgtgacatctggcagtcttggcttgcttcctaatgctacaccctaatctccaaaagtccaaataacacacaagagatgtggaaaagtttttgggacattgatagttccctttgct

SEQ ID NO: 18554 - DNA, 611 bp, Zea Mays
agagcgtaaaaaaaaggcctagtactcgtagatagaacgtccttgatcgatagttagttgaacaacatggaaagatcttttgcttcagaaagagagaccgacgacccctttggtccctttcacggcggctcgtgtggtgcctggttgcctgccccacgacacgagccacgacggtgacagacaattaggcaagagacatgcacacaccgccatcatcggatgagcatgcgctgtgtgacgacgacgacgacgaggaggcaaacaaaggtctggggaggcgagccgccatcagttccatggagccaccacgtgaagcgccccgcccccgcacgtacgaggccggccctgcatatgtgctttcttgcttgctcggtatagcagtagcactagctttagctaggactgcacgcgtcgtcgtggacgacggcgattaaccaaaccctagctagccgcctcagagatgcacatcgacttcgctatctagcctctgtgcgtgcacgcgggctcgtcgtcctcccctggtcgtgtctcggacacggttggctgctgtgccggccagccacgcacacacgtcgctgcgtgcgtgtgatcccaggtatctaccaggtcac

SEQ ID NO: 18555 - DNA, 322 bp, Zea Mays
gcaaaatccggcagcacctcccttgaaagaagcataataaggggggggggaaacaacatggagttcatacaggatataaaagacagataattcacgtagtagaatctaaatgcaaaagtagtaaaacacattcatgaccaaataaaaggataggtaactcagcccaccccaaaaacagctcaaccaccatgaaaagttagaacataataattccctagactcgacccctccctgattaacaacattattaagcagtggttcctttattaaaggtgtagtggctgtgctgctacatctctcttttcccaaagcagaaatcagg

SEQ ID NO: 18556 - DNA, 203 bp, Zea Mays
ttggattcttccctttctccttccttcttcctccctccaaactccaattgagatcgccacacgacggagaaaccacgcggaagggcttcaccttggagagaggggggggggctagggttttgggtggtgtggctgcaatggtttgagggaggaggaaatgggagggggggcggcggccaagggtgtgggggaaatggagaagg

SEQ ID NO: 18557 - DNA, 412 bp, Zea Mays
gcttgggccgcctgggccggaaggagaggggagggaggcgggcgcgcgcgaggtgggctgaaaggaggcccagccgagggagggaaaggtttttctttttttctttttctggtttccatttctctccctttttctttttttttcttttgtgtccttttgtttcttttcttattaacaaaagttttctagatgaactagatgataaatatggcctatgtgaggtgctcaaataactttaagtatatgcaaatgatagggtgacctagggggggtagggttagggaaaagaataaaacaaaaggggaaaaattaggggggggttagggtttcaaacctgggttgggattttaggatgttacaaacctaccccacttaaaggaatctcgccctcgagatttagactggatttggg

SEQ ID NO: 18558 - DNA, 340 bp, Zea Mays
aacgaaactatgatctctcaaaatgtgaatttatgtatggcgatgttcctctatttataggggagaggtacaacttcgtatgaaattacaaacatgcccacaaagtttatacatttgattcacaaatattataggagcaatattgtctttccctttttcttttttcttgctgcacaagtcttatgagccttcttattatctgcttcatgtatgaagcccttcacaggcgagcttggtgacatcgacgtgcacattcgccatgctcaagcctaggcgaagctgttcctttctgcttcaggcgaaggttggcttcgtctttccttcgtaacgcgcctgaaac

SEQ ID NO: 18559 - DNA, 248 bp, Zea Mays
acataattatagggagaaacaaggatcccatccttacctagggttttccctaagaaaaatctgcaagcgatgggggtagcacatctccttgatcctctcttcctcttcaatccatcttgttcctcctcttctcgatccttgttgcgtggggggggggagatctagggaggaagaagtattggagggctgctgcaatggggggagagggggcgaccagccaagggggaaaagtgaggcggccaagaaag

SEQ ID NO: 18560 - DNA, 249 bp, Zea Mays
ttactaggccgattcgcgcagcattgggcccacgcgccaattcttttttttccttttctttttttctgttttgttttttttattttgaatttcaaattttgtggcgaatttgtactcaacttttggaggtatgattcaaacatgccatggtgatatgaatttatttatttataaatttattttgtattggctaatatctcttcctctcttttccatattctagaatttctttttagatttttaaatttc

SEQ ID NO: 18561 - DNA, 417 bp, Zea Mays
aaacaggatgcgcggttgagccaggtaagccaggatgggccggcgtcggggaaagaagagatgagatgggccgaggggagaggaaatcgacccagacgcggttctctgtttttttcttttctttttttttgaatttctagctccatttcaaatttcaaaacttaacttcaggtttaaatttccagacttccaattgtataatactattttaattgtgaatataaactcctacaaatttttaataatattatattttccctctattttcccattctagtagcaacaaattactattattatttcttctctcattttctattttatatttccattgataatttgaggtcaattttatgttttcaatatatcacaacaaagtcatcagcatgatatgtatatttctttatttacttattg

SEQ ID NO: 18562 - DNA, 250 bp, Zea Mays
ctagactactgctgttcacccaccacctaaaattctggacaaccccctctacccaatcgcaaacgcaacctctaatcaattaaattgcagcgcaaatgaacaaggaatgaacacaaaaatcaccttggattctccccctttccttccttcttccctccaccaaaacgattgaagactcgcaccacgacgacgatgatcagagcggcaaggattggcaccttgggaggaggggattgggggggggggggcg

SEQ ID NO: 18563 - DNA, 150 bp, Zea Mays
gcctgatgttagctcgtcaccttgacagggacatccgatcctgaatttccgattggggtggcaaaggtcaagttgccaccacaagcatccagtccaatggctctgccactgcccagaagcttcatcacacctagaggtagccatgacagg

SEQ ID NO: 18564 - DNA, 436 bp, Zea Mays
gcacgaatcatcgagctacagtcggtaacatcgtcctactaaaaaaacatctcgaaggacaacctcgggtgagtggtcggacccaaaacaccgacagagcgcatatgggcggaactccggctggttgcgcgccgtgtggaggaagacgaacagggacttaacgccggcgagcggaggagctgggcgctgacagaggaagagggagctgggcgagctccagggagctacgcgcaggaaaaagctccacggcaatggggtcgcggcttggagaaataccagggaatgggacgtcacgagctgggaacagggataaacgccgaccatggaaccgagtagggagaagcgaccggcgcaggggaactggagcaccgcgagaactctatggcagggcgcgacgaaatggccgagacggagaagtccgagcgcagccatggat

SEQ ID NO: 18565 - DNA, 390 bp, Zea Mays
gtatacccgaaatttcgggtcgagttgttcgggttttaaataattcgggtattcaacaatcgaacccgaactcgacccgattttttcgggtacccgaaaattcgggtaccaaaaaaatcgggttcgggttcgggtaatttacagttacccgattaaatagaggcatgctactattccttgcatcaggacagcccacctgtggtagctgctcgacggtggcagtgttaggacggcgccatagcagaccgtggactggtagcccacctgtggtagctgctcgacggcggcagtgtcaggacggcgccatagcagaccgtggactggtgctcgacggcggcagctgctgctagctagggttgggaaatcctggactgctggacctggacgggc

SEQ ID NO: 18566 - DNA, 359 bp, Zea Mays
ctggcgtccaggcggggctctgctcggcggccttggggcgcggtagagagagacacgagggggaaggagagccagggcggcggcagcaacaaggagcggcggctcggcttagggttagggaggggtgcacgcgactgggccttgggccgttagttaggttaggttttagttttttttcttttttttctatttcctttttctaaattcgaaatatatttttaaataaccctaaaattcataatgatgaaaccaaaattatttataaataaaatagttatttttggactagtacttattatattatttatttggatttttacttaacaagaaatgttactcgatatccaaaaatcaattat

SEQ ID NO: 18567 - DNA, 489 bp, Zea Mays
ctcctctcggctctcgccgtctcgcgccatcgaacacccgccttccagggcgagcagacgttgtcgggctcatctacggtgttcggcgttggagtggtaccgatcttgattcccactagaaattttctcttacccaccgctcaagctactctcagccttatccccactaaaaataattttggtttaattattatgaattttaggattatttaaaatatgattttgaattaaaaaaaatatagaaaaaagaaaaaaaaactaacctaactaacccttggcccattaggcccatgagccgcccgctccctgccccttccctaaccctaagccgccgcccctggtcctagcagccgccgccatcccttctccctctccctcctctcctctagcttctctccctcgcttccctcccctgcagcttcctcacaccatggagtcgcgcccagccgccgaacaccgccagcacccgcgcccctgcagccagccgtg

SEQ ID NO: 18568 - DNA, 2291 bp, Zea Mays
tcaaaagagaataaattaactcgttgaactcttacaactcaatcaacaacaagaagactaatgctccagcatgtgatgcaatgatcaaaaaccctttttgagattcattaatacatctaatactttcataaaagcaaaatattccttctatatttttgaaagataaagaaaggcaaaggaagaagagggtaacacctgaatttggtgaatattagaaaaagaaattttataccccaaattcagggtgttacagctgttcatgtacttcccgactgaataagcaatggatagtgtcaccacacttctgtcgtgttagttgcaatgatggtcctggttgcctctccatgaacatgctctctctcatattgttaagattgtagggttgagactgaaataaattgcagaccatctaatgcaaaaatgcaagcaatagagacatctgaacatatgtagaactgaatagtgcacaaaggcttctttcggctcccctattcctggctgcaaaccttccctgcaagctatggtcaaaagccagggataactggacaaccaatttacccgtgaaaactccagggataactggacaaccatgcaagtgtgcactaaaatggcaatgtgactcacattcagaaccatctgtgcaccaacaattagtactcaactgtaatttacccaacctgggtaactcaatccaaccgctgatctgaacaatcatgtactccattaacagccccatgcaaatcctaaaatagactgtcacatgcccaaacgcttcgctgctaattcgtactgtttaaaggattaacttagtctgctccttctttatgctagccaagaacccaacacaaagcatcaagatgcctgaatttctctgcacatgctcatgttgtggccttgacagtccataaacatgcaaccaaatcaaaagtttcctcgtcagaatcacacaacacgtgcaccacttgggtctcttgatgctgatgtgctttgacacaaagtatgactcttctgccacatgtacgagtgtctcaaacaatggcgtcttgcacttacagaacctcccacaaaagcacgcaatagtaaatggacacattgaccaaccatgtagatgaacatgtatctgcagcacaaccttttagcacttaagtggttccatatgcacaaccaggactacttttagctgctggtcaatgagtgaaagtattcttgctataaggagacttactgccactaaacaactaggaagatagcatctgcaggatggaagcaacatcattgtgcatctgggtgttggccaaatagtcatcgacaacaaggtattttgtctacgaccaaaggacagccatggtatcggtctgaaattagagacactgcctatgtagcatattggtggttgtgactcgagcgggcgacaaacaccatgggcaccaacgatagaatttgcattttgcttcaaaagtgtccttgtacctagcatctggagaagacccggatcccatggtcgacacttatcagggacatcggtggcaagaccccacagaccattaccaatggaggaagcaggattaatgttggtggtatatctgctcaatagaagctcgagtgagcagtccctatctctgtgaaatgtgagtggttggtggagcagtgcaaacgattctgaagatgtccatgggcttcagcacatcactgatgcgattgagacattttgttgaacacttgctaggcgagttagttcgcaactcctcctctgcaccttgagcacccagtaccgatgagcaagtcgacacagcaggctatgcgtccagccaggcgatcaaggcagaggcgtgtatggctggtgttgttgtcggagccgaggatgtccccgtcgtcattgctgaattgatgttggacgatgtggcaggagatggtgtagatgtggtgtgctcgcagacggaactgacgatgatgctgacgtcgaacagctggtgcgcgccgtcatggagttagcgtcgaaagcggcgtgggtggccaactccaccgcaacagctgacgtgcgatcgccatttgcctcggggttggaggtagggtggtcccagtggtcagcgaacccagtgttggcagccccatactcgccatcgaagaatccgccccagttgtcggcgacgacggatggcgtcacgtagtactgctcgccatcgtcgaagcacccgccctagttgtcggtgatgacgacggccccaatgactacagtcgggggtggacggcgcgctagtggatgcgtcggggaagtggtcgacattgagcgg

SEQ ID NO: 18569 - DNA, 251 bp, Zea Mays
atgtatttaattgagaacaataaatccccaacaacaattgaattcaaatttaaaatttcaaatcaaaaaaggaaaaaagaaaagaaaatagaggagaaaagaaaaagaaaaattgtgcacgaattgggccaggttaccctatcggcccaattctcatttgctccacgcgcgcacggccagaaactgggtgcgttgacacagatggcccacctccccacacccgctccgtgcaactataagggggctttcac

SEQ ID NO: 18570 - DNA, 886 bp, Zea Mays
cgacgcactaatctctctctctctctcttttttctctcgtcttccctggttcaatggaaagacgggaggatgcagctcgtgcacctgcacgctcgcctgcgggttggtggggctagagccctcgtctgcttacggcggtggcctgcgcgctcgcctgctgctgcggcagtgctcgcgcccgcgcctgctcaaggcgacggcgacaacctgcgtgctcacctgcggctgcggcggtgctcacgcgcagcagcagagcccgcgccaacgcttgcctgcgcgagtcgagcggcggcggcggcgggctcgcctgcttacgcgtggagcggcggcagcggcgtggcctgcacgctcgcggcttgccctcgatgcctcatctgctcgacacggtgcacgcgcgttcgtccatggcagcgtcggtagttcggccagtacgcccatctgtgcatggtcgcagcggtggcggtggcgcgacgcctgcataccgggcagctacggttgcgcgccttcgtgctggagcgatgacaacagctgcgttcttgcgtgacttattttttttttcttttttctgtgtgtttttgcagaggtgattgatggatttacattcggcgacttcaagtctgctgcaatctcctgtgacattccatcgattttgtacttgtgttgtgccgtttgcaatatggaatgaaaatacaaagattcgagagaaagataaccttcttactttgcgaactcctgaaagagcaaaggtgctgataacgtgttaagaaccctttgttactagtgtagtccaaaggcttcttaactagaaatagaatcacaaacacaggagacacaaagatataggaggaactgttattctcattcatgtattcagcttactggttac

SEQ ID NO: 18571 - DNA, 214 bp, Zea Mays
ttttatgtaagtgttggatgtattaatgaaactctaaaaggggttttgattgttgcatcatgctgaagtatacattttttggatgatgattgtgttttgaaatgcattcatataacctacaactaaattcaaatagtaaaaaaagaaaaagaaataaaaagaaataaaaaggaaaaaatagcccaacaaccccctcctctttcctctggacggc

SEQ ID NO: 18572 - DNA, 784 bp, Zea Mays
atcatactcaacacatacagtcatcaagcacccttcacatagcttacaaactgacaattactagacgatgctactaaatcatcacctaccgctcaagaatcatccccattaccaaattatataacctaatcaaacactatccaaaaaatcggcttagcataaacaaactcaatcgttgttgctgcacacatggcgtgaagatgaatgcgccatcgagatctggagaccaaagcggagccgaaggagtacgacgggcatcgtgggcccaacaaggtggagcacgcgccacagaggagctactgcagctgtcggttggcgcgacaaaataataagaatggtggtgtcgcggatagggttgtccatgacacaaagacgacgtcgtggccagttgcgcaaggtgttgagcacctagcgagcgaggagggcaagctagggaacgacgcggttgcatagggcatggccagctgccctggaaccgaggctaagcagggggtgaggtactggcatcgctagacgaaacccgactgtgagcaacagcgaggggaaaggcaaagccaaccggtgaggtcgaccatggcagggtgcggtcggcagctcgccatggccgagcagggatagagggaggaagaatgctagtgactcggtgtcctggagcagaagccaggcggagggctggccagaatgggatgagctagattgctacgacgagctccagccatgggagtggcgccaaccaggagagctcggtcatggtggaggaagaatacaacgtgggggagaggag

SEQ ID NO: 18573 - DNA, 416 bp, Zea Mays
acgactccgcccgcgacctgcggccaggcggcggctccatccccgagctcgtggacgcgtccgcctcggaccgatggctaggcggttgcttcaaccccgacgcaggcagttcccagttcgccacgtacccaggctgctccgcccaaatcccgacccaagctccttccccaatccgtccctgacccgagtacgagcttccgcccgctcgtgagtgctccatgcgcctgcaccatcccacaagtcacgacaaatcaagctagccagaccactgaatttgtaggagcaagaggaatgtgtggaccatactgtcgttcttttgcttaggaagtgcgatcacgtagttgttttgtgctactctgtatacatctatcgtgtgtataaaaaacatgtgttctgtgataaaaaaatgagggtat

SEQ ID NO: 18574 - DNA, 341 bp, Zea Mays
cacaagtcatgtatcccatgtcgccagggttacctagacccttagacactaccgaggtgaatggctagggacccactacgaggcttttacaaagttccactagcttccgaaaacactaatacatgcgccaaagaagacaacatatataataacagagtgtatagagataaatgtcacaataatcagagtacttattacatagcggaagacttacaaaaaataaaagataaatataacaggatctagaatccatccttggcgccagaaagtcaactgggagacgccacctatatcaaatcgaactcctcgatgtggctcctcttgaaccatctgttcttctc

SEQ ID NO: 18575 - DNA, 519 bp, Zea Mays
taccagtattatctagcatgttcgtccattaggttagatctgatcaaattagatgggatcagaattaaattggtgtaatcagataagactagataaggtctacttaatttattttagaatagatcatgtttgttacagtgttttaagataagcaaatgataggtatgcttattaagacaagatgagcctataagaataagatagagtcttttgagtttagttagatctattagggtaggatagaatcttttcgagataagatggatcttgttaagataagaaagaatcttctaggataagagaaaatatgttaagataaaatggatctattaagataagagagaatattttaagataagatggatctttaaggtaagaaagaatattttaacatgagatggatctattaagataagagagagtcttttagataagaggggtctatataaaatagatacacttcaatagaggataatctaagttgtttatttatctcatgaattttatttatttatatct

SEQ ID NO: 18576 - DNA, 839 bp, Zea Mays
aggagcagcaacaatagggtggtgaggaaggtcacgccgtgggaccagaggagagaatgagcatcacgaccaatatgaatccatatacgattgaaggaatttggttgagccagaggattcgggttctcgtgtgcccagcgattctgacgacgagctttaccatttggagacttgcacttccattgagataagaagttggctgatgtagagtacctgcgagctcgtctagacagatacaacacaatatttgagtgtgttattatgtgttttggagacattagagacgtggtttatcacatctagaatatagaatattcaggctgaacaatcgccgcgggtcggtaaaatggaacgtcttttgcaagcagaacagttaagcattacacttgggagtctttcctcacacttgaagcgtcttagtcagatatttgttgatcactatgtggacaaaagccttatttacaaaatctctcagcatctatctcaattagggaccaaaaatattaccgtgtagccacaaaatatctgctactatactgaagctatcgcaaatgctctcagagcactgccttttgctttgtctgcaaaaagtcctggacgtatcaactatgaagaccttaatgcctgtgtgaggtatatgctggagagaattggagtgattgactgagaaaaaatacagtacccttgcgttgatgatcatgacacgcatgctcaacctcaggaagagccaatagcgctggttaacaacgatcaacaagcttacgaggtagacaaggttcaagaggacgagtatgtgtcactacacaatcttgcactattgctgctttcagaagacaaag

SEQ ID NO: 18577 - DNA, 235 bp, Zea Mays
gaaagggttagtgggccgaattccaggttgtggcccaacagcaggttttattctttttcctttttctttctatttttttttctccattttcaaatacaatttgagtttaagtttaaattcaaacttttgtgaataacttgtcctcagtttgaaaggtataatttaataatttaagtgtgaaggaggtttattctgatttttattttattttatgtagtatttttcttagttcttt

SEQ ID NO: 18578 - DNA, 407 bp, Zea Mays
aaaagattaagataagtttagaaaggatcagagtagcaaaggtgagtagataatggttgtccagttctatctaggtttcgtcctacagtcaacattcctctgataccacttctgtaacacccggattttaggggtccaaaacccgggcgctaacataaacaccaggtatgctgggaccaagtctcatacatatgatgtatagtggcacaggatcgaatgtcacatctttatatacaacaggagttctatacaaataaatagttacattataaggagacaacagtccagcaacccaaagttgactgggagacgacgacctagacctctcacgaactcatcacagcatcctccatgagcatcatcctgcagtacctggtcttgacctgtggtgtatgtgagacagcaag

SEQ ID NO: 18579 - DNA, 359 bp, Zea Mays
cctaatttgaatggatggatgtatgcttgcaatcgcatagagaacgatccggttgaagagcccgaggaactcgcaggagaagcccctgagcagcagtcggttggtggaggtaagtgtcccttgacctatctctgtcctattcattctttaattcacctcccgcattacacatttatacctaagcattgactagctttgttatccatatccttgtttacctatttgggttggattattattgcttaactttatgatattgctcaactctaatcaatgaacatgatgagattatctatgatacgctgttttcccctctcttattatgatgttatacttgtggtcttcaagggggctcgagc

SEQ ID NO: 18580 - DNA, 764 bp, Zea Mays
aacctctccggcccgggacggtgctccgtttcgggagtcttgagttcatgtccttcgacggcagctacgacatgtgatggaataagtcatgtgtggaggacagtccgcagtccgcacagcatctctgctgcaggacagcagcaacacagcagcttttgaatccgcagtccgcacagcatctctgcaggacagcagcaacgcagcagcttttgacagcaaggactgcggcaggcagcacagcagcagtcttttgactgcgaggacagcctgcaggcatctccttttcagtttcagcttttggaggacagcagcttgctgcagtttgcagtttttcctttttgactagagtacaacagcacctagtggttagtgcagtttgtaggacagcatattcgcaactctaggaagcatatgctgcagccccttgggctataaatatgtatcccgacccttagacgggtatggcattgtgtagtgtttgaagaaataaacagaaaattgccccaactcatagtgtcatcctctgatgagagttagagtccctctacttacaattggtatcagagccaaactatcctatagcctaaacatctcttgctcatctccttcccgcgcctctccccacactcagtcggcagcaagagctccaactgttccttcctctcctgctcagacgagcagcctttcgtctgagacagcctcttccactcgcagcgacccctcactagcccaccatgtccctacgctcggtcacttcgagtgcg

SEQ ID NO: 18581 - DNA, 60 bp, Zea Mays
cttgtcaaccctgtgcttgtgaggaagaaagggggtaaatggcggatgtgtgtagactac

SEQ ID NO: 18582 - DNA, 120 bp, Zea Mays
cgttgcccgttcagaggtcggtctacttcgtcagcgaagtactgtccgagaccaagatccgctccccgcaagttcagaagttgttgtatgatgtgatcctgacaaggcggaagttacgac

SEQ ID NO: 18583 - DNA, 191 bp, Zea Mays
cactcgtcaccttgacacggggcgactcatgcttggtgaagcggtacagataatcaacaggcgagacttagtgctcgaaaatgaggaaaaaacacggctccgtgccgaaattacataaatgttcaggcctcgacagccacaatgaacaaaaaccctggcattcgaagtgccgttacaaatggaactccggt

SEQ ID NO: 18584 - DNA, 258 bp, Zea Mays
caaccacgtcaaaaaaggataagcatcaactcaagacttcaaagatcaagttgggtcgctagcagaatcaagatccacagttcaggatgaagtctttccttattatactcttccttgccacaacctatacttgccataattgtacctcatatgacataatagatggctagacatatatatctatattttctaaatcatctactagcaagtatagaaaaaaaacttgaaacaaaacttttgattcctaaaccaaactgg

SEQ ID NO: 18585 - DNA, 478 bp, Zea Mays
aaacaataaagaaaagaaaaaaaaacataagcctgacttggacctaatccctcacttttagcccatatgcactttgccacccgccagcccactcctgctatggcgctggcgtatgggccccactggccggcgcctcaccgcgcatgcgtgcactctgctacgctgactaccgcgtggggccacggaccagccctcacccgctcatgcatgccgcctcggatgtccctctgccctgtgggacctgcactgtcaggttcttcttccctagggtctgctgggggcttgaccgaaggtttggcccagcgcgcaggcactaggacccgggttgccgaatcgaagttgcctcctacgaatctttgccgcacgcgaaccagattaccgatattggcgccgaaaatctaggaggctggccaatagaaaaccgctccacggatgtcgccatgattcttggccacgcgaagtgcggggcctcctcgac

SEQ ID NO: 18586 - DNA, 154 bp, Zea Mays
tctgtccaaccagcatcgcccctctcctgtaatcggccgttcaatttctgcagagaaggaaatcgtcgcgtcctgcatgtgtgcatggtcaggaaagagaggaagtagaatggcatctcagaaccctgtgctgtgcggttatagttgagaggaa

SEQ ID NO: 18587 - DNA, 1072 bp, Zea Mays
cgggctttggacccctaaaacccgggtgtgacaaatggagagagttcaaggtagctttcagggggcaccatataccctcaggcattatggaccgcaagctcaacgagtttctagcactcactcaagggaaccggacaatgttacagtatgctcaggccttcaatgacctgtgccagtatgctggatatcatgcagacaccgatgagaagaagagggacaggttcaggagggggcttagcactaagctccgtgaccgtcttaacaccgtcagggccaacagctacaatgagttagtcaacatggtcatttctcaggaggactgtatcacagctcgtcaggcagaaaagaagaggaagacccctgtggcaggaccctcagctcagccacagcgcttcaggatcatgtctgacactcagaacaggggaccccagcagcaacaaggacgttggctgatccggccacagcagcagcagcaggcacccaaccgcacccagtttccagttcagaggaacaatcagccacagcagcagcagtaccgtcaggccaatgacaacaggtgtttcacatgtggtaacaccggacattatgccaagaattgccccagaaaccagcagcggcagggacagaatgccaaccagaaccaaggcaagagacataaggcgcaagtgaggcaaggtaggctgaacttcaccaccatggctgatattctagagggagcacccgtcatgactggtatcttttcagttttgaattatcctgctattattctttttgattctggtgcatcactgtaacgccccgaatttcgagttcaattttttcttttctctatcgctcgctaaattcggtcgttacccctcttttccatttcttttcgctaaaacctcactcgtcttcaaaactttaggtcatgtgacaatagtaaatcctagagttattttctttggattgctgcaccatgccgaaccatgcatttctttgattgtttgaaagtgtgaaaacattcatataggaaatagatattaaaaaggaaaaatcttttcttctctcccctccctctccttcctttttt

SEQ ID NO: 18588 - DNA, 459 bp, Zea Mays
tagattcattagactacaatttgctttctgtatcccaattatgtcaaacgggctacaactgtctatttactgatacaggtgttactgtctttagaagaagtgatgattcaattgcatttaagggaatgttagagggtcagctatacttggtagattttgatagagctgaactcgacacttgcttgattgcaaagactaacttgggttggctctggcaccgccgactagcccatgtgggaatgaagaatcttcataagcttctaaagggggaacacattttaggactaaccaatgttcattttgagaaagacaggatttgtagcgcatgccaagccgggaagcaagttggcactcatcatccacataagaacatcatgacaagtgacaggccactggagctcctacacattgatttattcggctcgatcgcttacataagcatcggcgggagtaagtact

SEQ ID NO: 18589 - DNA, 464 bp, Zea Mays
aaagcattcaatgtttctatttggtaatgttcttctcaggagcgaccgacgaagaaggacgactcgaagaatccggagcagcattcacgtctgccattatgtcgttaggaacaaccacaccgggtctcctcatcaggattcgccccgcgcgaatggctttgtccatagctctgtcgcgtgagccctcagagtagcggaagtgtcttcagcagccttgacagccaaccgagcagcttctagctcctggacgactgatctcttgaaagcacgcaaatccttgatgatagtatccttgctcaacaccaattgcctaaggcaaatcatatcatctagggactcttgtagcttataacaatgattatccaagtcttccatggtgaaacgatggctcctctccaagatggtcaacgagttgctgacgtcgcggtataacttgtcaaggttgtcgcgagaagtggcaagag

SEQ ID NO: 18590 - DNA, 1066 bp, Zea Mays
cttcagttacttcgatttcctcttcacgttctaatcataaccatacataggtataagaatggatgccatgggatgctcatgaggatgcaaagatagtataaacttattattatgtcttgaatacaactttccttcacggagttccgggaacttagggtttccggagtcggtaaaggagttcatagggcagggggggggtgttttggggtttggtgatcaaacaaggtccaaatcaattcaaactctacccaaggcttctaaatattatgaggaactcatataaaaattttgagcatttttgaacttaccatttgttttctaaaaatccataaccaacatttttaaccactttaaattccctaaaatttcttactttccttaaaaatcacaaacttatttttactaaattctagagaaaataacaaacctaggaaaattagtttcacaattttagcatttttctacatttttctacatatttctaaagctctgctggaaaaagaaaaggaaaaggttgaaacagtgatgggccggtttcagcccagcggcccagttccagggaggaaaagcgcccgcgccctgacggttttgcagaacgacccctgcgtttttgtcaaacagcaaacgaggtcattcactgtttctacgtatcactgacagtttacaaaaacgcccctgatgttctatttcctcacccgactcatcctcgacggcgttcatgccccgccgagctccggcgagcacccacgccggtcgattggggctacggcagggttctccgagcggcggacatgaaattggggtcaacctgactatttcccctaacttaattgcgctattggtcaactatggagctctggccacggtggccgtaagcatggcggctatatggtcgtgttcccggcgaccagagagctcttagttcaattcaacggctcggcaagcatcgtggatgcacgagaatgcttaaacaagggagcagaggacacggatcggcgaggtcgcggtatgggcgagcagcagcacgacggcgcgagcacaggagttgggcgccgagcagccgaac

SEQ ID NO: 18591 - DNA, 742 bp, Zea Mays
gtttggtgatcaaacaaggtccaaatcaattcaaactctacccaaggcttctaaatattatgaggaactcatataaaaattttgagcatttttgaacttaccatttgttttctaaaaatccataaccaacatttttaaccacttcaaattccctaaaatttcttactttccttaaaaatcacaaacttatttttcctaaattctagagaaaataacaaacctaggaaaattagtttcacaattttagcatttttctacatttttctacatatttctaaagctctgctggaaaaagaaaaggaaaaggttgaaacagtgatgggccggtttcagcccagcggcccagttccagggaggaaaagcgcccgcgcgtgcccacgccctgacggttttgcagaacgacccccgcgtttttgtcaaacagcaaacgaggtcattcactgtttctacgtatcactgacagtttacaaaaacgcccctgatgttctatttcctcacccgactcatccttgacggcgttcatgccccgccgagctccggcgagcacccatgccggtcgattggggctacggcagggttctccgagcggcggacatgaaattggggtcaacctgactatttcccctaacttaattgcgctattggtcaactatggagctctggccacggtggccgtaagcatggcggctatatggtcgtgttcccggcgaccagagagctcttagttcaattcaacggctcg

SEQ ID NO: 18592 - DNA, 850 bp, Zea Mays
gaggagtgcgggttgatgtggatgcaacggcgagtttagaggagcggccaccaaccggaatcacgacgatgttggcggttcttcccatctccctctctctccagttgttcacgatggctcaggcagggtggcgacactagatcttcatgcaccggggcaagggtcccgtagagcacatatcgggtcgtgcgcggattcccagcggcgggcggatttcactgccatggcgacggcgaacgagcggaaccacagcggcggcacccttccagcacgctgcatgcccatggcgatgaggttcatcgagaagctctcgactttggtgtagatcgaaagggaagcacggctgtcccatatatagcccgagggggtctagatatgctcggccaggagcaacgaccaccccaagaatcacgcaaggttcccttggcttcagttcgccaggccgatttgtgctccagcttgacggcgatcggacgaaagggccccacctgtcatcagtgccctggagaggtaggggcgggcgcacggactaggccgacgcgctcacaggggaaaagaggactcggccgaattcaggatatcaggcccagattgtttccttttactatttttctgtttccctttttttatttccattttcaagttgggttttcacacaaattactaaactcaaatcatggtctgaatatccaacaaaaaaatatgtaccagccaaaatctcaacattaatgcggaaataaaatttttatttattcattgtttactttagcaaatacttttacacatacaaatcatacgatgaataagaaagggtttattttaggaaaataattcctattatgtgactttt

SEQ ID NO: 18593 - DNA, 224 bp, Zea Mays
cttgaatcaattttctttggaaaacctctctttatgtctctacaagtggatttgacttagagataggattttgaggctgatttgaaaaacaaaccaagtggtggcaaaggatgatccatatatgccaaattgaatcaaaataaatttgagttttttatttgaagtgatattgcacttgttctagttgctttatgtagtgttggcataaatcaccaaaaaggggg

SEQ ID NO: 18594 - DNA, 395 bp, Zea Mays
gtcttcggtgggctcttggtgggtggattgggtgagggcgagggccttgccctttcttgcggccagcagtgctgccttcgcagcctcgtcagccttggggttagctctcttgggtgccatcgcgggtggtcttgtcgtagcacgaacggtgggcgccaaatgttggaacttgctctcagcagcaaggaggccaacaagggtgaaaggtggtgacaacagggttacgtgctcgggggcaatagctctgttgatctcgcctctcacgggcactgtgcgggggtatttataggtatctgagtgcccagcgtcttgtgttaaggacgcatgtgccctcagacacctattttatccccagaatattcccataaagcagggttacaaactgtaattacaag

SEQ ID NO: 18595 - DNA, 956 bp, Zea Mays
acacgcacagaccgcatccagcaaacgccgagcaaacgacaacattacctgagccctcgcagcctcggcccgcgcccggaccacctcacaaccgtatgaaccccacatccggtcatagagggccccggcggattccttcaccacggggtcttcgacctcaaagacatctcgcccaaaatcctcatctgcctggtcgagggcctcaaagtgccggcagccctcgcgagagagcgcgttcatcgctgcctcgcaggtgaccagggaggtgaacgacatcaaccccgccaagacagtggggagctcctgcagttcctcctgcacccattccagacagcgaagtccggcctctcgctccggcacctcgaagtcacccgtccgcacacccagctcgcgatatgcagtcatgagctgcgtgcgcgtccgttcggcctccgctcgcatcgcggcctcggccccctccgcgcggctctccagggcagtaagccgccgctgcagctctccggcgagctccttggcgatattgccttccgcccgcgccagcctggcctccgcctgagcagcctactcttcggcgatggcttcgttggcctccctcctctcccccgccagctggcgccggaggtcagccttctccttctccagggcggccaccttctccgccagtttgtggcacttgctgtcggaggccgacttctcacggacagcgtcagcatgttgcgtccgaagtctctcgacctcggcagacaaagctgccgtaagggcccccgacgcggtgcggctggtgaagtcagccacctgcagaacacacgtaaggtcgttgcgtaaaaaaaaagctcggcggacctgactcagcgcctccgtcgctcgactcaacgcctccgtcgctcccttcagccggcgggtcgccacgcccgcctcgtccctgaccagcgcgagggcagacacctcgcctccgg

SEQ ID NO: 18596 - DNA, 383 bp, Zea Mays
ctcagacgaggcggcggccggcggcgtggcgtcggtggaagaagaagaggatggcatggctacgtaccgtcgtcggcggcgggcggtctgcttcactcgagccagaacgccggcgagcaaagggagcagcggaggaaaaggagcagcaagacggcgggcggctagggttttgcggagcgcggaaggcagagttcaaacagcgccgccccgcccccttttataggcagggcgcggcgcttcgggaaacccgcaatccaacagtacgccgtccatcaacggtcacatcaaaaacccccgcggaaccacttcgagcgagggcagtgtctccgccatctagcgacgtcttcggcaccaggtgactttgtcgaaatggtccctcggag

SEQ ID NO: 18597 - DNA, 1721 bp, Zea Mays
aaaataggtgtctgagggcacatgcgtccttaacacaagacgctgggcactcagatacctataaatacccccgcacagtgcccgtgagaggcgagatcaacagagctattgcccccgagcacgtaaccctgttgtcaccacctttcacccttgttggcctccttgctgctgagagcaagttccaacagatagcttgtaggtgtaatcatgtaatgctttataataccttatttgctaactacataagcataagcatccatgatcatgtaatttcatgtagagctcccaaaataaagagtgaagatttaagataaagtggttgttgaagacgagtctactccagtgcctgttcattaagtggatggagccatctaactgatcatcatgttagaagtatctagaacctcttctctgcaataaaggatcaactcgtagcaagcttttctgcaaaaaggagtctttgatcattgataaactttacctcaattcccaatcagctagcataccgttgagagtcttttcttttgtcgggtaaatcttgctgagtaattgtgtactcagggttttatcccctgttgtttttgcaggagaagttttattcccttatcttttggttagttacttcatgtggaggccttgaagcttagaatgtttatgtgtatctcttatggaaaggcttcacccttccaattattataataagttatgcactttgggtactatcaggacttgtaataaatacaattcttcttatgttgtaaaacttgagctttggaaatgtaaaatatgttttgtaaagtcttccactctatctctgaagtgtttgtgtatcgagtgtgattactgtaatatgcatgaatgtgggagatccttgggataatgagttcaagttgttgaactcgcgatagccttgttaagttacccggtacacgtgcacaaccatctaaggccgttaatggcaagggttggtgcatgtgggcctgataacttgggagggctgtcacactaatctcataatcgaaatatgtggcaatagctagaatgatccgaatagatttaagcagcactactggcgagaatgtctcgtcatagtcaactccttgaacttgtcgaaaaccctttgcaacaagtcgagcattatagatgttaacatttccatccatgtctttcttcttcttatagatccatttgcactctatgggtctaacaccatcaggtgggtccaccaagttccaaacttgattttctcccatggaatctatctcggatctcatggcaacttgccatttctcggaatctgggtccatcatcgcttctgcatatgttgcaggttcaacgttgtctaacaacaacacttcctcattgcccaacaatagcacttcttgacgtgcttcacgaagccttgctgaccttcgtggttgtggtggtgtttctcttgccacagacgtctcaacttattctgctacattagcatcacttgttggatcatgtgacactggctcatcctgaacttcttcaagatacactttttgtttacttttctctcttttgagaaactctttctctaagaacacactattctgggcaacaaacactttgccctctgtccggtggtaaaagtaatatcccaaagtttcctttggatatcccagaaacatgcacttgtccgattttggagtgagtttatctgactgaagtctgaaagggaaatgtgcccttgg

SEQ ID NO: 18598 - DNA, 388 bp, Zea Mays
gttggtcttggccgaaccacgggataaaccactgtgtcatctctgtgattgatctcttgtggtattgtgttttgttgagactccttcctagccacttggcatttattgttctaacacttaacaagtttttgtggctataagtttaagttttacaggatcacctattcaccccccctctaggtgctctcaattggtatcagaggcgttctcttcaagaaagggactaaccgcccgaagagatggatcctaaggggaagggaatcgtgatcaacgacaaggaaaaggagtccttcgtcaacgagccaaaagatgacaaatccaacgactctggctcgggccacagacataaagatgggaagaagaagaagacaagacgtatcaaggagat

SEQ ID NO: 18599 - DNA, 653 bp, Zea Mays
ccagatggagccttcccatggcttgtggcgggcttctcgctgatcccgatctccctcttggcggatgctcccgacatcacttcaagcggttaggctctaattaagcaccggtctttgataccaattgaaagtcgcctaggggggggtgaatagggcgaatctgaaatttataaacttaagcacaactacaagccgggtaagcgttagaaatgtaaatgagtccgcgagagagggtgaaaaacaaatcgcaagcaaacacagagtgagacacaaggatttgttttaccgatgttcggttcttgcaaacctacccccgttgaggtggtcacaaagaccgggtctctttcaaccctttccctctctcaaacggtcacttagaccgagtgagcttctcttctcaatcaaacggaacacaaagttcccgcaaggaccaccacacaattggagtctcttgcctcggttacaattgagtttgatcacaagaagaatgagaaagaaaagaagcaatccaagcgcaagagctcaaatgaacacaaatgtcgctctctctagtcactatttggtttggagtgattccagacttgggataggatttgatctcttttattgtgtctagaattgaatgctatagctcttgtaatgtgttgaaggtg

SEQ ID NO: 18600 - DNA, 476 bp, Zea Mays
aattgctagtcgtcctcatcataataagagtcatattcatgttgcttataatgattcacatgctatgtttgcttctagctctacttttgtgcatggtagaagtaggcctaggaaaatgtgtaatatacctactactttttccatgcttgcaacacttcgtttgtactttcatgtaagaatgaaaaagtggttgctaggaagttgggagccaaatgcaagggagacaaaacttgcatttgggttccaaaagttattgtgactaaccttgtaggacccaacaagagttgggtacctaaaacccaagcgtaaattgccttgcaggtttatgcatccgggggctcaagctggattatcgacagcggatgcacaaaccacatgacgggggagaagaagatgttcacctcctacgtcaagaacaaggattcctaggatacgatcatctttggagatgggaaccaaggcaaggtcaaaggatt

SEQ ID NO: 18601 - DNA, 221 bp, Zea Mays
ctcgattcgaatcgtctgcttctcgcagctaatgagactgcttgatccattgtactgcattgagtaaaaagtggaaatgagatactggcaaaggatattgattgataaaatgtttgataccatgtatgaatagctaggtactcatctagtttaaaaaggatcatactaaaatttgaaaagctaaaacttgattttagactaagctagtgcttttggcaaac

SEQ ID NO: 18602 - DNA, 1951 bp, Zea Mays
cttagattcgtggaacttggattgatttatagcatacatgtgttttatgccttgatcatgttccttatgcattttgttgcttatttatggtgatcaagttgtacaaacactccccggacctcaaaagtccatgtgtgagtgatgcacatatttagggggagatgtgctacaacttgaccctttgagactaaccatgtgcttgagttttcttaatttagtctcaaaggaggtttgaaagggaaaaggtggacttggaccatgcaagacttccactgcactccgatgaaagggtaacttattccaagttcatcttcatgctcttattgcctttttactcttcattgaagattttggtgaggcaatggggttccagggccaaaaatcatctcgttttggtgcttgatgccaaagggggagaaattaagggccaaagcaacaaatggatcagctaccacttgagaatttcgaaaaatagtagaatagagcttttggtttgactaaactctcttattgtctctcttgtcaaaagttggcctcttgtggggagaatggttgaatatgggaaaaaggggagtttttgaaatctttgatcaatttctctcggaacaactctatttatgtctcaacaagtgtgtttgacttagagataggaaattgaggttgatttgcaaaaacaaaaccatgtggtggcaaagaatgatccaaatatgccaaatttgatttaaatcaaatctgtgttcttatttgcattgatgttgcacatctttgtattgcttttattatgttggcataaatcaccaaaaagggggagattgaaagggaaatgtgcctttgggccatttctaagtattttggtgattgagtgccaacacaagtagtcatgtgttaatctatgccaaatgatggacaaagtgaaaatcaacataaaggtatatttctaagacttagtactttggtttaaggactaatgtattgtgtttaagtactggaaacaggataaatcaatttggaaaagagatggctttgttcagccaaagacagttcagtctgggtgcaccggacaatgtccggtggtgcaccggacagtgtccggtgcgccaggctggctctggtgaaaaggccgctctcgggagttcgtcggcggcgtacggctaaaattcaccggactgtccggtgaaccaacagtcggtcgagccaacggtcggccgcgcaatctgcgcgtgacgcgtggcagagacaacggtcagaagggggcaccggacagtgtccggtgcgccaacggctctagatcttcaacggtcggctgcgccaaaacaggaaagaaatccacaccagacagtgtccggtggtgcaccggactgtccggtgcgccagtcgacagaaggcaagatttgccttcctggaatgctctcagttttgctgactggatcaagagatatggagggatgaagttgggtttgtctcactgctgaactccgagagaaaatcccggatttgacatgtctagggcacgaatcaaaatgccatcttcacacatgttgcagaggggttagtttagaaaatttttgtcaatggggacttaaggatttgagctagggataaaggtgaacacgctcaagttctaggtggattctccctagagagcttccacttggatggcctttttgggtttttaataaactattttggccaaacttttataacaattgttgtagcttaatttgtgtatttcaacttttataattggcccaagccatgattccatgtttttcatggtcttttttcccatttcttcctttctacttaaagggcctaattagggttgttctagggttttgacattttccccttttttgcatgatatgatttaggcatgatccttaagataaaaagacttagttgagtttttgctcctaagtttttgatgtcttttgctcaattgtattcacat

SEQ ID NO: 18603 - DNA, 493 bp, Zea Mays
ctttctccaggctgagactaattgaggggtgttcgacaccttcttccatatagggcttcgaagggtgccatctttaggctggattgataactgtcgttataagcaaactctgccaaagagaggtacttatcccagttcttgccgcaatcgatcgcacaagcccttaacatatcttcaagaatttgatttaccctttcggtctgaccatcagtctgtgggtgataagctgaacttcttattagcttggttcccaaagactcttgcagttgttcccaaaatctggcaacgaattgggctcctaccgagatcccgttatcaagatgaatacaatcaattcctgacctcgcgcgagtgctagaaaaatcactcgacttctaccgagatcctaattagcaaagcaactactcgacctagcatactagtatctatctcaaaaaggaatcctgaattcatgcaactaagggtttcaagcaactcctacacttaagtgcac

SEQ ID NO: 18604 - DNA, 308 bp, Zea Mays
cttcctttctacttaaagggcctaattagggttgttctaggtttttgacatttttccccttttttgcatgatatgatttaggcatgatccttaagataaaaagacttagttgagtttttgctcctaagttttttatgtcttttgctcaattgtattcacatgtgataatgatcttgagttagcactgagaagtaccctaggtaaccctggggtgctatagttaccatggtaaagatcatcataccatccatcatcgttgattggagtttcttgacgaagctctttgtgttgtggcactcacccttgat

SEQ ID NO: 18605 - DNA, 695 bp, Zea Mays
aaacaacaagtgtaacccattgacttgttcatatttacatttcataaaacatgtatgaatgtcaacagggtttataatacattgataccttcggcttgctcgaaggtgttgatgcgagaaggattacaaatcagcgtgaacaatacagtgctactgttcatctatttataggcgcgggacgcagccaggtaaaagtacatttatgtccctgacatttacttatgattgtaacataaattattaaggactaagtagtctttttccctttcggtcatcatcatcatcagtcttcatcaccgttataagccgaagttgttactcttgccgtagcttcggtgtttattctcatcatccttagatcatatcttcatctcgtatgcctttgtcatgagagaaagacttccatcctgatgacgaagctccctgtaataatccttgtcattttgaaaacatatggttagtcatgtttttgaggaccttcggaagagtaaggcccccaacaattacacatcggaataaaagcggaaagatttaaaataacttaattttacgttgataagttgaagtaacaatatagaacgagtatttattacaatatagggtcttgagtgcttctacttattacatcaatggaaggtagacaccttccatatgttcatacttaatttttatcctcttgcttggggacaatcttg

SEQ ID NO: 18606 - DNA, 1353 bp, Zea Mays
cttatatcgagggattcttatatcgtccccttctcatagaaaccatagtggattttctaaagctagtgaaactttgtaaaggcctcatagtgggaccctacctcgtctcctcggtagagatgaatgggaagtcgcgatcccttggcaaatgggtaacacgacttttaggtaaaaggtacaacctgtgcagagtgtaaaataggtatatcatccatgctcatcatcaagagcgactcaagactcttgcatgattaatttatgaaattgaatttaatctgtcatttgcattgcattgtgagatattattattaattgtgatcaattactgaattgggctggtatactcttatacatagtaattgctaataaaattttgacgcaatgctcagccttaaccattcttcttagtaagccttacacttcacatgagcccccaacgtaattgagctcatgcacattattccccacaacatgttgagcgatgaacgtatgtgagcacactcttgctaaactcacaccaggtcaagaacaggttcttcaagatgaggagcatgaaggatgctacgatgagttcatgagaggtctagatcgtcgtctcccagtcaactatggttgtggaggatcgatgtcgtcatataattatttagctattttgtacggaacccctattatataataaagatgtgacattggtttctataccatgagtcatcatatgtgtgagacttgatcctaccacatatttgagacacgtctggatttgtttaaatctacgtgtgacaagtgtttgataaaataaacagaaaattaccccaattcgtagtgtcattctttcgatgagagtaagagtctcgttgcttacaaagtgctcaatttaagtttttagcaacaaaatttgagtggctcctgttgggggccttcgtcttccgaaggtcctcaaaaacatggtttaacaatgtttctggagtataatacatgaacaggtatcttcggactcggatcagaaccacaatgtgaagaagtacaaaagatgcgaaggttggcgcagagccaaagctatgcacaggggagcttcggcatgatagcggaaaggggaaccgacttaaaagggaaaaggctatttagacctcgatggattactatagagacattagcaaatgtaaagggcatgagtgtaattttacatgggctgcgtcctgtgcctataaatagatgaacagtgctcccgtactgttcacgctgacttggcatttgcttttgtgtcacgcttgtaccctttctttcttttaagccaaaggtacatttgtaacttgaaaccatttctattttctatgataataaaatagaaatgag

SEQ ID NO: 18607 - DNA, 289 bp, Zea Mays
ggttagggttaggtttttttctttttttccttttttctattttcttttctaatttcgaaatacatatttaaataaccctaaaatctataataattaaaccaaaattatttataaatacaatatttatttttagactaataattattatattagttatgtgaattttcatttaagagaaaatgctattcaatatctaaaatcaataatgagcaatcaaaaatcattccaaatgcacgtaaataacaaacacttcataaaattttatctatgcaaaattgttccattttaa

SEQ ID NO: 18608 - DNA, 288 bp, Zea Mays
ataaatagatatcatgataagaaaacataagagacattaatagtctgctagcaatgagaagacaaccataacggcatgagctaaattatccagtgcgcacaactagttagaaacaaacatcctttgacaagaagcttctagttaaatcatgactgcgcctaagcagcgttattataagagtgaaggtggatgtgctactacttcccacttcccttgatgagcagcaagcacctgcactgagtaatgcaagagtgagatgaaacatctcagcaagcgaataattttgac

SEQ ID NO: 18609 - DNA, 107 bp, Zea Mays
tagccccccccctcttcccctcccaaggtgcagcccctttcccgcatggatccacgttgcgttggtgcaagtctccaattggattttggtggaaggaaggagggaga

SEQ ID NO: 18610 - DNA, 111 bp, Zea Mays
gaggagcacgttgaattgaaggggaagagaggatcaaggagatgttcttctccatctcttcttgcagaatttcatggggaaaccctaggtggctacactccagatcatgcc

SEQ ID NO: 18611 - DNA, 181 bp, Zea Mays
ttttataaatacatatattatacttgaatatagagtacaaaacacaagaaacatgtgtttttttggttatgtgtgtgtaaataaatgtttagagctaataaatatggtttaaacactaaaaatgcatacttttaggatattttatcatttgagtgtcatattgttatgggcccgttaggcc

SEQ ID NO: 18612 - DNA, 1387 bp, Zea Mays
ggccacggaaagatctacaaattatctacgactcatatatagactttttatttttttgaggccactaagatcacggaaaactggtatgaacagaaactgtcgaatctgccatgctgcagaaaactaaattcgagatcaaaacctaaccccacatctaatacaacctctaatcctttaatccccatgatccaccacctccaaaagcacataattacagggagaaacaaggattccatccatacctagggtttccccaagaaaatatgcaagaagagatggggaagaacacctccttgatcctctcttcctcttcaattcaacgtgctcctcctcttctcgatccttgctgtgtagggggagatcttgggggaggaagcaatggaggatggctgccatatggggagggggcggccagccaagggggagaaagggggtggcggccaagaggggggggtgaagggaaaaaaagggtggccacctagggtttttgtgggagaaagaaacgacgcctcagatgacttctatctttgcatccaatggcccacaaccctttacctcatccacgcaccaaagattaacttttggtcaacattttttttgggatattacactctaccccccttaaaaagaattcaacctcgaattcggccactccaagcaaaacacccaaggtaccccatatagcaccaccattcaaaacatgggtccattattggtcttaattaacagaagaacttctaccttggactaattgtctaaggaaactacacgacctgacatcaagcatgaaacaacatgcaatgaagctcaaagcaattcatagttgcaatcaacactacaatttcacaccatcaaatttggatgcagctatacatcaacatcaatgtcttaagacaacactcttttatgaaggggtaatatgcaccaagcacaatccttaccaacttcaacaattaattttaattaaatggtgaaacatctacacccgacgaatgtataagaagatcaaacacctcaccttaaagcaacatgaaacaagtagttctattgaaacaaaaatcctaatcttcctaaaccttattcttgccatcatgaaaagataatcatgtaatctaacattctttgcaccccacaaaagggagaaaatccacagaactaatggagcaataaagccaacaagaagccaataatattctgcgcggcacatttcatcgaagaaatgccaaaagctccacaaagagcactgatagcacaacaacacaatacttggttaccaatgtcactatacttcatccaacaactcaactaagaaaaatatccgaactagtaaggttaacctacacataatataagtcttcatctactgtagttcataaacttacatttc

SEQ ID NO: 18613 - DNA, 212 bp, Zea Mays
aatcaccttggattctccccttttccttccttccttcttccctccaccaaaaccaattggagacttgcaccacgcgacgtagatccaagcgacaaggaatggcaccttggggaggaggagatgggggtggctagggttaggtggtgtggctgcaagagtttgagggaggaggagatgggaggggggcggcggccaagggctaggggaaatgg

SEQ ID NO: 18614 - DNA, 396 bp, Zea Mays
gggacccacgcgctagtcgctgtgtcacgctgacgaaccgatcccacgggacagcggcagaaggtgcaggcgcacccgtgctggatctaggccacgaggtgtgcgatttaagtgggccaagcggtggagattctgggccacggtgttgagctgggtctgcagggtggttcgacccacacgcaggttatttctttttttctttttttttcttttccttcctattttagttttctactttcaaactcaatttaaatctaggttttgaatttcaagcttcaatttatatttaacaaacaaaataatcccggcacgatgcaaagctttatttttatttaattatttattatcttggtttatccattaaagatgtgctttcaatatggaattcatatacat

SEQ ID NO: 18615 - DNA, 57 bp, Zea Mays
caacaatctgcacatgatgatgatcttggaagtctgatgtatgtctaaacttgctgg

SEQ ID NO: 18616 - DNA, 340 bp, Zea Mays
gagagactgtgattctattgagttgtgtctaggagtgaatgcactagctcttgtattgaatgtgaagtgctggaaacttggatgcttggagtggtggtggttggggggtatttatagccctcaaccaccaatttaccgttggggcaggctgctgtcgatgggcgcactggacagtctggtgcgctagccacgtcacccaactgttagggttcgggagcttctgaccgttggaggctttgtcctctagtggcaccggacagtccggtgccgcaccaaacagtccgatgccgcaccagacaggcactgttcactgtccggtgcgcctttgacgactgctctg

SEQ ID NO: 18617 - DNA, 4242 bp, Zea Mays
ccctcctgccggaaggcgggttgccgcgtcgtgcacacgggaggaccgcccaagatatcgcgcgctgccagggcggcgttcgtgttctggggcggtcctgcctttgcaccggtacgatgcctccacgcggaggtcggtgccccactcgtccgggaggatctgagtggggatctgccggagggctgacggcccctgtcgtcggtgccgaggtagaggcggctcgagaagtccccgttgccgacgggatcaccgccaccatccgcgctttgggcctccggctctttgtacttgtcctcgcccctcgagcgtcggcataggcgagggcaaggttgcagtagcgtccgccctgaggccatcgctgctgcagttcggccgcccggagcggaggtcgtcgttgtcgccgctgctggagcgggcgacggcgtgccgctcgtcggtcttctgttgctccgcaggcccccccaatcgagtggggttgttcgtacctgcggaggtggaaccggagttccgcttgtatggcactttgaatgccagtgtttttgttcattgtggctgtcgaggcctgaacatgtatgtaatttcggcatggagccgtgttttttccttattttcgagcactaagactcgcctgttggttgtccgaaccgcttcaccaagcgtgagtcgccccgtgtaaaggtgacgagtgaggtatccgtatcccggaggcgtaggagtccctcggctcggtcggccttgttgtccgaggcttcccttgcttagttaaaggaaaccctcagccgctcttcgatgagtcgaggccaggggtagcggtgtcagcatggacagaggcagagttggcttgaaaggaagacttggttggccggagcctggccgggtcgtccgctagcgggaccgacgccggagttgatcttccgaggtctcgggtcgggctgatgtctttgggggacagctggccgaggcctcggggcgaccagccgaggcgcctgcccgagccagattctcggagaagaccctggcggcgatggcccgggtgtggtgatgacgccgtccttcggagtggagatcctcggaccgcgtcgccgtccgaggctaggtcggacctcgccgaaggtgttgtcgacgccgagggtgctgtggctccctcaactgtctggatccgagcctgcaggatcggattatcttgtagcacgtgttttctgcggccgccgaggcccaaacacaccctcgtcgtgttgtaaagctgtgtctcttttcctcttgtttcgagtatctggacttcttcgccggtaacagaattgtccgtccatagggttctgtcaccgacgcagtcgagaaggctcgaagaatcgcttcggcagaggagctttcgaacgtgaagacttgttcggtccgcggaatcacttatccgagcgtgagttacttatcgcagaaggtgatgagtgaggtatccgtatcccggaggcgtaggagtccctcggctcggtcagccttggctgcttacgtgtactccgtcgttttcaggatccactttcgaagtagtcgaaaagcacgaaagacattctggcagaaaggatcttttttcgaggaaaaatttcgacgcagagggggttcccccccttttagcccccgagggagggtcgggctttgccgaggcaaggctgacccttccttgatgactaaactttgcatgggagcgaggtatatgaacaacttgaaaacatcttaaggatagaagcgacgtagctgttggatgttccaagcgttgctgtagacctcgccttgactgttggccagcttgtacgttccgggcttcagaactttggcgatgacgaacggcccttcccaggggggcgtgagcttgtgccgcccttgggtgtcttttcgcagccgaagcaccaggtcgcccacctggaggtctcgggaccggacccctcgggcatggtagcgtcgcagggactgctggtaccgcgccgagtgtagtagggccttgtctcgagcctcctccagctggtccagcgagtcttctcgattaacttggttgctttggtcagcatagaccctcgtcctcggggaaccgtattctaagtctgtgggcaagatggcctcggccccatagactagaaagaacggcgtgaagcccgtggctcggctcggcgttgtcctcaggctccagaccaccgaggggagttccttcatccatcgcttgccgaacttgttgaggtcgttgtagatccgaggcttgagtccttgtagaatcatgccgttggcacgctctacttgcccatttgacatggggtgagccacggcggcccagtccacccggatgtggtgattctcgcagaagtccaggaacttcctgccggtgaactgggtgccgttgtcggtgatgatggagttcgggaccccgaagcgatggatgatgttggtgaagaacgccaccgcctgctcggacttgatgctgtttaggggtcggacctcgatccacttggagaatttgtcgatggcgaccaacaggtgcgtgtagcccccgggtgccttctgcaaggggacgacgaggtccagaccccacacagcaaaaggccaggtgatgggtatcgtctgtagagcctgagcgggcaggtgggtctgtcttgcgtagaactgacacccttcgcaggtgcggacaattctagtagcgtcggccaccaccgtcggccagtagaagccttgtcggaaagcattcccgacaagggctcgaggcgctgcgtgatggctgcaagcccccgagtgtatctctcgcaggagctcctgaccttcggcgttggagatgcaccgctggaggatgcctgaggggctgcggtggtagagctccttctcatctcccagcaagacgaacgacttggcgcgccgcgccaaccgtcgagcttcggctcggtcggggggtagctctccttggtggagatattgcaggtacggggtctgccagttttgatcaggcgtgaccccgcttcgttccccccgacgtgcagcgtctcgccctcgggggccgagggtacctcgggctgaaccgagggtgcctcgggccgagccgagggtgcctcagactgtgccgagggtacctcgggccgagccgagggtgcctcaggctcgggcgtgtcgtcgatcttgacggagggttgatgcagatctcgggagaagacgtccgggggaaccgtggtccgccccgaggctattttagccagctcgtccgcagtctcgttgtagcgccgggcgatgtggttgagctcgagcccgtagaacttgtcttccaagcgccgaacctcatcgcagtaggcctccatcttcgggtcgcggcagtgggagttcttcatgacttggtcgatgacgagctgcgagtcaccgcgagcgtcgaggcgtaggacccctagctcgatggcgatccgcaacccgttgaccagagcctcgtactcagccacattgttggacgccgggaaatggaggcgtagcacgtagcgtctgtgcttcccgaggggcgagatgaagagtaggcctgcgccggctcctgtcttcatcagcgacccgtcgaagaacatggtccagagctctggttggatcggagctgttggtagctgggtgtcgacccattcagccacgaagtccgccaagacctgggacttgatggccttccgaggggcgaacgagattgcttcgcccatgatttccaccgcccactttgcgattctacccgaggcctctcggcactggataatctcccccagggggaaggatgacaccacaattaccggatgagactcgaagtagtgtcacagcttccgccgcgtcaggatcaccgcgtacaacagcttctgaacttgtgggtagcggatcttggtttcggacagtacctcgctgatgaagtagactggcctctgaacgggcaatgcatgcccctcttcttgcctctcaaccacaatcgcggcgctaaccacctgagtggtcgcggcgacgtagatcaggagggcttctccggcagctgggggcaccaagataggcgcattcgtgagaagcgccttcaggttcccgagggcttcctcggcctcaggggtccaagcgaagcactcggccttccttaggaggcggtacagaggcagacctctttcgccgaggcatgagatgaagcggctcagagccgcaagacatcccatgaccctctgcacgcctttcaagtccttgatgggccccatgctgacgatggctgcg

SEQ ID NO: 18618 - DNA, 1858 bp, Zea Mays
aggaaagacagagtttcgcacccagcagtggaatccacgatttgatcgatgcgaggcagagggtagggaaccttcggacatgctttgtttagaccagtgtagtctacacacatccgccatttccctcctttctttctcacaagcacagggttggcaagccattcgggatgggatacctctttgatgaaccctgcctccattagcttgtggatctcctcgcctatgactctgcgcttttcttcgtcgaatcggcgcagaggctgcttgacgggtcgggctccggctcggatgtccagcgagtgctcggcgacatccctcggtatgtcgggcatgtccgagggactccacgcgaagatgtcggcgttcgcgcggagaaagtcgacgagcactgcttcctatttgggatcgagctcggagccgatccggacttgcttggaggcatcgctgctggggtcgagggggacagacttaaccgtctccgctggctcgaagttgccggcatgacgcttcacgtctggcacctccttagagaggctttccaggtcgacgatgagggcctcagactcggcgagggcctcggcgtactccacgcactccacgtcgcattcgaacgcgtgtttgtacatggggccgacggtgatgaccccgttggggcccggcatcttgagcttcaggtaggtgtagttggggacggccatgaacttcgcgtagcatggcctttccagtaccgcatggtaggttcctcggaacccgaccacctcgaacgtcagggtctcccttcggaagttggagggtgttccgaagcagacgggaaggtcgagttgttcgaggggctggacgcgcttctcgggaatgatcccatggaaaggcgcagcgcctgcccggaccgaggacagatcgacacgcaggagcccgagagtctcggcgtagatgatgttgaggctgctgcctccatccatgaggaccttggtgagcctgacgtcgccgatgacggggtcggcgacgagcgggtatttccccgggctcgacatgtggtcggggtggtcggctcggtcgaaggtgatgggcttgtcggaccagtctaggtagactggcgccgccaccttcaccgaacagacctcccgacgctcttgcttgcggtgccgagccgaggcgttcgccgcttgcccaccgtagatcatgaagcagtcgcggacctcggggaactctcctgcctggtgatcttccttcttgtcgtcgtcgcgggccctgccaccctccacgggtggcccggccctgtggaagtggcgccgaagcatgacacactcctcaagggtgtgcttgacgggtccctggtggtaggggcacgactccttgagcatcttgtcgaagaggttggcacctccggggggtttctgagggttcttgtactcggcggcggcgacaaggtccgcgtcggcggcgtcgcgtttcgcttgcgacttcttcttgcccttcttcttggcgtcgcgctgagttggcgcctcgggggcatcttccagtgggcggccctggggctgcttatccttccggaagatagcctcgaccgcctcctggcccgaggcgaacttggtggcgatgtccatcagctcgctcgccctggtgggggtcttgcgacccagcttgctcaccaggtcacggcaggtggtgccggcgaggaacgcgccgatgacatccaagtcggtgatgttgggcagctcggtgcgctgcttcgagaatcgccggatgtagtcccggagagactctcccggctgttgccggcagctccggaggtcccaggagtttccagggcgcacgtacgtgccctggaaattgccggcgaaagcttggaccaggtcgt

SEQ ID NO: 18619 - DNA, 1037 bp, Zea Mays
caagactcccgaaacggagcaccgtcccgggttggagaggtcgctggagactgcccatctggagcttgacgggatgttgttcgtcaacacgcagcaggcccctacctggcgcgccaactgtcgacgtttcgagaccgggggtcccttggccgacgagtgaaatgtcgctgcgtgccccagcccagatgggtcggcgcgaggccgagcgcgaagggggggagaaaggtggccggagacgggcgtgagagaggtggaaatcccgtggccttcgtgttcgtcccgcgcccaggtcgggtgcgcttgcagtagggggttacaagcgtccacgcgggtgagggagcgagcggccttacgcgagcgcctgtctcgtcctcgtccccgcgcggccaaccctctgtaagagggccctggtccttccttttatagacgtaaggagaggatccaggtgtacaatgggaggtgtagcagagtgctacgtgtctagcgaaggagagctagtgccctaagtacacgccgtcgtggcagccggagaggttttggcacccagttggtgtgatgtcgtggccgtcggaggagcgttggagcctggcggaaggacagctatcggggcggttgagtccttgctgacgtcctcttgcttccataagggagccgagagccgccgtcgtcagggagcgtgcggggcgccatcattgcctatctggcggagcgagccagatgggacgtcggtcttgttccccgtagcctgagtcagctcggggtagggtaatgatggcgcctcctgttgacgtggctggcccgcgccctaggttgggtgatgtggaggctcctccgaggtcgaggtcgagtttgtcttccgtggccgtggtcgagtccgagcccctgggtcgggcgaggcggagaccgtcggctgaagccagggctgagtccgagccctggggtcgggcgaagcggagttcatcgtcttttggggctgagcccaagtccgagccctgggtcgggcgaagcggagttcgtcgtcttctggggctgagccc

SEQ ID NO: 18620 - DNA, 1387 bp, Zea Mays
atagtcccatgtttattaatgaacagattcataaaaatgcacaagctactactgtgttgctagcctctttgtgcagggacgagtaccataaggtgagcggattggacaatgccaagcagatctgggacaccctcaagatctctcatgaggggaatgatgtcaccttgcttaccaagatggagttggtggagggcgagcttggacgattcgcgatgataaggggagaggagccaacccaaacatacaaccggctcaagacccttatcaacaaaataaggagctacggaagcacgcggtggacggaccacgatgtcgtccgcctaatgctaaggtcctttaccgttcttgatcctcatttggtgaacaatattcgtgaaaatcctaggtacaccaagatgtcgcccgaagaagttcttgggaagttcgtaagcgggcgaatgatgatcaaggaggcaagatacgtggacgacgcgttgaacggtcctattcatgagcctcaacccattgctctcaaggcaacgaggagcaaggaggcgctaccaagcaaggtggcgcaaattgaggcggccagacttaatgatgaagagatgaccctcatcatcaaaagattcaagacgacgctaaagggtcgcaagggacagccaagcaagaccaagaccaaggaaaagcgttcatgcttcaaatgcggtaagcttggtcattttattgctaactgtcccgacaatgatagtgatcaggatcaagggaacaagagggagaagaagaagaactataagaaggcaaaaggcgaggcgcatctaggcaaggagtgggattcggattgctcctcttccgactccgacaatgagggacttgccgccaccgccttcaacaaatcagccctctttcccaacgagcgtcacacatgccttatggcaagggagaagaaggtatgtactcaaaactctacttatgcttcttcaagtgaggacgaatctagtgatgaggatgaaattgattattcatgtttgtttaagggcctagatagaaccaaggtagacaaaattaatgaattgattgatgccttgaatgataagaataggcttttagaaaagcaagaggatttgttgtatgaagaacatgataaatttgtagaggcacaaaaatcctatgccttagaagttaaaagaaatgaaatgctttcttatgaactgtctacttgtcatgaaaccatttctactttacaaggtgttaacaatgatttaaatgcaaaattagaagtagcaaataaatctaattcttgtgaagaacacgttatgatttgcactaggtgtaaggattttgatattgatgcctgtagtgaacacctagtttcaatttcgagattgaatgatgaagtagctagtct

SEQ ID NO: 18621 - DNA, 316 bp, Zea Mays
ctaaaaggaaccatgcttttatgtatcatgataggagacaaactagaaatgcttataggagttataatgcttatgatgatttcgactctcatgccatgtttgcttctagttcttcctatatgcatggtagaaatatgtctaggagaaatgctattcatcatgtgcctagaaagaatattattcatacttctaggaaagtagtgaatgaaccttctacaatttatcatgctttaaatgcttcctttgctatttgtagaaaggataagaaaatagttgctaggaagttaggggcaaaatgcaagggagacaaaacttg

SEQ ID NO: 18622 - DNA, 976 bp, Zea Mays
aatttctaatgagcactctatctccaatgtgtttttagttgagtctcttggttacaatttgctatctgttagtcaactatgcaatataggatacaattgtttattcacaaacgtagatgtgtctgtctttagaagaagtgatgggtcattagcttttaaaggtgtattagacggcaagctttacttagttgattttgcaaaagaagaggccggtctagatgcatgtttaattgctaagactagcatgggctggctatggcatcgtcgcttagcacatgtagggatgaagaaccttcacaagcttctaaagggagaacacgtgataggtttaactaacgtgcaattcgaaaaagatagaccttgtgcagcatgtcaagcaggtaaacaggtgggaggagcacatcacagcaagaatgtgatgaccacatcaagacccctggagctgctacatatggacctcttcggacccgtcgcttatctaagcatagggggaagtaagtatggtttagttattgtggatgacttttcccgcttcacttgggtattctttctgcaggataagtctgagacccaaggaaccctcaagcgcttcctaaggagagctcaaaacgagtttgagctcaaggtgaagaagataaggagcgacaacgggtccgaattcgagaaccttcaagtggaggagttccttgaggaagaaggaatcaagcacgagttctccgctccctacacaccacaacaaaatggtgtggtagagaggaagaacaggacgctcatcgatatggcaaggacgatgctaggagagttcaagacccctgagtacttttggacgaaagccgtgaacacggcttgccacgccatcaacagggtctaccttcatcgcctcctcaagaagacgtcatatgagctactaaccggtaacaaacccaatgtatcttactttcgtgtatttgggagcaagtgctacattctagtgaag

SEQ ID NO: 18623 - DNA, 702 bp, Zea Mays
ttatgactcaaatacaaaggcgtatagagtcttcaacaaatcatcgggtttggttgaagtttctagcgacgttgtatttgatgaaactaatggctctcctagagagcaagttgttgatcttgatgatgtagacgaagaaggtgttccgacggctgctatacgaaccatggcgattggtaatgtgcgaccacaggaacaagataagcaagatcaaccttcttcctcaactatggtgcatcccccaactcaagacgatgaacaggttcatcaacaggaggcgtgtgatcaagagggagcacaagatgatcatgtgatggagaagaagcggaaccggcacctccaacccacgttcgagcgatggttcaaagggatcatcccgtcgaccaaattctgggtgacattagcaagggagtaactactcggtctcgattagttaatttttgtgaacactactcttttgtctcttctattgagcctttcagggtagaagaggccttgctagatccggactgggtgttggccatgcaagaggagctcaacaacttcaagcgcaatgaagtttggacactggtgcctcgtcccaagcaaaatgttgtgggaaccaagtgggtgttccgcaacaaacaagacgagcacggggtggtgacgagaaacaaggctcgacttgtggcaaaaggttatgcccaagtcgcaggtttggac

SEQ ID NO: 18624 - DNA, 600 bp, Zea Mays
ttcaaggttgggaaagccgatccaactcttttcactaagacatgtgatggtgacttgtttgtgtgccaaatttatgtcgatgacataatatttggttctactaataaaaagtcttgtgaagagtttagcagggtgatgacgcataaattcgagatgtcaatgatgggcgagttgaactacttccttgggttccaagtgaagcaactcaaggacgacaccttcatctctcaaacgaagtacacgcaagacctgctgaagcgatttgggatgaaggacgccaagcccgcaaagactccaatggggaccgacggacacactgatctcaacaaaggaggtaagtccgttgatcaaaaggcataccggtcaatgatagggtcattactttacttatgtgctagtagaccggatattatgcttagcgtatgtatgtgtgctagatttcaatccgatcctaaggagtgtcacttagtggcagtgtgaagcgaatccttagatatttagttgctacgccttgcttcgggctctggtatccaaaggggtctacctttgacttaattggatattcagattccgactatgctggatgtaaggtcgatagga

SEQ ID NO: 18625 - DNA, 774 bp, Zea Mays
ggaaaatcctgttgagcacagccgaacaaagcacatagacatccggcatcactttttgagagaccaccagcaaaagggagatatcgaagtgtttcatgttagcaccgagaaccagctagccgatatctttaccaagcctctagatgagaagaccttttgcaggctgcgtagtgagctaaatgtcttagattcgcggaacttggattgaattgtagcatacatgtgtgtatgcttttgatcatgttcattctgcattttgttgcttattgtggtgctcaagttgtacaaacattccctggacctcacaagtccttgtgtaagtgatgcacatatttagggggagttgtgttacaacttgaacctttgagactaaccatatgcttgagtttgctttagtcttgaaggagaattgaaagggaaaaggtggacttggaccatgaaagacttccactgcactccaatgagagggtaacttattccaagttcatctcatgaactcttattgccatttgctcttaattgaagattttggtgaggcaatggggttataaggccaagattgatcccgttttggtgcttgatgccaaagggggagaaaataaaggccaaagcaataaatggatcagctaccacttgagaaatattgaaaatagtaaaatagagcttttgttttgtcaaaactcttgcattgtctcttttgtcaaaagttggcctcttgtggggagaagtgttgattatgggaaatagggggagtttttgaaatctttgatcaat

SEQ ID NO: 18626 - DNA, 11155 bp, Zea Mays
cccagatctgcaacggtcggccgcgctattttaggaaggaaatcgggcaccggacagtgtccggtgtgcaccggactgtccggtgcacctgacgacagaaggcaagattggccttccagatttgctctcaacggctcctagctgccttggggctataaaagggacccctaagcgcatggaggagtacaccaagcaaccttagagcattcttgatcacccacactcagtctttgcgcattcgtttgtcattctcagtgattcgagctccgttctagtgagaactttgagatagtttcttgagctcgattctcggccgtgtgtgtgcacattttgctatggatttgtgtgtgttgctaatccctcccttactccgtatttctttgtgaatctcaagtgtaagggcgagaggctccaagttgtggagattcctcgcaaacgggatattgaaaggcaaagcaaaacaccgtggtattcaagttggtctttggaccacttgagaggggttgattgcaaccctcgtccgttgggatgccacaacgtggagtaggcaagcgttggtcttggccgaaccacgggataaaccactgtgtcatctctctgattgatctcttgtggtattgtgtcttgttgagacttctctctagccacttggcgattattgtgctaacacttaacaagtttttgtggctataagtttaagtttcacaggatcacctattcaccccccctctaggtgctctcactgggctaaatgaggatgaaatgaccctcatcatcaagcgcttcaagatggcgctcaaaggtcgcaaggagcatcctaacaagagcaagacgaagggaaagcgctcctgcttcaagtgtggtaagattggtcactttattgctaactgtcccaataatgatagtgactaggaacaaggaaagaatgggaagagagagaacaagaaggtttacaagaaggctaagggcgaggcacacattggaaaagagtgggactcggattgttcttcgtccgactctgacgacgaaggactcgccgccacggccttcaacaaatcgtctctcttccccaacgagcgtcacacctacgtcatggcaaaagagaagaaggtaagtactcgaagtactattacgtatgcttcttcaagtgatgatgaatctagtgatgatgaagtagactatgcaagtttattcaaaggcttagatagaactaaaattgataagatcaatgaattaattgatgccttgaatgagaagaatagattgttagagaaacaagaggatcttctatatgaagagcatgataaatttgtaagtgcgcaaaattctcttgctttagaagttaaaagaaatgaaatgctttcatgtgaattatctacatgccatgaatctatttctagcttaaagagtattaattatgacttgaatactaagttagaaatagctaataaatcaagctcttgtgtagaacatgttgtgatatgcaatagatgtaaggatttcaatgttgatgcttgtagtgaacacttaatttccatttccaaattaaatgatgaagtggctagtcttaatgcccaacttaagactagcaagaatgaccttgataaactaaaatttgcaagagatgcctacactattggtagacacccctcaactaaggatgggcttagctttaagagggaagccaagaacttaacaagtcaaggggctcccattttcaacaaggaaaaagggaaggctcctatgactagtaatagtcaaaagaatcatgcatttatttatgatagaaaattttctaggaatgcttatcataataggagttgtaatgcttatgattcaaatgccatgattgcttcaagttcttcctttgtgcacggtagacatatgcctatgagaaatgttgttcatgtacctaggaaagcaagtaatgaaccttctacaatttaccatgcttgcaatgcttcttttgcaatttgtaggaagaataagaaagtgattgctaggaaattaggggcaaaatgcaagggagataaaacttgcatttgggtccctaaggctattgttactaaccttgtaggacccaacaagagttgggtacctaaaacccaagcctaatttgccttgcaggtttatgcatccgggggctcaagctggattatcgacagtggatgcacaaatcacatgacgggggagaagaagatgttcacctcctacgtcaagaacaaagactcccaagattcaatcatattcggtgacgggaatcaagcaaggttaaaggactaggaaaaatagctatttcatccgagcattccatctctaatgtgttttagttgaatcgctcggatataacttgttgtccgtaagtcaattatgcaatatgggttacaattgcttatttacaaatgtagatgtgtctgtctttagaaggagtgatggttcattagcttttaagggtgtactagacgacaaactctatttagttgattttgcaaaggaagaggccggtctagatgcatgcttaattgctaagactaacatgggctggctgtggcatcgccgtctagcacatgtggggatgaagaaccttcacaaacttctaaagggagaacatgtgttaggtctaacaaatgtaactttcgaaaaatatagaccttgtgcagcttgtcaagcaggtaaacaagtgggaaatgctcatcacagcaagaacgtgatgaccacatcaagacccctgaagctgctgcatatggacctcttcggacccatcgcctacctcagcatcggggaagtaagtatggtcttgttattgttgatgagttttcccgcttcacttggtattctttttgcaggataagtctgaaacccaagggacccttaaacgcttcctaaggagagctcaaaatgagtttgagctcaaggtgaagaagataaggagcgacaacgggtccgaattcaagaaccttcaagtagaggagtaccttgaggaggaaggaatcaagcacgagttctccgctccttacacacctcagcaaaatggtgtggtagagaggaagaacacgacgctcatagacatggcgatgacgatgcttggagagttcaagacacccgagcggttttggtcggaagccgtgaacacggcttgccatgccataaaccggtctaccttcatcgcctcctcaagaagatgttgtacgaactcctaaccggtaacaaacccaacgtttcatatttttcgtgtatttgggagtaaatgctacattctagtgaagaaaggcaggaattctaaatttgctcccaaagctgtagaagggtttttgttaggttatgactcaaatacaaaggcgtatagagtcttcaacaaatcatcaggtttggttgaagtctctagcgacgttgtatttgatgagactaatgactctccaagagagcaagttgatcttaataatgtagatgaatatgatgttccaacggacgcaattcacaccatggcgattggagatgtgcgaccacaggaacactaagagcaagatcaaccctcttcctcaacaatggtgcactccccatctcaagacgatgaacaggttcatcaagaagaggcgtgtgatcaagggggagcacaagataatgatgttatggaggaagaagcaccacaggcccctccaactcaagtccgagcgacgattcaaaggaatcatcccctcgaccagatattgggtgatataagcaagggagtaactactcactctagattagttaatttttgtgagcattactcttttgtctcttctattgagcctctcagggtagaagaggccttgttagatccagactgggtattggccatgcaggaagaacttaataacttcaagcgaaatgaagcttggacactggtgccacgtcccaagaaaaacgttgtgggaaccaagtgggtgtttcgcaacaaacaggacgagcacggggtggtgacaatgaacaaggctagacttgtggcaaaaggttatgcccaagtcgcaggtttggactttgaggagacttttgctcctgtggctaggctagagtctattcgtattttgttagcctatgccgctcaccattctttcaggttgttccaaatggatgtgaagagcgctttcctcaacgggccaatcaaggaggaggtgtacgtgtgtaagctctctaaggcgctctatggacttaagcaagccccaagagcatggtatgaatgccttagagactttttaattgctaatgctttcaaggttgggaaagccgatccaactttatttactaagacttgtgatggtgacttatttgtgtgccaaatttatgtcgatgacataatatttggttctactaaccaaaagtcttgtgaagagtttagcagggtgatgactcaaaagtttgagatgtcgatgatgggcgagttgaactacttccttgggttccaagtgaagcaactcaaggacggcacattcatctcccaaacgaagtacacgcaagacttgatcaagcggtttgggatgaaagacgccaagcccgcaaagactccaatgggaaccgacggacatgtcgacctcaacaaaggagtccatttgcaatctcaaaagtggattgaaagggaaaggtggacttggaccatgaaagacttccactgcacttcgatgagaggtaacttactccaagttcatctccatgctcttattgccttttttgaagattttggtgaggcaatgaggttaaaaggccaaaaatgatcccgttttggtgcttgatgccaaagggggagaaattaaggccaaagcaagcaaatggatcagctaccacttcagaattttgaaaatagtagagttagaagttttgatttgtcaaaatactctaagtgtctctttttgtcaaaagttggtctcttgtgggaagaatgtttgattatgaaaaaggggagtttttgtatctttgatcaatttctcttggaatacctctctttatgtctcaacaagtgtgtttgacttagagataggaatttgagtttgatttacaaaaacaaaccaagtggtggcaaagaatgatccaaatatgccaaatttgaataaaaaacaaatctggatctcatttgcattgatatgacacttctatgtgttgctttttttgttgtgttggcataaatcaccaaaaaaggggagattgaaagggaaatgtgcccttgggccatttctaagtattttggtgattaaatgcccaacacaaatggcttaagtataaattgtgcaaaatggtgaatgaagtgcaaatcatcaataaggtatgattctagacttagtacattgtattttgtgtactaacatatttggctaagtgctagaatcagggaaaacagaaaaagaaaaagacttggctgaagcagccaagactcagtacagtctgggtgcaccggacagtgtccggtgcgccaggctggattctggtcaataggccgctctcgggaattcgtcggtggcgtacggctaaaattcaccggactgtccggtggtgcaccggactgtccggtgagccaacggtcgaccgcgcaatccgcgcgtgacgcgtggctgagccaacggtctgatgggggcaccggactgtccggtgtgcaccggacagtgtccggtgcgtcaacggctccaaatcttcaatggtcgactgcgccaaattaggaaggtgatccgcaccggactgtgaacaggggatgtccggtgatgcaccggactgtccggtgcgccacctgacaaaaggcaagtattgtctgccaagaatgcctccaacggctcctagctgccttggggctataaaagggacccctaggcgcatggaggagtcacccaagcatactttgagcattcttaatcattcactctccgtctttgcgcactcgtttgactttcttagtgatttgagcttcgttctagtggtgaacctagtgctactcatttgagctcaagtcttggttgtgtgtgtgtgcgtattgctgtggatttgtgtgtgttgcttcccttccttaatctagtgcttccactttgatatttgttgtaagggcgagagactccaacttgtggagattcctcgcaaacgggaaaagtgataagtgaaagggaattagacttacacttatttcctaattgattttggtggttgaattgcccaacacagataattatactaactagtttgctctagtgtataagttatacaggtgccaaagcttcacacttagccaataaaaagaccaagaattgggttcaacaaggagagcaaagggataaccgaagtgtgccctggtctggcgcaccggactgtccggtgtgccactggacagtgtctggtgcactagggaacttcacgctgaactcttcaccttcgggaaaatccagaggctcttcgctgtaattcaccggactgtccggtgctccaaggaagggtgtctcaggaactcgccagcttcgggaattcgctccgctataattcaccggacatgtccggtgagccagcggagcaacgactacttcgcgccaacggtcacctgcagaggcattaaatgcacgccagagcgcgcagaagtcaggcacgcgcgaagtggcgcaccggacactctacagtgcatgtccggtgtgccaccggacatccaggcgggcccagaagtcagagctccaacggtcggaacccaacggcctggtgacgtggctggcgcaccggacactgtccggtgtgcaccggactgtccggtgcaccatgcgacagacagcctccaccaaactgctagttgggtggttggggttataaatacccccaaccaccccacattcaagtcatccaagtttctcaacttccaaccacttacaagagctaggcattcaatacaagacacacccaagtgatcaaatcctctcccaattccacaaaagctttagtgttaagtgagagtgatttgttgtgttcttttgagctcttgcgcttggatcgctttcttctttctcattctttcttgtgatcaatactcaattgtaaccaaggcaagagacaccaattgtgtggtgatccttgcggggaagttttgttcccggttgatttgagaagagaaagctcactcggtccgagggaccgtttgagagagggaaagggttgaaagagacccggtctttgtgaccacctcaacggggagtaggtttgcgagaaccgaacctcggtaaaacaaatccgcgtgtcacactctttattcgcttgcgatttgttttgcactctctctcgcggactcaattatatttctaacgctaacccggcttgtagttgtgattaactttgtgaatttcagtttcgccctattcaccccccctctaggcgactttcatttggtatcaaagctcggtgcttcactagagcctaaccgctcgaagtgatgtcgggagaacacgccaagaaggagatggagaccggcgacaagcccgctacaagccacgggaaagcttcatcgggagagtcccgcaacaaagggaaggggaaggagaagaaaccctcttcccacaagtcgcatcggagtggggacaagaaaaagaagatgaggaaggtggtctactacgagaccgacacctcatcgccatctacctccggctccgacgcaccatccgtcacttctaagcgccatgagcgcaagaagtttagtaagatccccttacactaccctcgcacttctagacatactccattactttccgttccattaggcaaaccgccaacctttgacggtgaagattatgctaggtggagtgatttaatgaaatttcatctaacctcactccacaaaagtatatggaatgttgttgagtttggagcacagataccatccataggggatgaggattatgatgaggacgaggtggcccaaatcgagcacttcaactgccaagccacaaccatactcctcgcctctctaagtagggaggagtacaacaaggtgcaaggattgaagagcgccaaggaagtttgggacgtgctcaagaccgcgcacgagggtgatgaactcaccaagatcaccaagcgggaaacgatcgagggggagctcggtcgcttccgtcttcgccaaggggaggagccacaagacatgtacaaccggctcaaaaccttggtgaatcaagtgcgcaaccttgggaccaaaaagtgggatgaccacgaggtggttaaggttattttaagatcacttatttgccttaacccgactcaagtacaattaattcgtggcaatccaagatatacactaatgactcccgaggaagtaatcgggaattttgtgagctttgaatttatgatcaagggctcacagaagatcaacgagcttgacggtccttctacgtccgaagctcaaccggtcgcattcaaagcgacggaagagaagaaggaggagtctacaccgagtagaacacccatcgacgcctccaagctcgacaacgaggaaatgacgcttgtcatcaaaagctttcgccaaattctcaagcaaaggagggggaaagactacaagccccgctccaagaaggtttgctacaagtgtggtaagcccgatcactttatagcaaaatgtcctatttccagtgacaggggcgacgacaaggggagaagaaaggagaagaagaggtactacaagaagaagggcggtgatgcccatgtttgtcgcgaatgggactccgacgaaagctctagcgactcctccgacgacgatgacgccgccaacatcgccatcaccaaggggcttctcttcccaaacgtcggccacaagtgcctcatggcaaaggacggcaaaaagaaaaaggttaaatccaaatcctccactagatatgagtcctctagtgatgataatgctagtgatgaggaagataacttgcgtaccctttttgccaacttaaacatgcaacaaaaagagaaattaaatgaattgattagtgccatccatgagaaggatgatctcttggactcccaagaggacttcctaatcaaggaaaacaaaaagcatgttaaagttaaaaatgcctatgctctagaagttgaaaaatgtgaaaaattatctagtgagctaagcacttgccatgagactatagacaaccttagaaatgagaattctaatttgttagctaaggttgattctattgcttgtaatgtttcaattcccaatcttagaaatgataatgatgatttgcttgctaagattaaagaattaaacatgtctcttgctagccttaggattgaaaatgaaaaattgcttgctaaggctaaagaattagatgtttgcaatgctacaatttccgaccttagaactaaaaaatgatatattgcatgctaaggttgtagaattgaaatcttgcaaaccctctacatctaccgttgagcacacttctatttgtactagatgtagagatgttaacattgatgctattcatgatcacatggctttaattaaacaacaaaatgatcatatagcaaaattagatgctaaaattgccgagcatgacttagagaatgaaaaatttaaatttgctcgtagtatgctttatagtgggagacgccctggcattaaggatggcattggcttccaaaaggggaacaatgtcaaacttaatgcccctcctaagaaattgtctaattttgttaagggcaaggctcccatgcctcaagataacgagggttacattttgtaccctgccggttatcctgagagcaaaattaggagaattcattctaggaagtctcactctggccctaaccatgcttttatgtataagggtgagacatctagttctaggcaaccaacccatgctaagttgcttaaaaagaaaactcctagtgcaacaaatgatcatgacatttcatttaaaacttttgatgcatcatatgttttaactaacaaatccggcaaggtagttgccaagtatgttgggggcaaacacaagggatcaaagacttgtgtttgggtacccaaagttcttgtatctaatgccaaaggacccaaaaccatttgggtacctaaagtcaagaactaaacatgttttgtaggtttatgcatccgggggctcaagttggatcatcgacagcgggtgcacaaacaacatgacaggggagaagaaaatgttctcctcctatgagaaaaaccaagatccccaacgagctatcacatttggtgatggaaaccaaggtttggtcaaaggattgggtaaaatagctatattgtggcggaaccgcccgaattattccagcttaagtgcccaagtcgcacccttaagggcagcaacacacttaaacaggaataacccgtcagtccctcggatctagtccgataaagccacttaccaggatcgaataccactagctcactcgaaggtgaggcacagagaaatacaataaagcataataccacaaatttaataagtatcaatagtgattacattatcggagtttcagaaataataatcataaattttaatgcagcggaaataactaacggagaaaaccgagtaacatggcgaagcctggccacgctactcctcctggtcctctcctgcggaagcaataacccactcgaccgtctatcccggtggcagggatggaggccaagtcacaccatcaaccaatcatcctaaggagtacctacaaaaattgtgccacaagcaaggctgagtatactaatactcagctagacttacccggtgtgaggagtctactcctctacctctagacatgcagctgtttggctgtggggtttggttgccaaaagcactagctgagtttataaatcaagttttagctttgtccagttttagtgtgactctcttaagactagatgtgtactatctactcattcatggtagcaagcaaatttagcaatcaacatcttttgtcacctcatcacatttccacttgttactcaatgtagcagcatggatcaagcagtctcattagctgcgagaagcagacgattcgaatcgagtttttaaaccttgcaaggtaaacctaaacacacgacatggcgaggcactccgtccccacacatatcaaccgtccccatcgattccccgtcagcagatcagggctcaccgccttggcgtacaatgcctcactgaccccgactgccgtcgtgcagtgaccg

SEQ ID NO: 18627 - DNA, 2641 bp, Zea Mays
aaaccacatcatatgcaaatatcacttcaatgaatgcatatgaatgcaatgcatatgtcatctgccttcatacctctaagggtatgaagccgcatcgtacccctcctcgggcaacgtacgatgctaagttgtaccggtacggtcggaccataggtcacgacccaacttcagatgcaagtgaatcatgcaatgtatatggcatgctgcatttatcaatatacttcactttcttcacatacaatacaacctcaaataatacttcatttaccttcagatacaataccaacctcaaataatacttcatttaccttcaggggtgtgaattaatctcatgagtcatactcgaatcataatcatcatcaatatatgattgagcatcagtataatgcaagtaagtaaagcatcaccatagagtccaattatgaaagaatccaatacttctgaatattagagtgtaggcaatagaaataacaggtcagaacggaagcaaccaccgctacattcacttgccttcatcgaagaagaaaaatgtactaggcatgatctggagtgtagccacctgctagcgggcataaaacttagtacaaatatttcacaaacatttgccaacaattaacaaatcgatcctacacctgaaaccaagacctgggggaaaacctcccactctgaaccacatgccatacaacagcaatgttgtttgttaattttgtatctttaaaattataacagtggtgatatcaaacaaatactccatgagtatctacacaaaatattctacaacttcggtattcgatggataattaaattctgccatctataagttctaaaacatctaacaagataactgactgaatctattttagacagcagcatagttaactttcaaaattcgatatctcacaaactactcaaccaaaaatcatgaaattcttctgaaagtaagaatttttatccctctacaaaagtctccatagctgggagagccaattcggccatttacttgatgaaacctaccagtgaacagacccgctcatttctgttaggctaacagaaacagccacagtaaaacaaacataactggagtttcataattcatatgaatgcactctttaacaatctggaaagattatgaaattatctacatcttttcttacaaacctaaggtttaattctgttgataaaattgcctaaatcttaagagaacagattctgtacagaattaagagactgaaaaactgctataatcaaactgcgataactctctgatctgatgtctggttgaggtgttcttcgcggccatggaaagatctacaaattatctacgacttatatatagactttttatttttttgaggcctctaagaccacggaaaactgggattaacagaaactgtcgaatctgccattctgcagaaaactaaattcgagatcaaaacctaaccccacatctaatccaacctctaatcctttaattcccatgatccacaacctccaaaagcacataattacagggaggaacaaggatctcatccatacctagggtttccccaagaaattctgcaagaagagatggggaagaacatctccttgatcctctcttccccttcaactcaatgtgctcctcttctcgatccttgttgcgcggggggagatctagagggaggaggaagccgtggagaggggctgccatgggaggagagggcagccagcccaaggaaaaaggagagaggggcggccaagtgttggaggaggggaaagggttggcgaccaagtaggggcaaaagggggaaaaggccaccactagggttttctttgcgggagaaaagaagcgatgccacagatgactccgacttagcatccaacggcccacaacccttttcccacatccacgcaccgaaaatcaacctttggcaacatttttttgggatattacactctacccgccttaaaaagaattcgtcctcgaattcgtccactccaaacaaaacatccatggtaccccatataacaccaccattccaaaacatgggtccattattggtcttaattaacacaagaacttcgacctcagactaaatgtctaaggaaactacaccacctgacatcaagcatgaaccaacatgtaatgaagctcaaaccaagtcatagatgcaatcaacactacgatttcacaacatcgaatttggatgcagccatacatccgcatcaatgtcttaaaacgacactctttgatgaaggggtaatatgcactaagcacaacctttaccaacttcaacaattcattttaatttaatggtgaaacatccacaccagatgaatgtataagaagatcaaacacctcacctcacagcaccacgaaacaattagttctattgaaacaaaactcctaatcttcctaaaccttgttcttgccataatgaaaatataatcatgtaatctaacattctttgcaccccaccgaaagggagataatctacagaactaatggagcaataaaaccgacaagaagccaataacattatgcacggcacagttcatcgaagaaatgccaaaaactccacatagagcacagacagcccaacgacaacacaatacttgcttaacccatgtcactatacttcatccaacaacttaactaaga

SEQ ID NO: 18628 - DNA, 315 bp, Zea Mays
gacaaaagtagttaagaaaaatagcaaaaagatagtggtctaccatagagggcacatgttccctaattggcctagagcatagcggctcattatcattccaccgctggtggcgggcggtactcgctgctctgtgaagccacctcacgcaatgtccgccactttaggtgttaggatgcaaaggcgtttgccaaggcacacgaaacccactacacaacttggaatgggtggtccacagtttgtagcactagacccaagcacatgcaccacaattgacatccacacttccttattgcccccgctcgggttacaagcaat

SEQ ID NO: 18629 - DNA, 982 bp, Zea Mays
tgtaatatcccaaaaaaaatgttgaccaaaagttaatctctggtgcgtggatgaggtaaagggttgtgggccattggatgcaaagatagaagtcatctgaggcgtcgtttctttctcccacaaaaaccctaggtggccacccttttttttcccttcaccccccccccccccccctcttggtcgccaccccctttttctcccccttggctggacgccccctccccctatggcagccatcctccattgcttcctcccccaagatctccccctacgcagcaaggttcaagaaaaggaggggcacgttgaattgaagaggaagagaggatcaaggagatgttcttccccatctcctcttgaagatttcttggggaaaccctaggtatggatgagatccttgttcctccctgtaattataggcttttggaggttgtggatcatgggaattaaaggattagaggttggatttgatgcggggttaggttttgatctcgaatttagttttctgcagaatggcagattcgacagtttctgttcatgccagttttccgtggtcttagtggcctcaaaaaaataaaaagtctatgtatgagtcgtagataatttgtagatctttccgtggccgcgaagaacacctcaatcggacatccgaccagaaagttattgcagttttactatagcagtttttcagtctcataattctgtgcagaatctgttctcttaagatttaggcaattttatcaacagaattaaactgtgggttggtaaaagaagttgtagataattttataagctttccagattgttaaagagtgcattcatatgatttgtgaaactccagttatgtttgttttactgtggctgttcctgtttacctgacaaaaatgagtgggtctgttcactggtgggtttcatctagtaaatggccgaattggctcttccaactatggagacttttgtagagggataaaagttcttacttcca

SEQ ID NO: 18630 - DNA, 1829 bp, Zea Mays
ccaaatttgatggtgtgaaattggagtgttgattgcaactatgacatgctttgagcttcattacatgttgtttcatgcttgatgtcaggtcgtgtagtttccttagacaattagtccaaggtagaagttcttgtgttaattaagaccaataatggacccatgttttgaattgtggtgctatatggggtaccttgggtgttttgcttggagtggccgaattcgaggtcgaattctttttaaggggggtagagtgtaatatcccaaaaaaaatgttgaccaaaagttaatctttggtgcgtggatgaggtaaagggttgtgggccattggatgcaaagatagaagtcatctgaggcgtcgtttctttctcccacaaaaaccctaggtggccacccttttttttcccttcaccccccccccccccctcttggtcgccaccccctttttctcccccttggctggacgccccctccccctatggcagccatcctccattgcttcctcccccaagatctccccctacgcagcaaggatcaagaaaaggaggggcacgttgaattgaagaggaagagaggatcaaggagatgttcttccccatctcctcttgaagatttcttggggaaaccctaggtatggatgagatccttgttcctccctgtaattataggcttttggaggttgtggatcatgggaattaaaggattagaggttggatttgatgcggggttaggttttgatctcgaatttagttttctgcagaatggcagattcgacagtttctgttcatgccagttttccgtggtcttagtggcctcaaaaaaataaaaagtctatgtatgagtcgtagataatttgtagatctttccgtggccgcgatgaacacctcaatcggacatccgaccagaaagttattgcagttttactatagcagtttttcagtctcataattctgtgcagaatctgttctcttaagatttaggcaattttatcaacagaattaaactgtgggttggtaaaagaagttttagataattttataagctttccagattgttaaagagtgcattcatatgatttgtgaaactccagttatgtttgttttactgtggctgttcctgtttacctgacaaaaatgagtgggtctgttcactggtgggtttcatctagtaaatggacgaattggctcttccaactatggagacttttgtagagggataaaagttcttacttccagcagaatttcataatttttggttcagcagttttggagatatcgaattttaaagttaaccatactgctgtctaaaacagattcagtcagttatcttgtcagatgttttagaacttgtagatggcagaatttaattatctattgaatattgaagttgtagagtattttgtgtagatactcctagagtatttgtttgatatcaccgctgttttaattttaaagatacaaaattaacaaacagcgttgctgctgtatggcatgtggttcagggtgggagtctttccactgggtcttggtttcaagtgtaggagtgttttgttgattgatggcaaatgtttgtgaaatatttgtactaagttttatgcccactagcaggtggctacactccagatcatgtctagtacatttcttcttctttgatgaaggcgagtgaatgtagcggtggttgcttccgttctgacctgttatttctatcgcctacactctaatattcagaagtatcagattctttcataattggactctatggtgatgctttacttgcttgcattatactgatgctcaatgatatattgatgatgattatgatttgagtatgac

SEQ ID NO: 18631 - DNA, 261 bp, Zea Mays
ggaagaccaccatagtgtgtggagtgcgaaaagcgcatagaggggaggagaagccaccgacgccaactcgtgcagttatcgttgttgcgtcttcacagaggggttgaggtggaaggatgaggtacaccgatcacgcgcgtagcacccttacaccatggggttgattggagtcacctctattgctcgctgggggtcgagaggagatccaccaccatagaatcgggttcacatcgctgttctgccctcgggtgtgaaaccaag

SEQ ID NO: 18632 - DNA, 728 bp, Zea Mays
atttaatcctcttcggtgtaaccatatttagtcttgtactattcttgtttatatgcattcatgtgcattatgtaaatcatttaggtacgttaattaatcacgttatgcggaggactagaactgagtcgaccacaagatgctggaaagcgtgagcttctccgcaagataatgttgatggacgaacctaaagatggatagacgaagcaagtattggaacaaaggctggtcgccatgtggacgtcatcgaacaaacactaatgtagtgtttattccaggcaagccccggtgcattcgccccttccttgtgttttaaatgttttttcaccttatctgatgcattaggtgataggagttgtgtgataaacaattgatgcattaccattccttggaaactccttaatcctggttttataaaaagaactgataatgcttagccctgcttaaaaaactgaaaaaacatttgttttcaaaaagaatgattgtggaacattggttatgggcatttcgtttcaaaaatcaaagcaaacttatggtgacgattccacttcggccggagtgggttcatcattcggaaaagagtacccctgccgggtaccaaaaatgggaaaatggtttgaatacatctagaccagacgttgagcggacaaggtcgcccgtctgtgtcgattaaggaccgtttgatgtaggcctgttgtggtggagaccttgcaactagccacatgctccgg

SEQ ID NO: 18633 - DNA, 262 bp, Zea Mays
ggcgattcacactgtcggaagggaggaaggagattaggaagttgcattgtaaagcataaatttaaaagaccaactcgagcaccttggaatccagacgacatagcgaccgcggacgtgagccaatgtgacgcggggcgcgcaagattgacaacggcagcagctcgacgatgttgtcaacggtggcggcgattaaagttgagggcgtgcggcggcggaggacggcattggcggacccaactgctatgtttagggtgtgccaaga

SEQ ID NO: 18634 - DNA, 910 bp, Zea Mays
aatatatcttccttatattatcatagataaacagaaacaatattgaattacatttgtaccttcggcttgacagaaggtaaaagtccaagcgtgacacacgagccaatacaagtcagcatcaacagtacgggggtactgttcatctatttataggcatagggcgcagcctgtgtaaatttacattcatgtccttcatatttactattgacttatggacaactcgacggggactagatagccttttcccctttaagtcggttcctttttccgccattaagccaaagctcccttgcacgtagcttcggagcaacatcatccttcgtcacgaccatgcttttcatatcgtgtatgcttttaaccagagtccgaaggtacctgctcatatgttacacttagaaaacattgttaaatcatgtttttgaggaccttcggaagatgaaggcccccaacagtaccaaaaacaatttactaagtgctagaatcatacctttgtttctcttaaattctgagctcatattagtcaaaacaaaatgtgttgagcatctaatcaacaaaacaatatagaaatggccccagggcacatttccctttcaacctctccctttttggtgatttatgccaacacattaaaagcaactcataatgcactaacatattcaaacgagctaaaagattcaaattgatgttaaattgaagaccaataaagtttcatatgatttgacatatttggatcatttttgccaccacttggtttgttttcgcaaaacaaattcatttgcctatctttatgtcaaaaacaattgttttggcaaatcaaaaatatctttcaagactagttttgatcaaacataaaaaaactacccattttttccataatcaaatttctcccccataagagagcagtttttgc

SEQ ID NO: 18635 - DNA, 2991 bp, Zea Mays
ctctctttaatccaaaccaccagtactttccgtttaaatcctggtacatcttggtacttctgggatgtatagaataagaggagtcatatgcttccttcaagatcatgtgtcgaaggtgatcatttctggcacacagatcctactattgaaacaaacagtaccttgatcatcctctgtaaattccggagcttttcccatcttaatcaaggttttgatttccttaatcctttcatccgactccttacctttgcagatttcttgctccaaggttgaatctatctccatagttattgcttctgtgtgggcaaccgtaccatggttaagtcattccatctcccaacataactcttggggcatcaagtgagcaataaccatgctatcctaacctttacgacttaacgcgttagccacaacatttccttttactaggatggtaatgaaggtccaaatcgtagtccttgaacaactcaagccatcttcgttgccttaagttgaggtcctttcgtatgtgaatatatactccaaactcttatgatccgtgaagacgttgcagttattcccaatcatatagtgcctccaaatttttagagcgtgcactacggcagctaactccaaatcatgtgttgggtagtccttctcatgcttccttagttgccttgatgcataagctatcactttgccttcttgcgttagaacacatccaagtcccaaatgtgatgcatcacaatacacatagaatcccttgtggatgtccgacatgaccaataccggtgcggtagttagtctctccataagttccttgaagcatttcggacaagcttccatccatttgaactctttgcctttctccagatgtgaggtaaggggtttcactaacttagagaatccttcaataaatcttttgtaatagcgtgctaatctgaggaaacttctaacttgacacatccttcgattgctcctagtacaatattttactgatcttgcctgggtctacttttatcccaccattagtgatgatatgcctaaggaaagcaatttcctttagccaaaagtcacacttcatgagttttgcatacagttggtggtcatgaaacttctaaagaactagccttaggtgctcctcatgtatttcttcattcggtgaatacactagtatatcattgatggacacaaccacaaacttgtcgagatattccatgaatactttattcatcaggttcataaagtatgttggtgcatttgtcaatccaaatgacataaccagaaactcatatagtccatatctattggtgaaggctatcttagagacatcttcagctcgaatcttcagctaatggtaacctgatctcatatccactttcgaaaataccttggctcctctcatttgatcaaacagatcttcaaatcgaggtaatgggtacttgttcttaatggtcacttcatttagatctctatagttgatacacatccttctagatccatcctttttctccacaaaaagtatggggctccccacggcggcaaactaagccggataaagcctttctctagaagttctgctatttgcttctttagctcacctagatccttaacatccatcctataaggccttttagaaataggtgtggtgccaggttttaactcaatggagaattctatatctcggtcgtgcaacatacatggtaactcctctaggaaaacgtctgggtattcacaaactactctgatgtcctctaggcacttctcctctacttgatttagcaccatatctgtttctactggcatgttgacactgaccttgatcctttctccttgcggacttgtcaaggtaaccattctcttagcactagagattactccatcatagctcttcaaccagacaaatctaagaatcacattgatcccactagatcttaggacaactaagttaaccaagaagtctattcccataatcttaaggttaacatgagggcatgagtgtgtggctctcatttcacctccaggtgaactaattaataacttcctctttaggggataacttgctatactatacttttccacaaaatgctccgttatgaagaaatgagtctagtatcaaataaaacaaatataggtactgagttgataagaaacatataccgagcaccacgttagctccttccaaaaccaattccacagtcacgtaattgactctacccttactctaattctgttgtcccttgccttaagagttgcgagagggtgcgttctaggctgacctctgattgttggtggcttgtggtgtctgaaaattcttcttgtgacaggtgttggcataatgtccaacctctccacacttgaaacaaccattgggatgcattggggcgataggatgttggcctttgctagggtattggtggcaactccctgatgagtctgctgacctccatcggttctctgcctttattggttgtacctatgagtttgctgacctgagcgttggttctggttttggtaattcccactctgaactgcggagcgagaataagaacactggttgtcttgctggtagtggacattcctactagactcgcttggagtctgggacttcctcttgtggccattcaactccttcctcttgctctctagaccaatagccttgttgagcaaggtatcattgccatgcttgaggaaaaaagtgttttgtccatagagcccattttaaaaccctttgaaacctagaaagatttcaaacgctactaccagactctaggggcttgtttcaaaccatacaaagtttttggtgtttaaatatatggtttagaaacttggaactctcaaaaccagggattgtctcacataaacctcttcctctatatacccattcagaaaagcacttttgacattcatttgaaaaagtttaaaatccttcaaagcagcaaaagctagaaggattctaatggcttcaaacaggctcaaaagaggcaacaaaaactaagtgagcaaaatgag

SEQ ID NO: 18636 - DNA, 826 bp, Zea Mays
aatgggtcgtggagcctccctcaaggaagtggcctccccctcaacagtagcttgaccgtctccacgtgcaacaggcactggcttgagcggaccccaagtgatggaagaagaggggtcaggtccatgagccgaagtagtggagcaggcttgactaggtaagctagtagagttggctcggggtcaccccaataaatgtcgtcgtgctccacctccacaaagatggtttgtcccatctgatctagacctgtaggctcaaatacaagggatggacaaggtgcaacctcatcgaatgtaacctcacaagtctccatgatgcggttagtctccaggttaagaacacgataagcacaagaatgtaatgcataacctaggaaaccccatcagaagactgagactcaaaattgtccaaaattccttgttttagcacaaagcacctgcaacaaaataccctaaaatggctaaccttgggtggtcgtccaaaccgcaactcatatgaagtcttgttcaagaaagctcgaagaaagatgtggttcgacacatggcaaacattgttgatcgctttgccccgaaaatgcctaggagtcctatgctcatcgagcatcgtcctagccatctcaataagggtatgattcttgtgttcaacaataccattatgctaaggcacatacatagaggaaaattgatgatcaagtcctaaagaatcacaaaaggtgtggaaatgagtattcttgaattctgtgcgattgtcactgcgaatcgctctcatggcatttttgggaaactcattttgcaacctaagaatcaaatcttaagcatgataaaaagc

SEQ ID NO: 18637 - DNA, 303 bp, Zea Mays
gaatatgcatcaagtatgacattcgatatcgcattcattatggttagaaagaaacgggaaaaggtctcgcaagggttaaagcttatgcactaacgattagttacaattggttctaacaaaagaatttagttatatgcactaatgggaacctagtcatttttagttgatcaacattgaactggataaacaattgattatatgaatcaactagcgtaacggaattgtaaattaagttttcctatttcaataacatgagcaatgattaacctgcctagaataaaataattaacagtaatgaaagaa

SEQ ID NO: 18638 - DNA, 405 bp, Zea Mays
gggggccccgcttgccagcgagtcagcgccgcgagtaggccacggagcaagcacctgacggcctggtcccgccagtcggggtcagctggatgttagcgcacgtgagccatatgcgagtgggccgcgcgggagagaggtgaggtgggccgaggcaggaaattgggcccaatgcctgtttttttctttttttttattctttttatttttattttccattttccttcctttctttccaaatccaaacttcaattctaatttaaatccaaagtttgcggaaaattcgtcttcacattaaatgttcaatttgaacatagtatggggataatttatttgtttataaacttattttggtttgtatagtacttctctctttttatattaattccaatttttcctaatttgcac

SEQ ID NO: 18639 - DNA, 266 bp, Zea Mays
ttttcttcttctttttttgctggggcctgaaccatttctttactatgacaacccaaacaataaggatattgctaacaacccctttgaaatcagatttaacaaatcttgttaatataaaaggtccagaaatctctatgatgattgcagagcgctcagaatgaattttgaggcaaggtcagatccgttggaaagaagataagataagctttccagattatatttaaacttccaaattcaacatgagatgtttccgtggtggaaaaaac

SEQ ID NO: 18640 - DNA, 818 bp, Zea Mays
ctgtaacactccatggttccacaaacaacccggaatgctactgtactacacttccgacgtccatatataaaatttcggcagcatcccctttgcaagattgcataaaagagggagcaacagagtataaacatatatcatgactaaaacatactaagtattattactcggccagcaaggaaagataaacatacgacctgaactgaattaaccagtgtgcacgaccatataaaaaaataaacaaacttcctttgacaataagtttctaattaaatcatggctgcgcctgggcagcgttattatgagagtgaaagtggacgtgctgctactcccctcattcccaacatgtaacaagtacctgcattgagtaatgcaagagtgagatgacacatctcagcaagtaaaataatatcaaacagtttaaccacataagaacattgttttaccaccacttgattccacaaccttcttattacgaaggtgcagcacgtatacaacgtacaacgcacctagttaccacacctcgcaggtagaaaccacaatagtaacatagtaatgtcacacttcatatatttcctcatgagtgcaaatgtctgcaaatgcaaggatgacttctgccttcatacctctaaggatatgaagccgcatcgtacccctcctcgggcaacgtacgatgctaaaaatgtaccggtacggtcggaccataagatcacgacataacttcaaaatgcaagatggatgatgcgatgtgcatgtcatgcctacaacacttcatataacatgattcaaaaagacacttcaacttcatccagatgggaatc

SEQ ID NO: 18641 - DNA, 494 bp, Zea Mays
cttaattcctcacgaaaaaaacacagaaactgctagactactgctgttcactcaccacctaaaattctggacagccccctctacccaatcgcaaacgcaacctctaatcaattaaattgcagcgcaaatgaacaagggatgaacacaaaaatcaccttggattctccccctttccttcctcccttcttccctccaccaaaacgattgaagactcgcaccacgacgacgatgatccgagcggcaaggattggcaccttgggaggaggggattgaggggggcggctagggtttggtggctgcaagaatggagagaggaggagatgggcaggggggcgacggccaaggggggagagaagtggggggcggctgcacatggggggagggggttaggagggaggcggctagggtttgggagggttaatgggctgaaactccaattgcggcccaactaacccacgcgacagctcccgaccgtaacgcaagcatcaaatcag

SEQ ID NO: 18642 - DNA, 190 bp, Zea Mays
caaaaatcaccttggattctccccctttccttcctcccttcttccctccaccaaaatgattgaagactcgcaccacgacgacgatgatccgagcggcaaggattggcaccttgggaggaggggattgaggggggggggggcggctagggtttggtggctgcaagaatggagagaggaggagatgggcagg

SEQ ID NO: 18643 - DNA, 289 bp, Zea Mays
gaagcttcaggtgcttccttacaaccgcctctcggggcagatcctgtaacatcccaaaatttcaacccgaggtttggaaccctaatctcctaaccccccctttttatctctccttaaactccaccccataggtcttctcatcatttgcattcactatgattgttagaagcacctcacatagaatatatttttagcacctaagattatctagctaatttttttgttcaaaagaaaaagagataaaagaaatagaagtaagaaatagaaataggaaataggaaatagaaaa

SEQ ID NO: 18644 - DNA, 494 bp, Zea Mays
cttgtgagtgagatcttgagtgacacctagcactagttttaagtgtgaacatgcaccgacactacactagttatctcttggtcaaattactcatctacaacccctctttatagtatggataaagtaaaaataaaaatcctaactctataccaagtgtcccacaactccttcgacacttatgatatgaagaccttcgtcttttgattcatcttttccagtcgtcgcttcaagttctgatctgagggattgttttcgcttgttggagtgtagctccctgcattgtgacctaacttaccatttgttctgcaaaacacatgttagtcacaaataatctcatgttgtcattaatcactaaaactaactagtgctctagatgcttttagaaggctactaggctgagtaattggcccaggcgcagccgcgcaggtaagggcaggggcgaagccaggatctaaaattagggggaccaaattagattaggggggctattagaa

SEQ ID NO: 18645 - DNA, 215 bp, Zea Mays
tatctatttttgaagaagtggctccaaagataagagattcttgttttaaaacacattttcaattcaaaaattttagatgattttattatgtttccaaaataagattttaggtgttacacagaatcagaaaaaagctgaaacaaatacggtccttatttgccgctcgttttccctgcatatcagtttgttttagtttttgtgtaaccgtatattca

SEQ ID NO: 18646 - DNA, 148 bp, Zea Mays
caatattttgcagcggaaatcttattaccaaattttacaagttacaaaaattttatattattttatcagagtgattacaaaagtataagtttgaaatatatatatgctagctcaaatgaccatcctcagtaagaagataaagactggg

SEQ ID NO: 18647 - DNA, 277 bp, Zea Mays
gccttggccgacaggcctgggtaatcttgggaaatttcatcgtgatggggatagatcattgcaattgttggtcttcaacgaggaatgcctagtaagcgcgagtcatcagctcgcgttgactacgtccctgccctttgtacacaccgcccgtcgctcctaccgattgaatggtccggtgaagtgttcggatcgcggcgacgggggcggttcgccgcccccgacgtcgcgagaagtccattgaaccttatcatttagaggaaggagaagtcgtaacaag

SEQ ID NO: 18648 - DNA, 1806 bp, Zea Mays
cttttatgtgttacaaggtggagtgttaggctctagtgcttgtgtgagaagtgtataaactgagtttgtctacctttacagcaaggcccccatctgtttatatagccaaggaatggccatcgtaattacataagattcggatggggtatcatctcctgtcttagacgcaaacttcctttgttgttccctgaaggtccatcatggtgatcgttcttgcttcatcactcctgagctgactggacaaaggggatagttggatcccgtaagtacctgaaaccttactatgaggtatgcttttcagggtcatacgaatagttcgcctcatattcttcttctacctctatattgtacgcctcatattctttttcttctacctctatattgtacgttcctgttgacttcccttctcttagggtgcatttgattatagagtcaactagaatggattggctccattcctgtttttgagaatggaaccgttctattctgtgtttgacaagcagaacagagccgctccattttttgtttggttgaaaagtataatagagcggacccactcggttctttgtttggttggagagcatatgattgtctaagggaggagagtgcacacatccgatcgttttggtggagcggtagcattccaactatttacggtaaattttcatatggagactccaagagccgctccgcttcttttttgttataaaccaaacatccagaaaataggaatggaaccgctctattttcctccactccataaccaaacacatccttaaagtgaggtttccatgatttctaggaccttgttcatatatcaaaggacacagtagtgggataggagacaattaggggaccattttcagaagtgtgcaccgccacacctaaccagactcgcctaggttaagttacccatctcatgtcctctttatagtatgacaagtggaaaataaaggacttgcactgatctaagtgtccagtaactccactgacacttagaacttggtgttccataaccttctaagttccaaccattcctttaaaaattaaccattgatctccattagccaagcctgcaagaatgtcgcagcggcattctccctcgaccctttgccggcaggccaaaaacgtctatcgcatctgctggcgtatctactgctaagcatgtcttatctttagtagcccctcttttgatccaccaccgttggtgtcgcgtgtagatacaaatctccaatcataaatttatgttatatgatacaaatagtgctatactatgtaggaaatattattatgaatctaaaacaactagaacagataaaatcagagttaaatgagccagatatgaattatctaggattttaggttttatttttacactaaaaatcatttccagccttatttatatgatttaccaaagtttagggaggcggccactaatacctgagaacccagggtcaaaaacgagaaaaacatgactcgagagttattagttttggacaagaaaggatggcgggttatatatataaaggtttgaggtctcttatgtaaaatggtcgcacagaaggggtatggtcctaagggatccgttggatcttagcccgacgactccaattagatcggccacttgatgaaatggtacaccacttgtcggtgttccgagaccggggggtccctgaaccgacgagtgaatgtcgccgcgtgccccagcccagatgggtcaagcgcgagggcgagcgcgaaggggggaaagcgaggcggccggagaccggcgtgagagaggtgggaatcccgcggccttcgtgttcg

SEQ ID NO: 18649 - DNA, 278 bp, Zea Mays
attagttcatcataaattcataatttttacacatgttcattagtttaacctatattcatagtcgaacataccaatttaacatatagacatagtttattaatcatcaatttaacacatagaccataaacgctatatatacatataacatattcacaaatttatacgtaaataatatccatataaattcattttaatgaaatattataatttgttgaagtcgctagctggctcgttaacaaatcaaactagaatgtcagctcaactcataaaaaattaag

SEQ ID NO: 18650 - DNA, 353 bp, Zea Mays
aacggacgtgaattagacccggcaccaacatcacgcactttatatatgatcgaaaatcacgcactttatatatgatcgctgagctcctcacgtcaatattttttttagcttgttgaaaagctagactattataggtacacctttttctagcttcgaccaactatatataagaaaaaaacagtagtatagattagcaaaattggagaatttatggctaccgatggaacaagctaggtggatttaggtatctcaaatctttagatagaaaactgatgcttacttgataaatggctttagaaatttatcgataaattaagtgggagtgtgacaggaactttctggaaagaattatt

SEQ ID NO: 18651 - DNA, 211 bp, Zea Mays
gtccccggcggaagaggagcagagccccactgccactggtgtggtggtgcggtgcagatgacgctctcctgttggattcactgatttttcatttgtcctcgaaggcatgtgtctcgatgtaataaagagtgttagcctggtcctctaaatttcatactctaaacgaatattctttgtactttacagcactcactaaacgattctattctct

SEQ ID NO: 18652 - DNA, 118 bp, Zea Mays
cggcaagctgtaccacaagatgcagtccaaaagcatccagtgcccagtcgatagcgatgaggagcatgagcaagcgaaagaagatgggccagctggctgcgctgacgaggaggcacct

SEQ ID NO: 18653 - DNA, 94 bp, Zea Mays
cccatggctgaaatccataatcgtcggcgacggagctcctttcaaagttatacaggattccctccagctgatggggtaagcatgcacatcggac

SEQ ID NO: 18654 - DNA, 290 bp, Zea Mays
cggcgatccaagcacgtccaccccctggacgggacgaccgtgtgttctgaaaccgatctgaactctgaagtcgctatggatgtgtgcgtgcagggcttcggaagtcggggctgaagcgtgtggtgatcgtcgcgatcctgtgtgtccgcttcgggctcctcccgctgatcggcatcgccatcgtccgcgccgcgtacgggctcggcttcctgtcccgcgacccgctgtactgctatgtgttgatggtgcagttcgtcgtgcctcccgcgatgaacatcggtacgtacgcc

SEQ ID NO: 18655 - DNA, 220 bp, Zea Mays
tttaggactagtttggtaactctctttttttaagggatttctgttttcttaaggtaagatgaactaaatttctttagaaaatagaattatcatgggaaaataaggtttccaaactagcccttatattttttatgacattatcgatagaagtgcaagcatgtaccttctgccgatgagccattcgactttggcggcatatttgttacgacctagatgtccc

SEQ ID NO: 18656 - DNA, 305 bp, Zea Mays
aaacagggaaacatgagtctgcgcgcatggaaggggcttactgacgagcgggcccgcgtggcggtgacagaagggtctggcggctacagcggagccgacagcgctgatgggtaccgggtttaggttagttgggctgcaagcggttgaaatcggcccaggtaggagctggtttctcttttctttttgttttcttttttttttctttttcacttgctttcatagtttaaatcccagaatttgttgtgagtttcacctttagtctaaatatacaaacttaaacactggtctaaaatattttatttatt

SEQ ID NO: 18657 - DNA, 271 bp, Zea Mays
ggtacttgatacatgttgggaatgaggggagtagcagcacgtccactttcactctcataatagcgctgcccaggcgtagccatgatttaattagaaacttgttgtcaaaagaagtttatttttttgctagtcgtgcgcactggttaattcagttcatgtcgtatgtttaacttcactttgctagccgattaataatacttggtatgtttttgtcatgatatatgtttatacactgttgtccccccccctcatttatgcaattttgcaaagg

SEQ ID NO: 18658 - DNA, 1269 bp, Zea Mays
cctttgaaagattgcataaacgaggggcaacagtgtataaacatatatcatgacaaaaaacatactaagcattattaatatgctagcaaaggaaagttaaacataacaacatgaactgaattaacaagtgcacacgactagaaaaaaacaaacatcatttgacatcgagtttctaattaaatcatggctgcaactgggcagcgttattataatagtgaaggtggacgtgctgctacttccctcattcccaacatgaatcaaatacctgcattgagtaatgcaagagtgagatgatacatctcaacaagaaaattattttgacgagatatttaaaccacaaattgaattaaacaacatttttaaaggaatcccaattgagatcagaaatacttgtagatatagaactcaatagtcccaatataaccaataccatctcatttcctcgaacaaccacaataggttgtataacccttccctgcgtcaacaatacctgcagatatcacttcaatgtatgcataggaatgcaatgtgtaggtcatctgccctcatacctctgagagtataaaaccgcatcatctgctaatatcacttcaatgaatgcatataaatgcaatgcatatgtcctctgccttcatacctctaagggtatgaagccgcatcgtacccctcctcgggcaacgtacgatgctaagttgtaccggtacggtcggaccataggtcacgaccaaacttcagatgcaaatgaataatgtaatgcatatggcattctgcatttatcaatatacttcacttccttcagatacaaaacaaacctcaaataatacttcatttgccttcagatacaatacaaaccttaaataatactttatctgccttcaggggtgtaaattaatctcatgggtcatactcgaaccataatcatcatcaatatatgattgagcatcagtataatacaagcaagtaaagcatcaccatagagttcaattatgaaagaattccataattctgaatattagagcgtaggcgataaaaaaacaacaagtcaaaacggtagcaaccactgctacattcacttgccttcatcgaagaagaaagatgtactaggcatgatccagagtgtagccacctgctagcgagcataaaaattagtacaaatatttcacaaacatttgctaacaatcaacaaatcgctcgtacacttgaaaccaaatcccggtggaaagactcccaccctgaaccacatgccaaacaacagcagcgttgtttgtt

SEQ ID NO: 18659 - DNA, 548 bp, Zea Mays
gcggcgcgtgccgcgcgcggcaagctgcaacgctgcagcagcacgggccacgacggcgcgacaagctgcaaggccaatcagggcgcggcacgtcaacacggtgggaggcggtcgggcggcgggggacgaccagcgggcgatccggtgatgccaactgagctgagcccaggactccactctccagtcactccccaggacgacagaggaagtgaggattcagtgatttacgaatacaagctgcgacgttcacttgttctctagtttgcagctagaagtccagaaagcaaatgtttacacttattgctattgatttgcaagataaagaacagatcgtttgattcgtgggacatagtagcaaacatatatataaatatatattcttccataaagtggccaaataattgtccgtgatttctcgaagggactgcacataatgatgtccatgcatgttggttagcattagcaagcatgcgtggccctgtttgtagcgcgccccactgaggagccgatggggcgtcttcattctgcatgatgattgatgagacttg

SEQ ID NO: 18660 - DNA, 187 bp, Zea Mays
atgaatttgaaagcatcggtttctcgtatcccggaatctccggatataattactaactgattcatccttttcttgtcgtagagccactaagtctactaaatctagctcataatcgccagagaagaaatgttcatgaaatttttgttctaaatctccccacgacaaaatggaattaggagggagcgtg

SEQ ID NO: 18661 - DNA, 366 bp, Zea Mays
gacgattcgagcgtatccgtgtatgcaggctaaagagatatttttaggcaatgtgggatatgcgggtgcagtttggtctcgttttatgcagttaactcaaacaaaggttgtccaaacgcatgtattgaaactggatagatgtgcgcaggataccaatcaaaaggttaaattctttatatagccagattctaaaaaaagaaaaaaatcgtcatgaaaaaaaaactgaaacaaacaaagagaagacgggagtagagtcgatgatgaagataggccggcaccacgacaatgtcccccaatgctcccgtaatttcacaggagccattaattttcttaactaatccctacaaaatacccccacaacatctc

SEQ ID NO: 18662 - DNA, 125 bp, Zea Mays
aggatatgcctgccgggggtcgtagctagcctagcgctcgttggattggctaccatctagctgctgctgctgcctctttggtttatgcacgaggaggatcttcctgtctctaccggcatcatcag

SEQ ID NO: 18663 - DNA, 806 bp, Zea Mays
agaaaaatggccgaagccatcatggataaagttgttgatcagctactaaacgaagctgcagaaatagttctaagggaagattaaatattattgtaaaaacatttagaatgtaacatttgttgagaaacatgtgtaatattttgtaactttgaatgtaatatattagctgtttatggttttattttttacgatgcatgaaacttcttatacataccttttttgagccttcggcgaaaaaacaccttcccttcttttcatgcttcgtaaacaatatctgtgttctcataagatcagtaaccaatcctcgtaaaatcaataaccaatagatctttccattttagaatttgacgaaggtataactcttcaatagctattttttgtgccttgtcactatttcttcgaaacagttttcgaatatcaatactgagacctccttcttgcgttattgatgcaatatgatgtatgatgttatgttatgcaaatgatgtaatgatgtgatgttatgcaaaatgatatttgccgaaggtcgatgttttttcactgcaagcctcccttaggagcttcttcgccttttacttcagcggaatcagcgtttatttttcgctgtaagcctcccttaggagcttcttcgccttttagtttcagcggaatcagcgtttatttttcgctgtaagcctcccttaggagcttcttcgccttttactttcagcggaatcagcgtttatttttcgctgtaagctctgcattcccttcggaacgacttttgagcagaaaacttacactgcgctccgttagaaacgactttt

SEQ ID NO: 18664 - DNA, 582 bp, Zea Mays
aaaacacagcactgtgcaaacacgaaagtggacgtatacggtgtgacgcctgcccggtgccggaaggttaattgatggggttagcgcaagcgaagctcttgatcgaagccccggtaaacggcggccgtaactataacggtcctaaggtagcgaaattccttgtcgggtaagttccgacctgcacgaatggcgtaatgatggccaggctgtctccacccgagactcagtgaaattgaactcgctgtgaagatgcagtgtacccgcggcaagacggaaagaccccgtgaacctttactatagcttgacactgaacattgagccttgatgtgtaggataggtgggaggctttgaagtgtggacgccagtctgcatggagccgaccttgaaataccaccctttaatgtttgatgttctaacgttgacccgtaatccgggttgcggacagtgtctggtgggtagtttgactggggcggtctcctcctaaagagtaacggaggagcacgaaggttggctaatcctggtcggacatcaggaggttagtgcaatggcataagccagcttgactgcgagcgtgacggcgcg

SEQ ID NO: 18665 - DNA, 557 bp, Zea Mays
aaccagattaaactcaactactccacgtactcaaactgatagcaaactttctttgcttctctttactcacaacaacaacaacagcaacagacttgtttagataccttaagtcgagctctcagccgagcccctggatgttggccgactcttcaccggcggtaccagccaccgtaccaacccttcgttcagcagctccttctgctgcagccatctccctagcagcagtacgctccctctcctttcagcagcagccttctcccttgcttcagcagcggctctctccgatggagccggcggctttccctcctcctcgacttgcttgcgttgccggagcgtctccaccacgagctcgtcgtcaccgcccagccggacgtcgacttgctgctgccgccgccttggcccagtgacagcttcaccactggctccgccgtgcccttgggcacctcgctcggatcaccacaccacgccttcaacacctagctcaggtaccgtgtttaagcttctagaatacactttcaggagtatgataccctgttacagtttacattacatattac

SEQ ID NO: 18666 - DNA, 696 bp, Zea Mays
tagcacttgagaataagagctcaatagatacccttgtatgaaccacaattagtcgatgtttttccatttctctaaatcaggggaaaccctaatcataaagtctcgagagtgatgttccttccatcatggatcctaaaatcagttgtcacacccggatttaagggacaaagtcaggtgcatctcatacatgcgccaaagaagacaacatatataataacagagtgtatagagataaatgtcacaataattagagtacttattacatagcggaagtcttacaaaataaatataaaatgaactaaagtccgtccttggtgccataaagtcgactaggagacaccacctagatcgaatcgaactcctcgttgtgtggctcctcttgaaccacctattcttctcatgtgggagggtgtgagacagcaagggtgagctcacacatgttcatcgctcaacaagttgtggggaataatgtgcatgaactcgccaaaggtggaagttcatgaagtgtaaggcttaccaaagagaatggttaaagctgagcattgcttttaaagttggtcaaaattttattagcaataactagatgtaagtaaataccaaaccataataataatagaacgaaattaataacaaatcccatgcaatgcaaatgacaaattgaatttagtttcataatttaatcatgcgagagtcctg

SEQ ID NO: 18667 - DNA, 1532 bp, Zea Mays
atcggttagtgcttcacttgtctcgtcaataaacattgtcataaataattgtgcaaaaattggtcctgagaatgcaatggggacacgtatgcgtgagtgtgtcgaagtgggttacatcaagtgttgcgttaggtggcatggttgcgtagaaaaatttgagggtcgccgagttgtgtttgtctgaggtgtcgacaagaattaaaaatgtctgtcaagtttatacgaatggcgagtctgtggatgattgtgtgtgctgagatgcattgtagtagtgatggcgttaaaattaacggaaatgtctcgagtgcacgccgccccatggctgtatgcgagacaaggtaacataaggtgtgctcgacacgaatgttcggtcgatataagtaggaaattgtgtttgcttaattagagaggtggtgacatgccgaagtagttatcgctttctcaatatttataagtcgaatcgagtcgatgcgtattttgtgttcgttaaattatgcttcgcatataatgtgtgattgtactcacggattcgagtagacacttcaagcaagtcaagtaggtttgtggtatgagttgtgtaatggagttaattgttttaggataattattgaaatgctctgttcgtataataaacatgtatgtgtccatgattgggaagtaaatgcatggtgattgtgagttggagactagtagtttacgatttgtatgatttggtcggtgtgcaaaaatacttgtgaatatgaatgtttataaaaatgttgtagtgtatgtggtgtctcggattttgataataatagacaagctgacgtgtatgatatttagcgggctgtgtcgttgctctagctagccgactcttagatgactttagttaagcttgtagtcccggtaaattgcttgttgtattctaaatgcgtatggttacggtcgcggatgaaaagtattagtgctcataggatgtctaatttaaaacgcaaatggttgggtgattgtcggggagaatgcgtcgttgattggttgtagtagttttagtgcactaaatgacttgaatgaaaattggtaagttgacttgttggttctcatttaattaatttaactctaacaaatggtaaagcgttagagcaagtcaagtctctaaaatgcggaaattcttgaattgtatagaagctgaattttagtaattgctgttttgggctgcacgcactgttttagttgtgttgtatgtttgatgaactaaattgtgttttctgtagatatgtgctatagaaaagtggtagataactttattatcttacttgtgttaaaatttgacagccataggactgacagtttaggagttatgctttttacaaattcagtaactgaatctgtccaatttctgtacagatttcagagactgtactgtttgcttaagttaatgtttgaatcagtccttgtagattataaggaagttgtagatgcttttctgatcttgcttgtgttaaaatttcataaacacaggcctgatagtttaagagttatgaattttacaactt

SEQ ID NO: 18668 - DNA, 157 bp, Zea Mays
gcaagcaacaatgagctaaattttagacgtcacaagcagcttgagatgaaaaagaacaaaaaaatggttgcgacctcaaacgagaccagttagaatgtgcataagaagcactcccagaagagataccaaatgggcaaaggagaaacttctgagcaag

SEQ ID NO: 18669 - DNA, 542 bp, Zea Mays
atccattgtactgcattgagtaataagtggaaatgaggatactggcaaaagatgttgattgatataatgtttgataccatgtatgaatagataagttctcatctagtctaaaattactattctagaacttgaaaagctaaaagttgattttagactcagctagtgcttttggcaaaccaaacccctcagccaaacagctgcatgtctagaggtagaggagtagactcctcacaccggataagtctagctgagtattagtatactcagccttgcttgtggcataatttttgcaggtacctccttgatttggttgatggtgtgacttggccttcattcctgccaccgggatagacggtcgagtgggttactgcttccgcaggagaggaccaggaggagtagtgtggccaggcttcgccatgttactcggttcttctccgttagttatttccgctgcattaaaatttatggttattatttctgaaactccgataatgtaatcactattgatacttattaaatttgaggtattatgctttattgta

SEQ ID NO: 18670 - DNA, 433 bp, Zea Mays
cccactggacgctcttcttcgacggatccgtccgtcagcaagttggcggagctgggatggtcctcatcgacccaagcggatatcaagtgaagtacatggtgcaccttgagttcaaggccaccaacaacacggcggagtacgaagcactgatcttcgacttgtcggtggccctacccctagggatccgccagctcctggtaaagggagactcccagctgatcatcaagcaagtccgcggggagtgtagctgcaacgagcccagactcacagcgtagcttcttcacgtgaggaagctggaaaaggacttcactgccctggaactgcaacacgttccttgggctgacaattcggcggcagatgacctctccgcgagggcatcaacttgggcacccatgcccgagggcgtcttcgaaagatggctgctgagacccac

SEQ ID NO: 18671 - DNA, 456 bp, Zea Mays
gccctgtccactccactggcaggcggcgaccaggccatcccgcaggcgacgtgcctgtccattccattggcaggcaatacgcccgtgctgcggcgtacactgtgctcatcatcactcgcgcgttaccgaggaagccgcacgacatgtcaatactatatgcactacaaacattatggcgctcggagatcgcccaggcgttacaacattagttacttccttccatttttcccctgggcccacatgtcggggctcagtatccttgtatgtgccccccttgagctataaaagggagggcacacgacgttacaaggcagactcaggctcacacaaacccaacttagactctcacacacgttctcgtactctcaagctctcaagctcaatacaacacacagtggagtagggtattacgctctggcggcctgaaccactataaacccttgtgtgctcttgtgt

SEQ ID NO: 18672 - DNA, 321 bp, Zea Mays
aatgcgtacgtattcgtcaccggcatccgcaggaacaccatatgcaaggatacgaacaacaacaacaactttctgaagggcagatagacctagctcaccggcacagtttggacgctgaacgaagtagggatccacttgttgcacagcaagaacgaggcgctcgaacacatggcgacgcatgcgaaacctatattgcaaaatatagtcagtacaagtgtgaagcacgtactatggacgtgaatagatgtgcgttcgaaataagatacctcctccggaattgagcatccgtgtaaaccggttgcacacaaaagtagtcggctc

SEQ ID NO: 18673 - DNA, 1656 bp, Zea Mays
ctttaggggaccgaatttaggggatgttgctggagactcagaagatatagaggacataatcttttagagtgtgctgtaaatgacagagaatattcgtttaggggacgaaatttaggggacgctgctggagacagcctaatggtaaagccgggacggatgacgacggaaggaggagtgatggcactcgctctacttagtttcctataggctatcaacctccagtgccacgttcgtacgccatctgctactaggtttaaaactggagcagcaggagcgagcgtgacgtatgtgaagcggtttgaaccgtaccaacggttgggttgcttggaaccgacggctgaaataattttgtgtggaatgattcactaatttgtgtaacttcaataaggtgttgtttgattatttgagattggtgggtcggaacgattcctaactggattgcttctctaatttatataaattttgattagctgaaacgattctaggtgcaatccgacacaaacgaacaaggtctaagttgccgacacaaacgaacaaggtcttagttggaacggttcttgtcttccatcccagctaaccgaacacacattaattagaaccgatcccgtacgtagaagtaggctactagtgctagcgcaagaccgtgcaatgcatgatgtcatgcacgacacggcgtgtcgaggctccgaaagtctatggccgattttcttttttctttttagggctagtttggaaaccctattttcccgagggtttttcgttttctcaagggaaattagttcattttcccttgggaaattggaaatcccatgggaaaatagtgttgccaaactagcccttagaaggtagatgcctagatgggttgggtgtttcgtcaagttcagcgcggctgccgtgccgcgaacgagtggggcgcgtcagcggcggcgacgaagctgcgtggcatttgccactttcttagctttttccagccgggttgagcgcgtgtccatgcatatttttggtagataataacgtcgatgcgcggttgagatagacgacattcggtaaacaatcaatccacacacctagacacacccggggtacgtcccccgcagtttcttcttttccactcaaaccaggaacccgccggattattgctgggatacacacaaagtaggctttctagcatgatgctatgatgatgatgatgatgatgatgatgatgatgatgatgatggacgagatgcactcccggacatgcgcatcccgatcgaggctgcggcagcggatcgatcaacctaattcagtatatacttctcctttctccttgtggctggacatgcttcagtcgatcatcgtcaagcagcaggaggaacacattagacgcacatgtttggactgtgggttattttacaaagaagtataagagcatctcgaaagatttagttaacaacatacactgagtagggggagtcagtcggcggagttgtctatgattcttgcatacttagtcggggcaatgttcatggtaggtattattagtatagctcagagtcagttatggctcagaccaagcatttgtacctatcctcgtctagtggggacgaagtggattatgaagttaggggggcttaagtacgtaataccttaataaggggtgaaagggaaataggc

SEQ ID NO: 18674 - DNA, 483 bp, Zea Mays
tctagactataagttttacaggtgccaaaggttcacaataaaccaataaaaagaccaagaaagggttcaaacaaagagaggaaaagacaaccgaagtgtgccctggtctggcgcaccgaactgtccggtgtgccactggacagtgtccgatgcaccagggaacccaactctgaattgctcaccttcgggaattctggaagccgctctgctataattcaccagactgtccggtgtgccaatggagtaacgactactacagcgccaacgatcgtctgcaacagcagttaatgcgctacagtgcgcgcagaagtcagagcagagccagaaggcgcaccagacagtctacaggacctgtccgatgcaccaccggactgtccggtgacccagatgtcagaagctccaacggtcagaatccaacggccgggtgacgtggctggcgcaccggactgtccggtgcgccatgcgacagaagccctcaccaac

SEQ ID NO: 18675 - DNA, 2373 bp, Zea Mays
gagcgatcacattcggggatggaaatcaaggtttggtcaaaggattgggtaaaattgctatatcacctgaccattttatttccaatgtttttcttgtagattcattagattacaatttgctttccatttctcaattatgtaaaatgggcgacaattgtctttttacggatataggtgttactgtctttagaagaagtgatgatttagttgcatttaagggagtgttagagggtcagctatacttagtagattttgatagagctgaattcaacacttgcttaattgctaagactaacatgggttggctatggcaccaccaactagcacatgttgggatgaagaatcttcataagcttctaaagggagagcacattttgggactaaccaatgttcattttgagaaagacaggatttgtagtgcatgtcaagcaggaaagcaagttggtgttcatcatccacacaagaacatcatgacggccgacaggccgcttgagctactccacatggacctattcggcctgatagcttacataagcattagcgggagtaagtattgtcttgtaattgtggatgattattctcgcttcacttgggtgttctttttgtaggaaaaatctcaaacccaagagaccttaaagggattcttgagacgagctcaaaatgagttcggcttaaggataaaaacgattagaagcgacaacaggacagagttcaagaactcacaaatagaagtcttccttgaggaggagggcatcaagcatgagttctcttctccctacatgccagaacaaaatggtgtagtagagaggaagaatagaactctattggacatggcaaggaccatgcttgatgagtacaagacttcggatcagttttgggcggaagcggtcaacaccgcttgctacgccatcaaccggttatatctacaccgaatcctcaagaagacatcgtatgaactcctaaccggtaaaaagcccaatgtttcatattttagagtctttggtagcaaatgttttattcttgttaaaagaggtagaaaatctaaatttgctcctaaggctgtacaaggctttttactaggatatgattcaaacacaagggcttatagagtctttaacaagtcctctggactagttgaagtttcttgtgacattgtgtttgatgagactaatggctctcaagtagagcaagttgatcttgatgagctagatgatgaagaggctccgtgcgtcgtgctaaggaacatgtccattggggatgtgtgtcctaaggaatccgaagagcctccacaagcacaagatcaaccatcttcctcaatgcaagcatctccaccaactcaaaacgaggatcaagctcgagatgatgatgaagatcaagaggagccacctcaagaggaggaaaatgatcaagggggagatgctaatgatcaagacaaggaagatgatgaggatccaagactgccacacccaagaatccaccaagcaatcctacgagatcaccccgtgaacaccatcctcggcgatattcaaaagggggtaaccactcgatctcgtgttgctcatttttgtgaacattactcttttgtttcctctattgagccacacaggatagaggaagcacttcaagattcagattgggtgctggcgatgcaagaggagctcaacaacttcacaaggaatgagatatggcatttagttccacgtcctaaccaaaatgttttaggaaccaagtgggtcttccgcaacaaacaagatgagcatggtgtggtgagaaggaacaaagcccgacttctggccaagggatattcacaagtcgaaggtttggatttcggtgaaacctatgcacccgtagctagacttgagtcaattcgcattttacttgcctatgctacttaccaaggctttaagctttaccaaatggatgtgaaaagtgccttcctcaatggaccaatcaaggaggaggtctatgttgagcaacctcccggatttgaagatagtgagtaccctaaccatgtttataaactctctaaggcgctttatgggctcaagcaagccccaagagcatggtatgaatgcctaagagattttcttatcgctaatggcttgaaagtcggaaaagccaatcctactctctttactaaaacacttgcagatgatttgtttgtatgccaaatttatgttgatgatatcatatttaggtctactaatgaatctacatgtaaagagtttagtaggatcatgactcaaaaattcgagatgtctatgatgggggagttgaagtatttcttaggatttcaagtcaagcaactccaagagggcaccttcactagccaaacgaagtacattgaagacatactcacaaagtttgggatga

SEQ ID NO: 18676 - DNA, 1480 bp, Zea Mays
aaggtataccggtcaatgataggttctttactctatttatgtgcttcacgaccagatattatgctttccgtatgcatgtgtgcaagattccaagccgatcctaaggaagttcaccttagggccgtgaaacgaatcttaagatatttagtttatactcctaagtttggcctttggtaccccaggggatctacatttgatttaattggttattccgatgctgattgggcagggtgtaaaattaatcgaaagagcacatcagggactttccaattcttgggaagatctctggtgtcttgggcttcaaagaagcaaaactctgtggctctttctaccgtcgaagccgagtatattgccgtagggcattgttgcgcgcaattgctttggatgaggcaaaccctcagggactatggttacaaattaaccaaagttcctcttctatgtgataatgagagtgcaatccgcatggcggataatcctgttgagcataaccgcactaaacacatagccattcggtatcactttttaagggatcaccaacaaaaggggatatcgagattgcatacgttaacaccaaagaacaattagtcgatatctttaccaagccattagatgagcaaacatttaccaaacttaggcatgagctaaatattcttgattctaggaattttgattgatgttttgcacatatagctcaaatatatacctttgatcatatctctttctttgctatgactaatgtgaatttcaagtgtatttcatgctaagtcatagattgaaaggggaaatggagtcttcggcgaagacaaggcttccactccactccatcgattattcatccttcgtcgtcgctctgcaccgctctccaatttggtataatcttcactcatacattatttaccatagggggagaaagtagttaaaagggctctaatgactccatttttggcgattcatgccaaagggggagagagtattagcccaaagcaaaaggaccgcaccaccaccaatttcaaaaattttagtctttcaatttgttttttaaagtagtgttttcaaattggtatcttattactgatataatttcaaaatggaataccctcttcaaaattaatatccaaaaccctcttgaacaccaagaggaggatttcattaagggggagttttgtttagtcaaaggaaaagcatttgaaacagggggagaaaatttcaaatcttgaaaatgcttctcaaaatcctattcatttacctttgactactttgcaaaagactttgaaaagaatttccaaaacatttgcaaaacaaaacatgtggtgcaagcgtggtccaaaattttaaattagaagaaagccatccatgcatatctagtagaaatgattattggtttcattccaagcaacctttgcacttacattatgcaaactagttcaattctgcacttctatatttgctttggtttgtgttggcatcaatcaccaaaaag

SEQ ID NO: 18677 - DNA, 841 bp, Zea Mays
aagttttacaggtgccaaaggttcacaataaaccaataaaaagaccaagaaagggttcaaacaaagagagcaaaagacaactgaagtgtgccctgatctggcgcaccggactgtccggtgcaccaccggacagtgtccggtgcaccagggaacccaactccgaactgctcaccttcgggaattctggaagccgctctgctataattcaccgaactgtccagtgtagcaccggactgtccagtgtgccagtggagtaacggctactacagcgccaatagtcgtctgcaacaacagttaatgtgctacagtgcgcgcagaagtcagagcagagccagaaggcgcaccggacagtctacaggacatgttcggtgcaccaccggactgtccggtgacccagatgtcagaagctccaacggtcagaatccaacggccgggtgacgtggctggcgcaccggacatgcgacagaagccctcaccaacagttcttttggtggttggggctataaataccccccaaccaccacaattcaatgcatccaagttttcagccttcaaacaccttacgagagctataacattcaatacaaagacacaaccaaagagattaaatcctctcccaagtccaaagatcattccaatcaaatagtgactcgtgagagagagacttgtgttcatttgagctcttgcgcttggattgcttttcttcttcattctttcttgtgttcaactcaattgtaaccaaggtaagggacaccaatcgtgtggtgatccttgtggggacttagtgtcccgtttgattgagaagagaagcttactcggtctaagtgaccgtttgagagag

SEQ ID NO: 18678 - DNA, 1289 bp, Zea Mays
caagaaccgaacctcggtaaaacaaatcaccgtgtcatccaccttatttgcttgtgatttgtttttgccctctctttcggactcgtttatatttctaactctaaccccggcttgtagttgtgcttaaactttgtaaatttcagattcgccctattcaccccccctctaggcgactttcaaggggacatgtatacaattggcaagcacaagataagttttattttgcttcaaataacatcttttagtatcatatgatcttgatgttacattgcatgctagcaagtaaatagtatcaattttctgtttgtatctatttttcgcttgttttgaccattctgccataaaacatcaaaaggaggcatattataaggaaaatgaaccccatgggccatttagtttggtttttttgattattaacaagaccatttagactaatgttgttcactagtatatttgttatagttcaacatgatgcaaagtagacttggactaagctggaccaataaatcaaatgatcaacacctcaagcaaaaccttagaagacttgtttaatacctagaagacaagctaagagtccaagacacaaaaattcaaatgttcgaagcaatcaacaaagatggcgtaaaggagctagggcagcctttgacctaccgcacaatcgaaccgcccctagtggaagtgggaccgtaaggtagcccatttggtccaatggttgatggtgtggaggctgtcagatgaagcgcttggactattcacgatgctcataatgggattgtgacatccatcggttgaactgccaggttaaggccaacaaggtggagtccctactatgtgcaatcgttggtggcgtagaggagtcaatagagcgggtcattgctagaccgctaggtccatgcgatcgacacatgggactagacaaagctgatgattgttgcttgcagtcgaccattgacggtgctggcggttggactatcaggatgagcctaaggtcaacaaaaacccaacaactatattgactgggtggggctatatatatatccccctcccaaaattgactcatttaatgtggaaggacttgggaagttgttgtagggtattgctacaacattttagagctctccacatgcatggtgctttagtgaacacttgctaaataatgtaggggctttacaaagtgcttatgttagttagacaattgctaaatatgcttactttatgtttagacctagtgttagtgatgtttccatacttcttgctattaggtgcttgcttgcattgttgttatactc

SEQ ID NO: 18679 - DNA, 685 bp, Zea Mays
attttgtacaaaactccgattatatagtaaagatgtgacattcgatcatgtgccatgattcatcatatgtgtgagacttggtcccagcacacctggtgattatgttcgcgcccgggtcttggtgccccgaaatccgggtgtgacagattgcaaactctcatcgataactccgataatcttaccgagatatcgaaaatctcacatttttctagctcttgttgaagccccttgcaaagatgcccttaggaggactaagtttttggtaactccgtgaatatcttccgaatcacacaagtgggtctccgagatagccactatcaaaccgctcctttgaaagggaaatgtgcccttgggccatttctaagtattttggtgattgagtgcaaacacaagtgctcaaatgtgaatctatgcccatgggtgaacaaagtgcaaatcacaattaaaggtatgtttctaagccttagtacattggttttgtgtactaatatacttgtctaagtattagaaacagagagaaaaagaaaagagaagagatggagaaagacttggctgtgtacagccaagactcagctcggtctgacacaccggactgtccggtggtgcaccggacagtgtctggtgcgccaggctgactcggcgtgaaaaggccgctctcgggaattcgtcgacggcgtacggctaa

SEQ ID NO: 18680 - DNA, 547 bp, Zea Mays
ctttataatggcacgacgtttgaagtttgtgctttataatggtagagatatagttaaacagggtgacgacgtgacacaatcaattatctcaattctcaaaattggagcagaagttaaggtgctgacatgggagtgtgtgaagttgttatttttgctgtgagaattgaattgacaattgaggtagcctagtgctgctagccgaacgttgctgcgaggaacatgtcctcctcgctcccaacccagccgcactggccacatcgctcgccagcacggcagcactcggccatggcgccgccggcgccgggcgccctctccgccacttgatgatcagcggcaacggcgtggacagcctcgacctcgaccagcagcctaggcgccttgcgcccacgcagctcgcggcccaccggcgagagcgtgagccacctctccgccggctgagacgacgccgccgacgccacgtcggcccacgggagctcggcccgcgccagcacccgcgacggcctcgcccgcgctccagtccccagcgacagcaacgccgccaggccgg

SEQ ID NO: 18681 - DNA, 482 bp, Zea Mays
aagatagagcacactgcagcatgttagtctaagtgtctaccatacagaagcaggtgaaagcacattctaatttctaatatattgaatccgaacataacgcagtaaggtctcagatcgcacagcctaaacatcaaaggatccgtcgacggtaccacaaacaagcagaaaaatgagcgcgtgcaggtgtccccaagatcataatcgtggcggtggcggtgccggtgccggtctcgcctccggaccagcactcgccgaggttggggcaccgggcctcctcgcagacggtgtggagcttcagctcccgcagcttggccgagtgtttggaggagagacgggccggggtggaggagatgaagcgggagggcgcccgggtcaggggctcagggcccgggttagggacgccgcgaggtgccggcagccgtgcatggctgctgctgcggcagcagttggtgaggcgtcgggagtccgggaggacggagcgg

SEQ ID NO: 18682 - DNA, 237 bp, Zea Mays
cttaattctagtttatttccaaattcaagattcaaactaagtttaaatttctggtttgaactttccaaattcctaaatatcaaatatgatccaattatgaatataaacgctactattttcggtattagtatttttttttcttcaaataaatgcttctagaggtaatattagtgaaagaaacatttgttaaattaaaaataggcaaactccctattatttatttttctgagatttgtg

SEQ ID NO: 18683 - DNA, 165 bp, Zea Mays
cacattccttgttcctcacaggtcagtgaagctcctaaagttggtattcctaactctactattgtgtgttgcataaaacgaggtcgcgccgtcacagcttggcgccgtggacagcttccccgccgacccatcaacccatgttgtctctggttgttttcacgtgag

SEQ ID NO: 18684 - DNA, 135 bp, Zea Mays
gcgggatcgggctcgtcggacccaaggttcggccgccaccgcggccagaggcgatattggtctcttcgatccgattaaccaaggggaagtgatggggtcggtttgggtgacgggtaggtatgctcattctcgtcg

SEQ ID NO: 18685 - DNA, 246 bp, Zea Mays
gtgcttgtatgaccataggttcagtagtttaggagttatgatttttccatgtccagtttcagaatctgtccagattctgtactgatttcgaaaataaccttgtttgtccaagttaaactgagaatcagctcttagtaattataggagaattgtagtacatttcttaagctttccaacaaattttggatcaccatttttggtggtctagaagtcaggttatggctgtttgaaatgtgatgtttgaag

SEQ ID NO: 18686 - DNA, 108 bp, Zea Mays
aggtatgcatcattccgagtgagacaagtgaacaagtaattgtaatcaagaggaaaatcatagctgtgaggtggattcttgcatgcacatctgtcagttcggttggcc

SEQ ID NO: 18687 - DNA, 196 bp, Zea Mays
tttaagcactccagtttgtgcgcatgtggaacacttttgagaaactgttgtgcttgtacatatgctgatactatcgttctcatgaataaacgatgctttttactttgagtgaaacaccgtttgcttaaactgtattggattgctatagatgtcagccgacatcgattgataatgatccaatgctattcggatagat

SEQ ID NO: 18688 - DNA, 259 bp, Zea Mays
ctcatttcttctcacctccccagccaccacaaaacaaacgagccgcattgctcctgaccgaccgctcttacttcccttctctctctgtttcttcatttctactccacctgccccacagctactcggctgccagggagaaccagccgttagcttctctactccctctcttgtttcacgttccttcgggcgcgttctggtggccagcgcatcgcagccaccgcgcccaactgtaaggcacgcgctagcggcttttcggtcg

SEQ ID NO: 18689 - DNA, 921 bp, Zea Mays
ctcatttcttctcacctccccagccgccacaaaacaaacgagccgcatttgctcctgaccgaccgctcttacttcccttctctctctgtttcttcatttctactccacctgccccacagctactcggctgccagggagaaccagccgttagcttctctactccctctcttgtttcacgttccttcagcgcgttctggtggccagcgcatcgcagccaccgcgctcaagtgtaaggcacgcgctagcggcttttcggtcgtctctatgcacagtgaaacgggcaccgcagacctcgccggcagcgagctcatcccttcgggcgggtgagctgctgtcggccgggaactgaccgcagtccgagcacgacaggttgggtgtctgtctcttgactgtctttaacttttaaaacttggatctagtcctcatttactcgaatcccttactgtgtatgaatgaatgtatgagatggatctaatgtaatattcgggatcgagttatgagttgataaaacgtagatccgagaccttgcgttatttctgttattttgtgatgatgttctgtacctttgactgaaaaaaaccagtccaaggattatattgatagtgctctgtacacttaatctgtacgcggtttcttattgactgtttcttggccgtgaattaaaaaaatacgagctactgtgatctctgttgacctagtttaaaactgatttgggttaggttattaaaaccctaaccctaaaacatcgatctgttttttactatctcggatttcttgggtttggtcgagactgacggtggccaaaaccctaactcgagatctaaaattatttcagtctattctaatctttctgttctcgggtgatcgatgataacaaaaaaaatgagtcgatcacattgaactgtgacctttctgtgatct

SEQ ID NO: 18690 - DNA, 492 bp, Zea Mays
cgagattctttttaagaggggtagatttgtgacactatgaaaatcattaaataaaaataatacatttggttattaatgaaattatggtaataaaaattttcttttaagtgtttgttatttatgtgcatttggaatgaattttgatttctcataattgattttagatattgaatagcattttctcttaaatgaaaattcacttaaataatataataaatattagtataaaaattaatattttatttataaataattttggtttgattattatgaattttagggttatttaaatatgtatttcgaaattagaaaacgaaatagaaaaaaaaagaaaaagaaaaaaaacctaaccctaaccgcctcggcccattaggcccattatccctaaccctaaacctgccatcgcccctggcttcccagccgccgcccctggctcctcctctctcttccagccgccgcttcctcccagaccgccgtcggcctctgcttctc

SEQ ID NO: 18691 - DNA, 287 bp, Zea Mays
caaaactcccttagatttttcccatcatatgcatacactttgtttgatcacaagcacctcacttagattttattttccaacacctagattatccactaaatgatttgttcaaaaaaaaagaaacaaaaatggaaatgagttattaaaaataaaaagaaaaagaaaaagctctccttcccctgctgggccaagtctggcccatgtcgtggccgcctcctccctcccccgcgcccgtgcattccccctttcggcccattagtcggcccgctcgcgcgcgaagccgcccg

SEQ ID NO: 18692 - DNA, 348 bp, Zea Mays
aaggaatacccttaccttttctcgagccccgtctgaaactcgagggcgagattcctttaagtggggtaggtttgtaacatcccaaaattctaacccaggttcgaaaccctaaatctaccccttttttctcatcttctatcccaaaactcccttagatttttcccatcatatgcatacactttgtttgatcacaagcacctcacttagattttattttccaacacctagattatccactaaatgatttgttcaaaaaaaagaaacaaaaatggaaatgagttattaaaaataaaaataaaaagaaaaagttctccttccccctgctgggccaagtctggcccatgttgc

SEQ ID NO: 18693 - DNA, 899 bp, Zea Mays
cagcactctacatggattgcaatcctctagtccacacttctctagaatttttcttgcagagcttcttgagacaaactgatcctagcttcttcctgcatcaattcaatgcccaggtaataagatagcaacccaaggtcactcatcttgaataccttagtcatttctgtctttgaacttcctgatgttgctgttgcttgtgcctgtgatccctagatcatcaatatagacacatacaacccgcctctctgcacctcatccacgtcagtaaaatagcatgctcagatggacatctcatgaattccagaacacccgattgttcatccagtttttgattccacgcacaaatttatgaaagttaattaagtctatatttaatacttataattggatattcaaaatttgatgtgacacaattaaactctagccagtgaaccgattcaaccaaacacccctttaataaagtgtttgtttggtagagcttttgctccaagtttataaaactgttttttttcaatttttcctaggttctaacaaaataacttttcttaaaagctatttttcaactcgtttcaaagcatagtttttttttcacgagaagttgtggaaaggcgaaaatactaagggcctgtttggttcagcttttttctgaccagcttttctaagaatctgaatgtgaggagaatctggctgtgggaagaatctgagtattattaggattatgtgcggagaaagataaagatgttcatagggctcaggatctagaaagtgacggattcctactattgcaacaactcaaccgattatatgtttatgttgattttaaatagtttttatctaaacgaattttatagaagctggctgaaaagctgacgcgtttagtagtccgcagcagcttttgg

SEQ ID NO: 18694 - DNA, 331 bp, Zea Mays
cggaaagggagggagctaaccggctagcagcgcaggtgctggagaaaggtcgaacccgcttccaggtggtgaagacggcgagaggacacggccgaggacgacgacgacgctgtgtgccttgccttccccgatctgctccaaggatggcgagacggcgacgctgtgtcccttcccttcccttccccgatctactctgaggacggtgagagaagcttcaggagcagaggtagactagagtcggggactccagggagacgggagggagaagatggtatgaacggatgtgaactctagtctgtgtatgagcagtttggacatttccaaggacaaa

SEQ ID NO: 18695 - DNA, 171 bp, Zea Mays
gaatatttaggatcaagtaacatcgatatattgtaactaaaaatgatagtgtgtgtttataatttattcttgcttgataatagaattaaatatgattaaacaggagaaacgcgagtgctgtagttagtatgtataatttattattttatgactattgcgcttagtcgtata

SEQ ID NO: 18696 - DNA, 457 bp, Zea Mays
gttaaatcgtgcaacttttttgtgttatgtggatcccaaaaagttagctagttcccttcctatttctgtcacatttatacatttcctcactctactggtgaactaaaacaattaccaagcacacatgctctcatagtttttattccatacacgtcatgaaactaagacatttttttagttgacaacatagcccccaaaataataatgaacacaattccaaaatctttcatacttttcccccctttttagacaaatagagatttactctgtgaagcattgtgttacatacatattacattttgtgttctggatgtgagtactcatacatttcttatttctcttcatgtcgacgatttccatggagctgtgactactcatctcgcaatttctaaatgtgacttttttctcctttgtaaggttagttactaacactattttattttgtagaacatatttt

SEQ ID NO: 18697 - DNA, 450 bp, Zea Mays
ctcacacatgatcataactcaacaagttgtggggaaaccagtgggcatgaactcaccaaaggtgggagttaatgtgaagtgtaagaggctgatcaacaataggggttaaagctgagcattgcttttaataagttggtcaaattttattagcaattaataaatgtaagtgaataccaaaccataataaataataatataacaaatttaataaataatcctatgcaatgcaaatgacaaattgaatttaagttccataaattaatcatgcgagagtcctgagctgctcatgaccgtgagctcggctagtataccagttttacactctgcagaggttgtaccctgtacccacaagttgtgtatcccatgtcgccagggttagctagaccctcagacactaccgaggtgaatgactagggatccactatgaggcctttacaaagttccactagc

SEQ ID NO: 18698 - DNA, 109 bp, Zea Mays
cgaaaatcataaagtgtagtggaaggtaaaatagcccaggccacaggcagaactgggtgaagacacagccccatcaatcaagcatagcagaaaagaagtcttcagctgc

SEQ ID NO: 18699 - DNA, 838 bp, Zea Mays
ctttaatcgtgactccgatcttagtagttctcgatcccgtgatctcgtagcaacgtgtagatcattgttatacattttgttcttatctgtggtgtgatgttaattttgtctataccatgtttgtttgtattgctacgtctagcgcgaggtcacgaggatctgaagaatcatcctggtacctggaatttcaagtgccaggcaagttgtgcccttgaccacttttattacccaataatgtcctttattgtcactattcaatgcataggtttagctttgatgggacctaataggtcaccctagactgtttatctttttaccttgtttacacctgaatcacttggtagtttttgttattgccttatatggttttgggttaatatttcattatatccatattccaattattctgttatgttattatgttcatgtcaagatcattaatgttaattggaacatggagcttaacttgagaaacatgtgccaccacaagggtggaatgggacgcccttggctaatgtaacatcccaaaaatcccaacccaaggtttgaaaccctaaccttctaaccccccccccctttattttattttctcctttaactctacccttaggacacctcatcatgtgcatacacttgaaataattagatcacctcacatagactatatttatcactcaagaccatttcgagaatttttgattcaaaggaaaaagaaacaaaagaaacaaaaatagaaaaaggaaaagagaagaattagaaaaagaaaagaaaaagagaaactcccccctcctcggctgggtcgaatctggcccaaccaacccccgcgcgcccgcgcttt

SEQ ID NO: 18700 - DNA, 583 bp, Zea Mays
aaaaaattctaccttatctttatggattcatcatgccctaattagcatatttatcccactctagagtaacaaccatgatctaatccaaagtaattagatattatctagtctaatctagtcataccaatctaatctagatcccatctaatctaatatggtccaatctaaagtgagttacttaacggactagttaatactagtgaaatagattagaccctgctggccatgttttaacttaaattagtatatcagaccaaaccacccatgaacaaataacttaccagcatattcatggtgaccatccctcccatcctagatgttgccataatacacttatcttatgccaccagcctgttaaccctctgtccttacctacaagttatcctaactacatgtccctaattcggataaagacttcaagaacgaagatcgaagatgatcgagctcatcaaatcaaggaaggataagattcaagctagatcttcaaaagtaatcaagatccacaatcttggatagagtctttcctagccctaccctttcgtaacctatctatgctctaaagacatcttctatactacataat

SEQ ID NO: 18701 - DNA, 469 bp, Zea Mays
ctagaacttgtttatttcatagaaaattcatatgaactccaaatcacttcatttcagttcctaaaattttgtaattttattctctatcacttagagtctctgttttgtcatgaaaatagtaataaaatttatttctcacttaatcctatttaaaacacatgaaacctttgaaaattcataacttaaaatctataactccaaaaattatgattcctgttcctaggattctattttaatatgtagattattactgtgtattttgtttatatgtttgatgtgatgttcattttgcctataccatgtttgtttgtattgctacgtttagcagtgaggacacattattcatgataccatgtggttttgggcattgagatacacattattcatgattatacttttgttatcagttgttatttactgttcatgtcaagatcattaatgttaattggaacatagagcttaacttgag

SEQ ID NO: 18702 - DNA, 514 bp, Zea Mays
ctaaaattaaagggttaccaatatttccctcctcacgcaatctttggaacatagctgccatctttctattgtattggatataaaccaaattgtttaacctttggtgctccaatttgttcctttttttggtatgaatctttttggtatgaatctatgtgccagctcacttgaggcattgatagactccaagaaaaatgtgccagttggactattgacaaggaaattgatcaagtactgacccctcctatctgtccaaccatcagacgtaagtgtgcaaccaaattcagtccaagccaactcatgagtctttcttatctcatctacactattctttgtcttctcaagcaatgacaccctaacatcatgatatgaaggtttcacatacccaggaccatattgcccaactgcctcaagcatgatctcaaaggcccttgagttgatgactgagagcacctagagggggggggggtgaataggtgatcctgtaaacttaagccacaaaactttgattaag

SEQ ID NO: 18703 - DNA, 641 bp, Zea Mays
gtcaggccacctttgcgttaaatgctcctgcgactcggtcggtcggcgcggcgatttagtcagggttgcttcttagcgaaggcaaggcctcgggcgaggcggagatgtgtccgccattggaggggggcctcgggcgagacggaaatccctcggggtcggctgcccttgtccgaggctaggctcgggcgaggcatgatcgagtcgctcgtatggactgatccctgacttaatcgtacccatcaggcctctgcagctttatgctgatgggggttaccagctgagaattaggcgtcttgagggtacccctaattatggtccccgacaaataggtagagcactttatatggaagctaacaaacaagtcttactaatttagaagctaccaaactcgagttatggattttataagaaagtgcaggaatctaaaatttcagcacacttgttcttgactcgggctcacctgctcgagctgagtggaggggaggaggggcgccagcaccatgcctgcagcgggggagcttgccatgggagagggctggtggcgtggggaggggagcacgccatggaagggggcgtctgctccatgctgctggcaacaacgaagggaaggagacggtgtgagggagagaaagggaggtgat

SEQ ID NO: 18704 - DNA, 351 bp, Zea Mays
ttcctttgactaaacaaaactccccctaaatgaaatcatcctcttagtgttcaagagggttttgatgattaaagttgaaaaactattttctcccccttttgaactcaataagatactaattgaaaaaatgctcttggaaaatactaagtttttgaaattggtggtggtgcggtccttttactttgggctcaacctttctccccctttggcatgaatcgccaaaaacggaatcattagagcccttttgttgactattttctcccctttggcaaatgaaacatatgagtgaggattataccaaagacggagagtggagcggagtgacggcgaaggatgagtagtagagtggag

SEQ ID NO: 18705 - DNA, 662 bp, Zea Mays
ctactcgatagccttaaccattatgctagaagccctttcacatctctctcccgctctcaatccttccaaccttctccaatctattggttcagcattggaagcttggatttgatcggtagatcttcgagagcaaggtatcctctctcctcttcttaatttatacacattgatttggtctatgctatgtgtattttactattgattcaacattggtagcttggatttaatttgtagatcttcgaaagcaaggtatcttctctcgcctctccttaatttatacacgttgttttagtctatgttagatgtattttataaccctagctatctagttagatatgggttgaattaattttgattttggtgtataagcaaagctgtttaggtagatcggttatgtttgcaaacatgtgtttagttttgtccacgatttatatgtgtacgcatgtgttttatgattaagttataatgttagttacggtatttagatttaatgtaggttaaatttggttgtaatttgtaggttttattttgttatctataatgtttagggtttatgtttagttttagtttagttagtgcccggagaaggccatacatctagatgccaccaagacggcttccaaaaatattggtaaaaggaattactaagggcttatctgttg

SEQ ID NO: 18706 - DNA, 755 bp, Zea Mays
cgcccccccacttctcttcccccttggccgccgcccccctgcccatctcctcctctctcaattcttgcagccaccaaaccctagccccccctctcaatcccctcctccgaaggtgccaatccttgccgctcggatcatcgtcgtcgtggtgcgagtcttcaatcgttttggtggagggaagaagggaggaaggaaagggggagaatccaaggtgatttttgtgttcatcccttgttcatttgcgctgcaatttaattgattagaggttgcgtttgcgattggggtagaggggggctgtccagaattttaggtggtgggtgaacaacagtagtctagcagtttctgtgtttttttcgtgaggaattaagggaaatcagtatgaggatcatgtagaactttaccttacctttccaacgagtatttatgcgctcaatttggagttataaattgaaagttatcaccgtttgaatccgggtatgtggctgtccaaaaaaacagatttttcaggaggatgaacagcagcagtattagcagtttctggggatttttcgggagtaattagtgttaatcagtatgagaatcatgtagggctttatgttatctttccaacaagtacttatgcgctcgattcggagttataattcaggagatatcgttgtttgaatccggttatgttgctgtccaaaaaaacagatttttcaggtgggtgaacagcagtggtattagcagtttctgggaatttttcgtgggtaatt

SEQ ID NO: 18707 - DNA, 1115 bp, Zea Mays
ctgtcattgagtatgcataagttttaattatgttaatcattgaattctatgatgaagtttatttgtttggaagtattaattctcaattttctaatattgtggatgatcataatttggtaatgatatatgtggttgattcccatctggatgaagttgaagtgtctttttgaatcatgttatatgaagtgttgtaggcatgacatgcacatcgcatcatccatcttgcattttgaagttatgtcgtgatcttatagtccgaccgtaccggtacatttttagcatcgtacgttgcccgaggaggggtacgatgcggcttcatattcttagaggtatgaagacagaagtcatccttgcatttgcagacatttgcactcatgaggaatatatgaagtgtgacattactatgttactattgtggtttctacctgcgaggtgtggtaactaggtgcgttgtacgttgtatacgtgctgcaccttcgtaataagaaggttgtggaattaagtggtggtaaaacaatgttcttatgtggttaaactgtttgatattattttacttgctgagatgtgtcatctcacttttgcattactcaatgcaggtacttgatacatgttgggaatgaggggagtagcagcacgtccactttcactctcacaataacgctgcccaggcgcagccatgatttaattagaaacttattgtcaaaggaagtttgtttattttttttaaatggtcgtgcgcactggttaattcagttcaggtcgtatgtttatctttccttgctagccgagtaataatacttagtatgttttagtcatgatatatgtttatactctgttgctccctgttttatgcaatcttgcaaaggggatgctgccgaaattttatatatggacgtcggaagtgtagtacagtagcataccgggttgtttgtggaacctggagtgttacagtgccgcaggctatgagctcttttctactagtgtctaatgcacatatgaatacacataaccctggcgcgtggacttgtctagtgaaatcttattattcttttgtcaatataatctgtaactcttctgtccgattcattttaaaaaaatatactgctatgtttcag

SEQ ID NO: 18708 - DNA, 3499 bp, Zea Mays
cgagagggaaagaccgccctcccggtattatattaaggagagactgaaacaatggtttcggccgagaaaatccccgaacactggccctccatcactaacgggcaggcgtcaaccgtccactctgcaacggcccaatcagagggtggcgcacaacacatcgtaacgcgaaggcggatggggcacagcgaggggatttttttaactaaatctgacaattcgctcccgagggggatcgaacccaggagttggaagtgctactcgaaagcccttaaccactaggctagaggccctttcgccactgtctactgtgtaatcaagctcctgaaccaatgcagcccctcctgctttcttgtgtgctctacaggcttgtgtatggtggcgctgcaggctgaaacaaatagggtttttccttttgtggagcaagctcttaaagaggccagcaagcaacttttttttctcgaacatgtgggagaaccacgtatcaatatattaaagaagataagaaaaaaaaggtctagaaaagacccagtacaaaggtgccaagaaagcacccacggaaataaaaaccaaaaatcaaaaatcaaaaacttaaaaagggatttaattccttggttattctggttgcttgggagttacaaaaatactgcaacaaagcacagaaaaaaatactgcaacgaaggcacctactatagtgcctctagatgtgaacagagttggcgtgtttttttgcggtccatcaaaaggagctcttttgccacccaggtcagatagtcacttttttttatagaacgcgcaggagaactgcgcatcttatatattagagaggaaaagaaaacattacaataaaggagatgttgctgagcaactctcccaaaaacccttataaacccgaaggtgattacagattgttgctgaaacttgacccgacctcgcccaggtcagcaactaagcccaagctcccaaactccttagctcctgctattacccagcaaacgtactcatccgggaaacacctgaaaatcctgggtagtgagggagactccccatggaacactgctctgtttctctgaagccatagacaccaagcccccaggatgatcagagagttaaaaccccttttttctggtcttgacaaccctaaggcttgcctttctccaccagtctgcaaaattctcctcatcagctgttggagtgaggtgccccaagccaatagcagcaagaattgtgtgccaaaattgtcgggcaaaaatgcacgcagtaaggaggtgctgaattgtctcttgggcttgatcacacattgggcaaacaactgggtgtggcattcccctcaactgtaatctgtcggctgtccaacatttgttccttattgccaaccaaaggaagaacttgcatttaggaggagcccaggtcttccataatctcttccaaggctcaaaaacagtagaaccgaagagaaggactttgtagcaggatttagaagagaacagccctgatgcctcgtgcctccaaacatggcggtcttcttcctgagaaagctgcacgtcccctaaagcatcccataagagaagaaattgttgaattccaatcaaggaaaggggggttttaatatgtgctatacattgcctgtttacaagagcctgactcactgtcaatgaggtaagagctcgtttagacaccttcgacgccacttctggagcaagatctctgatggagcatccatttagccacttatctgtccagaataaggtattagagccattttccacatgggaaatcagagatgctgcaaaaagatctttaacatgttgctgaatgggtatagtcaggccatgccaaggtctgctctgatctgttttttgaagccataaccatttggtttggagagcccaacacatgtgttgtaaattaggaatcccaagcccgccatacttcaaaggtcttgtgactgaatcccaggccacaaggcagctgcctccattaacctcttttctccctctccacacaaatcattttctgattttatcaattttgataatcacccacttagggacattcatagcaaggaaaagataaactgggatgggtgaaagtacaaagcgcacaagggctgtccttccagcaaggttgaggagcctagctttccaatttggtagcctatccgcaatcttgtcaacccaattcatcaaaatcttgtcaacccaggagttgaagcccttagcattgtttccagaaatctagttaaggagctgcggaaaggctttaactctttaataatcctagttgtctgggagctgtggaagcataggaatgtatgtgtctttaaagaagttagcccagctattcagtctgtccttctcttggtggctttcgaggggcacttgtggtgtcaggcaggagcttctcctgaagtctcttgctcctatatagtgagtgtcctgcccctggtagagtttggtcgtgtaacgttcctcccgaccgctgcagcttggacttggcatatctagttttccagaactatgttgggcccttcgtatgagatggctctggttgcaaaagacagatcccacacgcccatggtctgatctccccataaaagttcctggaaaagctagagctttctttacggaggtggtcattattgaggtgggagatggcacaaatacaaagttttggaaggataagtggctaactggtaagagaattaaagaccttgctccaagtttgtttaatgctatacccaagaggattgtcaatagcaggacagtatatgaggcaattacaaatagaaaatggatcactgatattaagggtccgctgacagtgggagtcttaacatattatctccagttatgagatatgatttcagaatggcagctgcagcctgaggttgaggatagacatgttttcagtatggctcctactggcacctattcagcaaagactgcttacgaagggttctttttggggtctgtggttttccctcatcacaagagaatttggaaaacttgggccttgccaaaatggcgtttcttcatttggctggtagctcaaaaaagagtttggacagcagataggcttgctaaaagagggctggttcatcctgataagtgccccctttgtgatcaagaggatgaaactattgatcatctccttgttacctgttcattttccagggaattctggtatttgttgctaaggaaatttgatatgcattctttggctcctcaaccggatgttggctcatatccgggctggtgggaatcggtggggaatattgttaatggactcaccaaaaaaggacttgattcccttgtcattctgagagactcgatcttgtggaaagatagaaacaaatgtgtctttgatggctgcagccctagtgttaccatgagtcttagagctgtggatgaggaaagggcaaaatgggagattgttggtgccaaggggctttcccatttggcagcaccattagctgagagttaagaagagtgatggataa

SEQ ID NO: 18709 - DNA, 116 bp, Zea Mays
cttttttttccctcgaaaattcgctttcacatggtcccaagttcaccatgttacaacttccggtttctcttctggtccggtatgctccttccgatttctcttatgggctcatatgc

SEQ ID NO: 18710 - DNA, 55 bp, Zea Mays
ggaggcgtgtctttgctgcttgcctgtttgtctttcggggacgggagcagtgtcc

SEQ ID NO: 18711 - DNA, 419 bp, Zea Mays
gaaactgttccgtcgagacattgccgttggattagatgggccggccgctactactgctcaggcccacgttcttgcaacggctgcatgcatgtgttgttcagacgtgcattgaggccactgtttgtagttgttgttgtttagcagagtaaaaccacattctagcagcgctgggtagtaatctcgtttatttactgtggctgatcatcataggtagtgctagctctccaacgggttcttctagtctccggaagagcggtttaccttgcgcaaaaaaaaaaaaaaaaatgcgaccaatgcgtgatgggtcattggatcccaacatcgccgcccctgcaggagcctggacctgtaatgagtaggcctgcatatctatctacttcttccactgcagcatcagacatatttaggcacgattcccc

SEQ ID NO: 18712 - DNA, 225 bp, Zea Mays
tgtacatacatatttgtcatactctcaaatgtattgtacgtatttagttttactaaatcggttgtttaaagtattcaaatagatagagaactatttagagaaactctatatatagaggatccagcagcgtcctctaaatttagagaaccgtttagaagatgttgcgggagggagtagaggacgtcctcgtcatctaaatttagagtacagaatcctttagagctc

SEQ ID NO: 18713 - DNA, 947 bp, Zea Mays
tactaaattttgtcatctttttctaatccaaaaatcatcgcatcgattaacatgaattctcacggtactaataatcgcatgaatctaccaaacaattccataacgcacatacacataaattgtgaatcacacgtgttcatattacaacaaacaaaatatacaactcatgaatcgaatcaaaaagtacttttataaaatacacaaaataattcggttcgtcatcaaccttgggttcgcacgtgcgacggggagagttcgacggggttcggccgggtggagaaaagcaggatctcgactacggacggcgagtgcgtggctcgagcgacgaactgcggctctggtgaactctgacgacgaacgacaactccggcgacgaacggcactagcgatgagcgaggagagctagagagagaggcgagctcgggtaggaggaagaagggagagagctctgctgtcccttttatagggagcaggagggagagaaagggtcggccaagctcttcaatggggcgcagtcggacttcatgaccaccaatggcgccgacggttacagggagtgatggaggagaggaaacggaagaaatgaagctcattaatggcgaagaagaacggtcgtcggggtcagttggtgcggggcgcgtcggtcacggccgggctcggtgtctcgcgtcgggctcctcagtcgcgggggtgggttagcctcagttggcgcgcttggcgtcgcagccggtcggtgtagggcgccatcggggctcgtgcggggctggggacactcggtcaggcgggcgctgctcggccggctccctggctgcgcgatggtgcagggcttcggcggtttcaggcgcgagcgtgagagagagaagaagggaggagagagaataggggagaggaaggagttagcagggggcggcggcggcttgggagaagccagccagggggagggcgcg

SEQ ID NO: 18714 - DNA, 520 bp, Zea Mays
cttatctccgttgcttctccctccctgttccatccgtccacagttcttgtgggaacccagggatcgatcttgactgggacgtcgccaccttattctcccgtacgtctagcttggtcccgaccaccggcaagcggcaaccaaatgcgcatactgcccctgtgaactctccaactccaagctactgctagcctagccacatggagctgaacaaggtgctgtacatgtacgctgccaccgtggcgctactgctctgctcctcggcgaacttcatacagagcccctccgacgtgctgggctccgtggcgctccaggatccgacgccctccgcggcgcacgacttcggcgccgtggtctccgatgcgcccgtcgcggtgatgcagcccgggtcccccgccgacatcgcgcggctcctgagcgcgctgtcctccgcggggccggaccgccgccccgaaggcggccgtggcggcgcgtggcgcggggcactcgctgcacgggcaggcccaggcgcgcggcggcattg

SEQ ID NO: 18715 - DNA, 1277 bp, Zea Mays
gaagttatgtcgtacatcgttagtcatcaggcacgcaccaccatacatgtttgcttaaacaaaaaggcaagtatgtgtttacaaagagaattaaaggcaggacgacacaaaagctaccccgacgatgacgagtggtcattgttgtcggtcctcctctgcgtcacctccggcgccgagatggcgccataatccttgatatagtagtcgtcgaacgcgcgcgacatggcgaataccgatgactcttggttgggctgccaaatgaagtgcaccccgggctcatcagcgaggtagtacacctggtcgttgcaccaccggatgtgctactcctctacatacatcttgttcgaggacactcacacaacagcagcaatgatcgtcattccagcgcacaagaattcatggtcggtcagtagcgacttacgtggcaggttgggcttcaggtggatgatgagctggacggcgtgatggcgccgtcgtcggttgtggtgcctagaacaacccgagagtcgtcgacattggcaacgaccatgaggtaccctgtttgacgatggacaacgcggtgtcgctctggaccgcgtccaagcggcggctgcgccggagcttgccgtacacagcggcgtatgcggccacgtaggactgcttccagaggtcgaactgacagtcgtcaagcttcttctcgtcgtcgatgagcgacgtcaacgcgagcgccttgtggtagtggtgtttgttcgggttttccaagtaagaaactgagagcacctagaggggggtgaataagtgatcctgtaaaacttgaactttaatgccacaaaacttgattaggagttagcacaataaagccaagtggctagagaagagttcttgcaagacacgataaccacaagaagatcaacacagatagacacagtggtttatcccgtggttcggccaagtccaacacttgcctactccacgttgtggcgtcccaacagacgagggttgcaatcaacccctctcaagcggtctaaagaccaacttgaataccacggtgttttgctttttactatatcccgcttgcgaggaatctccacaacttggagcctctcgcccttacaatatgatgttcacaaagaagcacagaagtaaggctgggatgagcaacgcacacaagacacaaaatcagagcacaaatacgcacacaagtcacaactcgagctcacaacacaacccaaagagttctctactctagttgctatcacaaagaatcgaatgcgcggaatgagagtcttggtgcttag

SEQ ID NO: 18716 - DNA, 50 bp, Zea Mays
agaaaagtgaggataatgtgagccgcgcagcggcgaggagaagtgacgac

SEQ ID NO: 18717 - DNA, 498 bp, Zea Mays
catgcttctgcatattggcccaggctccgactgccttggtggtgggagggaccttgcatcatcatacaccgttccgggctagcgttgtgcgcctcgtcccactcagccgaacaccacctatccaccatctgctccttgcacatgtaacatcccaaaaatctcaactcaaggtttggaaccctaatctcctaacccccccttatttctatttttctccctaaacttcacccctaggtcatatgcatacactttgattgttagagcaccccacatagattatttttttccctttacacttaaaattatttagcaaattgttgattcaaaagaaaagaaaataaaaagaaacaaaaaaatagaaaatggaaatgtgaaaaagaaaacagaaaaaaaagaaaaaggaaaaaaaccctcccccctcggtcgggccgtatccggcccaaaccgcgcccgcttccccccctctcctctctcggcccaagcggcccagctgcgcgc

SEQ ID NO: 18718 - DNA, 422 bp, Zea Mays
atgatcaactcttcgaagatcaattatgacgaccaactctctgctaatcagctccggccaaccaattctctgttgaccaacccgacgaggtagggatctaagtccagcgctactgatccacgacaactaagacgtgacgtgtcactatcaagccatgtctcgatatgtgcacaacacatcgaatggatattggggtctctacaatgaccagtacatcagaagggcgggacaacacactatactgagcgtgcatctgcacacgttggcatgtaacgaagggggcatgacgacaggagaagacacgccccgtacgaccgcatttttgagactggtccatggaacccattacgaaaatgttagcgatggactcgctacaagagccagagcaacgagaaaggacaacaccatggtgagagtacggc

SEQ ID NO: 18719 - DNA, 332 bp, Zea Mays
gccggggagagaggaggggaagcgcgagcgcgtggggtgggttgggccagaattcggcccagccgagggaggggggaagtttcctttttcttttctttttctaattctaattccttttttctcctttttctatttttgtttctttttgtttctttttctttggagaccaaaaatattttctaggtgatcttgagtgagaagtatagtctatgtgaggtgctctaattatttctagtgtatgcacatgagaaggggttctaagggtagggttaagggagaaaggtaaaataagggggggaattaggaggttagggtttcaaaccttagatggg

SEQ ID NO: 18720 - DNA, 550 bp, Zea Mays
gagacgtctgccatcggtcggccgccaggacctcacgaccgccatgcgcgcccatgctgggagcctggcgccctagcccttctacctccgtgcccctatctgccgctcgtggctcgcccgaccaccgtcattgcccttcgccggtgcctcccagtactcgggtgccggccgcgcccacaccgccacgcgtgacacacccacacgggactcgggcagcgacaccactgaggcggccaacttggagctatggaagtctgcatcattgtgaatccgcgaccgtagggcatgggggagaaccggagaaaactgtgattgctcaccgacgtcaaatccgtcgtgaggtcactggaaaccgtagaccttggactgtgccatcttagatggggggtgttggctcagtcgagtaatctagaccgtcgctctttgatcctatggcctcaattgtgtaccggatgagatcttttctagaccgtttgactgttatccaacgggtatgattgaaggataccccttcgcggccgaacatttgcatacaattccctgtcgtttt

SEQ ID NO: 18721 - DNA, 484 bp, Zea Mays
ctgacaccgaaaccatttgatacgccactcaaatgacgaggtgttcatcacgccactctcttctcgcagcctcgctacacgcagtaactttcttttttttttttttttttgacaaaactgacggtggcactaccacagtaccacggcactacagtgctgtgatgttgtgtgtctgtgcgtccgcgctgtgaaacgcgttgtcctgtcccgattgtgacgaccggggagggaaaaaaatgtggcgcgacggttggaattaggcggtgcgcggtggtattagaaatatgatcataagattacataaatagtaccctaatcggatttaggtcattttgaaggttttagagctaatagttagctgataaaattagttaaagatatataaacagtcaagctaatagtttagttgttaattatttttagcaaattaataaatagttagataactgattttaagtcaaggcgagaagctatgatgtcaaat

SEQ ID NO: 18722 - DNA, 561 bp, Zea Mays
cttgagcttcaggtaggtgtagttggggacggccatgaacttcgcgtagcacggcctccctagtacggcgtggtaggttcctcggaacccgaccacctcgaacgtcagggtctcccttcggaagttggagggcgtcccgaagcagatggggaggtcgagtcgcccgaggggctggacgcgcttcccagggatgatcccgtggaagggcgcagcgcctgctcggacggaggacagatcgacgcgcaggagcttgagggtctcggcgtagatgatgttgaggcagctgcccccatccatcaggaccttggtgagcctgacattgccgacaacggggtcgacgatgagcgggtatttccccgggctcgacacatggtcggggtggtcggcctggtcgaaggtgatgggcttgttggaccagtttaggtagactggcgccgccaccttcaccgagcagacctcccggcgctcctgcttgcgatgccgagccgaggcattcgccgcatgccctccatagatcatgaagcagtcgcggacctcggggaactctcctgcttggtgatc

SEQ ID NO: 18723 - DNA, 632 bp, Zea Mays
ctctaagttccaacagttttagggctaggtgacttaaccaaacttatactcctcatgtagctctataacttggttataatgatcatcttcaaaatgcttataaatcaaaagttacaatggtccaaagttggctagttgatattattttcagaaattccaatctaaactcaaaactgaatttttatacttagctctaaattcttccacataacttgggaatctccaaataagaaagttattcacttttccaagctctacacctttggtactttgatttttgcccaattctctctagattttgaattcctcgtttggggcaaatttagggtttcaattgtggttccttctcatctagtgatttaccaactcaatctatcctcctaaaagccaagtgactccttagtctcaaatccaactttagtacatgaaactcatgttcaaagtgtccttggtttaggagttgctttgtttatccataattctaagcaagtttttcaacctaagtcctatactcgacacacaacatcacacttttgaatcgaaaattttaacctagtaaatgcattctaggtgtaacaagcaagttaatgcaaatgcttatgatgacatgtcagagttttagttcacgtaac

SEQ ID NO: 18724 - DNA, 679 bp, Zea Mays
ttgggagctgagacaaggaaagctctgtgatggcagggattatgggagcgagccatgagattaagcgctagaaacaaaagaaggatagatgcaaaaaggcatgcatagcaggtagcagccatgcgcaaagctgtagtagctactagctataactagatcaacgaacaacctaggctgccctctgaactgaacgggcgctggtccagacagaggccaggccaggccaggacatggctctcgtctagcgtttctctgtgaatctcgtggtctcgtcgccggcgtctcatgttggatcgaatggatgagacggcaaagagaagaagagcacgcacgcagagagaaacagggagctgcagcatccatgaacagcctgttgggtctatgcttcgtcgccgaaggtcttataaagagaagtgatcctcggatgaagctgttcgtacaagatagccgaagatgcctcttcgcagagcttcggcattacaaaccgacttaaagatagaatgaccttttagtccataaaggtctgagtcaacgttgtaagttcttataaggggcatacttgtaattcctcacaggctgcgtcctgtgcctataaatagtgaacagtattccgttactgttcacgcattctgatttttgcaatcgcatttctcggaatacaacctttgtcaaggcatag

SEQ ID NO: 18725 - DNA, 1572 bp, Zea Mays
gtcggttccagtgaatgccagaccatatagatactctccactacacaaagatgagatagagagacaagtggcagaattgctcaaagcaggcttgattgttcctagtgtaagctcttttgcttctccagtattactggtacaaaagaaagatggaacatggaggttttgcatagattacagaaagctcaatgatatgacagtgaagaataggtttccaatgcctttggtggatgagattttagatgagttggcaggcacccaatatttttccagtttggatatgacagctgggtaccatcagattcgaatgggcgaagaagatgagcacaagactgcttttaaaacccatcatgggcattatcaattcagagtaatgccatttgggttgaccaatgctcctgccacttttcagtgtgctatgaatagtattttggaacccttcctcaggaagtttgtgcttgtttttattgatgatattctcatttacagcccaacattgcaagatcatgttcaacatttgaagcaagttttcactgtgttaaggcatcaccagttttatctcaaaaggaagaaatgtgtgtttgctcaggcgaaattgcagtatttgggccatattatttctaaggaaggggttgctactgatccatccaagactgaggccatggtcaggtggccagtgcctacttctgtcactgagttaagaggttttctcggtttgactgggtattacaggaagtttgtcaggcattatggtactctggcaaagcccttgacaatattacttcaaggcaagaaggcatgggtgtggacacttgaagctcagaaggcttttgaacatcttaagaaggccatgactcaaacacctgttctggctttaccaaggtttgagataccttttgtggttgagactgatgcttgtgatgaaggcataggagctgttcttatgcaggagcacaaaccattggctttcttgagtaaggccctgggtatgaagaacaagcaactatccatttatgagaaggaatttctggccttaatcatggcagttgacaggtggagaccttatttgcaaaggtcctctttcactattatgacagaccatcagtctctgtctttcttgggagaacagcagcttcagtctgaattgcaaagaaaagctatggctaagcttatgggtctccagttcaagatagtgtacaagaagggaaaagagaatgtggtggcagatgctttgtctagggtgggggcagccatgactttagcactggtttcggaggtccaaccggtttggcttcaggaaattttgaactcttatgccacagatttgcaggcccagcaacttttacagaaattggtaatacagagtcctgatgaagatggctattttcttcagcagggagtgatcagaaaggatcagcaaatttgggtaggggagaattctgccctcagaaccaaaattattgcagctttgcatgattcatcattgggtggtcattctggaatcactgctacttaccacagaattaaaaagttgttctgttggtcaggcctgaaaactgatgtggaattatt

SEQ ID NO: 18726 - DNA, 166 bp, Zea Mays
aaagggaactgtaaatagcattactcaccaagcacatcctacaaaatcagttcaagccatacagtaagacactaatttatcatgctcaactgttacctgattttcgttttcatatgactacatgaatggttagatattcttcaatatctttatagttgaggtggat

SEQ ID NO: 18727 - DNA, 374 bp, Zea Mays
caaccccccaagagttcataagcatcccgttttttttttttttttgtcgcggttgccatcccatcccaaacccacgccgcccatcagcccgaaaagtagatccagcaggcggcgggtcgacatgctggcaaggcaaagtcacgtgtgtgcacgctactcctagctaggtgtaccatccacccaccgatgtggccgcaggctcagtctaccactaccactgctagtagctccaacctgctgccgcgcgcgctcttcatgcgcgtcgtgtcgcgcgcatggaccatgctaatggctaatgcatcatcatccgccgcaagcaggcaaggcacgcaggcagcgtcgcagaggcgcccagacggacaggcgcacagcgc

SEQ ID NO: 18728 - DNA, 394 bp, Zea Mays
atcagaccctcggggcactgcagaggaataaggcattgttctcgaagaagagatgcatcgtctcatctactgcttggtctccaagcagggaagcaatccgcacacaggttattggtagcaacaaacgaaaacgatggcaccccaggcatacacatacacgtgagggacgacagattctctgaagcaaaaaaaaaaaaaaagcaacgaacaaccggttaaaaagaccatataattcgcaccacagcaaggactgatgtgcgttagcgtttcacagccgtcggcagaaactgcaaggccatgaatgatgacacacacactggttttggcccactgcgtaatcaggggtaggttcaggataagataaccaatgggggtcctggtggagaggtttgtt

SEQ ID NO: 18729 - DNA, 751 bp, Zea Mays
ctcggcaatcacgatgcgaggagcaggagaacggttggggcgagctcgacagggaacagcagagccagcgacgccagagagctcggcacggtggaacacgcgaccaaggtgttccctatcacgctccatgacacaacgctgctgagcgcgttacagaggcgaacgacaacgatgatggagtagcagctagcggtttgactctaaggcgatgtcatgcccatgcttgaggaaggtttgtgtcctggccacggcaagcacgaccaacgcagcggaggagaaacgagtcgttggcgatgatagcgcctaccgacagcagtgcgcgaggccggcgaacagaagcaagatccgagttggaaccgagatcaccggcgagctcacgcacgcatgggagggagataggtgtgagcaggaaggtcaacggcggccatgggcgacggcgagctgcagaccggcccaacagcgagaacaacagagagggcgagctggagtagagggcagagccgagcttgaatagggaccaggcgcggccatgaagatgagctgggcacgagcgagcagagacggggcgtcggccagcaggaaataaggagcggcgccatggggacaagcttgagggagcaggaggccggggcgagcaggacgcacggctggagagggcgagctgctcggccaacccggaggagcagggactgaccgatggccaaagtttgaagaagacaacacaaactgctcccaggcatacagtaaagaa

SEQ ID NO: 18730 - DNA, 196 bp, Zea Mays
ctctctctatgttatatcccgatgcttgctgtgccaaaaaattagctctaccattcttgtctctagatatatgcacaatagtgaaagtatccatttttttaacaatatctagacatctgtctaaataattacgcagcataccatctaaacactgaaattcccctctcacctgttgtaccacaagcaatgaatcccc

SEQ ID NO: 18731 - DNA, 359 bp, Zea Mays
cttgggaggtgacagatgagatgaaaatcatgttgcccaacagtgctgtggcctgtgggtgtggtccttgctgggacgtgtcgatgtcgtgcgtgcaggtgcagtgcaacaacatctgtggacgcaccgctctcgctctgccggcggcagagcctctctgcgcatgccagttcttctccccttcagccttcggctcccgcccccgccagtggaggggtgtcccacgctgctgccgcctgccgctgatgaggccgcgtcggcttaaacctgctaatgacaaaaaaaaaaaaaaaaccaccccacgtctagctcatacccaaatctaataactttgacatctatcccataaccacacaaaa

SEQ ID NO: 18732 - DNA, 2133 bp, Zea Mays
caataacactctatcccccacttgaaattctctatccaatcgatgtttatcagcttggatcttcatgcggttctgagcagcagccagtttagccttcaacatctccgagtaagccagtcgctcctgacacaattcctccacagattgaacacctcccactgctatcgttggagcagcagcgaaaatggagtcatacccatataaagctttaaaaggtgaacatcctatagcagtgtgataagaagagttgtaccagaactcagctaatggcaaccattgtcgccatttgtttggattgtcatagatagcacaacgcaaatacatctccacgcattgattaacacgttctgactggccatccgactgggggtggtatgcagtagtcaaagccagcttgatgttcaaagactgaaagagggccttccagaaggtactagtgaagattttatctctatcagacactaaagattttggagttccatgcaacttcactatattgtccaaaaaactttagccacagtagcagccgaaaaaggatgttttaagggaaaaaaatgagcatacttcgtatacctatccaccaccaccagaattgtatcacatccttctgatttaggaagtccttcaataaagtccatagtcaaatcttgccaagccccttgaggaataggcaaaggttgcaataatccaggaggatgtgtccgttcccctttggcatgttgacagacatcacattgtttcacatactccagcacatcagcttttaaccccttccaccaaaaaagacgcttaaggcgatgataggtagcttgtccccctgagtgcccccccactgcactgtcatggagggctgcaataagtttcgtttttaatgcagagttgtgagcaatccaaatcaatccatcttttctaataaccccctgctgcagagaaaaacccttttcattaggactatgcacagccaactgagccaacagatcttgggcctcagcatcagtagtataagaatttagcacatcttgaatccatagtggctggacttgcagcacagtttggagaaccataagatgacccactctagacaaggcatcggctgccacgttctccttccctttcttatacaccactcggaattgcaaccccatcaatttagccatagctttcttttgccattcagagtgcaaattctgctcttctaagaagcacaatgctttgtggtcagtccgtacagtaaattcagtatactgcaaatactgacgccactttgatactgccagcaataaagccaaaaactccttttcatagattgacaacgattggttcttagtgctcaaagccttactcaaatatgccactggcttgtggttctgcatgagcacagcaccaattcccacagcacaagcatctgtctccacctcaaaaggctcagaaaaatgtggaagggccaataccggtgtagtgatcgttgcctgtttgagagtacagaaagcctcttcagcctctggagtccacacaaacaatttctgttgcaacagcctggtgagaggtttagctatgattccatagttcttcacaaatcttctgtaatagccagtgagtcccaaaaaacctctcaattcagaaattgatgtaggagtaggccacttcttcattgcttcagtcttggatgggtctgcagcaactccttgttgagaaatgatatgccccaaataagataattcagttttgccaaaaacgcacttggatctcttaaggaaaaactgatgtttccttagtacagagaacaccaatctcagatgctgcaaatgttcagcccaactagcactatacaccaaaatgtcatctaggaataccattgtaaatttcctgagaaaaggagcaagaatcgagttcatagcacactggaaagtagctggtgcattggtaagtccaaagggcataacccgaaattgatagtgaccttgatgagtcttgaatgcagttttgtattcctcagattcttgcatccgaatctgatggtaccccgctgtgagatccaaactagtgaagtattgtgttccagccaattcttccaaaatttcctccactaaaggcatgggaaatctgttcttaatggtaagatcattaagcttc

SEQ ID NO: 18733 - DNA, 1954 bp, Zea Mays
cattaacttgactgccagaatcagcagtggattccactagcaccatggcccaaatatcatgtccagccagccatttctgcacttggagtgctgatacctcctgaatggttgaacccgagtgaacatcatccccatataaggtcacctcctgtccagcatctcgaaactgtagcaccttgtgtacccaatcacattccatagggctatgctgcatcaaccaatcataacccaagatagcatcaaaagcttctaaaggaagtactctcatgtcagtatggtagaaatgcccatgagaccaccattcaacatttctaaccatagagttgcaaatcattttgtgtccactggccaccttcacttgtacaggtgggcactcttccacctgcaactttaattgtttagacatgtgttcactgatgaaagtggaggaactgcctgaatccactagcattagcatcacttgttttcccacaatagatctcactctcatactgtaaatactgtcagaacctgatatggcctgaaaggacagatggcagcacacctctctttgttcatcttcttgttccaacttctgtaaaacttcatcagtcaacacctctggttcctcctcatccaccacaacatttaactgaactggccctcttttggcacatttgagaatgtggccaggctcaaatttctctccacatgcataacacagtccatttactctgcggtattccctgagttgcctctcccgaaataaatctccaccagtctgctggcccttaccttctcctctattgttaattggatactgtttagcaacatttccctgcctaactcctttaggtctgcttttatctagcacctcctgttgcatttgagccagctctacagccttgtccacagtatcaggttgatgcatctgaaccacaccttgaatttccaacttcaatccatatataaattgtgtaacaaaaaacatctcatctagcaatgggttaagcatggaggccatataccgcgcctgatcaaactccccgacatagttctctagagtatccacttgtttgagactccttatcttcctgagtgctttggcataagcactcgcgccaaacttactctccaccgctcgcgcaaactcttgccaattcctcatacctggacgcagtttctgaacttgccaccatcgagcagcattctgctccatgtgaatagaagcagcagatacccaaagtggttgtggaacttggtacatatgaaaatactccaaacacttatctacccaaaccaccggatcctctccagcaaatttgggaaacgacatcttgggtaatacctgatttgcagcctgcatgttcatcctctcatcatgttgtcttcctatcatcggaccttgatgattcctccgctgtccctcccgctcttgctgctctccctgaacaaagttgttcagcggagggtgtcttcctccattccggtttcccagaccctccggagtgccttccagattccttcccatctgttccaagcgcatctgagcgatctcccttctagtctcttccatcctcaaatacaactcgtttctctcctctgccgcacgctctgtaactcctgctgccagatcaacttgagtcatgagttggagttgtaccttctgcacgtccttcacttgccccgtcaacacctccaatgactccagtacttgactccatcgttcctgtgtagcacgatccgattccgccatcgcttcaagcacgaagcgtgtctgaacagatggcttcgctttgggagtcgtggtgcccaccgccagagatcgacggctttgataccaattgtgatacccgtggccgtgcggtgcgtcgccgccgacgtgagcgatcacggtgatcaccggagagaaccggaggacgcaaggtaggtggctggtattgttctgtttcttatttctttcgtaaaacccaag

SEQ ID NO: 18734 - DNA, 50 bp, Zea Mays
ctaaaacactcggtgtaccaagccgtcccttgcccacacccattgggggg

SEQ ID NO: 18735 - DNA, 444 bp, Zea Mays
cagaagtggtcagatcgactcaaggaagaagggacagcactgctggagatccagggcgcggcgcggggccgcaccaaccacaccagtgccgcttcttctccgggaagtgtctgcgcctgcgggcgggatgactggagaggagcatatcacctccgccgctgcaggctgcagcgacagaaatcgaggccgccctagcttctccgtcagagcagaggacacaaggtcagatgtcccgagggccgagaatcgacaggtatagccgtatagtgaagagtttgaggatccagtaagtatccatgtaaatttcgtttttttttctttctttttggtttggagcttctgtcccaacacccgtgactgggtttctgaagatcgcaaactaaacacaagttcagttcactcgtcgtacgtcctgaggacgactatgctgaccctgcaagcgtg

SEQ ID NO: 18736 - DNA, 236 bp, Zea Mays
tttcggaaccatcggaatcgaaagttcggtacagaaaatacatcggtaccggttggaaccttaaatacaatcggtaaccatatgtcaatataacaagttcagaatacaacaaagtttacaaatatcacaaagaccacaagttcacaattcacaatataaaaagttgatcacaaagaccacaagttcacaatataatagttttatcacaaatatcacaagttcacaatattacaaat

SEQ ID NO: 18737 - DNA, 305 bp, Zea Mays
cgcggtgcacacaaagcgaactattctttcgccttttactaaagaataccgtgtgtgcgccgcaaatagcagcatacgctaatttttggagggatcctctattttagggggccccacagttcaaatcaaagtttgttatataaaaaattgaattattttgcatttcttttttaaaagcctatacagtttaaatcgattttgtttacaggatttgtaaaatttaacttaatcaatacgctaatttttggagggatcctcttttagagggccccacagttcaaatcaaagtttgttatataaaaaat

SEQ ID NO: 18738 - DNA, 232 bp, Zea Mays
ctcctcctcgtcgtcttcttttgcactgcgcgtgctctcgctcttcttcgtcgttcacctacctagctacctccgcacgaaacaaacaaaatggtgagtgctgccgcgccgcctgctgcttctcttcacattgtacgtacgtacgtacgctgttccttccttccctcagcagctagctctctagcgagttcgagcaacgatccactgtctatctataaacctacgacctagc

SEQ ID NO: 18739 - DNA, 228 bp, Zea Mays
cttgaacaggatctgttctataggattgtaccgttgcatccttgacaaataaaggaggcaagcactaaaacctggttgatgagacatgacctgtgggccagagcgtgaataacggccaggatcgggctcagatgcttgtgtccggtgctgtagaggatcgttcctcgctagggtgtctaccctggctgggggtggctcatgggttgtctgacaggttctctttttttt

SEQ ID NO: 18740 - DNA, 677 bp, Zea Mays
cgaaatcatgagcgacacactaaagatctcagtgtttttattacagactacaataagctacaaaccaaggaaacgaaacattgattcagctagttacaaggtgtgttcgtagtagatcaatgtacagttaactgttcgtgtcgcccccgcgtggggcaactcagacgcccccagcaaccctagccgtcgccgcatcacctagggtcttctccttctgcgccgatgcctgagtgggtcaaataaaaagtccgcgcgactcgcggggagggcggcggcaggatctccccgactcccaccggtggatctggggcgggcgcgaccgccaaggtcgccatgggacggctcgccggcatggcgatgctccacggcacgggggctcgggacgtacgtttggcgaggcttggggtcctcacctggaccaagcctgtgccagcactggcgctagcccatcggtgggcagatttgagcgggggacagcacacaacggcatgggcgactcggcggggctccgacgaccccttggcgtggtggagctggccaacgcgcgggctgtggcgaggaagaccactaggtggtgtctacggaggagctctggcggtgcggtcgcagcgctgttgctgtctgctggtgctacacagtggtccgacggtgatggcgggctacccggctgtggcgtg

SEQ ID NO: 18741 - DNA, 537 bp, Zea Mays
agacaatccaaaataatattgatatccatggctgccggccgaagaaagatcaccacatcatccgcatagagagagacccggtgttgcagtgctcgaggagcaaggggctgcagcagtccatcctgtgcggccttattaatcaagaagcccaaagtatccatgaccaagatgaacaaaaaaggagacagaggatccccctgtcggagaccacgacgatgaagaataggttgtccaggtaaaccattaacacctgggatgaggaagtccatagcaatccactaataatatctctccagacttggccccagctaattcccaaagtcttctgtagcatcccaatttctaacccaggtttgaaaccctaatctaacccccccttcttattatctatcccaaaactcccttaggttctttccaacatatgcatacaccttgtttgaatatgagcacctcacttagaagttatttttcagcacctagattatctattaaattaattgttcaaaagaaaagggtataaaaagatttggatatagg

SEQ ID NO: 18742 - DNA, 537 bp, Zea Mays
cacctatgtgtctttagttgtgcctgatatcccaatacctctgccactgctcctcacaagctctcccccgctccactgcatgtcttttcctcggttactccttgacccctcaccacaagggatattgttgccttgactccacccatcgcaacattatctcccatcatgtcgtctttgacactcgtcgattttgatcccccactctccacccaggttcgaccctgcccatgccccatgtggacccgtcgaccctgctcatgccctgcgcggccctgcggcctcgcccacgccacgtgatgccccgtcgaccccgatcacgtgtgaccccaccgactccacccgctctgactccacttgtgccatgcgcggctccatcgacctcgccaacgccatgcacggccccatcgcctgcatcccacatgcacatcccgcgggagccccacctcaccgctctcaagtggattatccgcaacctccgcgtctccatcaactacgaccttctactttgatctttcccgactttagagcttgtggtct

SEQ ID NO: 18743 - DNA, 5811 bp, Zea Mays
gtccaattggttaaacctatgttttctggtcgagcgaccagctagtggacctagtggtccgaccaggtgactaattgtgattagccgaggactaggtcgactaatcgacctctggtcgaccctgttcatccactagttatcatgaccatctaagacatatatatatactagtatatatggtatatataaagggtaaacatgacatgaattctacagtactaatttaagagaagatatgtgttcctccaactgaaaacaacagctccccaatgaccctaaagtaatgcaagtgttcaaaacaacaaagaaatacttactaccactctagcagtgacctaagaaagatcttcatccaactgaaattcatcaacatcagctcgccttccacctgattcatggcagtgtagacctcttgagcttggtggccttggtatttcaagtctcagaattgggatggacattgagattgagatggctatggctgggtaaaactcaacctgataaaccatggtccccactgcctatgcaattttcaaaaaagatgatggccttcttctccactgccatgctcactaagattaggaatggatcttcaacattattttggcaagatcgttggattcatggaaagaaaattgaagaccttgctcctagattgatggcagttgtaccatagaagattaagaacaacagaactattcataaggcttcaattgatagaaaatggttgacaaatattaaaggggccttgactgttggagtgttggttgatttccttgatctctgggatgcacttcaaacagtccagcaacaaccagtcatagaggacaagcatatattcaggtttgctactaatggaaaatactcagccaaagcagcctatgatggtctctacattgggttgacccgatctgatcattgggaaagaatctggagaaccggggtcacctcctaaatgtaaattctttctatggttagctgatttaaggaggtgttggacaacagatcgactggagaaacatggtcaaagccatcctgataaatgtcccctgtgtgaccaagagcctaaaaatatagaccatatattggtgggttgtgtctttgctaggaattttttgtttcagctgcttagacaagtcaatttgcaaggttttataccccaacagggagaagagagtgctatgccatgttggagaagaactagtcggcagctacaagggattgccatgaagggatttaattctttaatcacccttgggttttggaacctctggaatcatagaaatggttgtgtttttgacagaattacacctaacctggaggcagctaccagaagtgctgaagaagaaagagagttatgggagactgctggagccaagcatctggatcttcttacagcccccattcctggaatctagtggggggtctagcagtagaagttcgttataactgctatagatatttttgtgtattttcatttctggccgccttgaacggccttttgttctgtactggtcctgttggaaccttttctattcttcttaatataatgacgcgctgctctcctgcgtattcagaaaaaaaatcatggtgaattttttgtatgtaaagcactataggggtttccattaataaatgtatagtgtacaggataagattaaagaactatgttttacaggtgtctgagccagaggctagtgtgcattgctatgtctttcttcattttatggcaaaccagttgcacttctcgaacgaatatttctttgcagtttgatgtcgtgggggtgttctcgaagatccacccattcctgcatttcgagatgtaccacatcattacaattagaatttccagacttccggatcagtttatttgcacttagatcgatcgtggtgaaaatttgatgcgcgccggacattggtcggacagtttcgcctgattggtcgactaatcactagttcaccactagtcgtctagtcgaacgaccagggccaccaccaggtgtgccccggtgacaccagccacaccagaaggacaacgctacttcttgctgctcgtcgacgacctctcccactacatgtgggtgatggtcctcggcagcaagggagaggctgtgaatgccaccaggcgtgtgcaggtcactgcagaggcgaagtgcggccgcaagctacgagtgttgcgcaccgacaacagcggcgaattcacggcggttgagttcgcattgtactgcgcggatgagggtgatcagcgcactactccacgccgtacagcccgcacaaaacaacgtcgtcgagtgacgtaaccagacggttgtggggatggctcaggctctcctcaagcagagaaaaaggttgactgtcttataggaagaggcggtggtgacaacggtctacattctcaccaaggcactcaaaaggatgacaccctacgtggcctggcatgggcgcaagccagatttctcacctatgggtcttcggctgcctcgcgttcaccaaggagcttggccacatcggcaagctcgacgacaggagcacctcaagtgtgttcattggctacacggagggctcgaaggcctatcgcatccttgacccaggaacacagcatctgcgccccacgcgatgtagtgttcgatgaaggtcgaggatgggcatgggacaaggcggtggacgatagcacgactctgacgtacgacgactttgtagaagattagaatttgaggcaattggccacacctcaattggagtggggtgccttctattatatagggtcgattggccttgctttaatttccttgatttacatctgctaactatagcaactaatccctgatttacatctgctgattatggcaactaatccctgatttacatctgctaactatagcaactaatctgctgattatggctatgataagtcgcaacatatggaaaggagttgtagcatattctatttcctaacacccgaccgcagtcgaagcgggaggctcccggacgcaaaggctggatcgaaattcttgaaagagtgctgtcggaagccctttagtcatgatgtcgacgaactggtgagaggagggcacatggagaacccaaatctcaccaagggccaccttttcgcagacaaagtgaatgttgatctcaatgtgcttcgttcgcttgtggtggacggggttggctgtcatgtagactgcactgactttgtcgcagaagacaacagtggcggagggtagctggatgtggagctcatggagtaattgtcgaagccagcagcactcggccacaacatgagccatggcccgatattctgccttagcgttggagcgggacatcgtggtctggcgcttggaggaccaagaaaccagattgtcaccgagatagacgcagaagccggaggtggaccgtcgagagtctggacagcctgcccagtcagcgtcagagtaggcagtcagtgtgtcgacagatctagtgccaatgtgaagacctaaggagagagtcccctagacgaagcgtaggatgcgcttgataagcgcacggtgaggctcgcgcggggtgtgcatgaagaggcacacctgctgaacagcataggccagattaggacgagtcagcgtcaagtactgaagagcccccgccaggctcctgtactcagatgcgtccttctctgacagaagaaccccgtcggtcacggatagcttggcgtgagtgtcaactggtgtcagtgtcggatgacactcagccatgcccgcgcgctgaagaagctcgacagcgtactgttgctaggagaggaagaggccatctgaggagcgtgtgacaatgatgccaagaaagtggtggagggcgccaagatccatcatgcgctgaaggagggccgaggatgaggcggtgagaacgatgtcgtcgacgtacaacagtaggtaggcgaggctcgtcccctcttggaaaatgaaaagggatgtgtcggaggtggaagtgatgaagtcgagctgtcggatgaaggtgccgaagcgctggtaccaggcccgcagagcttgattcagtccatacaaggacttctgcagatggcagacgtggtctgggacaccagagtcgacgaatcctggcggctgctgacagtagacggtctcctcgaggtggccgtgaagaaaggcattcttcacgtcaagctggtgaatcagctaggtgcgggacgcggcgatgctgagtacagaccgtatggtggccggtttgacgaccgggctgaaggtatcgtcgtagtcgacaccctcgcgctgggagaagcctcggacaacccagcgagccttgtggcgagcgagggacccatcggcatggaacttgtgccggaagatccacttccccgtcacgatgttggcgccagggggcgcagaacgagctgccaggtattgttgtcggcgagggcctggtactcatccatcatcgcggtatgctagttggcgtcggccagcgcgctgcggtagttcgtcggaatcggcgatggtgaggatgatgtagtggccgccagcccttcatagcgaacgcgagggatggcacccgtcatggtgcgggtggtacgtggcggcagtggtggtggtggcggagcaggcgatgccgccggtgtcggtgagggcgtcgtcggtggtgtcggggcgtcagaaggggctgccggggcagccgccgctctgaacggctcggggcgggggccgcagacgtagaccagtggtaaatggaccacgctgggtccaggcgggggcacgtgatcatgcccgcttggtgtcgaaggaggcgatccatgtgatgtcgcaacgtcggggggtggctggtcatcacccgagtgggatggagtgaccatgggtggcgaggaggaagtcccacctgcaacaacagtagagcaaggcaccaaaaccatattgtcatcgagaagaaagtcatgggaggcgtgggaggaggcatctgaggtgactgcaaaggggaaagaggtctcgtcgaatatgacatggcgacaaatgatgatgcgacgtgtcgataggtcgaggtagcggtaacctttgtgcgagggggatatccgaggaagacgcatgccgtggagcgaggggcgagcttatgtttggaggttgcttgcatgttggggtaacagaggcacccaaaaacatgcagatggttataggttgacggatgattatgcagacgagtgtatggaatgtcatgctgaatggaggaaaatgggcgcctattatggaggtagcaggccgttaggagtccctcggcccaatatgcgggggtagggaggcatggagaagcatggtgcgaatggaattgttgagtgtgcggatgaagcgttcggctttgccattctggggtgatgtgtagggacaggaggagcggaggtgagtgccttgagcaacgaagaatttggtggtggcaatgttgatgaattcagccccgttgtcagcctgaaaacattttatgggagagctgaattgtgttttggcgagcgcagcaagatcaactaagtgttggtggacctctgcttttttaagcggaaaaacccagcagtagtggctataatcatccaaacataccaagtaatatgaaaaaccagacagactgttgatgggtgaagtccaaacatcgcagtggaccagtttgaaaagggcatgagttatggactaggaagcgctgaaaggtagatgtgtatgcttgcctatctgacacgagtgacatagggagcggtctactttattacaggaaacaacatgcagtttattaaggcgttctagagtggcgggtgcagggtgaccgagacgttgatgccacagagaggag

SEQ ID NO: 18744 - DNA, 2032 bp, Zea Mays
gtcgtctacacgcaggcgtgcacgcacaggcgcggctccctggggtgctggtgcacgtggtcctcccgggctctgacgccggcctccctcgcaaccctgcgacgcttccaagcgcctggaggtcgcccgctgcccgaaggctgccagctgcccgctcggccgccggtcgctcctgccgacgctccagccgctcggagcctcggactcggcacgctccgtcgctccgcgctccagccgcccggtccggcgctccgctgttctgcttgccgcttggtcccgtcgaggcgacgacccgcgcggacgcacggctgccgcctgtcgctgtttcctgcttggccgcacgtcttggcatctcgtctgctcgtctagttgtctcactgtgacttgtgtgcagctcatccctctgccgcaccattcgccattcccttctccactctctcatggcttcaccccctttcgacgggctcaccgtgcgtgtcctccacgatggtcagtttgtccagggcacctttgtggccttcgatcacgccatgagccctgtcctccgtgactgtgttgaaatccatcccacgaccggtcgtcacgtgtccgggccccttgtcttccctcgtacaatgattgcctccctggcaatcgagccccctttgtccccctcccctcctagcaaccacgccagcgctcctcctctagctctttccgcgcaccctgcagccttccctctgtctccctctcccgtcgattggatggttgactccggggcctcctaccacactacccccacacctagttcgttattccactcccatccaccgcacccctcacatccttcctccatcgtcgtcagcaacggttccaccctcccggtcacctcagtaggtgcatcggttcttccaggaccattctgccttaacgacgtccttgttgctcccggactgactcatcccctcctctcggttcgtcgcttcactagtgacaaccagtgctctatggagttcgacccctggggtctcaccatacgccaccttcccacacatgctgtgctcgctcgctgtgacagctctggccccctctattctcttcacttgccctccactccccacaccagagtagcctcatctcctgctcttgctactaccaccacctcctccgccatttggcaccgttgtctcgggcaccctggacctgacgtcatgtcccagctttccagccactcagacatatcctatactcggggctcttcggagcgtctctgtcatgcttgtcagctcggccgtcactgccgtcttcctttttccacttccacgtctagggctgttcaggcctttgatcttgtccactgtgatctctggacgtctcctgtccttagcctctccgggtacaaatactacctggtcattctggacgactactcccattttctttggactttcccccttcgactgaagtctgacacgtttaccaccctcactcacttcttcgcctgggtatccacccagttcgagcgcccggtccgtgccctgcaatgcgacaacggccgcgagttcgacaaccacgcctctcggtcattcttcctcactcacggcgtccagttgcgcctctcgtgtccctacacctctgctcagaacggtcaggccgagcgcatgattcgaaccaccaccaacatgatccgatgccttctctttcaggcgtctcttcctgccacctactgggcagaggcccttcataccgccacgcatctcctcaaccgtcttccctcgaaggcggtgagccaccctacacctcacttcgccctttacggcacagccccttcctacgaccacctgcgcgtgttcggctgtgcctgctaccccaacatttccgctaccgcccctaacaagctttctcctcgctccactcgctgcctcttcctcggctactcccctgaccacaaggggtatcggtgcctggacctcacctcccaccgcatcatcatctctcgtcacgtcgtcttcgacgaagatgtgtttccccttgcaggctccaccccacccac

SEQ ID NO: 18745 - DNA, 234 bp, Zea Mays
ggccgaaatatggttttcgcgatggatttagaaccaacattgatttagagagttccaacgaggttcataaatataggaagaaattgggttttgtagtgagtttgtaaatttaaatacatgctttacataaacgttggtgaagagtttttctcgaaaacttcttaaattcgtatttagagagttgtttacataactattggagatgatttagagactaaaagtgagtcacttaag

SEQ ID NO: 18746 - DNA, 462 bp, Zea Mays
ggagttctatacaaaataattaaataattacatcatatgaggaaacgatccagcaacccaaagttgactgggagacgacggcctagaccactcacgaactcatcacagcatcctccacgcgcctcatcctttggtacctgctcttgacctgtggggggtgtgagacagcaagagtgagctcacatacgttcatcgctcaacaagttgtggggaataatgtgaatgaactcgccaaaggtgggagttcatgtgaagtgtaaggcttgccaaagaggatggttagagctgtgcattgcttttaaagttggtcaaaattttattagcagttactaagtataagtaaataccaacccaattaaatagtagaacagaagtaacaacatcacctgcgatgcaatgcatatgacaaattgaatttgagttccataaattaatcatgtgagggtccgagctgctcatgac

SEQ ID NO: 18747 - DNA, 320 bp, Zea Mays
aagtcagtcaaaagccggcgtttccttggacggacggaccaacacgaaatgtcttcttcattccttcgtccagtgagaagctctgcaccagctgcacgccttcttccttctgcaggctccaactgccgatcgagacttgttcctggtcctctcctgactgacgacgtgatgaggacgaaggcacagcttggagtttcagacgatttcacctcctcgtcaggcaggcttacctgcaggctcttcccggtgcaaattctcgagattctcatgcctgctggtatatgcatcccaaaggaagctagagtagtgttgcttcgctg

SEQ ID NO: 18748 - DNA, 486 bp, Zea Mays
tattaataaaagagtatgcatagaaaatattttctatcaaaataggtgaatatgaacttttgaatatacttttaatttgactacaaacaatgtgtgtatatgttgcatattggagacattctcgaataaataaagtatttaatataaaaatataattgcatttcatgctgaatttttgtatgtgcacttgaactcaaatcctaaatttgaatcttgtgtgaaattataaattttaaatagaattcaaaagaaaaaaaaatagaaaaaaaactgaaaagaaaagaagaaaaagagcagacttgcggctgggcctcaaccctaaattcagcccatcacctctttctcactcgcgcgcgcggcccatccctctacgcgctcgcgcctactgactagtcgggcccatgctccagccataccatccgcgctcccgcacgttcgctgacacaagcagggcccgatggtcagtctcccctccttttggttttt

SEQ ID NO: 18749 - DNA, 285 bp, Zea Mays
taatcatatcaatagaaatacaaaggtgtcccaaattgggattcaaagacctcatttacaatttaaaaaaatggaaataacataaaagaacaaggaaaagaaagggatcaccttgtaaagaaaactatataaaaataaatataacttttcaaattggtactcttaagttacaacttttgtctgagtacaaattcacaacaaaaaaatttgaattcaaatagagatttaaaagataaaagaaaaggaaaataaaaaaaaagaaaaaaaaagataaagcctacctgg

SEQ ID NO: 18750 - DNA, 658 bp, Zea Mays
attcactcgtcggttgagggtcccccgggtccaaaacaccgacagttggcgcgccaggtaggggctcgctgcgtgttaacatcattttcccgttaaggttccagatggacagtcttcaacaaccatggcagttcggcacggtgatccggttcgggagtctcgagttcatggcccctggcatcggctatgacatggtactcctctcaccccagcatcacatcgacgccgactaccgtcttgcccagccggggggagcacgaccacgtctaccccctagcttgaggagggacatccagagcaccgtcgccacccttctcgccggaggaggaggaggaacaaccgcaaccacgccacagatagcacttccctggctgtcatccctaggcaagctaacgacgcaggctcccttgcaagggacctgtcagccgtttgcctcgtcccaggaatgacgacaggtgacgcttcccgcccagttggcgcttctgtgcgggttgacaatgctggctcccttgcggggaacctatcggtcgttagccctgcatgggaaacaactacggtgacgcgtgtcgcttccccgacaactcctccgactcctccacccgcggaccaggaagtgggaatggtgttccaccagatccctttcaggttcagcttcgac

SEQ ID NO: 18751 - DNA, 179 bp, Zea Mays
gcgaactattctttcgccttttactaaagaataccgtgtgtgcgccgcaaatagcagcatacgcctatttttgaagggtttctctctgcgaggaccccacaattcaaagataattgtttaaatttaattaatgttttaatttgtaattggtgataaatttaagaaaattgtaattaaac

SEQ ID NO: 18752 - DNA, 290 bp, Zea Mays
ccgcgctcgacgaggtgtggtggcagcgtgaacgctagattggagctcggcctcggtgtcttcgtctgctcggcgacggcgacacgtacgatattgctcgggccctggtcggcgagagtgcaagccagacagccagtactcaagtaggcaggggcgactgtcgaccggcgaccggccgaggttccgtgaccgtcggcggcagctagtgaagtcaacctccgccacggttggaagaaacgaggtgcagcggccaacgggtctgtaggcgacgactggtaaagtggcttagg

SEQ ID NO: 18753 - DNA, 1118 bp, Zea Mays
cttacctcatttagtgagaaatcgaattcaagaacacattttttatttggttttcctcgattcctatgcaaacatgttttttctccactaccataatcgggctcagcaaaacctgtaaaacactcggcgaaatactcggcaaagagagctcgacgaactgtacatcaacaacggcttctttgtcgagtactactcgacagagaaaaggtcgccgtcacagcgactgttaatagagacggcaccttggccgagtgttctaggtgacgctcgctaaacagattaacctttgtcgagtgtattaggtgacactgggcaaatagttttcatctttgccgagtgtccgtcagcctagcactcgacaacgaggccgccgacgaacccctttgtcagtttttttgccgagtgtccgccagcctagcactcggcgctagcccatgagagacaaattaactcacttggacaggtaaggttaaccttatcaaactatgtccggtgcacatctaaatgtgccctagttttcttttttagatgcttctataatcatctcttccaagacatatgacaaaacctccatatcccatttttgtgtttgtcatgttgtcttatttatgttgtgtattcttatatagagaatactatattcttgcgtactaatagaatttgtagacatttgcaaatgtacgagttatagggtatttagtttgaggagtcatttcattctaaacgagatggtgtatcattagccaatttcttaaatttaatgaaataactcatttttctttctagtgtcattagactcgaagagattctcctttagcccaatgcagactatcaaaggttgggcctttggcaccacaaaggacccaaataggttctcgtctagccattgagttgtgatagccctatgaccaagaggaggcttctgccttgcggagtctccaagtgatgcgtggtgcagcccccaagggagtgatgcccttagagaaggagcgcatgatatatcgagtcattcctgcaattttctcaaggaaaatgataaaactctccatgtcatgggtctcatgaatattgtacttaacaatacccttttgactcttctcctgaaacctttttgggac

SEQ ID NO: 18754 - DNA, 56 bp, Zea Mays
tggattgtgcattttatattattattacaattaaaggacaagatgggaaaaaatga

SEQ ID NO: 18755 - DNA, 1594 bp, Zea Mays
caaatgtgtagcttcacgaactcactgcaaacttctttatttaagcacattattattttgatccaactaagatcaaatttcgattgctttaactagctgcgaccagaaccattataatagtgtctaggctcctcatagtgctaagttcgtaaattgcaatgttctacggcaattttgtactaaccaactctacacaccggaacaaaacatgtctacggtggtggaacttattactcaatacaaaacaacatgaagcacgagtcgtcctcttccaccatttgattaggttgtacccacttagcattaggcttagtgctcgatacaacaacttagtaatattgccattttagagacgaatatatggaagcattaacaagtaactggatatctttttctaaagttagaaaccaataagcttcgcatttactactctacacaacatatacagtctgaagaaacaaacgctacatataggaaaaagagaataataaactccataaagattaaacacaatcataagaagcgctgcatattttggttatgttgatctccgatagcctttaagaccaatattttattgccatatgaaatttgtacatatggttgatccactcttagtacgctgctgcataaactcactttaaactttcgttgaaagtaccattttttgtggccgttaagaccaatatttgtttacttcaatacatgcatgtatgcacaccctctgcaagcagaaccattataatattgttgcttctagggtgcttatgttgttatatttatagactgaactgttttgatactatatactattgttgcttctatacatctaaagctacactttttaaatggtgtaaagaaatcaaccaaagactcgcgcagggcgcgagcaaattactaatgagataaaacaacggttgaatcaaatatccagcaacaaaccaatgctgttcattgaaaagctgatagccatagtgtgaattcaaaatctttagcctatcagataaaagatctatcaacgtactctcgtcgatcgaagccgcccgtaccagtcttttgaggaggaaattcctggtcacggaaacgagagcatttctgcacacaacgatgatagtacgccgtctagttgttgcggccctttttatttattgtacctatgggagtattatagcagctctagtctcagtcattagtcaaaaagggccagtgtcaggtgatcactactacagcttgtacgcacagtattggtaatctagagagattgctaagcttctaggaggctgccaaaggatagaatcctgaatggtagtaaaagaaaaaggaaacaacagaagccgtaataaaacgtggtgaagaagaagatgagaacgagacagggcgcagtcaagcgatgcgatgccatgcgatgcgggcggctagcacgaggtccgcggctcggggcttttggccttcttttagcgttggaatcctcgaaatcctgctgcgactgggatgcgtcgcattctctgcggcccttttgttttccgtcaccaaaaccggctgctcctgagctcgctcgttttatggtcacaattcggatccttcagcgagtatc

SEQ ID NO: 18756 - DNA, 468 bp, Zea Mays
gaacattgctactgaacataatgtgttttgtgtctgaagcacattaagttcagacaagttcaactcagaggaaagtggctcacatgctttgcaagaagcaataattgctagcatcataacatctctctttcacttaatgctattgggatgctgacttaggtttgtcaacttaatgctatttttctactactaattatagatttgtatctagcctagagtttttggtacactcttgaaagggaattaggcttacacctagttcccaaataattttggtggttgaattgcccaacacaaataattggactaactagtttgcccaagtgtatagattatacaggtgtaaaaggttcacactcagccaattaaaaataccaagttttggattcaacaaaggagccaaggggcaaccgaaggcacccctggtctggcgcaccggactgtccggtgtgccaccggacagtgaac

SEQ ID NO: 18757 - DNA, 911 bp, Zea Mays
gccagcttcgggaaacgccaacggctagtccgctataattcaccggactgtccggtgtgcaccggactgtccggtgcgcctccgaagcaacggtcgtctccgcgccaacggctctctgccgcgcatttaatgcgcgctctgcgcgcgcagaagtcagaatcgcccatgctggcacaccggacatcaaacagtacctgtccggtgtgcaccggacaccctggcgggcccacaagtcagaagctccaacggctagaatccaacggcagtgatgacgtggcaggggcaccggactgtccggtgtgcaccggactgtccggtgcgccatcgagcagacgcctccagccaacggtcaagtttggtggttggggctataaataccccaaccaccccaccattcattgcatccaagttttccacttcccaactactacaagagctctagcattcaattctagacacaccaaaagagatcaaatcctctccaattccacgaaaggctttagtgattagagagagtgatttgccgtgttcatttgagctcttgcgcttggattgcttcttttctttctcacttgttcttgagatcacaactccattgtaatcaaggcaagaggcaccaattgtgtggtggcccttgcggggaagttttgttcccggctttgatttgagaagagaagctcactcggtccgtgggaccgtttgagagagggaagggttgaaagagacccggcctttgtggcctcctcaacagggagtaggtttgcaagaaccgaacctcggtaaaacaaatctccgtgtctcacttgcttattcgtttgggatttgttttgtgccctctctcgcggactcgtttatatttctaacgctaacccggcttgtagttgtgtttatatttgtaaatttcagtttcg

SEQ ID NO: 18758 - DNA, 822 bp, Zea Mays
ggtaatcctagatatactaaaatgacccccgaggaagttatcgggcattttgtaagttttgagtgcatgatagaaggctcgaggaaaatcaacgagcttgacgacccatccgaagcccaacccgttgcattcaaggcaacgaaggagaagaaggaggagtctacaccaagtagacaaccaatagacgcctccaagctcgacaatgaggaaatggcgctcgtcatcaagagcttccgccaaatcctcaagcaaaggaaggggaaggactacaagtcccgctccaagaaggtttgctacaagtgtggtaagcccggtcattttattgctaaatgtcctatatctagtgacagtgaccgaggtgacgacaagaaggggagaagaaaggagaagaaaaggtattacaagaagaagggcggcgatgcccatgtttgtcgggaatgggattccgacgaaagctcaagcgactcctccgacgacgaggacgccgccaacatcgccgtcaccaagggactcctcttccccaacgtcggccacaagtgcctcatggcaaaggacggcaaaaagaagaaggttaaattcaactcctccactaaatatgaatcttctagtgatgataatgctagtgatgaggaggataatttacgttccctttttgccaaccttaacatagctcaaaaagaaaaattaaatgaattagttagtgctattcatgaaaaggatgaccttttagatgcccaagaggattgtctaattaaagaaaacaagaaacatgttaaggttaaaaatgcttacgctctacaagttgaaaaatgtgaaaaattg

SEQ ID NO: 18759 - DNA, 293 bp, Zea Mays
ctaaaattgccgagcacaacttggaaaatgaaaaatttaaatttgctcgtagcatgctttataatgggagacgcccaggcattaaggatggcattggctttcaaaggggagacaatgtcaaaataagtgcccctcctaagagattgtccaactttgttaagggcaaggctcccatgcctcaggataacgagggttacattttgtaccctgccggttatcctaagagcaaaattaggagaattcattctaggaagtctcactctggccctaatcatgcttttatgtataagagt

SEQ ID NO: 18760 - DNA, 1073 bp, Zea Mays
cttgggtattctttttacaggaaaaatctcaaacccaagagaccttaaagggattcttgagacgggctcaaaatgagctcggcttaaggatcaagaaaataagaagcgacaacgggacggagttcaagaactctcaaattgaaggctttcttgaggaggagggcatcaagcatgagttctcttctccctacacgcctcaacaaaatggtgtagtggagaggaagaatagaactcttttggacatggcaagaaccatgcttgatgaatacaagacttcggatcggttttgggcggaggcggtcaacaccgcttgctacgccatcaaccggttatatcttcaccgaatcctcaagaagacatcatatgaactcctaactggtaaaaagcccaatatttcatactttagagtttttggtagcaaatgctttattcttgttaaaagaggtagaaaatctaaatttgctcctaaaactgtagaaggctttttacttggttatgactcaaacacaagggcatatagggtctttaacaagtccactggactagttgaagtctcatgtgacgttgtgtttgacgaaactaacggctctcaagtagagcatgttgatcttgatgagataggtgaagaacaggctccatgcacagcgctaaggaacatgtccgttggggacgtgtgtcctaaggaatccgaagagccttcaagagcacaagatcaaccgtcctcctccacacaagcatctccaccaactcaaaatgaggatgaagctcaagttgatgaagtggaagatcaggcaaatgagccacctcaagatgacggcatagatcaagggggagatgcaaatgatcaagacaaggaggatgaagaacaaaggccgccacacccaagagtccaccaagcaatccaacgagatcaccccgtcgacaccattctcggcgacattcataagggggtaactactcgatctcgtgttgcacatttttgtgaacattactcgtttgtttcctctattgagccacacagggtagaggaagcacttcaagattcggattgggtggtggcgatgcaagaggag

SEQ ID NO: 18761 - DNA, 623 bp, Zea Mays
aagaggtctatgttgagcaacctcccggctttgaagacagtgagtaccctaaccatgtctataggctctctaaggcgctttatgggctcaagcaagctccaagagcatggtatgaatgcctaagagatttccttatttcaaatggcttcaaagtcggaaaggccgatcctacactctttactaaaactctcaaaaatgatttgtttgtatgccaaatctatgttgatgatattatatttgggtctactaacgaatctacatgtgaagagtttagtaggattatgacacagaaattcgagatgtctatgattggggagttgaagtatttcttaggattccaagtaaagcaactccaagagggcaccttcatcagccaaacaaagtacactcaagatattctaaccaagtttgggatgaaggatgccaaacccatcaagacacccatgggaaccaatgggcatctcgacctcgacacgggaggtaagtccgtggatcaaaaggtataccggtcgatgataggttctttactctatttatgtgcatctcgaccggatattatgctttccgtatgcatgtgtgcaagattccaagccgaccctaagggagctcaccttacggccgtg

SEQ ID NO: 18762 - DNA, 1475 bp, Zea Mays
cttgccagttcttgggaagatccttggtgtcttgggcttcaaagaagcaaaattcggtcgctctttccacagccgaagccgagtacattgccgcaggccattgttgcgcgcaactgctttggatgaggcaaaccctgcgggactacggttacaaattaaccaaagtccctttgctatgtgacaatgagagtgcaatcaaaatggccgacaatcctgtcgagcatagccgcactaagcacatagccattcggtatcactttttgagggatcaccaacaaaagggagatatcgagatttcatacattaatactaaagatcaattagccgatatctttaccaagcctcttgatgaacaatcttttaacaaacttaggcatgagctcaatattcttgattcgcgcaatttcttttgctagattgcacacattgctcttttatatacctttaatcatgtctcttttgtatgctatgactaatgtgttttcaagaatatttcaaaccaagtcataggtatattgaaaggaaattggagtcttcggcgaagacaaaggcttccactccgtaactcatacttcgccatcactccaagcaactctctattccttggggagaaatgagcatcaaggaaaaggacttcgtctttggtatattcttaactcattcatttatgaccaaaggtgaagaaagcacttcgagggctctaatgattccgtttttggcgattcatgccaaaaagggggagaaaggagccccaaagcaaaaggaccgcaccaccatcgatttcaaaatcttagtgttgaatatttatcaattggttttcctattgtgttcaaaaaggggagaaagtagtacttcaaaataatatcaaaaccctcttgaacactaagaggagaatctcatttagggggagttttgtttagtcaaaggaaaagcatttgaaacagggggagaaaatttcaaatcttgaaaatgctttgcaaactcttattcatttgtctttgactatttgcaaaagaactttaaaatggatttacaaaagaatttgcaaaaacaaaacatgtggtgcaagcgtggtccaaaatgttaaataagaaagaaacattccatgcatatcttgtaagtagttttattggctcaattccaagcaacctttacacttacattatgcaaactagttcaattgtactcttctatatttgctttggtttgtgttggcatcaatcaccaaaaagggggagattgaaagggaattaggcttacacctagttcccaaataattttggtggttgaattgcccaacacaaataattggactaactagtttgcccaagtgtatagattatacaggtgtaaaaggttcacactcagccaattaaaaagaccaagttttggattcaacaaaggagccaaggggcaaccgaaggcacccctggtctggcgcaccggactgtccggtgtgccaccggacagtgaac

SEQ ID NO: 18763 - DNA, 743 bp, Zea Mays
cagttagtccacccaattcaaccctaagtcgctactccgtagattgtcactcatcacaaaaattgaaccacaagagcaaaaatatcaacattgtgttggcaatcttgtagtgataatcttattcatgaacaatgattaccttcttgccacgttggtatgcaagaagttgacatgtcggtacatagatcagttagtaaagaatttgctatttggctaacatatatgcttctctcgaatacttgagttaattggtaattgtttgacaacttgaatggtagtacaagcaatgaagaacttggcatgttggtccataagagtcctcaagatcgatgtaattggttgccatgttggtctgcacagctcctctcatgcatcggaccaatgtaaaaaaacccttaattatagcatacagtagaagccgatggatcgaaaggcgttgcaaacagagtagatagaccggcggcggcgaatcaaataaataataaaaaaaaaacaaacgaactaatttaaacgaaggaaacatggatggatcgaagcgaaacctggaggcgctaagtggagaattccaaagggattgcactgactgatctgcttgtcctcgggcacgtacgtacgtcggcgtcgatcggcaggttagatcaatgcgatccctttggagtcctccactagcttcctgctagtaggcggcataggggggacgacggcaggagagctagctatatagatgccatgccattgatggg

SEQ ID NO: 18764 - DNA, 1655 bp, Zea Mays
ccgccgccgccgcagcccgttccgttctcctcgctctcttttcacttgccaacgccaacgccaactgcttcttgtgcaattgggtgtgcttgctactgctcgctccccccgcggccgccctcgcttgctccgggcgccaccgtggggtcctccccccctgctctcccacacccaccctgtccttgtcgtccgctctgcgcaaccaaaccggcgaaaccgcccccctttcactccccctcctcctccagatccatccgcctctcctcgaaaccgtctctctgtgcgtccggagtccggggagagggtggcggcggtggagatggagagcctggcgcagcgcgcggcgctgctgcgggagtcgctgcagaagagccagcaggtcaccgacgccgtcgtctccatactcggctccttcgacagccgcctcaccgcgctcgactccgccatgcgccccatccaggtgaggacgcacgccgttcggaccgcgcacgagaacatcgaccgcacgctgcgctccgcggatgtgatcctcacccagttcgacaggacccgagaggcagagcgtgaaatacagaaggggccgcatgagaaccttcaaggtttcctagatgcagttgatcgcttgagaagtattgagcgtttctttagttcaaatcggagttaccgtagtagcgatggggtgctcaaccacgtaaacgcgctcctttctaaggcccttgtcaggatggagggtgaattccagaatcaattatcccagcgcagcaaaccgatggagcctgatcgtctttttgattgtcttccaagtacacttcgaccatcgtctgaatctcagcccgaaggtgggaaaaacccatccgagaatcagcaaaacccagaggctgttgtatatagtcctcctgctcttattgagccaaagtttgttccactactctctaaattagcacaacagttggttcaagctggatgccaacagcaatgctcagaaatatatagctcgttcttcagctttagaatcaagtctgaagaacttgggcgttgaaaaacttagcaaagatgaagtgcagaaaatgccgtgggaaattttggagtctaaaatagggaattggattcatttcatgcgaattgctgttaaacttctttttgctggggagcgccaactttgcgaccaagtttttgagtgcagtcaatcgttgagggataagtgctttgctgcaataacaaagaacagtttggctacactactcagttttggagaggctattgctatgagtaaacgatcaccagagaaactctttgttctgttagacatgtacgagataatgtgcgagcttcaaacagagctgctcaaggtcatgaactccaagacccccaaacttggtcccggaaggaatggactggagcacgtgaagcgcctgccgtcaaagacgagccgttgcacagcccaggcgccaggcctccgtccaaggagtcgtgccgctgtcaccaccttctgctgctctgccctctggcagccggaggcagaggcggatcctccaaattcgacggctgaaccgtcaaggatgttgaaatcagaattagatatgaaagcccccaaaggcataggcagggatgcccctgatcttgacatcgacagcctgaaaaacgggaccatttag

SEQ ID NO: 18765 - DNA, 1735 bp, Zea Mays
cgtcattcaccttgcctatccatcatcctcgtcttcttctgtctatccatggcgatttggcgttataaccacccccacccccacccttctctggctacgtcctcgctttcccttcctcccagctgcctgcccccccttccctaccctagctacgcacgctaccagctgccccccatccatgccgtccaggaagctggtggaggactccaaagggatcgcattgatctattctcacctgccgcctgctgcatgcgatgcgagtcgacgacaagatcagtgcaatccctttggaattttccactcgcgccttcacccccgccgcacgtgccacacgcccctccatcttccatggattccatctctcatcagggtaaaggtccagacaggacccatttaagaggattgaatatgcctgcagcggtcggccgccccaactgcacctgcacgcgcatcagtgtatttcgatcaactctctctgtcctttctgctttctccaaattaatacacttattcctcagacgacactgtcgctcactagtcaaagcagtatctagtttttaccactttagagtgaaagatacatatatttttaaaatactctgtttagcattacattacattgtaatattcagttttgattgtgaattggagatgacagcattaagaagacaaattgatgatgagattactgttcgccaattcatgatgagattttcaaattcattgatgatttagacaatttcaacacctcaaaactacaaggatgcaattgccccggaatttgcttcgccagggccttttagacaacaaccggactccaccacttctgtgtcctttctcctttcctccaaatacatgccaaacttacgtattccttacacacactagtctctctgtatgtatgtagagatactcgagccaatcgtgtatcatctggacctacagtccaaccggactaatcagcgacgcatggtcggcggaaccccactagaccggtgcattcatcagtttcttttttgatcgtggaatgaatgagttgatctatcaacggcaatttgatgatatgtttgcttcttttatttatatagtttctttatttgaacatgtgttgtgtattggtatgaaccttaaattatatataacactaatcttttacggccttgcttgattttgtcgtgcagtcttttttttcccaatgaattttcatcacgcgtttgacactgttgtgagatatgcaacaaccatcctgtcatcctgagactacaactcaattgctattcagactttccgttataattttagtcactctgttaccgttgcattttagtcattctattatagtctctatcgttctcgttcacacattcagacattacgttacagtttcattcattccattatggtttctgttacaattggagtcatttccttaccgttgcagttttagtcattctgttaccttctcacattcattatgttacaattttagtcattttattacagtttaaggcattccgttatattcttagtcatccattctattacagtttaagccattccgttctagttttagtaattgcactataatttctgttacagttttagtcaatttgttaccgttagtcattcactttcgttcaaagaatggattgaattattcgaaccaaacatcatggcaactccactccatttcacagaaattgtctacgtatttccttgccgaactcgacgttag

SEQ ID NO: 18766 - DNA, 1498 bp, Zea Mays
cttctgtctatccatggcgatttggcgttataaccacccccacccccacccttctctggctacgtcctcgctttcccttcctcccagctgcctgcccccccttccctaccctagctacgcacgctaccagctgccccccatccatgccgtccaggaagctggtggaggactccaaagggatcgcattgatctattctcacctgccgcctgctgcatgcgatgcgagtcgacgacaagatcagtgcaatccctttggaattttccactcgcgccttcacccccgccgcacgtgccacacgcccctccatcttccatggattccatctctcatcagggtaaaggtccagacaggacccatttaagaggattgaatatgcctgcagcggtcggccgccccaactgcacctgcacgcgcatcagtcattaagaagacaaattgatgatgagattactgttcgccaattcatgatgagattttcaaattcattgatgatttagacaatttcaacacctcaaaactacaaggatgcaattgccccggaatttgcttcgccagggccttttagacaacaaccggactccaccacttctgtgtcctttctcctttcctccaaatacatgccaaacttacgtattccttacacacactagtctctctgtatgtatgtagagatactcgagccaatcgtgtatcatctggacctacagtccaaccggactaatcagcgacgcatggtcggcggaaccccactagaccggtgcattcatcagtttcttttttgatcgtggaatgaatgagttgatctatcaacggcaatttgatgatatgtttgcttcttttatttatatagtttctttatttgaacatgtgttgtgtattggtatgaaccttaaattatatataacactaatcttttacggccttgcttgattttgtcgtgcagtcttttttttcccaatgaattttcatcacgcgtttgacactgttgtgagatatgcaacaaccatcctgtcatcctgagactacaactcaattgctattcagactttccgttataattttagtcactctgttaccgttgcattttagtcattctattatagtctctatcgttctcgttcacacattcagacattacgttacagtttcattcattccattatggtttctgttacaattggagtcatttccttaccgttgcagttttagtcattctgttaccttctcacattcattatgttacaattttagtcattttattacagtttaaggcattccgttatattcttagtcatccattctattacagtttaagccattccgttctagttttagtaattgcactataatttctgttacagttttagtcaatttgttaccgttagtcattcactttcgttcaaagaatggattgaattattcgaaccaaacatcatggcaactccactccatttcacagaaattgtctacgtatttccttgccgaactcgacgttag

SEQ ID NO: 18767 - DNA, 1992 bp, Zea Mays
tctgtctatccatggcgatttggcgttataaccacccccacccccacccttctctggctacgtcctcgctttcccttcctcccagctgcctgcccccccttccctaccctagctacgcacgctaccagctgccccccatccatgccgtccaggaagctggtggaggactccaaagggatcgcattgatctattctcacctgccgcctgctgcatgcgatgcgagtcgacgacaagatcagtgcaatccctttggaattttccactcgcgccttcacccccgccgcacgtgccacacgcccctccatcttccatggattccatctctcatcaggtatctctctctctatctgctcttgcaagctacttccatggatttgatttttgttaagttcgcctacttgctctccacgtacgtactggctacatcgtttctgcgcaccacacacccaccaggccatgaggaatcaatttgctcatgggagcatgatgatgcagacaagtacaaacatagtatataataaaaatagctgccgattcattctttcctttcgctcatcgttttcgtagttaattcattcattggcatggttaagtatgtgtaaatacttacatgtagatatatcagggtaaaggtccagacaggacccatttaagaggattgaatatgcctgcagcggtcggccgccccaactgcacctgcacgcgcatcagtgtatttcgatcaactctctctgtcctttctgctttctccaaattaatacacttattcctcagacgacactgtcgctcactagtcaaagcagtatctagtttttaccactttagagtgaaagatacatatatttttaaaatactctgtttagcattacattacattgtaatattcagttttgattgtgaattggagatgacagcattaagaagacaaattgatgatgagattactgttcgccaattcatgatgagattttcaaattcattgatgatttagacaatttcaacacctcaaaactacaaggatgcaattgccccggaatttgcttcgccagggccttttagacaacaaccggactccaccacttctgtgtcctttctcctttcctccaaatacatgccaaacttacgtattccttacacacactagtctctctgtatgtatgtagagatactcgagccaatcgtgtatcatctggacctacagtccaaccggactaatcagcgacgcatggtcggcggaaccccactagaccggtgcattcatcagtttcttttttgatcgtggaatgaatgagttgatctatcaacggcaatttgatgatatgtttgcttcttttatttatatagtttctttatttgaacatgtgttgtgtattggtatgaaccttaaattatatataacactaatcttttacggccttgcttgattttgtcgtgcagtcttttttttcccaatgaattttcatcacgcgtttgacactgttgtgagatatgcaacaaccatcctgtcatcctgagactacaactcaattgctattcagactttccgttataattttagtcactctgttaccgttgcattttagtcattctattatagtctctatcgttctcgttcacacattcagacattacgttacagtttcattcattccattatggtttctgttacaattggagtcatttccttaccgttgcagttttagtcattctgttaccttctcacattcattatgttacaattttagtcattttattacagtttaaggcattccgttatattcttagtcatccattctattacagtttaagccattccgttctagttttagtaattgcactataatttctgttacagttttagtcaatttgttaccgttagtcattcactttcgttcaaagaatggattgaattattcgaaccaaacatcatggcaactccactccatttcacagaaattgtctacgtatttccttgccgaactcgacgttag

SEQ ID NO: 18768 - DNA, 1656 bp, Zea Mays
ctctggctacgtcctcgctttcccttcctcccagctgcctgcccccccttccctaccctagctacgcacgctaccagctgccccccatccatgccgtccaggaagctggtggaggactccaaagggatcgcattgatctattctcacctgccgcctgctgcatgcgatgcgagtcgacgacaagatcagtgcaatccctttggaattttccactcgcgccttcacccccgccgcacgtgccacacgcccctccatcttccatggattccatctctcatcagatatatcagggtaaaggtccagacaggacccatttaagaggattgaatatgcctgcagcggtcggccgccccaactgcacctgcacgcgcatcagtgtatttcgatcaactctctctgtcctttctgctttctccaaattaatacacttattcctcagacgacactgtcgctcactagtcaaagcagtatctagtttttaccactttagagtgaaagatacatatatttttaaaatactctgtttagcattacattacattgtaatattcagttttgattgtgaattggagatgacagcattaagaagacaaattgatgatgagattactgttcgccaattcatgatgagattttcaaattcattgatgatttagacaatttcaacacctcaaaactacaaggatgcaattgccccggaatttgcttcgccagggccttttagacaacaaccggactccaccacttctgtgtcctttctcctttcctccaaatacatgccaaacttacgtattccttacacacactagtctctctgtatgtatgtagagatactcgagccaatcgtgtatcatctggacctacagtccaaccggactaatcagcgacgcatggtcggcggaaccccactagaccggtgcattcatcagtttcttttttgatcgtggaatgaatgagttgatctatcaacggcaatttgatgatatgtttgcttcttttatttatatagtttctttatttgaacatgtgttgtgtattggtatgaaccttaaattatatataacactaatcttttacggccttgcttgattttgtcgtgcagtcttttttttcccaatgaattttcatcacgcgtttgacactgttgtgagatatgcaacaaccatcctgtcatcctgagactacaactcaattgctattcagactttccgttataattttagtcactctgttaccgttgcattttagtcattctattatagtctctatcgttctcgttcacacattcagacattacgttacagtttcattcattccattatggtttctgttacaattggagtcatttccttaccgttgcagttttagtcattctgttaccttctcacattcattatgttacaattttagtcattttattacagtttaaggcattccgttatattcttagtcatccattctattacagtttaagccattccgttctagttttagtaattgcactataatttctgttacagttttagtcaatttgttaccgttagtcattcactttcgttcaaagaatggattgaattattcgaaccaaacatcatggcaactccactccatttcacagaaattgtctacgtatttccttgccgaactcgacgttag

SEQ ID NO: 18769 - DNA, 2002 bp, Zea Mays
gtctgattgtgccctgcagccgccgctctcgccgccgcccgtcccgacttaggccaagccaaccgcgtcatcgtcttatctctctcccatcattcatctatctgatctcatctcctatcttccctctctctcctccccgtcgtctgccttctctgcccggcaagaccgcctgcccatgtccgtggcgccgtgcgcgcttctcctgccctgcaatccgcttcctcagcgcagctccgatccgccaacgccgcccaaggagccgggatcggccgaccgatcggagacgagaggcaggcagcggaacagagcagcggcccgcaaggcgattgctctattctgccctgttccagcgttccatgcatggatgccaaggaactcatctcacagtccgacctgcagtcgttctaccagcagcaacaacagcagcaccgtgccttcggcggccaccatagcccgtcctcgctggccgggatgcactccgtcatccgacccatgcccaacatgaatatgagcccaactgctatccttaactccatcagcgggggttccctcgccggcatgcagttccagatggacccgcccccaccattgctgcacaacatcaacgccaccggcgctgtcacaccggcccctgcggagcctctcaagcgcaaaagaggaaggccgcgcaaatacggacccgatggcacgatgaggcaacagcaacagcaacaggctgcgtcatcgcagcagcagctcgtcgctacacaaccgaggatatgttctctatcgtcgggtcccgacatgctcggcagctccggtatggaggaccccgcgcagaagaagcggcgcggccggccgccgggcaccggcaagaagcaccagccctcgacctcacaaggtccaggcaatgcgttcgccggttcggctggaacgagcttcactccgcacatcatcacggcgtctccttcagaggacgtggcggcgaagatcgttgcgttcgccagccagtcgtcaaaggcggtgtgcgtcctctcggcgatgggttccgtctccagggccgtcctccgccacccggccgacggctctcccatggcgagggttcacgcgtcgccgcagccgtacaagaaccctgctgtctacgagggcggcggcctcagcgtcacgctctgcagccctgagaggaacgtgatcggaggcgttctgggcggcccactggtagctgcaggcaccgtgcaggtggttctggggagttttcaccagggagggtcgagatccaagtccaagaaagccgggaagcagcagcaggcggcggccttcagccccgactcgctcaccggcggccaggaggcgtcgcccagctccgggcacaaccaaaatctaacgccgccgccctccgtgacgggagggtggcccacctccggcatatttgacaccagaagttccagcattgatatcaactcgtctagaggctagctcattcgtcgatataattccagctcgacagaaattttctgttttcgcacaagaatacccaaaaaccatacttcgaaatagcttattcgcttctttcttttgagtaattaaattcgtatagaattcataggcatcgctcagtctcgtgacttgttattattcttccaacaatcccccttcgtcctctactcctctccgcgtggcataccgttgtgcaaattatacttcagaaatgcaaatatgcaactggtgtatgtaaattacctttttttgcccatatttagttttggtgatcccaacttgttggaatctgtcaggccactccaaggataccaggtatgaaaacacacagaaaaagaagggaaaactttaaagaatctggaaatgactaataaggattttaaccattgggaagccacattcacgataagcagaaccttccccttgcatctactcaactccacaccattttcacaagtattcgaaagttctcttcttcatattccagttgcatccattaaaaaaaatcaaaacaccatttccaaat

SEQ ID NO: 18770 - DNA, 1884 bp, Zea Mays
gagtgacactccatttaactgtctcctcaaatatttgagaatttttggtgatagatattttagtccaaaatctctcacctcttaaaatagatctacggagacgaaaataaaaaaaaactgaaattaattaatagaggtagccttgttcattccacggcatgtcgatgatggcaagggttctgctgctgtcggtccagtaaaatacagtaacaacaagaaggatgctagggcaccctgtgaaaacaaaaatagattggtccgtcgcgccatcaaggaacgggttctagacggatcggacggcacacgataacagctgccggtgtcccggaccatcctgtccatccctctataaacggagccctgtccagttgtgatcgagacccctcgcaaccgccggccgattcgagcagcgccccagcagcctctgctccgctgcctctggcgaccgccggagcccgaggaggaggaggagggaagatctcgctcgatccaaggaggtgagtacaagatggtgagctcctcgtcgccggtggtcaacgtgtacccgctcgccaactacacgttcggcaccaaggagcccaagatggagaaggacacctccgtcgccgaccgcctcgcccgtatgaaggtcaactacatgaaagaaggaatgcgtacaagtgttgaagcaatcctattggtgcaagagcacaaccatcctcacatactgctcctgcaaatcggtaatacattctgcaaacttcctggtggacggttgaagcctggagaaaatgaaatcgagggtttgaaaagaaagttatgcagcaaacttgctgtgaactcgccttcctttccacctaactggcaggttggagagtgcgttgctgtgtggtggaggccgaactttgagactgtgatgtatccttactgtcctccacatatcactaagcccaaggagtgcaagaaacttttcattgttcacctatccgaaagagagtattttgctgttccaaggaatctgaaactgcttgctgttccactgtttgaactctacgacaatgttcagaggtacgggcctgtcatctctaccatcccgcagcagctttctaggttccagttcaacatggttagctcttagggtgatgatacaagaaaaccaatgtggccaaggcagctcttcggttgctgagctagctgatcaacgtaccctgactgattttatttcattgtgctggatttttttatatagactactactatctagacatgcatttctgattgtattgttgttgaattatcctgttatgtcgcatcccatgggcagatccagtctaggatatgtacacctgataacttagttaaaaaaaagaaaagaaaaccgaaggtagtgtgtgtatagatcgtactgtagtatgcatgtaaccggatcagatccgttttcaggtagattgctctaggttgggttatttattgcattaattgcacaagctagatgccatgtgtactattgtcgaaaaggggttgcaggtcaaccttgcgtagatgttaaatgcagtctcaaatattttatccgaaggtgtgttctagtactggcatgccattgattacgtcatccaagcatatgttgttgcatcttatatgtgaatagccacatggtctgaacttaaagtttctagaggaacaagttcttcagatgatgctgcatcttacccgttggagttcttaactgttccagttgcatttgagctcgttattttcatcatcctcttcccatattgccatgtttccccttgagaatgaagtgcgctccgcattttccaagtactccacaagagagctaaagaacattctcaacaaagcatttttacccaaaaaacaaacaaacaaaccagattttggctacaa

SEQ ID NO: 18771 - DNA, 1856 bp, Zea Mays
gagtgacactccatttaactgtctcctcaaatatttgagaatttttggtgatagatattttagtccaaaatctctcacctcttaaaatagatctacggagacgaaaataaaaaaaaactgaaattaattaatagaggtagccttgttcattccacggcatgtcgatgatggcaagggttctgctgctgtcggtccagtaaaatacagtaacaacaagaaggatgctagggcaccctgtgaaaacaaaaatagattggtccgtcgcgccatcaaggaacgggttctagacggatcggacggcacacgataacagctgccggtgtcccggaccatcctgtccatccctctataaacggagccctgtccagttgtgatcgagacccctcgcaaccgccggccgattcgagcagcgccccagcagcctctgctccgctgcctctggcgaccgccggagcccgaggaggaggaggagggaagatctcgctcgatccaaggagcccaagatggagaaggacacctccgtcgccgaccgcctcgcccgtatgaaggtcaactacatgaaagaaggaatgcgtacaagtgttgaagcaatcctattggtgcaagagcacaaccatcctcacatactgctcctgcaaatcggtaatacattctgcaaacttcctggtggacggttgaagcctggagaaaatgaaatcgagggtttgaaaagaaagttatgcagcaaacttgctgtgaactcgccttcctttccacctaactggcaggttggagagtgcgttgctgtgtggtggaggccgaactttgagactgtgatgtatccttactgtcctccacatatcactaagcccaaggagtgcaagaaacttttcattgttcacctatccgaaagagagtattttgctgttccaaggaatctgaaactgcttgctgttccactgtttgaactctacgacaatgttcaggaatttgtcaagatttgtttctgaaacttgtttcctgtacattgatgtgcagaggtacgggcctgtcatctctaccatcccgcagcagctttctaggttccagttcaacatggttagctcttagggtgatgatacaagaaaaccaatgtggccaaggcagctcttcggttgctgagctagctgatcaacgtaccctgactgattttatttcattgtgctggatttttttatatagactactactatctagacatgcatttctgattgtattgttgttgaattatcctgttatgtcgcatcccatgggcagatccagtctaggatatgtacacctgataacttagttaaaaaaaagaaaagaaaaccgaaggtagtgtgtgtatagatcgtactgtagtatgcatgtaaccggatcagatccgttttcaggtagattgctctaggttgggttatttattgcattaattgcacaagctagatgccatgtgtactattgtcgaaaaggggttgcaggtcaaccttgcgtagatgttaaatgcagtctcaaatattttatccgaaggtgtgttctagtactggcatgccattgattacgtcatccaagcatatgttgttgcatcttatatgtgaatagccacatggtctgaacttaaagtttctagaggaacaagttcttcagatgatgctgcatcttacccgttggagttcttaactgttccagttgcatttgagctcgttattttcatcatcctcttcccatattgccatgtttccccttgagaatgaagtgcgctccgcattttccaagtactccacaagagagctaaagaacattctcaacaaagcatttttacccaaaaaacaaacaaacaaaccagattttggctacaa

SEQ ID NO: 18772 - DNA, 2037 bp, Zea Mays
gagtgacactccatttaactgtctcctcaaatatttgagaatttttggtgatagatattttagtccaaaatctctcacctcttaaaatagatctacggagacgaaaataaaaaaaaactgaaattaattaatagaggtagccttgttcattccacggcatgtcgatgatggcaagggttctgctgctgtcggtccagtaaaatacagtaacaacaagaaggatgctagggcaccctgtgaaaacaaaaatagattggtccgtcgcgccatcaaggtcagcgacacggcccacgcggaccctactcttctccttgttccgtgagatccgcggtcgcgctctacaacggcatgatccggggttgcgcttaccatggggccgcacgagcgcgcgctggagctgctcgccgaaatgccgcgccgccgccgtgaacgggttctagacggatcggacggcacacgataacagctgccggtgtcccggaccatcctgtccatccctctataaacggagccctgtccagttgtgatcgagacccctcgcaaccgccggccgattcgagcagcgccccagcagcctctgctccgctgcctctggcgaccgccggagcccgaggaggaggaggagggaagatctcgctcgatccaaggaggtgagtacaagatggtgagctcctcgtcgccggtggtcaacgtgtacccgctcgccaactacacgttcggcaccaaggagcccaagatggagaaggacacctccgtcgccgaccgcctcgcccgtatgaaggtcaactacatgaaagaaggaatgcgtacaagtgttgaagcaatcctattggtgcaagagcacaaccatcctcacatactgctcctgcaaatcggtaatacattctgcaaacttcctggtggacggttgaagcctggagaaaatgaaatcgagggtttgaaaagaaagttatgcagcaaacttgctgtgaactcgccttcctttccacctaactggcaggttggagagtgcgttgctgtgtggtggaggccgaactttgagactgtgatgtatccttactgtcctccacatatcactaagcccaaggagtgcaagaaacttttcattgttcacctatccgaaagagagtattttgctgttccaaggaatctgaaactgcttgctgttccactgtttgaactctacgacaatgttcagaggtacgggcctgtcatctctaccatcccgcagcagctttctaggttccagttcaacatggttagctcttagggtgatgatacaagaaaaccaatgtggccaaggcagctcttcggttgctgagctagctgatcaacgtaccctgactgattttatttcattgtgctggatttttttatatagactactactatctagacatgcatttctgattgtattgttgttgaattatcctgttatgtcgcatcccatgggcagatccagtctaggatatgtacacctgataacttagttaaaaaaaagaaaagaaaaccgaaggtagtgtgtgtatagatcgtactgtagtatgcatgtaaccggatcagatccgttttcaggtagattgctctaggttgggttatttattgcattaattgcacaagctagatgccatgtgtactattgtcgaaaaggggttgcaggtcaaccttgcgtagatgttaaatgcagtctcaaatattttatccgaaggtgtgttctagtactggcatgccattgattacgtcatccaagcatatgttgttgcatcttatatgtgaatagccacatggtctgaacttaaagtttctagaggaacaagttcttcagatgatgctgcatcttacccgttggagttcttaactgttccagttgcatttgagctcgttattttcatcatcctcttcccatattgccatgtttccccttgagaatgaagtgcgctccgcattttccaagtactccacaagagagctaaagaacattctcaacaaagcatttttacccaaaaaacaaacaaacaaaccagattttggctacaa

SEQ ID NO: 18773 - DNA, 1900 bp, Zea Mays
gagtgacactccatttaactgtctcctcaaatatttgagaatttttggtgatagatattttagtccaaaatctctcacctcttaaaatagatctacggagacgaaaataaaaaaaaactgaaattaattaatagaggtagccttgttcattccacggcatgtcgatgatggcaagggttctgctgctgtcggtccagtaaaatacagtaacaacaagaaggatgctagggcaccctgtgaaaacaaaaatagattggtccgtcgcgccatcaagtccaacaagctgacaggaacgggttctagacggatcggacggcacacgataacagctgccggtgtcccggaccatcctgtccatccctctataaacggagccctgtccagttgtgatcgagacccctcgcaaccgccggccgattcgagcagcgccccagcagcctctgctccgctgcctctggcgaccgccggagcccgaggaggaggaggagggaagatctcgctcgatccaaggaggtgagtacaagatggtgagctcctcgtcgccggtggtcaacgtgtacccgctcgccaactacacgttcggcaccaaggagcccaagatggagaaggacacctccgtcgccgaccgcctcgcccgtatgaaggtcaactacatgaaagaaggaatgcgtacaagtgttgaagcaatcctattggtgcaagagcacaaccatcctcacatactgctcctgcaaatcggtaatacattctgcaaacttcctggtggacggttgaagcctggagaaaatgaaatcgagggtttgaaaagaaagttatgcagcaaacttgctgtgaactcgccttcctttccacctaactggcaggttggagagtgcgttgctgtgtggtggaggccgaactttgagactgtgatgtatccttactgtcctccacatatcactaagcccaaggagtgcaagaaacttttcattgttcacctatccgaaagagagtattttgctgttccaaggaatctgaaactgcttgctgttccactgtttgaactctacgacaatgttcagaggtacgggcctgtcatctctaccatcccgcagcagctttctaggttccagttcaacatggttagctcttagggtgatgatacaagaaaaccaatgtggccaaggcagctcttcggttgctgagctagctgatcaacgtaccctgactgattttatttcattgtgctggatttttttatatagactactactatctagacatgcatttctgattgtattgttgttgaattatcctgttatgtcgcatcccatgggcagatccagtctaggatatgtacacctgataacttagttaaaaaaaagaaaagaaaaccgaaggtagtgtgtgtatagatcgtactgtagtatgcatgtaaccggatcagatccgttttcaggtagattgctctaggttgggttatttattgcattaattgcacaagctagatgccatgtgtactattgtcgaaaaggggttgcaggtcaaccttgcgtagatgttaaatgcagtctcaaatattttatccgaaggtgtgttctagtactggcatgccattgattacgtcatccaagcatatgttgttgcatcttatatgtgaatagccacatggtctgaacttaaagtttctagaggaacaagttcttcagatgatgctgcatcttacccgttggagttcttaactgttccagttgcatttgagctcgttattttcatcatcctcttcccatattgccatgtttccccttgagaatgaagtgcgctccgcattttccaagtactccacaagagagctaaagaacattctcaacaaagcatttttacccaaaaaacaaacaaacaaaccagattttggctacaa

SEQ ID NO: 18774 - DNA, 4321 bp, Zea Mays
gggcgcagttggcttttgcctcgtcccctccgccgccccgttgccgaaacaaaactcgctcttcggacaaaacgccaacgccagggcgagcgagcgaggtgaggtcacctaccagctcccacagtcgcactcccccctcgcgccgtcccgtcgtaggaatggaatgaggccgaggcccctcctcctcctcctcgtcgtcgtcgtcgtcgtcggtgcttctcccgtgacaggcctcccttcctccggtccggtcgccctctgacccaatccgcatacatccaccaaccagacaggggaggatggatttgtccaggctcgcctccgtcgccgggcccagccgcgcggccccgcgggcgggcctgcagatcggcgccgccgggaatggcttccgcgtctgctccctgcggcaccgcggcgccgggaacgggcgcctcacgtccgccgccgccctcctccgcggcagcagcgggctcttctacctggctcccgcgcgcgggggccctccccgtctccgcgccagagggcggccgcggtgccagggcagcgactcgttggcctacgtcgacggccccttggaggccgccaagggctccggcgaggtctacgacgacgatgccaccagctcggggcccgacgacgacgacaatgacaagggccccgccgacgtggacggtctccgggagatgctgcagaggtgcaggaacgagctcgaggtggccaggctcaacagcaccatgttcgaggagaaggctcagcggatatccgagtcggccatcgcgctcaaggaccgcgccgaaggcgcccagagggacgtgtccgcggccgtcgccaccgtgcaggaggtcatcgtcaaggaggcggacgccaaggaggccgtccagaaggctaccatggcgctgtcgatggccgaggccaggctgcagctggcgtccgaggcgctggatgccaagcgggggtcggtcgggcccatggaggttagcatcgaaggcgtggaggaggaggcccttgtgtctgctcaggaagagatcaaggattgccgggcagccttgttgcggtgtgaggaggagctggaacgcatccaggaacagaaaatgaacctgcagaaggaggttgataggctcaccgagctcgctgagaaggcccagttggatgcatccaaggccgaagaagatgtcaccaatataatggtgttggctgagcaggcggtggctcttgagatgaaagccacgcagcgtgtcaacgacgcggaggcggtgctgctgaaagcggagaaggtcatatcctcggttgacaccgtggtggagctaacatcacttgctgaagagcagaaaagcgctgaagaggatagcgtttctgaagggtatgagtatagcagcaatggcactgatgatgttcctgtgagggatgaggtgtcaagtatcgagcgtctaatggtaggtgacttgactgttgagggcattgagcagcttgaaccatcccgtgaaatatatgatgaagcaagcagcgataagatgtccgttgagcctcagaaagaagctgagcctgattcagacaagttgaagcaagggaagaagcaggaaatggaacgaaaggagttcaccaaggaaccactgagtgctcaaaaatcactgaagaagagatcatcccgcttcttcccggcatctttcttctcctccaaagctgatggagagtttacacctacatctgtctttcgggggttaatgaaatcagtgcaaaaacaggctcccaagcttgttgttgggatattgcttcttggtgcaggggccttcttcttaaatagagctgagaagagtcaactatttcagcagcaagaaattgccacaagtattggaaaggtaacctccacgacaaagcccatagttcgtgagatacggcaaattccacagagagtaaagaagctaatagagctcttacctcatcaagaggtaaatgaggaagaagcttcacttttcgacatactgtatttgcttcttgccagtgttatttttgtaccattatttcagaaaatccctggaggcagtcctgttcttggatatcttgctgctggtgtcctcattggtccatatgggctctccatcatccgtaatgtgcatgggacaaaggcaattgcggaattcggagtcgtgttcttactgtttaacattggacttgagctttctgtggaaaggctaagttcgatgaagaagtatgtcttcggcttgggatctgctcaggtgctagctactactgcagctgttggtgtgatagctcatcgttttgctgtgctaccaggaccagcagcaattgttgttgggagtggcttggctctgtcatccacggctgttgtcttgcaagtattgcaagagcgtggtgaaagtacgtcgcgtcatggacgtgccacattttctgtgttattgttccaggatttggctgtggtggtcctgttgatattaatacctctcatatcacctaattcttcaaaaggaggggttggtttccaagcaatagcagaagccatgggaatggctgcagtcaaagcagtagctgctataactgccataattgctggaggtcgtctgttgcttcggcctatttacaagcaaattgctgaaaatcagaatgctgagatattttcagcaaatacactccttgttatttttggcacaagtcttcttacagcccgggctgggttatcgatggcacttggagcttttttggctggtctgttactagcagaaacagagttctccttacaggttgagtcagatatagctccttatcgtggtcttctgttaggacttttctttatgacggttggaatgtctattgacccaaagctgcttctgtcaaacttcccaatgatctctatgatattgggtctcttgataattggaaagacattgttggttacatttgtgggcagggtatttggggtttctactatagctgccattcgtgttggtctcttgcttgcgcctggtggtgagtttgcttttgttgcctttggagaagctgtcaaccagggtcttctatcacctcaattatcatcgttactgtttttagtcgttggcatttcaatggctctgacaccatggttagctgctggagggcagtttctggcatcaaaatttgagcagcatgatgtgaggagtttattgcctgtggaaagtgagactgacgatttgcacgaccatattattatattaggctttggacgtgttgggcagatcgttgcgcaactcctgtcagagcggttaattccttttgttgcccttgatgttagaagtgatcgggttgcagttgggcgtgcacttgaccttccggtatattttggggatgctggaagcagagaggtactgcacaaagttggagctgaaagagcttgtgctgctgcaattactttggatacccctggtgcaaactatagagctgtctgggcattgaacaaatatttcccaaatgtgaagacatttgttagagcacatgatgttgatcatggtgttaatttggagaaagctggtgcaacagcggttgtccctgagaccttggagccaagtcttcagctagctgctgctgttcttgcacaagcaaaactcccaatgtcagagattcaggaaagcatcaacgagttccggaatcgtcatctgtcagagcttacagagttgtgtgctacgtcaggaaattctcttggctatgggttttccagagttatgtccaaatcgaagtctatcagctccgatgatgaaagcgaaacagtggatggcgcactagcaatttgaagacgattagataaaatgggatcccttgatagtactagatcgattgcactgttagtagataagcttgttgcatgtagaaaaatggaataaaaattaatgcaagagctgtcacaaaaatcggcgtgcaattttgtatgttagagtacttatatatttcttctctcccccaaaaaaattgtttgcatacaactcttcacaaagaaaaataatacactctagcagtgcacgtgaaaatgagacccttgtaagcagggaagaaaatagatgtcagaatgctgaatacttcccatgcttgctcaaaggagcatatggtacagtcaggccagttggacggttgggacctggctttgggtatgtttagtacaatttttgggtgtgtttgggacagttttttaaagagcttttctaaaaatctagaattttggataatctaactgtcacaagaatttagatatcgctagttgatctattcaaacgctgggttaagatcggattgtgggtcatatgacacggtctacgtttgacctgtgcatagggttaag

SEQ ID NO: 18775 - DNA, 3608 bp, Zea Mays
ggcgcagttggcttttgcctcgtcccctccgccgccccgttgccgaaacaaaactcgctcttcggacaaaacgccaacgccagggcgagcgagcgaggtgaggtcacctaccagctcccacagtcgcactcccccctcgcgccgtcccgtcgtaggaatggaatgaggccgaggcccctcctcctcctcctcgtcgtcgtcgtcgtcgtcggtgcttctcccgtgacaggcctcccttcctccggtccggtcgccctctgacccaatccgcatacatccaccaaccagctttgatttgcgctgtttccgattgtactcgtgctccgcccgctacgatacaggacaggggaggatggatttgtccaggctcgcctccgtcgccgggcccagccgcgcggccccgcgggcgggcctgcagatcggcgccgccgggaatggcttccgcgtctgctccctgcggcaccgcggcgccgggaacgggcgcctcacgtccgccgccgccctcctccgcggcagcagcgggctcttctacctggctcccgcgcgcgggggccctccccgtctccgcgccagagggcggccgcggtgccagggcagcgactcgttggcctacgtcgacggccccttggaggccgccaagggctccggcgaggtctacgacgacgatgccaccagctcggggcccgacgacgacgacaatgacaagggccccgccgacgtggacggtctccgggagatgctgcagaggtgcaggaacgagctcgaggtggccaggctcaacagcaccatgttcgaggagaaggctcagcggatatccgagtcggccatcgcgctcaaggaccgcgccgaaggcgcccagagggacgtgtccgcggccgtcgccaccgtgcaggaggtcatcgtcaaggaggcggacgccaaggaggccgtccagaaggctaccatggcgctgtcgatggccgaggccaggctgcagctggcgtccgaggcgctggatgccaagcgggggtcggtcgggcccatggaggttagcatcgaaggcgtggaggaggaggcccttgtgtctgctcaggaagagatcaaggattgccgggcagccttgttgcggtgtgaggaggagctggaacgcatccaggaacagaaaatgaacctgcagaaggaggttgataggctcaccgagctcgctgagaaggcccagttggatgcatccaaggccgaagaagatgtcaccaatataatggtgttggctgagcaggcggtggctcttgagatgaaagccacgcagcgtgtcaacgacgcggaggcggtgctgctgaaagcggagaaggtcatatcctcggttgacaccgtggtggagctaacatcacttgctgaagagcagaaaagcgctgaagaggatagcgtttctgaagggtatgagtatagcagcaatggcactgatgatgttcctgtgagggatgaggtgtcaagtatcgagcgtctaatggtaggtgacttgactgttgagggcattgagcagcttgaaccatcccgtgaaatatatgatgaagcaagcagcgataagatgtccgttgagcctcagaaagaagctgagcctgattcagacaagttgaagcaagggaagaagcaggaaatggaacgaaaggagttcaccaaggaaccactgagtgctcaaaaatcactgaagaagagatcatcccgcttcttcccggcatctttcttctcctccaaagctgatggagagtttacacctacatctgtctttcgggggttaatgaaatcagtgcaaaaacaggctcccaagcttgttgttgggatattgcttcttggtgcaggggccttcttcttaaatagagctgagaagagtcaactatttcagcagcaagaaattgccacaagtattggaaaggtaacctccacgacaaagcccatagttcgtgagatacggcaaattccacagagagtaaagaagctaatagagctcttacctcatcaagaggtaaatgaggaagaagcttcacttttcgacatactgtatttgcttcttgccagtgttatttttgtaccattatttcagaaaatccctggaggcagtcctgttcttggatatcttgctgctggtgtcctcattggtccatatgggctctccatcatccgtaatgtgcatgggacaaaggcaattgcggaattcggagtcgtgttcttactgtttaacattggacttgagctttctgtggaaaggctaagttcgatgaagaagtatgtcttcggcttgggatctgctcaggtgctagctactactgcagctgttggtgtgatagctcatcgttttgctgtgctaccaggaccagcagcaattgttgttgggagtggcttggctctgtcatccacggctgttgtcttgcaagtattgcaagagcgtggtgaaagtacgtcgcgtcatggacgtgccacattttctgtgttattgttccaggatttggctgtggtggtcctgttgatattaatacctctcatatcacctaattcttcaaaaggaggggttggtttccaagcaatagcagaagccatgggaatggctgcagtcaaagcagtagctgctataactgccataattgctggaggtcgtctgttgcttcggcctatttacaagcaaattgctgaaaatcagaatgctgagatattttcagcaaatacactccttgttatttttggcacaagtcttcttacagcccgggctgggttatcgatggcacttggagcttttttggctggtctgttactagcagaaacagagttctccttacaggttgagtcagatatagctccttatcgtggtcttctgttaggacttttctttatgacggttggaatgtctattgacccaaagctgcttctgtcaaacttcccaatgatctctatgatattgggtctcttgataattggaaagacattgttggttacatttgtgggcagggtatttggggtttctactatagctgccattcgtgttggtctcttgcttgcgcctggtggtgagtttgcttttgttgcctttggagaagctgtcaaccagggtcttctatcacctcaattatcatcgttactgtttttagtcgttggcatttcaatggctctgacaccatggttagctgctggagggcagtttctggcatcaaaatttgagcagcatgatgtgaggagtttattgcctgtggaaagtgagactgacgatttgcacgaccatattattatattaggctttggacgtgttgggcagatcgttgcgcaactcctgtcagagcggttaattccttttgttgcccttgatgttagaagtgatcgggttgcagttgggcgtgcacttgaccttccggtatattttggggatgctggaagcagagaggtactgcacaaagttggagctgaaagagcttgtgctgctgcaattactttggatacccctggtgcaaactatagagctgtctgggcattgaacaaatatttcccaaatgtgaagacatttgttagagcacatgatgttgatcatggtgttaatttggagaaagctggtgcaacagcgtacttacaacatatcttctaatgga

SEQ ID NO: 18776 - DNA, 2862 bp, Zea Mays
gcgcagttggcttttgcctcgtcccctccgccgccccgttgccgaaacaaaactcgctcttcggacaaaacgccaacgccagggcgagcgagcgaggtgaggtcacctaccagctcccacagtcgcactcccccctcgcgccgtcccgtcgtaggaatggaatgaggccgaggcccctcctcctcctcctcgtcgtcgtcgtcgtcgtcggtgcttctcccgtgacaggcctcccttcctccggtccggtcgccctctgacccaatccgcatacatccaccaaccagctttgatttgcgctgtttccgattgtactcgtgctccgcccgctacgatacaggacaggggaggatggatttgtccaggctcgcctccgtcgccgggcccagccgcgcggccccgcgggcgggcctgcagatcggcgccgccgggaatggcttccgcgtctgctccctgcggcaccgcggcgccgggaacgggcgcctcacgtccgccgccgccctcctccgcggcagcagcgggctcttctacctggctcccgcgcgcgggggccctccccgtctccgcgccagagggcggccgcggtgccagggcagcgactcgttggcctacgtcgacggccccttggaggccgccaagggctccggcgaggtctacgacgacgatgccaccagctcggggcccgacgacgacgacaatgacaagggccccgccgacgtggacggtctccgggagatgctgcagaggtgcaggaacgagctcgaggtggccaggctcaacagcaccatgttcgaggagaaggctcagcggatatccgagtcggccatcgcgctcaaggaccgcgccgaaggcgcccagagggacgtgtccgcggccgtcgccaccgtgcaggaggtcatcgtcaaggaggcggacgccaaggaggccgtccagaaggctaccatggcgctgtcgatggccgaggccaggctgcagctggcgtccgaggcgctggatgccaagcgggggtcggtcgggcccatggaggttagcatcgaaggcgtggaggaggaggcccttgtgtctgctcaggaagagatcaaggattgccgggcagccttgttgcggtgtgaggaggagctggaacgcatccaggaacagaaaatgaacctgcagaaggaggttgataggctcaccgagctcgctgagaaggcccagttggatgcatccaaggccgaagaagatgtcaccaatataatggtgttggctgagcaggcggtggctcttgagatgaaagccacgcagcgtgtcaacgacgcggaggcggtgctgctgaaagcggagaaggtcatatcctcggttgacaccgtggtggagctaacatcacttgctgaagagcagaaaagcgctgaagaggatagcgtttctgaagggtatgagtatagcagcaatggcactgatgatgttcctgtgagggatgaggtgtcaagtatcgagcgtctaatggtaggtgacttgactgttgagggcattgagcagcttgaaccatcccgtgaaatatatgatgaagcaagcagcgataagatgtccgttgagcctcagaaagaagctgagcctgattcagacaagttgaagcaagggaagaagcaggaaatggaacgaaaggagttcaccaaggaaccactgagtgctcaaaaatcactgaagaagagatcatcccgcttcttcccggcatctttcttctcctccaaagctgatggagagtttacacctacatctgtctttcgggggttaatgaaatcagtgcaaaaacaggctcccaagcttgttgttgggatattgcttcttggtgcaggagctgagaagagtcaactatttcagcagcaagaaattgccacaagtattggaaaggtaacctccacgacaaagcccatagttcgtgagatacggcaaattccacagagagtaaagaagctaatagagctcttacctcatcaagaggtaaatgaggaagaagcttcacttttcgacatactgtatttgcttcttgccagtgttatttttgtaccattatttcagaaaatccctggaggcagtcctgttcttggatatcttgctgctggtgtcctcattggtccatatgggctctccatcatccgtaatgtgcatgggacaaaggcaattgcggaattcggagtcgtgttcttactgtttaacattggacttgagctttctgtggaaaggctaagttcgatgaagaagtatgtcttcggcttgggatctgctcaggtgctagctactactgcagctgttggtgtgatagctcatcgttttgctgtgctaccaggaccagcagcaattgttgttgggagtggcttggctctgtcatccacggctgttgtcttgcaagtattgcaagagcgtggtgaaagtacgtcgcgtcatggacgtgccacattttctgtgttattgttccaggatttggctgtggtggtcctgttgatattaatacctctcatatcacctaattcttcaaaaggaggggttggtttccaagcaatagcagaagccatgggaatggctgcagtcaaagcagtagctgctataactgccataattgctggaggtcgtctgttgcttcggcctatttacaagcaaattgctgaaaatcagaatgctgagatattttcagcaaatacactccttgttatttttggcacaagtcttcttacagcccgggctgggttatcgatggcacttggagcttttttggctggtctgttactagcagaaacagagttctccttacaggttgagtcagatatagctccttatcgtggtcttctgttaggacttttctttatgacgatggaaccattttaa

SEQ ID NO: 18777 - DNA, 2735 bp, Zea Mays
gcgcagttggcttttgcctcgtcccctccgccgccccgttgccgaaacaaaactcgctcttcggacaaaacgccaacgccagggcgagcgagcgaggtgaggtcacctaccagctcccacagtcgcactcccccctcgcgccgtcccgtcgtaggaatggaatgaggccgaggcccctcctcctcctcctcgtcgtcgtcgtcgtcgtcggtgcttctcccgtgacaggcctcccttcctccggtccggtcgccctctgacccaatccgcatacatccaccaaccagacaggggaggatggatttgtccaggctcgcctccgtcgccgggcccagccgcgcggccccgcgggcgggcctgcagatcggcgccgccgggaatggcttccgcgtctgctccctgcggcaccgcggcgccgggaacgggcgcctcacgtccgccgccgccctcctccgcggcagcagcgggctcttctacctggctcccgcgcgcgggggccctccccgtctccgcgccagagggcggccgcggtgccagggcagcgactcgttggcctacgtcgacggccccttggaggccgccaagggctccggcgaggtctacgacgacgatgccaccagctcggggcccgacgacgacgacaatgacaagggccccgccgacgtggacggtctccgggagatgctgcagaggtgcaggaacgagctcgaggtggccaggctcaacagcaccatgttcgaggagaaggctcagcggatatccgagtcggccatcgcgctcaaggaccgcgccgaaggcgcccagagggacgtgtccgcggccgtcgccaccgtgcaggaggtcatcgtcaaggaggcggacgccaaggaggccgtccagaaggctaccatggcgctgtcgatggccgaggccaggctgcagctggcgtccgaggcgctggatgccaagcgggggtcggtcgggcccatggaggttagcatcgaaggcgtggaggaggaggcccttgtgtctgctcaggaagagatcaaggattgccgggcagccttgttgcggtgtgaggaggagctggaacgcatccaggaacagaaaatgaacctgcagaaggaggttgataggctcaccgagctcgctgagaaggcccagttggatgcatccaaggccgaagaagatgtcaccaatataatggtgttggctgagcaggcggtggctcttgagatgaaagccacgcagcgtgtcaacgacgcggaggcggtgctgctgaaagcggagaaggtcatatcctcggttgacaccgtggtggagctaacatcacttgctgaagagcagaaaagcgctgaagaggatagcgtttctgaagggtatgagtatagcagcaatggcactgatgatgttcctgtgagggatgaggtgtcaagtatcgagcgtctaatggtaggtgacttgactgttgagggcattgagcagcttgaaccatcccgtgaaatatatgatgaagcaagcagcgataagatgtccgttgagcctcagaaagaagctgagcctgattcagacaagttgaagcaagggaagaagcaggaaatggaacgaaaggagttcaccaaggaaccactgagtgctcaaaaatcactgaagaagagatcatcccgcttcttcccggcatctttcttctcctccaaagctgatggagagtttacacctacatctgtctttcgggggttaatgaaatcagtgcaaaaacaggctcccaagcttgttgttgggatattgcttcttggtgcaggggccttcttcttaaatagagctgagaagagtcaactatttcagcagcaagaaattgccacaagtattggaaaggtaacctccacgacaaagcccatagttcgtgagatacggcaaattccacagagagtaaagaagctaatagagctcttacctcatcaagaggcagtcctgttcttggatatcttgctgctggtgtcctcattggtccatatgggctctccatcatccgtaatgtgcatgggacaaaggcaattgcggaattcggagtcgtgttcttactgtttaacattggacttgagctttctgtggaaaggctaagttcgatgaagaagtatgtcttcggcttgggatctgctcaggtgctagctactactgcagctgttggtgtgatagctcatcgttttgctgtgctaccaggaccagcagcaattgttgttgggagtggcttggctctgtcatccacggctgttgtcttgcaagtattgcaagagcgtggtgaaagtacgtcgcgtcatggacgtgccacattttctgtgttattgttccaggatttggctgtggtggtcctgttgatattaatacctctcatatcacctaattcttcaaaaggaggggttggtttccaagcaatagcagaagccatgggaatggctgcagtcaaagcagtagctgctataactgccataattgctggaggtcgtctgttgcttcggcctatttacaagcaaattgctgaaaatcagaatgctgagatattttcagcaaatacactccttgttatttttggcacaagtcttcttacagcccgggctgggttatcgatggcacttggagcttttttggctggtctgttactagcagaaacagagttctccttacaggttgagtcagatatagctccttatcgtggtcttctgttaggacttttctttatgacgatggaaccattttaa

SEQ ID NO: 18778 - DNA, 2642 bp, Zea Mays
gcgcagttggcttttgcctcgtcccctccgccgccccgttgccgaaacaaaactcgctcttcggacaaaacgccaacgccagggcgagcgagcgaggtgaggtcacctaccagctcccacagtcgcactcccccctcgcgccgtcccgtcgtaggaatggaatgaggccgaggcccttgtgtctgctcaggaagagatcaaggattgccgggcagccttgttgcggtgtgaggaggagctggaacgcatccaggaacagaaaatgaacctgcagaaggaggttgataggctcaccgagctcgctgagaaggcccagttggatgcatccaaggccgaagaagatgtcaccaatataatggtgttggctgagcaggcggtggctcttgagatgaaagccacgcagcgtgtcaacgacgcggaggcggtgctgctgaaagcggagaaggtcatatcctcggttgacaccgtggtggagctaacatcacttgctgaagagcagaaaagcgctgaagaggatagcgtttctgaagggtatgagtatagcagcaatggcactgatgatgttcctgtgagggatgaggtgtcaagtatcgagcgtctaatggtaggtgacttgactgttgagggcattgagcagcttgaaccatcccgtgaaatatatgatgaagcaagcagcgataagatgtccgttgagcctcagaaagaagctgagcctgattcagacaagttgaagcaagggaagaagcaggaaatggaacgaaaggagttcaccaaggaaccactgagtgctcaaaaatcactgaagaagagatcatcccgcttcttcccggcatctttcttctcctccaaagctgatggagagtttacacctacatctgtctttcgggggttaatgaaatcagtgcaaaaacaggctcccaagcttgttgttgggatattgcttcttggtgcaggggccttcttcttaaatagagctgagaagagtcaactatttcagcagcaagaaattgccacaagtattggaaaggtaacctccacgacaaagcccatagttcgtgagatacggcaaattccacagagagtaaagaagctaatagagctcttacctcatcaagaggtaaatgaggaagaagcttcacttttcgacatactgtatttgcttcttgccagtgttatttttgtaccattatttcagaaaatccctggaggcagtcctgttcttggatatcttgctgctggtgtcctcattggtccatatgggctctccatcatccgtaatgtgcatgggacaaaggcaattgcggaattcggagtcgtgttcttactgtttaacattggacttgagctttctgtggaaaggctaagttcgatgaagaagtatgtcttcggcttgggatctgctcaggtgctagctactactgcagctgttggtgtgatagctcatcgttttgctgtgctaccaggaccagcagcaattgttgttgggagtggcttggctctgtcatccacggctgttgtcttgcaagtattgcaagagcgtggtgaaagtacgtcgcgtcatggacgtgccacattttctgtgttattgttccaggatttggctgtggtggtcctgttgatattaatacctctcatatcacctaattcttcaaaaggaggggttggtttccaagcaatagcagaagccatgggaatggctgcagtcaaagcagtagctgctataactgccataattgctggaggtcgtctgttgcttcggcctatttacaagcaaattgctgaaaatcagaatgctgagatattttcagcaaatacactccttgttatttttggcacaagtcttcttacagcccgggctgggttatcgatggcacttggagcttttttggctggtctgttactagcagaaacagagttctccttacaggttgagtcagatatagctccttatcgtggtcttctgttaggacttttctttatgacggttggaatgtctattgacccaaagctgcttctgtcaaacttcccaatgatctctatgatattgggtctcttgataattggaaagacattgttggttacatttgtgggcagggtatttggggtttctactatagctgccattcgtgttggtctcttgcttgcgcctggtggtgagtttgcttttgttgcctttggagaagctgtcaaccagggtcttctatcacctcaattatcatcgttactgtttttagtcgttggcatttcaatggctctgacaccatggttagctgctggagggcagtttctggcatcaaaatttgagcagcatgatgtgaggagtttattgcctgtggaaagtgagactgacgatttgcacgaccatattattatattaggctttggacgtgttgggcagatcgttgcgcaactcctgtcagagcggttaattccttttgttgcccttgatgttagaagtgatcgggttgcagttgggcgtgcacttgaccttccggtatattttggggatgctggaagcagagagggtactgcacaaagttggagctgaaagagcttgtgctgctgcaattactttggatacccctggtgcaaactatagagctgtctgggcattgaacaaatatttcccaaatgtgaagaca

SEQ ID NO: 18779 - DNA, 3357 bp, Zea Mays
gcgcagttggcttttgcctcgtcccctccgccgccccgttgccgaaacaaaactcgctcttcggacaaaacgccaacgccagggcgagcgagcgaggtgaggtcacctaccagctcccacagtcgcactcccccctcgcgccgtcccgtcgtaggaatggaatgaggccgaggcccctcctcctcctcctcgtcgtcgtcgtcgtcgtcggtgcttctcccgtgacaggcctcccttcctccggtccggtcgccctctgacccaatccgcatacatccaccaaccagacaggggaggatggatttgtccaggctcgcctccgtcgccgggcccagccgcgcggccccgcgggcgggcctgcagatcggcgccgccgggaatggcttccgcgtctgctccctgcggcaccgcggcgccgggaacgggcgcctcacgtccgccgccgccctcctccgcggcagcagcgggctcttctacctggctcccgcgcgcgggggccctccccgtctccgcgccagagggcggccgcggtgccagggcagcgactcgttggcctacgtcgacggccccttggaggccgccaagggctccggcgaggtctacgacgacgatgccaccagctcggggcccgacgacgacgacaatgacaagggccccgccgacgtggacggtctccgggagatgctgcagaggtgcaggaacgagctcgaggtggccaggctcaacagcaccatgttcgaggagaaggctcagcggatatccgagtcggccatcgcgctcaaggaccgcgccgaaggcgcccagagggacgtgtccgcggccgtcgccaccgtgcaggaggtcatcgtcaaggaggcggacgccaaggaggccgtccagaaggctaccatggcgctgtcgatggccgaggccaggctgcagctggcgtccgaggcgctggatgccaagcgggggtcggtcgggcccatggaggttagcatcgaaggcgtggaggaggaggcccttgtgtctgctcaggaagagatcaaggattgccgggcagccttgttgcggtgtgaggaggagctggaacgcatccaggaacagaaaatgaacctgcagaaggaggttgataggctcaccgagctcgctgagaaggcccagttggatgcatccaaggccgaagaagatgtcaccaatataatggtgttggctgagcaggcggtggctcttgagatgaaagccacgcagcgtgtcaacgacgcggaggcggtgctgctgaaagcggagaaggtcatatcctcggttgacaccgtggtggagctaacatcacttgctgaagagcagaaaagcgctgaagaggatagcgtttctgaagggtatgagtatagcagcaatggcactgatgatgttcctgtgagggatgaggtgtcaagtatcgagcgtctaatggtaggtgacttgactgttgagggcattgagcagcttgaaccatcccgtgaaatatatgatgaagcaagcagcgataagatgtccgttgagcctcagaaagaagctgagcctgattcagacaagttgaagcaagggaagaagcaggaaatggaacgaaaggagttcaccaaggaaccactgagtgctcaaaaatcactgaagaagagatcatcccgcttcttcccggcatctttcttctcctccaaagctgatggagagtttacacctacatctgtctttcgggggttaatgaaatcagtgcaaaaacaggctcccaagcttgttgttgggatattgcttcttggtgcaggggccttcttcttaaatagagctgagaagagtcaactatttcagcagcaagaaattgccacaagtattggaaaggtaacctccacgacaaagcccatagttcgtgagatacggcaaattccacagagagtaaagaagctaatagagctcttacctcatcaagaggtaaatgaggaagaagcttcacttttcgacatactgtatttgcttcttgccagtgttatttttgtaccattatttcagaaaatccctggaggcagtcctgttcttggatatcttgctgctggtgtcctcattggtccatatgggctctccatcatccgtaatgtgcatgggacaaaggcaattgcggaattcggagtcgtgttcttactgtttaacattggacttgagctttctgtggaaaggctaagttcgatgaagaagtatgtcttcggcttgggatctgctcaggtgctagctactactgcagctgttggtgtgatagctcatcgttttgctgtgctaccaggaccagcagcaattgttgttgggagtggcttggctctgtcatccacggctgttgtcttgcaagtattgcaagagcgtggtgaaagtacgtcgcgtcatggacgtgccacattttctgtgttattgttccaggatttggctgtggtggtcctgttgatattaatacctctcatatcacctaattcttcaaaaggaggggttggtttccaagcaatagcagaagccatgggaatggctgcagtcaaagcagtagctgctataactgccataattgctggaggtcgtctgttgcttcggcctatttacaagcaaattgctgaaaatcagaatgctgagatattttcagcaaatacactccttgttatttttggcacaagtcttcttacagcccgggctgggttatcgatggcacttggagcttttttggctggtctgttactagcagaaacagagttctccttacaggttggaatgtctattgacccaaagctgcttctgtcaaacttcccaatgatctctatgatattgggtctcttgataattggaaagacattgttggttacatttgtgggcagggtatttggggtttctactatagctgccattcgtgttggtctcttgcttgcgcctggtggtgagtttgcttttgttgcctttggagaagctgtcaaccagggtcttctatcacctcaattatcatcgttactgtttttagtcgttggcatttcaatggctctgacaccatggttagctgctggagggcagtttctggcatcaaaatttgagcagcatgatgtgaggagtttattgcctgtggaaagtgagatcgttgcgcaactcctgtcagagcggttaattccttttgttgcccttgatgttagaagtgatcgggttgcagttgggcgtgcacttgaccttccggtatattttggggatgctggaagcagagaggtactgcacaaagttggagctgaaagagcttgtgctgctgcaattactttggatacccctggtgcaaactatagagctgtctgggcattgaacaaatatttcccaaatgtgaagaca

SEQ ID NO: 18780 - DNA, 4373 bp, Zea Mays
gcgcagttggcttttgcctcgtcccctccgccgccccgttgccgaaacaaaactcgctcttcggacaaaacgccaacgccagggcgagcgagcgaggtgaggtcacctaccagctcccacagtcgcactcccccctcgcgccgtcccgtcgtaggaatggaatgaggccgaggcccctcctcctcctcctcgtcgtcgtcgtcgtcgtcggtgcttctcccgtgacaggcctcccttcctccggtccggtcgccctctgacccaatccgcatacatccaccaaccagctttgatttgcgctgtttccgattgtactcgtgctccgcccgctacgatacaggacaggggaggatggatttgtccaggctcgcctccgtcgccgggcccagccgcgcggccccgcgggcgggcctgcagatcggcgccgccgggaatggcttccgcgtctgctccctgcggcaccgcggcgccgggaacgggcgcctcacgtccgccgccgccctcctccgcggcagcagcgggctcttctacctggctcccgcgcgcgggggccctccccgtctccgcgccagagggcggccgcggtgccagggcagcgactcgttggcctacgtcgacggccccttggaggccgccaagggctccggcgaggtctacgacgacgatgccaccagctcggggcccgacgacgacgacaatgacaagggccccgccgacgtggacggtctccgggagatgctgcagaggtgcaggaacgagctcgaggtggccaggctcaacagcaccatgttcgaggagaaggctcagcggatatccgagtcggccatcgcgctcaaggaccgcgccgaaggcgcccagagggacgtgtccgcggccgtcgccaccgtgcaggaggtcatcgtcaaggaggcggacgccaaggaggccgtccagaaggctaccatggcgctgtcgatggccgaggccaggctgcagctggcgtccgaggcgctggatgccaagcgggggtcggtcgggcccatggaggttagcatcgaaggcgtggaggaggaggcccttgtgtctgctcaggaagagatcaaggattgccgggcagccttgttgcggtgtgaggaggagctggaacgcatccaggaacagaaaatgaacctgcagaaggaggttgataggctcaccgagctcgctgagaaggcccagttggatgcatccaaggccgaagaagatgtcaccaatataatggtgttggctgagcaggcggtggctcttgagatgaaagccacgcagcgtgtcaacgacgcggaggcggtgctgctgaaagcggagaaggtcatatcctcggttgacaccgtggtggagctaacatcacttgctgaagagcagaaaagcgctgaagaggatagcgtttctgaagggtatgagtatagcagcaatggcactgatgatgttcctgtgagggatgaggtgtcaagtatcgagcgtctaatggtaggtgacttgactgttgagggcattgagcagcttgaaccatcccgtgaaatatatgatgaagcaagcagcgataagatgtccgttgagcctcagaaagaagctgagcctgattcagacaagttgaagcaagggaagaagcaggaaatggaacgaaaggagttcaccaaggaaccactgagtgctcaaaaatcactgaagaagagatcatcccgcttcttcccggcatctttcttctcctccaaagctgatggagagtttacacctacatctgtctttcgggggttaatgaaatcagtgcaaaaacaggctcccaagcttgttgttgggatattgcttcttggtgcaggggccttcttcttaaatagagctgagaagagtcaactatttcagcagcaagaaattgccacaagtattggaaaggtaacctccacgacaaagcccatagttcgtgagatacggcaaattccacagagagtaaagaagctaatagagctcttacctcatcaagaggtaaatgaggaagaagcttcacttttcgacatactgtatttgcttcttgccagtgttatttttgtaccattatttcagaaaatccctggaggcagtcctgttcttggatatcttgctgctggtgtcctcattggtccatatgggctctccatcatccgtaatgtgcatgggacaaaggcaattgcggaattcggagtcgtgttcttactgtttaacattggacttgagctttctgtggaaaggctaagttcgatgaagaagtatgtcttcggcttgggatctgctcaggtgctagctactactgcagctgttggtgtgatagctcatcgttttgctgtgctaccaggaccagcagcaattgttgttgggagtggcttggctctgtcatccacggctgttgtcttgcaagtattgcaagagcgtggtgaaagtacgtcgcgtcatggacgtgccacattttctgtgttattgttccaggatttggctgtggtggtcctgttgatattaatacctctcatatcacctaattcttcaaaaggaggggttggtttccaagcaatagcagaagccatgggaatggctgcagtcaaagcagtagctgctataactgccataattgctggaggtcgtctgttgcttcggcctatttacaagcaaattgctgaaaatcagaatgctgagatattttcagcaaatacactccttgttatttttggcacaagtcttcttacagcccgggctgggttatcgatggcacttggagcttttttggctggtctgttactagcagaaacagagttctccttacaggttgagtcagatatagctccttatcgtggtcttctgttaggacttttctttatgacggttggaatgtctattgacccaaagctgcttctgtcaaacttcccaatgatctctatgatattgggtctcttgataattggaaagacattgttggttacatttgtgggcagggtatttggggtttctactatagctgccattcgtgttggtctcttgcttgcgcctggtggtgagtttgcttttgttgcctttggagaagctgtcaaccagggtcttctatcacctcaattatcatcgttactgtttttagtcgttggcatttcaatggctctgacaccatggttagctgctggagggcagtttctggcatcaaaatttgagcagcatgatgtgaggagtttattgcctgtggaaagtgagactgacgatttgcacgaccatattattatattaggctttggacgtgttgggcagatcgttgcgcaactcctgtcagagcggttaattccttttgttgcccttgatgttagaagtgatcgggttgcagttgggcgtgcacttgaccttccggtatattttggggatgctggaagcagagaggtactgcacaaagttggagctgaaagagcttgtgctgctgcaattactttggatacccctggtgcaaactatagagctgtctgggcattgaacaaatatttcccaaatgtgaagacatttgttagagcacatgatgttgatcatggtgttaatttggagaaagctggtgcaacagcggttgtccctgagaccttggagccaagtcttcagctagctgctgctgttcttgcacaagcaaaactcccaatgtcagagattcaggaaagcatcaacgagttccggaatcgtcatctgtcagagcttacagagttgtgtgctacgtcaggaaattctcttggctatgggttttccagagttatgtccaaatcgaagtctatcagctccgatgatgaaagcgaaacagtggatggcgcactagcaatttgaagacgattagataaaatgggatcccttgatagtactagatcgattgcactgttagtagataagcttgttgcatgtagaaaaatggaataaaaattaatgcaagagctgtcacaaaaatcggcgtgcaattttgtatgttagagtacttatatatttcttctctcccccaaaaaaattgtttgcatacaactcttcacaaagaaaaataatacactctagcagtgcacgtgaaaatgagacccttgtaagcagggaagaaaatagatgtcagaatgctgaatacttcccatgcttgctcaaaggagcatatggtacagtcaggccagttggacggttgggacctggctttgggtatgtttagtacaatttttgggtgtgtttgggacagttttttaaagagcttttctaaaaatctagaattttggataatctaactgtcacaagaatttagatatcgctagttgatctattcaaacgctgggttaagatcggattgtgggtcatatgacacggtctacgtttgacctgtgcatagggttaag

SEQ ID NO: 18781 - DNA, 4701 bp, Zea Mays
gcgcagttggcttttgcctcgtcccctccgccgccccgttgccgaaacaaaactcgctcttcggacaaaacgccaacgccagggcgagcgagcgaggtgaggtcacctaccagctcccacagtcgcactcccccctcgcgccgtcccgtcgtaggaatggaatgaggccgaggcccctcctcctcctcctcgtcgtcgtcgtcgtcgtcggtgcttctcccgtgacaggcctcccttcctccggtccggtcgccctctgacccaatccgcatacatccaccaaccagctttgatttgcgctgtttccgattgtactcgtgctccgcccgctacgatacaggacaggggaggatggatttgtccaggctcggctccggcgaggtctacgacgacgatgccaccagctcggggcccgacgacgacgacaatgacaagggccccgccgacgtggacggtctccgggagatgctgcagaggtgcaggaacgagctcgaggtggccaggctcaacagcaccatgttcgaggagaaggctcagcggatatccgagtcggccatcgcgctcaaggaccgcgccgaaggcgcccagagggacgtgtccgcggccgtcgccaccgtgcaggaggtcatcgtcaaggaggcggacgccaaggaggccgtccagaaggctaccatggcgctgtcgatggccgaggccaggctgcagctggcgtccgaggcgctggatgccaagcgggggtcggtcgggcccatggaggttagcatcgaaggcgtggaggaggaggcccttgtgtctgctcaggaagagatcaaggattgccgggcagccttgttgcggtgtgaggaggagctggaacgcatccaggaacagaaaatgaacctgcagaaggaggttgataggctcaccgagctcgctgagaaggcccagttggatgcatccaaggccgaagaagatgtcaccaatataatggtgttggctgagcaggcggtggctcttgagatgaaagccacgcagcgtgtcaacgacgcggaggcggtgctgctgaaagcggagaaggtcatatcctcggttgacaccgtggtggagctaacatcacttgctgaagagcagaaaagcgctgaagaggatagcgtttctgaagggtatgagtatagcagcaatggcactgatgatgttcctgtgagggatgaggtgtcaagtatcgagcgtctaatggtaggtgacttgactgttgagggcattgagcagcttgaaccatcccgtgaaatatatgatgaagcaagcagcgataagatgtccgttgagcctcagaaagaagctgagcctgattcagacaagttgaagcaagggaagaagcaggaaatggaacgaaaggagttcaccaaggaaccactgagtgctcaaaaatcactgaagaagagatcatcccgcttcttcccggcatctttcttctcctccaaagctgatggagagtttacacctacatctgtctttcgggggttaatgaaatcagtgcaaaaacaggctcccaagcttgttgttgggatattgcttcttggtgcaggggccttcttcttaaatagagctgagaagagtcaactatttcagcagcaagaaattgccacaagtattggaaaggtaacctccacgacaaagcccatagttcgtgagatacggcaaattccacagagagtaaagaagctaatagagctcttacctcatcaagaggtaaatgaggaagaagcttcacttttcgacatactgtatttgcttcttgccagtgttatttttgtaccattatttcagaaaatccctggaggcagtcctgttcttggatatcttgctgctggtgtcctcattggtccatatgggctctccatcatccgtaatgtgcatgggacaaaggcaattgcggaattcggagtcgtgttcttactgtttaacattggacttgagctttctgtggaaaggctaagttcgatgaagaagtatgtcttcggcttgggatctgctcaggtgctagctactactgcagctgttggtgtgatagctcatcgttttgctgtgctaccaggaccagcagcaattgttgttgggagtggcttggctctgtcatccacggctgttgtcttgcaagtattgcaagagcgtggtgaaagtacgtcgcgtcatggacgtgccacattttctgtgttattgttccaggatttggctgtggtggtcctgttgatattaatacctctcatatcacctaattcttcaaaaggaggggttggtttccaagcaatagcagaagccatgggaatggctgcagtcaaagcagtagctgctataactgccataattgctggaggtcgtctgttgcttcggcctatttacaagcaaattgctgaaaatcagaatgctgagatattttcagcaaatacactccttgttatttttggcacaagtcttcttacagcccgggctgggttatcgatggcacttggagcttttttggctggtctgttactagcagaaacagagttctccttacaggttgagtcagatatagctccttatcgtggtcttctgttaggacttttctttatgacggttggaatgtctattgacccaaagctgcttctgtcaaacttcccaatgatctctatgatattgggtctcttgataattggaaagacattgttggttacatttgtgggcagggtatttggggtttctactatagctgccattcgtgttggtctcttgcttgcgcctggtggtgagtttgcttttgttgcctttggagaagctgtcaaccagggtcttctatcacctcaattatcatcgttactgtttttagtcgttggcatttcaatggctctgacaccatggttagctgctggagggcagtttctggcatcaaaatttgagcagcatgatgtgaggagtttattgcctgtggaaagtgagactgacgatttgcacgaccatattattatattaggctttggacgtgttgggcagatcgttgcgcaactcctgtcagagcggttaattccttttgttgcccttgatgttagaagtgatcgggttgcagttgggcgtgcacttgaccttccggtatattttggggatgctggaagcagagaggtactgcacaaagttggagctgaaagagcttgtgctgctgcaattactttggatacccctggtgcaaactatagagctgtctgggcattgaacaaatatttcccaaatgtgaagacatttgttagagcacatgatgttgatcatggtgttaatttggagaaagctggtgcaacagcggttgtccctgagaccttggagccaagtcttcagctagctgctgctgttcttgcacaagcaaaactcccaatgtcagagattcaggaaagcatcaacgagttccggaatcgtcatctgtcagagcttacagaggtgtgtaattatgtcatcattcagtggtctgctaaacttattgatgatatttgcaacagaaagcctctgacaaacgaagagataagaaatgaaccatggcaaaccaaatttccgaatggtagtaatccaagggtagctggtgtagaatctgtagatgggttgaattaagcttgtgatgatagttacatgttagtaactagttacattgttacatgattaaacactagccatttgataactggaacggcgatgatctacagtataatgatccttctggcaatttgcccggtgaagccaaagcccaaaaatcgaattagtagatatcatatactaaaagaaaaaataggtgcagttcgtttctaataatacatgtagtgtaatagtcatccaatttttttttttaaatatgcaagtcttagatgttttttaaggttcttgagttttgtggttttttaaagtccatgtattatcacaccatgtggccatttttttttctttcgggttcatacaatctgtgctgcattcatgcaatataatattgagcaatatcatcatttttttgtaactacctgatgacctcctgttgttcccttcgcagttgtgtgctacgtcaggaaattctcttggctatgggttttccagagttatgtccaaatcgaagtctatcagctccgatgatgaaagcgaaacagtggatggcgcactagcaatttgaagacgattagataaaatgggatcccttgatagtactagatcgattgcactgttagtagataagcttgttgcatgtagaaaaatggaataaaaattaatgcaagagctgtcacaaaaatcggcgtgcaattttgtatgttagagtacttatatatttcttctctcccccaaaaaaattgtttgcatacaactcttcacaaagaaaaataatacactctagcagtgcacgtgaaaatgagacccttgtaagcagggaagaaaatagatgtcagaatgctgaatacttcccatgcttgctcaaaggagcatatggtacagtcaggccagttggacggttgggacctggctttgggtatgtttagtacaatttttgggtgtgtttgggacagttttttaaagagcttttctaaaaatctagaattttggataatctaactgtcacaagaatttagatatcgctagttgatctattcaaacgctgggttaagatcggattgtgggtcatatgacacggtctacgtttgacctgtgcatagggttaag

SEQ ID NO: 18782 - DNA, 3149 bp, Zea Mays
atggatttgtccaggctcgcctccgtcgccgggcccagccgcgcggccccgcgggcgggcctgcagatcggcgccgccgggaatggcttccgcgtctgctccctgcggcaccgcggcgccgggaacgggcgcctcacgtccgccgccgccctcctccgcggcagcagcgggctcttctacctggctcccgcgcgcgggggccctccccgtctccgcgccagagggcggccgcggtgccagggcagcgactcgttggcctacgtcgacggccccttggaggccgccaagggctccggcgaggtctacgacgacgatgccaccagctcggggcccgacgacgacgacaatgacaagggccccgccgacgtggacggtctccgggagatgctgcagaggtgcaggaacgagctcgaggtggccaggctcaacagcaccatgttcgaggagaaggctcagcggatatccgagtcggccatcgcgctcaaggaccgcgccgaaggcgcccagagggacgtgtccgcggccgtcgccaccgtgcaggaggtcatcgtcaaggaggcggacgccaaggaggccgtccagaaggctaccatggcgctgtcgatggccgaggccaggctgcagctggcgtccgaggcgctggatgccaagcgggggtcggtcgggcccatggaggttagcatcgaaggcgtggaggaggaggcccttgtgtctgctcaggaagagatcaaggattgccgggcagccttgttgcggtgtgaggaggagctggaacgcatccaggaacagaaaatgaacctgcagaaggaggttgataggctcaccgagctcgctgagaaggcccagttggatgcatccaaggccgaagaagatgtcaccaatataatggtgttggctgagcaggcggtggctcttgagatgaaagccacgcagcgtgtcaacgacgcggaggcggtgctgctgaaagcggagaaggtcatatcctcggttgacaccgtggtggagctaacatcacttgctgaagagcagaaaagcgctgaagaggatagcgtttctgaagggtatgagtatagcagcaatggcactgatgatgttcctgtgagggatgaggtgtcaagtatcgagcgtctaatggtaggtgacttgactgttgagggcattgagcagcttgaaccatcccgtgaaatatatgatgaagcaagcagcgataagatgtccgttgagcctcagaaagaagctgagcctgattcagacaagttgaagcaagggaagaagcaggaaatggaacgaaaggagttcaccaaggaaccactgagtgctcaaaaatcactgaagaagagatcatcccgcttcttcccggcatctttcttctcctccaaagctgatggagagtttacacctacatctgtctttcgggggttaatgaaatcagtgcaaaaacaggctcccaagcttgttgttgggatattgcttcttggtgcaggggccttcttcttaaatagagctgagaagagtcaactatttcagcagcaagaaattgccacaagtattggaaaggtaacctccacgacaaagcccatagttcgtgagatacggcaaattccacagagagtaaagaagctaatagagctcttacctcatcaagaggtaaatgaggaagaagcttcacttttcgacatactgtatttgcttcttgccagtgttatttttgtaccattatttcagaaaatccctggaggcagtcctgttcttggatatcttgctgctggtgtcctcattggtccatatgggctctccatcatccgtaatgtgcatgggacaaaggcaattgcggaattcggagtcgtgttcttactgtttaacattggacttgagctttctgtggaaaggctaagttcgatgaagaagtatgtcttcggcttgggatctgctcaggtgctagctactactgcagctgttggtgtgatagctcatcgttttgctgtgctaccaggaccagcagcaattgttgttgggagtggcttggctctgtcatccacggctgttgtcttgcaagtattgcaagagcgtggtgaaagtacgtcgcgtcatggacgtgccacattttctgtgttattgttccaggatttggctgtggtggtcctgttgatattaatacctctcatatcacctaattcttcaaaaggaggggttggtttccaagcaatagcagaagccatgggaatggctgcagtcaaagcagtagctgctataactgccataattgctggaggtcgtctgttgcttcggcctatttacaagcaaattgctgaaaatcagaatgctgagatattttcagcaaatacactccttgttatttttggcacaagtcttcttacagcccgggctgggttatcgatggcacttggagcttttttggctggtctgttactagcagaaacagagttctccttacaggttgagtcagatatagctccttatcgtggtcttctgttaggacttttctttatgacggttggaatgtctattgacccaaagctgcttctgtcaaacttcccaatgatctctatgatattgggtctcttgataattggaaagacattgttggttacatttgtgggcagggtatttggggtttctactatagctgccattcgtgttggtctcttgcttgcgcctggtggtgagtttgcttttgttgcctttggagaagctgtcaaccagggtcttctatcacctcaattatcatcgttactgtttttagtcgttggcatttcaatggctctgacaccatggttagctgctggagggcagtttctggcatcaaaatttgagcagcatgatgtgaggagtttattgcctgtggaaagtgagactgacgatttgcacgaccatattattatattaggctttggacgtgttgggcagagcggttaattccttttgttgcccttgatgttagaagtgatcgggttgcagttgggcgtgcacttgaccttccggtatattttggggatgctggaagcagagaggtactgcacaaagttggagctgaaagagcttgtgctgctgcaattactttggatacccctggtgcaaactatagagctgtctgggcattgaacaaatatttcccaaatgtgaagaca

SEQ ID NO: 18783 - DNA, 211 bp, Zea Mays
aggagtttattgcctgtggaaagtgagtgatcgggttgcagttgggcgtgcacttgaccttccggtatattttggggatgctggaagcagagaggtactgcacaaagttggagctgaaagagcttgtgctgctgcaattactttggatacccctggtgcaaactatagagctgtctgggcattgaacaaatatttcccaaatgtgaagaca

SEQ ID NO: 18784 - DNA, 1290 bp, Zea Mays
aaagatgagaacaaaaaatctaaaatccaatcagttcaggtatcagctagtgcactagccattttagactgacgatttgcacgaccatattattatattaggctttggacgtgttgggcagatcgttgcgcaactcctgtcagagcggttaattccttttgttgcccttgatgttagaagtgatcgggttgcagttgggcgtgcacttgaccttccggtatattttggggatgctggaagcagagaggtagggagagttcggttataatttaatatcacatatagcttgtggagagtactgttctaaattgaattttgataggtactgcacaaagttggagctgaaagagcttgtgctgctgcaattactttggatacccctggtgcaaactatagagctgtctgggcattgaacaaatatttcccaaatgtgaagacatttgttagagcacatgatgttgatcatggtgttaatttggagaaagctggtgcaacagcggttgtccctgagaccttggagccaagtcttcagctagctgctgctgttcttgcacaagcaaaactcccaatgtcagagattcaggaaagcatcaacgagttccggaatcgtcatctgtcagagcttacagagttgtgtgctacgtcaggaaattctcttggctatgggttttccagagttatgtccaaatcgaagtctatcagctccgatgatgaaagcgaaacagtggatggcgcactagcaatttgaagacgattagataaaatgggatcccttgatagtactagatcgattgcactgttagtagataagcttgttgcatgtagaaaaatggaataaaaattaatgcaagagctgtcacaaaaatcggcgtgcaattttgtatgttagagtacttatatatttcttctctcccccaaaaaaattgtttgcatacaactcttcacaaagaaaaataatacactctagcagtgcacgtgaaaatgagacccttgtaagcagggaagaaaatagatgtcagaatgctgaatacttcccatgcttgctcaaaggagcatatggtacagtcaggccagttggacggttgggacctggctttgggtatgtttagtacaatttttgggtgtgtttgggacagttttttaaagagcttttctaaaaatctagaattttggataatctaactgtcacaagaatttagatatcgctagttgatctattcaaacgctgggttaagatcggattgtgggtcatatgacacggtctacgtttgacctgtgcatagggttaag

SEQ ID NO: 18785 - DNA, 1865 bp, Zea Mays
gctggtcttacttgccaacgccaaggcccagctcgagtcgatccgcccgacatcctgggtgtccttcacacacatgcggcgttaggtgatgacgagcttgcctgagaggggagaatcacctgtgccgccactcgattctctgcgccaggactctgccgtgaccgtcctagcggctgccgccgttgcctcttcctccgctggctccgatcgcaaggaagacagcggctccaggcagcccaaggcctccatcctgtccggcgtcttctctcccccttttgccatattcgaggggcagcagcagggctcctcgtcgccggcgtgcgacgccaggtcgacaaagtcgtcctcagggtcctatggtttatccaggatcctgaggaggttcgtgggcagcggctccatgtggcgacttctggggtgcggcagggtcttgacctccagtgacgtgtggttccttggtaaatgctataaggtgtcgcctgaagaagaggagtctggcgactcggagtccgacagcgggcatgctgcgtttctggaagatttctcttccaggatatggatcacttaccggaaaggctttgatgcaatatctgattccaagctaactagtgatgtgaactggggatgcatggttagaagcagtcaaatgctggttgctcaggcgctgatttttcaccaccttggaagatcttggagaaagcccccagagaagccatacaacccagattatataggggtcttacacctattcggtgattctgaagcttgtgctttctctattcacaatttacttcaagctggaaggaattatggtctggctgctggatcatggttgggtccatatgctatgtgccgggcatggcagacccttattcgcacaaatagagagcaagctgatgctgtagatgggaaggaaaatttccctatggcgctgtatgtggtttcgggtgatgaagatggcgaaagaggtggagctccagttgtttgcattgatgttgctgctcagctttgctctgatttcaacaaaggaccatctacatggtcacctattcttttgttagttcctctggttcttggccttgacaaaattaacccaaggtacatcccattactaaaggagacatttatgttcccacaaagcttgggcattttaggtggaaaacctggtacatcaacatacattgctggggtacaggatgatagggctctctacctagatccccatgaagttcagatgacggttgacattgcactggataacttggaggcagacacttcctcataccactgcagcgttgtccgagccttagctctggaacaaatagatccctccctggctattggtttttactgtcgtgacaaagacgactttgatgatttctgttctcgggcctctgagttggcggagaaggccaatggcgcgccactctttactgttgtgcagtcaatcgagccatcgaaacaaatgtataaacaggatgatggactgggttgttctggcagtagcatggccaatgacgacgaccttgatggctctggtgaagcagaagagtggcagatcctttagacgaggctaagacatgttgggctgaagaaaaaaaaacttgcattgaaaatgttgtctgaatgccctcgtctgcgtgtgaatagaggggattatttgtgtgatctcggggtggaaatgttcagaacatacactcgtagtcgtggatgataataattaaatgtatttattattccatattctaacatcgttttaccacggcgtggttgtttctcaattgttggctacagttgcacctgccaaaaagtttgtggtgttggtatgttacatttgcaatgccaacatatcgctgtttgatgtg

SEQ ID NO: 18786 - DNA, 1548 bp, Zea Mays
gagtcgatccgcccgtacgtctctctcttgttcctctccggcttttccttcccctccgcctccgccacgccacctcccctcccctcccgccgtgcgccccgatccctcgccgccccacgccggcctcatctcgccgaggactggatcgccggggggtgtcgcctgaagaagaggagtctggcgactcggagtccgacagcgggcatgctgcgtttctggaagatttctcttccaggatatggatcacttaccggaaaggctttgatgcaatatctgattccaagctaactagtgatgtgaactggggatgcatggttagaagcagtcaaatgctggttgctcaggcgctgatttttcaccaccttggaagatcttggagaaagcccccagagaagccatacaacccagattatataggggtcttacacctattcggtgattctgaagcttgtgctttctctattcacaatttacttcaagctggaaggaattatggtctggctgctggatcatggttgggtccatatgctatgtgccgggcatggcagacccttattcgcacaaatagagagcaagctgatgctgtagatgggaaggaaaatttccctatggcgctgtatgtggtttcgggtgatgaagatggcgaaagaggtggagctccagttgtttgcattgatgttgctgctcagctttgctctgatttcaacaaaggaccatctacatggtcacctattcttttgttagttcctctggttcttggccttgacaaaattaacccaaggtacatcccattactaaaggagacatttatgttcccacaaagcttgggcattttaggtggaaaacctggtacatcaacatacattgctggggtacaggatgatagggctctctacctagatccccatgaagttcagatgacggttgacattgcactggataacttggaggcagacacttcctcataccactgcagcgttgtccgagccttagctctggaacaaatagatccctccctggctattggtttttactgtcgtgacaaagacgactttgatgatttctgttctcgggcctctgagttggcggagaaggccaatggcgcgccactctttactgttgtgcagtcaatcgagccatcgaaacaaatgtataaacaggatgatggactgggttgttctggcagtagcatggccaatgacgacgaccttgatggctctggtgaagcagaagagtggcagatcctttagacgaggctaagacatgttgggctgaagaaaaaaaaacttgcattgaaaatgttgtctgaatgccctcgtctgcgtgtgaatagaggggattatttgtgtgatctcggggtggaaatgttcagaacatacactcgtagtcgtggatgataataattaaatgtatttattattccatattctaacatcgttttaccacggcgtggttgtttctcaattgttggctacagttgcacctgccaaaaagtttgtggtgttggtatgttacatttgcaatgccaacatatcgctgtttgatgtg

SEQ ID NO: 18787 - DNA, 1809 bp, Zea Mays
cacatgttgaatctgggactgcttcggttctgtggtctcctccgctgacctagtcgagcacggcgcttccccgctgggacatcctgggtgtccttcacacacatgcggcgttaggtgatgacgagcttgcctgagaggggagaatcacctgtgccgccactcgattctctgcgccaggactctgccgtgaccgtcctagcggctgccgccgttgcctcttcctccgctggctccgatcgcaaggaagacagcggctccaggcagcccaaggcctccatcctgtccggcgtcttctctcccccttttgccatattcgaggggcagcagcagggctcctcgtcgccggcgtgcgacgccaggtcgacaaagtcgtcctcagggtcctatggtttatccaggatcctgaggaggttcgtgggcagcggctccatgtggcgacttctggggtgcggcagggtcttgacctccagtgacgtgtggttccttggtaaatgctataaggtgtcgcctgaagaagaggagtctggcgactcggagtccgacagcgggcatgctgcgtttctggaagatttctcttccaggatatggatcacttaccggaaaggctttgatgcaatatctgattccaagctaactagtgatgtgaactggggatgcatggttagaagcagtcaaatgctggttgctcaggcgctgatttttcaccaccttggaagatcttggagaaagcccccagagaagctggaaggaattatggtctggctgctggatcatggttgggtccatatgctatgtgccgggcatggcagacccttattcgcacaaatagagagcaagctgatgctgtagatgggaaggaaaatttccctatggcgctgtatgtggtttcgggtgatgaagatggcgaaagaggtggagctccagttgtttgcattgatgttgctgctcagctttgctctgatttcaacaaaggaccatctacatggtcacctattcttttgttagttcctctggttcttggccttgacaaaattaacccaaggtacatcccattactaaaggagacatttatgttcccacaaagcttgggcattttaggtggaaaacctggtacatcaacatacattgctggggtacaggatgatagggctctctacctagatccccatgaagttcagatgacggttgacattgcactggataacttggaggcagacacttcctcataccactgcagcgttgtccgagccttagctctggaacaaatagatccctccctggctattggtttttactgtcgtgacaaagacgactttgatgatttctgttctcgggcctctgagttggcggagaaggccaatggcgcgccactctttactgttgtgcagtcaatcgagccatcgaaacaaatgtataaacaggatgatggactgggttgttctggcagtagcatggccaatgacgacgaccttgatggctctggtgaagcagaagagtggcagatcctttagacgaggctaagacatgttgggctgaagaaaaaaaaacttgcattgaaaatgttgtctgaatgccctcgtctgcgtgtgaatagaggggattatttgtgtgatctcggggtggaaatgttcagaacatacactcgtagtcgtggatgataataattaaatgtatttattattccatattctaacatcgttttaccacggcgtggttgtttctcaattgttggctacagttgcacctgccaaaaagtttgtggtgttggtatgttacatttgcaatgccaacatatcgctgtttgatgtg

SEQ ID NO: 18788 - DNA, 1123 bp, Zea Mays
gatatggcttgaccaccaatgcaaagaaaaaatgaggaatttctgctcagttatactggaaggaattatggtctggctgctggatcatggttgggtccatatgctatgtgccgggcatggcagacccttattcgcacaaatagagagcaagctgatgctgtagatgggaaggaaaatttccctatggcgctgtatgtggtttcgggtgatgaagatggcgaaagaggtggagctccagttgtttgcattgatgttgctgctcagctttgctctgatttcaacaaaggaccatctacatggtcacctattcttttgttagttcctctggttcttggccttgacaaaattaacccaaggtacatcccattactaaaggagacatttatgttcccacaaagcttgggcattttaggtggaaaacctggtacatcaacatacattgctggggtacaggatgatagggctctctacctagatccccatgaagttcagatgacggttgacattgcactggataacttggaggcagacacttcctcataccactgcagcgttgtccgagccttagctctggaacaaatagatccctccctggctattggtttttactgtcgtgacaaagacgactttgatgatttctgttctcgggcctctgagttggcggagaaggccaatggcgcgccactctttactgttgtgcagtcaatcgagccatcgaaacaaatgtataaacaggatgatggactgggttgttctggcagtagcatggccaatgacgacgaccttgatggctctggtgaagcagaagagtggcagatcctttagacgaggctaagacatgttgggctgaagaaaaaaaaacttgcattgaaaatgttgtctgaatgccctcgtctgcgtgtgaatagaggggattatttgtgtgatctcggggtggaaatgttcagaacatacactcgtagtcgtggatgataataattaaatgtatttattattccatattctaacatcgttttaccacggcgtggttgtttctcaattgttggctacagttgcacctgccaaaaagtttgtggtgttggtatgttacatttgcaatgccaacatatcgctgtttgatgtg

SEQ ID NO: 18789 - DNA, 1143 bp, Zea Mays
caccaatgcaaagaaaaaatgaggaatttctgctcagttatacttgtgctttctctattcacaatttacttcaagctggaaggaattatggtctggctgctggatcatggttgggtccatatgctatgtgccgggcatggcagacccttattcgcacaaatagagagcaagctgatgctgtagatgggaaggaaaatttccctatggcgctgtatgtggtttcgggtgatgaagatggcgaaagaggtggagctccagttgtttgcattgatgttgctgctcagctttgctctgatttcaacaaaggaccatctacatggtcacctattcttttgttagttcctctggttcttggccttgacaaaattaacccaaggtacatcccattactaaaggagacatttatgttcccacaaagcttgggcattttaggtggaaaacctggtacatcaacatacattgctggggtacaggatgatagggctctctacctagatccccatgaagttcagatgacggttgacattgcactggataacttggaggcagacacttcctcataccactgcagcgttgtccgagccttagctctggaacaaatagatccctccctggctattggtttttactgtcgtgacaaagacgactttgatgatttctgttctcgggcctctgagttggcggagaaggccaatggcgcgccactctttactgttgtgcagtcaatcgagccatcgaaacaaatgtataaacaggatgatggactgggttgttctggcagtagcatggccaatgacgacgaccttgatggctctggtgaagcagaagagtggcagatcctttagacgaggctaagacatgttgggctgaagaaaaaaaaacttgcattgaaaatgttgtctgaatgccctcgtctgcgtgtgaatagaggggattatttgtgtgatctcggggtggaaatgttcagaacatacactcgtagtcgtggatgataataattaaatgtatttattattccatattctaacatcgttttaccacggcgtggttgtttctcaattgttggctacagttgcacctgccaaaaagtttgtggtgttggtatgttacatttgcaatgccaacatatcgctgtttgatgtg

SEQ ID NO: 18790 - DNA, 1977 bp, Zea Mays
gcaaccagcaggccattctctcgccgtctcatcacaactagcgccactctagtagtaagtactaagtagtagtagtaggtggcagcagccaatcttgccacgatgacactctgcaccgtcttgctccagatcctccttccaacgctgctcttggtttctgccatcacaggcgcggacgctagcggcatcggcgtcaactacggcacgcggggcacgacgctcccggcgccggccgacgtggcgcggttcctggcccgggacaccatcttcgaccgcgtgaggctgttggacgccgacccggtcctgctgcgggccttcgccggcacgggcctcgccgtggacgtgacggtgcccaacggcgtcgtcccgcacctgctgaatctgaccttcgcgcggcgctgggtgcgcgacaacgtgacgccctacgcgggcgccaccaatatctcgcgcctcctggtcggcgacgaggtgaccaccgaggccaaccggacgctgctgctggcgctggtgccggccatgcagaacctgcacaccgcgctggtcgccgcgtccctgcacggccgggtgaaggtctccaccacgcactcgctcggggtgctcaccaccacggagcagccgtcggcggcgcggttccgcgacggctacgacgcggccatcgtgaggccgctgctcaggttcctccgcgcgaccggcgcgccgttcatggtgaacgcgtacccgttctacgcgctcgccaacgacagcagcctcgacttcgcgctgttccgggtgaacgacggcgtcatggaccagggcaccgggctggtgtacggcaacatgctggacgcgcagctcgacgccgtgcactcggccgtcaggcggatgggcttcggggacgtcgacatcgccgtgtcggagaccgggtggccatcggccggggaggactgggaggtcggcgtcggcgcggacctcgcccgggactacaacagcaacgccatccgccacctcggctccggcgtcggcacgccgctcatgcccaaccgcaccttcgaggtctccatcttctccctcttcgacgagaacctcaagccagggccggtgtcggagaggaatttcggcttgttccgcggcgacatgacgccggtctacgacgtcggcatcttcactgatccggagacccttgagccggtgagagcgaaggtgacgagccggaaatggtgcgtgccggagccggcggcggacgagatggtgctgcaggagaacatcgacttcgcgtgcggccaaaagggcgtcgactgtaccgcgatccggccgggcggcgtctgctacgagccggacacggtgcaggcccacgcggcgtacgccatgaacctctacttccaggccaatggccagcatgcctttgactgcgattttggacagacaggttatggaggctgcaaattcatgtgaacaaggcataggggatgtttgttttgaggaatcactctattgaaatttagatggtacatcatgagtccatttctcaaatttgttgggatgattatattacttatattaatactaactaactatgaaaaatgagatagtgatagataaactcattttatttcatcaaaccaaacaccctaatagtactccactatcttacaataagctcgttacccccttttttttgccttttatgtatgatttgaagtgtactagatcgtggggcgccccttcgggcgccctatccagtatacatgctatattcaaattaagtagaggatgattgaatctctaacaaaaccttttagttctagatagactgaatataacccacattaaagttgcagcaccacatctaaacgcgtaccacacctagacacataccacacctaatgttgcgcaccctttcaaccatttaaaaaacgattgaatagcaacaattacatgaagatctagaaaaacaaagatgattaccatatacagtaagatataagacaacagacaacc

SEQ ID NO: 18791 - DNA, 1967 bp, Zea Mays
ctccttcagttttcatcacacgacaatggagtggggctagcaatggcatggtaacttttccaatatttttgcattaaaaaagaaatcctaaagaaaaaggattactaaacgagcacgctcgccgacgccgggaccaggctctcggagtctgggtctcgcatcacgatcagatccaatccaaggccgcgccctagctcgacggatggattccgccgccgtggccatcgtgacggtgtcgttcccggcgcagggtcacctgaaccagttgctgcagctgtccccgctcctcgcatggcgggggtttcctatccacttcgccgcgccggagccgcacctcagggaggcccgcgcgcgcctgcacggctgggccccgaccccgcgacggtgtgtttccacgcgctggacgtgcccgcgcacgactccccctcccccgttcccggcgcacatgcaacccttgttcgaggccttctgcaccggcgcgcaggcctcgctagtcgcgctggagaggaggcggaggaaatggagaggaggcgcgacgcacagacggaaggtgttgatttgatggatatagatggacggtccagattggttcgaggcagaactagtggaggcatactacccttacaaccttaatacaaaattggaaggatagcgacgattccaaagtccgaacagagctagtttctcccgagcgcaaattttgaaaaccctcaacccggcactccgcactcagatctgcctgccaggcccccccacaaatccacaatccaaccgcacaagactcggaagaagaagcggggtgatggaagacggcgacgagagcgcggcggcggcgctggggctgagcccgcagcttttcgtcaacgaggtccacggcatcatcgccgacatcagcgccgaggccttcgagtactgtctccaggcagcggccgcaccaggggtcgtcggcgccgccaaggctgcagagaaggccatggatctccagcggggattaaatgctgttcaccatgtcgtaaaggatcgactggacaagagaatggccaactgggagaaattctgccttcgacattgcttcgatgtacctgaaggttttgtggccgatgaaaatgatagttcttgtgcaaaagaatcacacaaaaatgggacttcagattcagatttggatttggaacttgactccttaaggagaaagctcgaaagtgtaatcaccttagctgtaatgaatcaccttataatatatctagatttctgtagcaattgccagtatttcttacttttcaccaggctaacaaggagtctgaaaatcttgaaagagagatgtcgtcattggaaaggcaaagtatgcacaaaagaaaacttgattcttcaatctctgagatacaaaagttgtttgaagacaagttaatgcagggatttgaagaccttgtgaaggcaataccggcattgcggcagaaaataatagatatgaacaagaaaaggactgagatcaggtgtttggtagatcaacaggtttggaacacgagcagtgtgagaggcaacaagcgacaaacactggataagggttttactgcatgtggtgtagacactcgagaggtcgtcagtatctttgagaacatgtagcttgttgttctttacctgattcatgttgcttacccatagtgcccgcagcttgcttgcttggagcttttccccagtcttgttattgattgacaccagatattatttgggctaattcaattcaagaatgactggagatattattggccatctggcacaggttctatcgcagacacaggaggcgaagggtacttcaaccgttatcaacgtcgaggtccatgttcaagaaccatcgaaaggtccgaagcgaagggttctaccgtttaaagtggggggctcctcgtgacctcgcgaaggcaacccccgccagctcgtacggttccgagctgcagccttggcgaagatcgaag

SEQ ID NO: 18792 - DNA, 2150 bp, Zea Mays
cgacaatggagtggggctagcaatggcatggtaacttttccaatatttttgcattaaaaaagaaatcctaaagaaaaaggattactaaacgagcacgctcgccgacgccgggaccaggctctcggagtctgggtctcgcatcacgatcagatccaatccaaggccgcgccctagctcgacggatggattccgccgccgtggccatcgtgacggtgtcgttcccggcgcagggtcacctgaaccagttgctgcagctgtccccgctcctcgcatggcgggggtttcctatccacttcgccgcgccggagccgcacctcagggaggcccgcgcgcgcctgcacggctgggccccgaccccgcgacggtgtgtttccacgcgctggacgtgcccgcgcacgactccccctcccccgttcccggcgcacatgcaacccttgttcgaggccttctgcaccggcgcgcaggcctcgctagtcgcgctggagaggaggcggaggaaatggagaggaggcgcgacgcacagacggaaggtgttgatttgatggatatagatggacggtccagattggttcgaggcagaactagtggaggcatactacccttacaaccttaatacagtaagtatagatatcaaagacgtcgtgtaataaaagtgatcataatgaacatctttacaacatatggatgatgatgtaatgtcagaatcaagttgtcttagtttctttttgtttaatgagaaattggaaggatagcgacgattccaaagtccgaacagagctagtttctcccgagcgcaaattttgaaaaccctcaacccggcactccgcactcagatctgcctgccaggcccccccacaaatccacaatccaaccgcacaagactcggaagaagaagcggggtgatggaagacggcgacgagagcgcggcggcggcgctggggctgagcccgcagcttttcgtcaacgaggtccacggcatcatcgccgacatcagcgccgaggccttcgagtactgtctccaggcagcggccgcaccaggggtcgtcggcgccgccaaggctgcagagaaggccatggatctccagcggggattaaatgctgttcaccatgtcgtaaaggatcgactggacaagagaatggccaactgggagaaattctgccttcgacattgcttcgatgtacctgaaggttttgtggccgatgaaaatgatagttcttgtgcaaaagaatcacacaaaaatgggacttcagattcagatttggatttggaacttgactccttaaggagaaagctcgaaagtgtaatcaccttagctgtaatgaatcaccttataatatatctagatttctgtagcaattgccagtatttcttacttttcaccaggctaacaaggagtctgaaaatcttgaaagagagatgtcgtcattggaaaggcaaagtatgcacaaaagaaaacttgattcttcaatctctgagatacaaaagttgtttgaagacaagttaatgcagggatttgaaggcaataccggcattgcggcagaaaataatagatatgaacaagaaaaggactgagatcaggtgtttggtagatcaacaggtttggaacacgagcagtgtgagaggcaacaagcgacaaacactggataagggttttactgcatgtggtgtagacactcgagaggtcgtcagtatctttgagaacatgtagcttgttgttctttacctgattcatgttgcttacccatagtgcccgcagcttgcttgcttggagcttttccccagtcttgttattgattgacaccagatattatttgggctaattcaattcaagaatgactggagatattattggccatctggcacaggtaaatgctacatgtaattgcttccagaagcatactagattggaaatgtaatccttcctgcggctacttgtctacctctggtcgagagattttctgaactgcttcggtcatcatagttcttttagcatacagtatgtggtataacttgtcctgtacatgagaaaggaacattaagcagctgctacatatatctgagaagtttcccattttatgttacaactagtatggtgcacatgtgttgcaacgaaacacaaactatttgttaaatgcttatgacctaagca

SEQ ID NO: 18793 - DNA, 1679 bp, Zea Mays
cgacaatggagtggggctagcaatggcatggtaacttttccaatatttttgcattaaaaaagaaatcctaaagaaaaaggattactaaacgagcacgctcgccgacgccgggaccaggctctcggagtctgggtctcgcatcacgatcagatccaatccaaggccgcgccctagctcgacggatggattccgccgccgtggccatcgtgacggtgtcgttcccggcgcagggtcacctgaaccagttgctgcagctgtccccgctcctcgcatggcgggggtttcctatccacttcgccgcgccggagccgcacctcagggaggcccgcgcgcgcctgcacggctgggccccgaccccgcgacggtgtgtttccacgcgctggacgtgcccgcgcacgactccccctcccccgttcccggcgcacatgcaacccttgttcgaggccttctgcaccggcgcgcaggcctcgctagtcgcgctggagaggaggcggaggaaatggagaggaggcgcgacgcacagacggaaggtgttgatttgatggatatagatggacggtccagattggttcgaggcagaactagtggaggcatactacccttacaaccttaatacaggattaaatgctgttcaccatgtcgtaaaggatcgactggacaagagaatggccaactgggagaaattctgccttcgacattgcttcgatgtacctgaaggttttgtggccgatgaaaatgatagttcttgtgcaaaagaatcacacaaaaatgggacttcagattcagatttggatttggaacttgactccttaaggagaaagctcgaaagtgtaatcaccttagctgtaatgaatcaccttataatatatctagatttctgtagcaattgccagtatttcttacttttcaccaggctaacaaggagtctgaaaatcttgaaagagagatgtcgtcattggaaaggcaaagtatgcacaaaagaaaacttgattcttcaatctctgagatacaaaagttgtttgaagacaagttaatgcagggatttgaaggcaataccggcattgcggcagaaaataatagatatgaacaagaaaaggactgagatcaggtgtttggtagatcaacaggtttggaacacgagcagtgtgagaggcaacaagcgacaaacactggataagggttttactgcatgtggtgtagacactcgagaggtcgtcagtatctttgagaacatgtagcttgttgttctttacctgattcatgttgcttacccatagtgcccgcagcttgcttgcttggagcttttccccagtcttgttattgattgacaccagatattatttgggctaattcaattcaagaatgactggagatattattggccatctggcacaggtaaatgctacatgtaattgcttccagaagcatactagattggaaatgtaatccttcctgcggctacttgtctacctctggtcgagagattttctgaactgcttcggtcatcatagttcttttagcatacagtatgtggtataacttgtcctgtacatgagaaaggaacattaagcagctgctacatatatctgagaagtttcccattttatgttacaactagtatggtgcacatgtgttgcaacgaaacacaaactatttgttaaatgcttatgacctaagca

SEQ ID NO: 18794 - DNA, 1958 bp, Zea Mays
cgacaatggagtggggctagcaatggcatggtaacttttccaatatttttgcattaaaaaagaaatcctaaagaaaaaggattactaaacgagcacgctcgccgacgccgggaccaggctctcggagtctgggtctcgcatcacgatcagatccaatccaaggccgcgccctagctcgacggatggattccgccgccgtggccatcgtgacggtgtcgttcccggcgcagggtcacctgaaccagttgctgcagctgtccccgctcctcgcatggcgggggtttcctatccacttcgccgcgccggagccgcacctcagggaggcccgcgcgcgcctgcacggctgggccccgaccccgcgacggtgtgtttccacgcgctggacgtgcccgcgcacgactccccctcccccgttcccggcgcacatgcaacccttgttcgaggccttctgcaccggcgcgcaggcctcgctagtcgcgctggagaggaggcggaggaaatggagaggaggcgcgacgcacagacggaaggtgttgatttgatggatatagatggacggtccagattggttcgaggcagaactagtggaggcatactacccttacaaccttaatacaaaattggaaggatagcgacgattccaaagtccgaacagagctagtttctcccgagcgcaaattttgaaaaccctcaacccggcactccgcactcagatctgcctgccaggcccccccacaaatccacaatccaaccgcacaagactcggaagaagaagcggggtgatggaagacggcgacgagagcgcggcggcggcgctggggctgagcccgcagcttttcgtcaacgaggtccacggcatcatcgccgacatcagcgccgaggccttcgagtactgtctccaggcagcggccgcaccaggggtcgtcggcgccgccaaggctgcagagaaggccatggatctccagcggggattaaatgctgttcaccatgtcgtaaaggatcgactggacaagagaatggccaactgggagaaattctgccttcgacattgcttcgatgtacctgaaggttttgtggccgatgaaaatgatagttcttgtgcaaaagaatcacacaaaaatgggacttcagattcagatttggatttggaacttgactccttaaggagaaagctcgaaagtgctaacaaggagtctgaaaatcttgaaagagagatgtcgtcattggaaaggcaaagtatgcacaaaagaaaacttgattcttcaatctctgagatacaaaagttgtttgaagacaagttaatgcagggatttgaagaccttgtgaaggcaataccggcattgcggcagaaaataatagatatgaacaagaaaaggactgagatcaggtgtttggtagatcaacaggtttggaacacgagcagtgtgagaggcaacaagcgacaaacactggataagggttttactgcatgtggtgtagacactcgagaggtcgtcagtatctttgagaacatgtagcttgttgttctttacctgattcatgttgcttacccatagtgcccgcagcttgcttgcttggagcttttccccagtcttgttattgattgacaccagatattatttgggctaattcaattcaagaatgactggagatattattggccatctggcacaggtaaatgctacatgtaattgcttccagaagcatactagattggaaatgtaatccttcctgcggctacttgtctacctctggtcgagagattttctgaactgcttcggtcatcatagttcttttagcatacagtatgtggtataacttgtcctgtacatgagaaaggaacattaagcagctgctacatatatctgagaagtttcccattttatgttacaactagtatggtgcacatgtgttgcaacgaaacacaaactatttgttaaatgcttatgacctaagca

SEQ ID NO: 18795 - DNA, 1607 bp, Zea Mays
cgacaatggagtggggctagcaatggcatggtaacttttccaatatttttgcattaaaaaagaaatcctaaagaaaaaggattactaaacgagcacgctcgccgacgccgggaccaggctctcggagtctgggtctcgcatcacgatcagatccaatccaaggccgcgccctagctcgacggatggattccgccgccgtggccatcgtgacggtgtcgttcccggcgcagggtcacctgaaccagttgctgcagctgtccccgctcctcgcatggcgggggtttcctatccacttcgccgcgccggagccgcacctcagggaggcccgcgcgcgcctgcacggctgggccccgaccccgcgacggtgtgtttccacgcgctggacgtgcccgcgcacgactccccctcccccgttcccggcgcacatgcaacccttgttcgaggccttctgcaccggcgcgcaggcctcgctagtcgcgctggagaggaggcggaggaaatggagaggaggcgcgacgcacagacggaaggtgttgatttgatggatatagatggacggtccagattggttcgaggcagaactagtggaggcatactacccttacaaccttaatacaggattaaatgctgttcaccatgtcgtaaaggatcgactggacaagagaatggccaactgggagaaattctgccttcgacattgcttcgatgtacctgaaggttttgtggccgatgaaaatgatagttcttgtgcaaaagaatcacacaaaaatgggacttcagattcagatttggatttggaacttgactccttaaggagaaagctcgaaagtgctaacaaggagtctgaaaatcttgaaagagagatgtcgtcattggaaaggcaaagtatgcacaaaagaaaacttgattcttcaatctctgagatacaaaagttgtttgaagacaagttaatgcagggatttgaagaccttgtgaaggcaataccggcattgcggcagaaaataatagatatgaacaagaaaaggactgagatcaggtgtttggtagatcaacaggtttggaacacgagcagtgtgagaggcaacaagcgacaaacactggataagggttttactgcatgtggtgtagacactcgagaggtcgtcagtatctttgagaacatgtagcttgttgttctttacctgattcatgttgcttacccatagtgcccgcagcttgcttgcttggagcttttccccagtcttgttattgattgacaccagatattatttgggctaattcaattcaagaatgactggagatattattggccatctggcacaggtaaatgctacatgtaattgcttccagaagcatactagattggaaatgtaatccttcctgcggctacttgtctacctctggtcgagagattttctgaactgcttcggtcatcatagttcttttagcatacagtatgtggtataacttgtcctgtacatgagaaaggaacattaagcagctgctacatatatctgagaagtttcccattttatgttacaactagtatggtgcacatgtgttgcaacgaaacacaaactatttgttaaatgcttatgacctaagca

SEQ ID NO: 18796 - DNA, 1849 bp, Zea Mays
cgacaatggagtggggctagcaatggcatggtaacttttccaatatttttgcattaaaaaagaaatcctaaagaaaaaggattactaaacgagcacgctcgccgacgccgggaccaggctctcggagtctgggtctcgcatcacgatcagatccaatccaaggccgcgccctagctcgacggatggattccgccgccgtggccatcgtgacggtgtcgttcccggcgcagggtcacctgaaccagttgctgcagctgtccccgctcctcgcatggcgggggtttcctatccacttcgccgcgccggagccgcacctcagggaggcccgcgcgcgcctgcacggctgggccccgaccccgcgacggtgtgtttccacgcgctggacgtgcccgcgcacgactccccctcccccgttcccggcgcacatgcaacccttgttcgaggccttctgcaccggcgcgcaggcctcgctagtcgcgctggagaggaggcggaggaaatggagaggaggcgcgacgcacagacggaaggtgttgatttgatggatatagatggacggtccagattggttcgaggcagaactagtggaggcatactacccttacaaccttaatacagcccccccacaaatccacaatccaaccgcacaagactcggaagaagaagcggggtgatggaagacggcgacgagagcgcggcggcggcgctggggctgagcccgcagcttttcgtcaacgaggtccacggcatcatcgccgacatcagcgccgaggccttcgagtactgtctccaggcagcggccgcaccaggggtcgtcggcgccgccaaggctgcagagaaggccatggatctccagcggggattaaatgctgttcaccatgtcgtaaaggatcgactggacaagagaatggccaactgggagaaattctgccttcgacattgcttcgatgtacctgaaggttttgtggccgatgaaaatgatagttcttgtgcaaaagaatcacacaaaaatgggacttcagattcagatttggatttggaacttgactccttaaggagaaagctcgaaagtgctaacaaggagtctgaaaatcttgaaagagagatgtcgtcattggaaaggcaaagtatgcacaaaagaaaacttgattcttcaatctctgagatacaaaagttgtttgaagacaagttaatgcagggatttgaagaccttgtgaaggcaataccggcattgcggcagaaaataatagatatgaacaagaaaaggactgagatcaggtgtttggtagatcaacaggtttggaacacgagcagtgtgagaggcaacaagcgacaaacactggataagggttttactgcatgtggtgtagacactcgagaggtcgtcagtatctttgagaacatgtagcttgttgttctttacctgattcatgttgcttacccatagtgcccgcagcttgcttgcttggagcttttccccagtcttgttattgattgacaccagatattatttgggctaattcaattcaagaatgactggagatattattggccatctggcacaggtaaatgctacatgtaattgcttccagaagcatactagattggaaatgtaatccttcctgcggctacttgtctacctctggtcgagagattttctgaactgcttcggtcatcatagttcttttagcatacagtatgtggtataacttgtcctgtacatgagaaaggaacattaagcagctgctacatatatctgagaagtttcccattttatgttacaactagtatggtgcacatgtgttgcaacgaaacacaaactatttgttaaatgcttatgacctaagca

SEQ ID NO: 18797 - DNA, 2066 bp, Zea Mays
cgacaatggagtggggctagcaatggcatggtaacttttccaatatttttgcattaaaaaagaaatcctaaagaaaaaggattactaaacgagcacgctcgccgacgccgggaccaggctctcggagtctgggtctcgcatcacgatcagatccaatccaaggccgcgccctagctcgacggatggattccgccgccgtggccatcgtgacggtgtcgttcccggcgcagggtcacctgaaccagttgctgcagctgtccccgctcctcgcatggcgggggtttcctatccacttcgccgcgccggagccgcacctcagggaggcccgcgcgcgcctgcacggctgggccccgaccccgcgacggtgtgtttccacgcgctggacgtgcccgcgcacgactccccctcccccgttcccggcgcacatgcaacccttgttcgaggccttctgcaccggcgcgcaggcctcgctagtcgcgctggagaggaggcggaggaaatggagaggaggcgcgacgcacagacggaaggtgttgatttgatggatatagatggacggtccagattggttcgaggcagaactagtggaggcatactacccttacaaccttaatacagtaagtatagatatcaaagacgtcgtgtaataaaagtgatcataatgaacatctttacaacatatggatgatgatgtaatgtcagaatcaagttgtcttagtttctttttgtttaatgagaaattggaaggatagcgacgattccaaagtccgaacagagctagtttctcccgagcgcaaattttgaaaaccctcaacccggcactccgcactcagatctgcctgccaggcccccccacaaatccacaatccaaccgcacaagactcggaagaagaagcggggtgatggaagacggcgacgagagcgcggcggcggcgctggggctgagcccgcagcttttcgtcaacgaggtccacggcatcatcgccgacatcagcgccgaggccttcgaggcagcggccgcaccaggggtcgtcggcgccgccaaggctgcagagaaggccatggatctccagcggggattaaatgctgttcaccatgtcgtaaaggatcgactggacaagagaatggccaactgggagaaattctgccttcgacattgcttcgatgtacctgaaggttttgtggccgatgaaaatgatagttcttgtgcaaaagaatcacacaaaaatgggacttcagattcagatttggatttggaacttgactccttaaggagaaagctcgaaagtgctaacaaggagtctgaaaatcttgaaagagagatgtcgtcattggaaaggcaaagtatgcacaaaagaaaacttgattcttcaatctctgagatacaaaagttgtttgaagacaagttaatgcagggatttgaagaccttgtgaaggcaataccggcattgcggcagaaaataatagatatgaacaagaaaaggactgagatcaggtgtttggtagatcaacaggtttggaacacgagcagtgtgagaggcaacaagcgacaaacactggataagggttttactgcatgtggtgtagacactcgagaggtcgtcagtatctttgagaacatgtagcttgttgttctttacctgattcatgttgcttacccatagtgcccgcagcttgcttgcttggagcttttccccagtcttgttattgattgacaccagatattatttgggctaattcaattcaagaatgactggagatattattggccatctggcacaggtaaatgctacatgtaattgcttccagaagcatactagattggaaatgtaatccttcctgcggctacttgtctacctctggtcgagagattttctgaactgcttcggtcatcatagttcttttagcatacagtatgtggtataacttgtcctgtacatgagaaaggaacattaagcagctgctacatatatctgagaagtttcccattttatgttacaactagtatggtgcacatgtgttgcaacgaaacacaaactatttgttaaatgcttatgacctaagca

SEQ ID NO: 18798 - DNA, 1929 bp, Zea Mays
cgacaatggagtggggctagcaatggcatggtaacttttccaatatttttgcattaaaaaagaaatcctaaagaaaaaggattactaaacgagcacgctcgccgacgccgggaccaggctctcggagtctgggtctcgcatcacgatcagatccaatccaaggccgcgccctagctcgacggatggattccgccgccgtggccatcgtgacggtgtcgttcccggcgcagggtcacctgaaccagttgctgcagctgtccccgctcctcgcatggcgggggtttcctatccacttcgccgcgccggagccgcacctcagggaggcccgcgcgcgcctgcacggctgggccccgaccccgcgacggtgtgtttccacgcgctggacgtgcccgcgcacgactccccctcccccgttcccggcgcacatgcaacccttgttcgaggccttctgcaccggcgcgcaggcctcgctagtcgcgctggagaggaggcggaggaaatggagaggaggcgcgacgcacagacggaaggtgttgatttgatggatatagatggacggtccagattggttcgaggcagaactagtggaggcatactacccttacaaccttaatacaaaattggaaggatagcgacgattccaaagtccgaacagagctagtttctcccgagcgcaaattttgaaaaccctcaacccggcactccgcactcagatctgcctgccaggcccccccacaaatccacaatccaaccgcacaagactcggaagaagaagcggggtgatggaagacggcgacgagagcgcggcggcggcgctggggctgagcccgcagcttttcgtcaacgaggtccacggcatcatcgccgacatcagcgccgaggccttcgagtactgtctccaggcagcggccgcaccaggggtcgtcggcgccgccaaggctgcagagaaggccatggatctccagcggggattaaatgctgttcaccatgtcgtaaaggatcgactggacaagagaatggccaactgggagaaattctgccttcgacattgcttcgatgtacctgaaggttttgtggccgatgaaaatgatagttcttgtgcaaaagaatcacacaaaaatgggacttcagattcagatttggatttggaacttgactccttaaggagaaagctcgaaagtagagatgtcgtcattggaaaggcaaagtatgcacaaaagaaaacttgattcttcaatctctgagatacaaaagttgtttgaagacaagttaatgcagggatttgaagaccttgtgaaggcaataccggcattgcggcagaaaataatagatatgaacaagaaaaggactgagatcaggtgtttggtagatcaacaggtttggaacacgagcagtgtgagaggcaacaagcgacaaacactggataagggttttactgcatgtggtgtagacactcgagaggtcgtcagtatctttgagaacatgtagcttgttgttctttacctgattcatgttgcttacccatagtgcccgcagcttgcttgcttggagcttttccccagtcttgttattgattgacaccagatattatttgggctaattcaattcaagaatgactggagatattattggccatctggcacaggtaaatgctacatgtaattgcttccagaagcatactagattggaaatgtaatccttcctgcggctacttgtctacctctggtcgagagattttctgaactgcttcggtcatcatagttcttttagcatacagtatgtggtataacttgtcctgtacatgagaaaggaacattaagcagctgctacatatatctgagaagtttcccattttatgttacaactagtatggtgcacatgtgttgcaacgaaacacaaactatttgttaaatgcttatgacctaagca

SEQ ID NO: 18799 - DNA, 1380 bp, Zea Mays
cgacaatggagtggggctagcaatggcatggtaacttttccaatatttttgcattaaaaaagaaatcctaaagaaaaaggattactaaacgagcacgctcgccgacgccgggaccaggctctcggagtctgggtctcgcatcacgatcagatccaatccaaggccgcgccctagctcgacggatggattccgccgccgtggccatcgtgacggtgtcgttcccggcgcagggtcacctgaaccagttgctgcagctgtccccgctcctcgcatggcgggggtttcctatccacttcgccgcgccggagccgcacctcagggaggcccgcgcgcgcctgcacggctgggccccgaccccgcgacggtgtgtttccacgcgctggacgtgcccgcgcacgactccccctcccccgttcccggcgcacatgcaacccttgttcgaggccttctgcaccggcgcgcaggcctcgctagtcgcgctggagaggaggcggaggaaatggagaggaggcgcgacgcacagacggaaggtgttgatttgatggatatagatggacggtccagattggttcgaggcagaactagtggaggcatactacccttacaaccttaatacaggattaaatgctgttcaccatgtcgtaaaggatcgactggacaagagaatggccaactgggagaaattctgccttcgacattgcttcgatgtacctgaaggttttgtggccgatgaaaatgatagttcttgtgcaaaagaatcacacaaaaatgggacttcagattcagatttggatttggaacttgactccttaaggagaaagctcgaaagtgtaatcaccttagctgtaatgaatcaccttataatatatctagatttctgtagcaattgccagtatttcttacttttcaccaggctaacaaggagtctgaaaatcttgaaagagagatgtcgtcattggaaaggcaaagtatgcacaaaagaaaacttgattcttcaatctctgagatacaaaagttgtttgaagacaagttaatgcagggatttgaagaccttgtgaaggcaataccggcattgcggcagaaaataatagatatgaacaagaaaaggactgagatcaggtgtttggtagatcaacaggtttggaacacgagcagtgtgagaggcaacaagcgacaaacactggataagggttctatcgcagacacaggaggcgaagggtacttcaaccgttatcaacgtcgaggtccatgttcaagaaccatcgaaaggtccgaagcgaagggttctaccgtttaaagtggggggctcctcgtgacctcgcgaaggcaacccccgccagctcgtacggttccgagctgcagccttggcgaagatcgaag

SEQ ID NO: 18800 - DNA, 1883 bp, Zea Mays
cgacaatggagtggggctagcaatggcatggtaacttttccaatatttttgcattaaaaaagaaatcctaaagaaaaaggattactaaacgagcacgctcgccgacgccgggaccaggctctcggagtctgggtctcgcatcacgatcagatccaatccaaggccgcgccctagctcgacggatggattccgccgccgtggccatcgtgacggtgtcgttcccggcgcagggtcacctgaaccagttgctgcagctgtccccgctcctcgcatggcgggggtttcctatccacttcgccgcgccggagccgcacctcagggaggcccgcgcgcgcctgcacggctgggccccgaccccgcgacggtgtgtttccacgcgctggacgtgcccgcgcacgactccccctcccccgttcccggcgcacatgcaacccttgttcgaggccttctgcaccggcgcgcaggcctcgctagtcgcgctggagaggaggcggaggaaatggagaggaggcgcgacgcacagacggaaggtgttgatttgatggatatagatggacggtccagattggttcgaggcagaactagtggaggcatactacccttacaaccttaatacatttctttttgtttaatgagaaattggaaggatagcgacgattccaaagtccgaacagagctagtttctcccgagcgcaaattttgaaaaccctcaacccggcactccgcactcagatctgcctgccaggcccccccacaaatccacaatccaaccgcacaagactcggaagaagaagcggggtgatggaagacggcgacgagagcgcggcggcggcgctggggctgagcccgcagcttttcgtcaacgaggtccacggcatcatcgccgacatcagcgccgaggccttcgagtactgtctccaggcagcggccgcaccaggggtcgtcggcgccgccaaggctgcagagaaggccatggatctccagcggggattaaatgctgttcaccatgtcgtaaaggatcgactggacaagagaatggccaactgggagaaattctgccttcgacattgcttcgatgtacctgaaggttttgtggccgatgaaaatgatagttcttgtgcaaaagaatcacacaaaaatgggacttcagattcagatttggatttggaacttgactccttaaggagaaagctcgaaagtgctaacaaggagtctgaaaatcttgaaagagagatgtcgtcattggaaaggcaaagtatgcacaaaagaaaacttgattcttcaatctctgagatacaaaagttgtttgaagacaagttaatgcagggatttgaagaccttgtgaaggcaataccggcattgcggcagaaaataatagatatgaacaagaaaaggactgagatcaggtgtttggtagatcaacaggtttggaacacgagcagtgtgagaggcaacaagcgacaaacactggataagggttttactgcatgtggtgtagacactcgagaggtcgtcagtatctttgagaacatgtagcttgttgttctttacctgattcatgttgcttacccatagtgcccgcagcttgcttgcttggagcttttccccagtcttgttattgattgacaccagatattatttgggctaattcaattcaagaatgactggagatattattggccatctggcacaggttctatcgcagacacaggaggcgaagggtacttcaaccgttatcaacgtcgaggtccatgttcaagaaccatcgaaaggtccgaagcgaagggttctaccgtttaaagtggggggctcctcgtgacctcgcgaaggcaacccccgccagctcgtacggttccgagctgcagccttggcgaagatcgaag

SEQ ID NO: 18801 - DNA, 703 bp, Zea Mays
aggtcgcagtggcgcagtgagtgcactagtacgctacgcacctttccttcgtgtaataactccagctacttcctgtctagtgtctccgtcgaccgtcgctgccagccagccacagcaagctccgcacgaccgccggtccgccgcctaccagagcgagctcatctctcagccgcgccggggggcctcctcgtcacgccggcgcagcccgcgcttcgttccaccgtagtttgcccggccgtgctggggcaaaaaaaggtccgggcccacgtgttcccagacggagcgagaggacgtcgatcggtcaggccatcagggaccagaccagacaaagccaaaggggccgcggatcggtaggcggccggcgcggatcggaggaagaagggaggaggaggccatccagttggagtacttggagaggtagcaggacgacgatgcttggaggccgtcccctcttcgtgctcttcggctcctccatcgtgcagtacagcttcagcaacggcggatggggcgccgcgcttgccgacatttacgcccgcaaggctgatgtcctgctaagaggatatattggctggaacacaaggcgggctgttcaagtgatggacaaagtgttccctaagtttaagcttttgggttgaactggtgtcatgtgcgggcgcacctacaccaggcgccatagggcccgtgacgtgcgccgagcccacga

SEQ ID NO: 18802 - DNA, 2718 bp, Zea Mays
ggcggacctccttttcacaggacaggccggcggccgggtaggaaaagcccaaaacctctcttcctgctgcccctcgctgttcgctgcctcccctccactctccactgttcactcccagtccccaccagcaccaggcacagatcactcgcttccccactcgctcacgccaaaaccaccgcgccgaatccgaatcgagtcgagcacgagcgagcaagcaaggagctagcgcacgcatctaggctaggcgagagcaccaaaggaggcgccgcgggtggcggcggaatgggagggcccctcggcgcgatcatcggccgctacccgtcggcggccggcggcgacgagcagctgggaggcggcgccggaggcggcattatacgccacgaccgcaggtgccgcgacatcgccgttctcgtgctcttcgccgccttctgggtcgccatgattgtcaactccagcttcggcttcaaccagggcaacccgctcaggctgacttatgaactggactacaaagggaacgtttgtggcgataagcatggcaacccaaatttgcaggagctggatgttagatactggatgaatccgaatcaagtctaccaaagtggactcaagaacagcaaggttaacctggctgatgccaaagccatctgcctgatggagtgcccaaatccagctgtagatggattgaactatatttgtgattatccagaagggaacatagacctctctgttgatgattggatcaatagggactatgactattatgagtttctcacaccagacatgaagaatagctcacttcaactccagggtccatgctaccctataatatttccaactgtaaatgcactggcatgagacgggtggtgtcagcattgatgaaaatatcctcattgataaaacagtgcacaaggccatcgattctagatctgctgtattaaagagatatattgcagacattgggaagtcctggcctgtgttcatcgtttgtggtggaattctccctgttttcctgtcagttatctggttgcttatgattcgttatttcgttgctgccatgacttggattacagtagtcctcttcaatgcccttgttatatctgtaacgatgttcttttacatcaaagctggctggataggcaatgaccccttaactgttgtcattggtgaaagtgatccatatgttcacataagtggacgggaaataagtcaccttcatactattacaatcctaatgacagcagtaatgatcattgctttcctgtcctcaatagctattgtccgccgtatactgatagcaacacctgtcttaaaggttgctgcaaaggtcattggtgaagttcaggcactgatagcttttccacttttgccgtgcctgatcctttctatcttgtatatgttctggttttctgctacactccatctcttcagctctggtcaagttgtccgaaatgattgcaatactgattgttgttcatatgatctgaagctgggaaaagtaaattgtgacaactgctgtgggtacagcatccattacacccctcatatcagcattgccattctatttcacttatttggttgctactgggcgactcaattcattctcgcatgctcttcaactgtggttgcgggatcagttgcttcatactactgggcgcgtggtgaaatatcacatgatataccatttctcactgtagtctcttcactgaagcgactgatgcgctacagccttggatctgttgctctgggttcacttgttgtatctgttgttgaatgggtgcggtttatactagaatgccttcgtcgcaagttgaagctagttgattctgcccgagagagctgctttggaaaagcgacgtcctcctcttctgaatgctgcctgggttgcatagactggaccctcaagtcagtaaatcgaaatgcctacattatgattgccatcaccgggaaaggtttcttcaaagcttcagtgctcgcaactggattaataatgaagaacattctgcgcatcggaaaagtcaacgtcattggagatgtcatcctcttcctgggaaaactctgtgtgagcctattctgtgcgcttttcgcctttctgatgttagacacccacaagtacaagtccgcacacaacaagatatcctctccagttatccctgtcctggtaacatgggccctcggctacgtagtcgcgaagcttttctttgcggtggttgagatgtcgatcgacaccataatcctctcgttctgccaggacgccgaggagcaccaggggaacgcgcagtatgcgcccccagctctgatggaaactctggacgaacagggcgaactgcagagactaactcaagggccttgactgtcttttcctcttggtagtagcatggaaacttagcggcagcctaatgttttgttaccccgttccgttctcttggcttgtgaagaggtttgccatttttgcttgctattccatgtacaagtctgaatctgacatgttctcctggcccaattggcatgtgtaggcagcttatctatatatgtgtgcagtgtgctattgctgatacggcgttggtgaaatactccctccgtttccaacttccaacatcataaatttaaccaaatttatatagtaaaacaatagcatttatgatacctaaataactattattggattcttcattagttagctatttgatgtcatagatctttgtgtgtgtgttttttttt

SEQ ID NO: 18803 - DNA, 2256 bp, Zea Mays
ctccttttcacaggacaggccggcggccgggtaggaaaagcccaaaacctctcttcctgctgcccctcgctgttcgctgcctcccctccactctccactgttcactcccagtccccaccagcaccaggcacagatcactcgcttccccactcgctcacgccaaaaccaccgcgccgaatccgaatcgagtcgagcacgagcgagcaagcaaggagctagcgcacgcatctaggctaggcgagagcaccaaaggaggcgccgcgggtggcggcggaatgggagggcccctcggcgcgatcatcggccgctacccgtcggcggccggcggcgacgagcagctgggaggcggcgccggaggcggcattatacgccacgaccgcaggtgccgcgacatcgccgttctcgtgctcttcgccgccttctgggtcgccatgattgtcaactccagcttcggcttcaaccagggcaacccgctcagagatatattgcagacattgggaagtcctggcctgtgttcatcgtttgtggtggaattctccctgttttcctgtcagttatctggttgcttatgattcgttatttcgttgctgccatgacttggattacagtagtcctcttcaatgcccttgttatatctgtaacgatgttcttttacatcaaagctggctggataggcaatgaccccttaactgttgtcattggtgaaagtgatccatatgttcacataagtggacgggaaataagtcaccttcatactattacaatcctaatgacagcagtaatgatcattgctttcctgtcctcaatagctattgtccgccgtatactgatagcaacacctgtcttaaaggttgctgcaaaggtcattggtgaagttcaggcactgatagcttttccacttttgccgtgcctgatcctttctatcttgtatatgttctggttttctgctacactccatctcttcagctctggtcaagttgtccgaaatgattgcaatactgattgttgttcatatgatctgaagctgggaaaagtaaattgtgacaactgctgtgggtacagcatccattacacccctcatatcagcattgccattctatttcacttatttggttgctactgggcgactcaattcattctcgcatgctcttcaactgtggttgcgggatcagttgcttcatactactgggcgcgtggtgaaatatcacatgatataccatttctcactgtagtctcttcactgaagcgactgatgcgctacagccttggatctgttgctctgggttcacttgttgtatctgttgttgaatgggtgcggtttatactagaatgccttcgtcgcaagttgaagctagttgattctgcccgagagagctgctttggaaaagcgacgtcctcctcttctgaatgctgcctgggttgcatagactggaccctcaagtcagtaaatcgaaatgcctacattatgattgccatcaccgggaaaggtttcttcaaagcttcagtgctcgcaactggattaataatgaagaacattctgcgcatcggaaaagtcaacgtcattggagatgtcatcctcttcctgggaaaactctgtgtgagcctattctgtgcgcttttcgcctttctgatgttagacacccacaagtacaagtccgcacacaacaagatatcctctccagttatccctgtcctggtaacatgggccctcggctacgtagtcgcgaagcttttctttgcggtggttgagatgtcgatcgacaccataatcctctcgttctgccaggacgccgaggagcaccaggggaacgcgcagtatgcgcccccagctctgatggaaactctggacgaacagggcgaactgcagagactaactcaagggccttgactgtcttttcctcttggtagtagcatggaaacttagcggcagcctaatgttttgttaccccgttccgttctcttggcttgtgaagaggtttgccatttttgcttgctattccatgtacaagtctgaatctgacatgttctcctggcccaattggcatgtgtaggcagcttatctatatatgtgtgcagtgtgctattgctgatacggcgttggtgaaatactccctccgtttccaacttccaacatcataaatttaaccaaatttatatagtaaaacaatagcatttatgatacctaaataactattattggattcttcattagttagctatttgatgtcatagatctttgtgtgtgtgttttttttt

SEQ ID NO: 18804 - DNA, 2720 bp, Zea Mays
ccttttcacaggacaggccggcggccgggtaggaaaagcccaaaacctctcttcctgctgcccctcgctgttcgctgcctcccctccactctccactgttcactcccagtccccaccagcaccaggcacagatcactcgcttccccactcgctcacgccaaaaccaccgcgccgaatccgaatcgagtcgagcacgagcgagcaagcaaggagctagcgcacgcatctaggctaggcgagagcaccaaaggaggcgccgcgggtggcggcggaatgggagggcccctcggcgcgatcatcggccgctacccgtcggcggccggcggcgacgagcagctgggaggcggcgccggaggcggcattatacgccacgaccgcaggtgccgcgacatcgccgttctcgtgctcttcgccgccttctgggtcgccatgattgtcaactccagcttcggcttcaaccagggcaacccgctcaggctgacttatgaactggactacaaagggaacgtttgtggcgataagcatggcaacccaaatttgcaggagctggatgttagatactggatgaatccgaatcaagtctaccaaagtggactcaagaacagcaaggttaacctggctgatgccaaagccatctgcctgatggagtgcccaaatccagctgtagatggattgaactatatttgtgattatccagaagggaacatagacctctctgttgatgattggatcaatagggactatgactattatgagtttctcacaccagacatgaagaatagctcacttcaactccagggtccatgctaccctataatatttccaactgtaaatgtctattggagctgccaatttattgcacgtgcatccaatgtttctttgaagcactggcatgagacgggtggtgtcagcattgatgaaaatatcctcattgataaaacagtgcacaaggccatcgattctagatctgctgtattaaagagatatattgcagacattgggaagtcctggcctgtgttcatcgtttgtggtggaattctccctgttttcctgtcagttatctggttgcttatgattcgttatttcgttgctgccatgacttggattacagtagtcctcttcaatgcccttgttatatctgtaacgatgttcttttacatcaaagctggctggataggcaatgaccccttaactgttgtcattggtgaaagtgatccatatgttcacataagtggacgggaaataagtcaccttcatactattacaatcctaatgacagcagtaatgatcattgctttcctgtcctcaatagctattgtccgccgtatactgatagcaacacctgtcttaaaggttgctgcaaaggtcattggtgaagttcaggcactgatagcttttccacttttgccgtgcctgatcctttctatcttgtatatgttctggttttctgctacactccatctcttcagctctggtcaagttgtccgaaatgattgcaatactgattgttgttcatatgatctgaagctgggaaaagtaaattgtgacaactgctgtgggtacagcatccattacacccctcatatcagcattgccattctatttcacttatttggttgctactgggcgactcaattcattctcgcatgctcttcaactgtggttgcgggatcagttgcttcatactactgggcgcgtggtgaaatatcacgactgatgcgctacagccttggatctgttgctctgggttcacttgttgtatctgttgttgaatgggtgcggtttatactagaatgccttcgtcgcaagttgaagctagttgattctgcccgagagagctgctttggaaaagcgacgtcctcctcttctgaatgctgcctgggttgcatagactggaccctcaagtcagtaaatcgaaatgcctacattatgattgccatcaccgggaaaggtttcttcaaagcttcagtgctcgcaactggattaataatgaagaacattctgcgcatcggaaaagtcaacgtcattggagatgtcatcctcttcctgggaaaactctgtgtgagcctattctgtgcgcttttcgcctttctgatgttagacacccacaagtacaagtccgcacacaacaagatatcctctccagttatccctgtcctggtaacatgggccctcggctacgtagtcgcgaagcttttctttgcggtggttgagatgtcgatcgacaccataatcctctcgttctgccaggacgccgaggagcaccaggggaacgcgcagtatgcgcccccagctctgatggaaactctggacgaacagggcgaactgcagagactaactcaagggccttgactgtcttttcctcttggtagtagcatggaaacttagcggcagcctaatgttttgttaccccgttccgttctcttggcttgtgaagaggtttgccatttttgcttgctattccatgtacaagtctgaatctgacatgttctcctggcccaattggcatgtgtaggcagcttatctatatatgtgtgcagtgtgctattgctgatacggcgttggtgaaatactccctccgtttccaacttccaacatcataaatttaaccaaatttatatagtaaaacaatagcatttatgatacctaaataactattattggattcttcattagttagctatttgatgtcatagatctttgtgtgtgtgttttttttt

SEQ ID NO: 18805 - DNA, 2618 bp, Zea Mays
aaaagcccaaaacctctcttcctgctgcccctcgctgttcgctgcctcccctccactctccactgttcactcccagtccccaccagcaccaggcacagatcactcgcttccccactcgctcacgccaaaaccaccgcgccgaatccgaatcgagtcgagcacgagcgagcaagcaaggagctagcgcacgcatctaggctaggcgagagcaccaaaggaggcgccgcgggtggcggcggaatgggagggcccctcggcgcgatcatcggccgctacccgtcggcggccggcggcgacgagcagctgggaggcggcgccggaggcggcattatacgccacgaccgcaggtgccgcgacatcgccgttctcgtgctcttcgccgccttctgggtcgccatgattgtcaactccagcttcggcttcaaccagggcaacccgctcaggctgacttatgaactggactacaaagggaacgtttgtggcgataagcatggcaacccaaatttgcaggagctggatgttagatactggatgaatccgaatcaagtctaccaaagtggactcaagaacagcaaggttaacctggctgatgccaaagccatctgcctgatggagtgcccaaatccagctgtagatggattgaactatatttgtgattatccagaagggaacatagacctctctgttgatgattggatcaatagggactatgactattatgagtttctcacaccagacatgaagaatagctcacttcaactccagggtccatgctaccctataatatttccaactgtaaatgtgcacaaggccatcgattctagatctgctgtattaaagagatatattgcagacattgggaagtcctggcctgtgttcatcgtttgtggtggaattctccctgttttcctgtcagttatctggttgcttatgattcgttatttcgttgctgccatgacttggattacagtagtcctcttcaatgcccttgttatatctgtaacgatgttcttttacatcaaagctggctggataggcaatgaccccttaactgttgtcattggtgaaagtgatccatatgttcacataagtggacgggaaataagtcaccttcatactattacaatcctaatgacagcagtaatgatcattgctttcctgtcctcaatagctattgtccgccgtatactgatagcaacacctgtcttaaaggttgctgcaaaggtcattggtgaagttcaggcactgatagcttttccacttttgccgtgcctgatcctttctatcttgtatatgttctggttttctgctacactccatctcttcagctctggtcaagttgtccgaaatgattgcaatactgattgttgttcatatgatctgaagctgggaaaagtaaattgtgacaactgctgtgggtacagcatccattacacccctcatatcagcattgccattctatttcacttatttggttgctactgggcgactcaattcattctcgcatgctcttcaactgtggttgcgggatcagttgcttcatactactgggcgcgtggtgaaatatcacatgatataccatttctcactgtagtctcttcactgaagcgactgatgcgctacagccttggatctgttgctctgggttcacttgttgtatctgttgttgaatgggtgcggtttatactagaatgccttcgtcgcaagttgaagctagttgattctgcccgagagagctgctttggaaaagcgacgtcctcctcttctgaatgctgcctgggttgcatagactggaccctcaagtcagtaaatcgaaatgcctacattatgattgccatcaccgggaaaggtttcttcaaagcttcagtgctcgcaactggattaataatgaagaacattctgcgcatcggaaaagtcaacgtcattggagatgtcatcctcttcctgggaaaactctgtgtgagcctattctgtgcgcttttcgcctttctgatgttagacacccacaagtacaagtccgcacacaacaagatatcctctccagttatccctgtcctggtaacatgggccctcggctacgtagtcgcgaagcttttctttgcggtggttgagatgtcgatcgacaccataatcctctcgttctgccaggacgccgaggagcaccaggggaacgcgcagtatgcgcccccagctctgatggaaactctggacgaacagggcgaactgcagagactaactcaagggccttgactgtcttttcctcttggtagtagcatggaaacttagcggcagcctaatgttttgttaccccgttccgttctcttggcttgtgaagaggtttgccatttttgcttgctattccatgtacaagtctgaatctgacatgttctcctggcccaattggcatgtgtaggcagcttatctatatatgtgtgcagtgtgctattgctgatacggcgttggtgaaatactccctccgtttccaacttccaacatcataaatttaaccaaatttatatagtaaaacaatagcatttatgatacctaaataactattattggattcttcattagttagctatttgatgtcatagatctttgtgtgtgtgttttttttt

SEQ ID NO: 18806 - DNA, 2852 bp, Zea Mays
ctctcttcctgctgcccctcgctgttcgctgcctcccctccactctccactgttcactcccagtccccaccagcaccaggcacagatcactcgcttccccactcgctcacgccaaaaccaccgcgccgaatccgaatcgagtcgagcacgagcgagcaagcaaggagctagcgcacgcatctaggctaggcgagagcaccaaaggaggcgccgcgggtggcggcggaatgggagggcccctcggcgcgatcatcggccgctacccgtcggcggccggcggcgacgagcagctgggaggcggcgccggaggcggcattatacgccacgaccgcaggtgccgcgacatcgccgttctcgtgctcttcgccgccttctgggtcgccatgattgtcaactccagcttcggcttcaaccagggcaacccgctcaggctgacttatgaactggactacaaagggaacgtttgtggcgataagcatggcaacccaaatttgcaggagctggatgttagatactggatgaatccgaatcaagtctaccaaagtggactcaagaacagcaaggttaacctggctgatgccaaagccatctgcctgatggagtgcccaaatccagctgtagatggattgaactatatttgtgattatccagaagggaacatagacctctctgttgatgattggatcaatagggactatgactattatgagtttctcacaccagacatgaagaatagctcacttcaactccagggtccatgctaccctataatatttccaactgtaaatggtaatattaatcctgccgtcattttaaaagttataagggttagatagagtggcatgacttatttattctgtaaattcatactgtaaccgtgagataagcatttcaattttcttcccctttagtctattggagctgccaatttattgcacgtgcatccaatgtttctttgaagcactggcatgagacgggtggtgtcagcattgatgaaaatatcctcattgataaaacagtgcacaaggccatcgattctagatctgctgtattaaagagatatattgcagacattgggaagtcctggcctgtgttcatcgtttgtggtggaattctccctgttttcctgtcagttatctggttgcttatgattcgttatttcgttgctgccatgacttggattacagtagtcctcttcaatgcccttgttatatctgtaacgatgttcttttacatcaaagctggctggataggcaatgaccccttaactgttgtcattggtgaaagtgatccatatgttcacataagtggacgggaaataagtcaccttcatactattacaatcctaatgacagcagtaatgatcattgctttcctgtcctcaatagctattgtccgccgtatactgatagcaacacctgtcttaaaggttgctgcaaaggtcattggtgaagttcaggcactgatagcttttccacttttgccgtgcctgatcctttctatcttgtatatgttctggttttctgctacactccatctcttcagctctggtcaagttgtccgaaatgattgcaatactgattgttgttcatatgatctgaagctgggaaaagtaaattgtgacaactgctgtgggtacagcatccattacacccctcatatcagcattgccattctatttcacttatttggttgctactgggcgactcaattcattctcgcatgctcttcaactgtggttgcgggatcagttgcttcatactactgggcgcgtggtgaaatatcacatgatataccatttctcactgtagtctcttcactgaagcgactgatgcgctacagccttggatctgttgctctgggttcacttgttgtatctgttgttgaatgggtgcggtttatactagaatgccttcgtcgcaagttgaagctagttgattctgcccgagagagctgctttggaaaagcgacgtcctcctcttctgaatgctgcctgggttgcatagactggaccctcaagtcagtaaatcgaaatgcctacattatggtcagtatgaagatttgattgccatcaccgggaaaggtttcttcaaagcttcagtgctcgcaactggattaataatgaagaacattctgcgcatcggaaaagtcaacgtcattggagatgtcatcctcttcctgggaaaactctgtgtgagcctattctgtgcgcttttcgcctttctgatgttagacacccacaagtacaagtccgcacacaacaagatatcctctccagttatccctgtcctggtaacatgggccctcggctacgtagtcgcgaagcttttctttgcggtggttgagatgtcgatcgacaccataatcctctcgttctgccaggacgccgaggagcaccaggggaacgcgcagtatgcgcccccagctctgatggaaactctggacgaacagggcgaactgcagagactaactcaagggccttgactgtcttttcctcttggtagtagcatggaaacttagcggcagcctaatgttttgttaccccgttccgttctcttggcttgtgaagaggtttgccatttttgcttgctattccatgtacaagtctgaatctgacatgttctcctggcccaattggcatgtgtaggcagcttatctatatatgtgtgcagtgtgctattgctgatacggcgttggtgaaatactccctccgtttccaacttccaacatcataaatttaaccaaatttatatagtaaaacaatagcatttatgatacctaaataactattattggattcttcattagttagctatttgatgtcatagatctttgtgtgtgtgttttttttt

SEQ ID NO: 18807 - DNA, 2074 bp, Zea Mays
cctgctgcccctcgctgttcgctgcctcccctccactctccactgttcactcccagtccccaccagcaccaggcacagatcactcgcttccccactcgctcacgccaaaaccaccgcgccgaatccgaatcgagtcgagcacgagcgagcaagcaaggagctagcgcacgcatctaggctaggcgagagcaccaaaggaggcgccgcgggtggcggcggaatgggagggcccctcggcgcgatcatcggccgctacccgtcggcggccggcggcgacgagcagctgggaggcggcgccggaggcggcattatacgccacgaccgcaggtgccgcgacatcgccgttctcgtgctcttcgccgccttctgggtcgccatgattgtcaactccagcttcggcttcaaccagggcaacccgctcaggctgacttatgaactggactacaaagggaacgtttgtggcgataagcatggcaacccaaatttgcaggagctggatgttagatactggatgaatccgaatcaagtctaccaaagtggactcaagaacagcaaggttaacctggctgatgccaaagccatctgcctgatggagtgcccaaatccagctgtagatggattgaactatatttgtgattatccagaagggaacatagacctctctgttgatgattggatcaatagggactatgactattatgagtttctcacaccagacatgaagaatagctcacttcaactccagggtccatgctaccctataatatttccaactgtaaatgtctattggagctgccaatttattgcacgtgcatccaatgtttctttgaagcactggcatgagacgggtggtgtcagcattgatgaaaatatcctcattgataaaacagtgcacaaggccatcgattctagatctgctgtattaaagagatatattgcagacattgggaagtcctggcctgtgttcatcgtttgtggtggaattctccctgttttcctgtcagttatctggttgcttatgattcgttatttcgttgctgccatgacttggattacagtagtcctcttcaatgcccttgttatatctgtaacgatgttcttttacatcaaagctggctggataggcaatgaccccttaactgttgtcattggtgaaagtgatccatatgttcacataagtggacgggaaataagtcaccttcatactattacaatcctaatgacagcagtaatgatcattgctttcctgtcctcaatagctattgtccgccgtatactgatagcaacacctgtcttaaaggttgctgcaaaggtcattggtgaagttcaggcactgatagcttttccacttttgccgtgcctgatcctttctatcttgtatatgttctggttttctgctacactccatctcttcagctctggtcaagttgtccgaaatgattgcaatactgattgttgttcatatgatctgaagctgggaaaagtaaattgtgacaactgctgtgggtacagcatccattacacccctcatatcagcattgccattctatttcacttatttggttgctactgggcgactcaattcattctcgcatgctcttcaactgtggttgcgggatcagttgcttcatactactgggcgcgtggtgaaatatcacatgatataccatttctcactgtagtctcttcactgaagcgactgatgcgctacagccttggatctgttgctctgggttcacttgttgtatctgttgttgaatgggtgcggtttatactagaatgccttcgtcgcaagttgaagctagttgattctgcccgagagagctgctttggaaaagcgacgtcctcctcttctgaatgctgcctgggttgcatagactggaccctcaagtcagtaaatcgaaatgcctacattatgattgccatcaccgggaaaggtttcttcaaagcttcagtgctcgcaactggattaataatgaagaacattctgcgcatcggaaaagtcaacgtcattggagatgtcatcctcttcctgggaaaactctgtatctcaatttccatttgctgaaacccg

SEQ ID NO: 18808 - DNA, 826 bp, Zea Mays
gtatcagagcataggaaaatgtactgaaatatgctacaaagatccggtgttagaagatcgccagtggagcgcttacattgaccgatctccagggcaggatagttactctttggaatgcttcaatgcttgtgtgtctggctgtggattcagatttgacatcccaacggagaaggtcgaagaaatcaagcccaataggccatccaaaccatcagctcctgaacctgaagtgaaacaaactaggaatgcagattgtaatgaagatgtgccgtgcacgtcagcctagtttgagtgttggcgtgcctcaaattttgtaaagccaatgtgtttctccgttgtatttctactcgtcctattttcccatggaaaactcacgggaaactttatctagcttagctctagtttggaaactcaaatcccttcgtggatgaaaggggtttgagggacaaattagtttatttttatcttaatcccttccaatccccgggtgatttgagtttacaaactagcctttagagtaaagatttaccacattggcaatgaaagatgatggcctgggaactaggtgaagatttactgcattggtggtgataagtgagcctgaccctgatgagtatagtaattcgacgatgtaatgtgcataagtaacggggtcttgagtttatattccatgcatcacatattgtttggatcaccaccgccgatcccacattgcgcagttgtggcggttgaatcggccgccgcagcttaggcagggtgctggaggtcaaggtccaaacatgtcatgtatctttcagttcaatcatccttgcgtgccagcacctagcaa

SEQ ID NO: 18809 - DNA, 915 bp, Zea Mays
tgtattttcatgctgaagggaccgatgtggtattaaacttttttggtgttgattcgcaacaacaaccatagctgttgagatttttcaagagaatactaatcaagttcatgttgtaaattattgtttgtgttgcatattgtatgtgacataccgacaagtttctttattcaatgtttttgacaaagtcagtttttcgtgcaggaatgcttcaatgcttgtgtgtctggctgtggattcagatttgacatcccaacggagaaggtcgaagaaatcaagcccaataggccatccaaaccatcagctcctgaacctgaagtgaaacaaactaggaatgcagattgtaatgaagatgtgccgtgcacgtcagcctagtttgagtgttggcgtgcctcaaattttgtaaagccaatgtgtttctccgttgtatttctactcgtcctattttcccatggaaaactcacgggaaactttatctagcttagctctagtttggaaactcaaatcccttcgtggatgaaaggggtttgagggacaaattagtttatttttatcttaatcccttccaatccccgggtgatttgagtttacaaactagcctttagagtaaagatttaccacattggcaatgaaagatgatggcctgggaactaggtgaagatttactgcattggtggtgataagtgagcctgaccctgatgagtatagtaattcgacgatgtaatgtgcataagtaacggggtcttgagtttatattccatgcatcacatattgtttggatcaccaccgccgatcccacattgcgcagttgtggcggttgaatcggccgccgcagcttaggcagggtgctggaggtcaaggtccaaacatgtcatgtatctttcagttcaatcatccttgcgtgccagcacctagcaa

SEQ ID NO: 18810 - DNA, 2278 bp, Zea Mays
caaacacgtacatcctcccgtagatgcctagcagagatcaccaacccatgcggtgcaggacgtgacggcgatggcgaggcggcagctgtgccggaccaagcgtaccaaccgtccccgtcggccgtcgggaactccccacccccgcattttctccgcgttttgtcaacgtcacgcctcgcccgccgtcctttcctctcccactcccacccccaccccgctatctcccactctttctctgcacggcggggctccactcgtccgccactccaccgcttctacaagatcctacaccacgtcaaaccagacccagccgcggagaaagctagctgtagctacctacccggtccggtctccgcttctcccgcacgcgcagcctgctgcatcctccttcctgcgaccgcccgcttcgttcgcggaacataaaggtcttgctccggtcagccacggcggcatcggcatcggcatggcggggcggatggtgcggagctgcgtgcagacggcgctcaaggcggccaactccgtcgtggggctcgccggcatggccgtcatcctctacgcgctctggatgctccgcgcatggtacagggagatcgccggcctcggccaacgccccccggccccctggttcatctacacatttcttggcctggggatctttctctgcatactgacttgctctgggcatattgctgctgaaactgcaaatggtcactgcctctactgtgtatccttttagttagtaggtacatagtagatttaaatgttgttccatataccagcctccattggttgtgtttgattgctgactacctatgctaaatcacatggagttacatgttatccagctgccatcacctgggttttttgcttgttggctacatatagtgaatgagtggttagcagcttctgctggttcatccaaggttttcagctaggtgcagaaaccacatcttttttctaggttatataattatctgtacatgagatgccaaaaagaactgatctgagagtgagagtgctggcctcgaattgcagttacattctttaagctctgtaatgtttagtgcagtgcgacctcccagtgatattgcccttctttttccttaacccacatgtagtacatgaccatcgtatttatgcttattatactggaaggcgcaatcactttggatgtatttctgaatagcaactgggaagagggtttccctcctgacccatcaggcaagtttggggatttcaagcactttgtgagatccaattccgagatatgtgaatgggtaggcctctcagtggtggctgctcaggtgctatcaatcgttcttgggatggtgctcaggacccttgggcctgaccgtgagaccgactatgacagtgaagacgacacagccgtgcccgcaaggctgcctctcctgagaaaccagtcccagcatggatcttgggactacgctgaagctaccacgtctcgtcagggacttccgttattacattctaaatgtgttcagcgttaataaaagccttgcgacgttccattgcaggtgaagaacaacagacccttcaggatggtcatagattatatctttttcttcttcttatatggagagagtattcctatgttagaatagcagaagcagcagcagcagcagcggtagagtagttctgaaacctggacgccaatcagcatgctcagatatttgagtagcatgtgaactgacccttataaccccgcatactggggaaggaagagatgaggtcacgattggtgccttcactgaccaaagacagagatgtttgttctttcccttgttgtttatccatcagctgcaccatccattttaatctgcttgtttgctgccagatttccttcctattcgcatcacctgtcaacagccttgcctttcatcactccggcggtggtaagcaaggaatgaaagcaacccgacgctgaaactacagagcatttcatttcaagcttcaaactgaacccaatacatacatgcacgacatggtggtggtgctcccatccacataaaccttgtagattaggatcatgagcagccccagcgcgtcggccaggctgcacgaggaagaggaacatgcgcatctcgagaaatccgctgccctgtccacttgtttcagcagtcatcaggcacgcgtcgggctcgggcagccatccacacgagcacggcaaggcaacttgatgtggctcaggaagaatcagctgggagcgggacggcactcacagggtgttggcgtgctggatgtcagcctcaagaacctt

SEQ ID NO: 18811 - DNA, 1884 bp, Zea Mays
caaacacgtacatcctcccgtagatgcctagcagagatcaccaacccatgcggtgcaggacgtgacggcgatggcgaggcggcagctgtgccggaccaagcgtaccaaccgtccccgtcggccgtcgggaactccccacccccgcattttctccgcgttttgtcaacgtcacgcctcgcccgccgtcctttcctctcccactcccacccccaccccgctatctcccactctttctctgcacggcggggctccactcgtccgccactccaccgcttctacaagatcctacaccacgtcaaaccagacccagccgcggagaaagctagctgtagctacctacccggtccggtctccgcttctcccgcacgcgcagcctgctgcatcctccttcctgcgaccgcccgcttcgttcgcggaacataaaggtcttgctccggtcagccacggcggcatcggcatcggcatggcggggcggatggtgcggagctgcgtgcagacggcgctcaaggcggccaactccgtcgtggggctcgccggcatggccgtcatcctctacgcgctctggatgctccgcgcatggtacagggagatcgccggcctcggccaacgccccccggccccctggttcatctacacatttcttggcctggggatctttctctgcatactgacttgctctgggcatattgctgctgaaactgcaaatggtcactgcctctactgttacatgaccatcgtatttatgcttattatactggaaggcgcaatcactttggatgtatttctgaatagcaactgggaagagggtttccctcctgacccatcaggcaagtttggggatttcaagcactttgtgagatccaattccgagatatgtgaatgggtaggcctctcagtggtggctgctcaggtgctatcaatcgttcttgggatggtgctcaggacccttgggcctgaccgtgagaccgactatgacagtgaagacgacacagccgtgcccgcaaggctgcctctcctgagaaaccagtcccagcatggatcttgggactacgctgaagctaccacgtctcgtcagggacttccgttattacattctaaatgtgttcagcgttaataaaagccttgcgacgttccattgcaggtgaagaacaacagacccttcaggatggtcatagattatatctttttcttcttcttatatggagagagtattcctatgttagaatagcagaagcagcagcagcagcagcggtagagtagttctgaaacctggacgccaatcagcatgctcagatatttgagtagcatgtgaactgacccttataaccccgcatactggggaaggaagagatgaggtcacgattggtgccttcactgaccaaagacagagatgtttgttctttcccttgttgtttatccatcagctgcaccatccattttaatctgcttgtttgctgccagatttccttcctattcgcatcacctgtcaacagccttgcctttcatcactccggcggtggtaagcaaggaatgaaagcaacccgacgctgaaactacagagcatttcatttcaagcttcaaactgaacccaatacatacatgcacgacatggtggtggtgctcccatccacataaaccttgtagattaggatcatgagcagccccagcgcgtcggccaggctgcacgaggaagaggaacatgcgcatctcgagaaatccgctgccctgtccacttgtttcagcagtcatcaggcacgcgtcgggctcgggcagccatccacacgagcacggcaaggcaacttgatgtggctcaggaagaatcagctgggagcgggacggcactcacagggtgttggcgtgctggatgtcagcctcaagaacctt

SEQ ID NO: 18812 - DNA, 643 bp, Zea Mays
atggcgaggcggcagctgtgccggaccaagcgtaccaaccgtccccgtcggccgtcgggaactccccacccccgcattttctccgcgttttgtcaacgtcacgcctcgcccgccgtcctttcctctcccactcccacccccaccccgctatctcccactctttctctgcacggcggggctccactcgtccgccactccaccgcttctacaagatcctacaccacgtcaaaccagacccagccgcggagaaagctagctgtagctacctacccggtccggtctccgcttctcccgcacgcgcagcctgctgcatcctccttcctgcgaccgcccgcttcgttcgcggaacataaaggtcttgctccggtcagccacggcggcatcggcatcggcatggcggggcggatggtgcggagctgcgtgcagacggcgctcaaggcggccaactccgtcgtggggctcgccggcatggccgtcatcctctacgcgctctggatgctccgcgcatggtacagggagatcgccggcctcggccaacgccccccggccccctggttcatcaccatgggtgacggcgctcaaccctccatggccgacgtcatgcagatgctccagaccctgtccaccaacatgtccaagatgc

SEQ ID NO: 18813 - DNA, 5363 bp, Zea Mays
gcgtgtgtatgtatcaaaccaacaccaacacgctcggctccgcctccgctggtaggtcacatcacactcgcttcaatattgacaccaccaacgcacgcacgacccttcttcctcctcccggcggctaggctgatttctccttgcatcgcctttattgcgctcagctgctctgccaagtgccaacgtcgtacacctccagcagtggagggagccggagcacgagcaacaccaaggtgtccgccacagaaatctacatataattgcagccccaaccacctcgttcctcttccccttcccccctccccagccaaatccgctttcctagctctaatcgccgccgatctcgccggaggaactgctagctagctgctcccttcacttctcaggagccaggattaaaagttgcctcaaagaagaagatccctctgcgccgctgcatgttgagcgagcctaccgtagcgacgagcgcggatatgaattggtgttgtgttcctagggccaacaagagagaagagaacccttactccaacagcatcggcggcatctactccgagaagaacataaggctgttctcctatgccgagttaagatctgctaccgacaacttcaaccgcaccaacaaagtgggacgaggcggattcgggacagtttataagggaaccatccgaagcgggcgagaggtcgcggtgaaggtcctctccgccgagtccaggcagggcatcagggagttcctgacggagatcgacgtcatcagcaacgtcaagcaccccaacctcgtcgaactcatcggctgctgcgtcgagggaagcaaccggattctggtgtatgagtacctcaagaacagcagccttgaccgtgcgctgctggtgagcctgccgacttcacctggagcgtcaggtctgctatatgcctcggagtcgctcggggccttgcgtacctgcacgaggagatcgcggcgccgatcgtgcacagagacatcaaggccagcaacatacttctcgacaggaactacgtccccaagatcggggatttcggtctggccaagctgtttcctgacaatgtcacccacatcagcacccgcgtcgcgggaacaacaggctaccttgcgcctgagtacgcctggcatggccagctcaccaagaaagcggacatctacagctttggtgtccttgtcctggagatagtgagcggcactagtagctccaggagcatactcatggatgacaagattctcctagagaaggcatgggagctgtacgaagcgaagaggctcaaggaactggtggatccagcccttgtagactgccctgacgaagaagccatcaggtacatcatggtggccctcttctgcctacaggcggccgccgcgcgccggccgacgatgccccaggtcgtcaccatgctgtccaagcccgtccggatcaacgagagcgagctgacggcgccggggtacctccaggagtacagcaggcggagccccttgtccaaggccaccacttccaccgactccaggttcaagaacctggcgtcccaggaggactccaacatgttcagcacggtggtgccacccacggtgaccgagatgagccccaggtgaagcaaccgccatgtaattttgactaattccttccttgcgttttgtcaaccggcggcgactatatgatgtagtgccaagtgtgttttcctcctgcaaatgcggcagctagatcttgtacatatagattagtgaatccatgccagacccagagcaatgcaagattgctgtttgttgcacagcttcagattattattagggcagtaccatatcatcgtaacagtttcagacctcaacttgtatgagatcacaggcatctcagtgacgacacaactggacaggggtgaaaacagcaaagatacgactactgtggtgatactaaattatgaatgttctgtgctcatacgaagacatcctgatgcagatctctgcaaaagatcagtacgggataaacgggtctgcgaaatcatcagaaacaaaaacacgtttccatctactgacagtcaagcctcttgtgtttctgtaatgctacgctttcctttccggtcactccgacgccgcaggctgctctttctcggcctccgaggggccattggcggtgctggtttcttggctctctgcaggctgcttggcgtcgtttgctggggctgccgcgccgtctttggcaccaccatcctttccaccttctttggagccatcctttgcgccctctttagcagcaggtgctggtggaggttgcaacatatgtggcggtggagcgtgcttcagcttcactaagatatggcgcatccgggagaggtcggtgggcttgccaggcttggggccctgaataactgtgacggatggcttcttgtccttgtctttctttccccgcttctcaatggtggctatttcatgcgggatgagatccgagatcgatttccagtactgcttgtctgcgttggcatggaatttctcctggctggctacaaaaatctgcagcagaccacaggagcgattagtaccaaacatagaaatagattagctaataaacacagagccctagctgcttacatatgataggcgcataccttctccctttctctgttgttgaccatattcgacgcacagttctgtatcctcttctcaaaaaaagctttcttgaattcttctgcttcagcaattatttgggcacgtagctccttctccttctgttcttttttctcaagttccatagcatttttcctaagacattgttgaaaaaggaagcaataacaaattaaaactagagtggcaggaaaaaaaatcaaggaagccaagaaaatgacatcattcgatttgagggacacaaaagacaggacagtaacttggtctgtacccttacaatagttacaggctccttacaaattgaccttactggactttccacaagataagcattaaacaaatcagaatcaacgccactccaaatatagacaaatctactactgctgcaagcctgggacaatgtcctgatgaagaacatcataccaaacacggcttacacaactccaatattcatgaacttctattagttaactaccaaagtaaattccgaagtaaatatagacgtgcactaaaccataaaataaacgaggttgtatcagcagacaattgcgtcatagtctcatagagcatattatgttaggaacctaatgcacacattttgcaaggttacaaagacgagcagtaccaaaagaatgtatggattttctctgggaggtacaccttcactgatttgaggatttcaagaaaaccagcagatatgaaaatctaaaaaaaatgtgtccacctggtgtgatgtcagcaaaacatacagttggaagaatgcagcaccagatgaagcattaagtggtcgcaaaagaacaatggtgaataactaactagttatatccacatacatagatagctaagacatcctacaatcaaggttttccagaaatgcatcaaacaccaggaagagaacaaacatacatgaggactgtaagtttgcaaaaaaaaacatcggttttctagagtacaaggtaatccaacaaagaacattctccaactaatatgacgtttttggaagcctctatgattgcatggcacaaattcatattttagaaggttggtttgacatactttttacctttattcctctagtttctgtgggacttagttcatacaatttcgatacaatatgataataggctgtataggtaagattgggacagatacaatctaggtaaaatgcaatagctaaggcagggttagttctgaattatgtcatgctagcttagtctgaattttactttctattgagtagcaaaccaaatctagatgtatatgcctatgtttattagaaacattactaggttgtaggttccttttggttcgagtataacaaaaaataaaattgagcaatacgcagttccattctaaccaaatctagttaagagataaaacacaaatttccaatgaaaatctgtcagtgtttaatactctgaatgacaagtcgttttgccttttctagattcatagtttttactaagggggtgtttgaatgcactaaatctaatagttagtggctaaaattagttgtagacatccaaacaccctagctaatagttcaactattagctatttttagtaaactagttaatagttagctagctatttgttagctagctaattccactagcaattttttagccaactaagggtgtgtttgaatgtactagaactaatagttagttggctaaaaaattgttagtggaattagctagctaactattaactaatttactaaaaatagctaatagctatggtgtttgaatgtttccagctaattttagctactaactattagctctagtgcattcaaacacccccctaattattagctctagtgcattcaaacaccccctaactattaggtctagtgtattcaaacaccccctaagtactatctagacacagtgtatacaggtgcatagcaaaaggtacctaaaaaggcaaaaacgacttataattcaggacggagtacctctgaattgcttcaataaactaatttcaggggtaaaattcacaaaacaactttaagtgctgggaccataggtgtcaagcggtcaaggaaaattactacacactgctgcatctagctacttatattcgtatttttcatattttatggtaatctgcatacagtagctccataccatcctattcatggcagtgatagtatggcaaaaacagagatactagcagatccaactatggttacacctatatggtatcaacgattcaaacacttaggctgatttggtgattatggatcccgagtggatccatggggagaaattctcttgctattcaataaccttgcaattcaattttgaatagcaagagaatttctccccatggatccactcgggatccccggtcaccaaatcagcccttatggagaacaaaacccaccctcgaaggtctgcagctatacttaagttctcagcttataaactagtccatgactggctattcccaacagcgcaatttctagtgtatcctaattcctaaccaaccgaagtaatagaaaccagcaatttccgtacagagcccctcgccgtgtttcgttcaccttcgtagtgcagaagaagcggctacagttagtcgaaagagcgccagaaagcgttagatctgactcgaacagcccgaaacctagcccacacgcaagcaagcatacaggcagcaaaacggcgtgtcccccaagcagatcggaaccggcgccggcggtcctcacctccgccactcgcggagaaggattccctcc

SEQ ID NO: 18814 - DNA, 5343 bp, Zea Mays
cgctcggctccgcctccgctggtaggtcacatcacactcgcttcaatattgacaccaccaacgcacgcacgacccttcttcctcctcccggcggctaggctgatttctccttgcatcgcctttattgcgctcagctgctctgccaagtgccaacgtcgtacacctccagcagtggagggagccggagcacgagcaacaccaaggtgtccgccacagaaatctacatataattgcagccccaaccacctcgttcctcttccccttcccccctccccagccaaatccgctttcctagctctaatcgccgccgatctcgccggaggaactgctagctagctgctcccttcacttctcaggagccaggattaaaagttgcctcaaagaagaagatccctctgcgccgctgcatgttgagcgagcctaccgtagcgacgagcgcggatatgaattggtgttgtgttcctagggccaacaagagagaagagaacccttactccaacagcatcggcggcatctactccgagaagaacataaggctgttctcctatgccgagttaagatctgctaccgacaacttcaaccgcaccaacaaagtgggacgaggcggattcgggacagtttataagggaaccatccgaagcgggcgagaggtcgcggtgaaggtcctctccgccgagtccaggcagggcatcagggagttcctgacggagatcgacgtcatcagcaacgtcaagcaccccaacctcgtcgaactcatcggctgctgcgtcgagggaagcaaccggattctggtgtatgagtacctcaagaacagcagccttgaccgtgcgctgctggcttctaacagtgagcctgccgacttcacctggagcgtcaggtctgctatatgcctcggagtcgctcggggccttgcgtacctgcacgaggagatcgcggcgccgatcgtgcacagagacatcaaggccagcaacatacttctcgacaggaactacgtccccaagatcggggatttcggtctggccaagctgtttcctgacaatgtcacccacatcagcacccgcgtcgcgggaacaacaggctaccttgcgcctgagtacgcctggcatggccagctcaccaagaaagcggacatctacagctttggtgtccttgtcctggagatagtgagcggcactagtagctccaggagcatactcatggatgacaagattctcctagagaaggcatgggagctgtacgaagcgaagaggctcaaggaactggtggatccagcccttgtagactgccctgacgaagaagccatcaggtacatcatggtggccctcttctgcctacaggcggccgccgcgcgccggccgacgatgccccaggtcgtcaccatgctgtccaagcccgtccggatcaacgagagcgagctgacggcgccggggtacctccaggagtacagcaggcggagccccttgtccaaggccaccacttccaccgactccaggttcaagaacctggcgtcccaggaggactccaacatgttcagcacggtggtgccacccacggtgaccgagatgagccccaggtgaagcaaccgccatgtaattttgactaattccttccttgcgttttgtcaaccggcggcgactatatgatgtagtgccaagtgtgttttcctcctgcaaatgcggcagctagatcttgtacatatagattagtgaatccatgccagacccagagcaatgcaagattgctgtttgttgcacagcttcagattattattagggcagtaccatatcatcgtaacagtttcagacctcaacttgtatgagatcacaggcatctcagtgacgacacaactggacaggggtgaaaacagcaaagatacgactactgtggtgatactaaattatgaatgttctgtgctcatacgaagacatcctgatgcagatctctgcaaaagatcagtacgggataaacgggtctgcgaaatcatcagaaacaaaaacacgtttccatctactgacagtcaagcctcttgtgtttctgtaatgctacgctttcctttccggtcactccgacgccgcaggctgctctttctcggcctccgaggggccattggcggtgctggtttcttggctctctgcaggctgcttggcgtcgtttgctggggctgccgcgccgtctttggcaccaccatcctttccaccttctttggagccatcctttgcgccctctttagcagcaggtgctggtggaggttgcaacatatgtggcggtggagcgtgcttcagcttcactaagatatggcgcatccgggagaggtcggtgggcttgccaggcttggggccctgaataactgtgacggatggcttcttgtccttgtctttctttccccgcttctcaatggtggctatttcatgcgggatgagatccgagatcgatttccagtactgcttgtctgcgttggcatggaatttctcctggctggctacaaaaatctgcagcagaccacaggagcgattagtaccaaacatagaaatagattagctaataaacacagagccctagctgcttacatatgataggcgcataccttctccctttctctgttgttgaccatattcgacgcacagttctgtatcctcttctcaaaaaaagctttcttgaattcttctgcttcagcaattatttgggcacgtagctccttctccttctgttcttttttctcaagttccatagcatttttcctaagacattgttgaaaaaggaagcaataacaaattaaaactagagtggcaggaaaaaaaatcaaggaagccaagaaaatgacatcattcgatttgagggacacaaaagacaggacagtaacttggtctgtacccttacaatagttacaggctccttacaaattgaccttactggactttccacaagataagcattaaacaaatcagaatcaacgccactccaaatatagacaaatctactactgctgcaagcctgggacaatgtcctgatgaagaacatcataccaaacacggcttacacaactccaatattcatgaacttctattagttaactaccaaagtaaattccgaagtaaatatagacgtgcactaaaccataaaataaacgaggttgtatcagcagacaattgcgtcatagtctcatagagcatattatgttaggaacctaatgcacacattttgcaaggttacaaagacgagcagtaccaaaagaatgtatggattttctctgggaggtacaccttcactgatttgaggatttcaagaaaaccagcagatatgaaaatctaaaaaaaatgtgtccacctggtgtgatgtcagcaaaacatacagttggaagaatgcagcaccagatgaagcattaagtggtcgcaaaagaacaatggtgaataactaactagttatatccacatacatagatagctaagacatcctacaatcaaggttttccagaaatgcatcaaacaccaggaagagaacaaacatacatgaggactgtaagtttgcaaaaaaaaacatcggttttctagagtacaaggtaatccaacaaagaacattctccaactaatatgacgtttttggaagcctctatgattgcatggcacaaattcatattttagaaggttggtttgacatactttttacctttattcctctagtttctgtgggacttagttcatacaatttcgatacaatatgataataggctgtataggtaagattgggacagatacaatctaggtaaaatgcaatagctaaggcagggttagttctgaattatgtcatgctagcttagtctgaattttactttctattgagtagcaaaccaaatctagatgtatatgcctatgtttattagaaacattactaggttgtaggttccttttggttcgagtataacaaaaaataaaattgagcaatacgcagttccattctaaccaaatctagttaagagataaaacacaaatttccaatgaaaatctgtcagtgtttaatactctgaatgacaagtcgttttgccttttctagattcatagtttttactaagggggtgtttgaatgcactaaatctaatagttagtggctaaaattagttgtagacatccaaacaccctagctaatagttcaactattagctatttttagtaaactagttaatagttagctagctatttgttagctagctaattccactagcaattttttagccaactaagggtgtgtttgaatgtactagaactaatagttagttggctaaaaaattgttagtggaattagctagctaactattaactaatttactaaaaatagctaatagctatggtgtttgaatgtttccagctaattttagctactaactattagctctagtgcattcaaacacccccctaattattagctctagtgcattcaaacaccccctaactattaggtctagtgtattcaaacaccccctaagtactatctagacacagtgtatacaggtgcatagcaaaaggtacctaaaaaggcaaaaacgacttataattcaggacggagtacctctgaattgcttcaataaactaatttcaggggtaaaattcacaaaacaactttaagtgctgggaccataggtgtcaagcggtcaaggaaaattactacacactgctgcatctagctacttatattcgtatttttcatattttatggtaatctgcatacagtagctccataccatcctattcatggcagtgatagtatggcaaaaacagagatactagcagatccaactatggttacacctatatggtatcaacgattcaaacacttaggctgatttggtgattatggatcccgagtggatccatggggagaaattctcttgctattcaataaccttgcaattcaattttgaatagcaagagaatttctccccatggatccactcgggatccccggtcaccaaatcagcccttatggagaacaaaacccaccctcgaaggtctgcagctatacttaagttctcagcttataaactagtccatgactggctattcccaacagcgcaatttctagtgtatcctaattcctaaccaaccgaagtaatagaaaccagcaatttccgtacagagcccctcgccgtgtttcgttcaccttcgtagtgcagaagaagcggctacagttagtcgaaagagcgccagaaagcgttagatctgactcgaacagcccgaaacctagcccacacgcaagcaagcatacaggcagcaaaacggcgtgtcccccaagcagatcggaaccggcgccggcggtcctcacctccgccactcgcggagaaggattccctcc

SEQ ID NO: 18815 - DNA, 3517 bp, Zea Mays
aaaacggcctttttccccctacgatctgggctgctcatgtccgtaggcccgtcaatttgcctatacgggctggcccattaactcactcgtcgtttactctcctctcgtcggcttctttgcttcgggtggacggcagggcgagcggcgacgccctcttcgtcggggaccttcgccggcgacgagaatccaacctgataatccggaagatacatgtgccagatgtgtcgatcacagggatagtaaagctctcgaactgggtgtaaagagatgataacatgtctgattttgaggagccctttaaaatttctgggatgtggcaatgctccatttgcacgcatgaaaatactacatatagttcatcttgtgagctatgtggtgtgcttcatgatctctcactgtatttcaatgatatcagtgaagacgaagatggagacacaagtattctggagtatccatccttgcaagatctctttttacaccacctagtgcaaagtcaaaggctattgttttctctcatgatttcaaagacagaagaaatacaacagggaataagcaagctacaatggatgctctacataagacattcatgactcgcaaaaagcgccacattaacatagtgcctttcaagtttgatacaccatctcctgatgacatggtcactacaggattaaaatcatccagaaactttagaaaagttgacacagaggttctagttaaggattctgttggcgtgactggaaaggagatgatgaataatgatattcttctaactgaaaagaatacaagcatggacccaagtgcattagtacagttggatgatggtggaactagtagcaatgttccttcgagtagtcaaaatataactcttgctttggaccatgagctacaacatttgagtttggagagcaaactgaagaacagtaaaacgaatgttaagaaaacagcttctgtttctcactacaagccagaaccttggatgctccagagtgaaaatcaagaaatccgtaatcagctaagtcttgccattgttggtcatgttgattctgggaaatcaactttatgtggtcgattgcgacatgctctgggattgatttcaaaaaagcaaatgcataaatatgagaaagaagctaaagaaaagggaaaagggtcatttgcatatgcctgggctatggatgagagcagtgatgagagggagcgtggcattacgatgactgtggctgtagcatactttaatagcgagaaataccgtgtggttctgcttgactcccctggtcacaaggattttgtgcctaatatgatatctggtgctacacaagctgatgccgccatcctagttgttgatgcatctatagggtcatttgaagcaggcatgggtgtcaatgggattggtcagacgaaggagcactcgcagcttgttaggagctttggtgttgagaacttgatagttgctgttaataagatggatggggtggaatattcgaaggagcggtttcagtccgttaaatcgcaactcggcgtctttcttcggtcgtgtgggtacaaggactcttcagtcacctgggttcctttgagcgcaatggccaacgaaaatttagtcacagcttgttcagacactcgacttttatcttggtacaatggaggctgtctgctgcaagccatcgactcgttacctcctccccgtcgcgacgtgtcaagtccactgcgccttccgatatgtgatgtcattgcatctcacacgctgggccaggtggctgtctgtggtaaagtcgagtctggagggatccgaactggctgtaaggtccttgtcatgccttctggagacatagctacggtgaaaaccatggagcgggattcctctacctgcagcttggctagagccggggacaacgtcgccgttggtttgcacggggtggaccctggccacatcgcggcaggcggagttctctgccatccagatttcccggtgcgcgtggcgtgtcacctggagctgaaaattctggttctggaaatcaccgtgccaatactggttggccttgagtttgagctgcacatacggcacgccaagtcgtccgcgaggctggtgagaatactgtcgtccctggaccagaagaccggcagggccctgaagaaagcgccgcgtctgctcaccgcgaggcaggcggccctggtcgaggtgaggctggacagagaagcgtgcgtggaggaattctcgacgctgaaggcgctcgcgcgggtgttcctgcggtcgcagggtagcacggttgcggtgggcgtggtgactcgagtcctggaccgggctttggacatgggctagctgcattggcacgggcgcggataatttatgaacgtcacgcgcgcggggggaggcaggtaggtcggtctcctggattaatggcacccgggaccgggagggagagagagagggcctttcggcgcccaacgaacgattcaaaggcggccgacacgagtttcgtccacgcacccccacggttcaaagggaggatccgcccgggacggacgggtcaaaggcccgcgactgcaatgaattcaatgaatctggggctgtaagccggccgttggcttgttgcaatctgtccctatttttcttccatccaatccaagggcgcaccgacaggcacactgcgtagttagtgccccttgtgctgaccgtccgaccgcggctgaggaggggggtgtgcggtggcatgtgttgaatgagctgtggtttctgccgtattagtctagtatctatatagcgactcgtttgccggattacccactaagccatgtgtgttgtttgctggaacggccgcgcagctagcatgaacaatcatcggctgccagccatgtggcgcctgcctgcccgcctccattatgcatgcagctagctgctcggcccctgcaacggagaaatttgcaactttggcactcccgtccgccgccgccgcaaacgatttataatcatacagacataaattatgtcttctgtttctgtttgaaatagagatgagataaagagatctactgaagatggccttagactgtttcgcagcggcaggttcgttgaggtcgttgtacttgccggtcgctacagctcgcctttttctttttccatttcgttttcttttctgacgaagcggatggaatgcttgccattgccaagctcttggaaactagtacaaggggcgggcggcgtagtgtgcgctgggacggaggcgacccttttgtcagcgactccgcgcagccggtgggaaccacctaggcccaccaaaacatccgcaatgatagtatcagccggccggctcacacatgcatgcagacaatttttttttttttttttacaacagcacatgcagctcgcactgcccctatgctactgctgcatgcatcaccagcaaatgaataccacgtgttaaaccgagagagagaaagagcaaccgctgaggctatccacactcatacaaccctaaatttttactctaaaaagaatattctattctggtcagcgagattcttt

SEQ ID NO: 18816 - DNA, 3423 bp, Zea Mays
gctcatgtccgtaggcccgtcaatttgcctatacgggctggcccattaactcactcgtcgtttactctcctctcgtcggcttctttgcttcgggtggacggcagggcgagcggcgacgccctcttcgtcggggaccttcgccggcgacgagaatccaacctgataatccggaagatacatgtgccagatgtgtcgatcacagggatagtaaagctctcgaactgggtgtaaagagatgtttgttcccgtgttagataacatgtctgattttgaggagccctttaaaatttctgggatgtggcaatgctccatttgcacgcatgaaaatactacatatagttcatcttgtgagctatgtggtgtgcttcatgatctctcactgtatttcaatgatatcagtgaagacgaagatggagacacaagtattctggagtatccatccttgcaagatctctttttacaccacctagtgcaaagtcaaaggctattgttttctctcatgatttcaaagacagaagaaatacaacagggaataagcaagctacaatggatgctctacataagacattcatgactcgcaaaaagcgccacattaacatagttgacacagaggttctagttaaggattctgttggcgtgactggaaaggagatgatgaataatgatattcttctaactgaaaagaatacaagcatggacccaagtgcattagtacagttggatgatggtggaactagtagcaatgttccttcgagtagtcaaaatataactcttgctttggaccatgagctacaacatttgagtttggagagcaaactgaagaacagtaaaacgaatgttaagaaaacagcttctgtttctcactacaagccagaaccttggatgctccagagtgaaaatcaagaaatccgtaatcagctaagtcttgccattgttggtcatgttgattctgggaaatcaactttatgtggtcgattgcgacatgctctgggattgatttcaaaaaagcaaatgcataaatatgagaaagaagctaaagaaaagggaaaagggtcatttgcatatgcctgggctatggatgagagcagtgatgagagggagcgtggcattacgatgactgtggctgtagcatactttaatagcgagaaataccgtgtggttctgcttgactcccctggtcacaaggattttgtgcctaatatgatatctggtgctacacaagctgatgccgccatcctagttgttgatgcatctatagggtcatttgaagcaggcatgggtgtcaatgggattggtcagacgaaggagcactcgcagcttgttaggagctttggtgttgagaacttgatagttgctgttaataagatggatggggtggaatattcgaaggagcggtttcagtccgttaaatcgcaactcggcgtctttcttcggtcgtgtgggtacaaggactcttcagtcacctgggttcctttgagcgcaatggccaacgaaaatttagtcacagcttgttcagacactcgacttttatcttggtacaatggaggctgtctgctgcaagccatcgactcgttacctcctccccgtcgcgacgtgtcaagtccactgcgccttccgatatgtgatgtcattgcatctcacacgctgggccaggtggctgtctgtggtaaagtcgagtctggagggatccgaactggctgtaaggtccttgtcatgccttctggagacatagctacggtgaaaaccatggagcgggattcctctacctgcagcttggctagagccggggacaacgtcgccgttggtttgcacggggtggaccctggccacatcgcggcaggcggagttctctgccatccagatttcccggtgcgcgtggcgtgtcacctggagctgaaaattctggttctggaaatcaccgtgccaatactggttggccttgagtttgagctgcacatacggcacgccaagtcgtccgcgaggctggtgagaatactgtcgtccctggaccagaagaccggcagggccctgaagaaagcgccgcgtctgctcaccgcgaggcaggcggccctggtcgaggtgaggctggacagagaagcgtgcgtggaggaattctcgacgctgaaggcgctcgcgcgggtgttcctgcggtcgcagggtagcacggttgcggtgggcgtggtgactcgagtcctggaccgggctttggacatgggctagctgcattggcacgggcgcggataatttatgaacgtcacgcgcgcggggggaggcaggtaggtcggtctcctggattaatggcacccgggaccgggagggagagagagagggcctttcggcgcccaacgaacgattcaaaggcggccgacacgagtttcgtccacgcacccccacggttcaaagggaggatccgcccgggacggacgggtcaaaggcccgcgactgcaatgaattcaatgaatctggggctgtaagccggccgttggcttgttgcaatctgtccctatttttcttccatccaatccaagggcgcaccgacaggcacactgcgtagttagtgccccttgtgctgaccgtccgaccgcggctgaggaggggggtgtgcggtggcatgtgttgaatgagctgtggtttctgccgtattagtctagtatctatatagcgactcgtttgccggattacccactaagccatgtgtgttgtttgctggaacggccgcgcagctagcatgaacaatcatcggctgccagccatgtggcgcctgcctgcccgcctccattatgcatgcagctagctgctcggcccctgcaacggagaaatttgcaactttggcactcccgtccgccgccgccgcaaacgatttataatcatacagacataaattatgtcttctgtttctgtttgaaatagagatgagataaagagatctactgaagatggccttagactgtttcgcagcggcaggttcgttgaggtcgttgtacttgccggtcgctacagctcgcctttttctttttccatttcgttttcttttctgacgaagcggatggaatgcttgccattgccaagctcttggaaactagtacaaggggcgggcggcgtagtgtgcgctgggacggaggcgacccttttgtcagcgactccgcgcagccggtgggaaccacctaggcccaccaaaacatccgcaatgatagtatcagccggccggctcacacatgcatgcagacaatttttttttttttttttacaacagcacatgcagctcgcactgcccctatgctactgctgcatgcatcaccagcaaatgaataccacgtgttaaaccgagagagagaaagagcaaccgctgaggctatccacactcatacaaccctaaatttttactctaaaaagaatattctattctggtcagcgagattcttt

SEQ ID NO: 18817 - DNA, 3495 bp, Zea Mays
gctcatgtccgtaggcccgtcaatttgcctatacgggctggcccattaactcactcgtcgtttactctcctctcgtcggcttctttgcttcgggtggacggcagggcgagcggcgacgccctcttcgtcggggaccttcgccggcgacgagaatccaacctgataatccggaagatacatgtgccagatgtgtcgatcacagggatagtaaagctctcgaactgggtgtaaagagatgataacatgtctgattttgaggagccctttaaaatttctgggatgtggcaatgctccatttgcacgcatgaaaatactacatatagttcatcttgtgagctatgtggtgtgcttcatgatctctcactgtatttcaatgatatcagtgaagacgaagatggagctaaatgcagacacaagtattctggagtatccatccttgcaagatctctttttacaccacctagtgcaaagtcaaaggctattgttttctctcatgatttcaaagacagaagaaatacaacagggaataagcaagctacaatggatgctctacataagacattcatgactcgcaaaaagcgccacattaacatagtgcctttcaagtttgatacaccatctcctgatgacatggtcactacaggattaaaatcatccagaaactttagaaaagttgacacagaggttctagttaaggattctgttggcgtgactggaaaggagatgatgaataatgatattcttctaactgaaaagaatacaagcatggacccaagtgcattagtacagttggatgatggtggaactagtagcaatgttccttcgagtagtcaaaatataactcttgctttggaccatgagctacaacatttgagtttggagagcaaactgaagaacagtaaaacgaatgttaagaaaacagcttctgtttctcactacaagccagaaccttggatgctccagagtgaaaatcaagaaatccgtaatcagctaagtcttgccattgttggtcatgttgattctgggaaatcaactttatgtggtcgattgcgacatgctctgggattgatttcaaaaaagcaaatgcataaatatgagaaagaagctaaagaaaagggaaaagggtcatttgcatatgcctgggctatggatgagagcagtgatgagagggagcgtggcattacgatgactgtggctgtagcatactttaatagcgagaaataccgtgtggttctgcttgactcccctggtcacaaggattttgtgcctaatatgatatctggtgctacacaagctgatgccgccatcctagttgttgatgcatctatagggtcatttgaagcaggcatgggtgtcaatgggattggtcagacgaaggagcactcgcagcttgttaggagctttggtgttgagaacttgatagttgctgttaataagatggatggggtggaatattcgaaggagcggtttcagtccgttaaatcgcaactcggcgtctttcttcggtcgtgtgggtacaaggactcttcagtcacctgggttcctttgagcgcaatggccaacgaaaatttagtcacagcttgttcagacactcgacttttatcttggtacaatggaggctgtctgctgcaagccatcgactcgttacctcctccccgtcgcgacgtgtcaagtccactgcgccttccgatatgtgatgtcattgcatctcacacgctgggccaggtggctgtctgtggtaaagtcgagtctggagggatccgaactggctgtaaggtccttgtcatgccttctggagacatagctacggtgaaaaccatggagcgggattcctctacctgcagcttggctagagccggggacaacgtcgccgttggtttgcacggggtggaccctggccacatcgcggcaggcggagttctctgccatccagatttcccggtgcgcgtggcgtgtcacctggagctgaaaattctggttctggaaatcaccgtgccaatactggttggccttgagtttgagctgcacatacggcacgccaagtcgtccgcgaggctggtgagaatactgtcgtccctggaccagaagaccggcagggccctgaagaaagcgccgcgtctgctcaccgcgaggcaggcggccctggtcgaggtgaggctggacagagaagcgtgcgtggaggaattctcgacgctgaaggcgctcgcgcgggtgttcctgcggtcgcagggtagcacggttgcggtgggcgtggtgactcgagtcctggaccgggctttggacatgggctagctgcattggcacgggcgcggataatttatgaacgtcacgcgcgcggggggaggcaggtaggtcggtctcctggattaatggcacccgggaccgggagggagagagagagggcctttcggcgcccaacgaacgattcaaaggcggccgacacgagtttcgtccacgcacccccacggttcaaagggaggatccgcccgggacggacgggtcaaaggcccgcgactgcaatgaattcaatgaatctggggctgtaagccggccgttggcttgttgcaatctgtccctatttttcttccatccaatccaagggcgcaccgacaggcacactgcgtagttagtgccccttgtgctgaccgtccgaccgcggctgaggaggggggtgtgcggtggcatgtgttgaatgagctgtggtttctgccgtattagtctagtatctatatagcgactcgtttgccggattacccactaagccatgtgtgttgtttgctggaacggccgcgcagctagcatgaacaatcatcggctgccagccatgtggcgcctgcctgcccgcctccattatgcatgcagctagctgctcggcccctgcaacggagaaatttgcaactttggcactcccgtccgccgccgccgcaaacgatttataatcatacagacataaattatgtcttctgtttctgtttgaaatagagatgagataaagagatctactgaagatggccttagactgtttcgcagcggcaggttcgttgaggtcgttgtacttgccggtcgctacagctcgcctttttctttttccatttcgttttcttttctgacgaagcggatggaatgcttgccattgccaagctcttggaaactagtacaaggggcgggcggcgtagtgtgcgctgggacggaggcgacccttttgtcagcgactccgcgcagccggtgggaaccacctaggcccaccaaaacatccgcaatgatagtatcagccggccggctcacacatgcatgcagacaatttttttttttttttttacaacagcacatgcagctcgcactgcccctatgctactgctgcatgcatcaccagcaaatgaataccacgtgttaaaccgagagagagaaagagcaaccgctgaggctatccacactcatacaaccctaaatttttactctaaaaagaatattctattctggtcagcgagattcttt

SEQ ID NO: 18818 - DNA, 3509 bp, Zea Mays
gtcaatttgcctatacgggctggcccattaactcactcgtcgtttactctcctctcgtcggcttctttgcttcgggtggacggcagggcgagcggcgacgccctcttcgtcggggaccttcgccggcgacgagaatccaacctgataatccggaagatacatgtgccagatgtgtcgatcacagggatagtaaagctctcgaactgggtgtaaagagatgtttgttcccgtgttagataacatgtctgattttgaggagccctttaaaatttctgggatgtggcaatgctccatttgcacgcatgaaaatactacatatagttcatcttgtgagctatgtggtgtgcttcatgatctctcactgtatttcaatgatatcagtgaagacgaagatggagctaaatgcagacacaagtattctggagtatccatccttgcaagatctctttttacaccacctagtgcaaagtcaaaggctattgttttctctcatgatttcaaagacagaagaaatacaacagggaataagcaagctacaatggatgctctacataagacattcatgactcgcaaaaagcgccacattaacatagtgcctttcaagtttgatacaccatctcctgatgacatggtcactacaggattaaaatcatccagaaactttagaaaagttgacacagaggttctagttaaggattctgttggcgtgactggaaaggagatgatgaataatgatattcttctaactgaaaagaatacaagcatggacccaagtgcattagtacagttggatgatggtggaactagtagcaatgttccttcgagtagtcaaaatataactcttgctttggaccatgagctacaacatttgagtttggagagcaaactgaagaacagtaaaacgaatgttaagaaaacagcttctgtttctcactacaagccagaaccttggatgctccagagtgaaaatcaagaaatccgtaatcagctaagtcttgccattgttggtcatgttgattctgggaaatcaactttatgtggtcgattgcgacatgctctgggattgatttcaaaaaagcaaatgcataaatatgagaaagaagctaaagaaaagggaaaagggtcatttgcatatgcctgggctatggatgagagcagtgatgagagggagcgtggcattacgatgactgtggctgtagcatactttaatagcgagaaataccgtgtggttctgcttgactcccctggtcacaaggattttgtgcctaatatgatatctggtgctacacaagctgatgccgccatcctagttgttgatgcatctatagggtcatttgaagcaggcatgggtgtcaatgggattggtcagacgaaggagcactcgcagcttgttaggagctttggtgttgagaacttgatagttgctgttaataagatggatggggtggaatattcgaaggagcggtttcagtccgttaaatcgcaactcggcgtctttcttcggtcgtgtgggtacaaggactcttcagtcacctgggttcctttgagcgcaatggccaacgaaaatttagtcacagcttgttcagacactcgacttttatcttggtacaatggaggctgtctgctgcaagccatcgactcgttacctcctccccgtcgcgacgtgtcaagtccactgcgccttccgatatgtgatgtcattgcatctcacacgctgggccaggtggctgtctgtggtaaagtcgagtctggagggatccgaactggctgtaaggtccttgtcatgccttctggagacatagctacggtgaaaaccatggagcgggattcctctacctgcagcttggctagagccggggacaacgtcgccgttggtttgcacggggtggaccctggccacatcgcggcaggcggagttctctgccatccagatttcccggtgcgcgtggcgtgtcacctggagctgaaaattctggttctggaaatcaccgtgccaatactggttggccttgagaaaccattatttccagtttgagctgcacatacggcacgccaagtcgtccgcgaggctggtgagaatactgtcgtccctggaccagaagaccggcagggccctgaagaaagcgccgcgtctgctcaccgcgaggcaggcggccctggtcgaggtgaggctggacagagaagcgtgcgtggaggaattctcgacgctgaaggcgctcgcgcgggtgttcctgcggtcgcagggtagcacggttgcggtgggcgtggtgactcgagtcctggaccgggctttggacatgggctagctgcattggcacgggcgcggataatttatgaacgtcacgcgcgcggggggaggcaggtaggtcggtctcctggattaatggcacccgggaccgggagggagagagagagggcctttcggcgcccaacgaacgattcaaaggcggccgacacgagtttcgtccacgcacccccacggttcaaagggaggatccgcccgggacggacgggtcaaaggcccgcgactgcaatgaattcaatgaatctggggctgtaagccggccgttggcttgttgcaatctgtccctatttttcttccatccaatccaagggcgcaccgacaggcacactgcgtagttagtgccccttgtgctgaccgtccgaccgcggctgaggaggggggtgtgcggtggcatgtgttgaatgagctgtggtttctgccgtattagtctagtatctatatagcgactcgtttgccggattacccactaagccatgtgtgttgtttgctggaacggccgcgcagctagcatgaacaatcatcggctgccagccatgtggcgcctgcctgcccgcctccattatgcatgcagctagctgctcggcccctgcaacggagaaatttgcaactttggcactcccgtccgccgccgccgcaaacgatttataatcatacagacataaattatgtcttctgtttctgtttgaaatagagatgagataaagagatctactgaagatggccttagactgtttcgcagcggcaggttcgttgaggtcgttgtacttgccggtcgctacagctcgcctttttctttttccatttcgttttcttttctgacgaagcggatggaatgcttgccattgccaagctcttggaaactagtacaaggggcgggcggcgtagtgtgcgctgggacggaggcgacccttttgtcagcgactccgcgcagccggtgggaaccacctaggcccaccaaaacatccgcaatgatagtatcagccggccggctcacacatgcatgcagacaatttttttttttttttttacaacagcacatgcagctcgcactgcccctatgctactgctgcatgcatcaccagcaaatgaataccacgtgttaaaccgagagagagaaagagcaaccgctgaggctatccacactcatacaaccctaaatttttactctaaaaagaatattctattctggtcagcgagattcttt

SEQ ID NO: 18819 - DNA, 3462 bp, Zea Mays
ggcccattaactcactcgtcgtttactctcctctcgtcggcttctttgcttcgggtggacggcagggcgagcggcgacgccctcttcgtcggggaccttcgccggcgacgagaatccaacctgataatccggaagatacatgtgccagatgtgtcgatcacagggatagtaaagctctcgaactgggtgtaaagagatgtttgttcccgtgttagataacatgtctgattttgaggagccctttaaaatttctgggatgtggcaatgctccatttgcacgcatgaaaatactacatatagttcatcttgtgagctatgtggtgtgcttcatgatctctcactgtatttcaatgatatcagtgaagacgaagatggagacacaagtattctggagtatccatccttgcaagatctctttttacaccacctagtgcaaagtcaaaggctattgttttctctcatgatttcaaagacagaagaaatacaacagggaataagcaagctacaatggatgctctacataagacattcatgactcgcaaaaagcgccacattaacatagtgcctttcaagtttgatacaccatctcctgatgacatggtcactacaggattaaaatcatccagaaactttagaaaagttgacacagaggttctagttaaggattctgttggcgtgactggaaaggagatgatgaataatgatattcttctaactgaaaagaatacaagcatggacccaagtgcattagtacagttggatgatggtggaactagtagcaatgttccttcgagtagtcaaaatataactcttgctttggaccatgagctacaacatttgagtttggagagcaaactgaagaacagtaaaacgaatgttaagaaaacagcttctgtttctcactacaagccagaaccttggatgctccagagtgaaaatcaagaaatccgtaatcagctaagtcttgccattgttggtcatgttgattctgggaaatcaactttatgtggtcgattgcgacatgctctgggattgatttcaaaaaagcaaatgcataaatatgagaaagaagctaaagaaaagggaaaagggtcatttgcatatgcctgggctatggatgagagcagtgatgagagggagcgtggcattacgatgactgtggctgtagcatactttaatagcgagaaataccgtgtggttctgcttgactcccctggtcacaaggattttgtgcctaatatgatatctggtgctacacaagctgatgccgccatcctagttgttgatgcatctatagggtcatttgaagcaggcatgggtgtcaatgggattggtcagacgaaggagcactcgcagcttgttaggagctttggtgttgagaacttgatagttgctgttaataagatggatggggtggaatattcgaaggagcggtttcagtccgttaaatcgcaactcggcgtctttcttcggtcgtgtgggtacaaggactcttcagtcacctgggttcctttgagcgcaatggccaacgaaaatttagtcacagcttgttcagacactcgacttttatcttggtacaatggaggctgtctgctgcaagccatcgactcgttacctcctccccgtcgcgacgtgtcaagtccactgcgccttccgatatgtgatgtcattgcatctcacacgctgggccaggtggctgtctgtggtaaagtcgagtctggagggatccgaactggctgtaaggtccttgtcatgccttctggagacatagctacggtgaaaaccatggagcgggattcctctacctgcagcttggctagagccggggacaacgtcgccgttggtttgcacggggtggaccctggccacatcgcggcaggcggagttctctgccatccagatttcccggtgcgcgtggcgtgtcacctggagctgaaaattctggttctggaaatcaccgtgccaatactggttggccttgagtttgagctgcacatacggcacgccaagtcgtccgcgaggctggtgagaatactgtcgtccctggaccagaagaccggcagggccctgaagaaagcgccgcgtctgctcaccgcgaggcaggcggccctggtcgaggtgaggctggacagagaagcgtgcgtggaggaattctcgacgctgaaggcgctcgcgcgggtgttcctgcggtcgcagggtagcacggttgcggtgggcgtggtgactcgagtcctggaccgggctttggacatgggctagctgcattggcacgggcgcggataatttatgaacgtcacgcgcgcggggggaggcaggtaggtcggtctcctggattaatggcacccgggaccgggagggagagagagagggcctttcggcgcccaacgaacgattcaaaggcggccgacacgagtttcgtccacgcacccccacggttcaaagggaggatccgcccgggacggacgggtcaaaggcccgcgactgcaatgaattcaatgaatctggggctgtaagccggccgttggcttgttgcaatctgtccctatttttcttccatccaatccaagggcgcaccgacaggcacactgcgtagttagtgccccttgtgctgaccgtccgaccgcggctgaggaggggggtgtgcggtggcatgtgttgaatgagctgtggtttctgccgtattagtctagtatctatatagcgactcgtttgccggattacccactaagccatgtgtgttgtttgctggaacggccgcgcagctagcatgaacaatcatcggctgccagccatgtggcgcctgcctgcccgcctccattatgcatgcagctagctgctcggcccctgcaacggagaaatttgcaactttggcactcccgtccgccgccgccgcaaacgatttataatcatacagacataaattatgtcttctgtttctgtttgaaatagagatgagataaagagatctactgaagatggccttagactgtttcgcagcggcaggttcgttgaggtcgttgtacttgccggtcgctacagctcgcctttttctttttccatttcgttttcttttctgacgaagcggatggaatgcttgccattgccaagctcttggaaactagtacaaggggcgggcggcgtagtgtgcgctgggacggaggcgacccttttgtcagcgactccgcgcagccggtgggaaccacctaggcccaccaaaacatccgcaatgatagtatcagccggccggctcacacatgcatgcagacaatttttttttttttttttacaacagcacatgcagctcgcactgcccctatgctactgctgcatgcatcaccagcaaatgaataccacgtgttaaaccgagagagagaaagagcaaccgctgaggctatccacactcatacaaccctaaatttttactctaaaaagaatattctattctggtcagcgagattcttt

SEQ ID NO: 18820 - DNA, 3374 bp, Zea Mays
cattaactcactcgtcgtttactctcctctcgtcggcttctttgcttcgggtggacggcagggcgagcggcgacgccctcttcgtcggggaccttcgccggcgacgagaatccaacctgataatccggaagatacatgtgccagatgtgtcgatcacagggatagtaaagctctcgaactgggtgtaaagagatgataacatgtctgattttgaggagccctttaaaatttctgggatgtggcaatgctccatttgcacgcatgaaaatactacatatagttcatcttgtgagctatgtggtgtgcttcatgatctctcactgtatttcaatgatatcagtgaagacgaagatggagctaaatgcagacacaagtattctggagtatccatccttgcaagatctctttttacaccacctagtgcaaagtcaaaggctattgttttctctcatgatttcaaagacagaagaaatacaacagggaataagcaagctacaatggatgctctacataagacattcatgactcgcaaaaagcgccacattaacatagttgacacagaggttctagttaaggattctgttggcgtgactggaaaggagatgatgaataatgatattcttctaactgaaaagaatacaagcatggacccaagtgcattagtacagttggatgatggtggaactagtagcaatgttccttcgagtagtcaaaatataactcttgctttggaccatgagctacaacatttgagtttggagagcaaactgaagaacagtaaaacgaatgttaagaaaacagcttctgtttctcactacaagccagaaccttggatgctccagagtgaaaatcaagaaatccgtaatcagctaagtcttgccattgttggtcatgttgattctgggaaatcaactttatgtggtcgattgcgacatgctctgggattgatttcaaaaaagcaaatgcataaatatgagaaagaagctaaagaaaagggaaaagggtcatttgcatatgcctgggctatggatgagagcagtgatgagagggagcgtggcattacgatgactgtggctgtagcatactttaatagcgagaaataccgtgtggttctgcttgactcccctggtcacaaggattttgtgcctaatatgatatctggtgctacacaagctgatgccgccatcctagttgttgatgcatctatagggtcatttgaagcaggcatgggtgtcaatgggattggtcagacgaaggagcactcgcagcttgttaggagctttggtgttgagaacttgatagttgctgttaataagatggatggggtggaatattcgaaggagcggtttcagtccgttaaatcgcaactcggcgtctttcttcggtcgtgtgggtacaaggactcttcagtcacctgggttcctttgagcgcaatggccaacgaaaatttagtcacagcttgttcagacactcgacttttatcttggtacaatggaggctgtctgctgcaagccatcgactcgttacctcctccccgtcgcgacgtgtcaagtccactgcgccttccgatatgtgatgtcattgcatctcacacgctgggccaggtggctgtctgtggtaaagtcgagtctggagggatccgaactggctgtaaggtccttgtcatgccttctggagacatagctacggtgaaaaccatggagcgggattcctctacctgcagcttggctagagccggggacaacgtcgccgttggtttgcacggggtggaccctggccacatcgcggcaggcggagttctctgccatccagatttcccggtgcgcgtggcgtgtcacctggagctgaaaattctggttctggaaatcaccgtgccaatactggttggccttgagtttgagctgcacatacggcacgccaagtcgtccgcgaggctggtgagaatactgtcgtccctggaccagaagaccggcagggccctgaagaaagcgccgcgtctgctcaccgcgaggcaggcggccctggtcgaggtgaggctggacagagaagcgtgcgtggaggaattctcgacgctgaaggcgctcgcgcgggtgttcctgcggtcgcagggtagcacggttgcggtgggcgtggtgactcgagtcctggaccgggctttggacatgggctagctgcattggcacgggcgcggataatttatgaacgtcacgcgcgcggggggaggcaggtaggtcggtctcctggattaatggcacccgggaccgggagggagagagagagggcctttcggcgcccaacgaacgattcaaaggcggccgacacgagtttcgtccacgcacccccacggttcaaagggaggatccgcccgggacggacgggtcaaaggcccgcgactgcaatgaattcaatgaatctggggctgtaagccggccgttggcttgttgcaatctgtccctatttttcttccatccaatccaagggcgcaccgacaggcacactgcgtagttagtgccccttgtgctgaccgtccgaccgcggctgaggaggggggtgtgcggtggcatgtgttgaatgagctgtggtttctgccgtattagtctagtatctatatagcgactcgtttgccggattacccactaagccatgtgtgttgtttgctggaacggccgcgcagctagcatgaacaatcatcggctgccagccatgtggcgcctgcctgcccgcctccattatgcatgcagctagctgctcggcccctgcaacggagaaatttgcaactttggcactcccgtccgccgccgccgcaaacgatttataatcatacagacataaattatgtcttctgtttctgtttgaaatagagatgagataaagagatctactgaagatggccttagactgtttcgcagcggcaggttcgttgaggtcgttgtacttgccggtcgctacagctcgcctttttctttttccatttcgttttcttttctgacgaagcggatggaatgcttgccattgccaagctcttggaaactagtacaaggggcgggcggcgtagtgtgcgctgggacggaggcgacccttttgtcagcgactccgcgcagccggtgggaaccacctaggcccaccaaaacatccgcaatgatagtatcagccggccggctcacacatgcatgcagacaatttttttttttttttttacaacagcacatgcagctcgcactgcccctatgctactgctgcatgcatcaccagcaaatgaataccacgtgttaaaccgagagagagaaagagcaaccgctgaggctatccacactcatacaaccctaaatttttactctaaaaagaatattctattctggtcagcgagattcttt

SEQ ID NO: 18821 - DNA, 3664 bp, Zea Mays
attaactcactcgtcgtttactctcctctcgtcggcttctttgcttcgggtggacggcagggcgagcggcgacgccctcttcgtcggggaccttcgccggcgacgagaatccaacctgataatccggaagatacatgtgccagatgtgtcgatcacagggatagtaaagctctcgaactgggtgtaaagagatgataacatgtctgattttgaggagccctttaaaatttctgggatgtggcaatgctccatttgcacgcatgaaaatactacatatagttcatcttgtgagctatgtggtgtgcttcatgatctctcactgtatttcaatgatatcagtgaagacgaagatggagctaaatgcagacacaagtattctggagtatccatccttgcaagatctctttttacaccacctagtgcaaagtcaaaggctattgttttctctcatgatttcaaagacagaagaaatacaacagggaataagcaagctacaatggatgctctacataagacattcatgactcgcaaaaagcgccacattaacatagtgcctttcaagtttgatacaccatctcctgatgacatggtcactacaggattaaaatcatccagaaactttagaaaagttgacacagaggttctagttaaggattctgttggcgtgactggaaaggagatgatgaataatgatattcttctaactgaaaagaatacaagcatggacccaagtgcattagtacagttggatgatggtggaactagtagcaatgttccttcgagtagtcaaaatataactcttgctttggaccatgagctacaacatttgagtttggagagcaaactgaagaacagtaaaacgaatgttaagaaaacagcttctgtttctcactacaagccagaaccttggatgctccagagtgaaaatcaagaaatccgtaatcagctaagtcttgccattgttggtcatgttgattctgggaaatcaactttatgtggtcgattgcgacatgctctgggattgatttcaaaaaagcaaatgcataaatatgagaaagaagctaaagaaaagggaaaagggtcatttgcatatgcctgggctatggatgagagcagtgatgagagggagcgtggcattacgatgactgtggctgtagcatactttaatagcgagaaataccgtgtggttctgcttgactcccctggtcacaaggattttgtgcctaatatgatatctggtgctacacaagctgatgccgccatcctagttgttgatgcatctatagggtcatttgaagcaggcatgggtgtcaatgggattggtcagacgaaggagcactcgcagcttgttaggagctttggtgttgagaacttgatagttgctgttaataagatggatggggtggaatattcgaaggagcggtttcagtccgttaaatcgcaactcggcgtctttcttcggtcgtgtgggtacaaggactcttcagtcacctgggttcctttgagcgcaatggccaacgaaaatttagtcacagcttgttcagacactcgacttttatcttggtacaatggaggctgtctgctgcaagccatcgactcgttacctcctccccgtcgcgacgtgtcaagtccactgcgccttccgatatgtgatgtcattgcatctcacacgctgggccaggtggctgtctgtggtaaagtcgagtctggagggatccgaactggctgtaaggtaccattttgatgctacgattgggcatcacgcacgctataatagctatagatttggtggctttcctgtcctgtctacttttacctgctgctaaacaacatatattttgttgcatgaccaagctagctataatatctgcaattttgttttatttacatacaagtttctcgattcgttattttgatgatggcttgatgagtactccggcatcaggtccttgtcatgccttctggagacatagctacggtgaaaaccatggagcgggattcctctacctgcagcttggctagagccggggacaacgtcgccgttggtttgcacggggtggaccctggccacatcgcggcaggcggagttctctgccatccagatttcccggtgcgcgtggcgtgtcacctggagctgaaaattctggttctggaaatcaccgtgccaatactggttggccttgagtttgagctgcacatacggcacgccaagtcgtccgcgaggctggtgagaatactgtcgtccctggaccagaagaccggcagggccctgaagaaagcgccgcgtctgctcaccgcgaggcaggcggccctggtcgaggtgaggctggacagagaagcgtgcgtggaggaattctcgacgctgaaggcgctcgcgcgggtgttcctgcggtcgcagggtagcacggttgcggtgggcgtggtgactcgagtcctggaccgggctttggacatgggctagctgcattggcacgggcgcggataatttatgaacgtcacgcgcgcggggggaggcaggtaggtcggtctcctggattaatggcacccgggaccgggagggagagagagagggcctttcggcgcccaacgaacgattcaaaggcggccgacacgagtttcgtccacgcacccccacggttcaaagggaggatccgcccgggacggacgggtcaaaggcccgcgactgcaatgaattcaatgaatctggggctgtaagccggccgttggcttgttgcaatctgtccctatttttcttccatccaatccaagggcgcaccgacaggcacactgcgtagttagtgccccttgtgctgaccgtccgaccgcggctgaggaggggggtgtgcggtggcatgtgttgaatgagctgtggtttctgccgtattagtctagtatctatatagcgactcgtttgccggattacccactaagccatgtgtgttgtttgctggaacggccgcgcagctagcatgaacaatcatcggctgccagccatgtggcgcctgcctgcccgcctccattatgcatgcagctagctgctcggcccctgcaacggagaaatttgcaactttggcactcccgtccgccgccgccgcaaacgatttataatcatacagacataaattatgtcttctgtttctgtttgaaatagagatgagataaagagatctactgaagatggccttagactgtttcgcagcggcaggttcgttgaggtcgttgtacttgccggtcgctacagctcgcctttttctttttccatttcgttttcttttctgacgaagcggatggaatgcttgccattgccaagctcttggaaactagtacaaggggcgggcggcgtagtgtgcgctgggacggaggcgacccttttgtcagcgactccgcgcagccggtgggaaccacctaggcccaccaaaacatccgcaatgatagtatcagccggccggctcacacatgcatgcagacaatttttttttttttttttacaacagcacatgcagctcgcactgcccctatgctactgctgcatgcatcaccagcaaatgaataccacgtgttaaaccgagagagagaaagagcaaccgctgaggctatccacactcatacaaccctaaatttttactctaaaaagaatattctattctggtcagcgagattcttt

SEQ ID NO: 18822 - DNA, 3358 bp, Zea Mays
ctcactcgtcgtttactctcctctcgtcggcttctttgcttcgggtggacggcagggcgagcggcgacgccctcttcgtcggggaccttcgccggcgacgagaatccaacctgataatccggaagatacatgtgccagatgtgtcgatcacagggatagtaaagctctcgaactgggtgtaaagagatgataacatgtctgattttgaggagccctttaaaatttctgggatgtggcaatgctccatttgcacgcatgaaaatactacatatagttcatcttgtgagctatgtggtgtgcttcatgatctctcactgtatttcaatgatatcagtgaagacgaagatggagacacaagtattctggagtatccatccttgcaagatctctttttacaccacctagtgcaaagtcaaaggctattgttttctctcatgatttcaaagacagaagaaatacaacagggaataagcaagctacaatggatgctctacataagacattcatgactcgcaaaaagcgccacattaacatagttgacacagaggttctagttaaggattctgttggcgtgactggaaaggagatgatgaataatgatattcttctaactgaaaagaatacaagcatggacccaagtgcattagtacagttggatgatggtggaactagtagcaatgttccttcgagtagtcaaaatataactcttgctttggaccatgagctacaacatttgagtttggagagcaaactgaagaacagtaaaacgaatgttaagaaaacagcttctgtttctcactacaagccagaaccttggatgctccagagtgaaaatcaagaaatccgtaatcagctaagtcttgccattgttggtcatgttgattctgggaaatcaactttatgtggtcgattgcgacatgctctgggattgatttcaaaaaagcaaatgcataaatatgagaaagaagctaaagaaaagggaaaagggtcatttgcatatgcctgggctatggatgagagcagtgatgagagggagcgtggcattacgatgactgtggctgtagcatactttaatagcgagaaataccgtgtggttctgcttgactcccctggtcacaaggattttgtgcctaatatgatatctggtgctacacaagctgatgccgccatcctagttgttgatgcatctatagggtcatttgaagcaggcatgggtgtcaatgggattggtcagacgaaggagcactcgcagcttgttaggagctttggtgttgagaacttgatagttgctgttaataagatggatggggtggaatattcgaaggagcggtttcagtccgttaaatcgcaactcggcgtctttcttcggtcgtgtgggtacaaggactcttcagtcacctgggttcctttgagcgcaatggccaacgaaaatttagtcacagcttgttcagacactcgacttttatcttggtacaatggaggctgtctgctgcaagccatcgactcgttacctcctccccgtcgcgacgtgtcaagtccactgcgccttccgatatgtgatgtcattgcatctcacacgctgggccaggtggctgtctgtggtaaagtcgagtctggagggatccgaactggctgtaaggtccttgtcatgccttctggagacatagctacggtgaaaaccatggagcgggattcctctacctgcagcttggctagagccggggacaacgtcgccgttggtttgcacggggtggaccctggccacatcgcggcaggcggagttctctgccatccagatttcccggtgcgcgtggcgtgtcacctggagctgaaaattctggttctggaaatcaccgtgccaatactggttggccttgagtttgagctgcacatacggcacgccaagtcgtccgcgaggctggtgagaatactgtcgtccctggaccagaagaccggcagggccctgaagaaagcgccgcgtctgctcaccgcgaggcaggcggccctggtcgaggtgaggctggacagagaagcgtgcgtggaggaattctcgacgctgaaggcgctcgcgcgggtgttcctgcggtcgcagggtagcacggttgcggtgggcgtggtgactcgagtcctggaccgggctttggacatgggctagctgcattggcacgggcgcggataatttatgaacgtcacgcgcgcggggggaggcaggtaggtcggtctcctggattaatggcacccgggaccgggagggagagagagagggcctttcggcgcccaacgaacgattcaaaggcggccgacacgagtttcgtccacgcacccccacggttcaaagggaggatccgcccgggacggacgggtcaaaggcccgcgactgcaatgaattcaatgaatctggggctgtaagccggccgttggcttgttgcaatctgtccctatttttcttccatccaatccaagggcgcaccgacaggcacactgcgtagttagtgccccttgtgctgaccgtccgaccgcggctgaggaggggggtgtgcggtggcatgtgttgaatgagctgtggtttctgccgtattagtctagtatctatatagcgactcgtttgccggattacccactaagccatgtgtgttgtttgctggaacggccgcgcagctagcatgaacaatcatcggctgccagccatgtggcgcctgcctgcccgcctccattatgcatgcagctagctgctcggcccctgcaacggagaaatttgcaactttggcactcccgtccgccgccgccgcaaacgatttataatcatacagacataaattatgtcttctgtttctgtttgaaatagagatgagataaagagatctactgaagatggccttagactgtttcgcagcggcaggttcgttgaggtcgttgtacttgccggtcgctacagctcgcctttttctttttccatttcgttttcttttctgacgaagcggatggaatgcttgccattgccaagctcttggaaactagtacaaggggcgggcggcgtagtgtgcgctgggacggaggcgacccttttgtcagcgactccgcgcagccggtgggaaccacctaggcccaccaaaacatccgcaatgatagtatcagccggccggctcacacatgcatgcagacaatttttttttttttttttacaacagcacatgcagctcgcactgcccctatgctactgctgcatgcatcaccagcaaatgaataccacgtgttaaaccgagagagagaaagagcaaccgctgaggctatccacactcatacaaccctaaatttttactctaaaaagaatattctattctggtcagcgagattcttt

SEQ ID NO: 18823 - DNA, 3384 bp, Zea Mays
ctcactcgtcgtttactctcctctcgtcggcttctttgcttcgggtggacggcagggcgagcggcgacgccctcttcgtcggggaccttcgccggcgacgagaatccaacctgataatccggaagatacatgtgccagatgtgtcgatcacagggatagtaaagctctcgaactgggtgtaaagagatgtttgttcccgtgttagataacatgtctgattttgaggagccctttaaaatttctgggatgtggcaatgctccatttgcacgcatgaaaatactacatatagttcatcttgtgagctatgtggtgtgcttcatgatctctcactgtatttcaatgatatcagtgaagacgaagatggagctaaatgcagacacaagtattctggagtatccatccttgcaagatctctttttacaccacctagtgcaaagtcaaaggctattgttttctctcatgatttcaaagacagaagaaatacaacagggaataagcaagctacaatggatgctctacataagacattcatgactcgcaaaaagcgccacattaacatagttgacacagaggttctagttaaggattctgttggcgtgactggaaaggagatgatgaataatgatattcttctaactgaaaagaatacaagcatggacccaagtgcattagtacagttggatgatggtggaactagtagcaatgttccttcgagtagtcaaaatataactcttgctttggaccatgagctacaacatttgagtttggagagcaaactgaagaacagtaaaacgaatgttaagaaaacagcttctgtttctcactacaagccagaaccttggatgctccagagtgaaaatcaagaaatccgtaatcagctaagtcttgccattgttggtcatgttgattctgggaaatcaactttatgtggtcgattgcgacatgctctgggattgatttcaaaaaagcaaatgcataaatatgagaaagaagctaaagaaaagggaaaagggtcatttgcatatgcctgggctatggatgagagcagtgatgagagggagcgtggcattacgatgactgtggctgtagcatactttaatagcgagaaataccgtgtggttctgcttgactcccctggtcacaaggattttgtgcctaatatgatatctggtgctacacaagctgatgccgccatcctagttgttgatgcatctatagggtcatttgaagcaggcatgggtgtcaatgggattggtcagacgaaggagcactcgcagcttgttaggagctttggtgttgagaacttgatagttgctgttaataagatggatggggtggaatattcgaaggagcggtttcagtccgttaaatcgcaactcggcgtctttcttcggtcgtgtgggtacaaggactcttcagtcacctgggttcctttgagcgcaatggccaacgaaaatttagtcacagcttgttcagacactcgacttttatcttggtacaatggaggctgtctgctgcaagccatcgactcgttacctcctccccgtcgcgacgtgtcaagtccactgcgccttccgatatgtgatgtcattgcatctcacacgctgggccaggtggctgtctgtggtaaagtcgagtctggagggatccgaactggctgtaaggtccttgtcatgccttctggagacatagctacggtgaaaaccatggagcgggattcctctacctgcagcttggctagagccggggacaacgtcgccgttggtttgcacggggtggaccctggccacatcgcggcaggcggagttctctgccatccagatttcccggtgcgcgtggcgtgtcacctggagctgaaaattctggttctggaaatcaccgtgccaatactggttggccttgagtttgagctgcacatacggcacgccaagtcgtccgcgaggctggtgagaatactgtcgtccctggaccagaagaccggcagggccctgaagaaagcgccgcgtctgctcaccgcgaggcaggcggccctggtcgaggtgaggctggacagagaagcgtgcgtggaggaattctcgacgctgaaggcgctcgcgcgggtgttcctgcggtcgcagggtagcacggttgcggtgggcgtggtgactcgagtcctggaccgggctttggacatgggctagctgcattggcacgggcgcggataatttatgaacgtcacgcgcgcggggggaggcaggtaggtcggtctcctggattaatggcacccgggaccgggagggagagagagagggcctttcggcgcccaacgaacgattcaaaggcggccgacacgagtttcgtccacgcacccccacggttcaaagggaggatccgcccgggacggacgggtcaaaggcccgcgactgcaatgaattcaatgaatctggggctgtaagccggccgttggcttgttgcaatctgtccctatttttcttccatccaatccaagggcgcaccgacaggcacactgcgtagttagtgccccttgtgctgaccgtccgaccgcggctgaggaggggggtgtgcggtggcatgtgttgaatgagctgtggtttctgccgtattagtctagtatctatatagcgactcgtttgccggattacccactaagccatgtgtgttgtttgctggaacggccgcgcagctagcatgaacaatcatcggctgccagccatgtggcgcctgcctgcccgcctccattatgcatgcagctagctgctcggcccctgcaacggagaaatttgcaactttggcactcccgtccgccgccgccgcaaacgatttataatcatacagacataaattatgtcttctgtttctgtttgaaatagagatgagataaagagatctactgaagatggccttagactgtttcgcagcggcaggttcgttgaggtcgttgtacttgccggtcgctacagctcgcctttttctttttccatttcgttttcttttctgacgaagcggatggaatgcttgccattgccaagctcttggaaactagtacaaggggcgggcggcgtagtgtgcgctgggacggaggcgacccttttgtcagcgactccgcgcagccggtgggaaccacctaggcccaccaaaacatccgcaatgatagtatcagccggccggctcacacatgcatgcagacaatttttttttttttttttacaacagcacatgcagctcgcactgcccctatgctactgctgcatgcatcaccagcaaatgaataccacgtgttaaaccgagagagagaaagagcaaccgctgaggctatccacactcatacaaccctaaatttttactctaaaaagaatattctattctggtcagcgagattcttt

SEQ ID NO: 18824 - DNA, 3429 bp, Zea Mays
ctttgcttcgggtggacggcagggcgagcggcgacgccctcttcgtcggggaccttcgccggcgacgagaatccaacctgataatccggaagatacatgtgccagatgtgtcgatcacagggatagtaaagctctcgaactgggtgtaaagagatgataacatgtctgattttgaggagccctttaaaatttctgggatgtggcaatgctccatttgcacgcatgaaaatactacatatagttcatcttgtgagctatgtggtgtgcttcatgatctctcactgtatttcaatgatatcagtgaagacgaagatggagctaaatgcagacacaagtattctggagtatccatccttgcaagatctctttttacaccacctagtgcaaagtcaaaggctattgttttctctcatgatttcaaagacagaagaaatacaacagggaataagcaagctacaatggatgctctacataagacattcatgactcgcaaaaagcgccacattaacatagtgcctttcaagtttgatacaccatctcctgatgacatggtcactacaggattaaaatcatccagaaactttagaaaagttgacacagaggttctagttaaggattctgttggcgtgactggaaaggagatgatgaataatgatattcttctaactgaaaagaatacaagcatggacccaagtgcattagtacagttggatgatggtggaactagtagcaatgttccttcgagtagtcaaaatataactcttgctttggaccatgagctacaacatttgagtttggagagcaaactgaagaacagtaaaacgaatgttaagaaaacagcttctgtttctcactacaagccagaaccttggatgctccagagtgaaaatcaagaaatccgtaatcagctaagtcttgccattgttggtcatgttgattctgggaaatcaactttatgtggtcgattgcgacatgctctgggattgatttcaaaaaagcaaatgcataaatatgagaaagaagctaaagaaaagggaaaagggtcatttgcatatgcctgggctatggatgagagcagtgatgagagggagcgtggcattacgatgactgtggctgtagcatactttaatagcgagaaataccgtgtggttctgcttgactcccctggtcacaaggattttgtgcctaatatgatatctggtgctacacaagctgatgccgccatcctagttgttgatgcatctatagggtcatttgaagcaggcatgggtgtcaatgggattggtcagacgaaggagcactcgcagcttgttaggagctttggtgttgagaacttgatagttgctgttaataagatggatggggtggaatattcgaaggagcggtttcagtccgttaaatcgcaactcggcgtctttcttcggtcgtgtgggtacaaggactcttcagtcacctgggttcctttgagcgcaatggccaacgaaaatttagtcacagcttgttcagacactcgacttttatcttggtacaatggaggctgtctgctgcaagccatcgactcgttacctcctccccgtcgcgacgtgtcaagtccactgcgccttccgatatgtgatgtcattgcatctcacacgctgggccaggtggctgtctgtggtaaagtcgagtctggagggatccgaactggctgtaaggtccttgtcatgccttctggagacatagctacggtgaaaaccatggagcgggattcctctacctgcagcttggctagagccggggacaacgtcgccgttggtttgcacggggtggaccctggccacatcgcggcaggcggagttctctgccatccagatttcccggtgcgcgtggcgtgtcacctggagctgaaaattctggttctggaaatcaccgtgccaatactggttggccttgagaaaccattatttccagtttgagctgcacatacggcacgccaagtcgtccgcgaggctggtgagaatactgtcgtccctggaccagaagaccggcagggccctgaagaaagcgccgcgtctgctcaccgcgaggcaggcggccctggtcgaggtgaggctggacagagaagcgtgcgtggaggaattctcgacgctgaaggcgctcgcgcgggtgttcctgcggtcgcagggtagcacggttgcggtgggcgtggtgactcgagtcctggaccgggctttggacatgggctagctgcattggcacgggcgcggataatttatgaacgtcacgcgcgcggggggaggcaggtaggtcggtctcctggattaatggcacccgggaccgggagggagagagagagggcctttcggcgcccaacgaacgattcaaaggcggccgacacgagtttcgtccacgcacccccacggttcaaagggaggatccgcccgggacggacgggtcaaaggcccgcgactgcaatgaattcaatgaatctggggctgtaagccggccgttggcttgttgcaatctgtccctatttttcttccatccaatccaagggcgcaccgacaggcacactgcgtagttagtgccccttgtgctgaccgtccgaccgcggctgaggaggggggtgtgcggtggcatgtgttgaatgagctgtggtttctgccgtattagtctagtatctatatagcgactcgtttgccggattacccactaagccatgtgtgttgtttgctggaacggccgcgcagctagcatgaacaatcatcggctgccagccatgtggcgcctgcctgcccgcctccattatgcatgcagctagctgctcggcccctgcaacggagaaatttgcaactttggcactcccgtccgccgccgccgcaaacgatttataatcatacagacataaattatgtcttctgtttctgtttgaaatagagatgagataaagagatctactgaagatggccttagactgtttcgcagcggcaggttcgttgaggtcgttgtacttgccggtcgctacagctcgcctttttctttttccatttcgttttcttttctgacgaagcggatggaatgcttgccattgccaagctcttggaaactagtacaaggggcgggcggcgtagtgtgcgctgggacggaggcgacccttttgtcagcgactccgcgcagccggtgggaaccacctaggcccaccaaaacatccgcaatgatagtatcagccggccggctcacacatgcatgcagacaatttttttttttttttttacaacagcacatgcagctcgcactgcccctatgctactgctgcatgcatcaccagcaaatgaataccacgtgttaaaccgagagagagaaagagcaaccgctgaggctatccacactcatacaaccctaaatttttactctaaaaagaatattctattctggtcagcgagattcttt

SEQ ID NO: 18825 - DNA, 3330 bp, Zea Mays
ctttgcttcgggtggacggcagggcgagcggcgacgccctcttcgtcggggaccttcgccggcgacgagaatccaacctgaacagataatccggaagatacatgtgccagatgtgtcgatcacagggatagtaaagctctcgaactgggtgtaaagagatgataacatgtctgattttgaggagccctttaaaatttctgggatgtggcaatgctccatttgcacgcatgaaaatactacatatagttcatcttgtgagctatgtggtgtgcttcatgatctctcactgtatttcaatgatatcagtgaagacgaagatggagacacaagtattctggagtatccatccttgcaagatctctttttacaccacctagtgcaaagtcaaaggctattgttttctctcatgatttcaaagacagaagaaatacaacagggaataagcaagctacaatggatgctctacataagacattcatgactcgcaaaaagcgccacattaacatagttgacacagaggttctagttaaggattctgttggcgtgactggaaaggagatgatgaataatgatattcttctaactgaaaagaatacaagcatggacccaagtgcattagtacagttggatgatggtggaactagtagcaatgttccttcgagtagtcaaaatataactcttgctttggaccatgagctacaacatttgagtttggagagcaaactgaagaacagtaaaacgaatgttaagaaaacagcttctgtttctcactacaagccagaaccttggatgctccagagtgaaaatcaagaaatccgtaatcagctaagtcttgccattgttggtcatgttgattctgggaaatcaactttatgtggtcgattgcgacatgctctgggattgatttcaaaaaagcaaatgcataaatatgagaaagaagctaaagaaaagggaaaagggtcatttgcatatgcctgggctatggatgagagcagtgatgagagggagcgtggcattacgatgactgtggctgtagcatactttaatagcgagaaataccgtgtggttctgcttgactcccctggtcacaaggattttgtgcctaatatgatatctggtgctacacaagctgatgccgccatcctagttgttgatgcatctatagggtcatttgaagcaggcatgggtgtcaatgggattggtcagacgaaggagcactcgcagcttgttaggagctttggtgttgagaacttgatagttgctgttaataagatggatggggtggaatattcgaaggagcggtttcagtccgttaaatcgcaactcggcgtctttcttcggtcgtgtgggtacaaggactcttcagtcacctgggttcctttgagcgcaatggccaacgaaaatttagtcacagcttgttcagacactcgacttttatcttggtacaatggaggctgtctgctgcaagccatcgactcgttacctcctccccgtcgcgacgtgtcaagtccactgcgccttccgatatgtgatgtcattgcatctcacacgctgggccaggtggctgtctgtggtaaagtcgagtctggagggatccgaactggctgtaaggtccttgtcatgccttctggagacatagctacggtgaaaaccatggagcgggattcctctacctgcagcttggctagagccggggacaacgtcgccgttggtttgcacggggtggaccctggccacatcgcggcaggcggagttctctgccatccagatttcccggtgcgcgtggcgtgtcacctggagctgaaaattctggttctggaaatcaccgtgccaatactggttggccttgagtttgagctgcacatacggcacgccaagtcgtccgcgaggctggtgagaatactgtcgtccctggaccagaagaccggcagggccctgaagaaagcgccgcgtctgctcaccgcgaggcaggcggccctggtcgaggtgaggctggacagagaagcgtgcgtggaggaattctcgacgctgaaggcgctcgcgcgggtgttcctgcggtcgcagggtagcacggttgcggtgggcgtggtgactcgagtcctggaccgggctttggacatgggctagctgcattggcacgggcgcggataatttatgaacgtcacgcgcgcggggggaggcaggtaggtcggtctcctggattaatggcacccgggaccgggagggagagagagagggcctttcggcgcccaacgaacgattcaaaggcggccgacacgagtttcgtccacgcacccccacggttcaaagggaggatccgcccgggacggacgggtcaaaggcccgcgactgcaatgaattcaatgaatctggggctgtaagccggccgttggcttgttgcaatctgtccctatttttcttccatccaatccaagggcgcaccgacaggcacactgcgtagttagtgccccttgtgctgaccgtccgaccgcggctgaggaggggggtgtgcggtggcatgtgttgaatgagctgtggtttctgccgtattagtctagtatctatatagcgactcgtttgccggattacccactaagccatgtgtgttgtttgctggaacggccgcgcagctagcatgaacaatcatcggctgccagccatgtggcgcctgcctgcccgcctccattatgcatgcagctagctgctcggcccctgcaacggagaaatttgcaactttggcactcccgtccgccgccgccgcaaacgatttataatcatacagacataaattatgtcttctgtttctgtttgaaatagagatgagataaagagatctactgaagatggccttagactgtttcgcagcggcaggttcgttgaggtcgttgtacttgccggtcgctacagctcgcctttttctttttccatttcgttttcttttctgacgaagcggatggaatgcttgccattgccaagctcttggaaactagtacaaggggcgggcggcgtagtgtgcgctgggacggaggcgacccttttgtcagcgactccgcgcagccggtgggaaccacctaggcccaccaaaacatccgcaatgatagtatcagccggccggctcacacatgcatgcagacaatttttttttttttttttacaacagcacatgcagctcgcactgcccctatgctactgctgcatgcatcaccagcaaatgaataccacgtgttaaaccgagagagagaaagagcaaccgctgaggctatccacactcatacaaccctaaatttttactctaaaaagaatattctattctggtcagcgagattcttt

SEQ ID NO: 18826 - DNA, 3380 bp, Zea Mays
atggagaaaagcaagttgaaaaaggttagagaatacagacttggaaaatgctatcataacaaaacgggagaggagtttgtggcgcactcgtccaatgttaactgcctcaagattgggaggaagacctcgcgggttcttgtcacaggaggagaggaccataaggtcaatctttgggctattgggaagcccaattcaatactgagcttatcaggtcacacaagtgctgtggagtcggttggttttgattccacggaagtgtttgtggctgcaggagcagccagtggaacaataaagctatgggatttggaggaggcaaagattgtccgcactcttactggacatagatcaaactgcatgtcagttgattttcatccgtttggggaattctttgcctctgggtcactggacactaatctgaagatatgggatataagaaggaagaattgcatccatacatacaaaggtcacacacgaggggtgaacactattagatttacacccgatgggcggtgggttgtgtctggtggcgaagataatatagtaaagctctgggatctgacagctggaaagttattacatgaattcaagtgtcatgagggtcagatccagtgcatagatttccacccccacgagttccttctggcaacaggttcagctgataaaactgtcaaattctgggatttggagacatttgaattgattggatctacaggacctgagacaacaggtgtccgatccatgacattcaatcctgatggaagatctttgttatgtgggctgcacgaaagcttaaaggttttctcttgggagccaataagatgccatgatactgtggacgtgggatggtctagacttgccgatttgaatgtccatgagggaaaacttcttggttgttctttcaatcaaagttgtgttggaatatgggttgttgatctgacgcgtcttgagccatatacaatgggtacttcaacaaaagtaaatggtcattctgaattgaagactgtttctagcggcactttgcctttacaaaatgatagtggttcaagggctaacatagggcgatcatcagtcttgcaaaatacagagaacaaccttaaaactacttcaggaagactgtcggcttcacagaactcagattctgcacccaaagaaactaactcggcaccttcaagcgggttgatcccaagcacaccacatagggctggagttggctcccataatagatctgttggaaattcagcttttcaatctggtggtaccaccttgaagagaagttcgttgaggaataacagtgcctctaatgttcacaatttcagtaaagctgatgtagtgcctgtcattgttcccagaactagctcaggaggggagttggctactgattctagaagcgatgctgctgatgtggcacccgttcttccgaaggtaaccagaagggttgaacctgctaccgattctagaaaagaaagtaatgatgtggaacttgttgttcctagagcaagctcaagaatggaaatagccgatttagcacccatttctagttccaagtcaggcagaaggttggagtctgcccctgattcgaaagaagaaagtgctgatacagcacctgttgttgtttccaatcccagggctaatgtaagaatggaaatagtctctgattctgcgcccgctctttcaaagtcaaacagaaagctagattctggcactaactcaaagaaagaaagtgctgatgcagtcattgtacccagaacaaattctagaatggaaatgatttctgattctaggagagaaccctctgctggaagaatatcaccattcagaatccagtcaagatatgctgagccacggaagctagcccatgccagaactgattcaaacaaagttgatagcagaagtaaaattactgaaacagaagacttcaattgccaaatatttcttccccgtagaaacagtgtttttcaaacaataagttctgaagaacctcgtgaagatgtaaagtgtggtccagttgacagggtgggattttcaaattcatcagaaccaaatgcgagtgtccgcaatgagaattatgttcctagaatgcgcaaaccaggagacaactgctatatcgaagtttcaagagcaggaagagcaaggtcaagtgtctctaattgggaagggagggatcagccccctagtcatgaagaaccaacaacaagcagttctacactggctcctaccggccatccatattcatctagaggaagcaatcaagcttctgaagctccaatcatagctagtgatgaagatgttctatctcttatcatggagcgacatgatctatttttaagctcaactaagtctcggctgatgaaattgcagattattcatcaaatgtgggaaagaaatgacatcaggggtgtgctctctgcgatggacaggatgggtgatcatgctgtctgtgctgatatggctagcgttctcatggagaaaagtgaaacaatcacactagatttatgtacctctatcctgcctgtcgtcaccgatcttctggagagcaaaattgacagacacttagtcgtcgcattggaattgttggtgaagcttgtaaggacttttggtccaatgatacattcaacagtatcgtcaggtccttgtgttggtgtagaccttgaggcagagcaaaggagggagcgctgcaacttatgcttcatcgaattggagaaggccaaaaataagcttccatctctaacaagaagaaaaggggcggttgcaaatgctgcacaagaacttgctcttgtcttccaggaaatcatgagttgactgacgacacactagatatacacaattagatgggacatgcttcggcctctgatggcaacaagattggatatcagctgccatggagggtgctagctattcagtcttagcgacgtcatcaagctccaaggccacagcaccaacaaatgcattttgttgctgctgttcgtgccttttgtacacatgctaacacataatccatgtcatttgtgaagagaagctgccatggacagtgacttcatccacaatattatgtggatggcggcagctggagatgttaggccccgatcgaatggtgatcagcagatgagacttgcttgggcttttctggcactcgtagttctttgctgtctgtaacatctttctcatgtaccgttatcatgtgcatgtgcaacagtcaagtggttgcatttggtagtttatggttgtgctgtgtgttggtcgatttagtggtcgttgatgagtgaagcgagccatgtacatcatttttttttaagatttgatatcttctttttccttgatgactcctctcgttatacttgagtgaaaatgatatcttgtgtacttgccttgacagcttttcg

SEQ ID NO: 18827 - DNA, 3419 bp, Zea Mays
atggagaaaagcaagttgaaaaaggttagagaatacagacttggaaaatgctatcataacaaaacgggagaggagtttgtggcgcactcgtccaatgttaactgcctcaagattgggaggaagacctcgcgggttcttgtcacaggaggagaggaccataaggtcaatctttgggctattgggaagcccaattcaatactgagcttatcaggtcacacaagtgctgtggagtcggttggttttgattccacggaagtgtttgtggctgcaggagcagccagtggaacaataaagctatgggatttggaggaggcaaagattgtccgcactcttactggacatagatcaaactgcatgtcagttgattttcatccgtttggggaattctttgcctctgggtcactggacactaatctgaagatatgggatataagaaggaagaattgcatccatacatacaaaggtcacacacgaggggtgaacactattagatttacacccgatgggcggtgggttgtgtctggtggcgaagataatatagtaaagctctgggatctgacagctggaaagttattacatgaattcaagtgtcatgagggtcagatccagtgcatagatttccacccccacgagttccttctggcaacaggttcagctgataaaactgtcaaattctgggatttggagacatttgaattgattggatctacaggacctgagacaacaggtgtccgatccatgacattcaatcctgatggaagatctttgttatgtgggctgcacgaaagcttaaaggttttctcttgggagccaataagatgccatgatactgtggacgtgggatggtctagacttgccgatttgaatgtccatgagggaaaacttcttggttgttctttcaatcaaagttgtgttggaatatgggttgttgatctgacgcgtcttgagccatatacaatgggtacttcaacaaaagtaaatggtcattctgaattgaagactgtttctagcggcactttgcctttacaaaatgatagtggttcaagggctaacatagggcgatcatcagtcttgcaaaatacagagaacaaccttaaaactacttcaggaagactgtcggcttcacagaactcagattctgcacccaaagaaactaactcggcaccttcaagcgggttgatcccaagcacaccacatagggctggagttggctcccataatagatctgttggaaattcagcttttcaatctggtggtaccaccttgaagagaagttcgttgaggaataacagtgcctctaatgttcacaatttcagtaaagctgatgtagtgcctgtcattgttcccagaactagctcaggaggggagttggctactgattctagaagcgatgctgctgatgtggcacccgttcttccgaaggtaaccagaagggttgaacctgctaccgattctagaaaagaaagtaatgatgtggaacttgttgttcctagagcaagctcaagaatggaaatagccgatttagcacccatttctagttccaagtcaggcagaaggttggagtctgcccctgattcgaaagaagaaagtgctgatacagcacctgttgttgtttccaatcccagggctaatgtaagaatggaaatagtctctgattctgcgcccgctctttcaaagtcaaacagaaagctagattctggcactaactcaaagaaagaaagtgctgatgcagtcattgtacccagaacaaattctagaatggaaatgatttctgattctaggagagaaccctctgctggaagaatatcaccattcagaatccagtcaagatatgctgagccacggaagctagcccatgccagaactgattcaaacaaagttgatagcagaagtaaaattactgaaacagaagacttcaattgccaaatatttcttccccgtagaaacagtgtttttcaaacaataagttctgaagaacctcgtgaagatgtaaagtgtggtccagttgacaggatgttcctagaatgcgcaaaccaggagacaactgctatatcgaagtttcaagagcaggtatgtttttttggtactgtgtatcgttttatgggaggtgctactgttttgatttcagtaatctgttcatggatatgaattaattatcatgtaggaagagcaaggtcaagtgtctctaattgggaagggagggatcagccccctagtcatgaagaaccaacaacaagcagttctacactggctcctaccggccatccatattcatctagaggaagcaatcaagcttctgaagctccaatcatagctagtgatgaagatgttctatctcttatcatggagcgacatgatctatttttaagctcaactaagtctcggctgatgaaattgcagattattcatcaaatgtgggaaagaaatgacatcaggggtgtgctctctgcgatggacaggatgggtgatcatgctgtctgtgctgatatggctagcgttctcatggagaaaagtgaaacaatcacactagatttatgtacctctatcctgcctgtcgtcaccgatcttctggagagcaaaattgacagacacttagtcgtcgcattggaattgttggtgaagcttgtaaggacttttggtccaatgatacattcaacagtatcgtcaggtccttgtgttggtgtagaccttgaggcagagcaaaggagggagcgctgcaacttatgcttcatcgaattggagaaggccaaaaataagcttccatctctaacaagaaaaggggcggttgcaaatgctgcacaagaacttgctcttgtcttccaggaaatcatgagttgactgacgacacactagatatacacaattagatgggacatgcttcggcctctgatggcaacaagattggatatcagctgccatggagggtgctagctattcagtcttagcgacgtcatcaagctccaaggccacagcaccaacaaatgcattttgttgctgctgttcgtgccttttgtacacatgctaacacataatccatgtcatttgtgaagagaagctgccatggacagtgacttcatccacaatattatgtggatggcggcagctggagatgttaggccccgatcgaatggtgatcagcagatgagacttgcttgggcttttctggcactcgtagttctttgctgtctgtaacatctttctcatgtaccgttatcatgtgcatgtgcaacagtcaagtggttgcatttggtagtttatggttgtgctgtgtgttggtcgatttagtggtcgttgatgagtgaagcgagccatgtacatcatttttttttaagatttgatatcttctttttccttgatgactcctctcgttatacttgagtgaaaatgatatcttgtgtacttgccttgacagcttttcg

SEQ ID NO: 18828 - DNA, 3310 bp, Zea Mays
atggagaaaagcaagttgaaaaaggttagagaatacagacttggaaaatgctatcataacaaaacgggagaggagtttgtggcgcactcgtccaatgttaactgcctcaagattgggaggaagacctcgcgggttcttgtcacaggaggagaggaccataaggtcaatctttgggctattgggaagcccaattcaatactggagcagccagtggaacaataaagctatgggatttggaggaggcaaagattgtccgcactcttactggacatagatcaaactgcatgtcagttgattttcatccgtttggggaattctttgcctctgggtcactggacactaatctgaagatatgggatataagaaggaagaattgcatccatacatacaaaggtcacacacgaggggtgaacactattagatttacacccgatgggcggtgggttgtgtctggtggcgaagataatatagtaaagctctgggatctgacagctggaaagttattacatgaattcaagtgtcatgagggtcagatccagtgcatagatttccacccccacgagttccttctggcaacaggttcagctgataaaactgtcaaattctgggatttggagacatttgaattgattggatctacaggacctgagacaacaggtgtccgatccatgacattcaatcctgatggaagatctttgttatgtgggctgcacgaaagcttaaaggttttctcttgggagccaataagatgccatgatactgtggacgtgggatggtctagacttgccgatttgaatgtccatgagggaaaacttcttggttgttctttcaatcaaagttgtgttggaatatgggttgttgatctgacgcgtcttgagccatatacaatgggtacttcaacaaaagtaaatggtcattctgaattgaagactgtttctagcggcactttgcctttacaaaatgatagtggttcaagggctaacatagggcgatcatcagtcttgcaaaatacagagaacaaccttaaaactacttcaggaagactgtcggcttcacagaactcagattctgcacccaaagaaactaactcggcaccttcaagcgggttgatcccaagcacaccacatagggctggagttggctcccataatagatctgttggaaattcagcttttcaatctggtggtaccaccttgaagagaagttcgttgaggaataacagtgcctctaatgttcacaatttcagtaaagctgatgtagtgcctgtcattgttcccagaactagctcaggaggggagttggctactgattctagaagcgatgctgctgatgtggcacccgttcttccgaaggtaaccagaagggttgaacctgctaccgattctagaaaagaaagtaatgatgtggaacttgttgttcctagagcaagctcaagaatggaaatagccgatttagcacccatttctagttccaagtcaggcagaaggttggagtctgcccctgattcgaaagaagaaagtgctgatacagcacctgttgttgtttccaatcccagggctaatgtaagaatggaaatagtctctgattctgcgcccgctctttcaaagtcaaacagaaagctagattctggcactaactcaaagaaagaaagtgctgatgcagtcattgtacccagaacaaattctagaatggaaatgatttctgattctaggagagaaccctctgctggaagaatatcaccattcagaatccagtcaagatatgctgagccacggaagctagcccatgccagaactgattcaaacaaagttgatagcagaagtaaaattactgaaacagaagacttcaattgccaaatatttcttccccgtagaaacagtgtttttcaaacaataagttctgaagaacctcgtgaagatgtaaagtgtggtccagttgacagggtgggattttcaaattcatcagaaccaaatgcgagtgtccgcaatgagaattatgttcctagaatgcgcaaaccaggagacaactgctatatcgaagtttcaagagcaggaagagcaaggtcaagtgtctctaattgggaagggagggatcagccccctagtcatgaagaaccaacaacaagcagttctacactggctcctaccggccatccatattcatctagaggaagcaatcaagcttctgaagctccaatcatagctagtgatgaagatgttctatctcttatcatggagcgacatgatctatttttaagctcaactaagtctcggctgatgaaattgcagattattcatcaaatgtgggaaagaaatgacatcaggggtgtgctctctgcgatggacaggatgggtgatcatgctgtctgtgctgatatggctagcgttctcatggagaaaagtgaaacaatcacactagatttatgtacctctatcctgcctgtcgtcaccgatcttctggagagcaaaattgacagacacttagtcgtcgcattggaattgttggtgaagcttgtaaggacttttggtccaatgatacattcaacagtatcgtcaggtccttgtgttggtgtagaccttgaggcagagcaaaggagggagcgctgcaacttatgcttcatcgaattggagaaggccaaaaataagcttccatctctaacaagaagaaaaggggcggttgcaaatgctgcacaagaacttgctcttgtcttccaggaaatcatgagttgactgacgacacactagatatacacaattagatgggacatgcttcggcctctgatggcaacaagattggatatcagctgccatggagggtgctagctattcagtcttagcgacgtcatcaagctccaaggccacagcaccaacaaatgcattttgttgctgctgttcgtgccttttgtacacatgctaacacataatccatgtcatttgtgaagagaagctgccatggacagtgacttcatccacaatattatgtggatggcggcagctggagatgttaggccccgatcgaatggtgatcagcagatgagacttgcttgggcttttctggcactcgtagttctttgctgtctgtaacatctttctcatgtaccgttatcatgtgcatgtgcaacagtcaagtggttgcatttggtagtttatggttgtgctgtgtgttggtcgatttagtggtcgttgatgagtgaagcgagccatgtacatcatttttttttaagatttgatatcttctttttccttgatgactcctctcgttatacttgagtgaaaatgatatcttgtgtacttgccttgacagcttttcg

SEQ ID NO: 18829 - DNA, 3267 bp, Zea Mays
atggagaaaagcaagttgaaaaaggttagagaatacagacttggaaaatgctatcataacaaaacgggagaggagtttgtggcgcactcgtccaatgttaactgcctcaagattgggaggaagacctcgcgggttcttgtcacaggaggagaggaccataaggtcaatctttgggctattgggaagcccaattcaatactgagcttatcaggtcacacaagtgctgtggagtcggttggttttgattccacggaagtgtttgtggctgcaggagcagccagtggaacaataaagctatgggatttggaggaggcaaagattgtccgcactcttactggacatagatcaaactgcatgtcagttgattttcatccgtttggggaattctttgcctctgggtcactggacactaatctgaagatatgggatataagaaggaagaattgcatccatacatacaaaggtcacacacgaggggtgaacactattagatttacacccgatgggcggtgggttgtgtctggtggcgaagataatatagtaaagctctgggatctgacagctggaaagttattacatgaattcaagtgtcatgagggtcagatccagtgcatagatttccacccccacgagttccttctggcaacaggttcagctgataaaactgtcaaattctgggatttggagacatttgaattgattggatctacaggacctgagacaacaggtgtccgatccatgacattcaatcctgatggaagatctttgttatgtgggctgcacgaaagcttaaaggttttctcttgggagccaataagatgccatgatactgtggacgtgggatggtctagacttgccgatttgaatgtccatgagggaaaacttcttggttgttctttcaatcaaagttgtgttggaatatgggttgttgatctgacgcgtcttgagccatatacaatgggtacttcaacaaaagtaaatggtcattctgaattgaagactgtttctagcggcactttgcctttacaaaatgatagtggttcaagggctaacatagggcgatcatcagtcttgcaaaatacagagaacaaccttaaaactacttcaggaagactgtcggcttcacagaactcagattctgcacccaaagaaactaactcggcaccttcaagcgggttgatcccaagcacaccacatagggctggagttggctcccataatagatctgttggaaattcagcttttcaatctggtggtaccaccttgaagagaagttcgttgaggaataacagtgcctctaatgttcacaatttcagtaaagctgatgtagtgcctgtcattgttcccagaactagctcaggaggggagttggctactgattctagaagcgatgctgctgatgtggcacccgttcttccgaaggtaaccagaagggttgaacctgctaccgattctagaaaagaaagtaatgatgtggaacttgttgttcctagagcaagctcaagaatggaaatagccgatttagcacccatttctagttccaagtcaggcagaaggttggagtctgcccctgattcgaaagaagaaagtgctgatacagcacctgttgttgtttccaatcccagggctaatgtaagaatggaaatagtctctgattctgcgcccgctctttcaaagtcaaacagaaagctagattctggcactaactcaaagaaagaaagtgctgatgcagtcattgtacccagaacaaattctagaatggaaatgatttctgattctaggagagaaccctctgctggaagaatatcaccattcagaatccagtcaagatatgctgagccacggaagctagcccatgccagaactgattcaaacaaagttgatagcagaagtaaaattactgaaacagaagacttcaattgccaaatatttcttccccgtagaaacagtgtttttcaaacaataagttctgaagaacctcgtgaagatgtaaagtgtggtccagttgacagggtgggattttcaaattcatcagaaccaaatgcgagtgtccgcaatgagaattatgttcctagaatgcgcaaaccaggagacaactgctatatcgaagtttcaagagcagagaggaagcaatcaagcttctgaagctccaatcatagctagtgatgaagatgttctatctcttatcatggagcgacatgatctatttttaagctcaactaagtctcggctgatgaaattgcagattattcatcaaatgtgggaaagaaatgacatcaggggtgtgctctctgcgatggacaggatgggtgatcatgctgtctgtgctgatatggctagcgttctcatggagaaaagtgaaacaatcacactagatttatgtacctctatcctgcctgtcgtcaccgatcttctggagagcaaaattgacagacacttagtcgtcgcattggaattgttggtgaagcttgtaaggacttttggtccaatgatacattcaacagtatcgtcaggtccttgtgttggtgtagaccttgaggcagagcaaaggagggagcgctgcaacttatgcttcatcgaattggagaaggccaaaaataagcttccatctctaacaagaagaaaaggggcggttgcaaatgctgcacaagaacttgctcttgtcttccaggaaatcatgagttgactgacgacacactagatatacacaattagatgggacatgcttcggcctctgatggcaacaagattggatatcagctgccatggagggtgctagctattcagtcttagcgacgtcatcaagctccaaggccacagcaccaacaaatgcattttgttgctgctgttcgtgccttttgtacacatgctaacacataatccatgtcatttgtgaagagaagctgccatggacagtgacttcatccacaatattatgtggatggcggcagctggagatgttaggccccgatcgaatggtgatcagcagatgagacttgcttgggcttttctggcactcgtagttctttgctgtctgtaacatctttctcatgtaccgttatcatgtgcatgtgcaacagtcaagtggttgcatttggtagtttatggttgtgctgtgtgttggtcgatttagtggtcgttgatgagtgaagcgagccatgtacatcatttttttttaagatttgatatcttctttttccttgatgactcctctcgttatacttgagtgaaaatgatatcttgtgtacttgccttgacagcttttcg

SEQ ID NO: 18830 - DNA, 3328 bp, Zea Mays
atggagaaaagcaagttgaaaaaggttagagaatacagacttggaaaatgctatcataacaaaacgggagaggagtttgtggcgcactcgtccaatgttaactgcctcaagattgggaggaagacctcgcgggttcttgtcacaggaggagaggaccataaggtcaatctttgggctattgggaagcccaattcaatactgagcttatcaggtcacacaagtgctgtggagtcggttggttttgattccacggaagtgtttgtggctgcaggagcagccagtggaacaataaagctatgggatttggaggaggcaaagattgtccgcactcttactggacatagatcaaactgcatgtcagttgattttcatccgtttggggaattctttgcctctgggtcactggacactaatctgaagatatgggatataagaaggaagaattgcatccatacatacaaaggtcacacacgaggggtgaacactattagatttacacccgatgggcggtgggttgtgtctggtggcgaagataatatagtaaagctctgggatctgacagctggaaagttattacatgaattcaagtgtcatgagggtcagatccagtgcatagatttccacccccacgagttccttctggcaacaggttcagctgataaaactgtcaaattctgggatttggagacatttgaattgattggatctacaggacctgagacaacaggtgtccgatccatgacattcaatcctgatggaagatctttgttatgtgggctgcacgaaagcttaaaggttttctcttgggagccaataagatgccatgatactgtggacgtgggatggtctagacttgccgatttgaatgtccatgagggaaaacttcttggttgttctttcaatcaaagttgtgttggaatatgggttgttgatctgacgcgtcttgagccatatacaatgggtacttcaacaaaagtaaatggtcattctgaattgaagactgtttctagcggcactttgcctttacaaaatgatagtggttcaagggctaacatagggcgatcatcagtcttgcaaaatacagagaacaaccttaaaactacttcaggaagactgtcggcttcacagaactcagattctgcacccaaagaaactaactcggcaccttcaagcgggttgatcccaagcacaccacatagggctggagttggctcccataatagatctgttggaaattcagcttttcaatctggtggtaccaccttgaagagaagttcgttgaggaataacagtgcctctaatgttcacaatttcagtaaagctgatgtagtgcctgtcattgttcccagaactagctcaggaggggagttggctactgattctagaagcgatgctgctgatgtggcacccgttcttccgaaggtaaccagaagggttgaacctgctaccgattctagaaaagaaagtaatgatgtggaacttgttgttcctagagcaagctcaagaatggaaatagccgatttagcacccatttctagttccaagtcaggcagaaggttggagtctgcccctgattcgaaagaagaaagtgctgatacagcacctgttgttgtttccaatcccagggctaatgtaagaatggaaatagtctctgattctgcgcccgctctttcaaagtcaaacagaaagctagattctggcactaactcaaagaaagaaagtgctgatgcagtcattgtacccagaacaaattctagaatggaaatgatttctgattctaggagagaaccctctgctggaagaatatcaccattcagaatccagtcaagatatgctgagccacggaagctagcccatgccagaactgattcaaacaaagttgatagcagaagtaaaattactgaaacagaagacttcaattgccaaatatttcttccccgtagaaacagtgtttttcaaacaataagttctgaagaacctcgtgaagatgtaaagtgtggtccagttgacaggatgttcctagaatgcgcaaaccaggagacaactgctatatcgaagtttcaagagcaggaagagcaaggtcaagtgtctctaattgggaagggagggatcagccccctagtcatgaagaaccaacaacaagcagttctacactggctcctaccggccatccatattcatctagaggaagcaatcaagcttctgaagctccaatcatagctagtgatgaagatgttctatctcttatcatggagcgacatgatctatttttaagctcaactaagtctcggctgatgaaattgcagattattcatcaaatgtgggaaagaaatgacatcaggggtgtgctctctgcgatggacaggatgggtgatcatgctgtctgtgctgatatggctagcgttctcatggagaaaagtgaaacaatcacactagatttatgtacctctatcctgcctgtcgtcaccgatcttctggagagcaaaattgacagacacttagtcgtcgcattggaattgttggtgaagcttgtaaggacttttggtccaatgatacattcaacagtatcgtcaggtccttgtgttggtgtagaccttgaggcagagcaaaggagggagcgctgcaacttatgcttcatcgaattggagaaggccaaaaataagcttccatctctaacaagaagaaaaggggcggttgcaaatgctgcacaagaacttgctcttgtcttccaggaaatcatgagttgactgacgacacactagatatacacaattagatgggacatgcttcggcctctgatggcaacaagattggatatcagctgccatggagggtgctagctattcagtcttagcgacgtcatcaagctccaaggccacagcaccaacaaatgcattttgttgctgctgttcgtgccttttgtacacatgctaacacataatccatgtcatttgtgaagagaagctgccatggacagtgacttcatccacaatattatgtggatggcggcagctggagatgttaggccccgatcgaatggtgatcagcagatgagacttgcttgggcttttctggcactcgtagttctttgctgtctgtaacatctttctcatgtaccgttatcatgtgcatgtgcaacagtcaagtggttgcatttggtagtttatggttgtgctgtgtgttggtcgatttagtggtcgttgatgagtgaagcgagccatgtacatcatttttttttaagatttgatatcttctttttccttgatgactcctctcgttatacttgagtgaaaatgatatcttgtgtacttgccttgacagcttttcg

SEQ ID NO: 18831 - DNA, 3470 bp, Zea Mays
gacaggcgcggcgcgagatccgggctggaagggctggcgggtcccgttggtggcgccgtggcgtcggcgtgatctgagatgagattggacccggctgcgcggtattcgctgcggaggtagacggccatgacgaccaacaccaagcgcgcctacaagctccaggagtttgtggcgcactcgtccaatgttaactgcctcaagattgggaggaagacctcgcgggttcttgtcacaggaggagaggaccataaggtcaatctttgggctattgggaagcccaattcaatactgagcttatcaggtcacacaagtgctgtggagtcggttggttttgattccacggaagtgtttgtggctgcaggagcagccagtggaacaataaagctatgggatttggaggaggcaaagattgtccgcactcttactggacatagatcaaactgcatgtcagttgattttcatccgtttggggaattctttgcctctgggtcactggacactaatctgaagatatgggatataagaaggaagaattgcatccatacatacaaaggtcacacacgaggggtgaacactattagatttacacccgatgggcggtgggttgtgtctggtggcgaagataatatagtaaagctctgggatctgacagctggaaagttattacatgaattcaagtgtcatgagggtcagatccagtgcatagatttccacccccacgagttccttctggcaacaggttcagctgataaaactgtcaaattctgggatttggagacatttgaattgattggatctacaggacctgagacaacaggtgtccgatccatgacattcaatcctgatggaagatctttgttatgtgggctgcacgaaagcttaaaggttttctcttgggagccaataagatgccatgatactgtggacgtgggatggtctagacttgccgatttgaatgtccatgagggaaaacttcttggttgttctttcaatcaaagttgtgttggaatatgggttgttgatctgacgcgtcttgagccatatacaatgggtacttcaacaaaagtaaatggtcattctgaattgaagactgtttctagcggcactttgcctttacaaaatgatagtggttcaagggctaacatagggcgatcatcagtcttgcaaaatacagagaacaaccttaaaactacttcaggaagactgtcggcttcacagaactcagattctgcacccaaagaaactaactcggcaccttcaagcgggttgatcccaagcacaccacatagggctggagttggctcccataatagatctgttggaaattcagcttttcaatctggtggtaccaccttgaagagaagttcgttgaggaataacagtgcctctaatgttcacaatttcagtaaagctgatgtagtgcctgtcattgttcccagaactagctcaggaggggagttggctactgattctagaagcgatgctgctgatgtggcacccgttcttccgaaggtaaccagaagggttgaacctgctaccgattctagaaaagaaagtaatgatgtggaacttgttgttcctagagcaagctcaagaatggaaatagccgatttagcacccatttctagttccaagtcaggcagaaggttggagtctgcccctgattcgaaagaagaaagtgctgatacagcacctgttgttgtttccaatcccagggctaatgtaagaatggaaatagtctctgattctgcgcccgctctttcaaagtcaaacagaaagctagattctggcactaactcaaagaaagaaagtgctgatgcagtcattgtacccagaacaaattctagaatggaaatgatttctgattctaggagagaaccctctgctggaagaatatcaccattcagaatccagtcaagatatgctgagccacggaagctagcccatgccagaactgattcaaacaaagttgatagcagaagtaaaattactgaaacagaagacttcaattgccaaatatttcttccccgtagaaacagtgtttttcaaacaataagttctgaagaacctcgtgaagatgtaaagtgtggtccagttgacagggtgggattttcaaattcatcagaaccaaatgcgagtgtccgcaatgagaattatgttcctagaatgcgcaaaccaggagacaactgctatatcgaagtttcaagagcaggaagagcaaggtcaagtgtctctaattgggaagggagggatcagccccctagtcatgaagaaccaacaacaagcagttctacactggctcctaccggccatccatattcatctagaggaagcaatcaagcttctgaagctccaatcatagctagtgatgaagatgttctatctcttatcatggagcgacatgatctatttttaagctcaactaagtctcggctgatgaaattgcagattattcatcaaatgtgggaaagaaatgacatcaggggtgtgctctctgcgatggacaggatgggtgatcatgctgtctgtgctgatatggctagcgttctcatggagaaaagtgaaacaatcacactagatttatgtacctctatcctgcctgtcgtcaccgatcttctggagagcaaaattgacagacacttagtcgtcgcattggaattgttggtgaagcttgtaaggacttttggtccaatgatacattcaacagtatcgtcaggtccttgtgttggtgtagaccttgaggcagagcaaaggagggagcgctgcaacttatgcttcatcgaattggagaaggccaaaaataagcttccatctctaacaagaagaaaaggggcggttgcaaatgctgcacaagaacttgctcttgtcttccaggaaatcatgagttgactgacgacacactagatatacacaattagatgggacatgcttcggcctctgatggcaacaagattggatatcagctgccatggagggtgctagctattcagtcttagcgacgtcatcaagctccaaggccacagcaccaacaaatgcattttgttgctgctgttcgtgccttttgtacacatgctaacacataatccatgtcatttgtgaagagaagctgccatggacagtgacttcatccacaatattatgtggatggcggcagctggagatgttaggccccgatcgaatggtgatcagcagatgagacttgcttgggcttttctggcactcgtagttctttgctgtctgtaacatctttctcatgtaccgttatcatgtgcatgtgcaacagtcaagtggttgcatttggtagtttatggttgtgctgtgtgttggtcgatttagtggtcgttgatgagtgaagcgagccatgtacatcatttttttttaagatttgatatcttctttttccttgatgactcctctcgttatacttgagtgaaaatgatatcttgtgtacttgccttgacagcttttcg

SEQ ID NO: 18832 - DNA, 3411 bp, Zea Mays
gcggcgcgagatccgggctggaagggctggcgggtcccgttggtggcgccgtggcgtcggcgtgatctgagatgagattggacccggctgcgcggtattcgctgcggaggtagacggccatgacgaccaacaccaagcgcgcctacaagctccaggagtttgtggcgcactcgtccaatgttaactgcctcaagattgggaggaagacctcgcgggttcttgtcacaggaggagaggaccataaggtcaatctttgggctattgggaagcccaattcaatactgagcttatcaggtcacacaagtgctgtggagtcggttggttttgattccacggaagtgtttgtggctgcaggagcagccagtggaacaataaagctatgggatttggaggaggcaaagattgtccgcactcttactggacatagatcaaactgcatgtcagttgattttcatccgtttggggaattctttgcctctgggtcactggacactaatctgaagatatgggatataagaaggaagaattgcatccatacatacaaaggtcacacacgaggggtgaacactattagatttacacccgatgggcggtgggttgtgtctggtggcgaagataatatagtaaagctctgggatctgacagctggaaagttattacatgaattcaagtgtcatgagggtcagatccagtgcatagatttccacccccacgagttccttctggcaacaggttcagctgataaaactgtcaaattctgggatttggagacatttgaattgattggatctacaggacctgagacaacaggtgtccgatccatgacattcaatcctgatggaagatctttgttatgtgggctgcacgaaagcttaaaggttttctcttgggagccaataagatgccatgatactgtggacgtgggatggtctagacttgccgatttgaatgtccatgagggaaaacttcttggttgttctttcaatcaaagttgtgttggaatatgggttgttgatctgacgcgtcttgagccatatacaatgggtacttcaacaaaagtaaatggtcattctgaattgaagactgtttctagcggcactttgcctttacaaaatgatagtggttcaagggctaacatagggcgatcatcagtcttgcaaaatacagagaacaaccttaaaactacttcaggaagactgtcggcttcacagaactcagattctgcacccaaagaaactaactcggcaccttcaagcgggttgatcccaagcacaccacatagggctggagttggctcccataatagatctgttggaaattcagcttttcaatctggtggtaccaccttgaagagaagttcgttgaggaataacagtgcctctaatgttcacaatttcagtaaagctgatgtagtgcctgtcattgttcccagaactagctcaggaggggagttggctactgattctagaagcgatgctgctgatgtggcacccgttcttccgaaggtaaccagaagggttgaacctgctaccgattctagaaaagaaagtaatgatgtggaacttgttgttcctagagcaagctcaagaatggaaatagccgatttagcacccatttctagttccaagtcaggcagaaggttggagtctgcccctgattcgaaagaagaaagtgctgatacagcacctgttgttgtttccaatcccagggctaatgtaagaatggaaatagtctctgattctgcgcccgctctttcaaagtcaaacagaaagctagattctggcactaactcaaagaaagaaagtgctgatgcagtcattgtacccagaacaaattctagaatggaaatgatttctgattctaggagagaaccctctgctggaagaatatcaccattcagaatccagtcaagatatgctgagccacggaagctagcccatgccagaactgattcaaacaaagttgatagcagaagtaaaattactgaaacagaagacttcaattgccaaatatttcttccccgtagaaacagtgtttttcaaacaataagttctgaagaacctcgtgaagatgtaaagtgtggtccagttgacaggatgttcctagaatgcgcaaaccaggagacaactgctatatcgaagtttcaagagcaggaagagcaaggtcaagtgtctctaattgggaagggagggatcagccccctagtcatgaagaaccaacaacaagcagttctacactggctcctaccggccatccatattcatctagaggaagcaatcaagcttctgaagctccaatcatagctagtgatgaagatgttctatctcttatcatggagcgacatgatctatttttaagctcaactaagtctcggctgatgaaattgcagattattcatcaaatgtgggaaagaaatgacatcaggggtgtgctctctgcgatggacaggatgggtgatcatgctgtctgtgctgatatggctagcgttctcatggagaaaagtgaaacaatcacactagatttatgtacctctatcctgcctgtcgtcaccgatcttctggagagcaaaattgacagacacttagtcgtcgcattggaattgttggtgaagcttgtaaggacttttggtccaatgatacattcaacagtatcgtcaggtccttgtgttggtgtagaccttgaggcagagcaaaggagggagcgctgcaacttatgcttcatcgaattggagaaggccaaaaataagcttccatctctaacaagaagaaaaggggcggttgcaaatgctgcacaagaacttgctcttgtcttccaggaaatcatgagttgactgacgacacactagatatacacaattagatgggacatgcttcggcctctgatggcaacaagattggatatcagctgccatggagggtgctagctattcagtcttagcgacgtcatcaagctccaaggccacagcaccaacaaatgcattttgttgctgctgttcgtgccttttgtacacatgctaacacataatccatgtcatttgtgaagagaagctgccatggacagtgacttcatccacaatattatgtggatggcggcagctggagatgttaggccccgatcgaatggtgatcagcagatgagacttgcttgggcttttctggcactcgtagttctttgctgtctgtaacatctttctcatgtaccgttatcatgtgcatgtgcaacagtcaagtggttgcatttggtagtttatggttgtgctgtgtgttggtcgatttagtggtcgttgatgagtgaagcgagccatgtacatcatttttttttaagatttgatatcttctttttccttgatgactcctctcgttatacttgagtgaaaatgatatcttgtgtacttgccttgacagcttttcg

SEQ ID NO: 18833 - DNA, 3296 bp, Zea Mays
ggcgcgagatccgggctggaagggctggcgggtcccgttggtggcgccgtggcgtcggcgtgatctgagatgagattggacccggctgcgcggtattcgctgcggaggtagacggccatgacgaccaacaccaagcgcgcctacaagctccaggagtttgtggcgcactcgtccaatgttaactgcctcaagattgggaggaagacctcgcgggttcttgtcacaggaggagaggaccataaggtcaatctttgggctattgggaagcccaattcaatactgagcttatcaggtcacacaagtgctgtggagtcggttggttttgattccacggaagtgtttgtggctgcaggagcagccagtggaacaataaagctatgggatttggaggaggcaaagattgtccgcactcttactggacatagatcaaactgcatgtcagttgattttcatccgtttggggaattctttgcctctgggtcactggacactaatctgaagatatgggatataagaaggaagaattgcatccatacatacaaaggtcacacacgaggggtgaacactattagatttacacccgatgggcggtgggttgtgtctggtggcgaagataatatagtaaagctctgggatctgacagctggaaagttattacatgaattcaagtgtcatgagggtcagatccagtgcatagatttccacccccacgagttccttctggcaacaggttcagctgataaaactgtcaaattctgggatttggagacatttgaattgattggatctacaggacctgagacaacaggtgtccgatccatgacattcaatcctgatggaagatctttgttatgtgggctgcacgaaagcttaaaggttttctcttgggagccaataagatgccatgatactgtggacgtgggatggtctagacttgccgatttgaatgtccatgagggaaaacttcttggttgttctttcaatcaaagttgtgttggaatatgggttgttgatctgacgcgtcttgagccatatacaatgggtacttcaacaaaagtaaatggtcattctgaattgaagactgtttctagcggcactttgcctttacaaaatgatagtggttcaagggctaacatagggcgatcatcagtcttgcaaaatacagagaacaaccttaaaactacttcaggaagactgtcggcttcacagaactcagattctgcacccaaagaaactaactcggcaccttcaagcgggttgatcccaagcacaccacatagggctggagttggctcccataatagatctgttggaaattcagcttttcaatctggtggtaccaccttgaagagaagttcgttgaggaataacagtgcctctaatgttcacaatttcagtaaagctgatgtagtgcctgtcattgttcccagaactagctcaggaggggagttggctactgattctagaagcgatgctgctgatgtggcacccgttcttccgaaggtaaccagaagggttgaacctgctaccgattctagaaaagaaagtaatgatgtggaacttgttgttcctagagcaagctcaagaatggaaatagccgatttagcacccatttctagttccaagtcaggcagaaggttggagtctgcccctgattcgaaagaagaaagtgctgatacagcacctgttgttgtttccaatcccagggctaatgtaagaatggaaatagtctctgattctgcgcccgctctttcaaagtcaaacagaaagctagattctggcactaactcaaagaaagaaagtgctgatgcagtcattgtacccagaacaaattctagaatggaaatgatttctgattctaggagagaaccctctgctggaagaatatcaccattcagaatccagtcaagatatgctgagccacggaagctagcccatgccagaactgattcaaacaaagttgatagcagaagtaaaattactgaaacagaagacttcaattgccaaatatttcttccccgtagaaacagtgtttttcaaacaataagttctgaagaacctcgtgaagatgtaaagtgtggtccagttgacaggatgttcctagaatgcgcaaaccaggagacaactgctatatcgaagtttcaagagcagagaggaagcaatcaagcttctgaagctccaatcatagctagtgatgaagatgttctatctcttatcatggagcgacatgatctatttttaagctcaactaagtctcggctgatgaaattgcagattattcatcaaatgtgggaaagaaatgacatcaggggtgtgctctctgcgatggacaggatgggtgatcatgctgtctgtgctgatatggctagcgttctcatggagaaaagtgaaacaatcacactagatttatgtacctctatcctgcctgtcgtcaccgatcttctggagagcaaaattgacagacacttagtcgtcgcattggaattgttggtgaagcttgtaaggacttttggtccaatgatacattcaacagtatcgtcaggtccttgtgttggtgtagaccttgaggcagagcaaaggagggagcgctgcaacttatgcttcatcgaattggagaaggccaaaaataagcttccatctctaacaagaagaaaaggggcggttgcaaatgctgcacaagaacttgctcttgtcttccaggaaatcatgagttgactgacgacacactagatatacacaattagatgggacatgcttcggcctctgatggcaacaagattggatatcagctgccatggagggtgctagctattcagtcttagcgacgtcatcaagctccaaggccacagcaccaacaaatgcattttgttgctgctgttcgtgccttttgtacacatgctaacacataatccatgtcatttgtgaagagaagctgccatggacagtgacttcatccacaatattatgtggatggcggcagctggagatgttaggccccgatcgaatggtgatcagcagatgagacttgcttgggcttttctggcactcgtagttctttgctgtctgtaacatctttctcatgtaccgttatcatgtgcatgtgcaacagtcaagtggttgcatttggtagtttatggttgtgctgtgtgttggtcgatttagtggtcgttgatgagtgaagcgagccatgtacatcatttttttttaagatttgatatcttctttttccttgatgactcctctcgttatacttgagtgaaaatgatatcttgtgtacttgccttgacagcttttcg

SEQ ID NO: 18834 - DNA, 3442 bp, Zea Mays
gggctggaagggctggcgggtcccgttggtggcgccgtggcgtcggcgtgatctgagatgagattggacccggctgcgcggtattcgctgcggaggtagacggccatgacgaccaacaccaagcgcgcctacaagctccaggagtttgtggcgcactcgtccaatgttaactgcctcaagattgggaggaagacctcgcgggttcttgtcacaggaggagaggaccataaggtcaatctttgggctattgggaagcccaattcaatactgagcttatcaggtcacacaagtgctgtggagtcggttggttttgattccacggaagtgtttgtggctgcaggagcagccagtggaacaataaagctatgggatttggaggaggcaaagattgtccgcactcttactggacatagatcaaactgcatgtcagttgattttcatccgtttggggaattctttgcctctgggtcactggacactaatctgaagatatgggatataagaaggaagaattgcatccatacatacaaaggtcacacacgaggggtgaacactattagatttacacccgatgggcggtgggttgtgtctggtggcgaagataatatagtaaagctctgggatctgacagctggaaagttattacatgaattcaagtgtcatgagggtcagatccagtgcatagatttccacccccacgagttccttctggcaacaggttcagctgataaaactgtcaaattctgggatttggagacatttgaattgattggatctacaggacctgaggtgtccgatccatgacattcaatcctgatggaagatctttgttatgtgggctgcacgaaagcttaaaggttttctcttgggagccaataagatgccatgatactgtggacgtgggatggtctagacttgccgatttgaatgtccatgagggaaaacttcttggttgttctttcaatcaaagttgtgttggaatatgggttgttgatctgacgcgtcttgagccatatacaatgggtacttcaacaaaagtaaatggtcattctgaattgaagactgtttctagcggcactttgcctttacaaaatgatagtggttcaagggctaacatagggcgatcatcagtcttgcaaaatacagagaacaaccttaaaactacttcaggaagactgtcggcttcacagaactcagattctgcacccaaagaaactaactcggcaccttcaagcgggttgatcccaagcacaccacatagggctggagttggctcccataatagatctgttggaaattcagcttttcaatctggtggtaccaccttgaagagaagttcgttgaggaataacagtgcctctaatgttcacaatttcagtaaagctgatgtagtgcctgtcattgttcccagaactagctcaggaggggagttggctactgattctagaagcgatgctgctgatgtggcacccgttcttccgaaggtaaccagaagggttgaacctgctaccgattctagaaaagaaagtaatgatgtggaacttgttgttcctagagcaagctcaagaatggaaatagccgatttagcacccatttctagttccaagtcaggcagaaggttggagtctgcccctgattcgaaagaagaaagtgctgatacagcacctgttgttgtttccaatcccagggctaatgtaagaatggaaatagtctctgattctgcgcccgctctttcaaagtcaaacagaaagctagattctggcactaactcaaagaaagaaagtgctgatgcagtcattgtacccagaacaaattctagaatggaaatgatttctgattctaggagagaaccctctgctggaagaatatcaccattcagaatccagtcaagatatgctgagccacggaagctagcccatgccagaactgattcaaacaaagttgatagcagaagtaaaattactgaaacagaagacttcaattgccaaatatttcttccccgtagaaacagtgtttttcaaacaataagttctgaagaacctcgtgaagatgtaaagtgtggtccagttgacagggtgggattttcaaattcatcagaaccaaatgcgagtgtccgcaatgagaattatgttcctagaatgcgcaaaccaggagacaactgctatatcgaagtttcaagagcaggaagagcaaggtcaagtgtctctaattgggaagggagggatcagccccctagtcatgaagaaccaacaacaagcagttctacactggctcctaccggccatccatattcatctagaggaagcaatcaagcttctgaagctccaatcatagctagtgatgaagatgttctatctcttatcatggagcgacatgatctatttttaagctcaactaagtctcggctgatgaaattgcagattattcatcaaatgtgggaaagaaatgacatcaggggtgtgctctctgcgatggacaggatgggtgatcatgctgtctgtgctgatatggctagcgttctcatggagaaaagtgaaacaatcacactagatttatgtacctctatcctgcctgtcgtcaccgatcttctggagagcaaaattgacagacacttagtcgtcgcattggaattgttggtgaagcttgtaaggacttttggtccaatgatacattcaacagtatcgtcaggtccttgtgttggtgtagaccttgaggcagagcaaaggagggagcgctgcaacttatgcttcatcgaattggagaaggccaaaaataagcttccatctctaacaagaagaaaaggggcggttgcaaatgctgcacaagaacttgctcttgtcttccaggaaatcatgagttgactgacgacacactagatatacacaattagatgggacatgcttcggcctctgatggcaacaagattggatatcagctgccatggagggtgctagctattcagtcttagcgacgtcatcaagctccaaggccacagcaccaacaaatgcattttgttgctgctgttcgtgccttttgtacacatgctaacacataatccatgtcatttgtgaagagaagctgccatggacagtgacttcatccacaatattatgtggatggcggcagctggagatgttaggccccgatcgaatggtgatcagcagatgagacttgcttgggcttttctggcactcgtagttctttgctgtctgtaacatctttctcatgtaccgttatcatgtgcatgtgcaacagtcaagtggttgcatttggtagtttatggttgtgctgtgtgttggtcgatttagtggtcgttgatgagtgaagcgagccatgtacatcatttttttttaagatttgatatcttctttttccttgatgactcctctcgttatacttgagtgaaaatgatatcttgtgtacttgccttgacagcttttcg

SEQ ID NO: 18835 - DNA, 3608 bp, Zea Mays
ctggcgggtcccgttggtggcgccgtggcgtcggcgtgatctgagatgagattggacccggctgcgcggtattcgctgcggaggtagacggccatgacgaccaacaccaagcgcgcctacaagctccaggagtttgtggcgcactcgtccaatgttaactgcctcaagattgggaggaagacctcgcgggttcttgtcacaggaggagaggaccataaggtcaatctttgggctattgggaagcccaattcaatactgagcttatcaggtcacacaagtgctgtggagtcggttggttttgattccacggaagtgtttgtggctgcaggagcagccagtggaacaataaagctatgggatttggaggaggcaaagattgtccgcactcttactggacatagatcaaactgcatgtcagttgattttcatccgtttggggaattctttgcctctgggtcactggacactaatctgaagatatgggatataagaaggaagaattgcatccatacatacaaaggtcacacacgaggggtgaacactattagatttacacccgatgggcggtgggttgtgtctggtggcgaagataatatagtaaagctctgggatctgacagctggaaagttattacatgaattcaagtgtcatgagggtcagatccagtgcatagatttccacccccacgagttccttctggcaacaggttcagctgataaaactgtcaaattctgggatttggagacatttgaattgattggatctacaggacctgaggtacatcggtatttggagctgatagttcacaattgtttatttcctttgcatttgtaatcctcagaatttaagcattatttccttaataagtagcttgggtggggatcccatctctaatgttacatcgaaaaagaaatggaaaatgaacataaacttagatgtccctgtttgatgcttctttatacaacaaacagtcatatgctaatgttttgcagcataattcagttcaatttgggcacctatttaattcatttggatacctcttttgtttccatcatttaattcatttgaatcacttcttggaatcacttcttgtgtttccataaaaaatactagacaacaggtgtccgatccatgacattcaatcctgatggaagatctttgttatgtgggctgcacgaaagcttaaaggttttctcttgggagccaataagatgccatgatactgtggacgtgggatggtctagacttgccgatttgaatgtccatgagggaaaacttcttggttgttctttcaatcaaagttgtgttggaatatgggttgttgatctgacgcgtcttgagccatatacaatgggtacttcaacaaaagtaaatggtcattctgaattgaagactgtttctagcggcactttgcctttacaaaatgatagtggttcaagggctaacatagggcgatcatcagtcttgcaaaatacagagaacaaccttaaaactacttcaggaagactgtcggcttcacagaactcagattctgcacccaaagaaactaactcggcaccttcaagcgggttgatcccaagcacaccacatagggctggagttggctcccataatagatctgttggaaattcagcttttcaatctggtggtaccaccttgaagagaagttcgttgaggaataacagtgcctctaatgttcacaatttcagtaaagctgatgtagtgcctgtcattgttcccagaactagctcaggaggggagttggctactgattctagaagcgatgctgctgatgtggcacccgttcttccgaaggtaaccagaagggttgaacctgctaccgattctagaaaagaaagtaatgatgtggaacttgttgttcctagagcaagctcaagaatggaaatagccgatttagcacccatttctagttccaagtcaggcagaaggttggagtctgcccctgattcgaaagaagaaagtgctgatacagcacctgttgttgtttccaatcccagggctaatgtaagaatggaaatagtctctgattctgcgcccgctctttcaaagtcaaacagaaagctagattctggcactaactcaaagaaagaaagtgctgatgcagtcattgtacccagaacaaattctagaatggaaatgatttctgattctaggagagaaccctctgctggaagaatatcaccattcagaatccagtcaagatatgctgagccacggaagctagcccatgccagaactgattcaaacaaagttgatagcagaagtaaaattactgaaacagaagacttcaattgccaaatatttcttccccgtagaaacagtgtttttcaaacaataagttctgaagaacctcgtgaagatgtaaagtgtggtccagttgacaggatgttcctagaatgcgcaaaccaggagacaactgctatatcgaagtttcaagagcagagaggaagcaatcaagcttctgaagctccaatcatagctagtgatgaagatgttctatctcttatcatggagcgacatgatctatttttaagctcaactaagtctcggctgatgaaattgcagattattcatcaaatgtgggaaagaaatgacatcaggggtgtgctctctgcgatggacaggatgggtgatcatgctgtctgtgctgatatggctagcgttctcatggagaaaagtgaaacaatcacactagatttatgtacctctatcctgcctgtcgtcaccgatcttctggagagcaaaattgacagacacttagtcgtcgcattggaattgttggtgaagcttgtaaggacttttggtccaatgatacattcaacagtatcgtcaggtccttgtgttggtgtagaccttgaggcagagcaaaggagggagcgctgcaacttatgcttcatcgaattggagaaggccaaaaataagcttccatctctaacaagaagaaaaggggcggttgcaaatgctgcacaagaacttgctcttgtcttccaggaaatcatgagttgactgacgacacactagatatacacaattagatgggacatgcttcggcctctgatggcaacaagattggatatcagctgccatggagggtgctagctattcagtcttagcgacgtcatcaagctccaaggccacagcaccaacaaatgcattttgttgctgctgttcgtgccttttgtacacatgctaacacataatccatgtcatttgtgaagagaagctgccatggacagtgacttcatccacaatattatgtggatggcggcagctggagatgttaggccccgatcgaatggtgatcagcagatgagacttgcttgggcttttctggcactcgtagttctttgctgtctgtaacatctttctcatgtaccgttatcatgtgcatgtgcaacagtcaagtggttgcatttggtagtttatggttgtgctgtgtgttggtcgatttagtggtcgttgatgagtgaagcgagccatgtacatcatttttttttaagatttgatatcttctttttccttgatgactcctctcgttatacttgagtgaaaatgatatcttgtgtacttgccttgacagcttttcg

SEQ ID NO: 18836 - DNA, 2472 bp, Zea Mays
cgccttccatctccggccggtctccgctcgtcgtcctcgcccagcccagagacgcccacggaatcgcaattccccactcccaccccccttctcctttctataaagggaaacttcgccaccaaatctcgaatcccatctcgctgctctccgccgctcgacgccgacgccgacgccgacacctctccctcccccattccccgtgccccggaccgcggagcagacagaggcgagatccggagcgccgcgcgatggcgaacatcgacatggcgaagatcctggcggacctggaccgcggcgccggcgacgcgcggctgcccaagaccaagctcgtctgcacgcttggcccggcctcccgctccgtgcccatgctcgagaagctgctccgcgccggcatgaacgtcgcgcgcttcaacttctcccacggcacccaccagtaccaccaggagacgctcgacagcctccgccaggccatgcacaacaccggcatcctctgcgccgtcatgctcgacaccaagggtcctgagattcgtacagggtttttgaaggatggtaaaccaattaagctaaccaagggtcaagagatcactgttaccactgattatgatatcaagggtgacgaaaaaatgatcgctatgagttacaagaaactgcctgttgacgtgaagcctggaaatgtcatactctgcgcagatggtactatctctctggccgttctgtcttgcgatcctgatgctggaactgtgcgttgtaggtgtgagaacactgcaatgcttggtgagagaaagaactgcaatttgccaggaattgttgtggatcttcctacattgactgagaaagataaagaagatattttgggctggggtgttccaaatgacattgacatgattgctctatcctttgtccgtaaaggatcagatttggtgactgtcagacaggttcttgggcagcatgccaagcgcattaagttgatgtcaaagttggttagcgaaatgcaattctgttaacttgacgctacatttccacctggttgagaaccaagagggtgttgtaaactttgatgagatcttgagggagactgatgcttttatggttgctagaggtgatctgggaatggagattccagtcgagaagattttccttgcgcagaagatgatgatctacaagtgcaacattgctggcaaacctgttgttactgctacccagatgctcgagtcgatgatcaaatctcctcggccgacacgtgctgaggccactgacgttgcaaatgccgttcttgatggaactgactgtgtcatgctcagcggagagagtgccgctggagcctaccccgaggtggctgtgaagatcatggctcgtatttgcatcgaggcagaatcttccctggaccacgaggcagttttcaaggccatgatcaggtccgcgcctcttccaatgagccctctggagtcccttgcatcatctgctgtgaggactgccaacaaggccaaggctgcactgattgtcgtcctgactcgcggtggcaccacggccaaactggtcgccaagtaccgccccagggtccccatcctctccgttgtcgtacccgtgcttacgaccgactctttcgactggaccatcagctccgagggcccagctaggcacagcctgatctacagaggcctcattcccctcctcgccgagggctccgcgaaggctacggattcagagtcgacggaggtgatccttgaggccgcgttgaagtcggccgtgcagaagcagctctgcaagcctggtgatgccatcgtggctcttcatcgtattggcgtcgcctccgtcatcaagatctgcatcgtgaagtgatcaccacgacctggttctcactgctgggattccatgaaacagcttttctgcctcctttttactgcatttttttccggagacagatatttatgttgtaagcctgcgtctgttgtttgcagttgcggaatgttttttgttcacgtagttatttagctggtaaatggggagggagaggactccattgatgttagtggtaataagatttgtgtctatggagttgagttgaaagggttttttcatgctaagccccgagacactaggagatggagatcgaggttgagatgagataagcaataagtgaaaaaaatgttgatttgctttctttgtatgcacacgcttttgaggggtaagattagtctccattggagttgagttgaattgtttgttggttgcaactggagctagcatcttaacattttaataccaaaccaatggattgagttagaaacaaagacattcagatcacatctatgacagcaaccggtactgcatcaactgagtgatcgagacagtttggggaaggaagcaccaataataggggaaaaaacaaagaaaatactagtactagaggctagagcagcaagttctagaaatatatagggatgaaagatacatgagactatgacaggctag

SEQ ID NO: 18837 - DNA, 2731 bp, Zea Mays
cgccttccatctccggccggtctccgctcgtcgtcctcgcccagcccagagacgcccacggaatcgcaattccccactcccaccccccttctcctttctataaagggaaacttcgccaccaaatctcgaatcccatctcgctgctctccgccgctcgacgccgacgccgacgccgacacctctccctcccccattccccgtgccccggaccgcggagcagacagaggcgagatccggagcgccgcgcgatggcgaacatcgacatggcgaagatcctggcggacctggaccgcggcgccggcgacgcgcggctgcccaagaccaagctcgtctgcacgcttggcccggcctcccgctccgtgcccatgctcgagaagctgctccgcgccggcatgaacgtcgcgcgcttcaacttctcccacggcacccaccagtaccaccaggagacgctcgacagcctccgccaggccatgcacaacaccggcatcctctgcgccgtcatgctcgacaccaagggtcctgagattcgtacagggtttttgaaggatggtaaaccaattaagctaaccaagggtcaagagatcactgttaccactgattatgatatcaagggtgacgaaaaaatgatcgctatgagttacaagaaactgcctgttgacgtgaagcctggaaatgtcatactctgcgcagatggtactatctctctggccgttctgtcttgcgatcctgatgctggaactgtgcgttgtaggtgtgagaacactgcaatgcttggtgagagaaagaactgcaatttgccaggaattgttgtggatcttcctacattgactgagaaagataaagaagatattttgggctggggtgttccaaatgacattgacatgattgctctatcctttgtccgtaaaggatcagatttggtgactgtcagacaggttcttgggcagcatgccaagcgcattaagttgatgtcaaaggttcgtatatactatcactgtcgacctttaaagggttatatcagctatatttctgtccataatttggcacgactccattttttgtttgcatctctcgaatgaaaccttcccatcttaatttttgctgtgaacacatgataaccacatgctatgttatttatcatgtaacatatgaaagtagtatgttgagtacccttttaccaactaggatatactgcttgcccaggctgcaacttcacaagaattttttactttacagttggttagcgaaatgcaattctgttaacttgacgctacatttccacctggttgagaaccaagagggtgttgtaaactttgatgagatcttgagggagactgatgcttttatggttgctagaggtgatctgggaatggagattccagtcgagaagattttccttgcgcagaagatgatgatctacaagtgcaacattgctggcaaacctgttgttactgctacccagatgctcgagtcgatgatcaaatctcctcggccgacacgtgctgaggccactgacgttgcaaatgccgttcttgatggaactgactgtgtcatgctcagcggagagagtgccgctggagcctaccccgaggtggctgtgaagatcatggctcgtatttgcatcgaggcagaatcttccctggaccacgaggcagttttcaaggccatgatcaggtccgcgcctcttccaatgagccctctggagtcccttgcatcatctgctgtgaggactgccaacaaggccaaggctgcactgattgtcgtcctgactcgcggtggcaccacggccaaactggtcgccaagtaccgccccagggtccccatcctctccgttgtcgtacccgtgcttacgaccgactctttcgactggaccatcagctccgagggcccagctaggcacagcctgatctacagaggcctcattcccctcctcgccgagggctccgcgaaggctacggattcagagtcgacggaggtgatccttgaggccgcgttgaagtcggccgtgcagaagcagctctgcaagcctggtgatgccatcgtggctcttcatcgtattggcgtcgcctccgtcatcaagatctgcatcgtgaagtgatcaccacgacctggttctcactgctgggattccatgaaacagcttttctgcctcctttttactgcatttttttccggagacagatatttatgttgtaagcctgcgtctgttgtttgcagttgcggaatgttttttgttcacgtagttatttagctggtaaatggggagggagaggactccattgatgttagtggtaataagatttgtgtctatggagttgagttgaaagggttttttcatgctaagccccgagacactaggagatggagatcgaggttgagatgagataagcaataagtgaaaaaaatgttgatttgctttctttgtatgcacacgcttttgaggggtaagattagtctccattggagttgagttgaattgtttgttggttgcaactggagctagcatcttaacattttaataccaaaccaatggattgagttagaaacaaagacattcagatcacatctatgacagcaaccggtactgcatcaactgagtgatcgagacagtttggggaaggaagcaccaataataggggaaaaaacaaagaaaatactagtactagaggctagagcagcaagttctagaaatatatagggatgaaagatacatgagactatgacaggctag

SEQ ID NO: 18838 - DNA, 2346 bp, Zea Mays
cgccttccatctccggccggtctccgctcgtcgtcctcgcccagcccagagacgcccacggaatcgcaattccccactcccaccccccttctcctttctataaagggaaacttcgccaccaaatctcgaatcccatctcgctgctctccgccgctcgacgccgacgccgacgccgacacctctccctcccccattccccgtgccccggaccgcggagcagacagaggcgagatccggagcgccgcgcgatggcgaacatcgacatggcgaagatcctggcggacctggaccgcggcgccggcgacgcgcggctgcccaagaccaagctcgtctgcacgcttggcccggcctcccgctccgtgcccatgctcgagaagctgctccgcgccggcatgaacgtcgcgcgcttcaacttctcccacggcacccaccagtaccaccaggagacgctcgacagcctccgccaggccatgcacaacaccggcatcctctgcgccgtcatgctcgacaccaagggtcctgagattcgtacagggtttttgaaggatggtaaaccaattaagctaaccaagggtcaagagatcactgttaccactgattatgatatcaagggtgacgaaaaaatgatcgctatgagttacaagaaactgcctgttgacgtgaagcctggaaatgtgtgagaacactgcaatgcttggtgagagaaagaactgcaatttgccaggaattgttgtggatcttcctacattgactgagaaagataaagaagatattttgggctggggtgttccaaatgacattgacatgattgctctatcctttgtccgtaaaggatcagatttggtgactgtcagacaggttcttgggcagcatgccaagcgcattaagttgatgtcaaaggttgagaaccaagagggtgttgtaaactttgatgagatcttgagggagactgatgcttttatggttgctagaggtgatctgggaatggagattccagtcgagaagattttccttgcgcagaagatgatgatctacaagtgcaacattgctggcaaacctgttgttactgctacccagatgctcgagtcgatgatcaaatctcctcggccgacacgtgctgaggccactgacgttgcaaatgccgttcttgatggaactgactgtgtcatgctcagcggagagagtgccgctggagcctaccccgaggtggctgtgaagatcatggctcgtatttgcatcgaggcagaatcttccctggaccacgaggcagttttcaaggccatgatcaggtccgcgcctcttccaatgagccctctggagtcccttgcatcatctgctgtgaggactgccaacaaggccaaggctgcactgattgtcgtcctgactcgcggtggcaccacggccaaactggtcgccaagtaccgccccagggtccccatcctctccgttgtcgtacccgtgcttacgaccgactctttcgactggaccatcagctccgagggcccagctaggcacagcctgatctacagaggcctcattcccctcctcgccgagggctccgcgaaggctacggattcagagtcgacggaggtgatccttgaggccgcgttgaagtcggccgtgcagaagcagctctgcaagcctggtgatgccatcgtggctcttcatcgtattggcgtcgcctccgtcatcaagatctgcatcgtgaagtgatcaccacgacctggttctcactgctgggattccatgaaacagcttttctgcctcctttttactgcatttttttccggagacagatatttatgttgtaagcctgcgtctgttgtttgcagttgcggaatgttttttgttcacgtagttatttagctggtaaatggggagggagaggactccattgatgttagtggtaataagatttgtgtctatggagttgagttgaaagggttttttcatgctaagccccgagacactaggagatggagatcgaggttgagatgagataagcaataagtgaaaaaaatgttgatttgctttctttgtatgcacacgcttttgaggggtaagattagtctccattggagttgagttgaattgtttgttggttgcaactggagctagcatcttaacattttaataccaaaccaatggattgagttagaaacaaagacattcagatcacatctatgacagcaaccggtactgcatcaactgagtgatcgagacagtttggggaaggaagcaccaataataggggaaaaaacaaagaaaatactagtactagaggctagagcagcaagttctagaaatatatagggatgaaagatacatgagactatgacaggctag

SEQ ID NO: 18839 - DNA, 2083 bp, Zea Mays
actttatctacccagacccagagtgtactgaacagttggtggatgttgagcactcctactttacctgatgtgggagtttgggtttaagaagtcaattccttcactagacttgaagattggcaaattggtcctgagattcgtacagggtttttgaaggatggtaaaccaattaagctaaccaagggtcaagagatcactgttaccactgattatgatatcaagggtgacgaaaaaatgatcgctatgagttacaagaaactgcctgttgacgtgaagcctggaaatgtcatactctgcgcagatggtactatctctctggccgttctgtcttgcgatcctgatgctggaactgtgcgttgtaggtgtgagaacactgcaatgcttggtgagagaaagaactgcaatttgccaggaattgttgtggatcttcctacattgactgagaaagataaagaagatattttgggctggggtgttccaaatgacattgacatgattgctctatcctttgtccgtaaaggatcagatttggtgactgtcagacaggttcttgggcagcatgccaagcgcattaagttgatgtcaaagttggttagcgaaatgcaattctgttaacttgacgctacatttccacctggttgagaaccaagagggtgttgtaaactttgatgagatcttgagggagactgatgcttttatggttgctagaggtgatctgggaatggagattccagtcgagaagattttccttgcgcagaagatgatgatctacaagtgcaacattgctggcaaacctgttgttactgctacccagatgctcgagtcgatgatcaaatctcctcggccgacacgtgctgaggccactgacgttgcaaatgccgttcttgatggaactgactgtgtcatgctcagcggagagagtgccgctggagcctaccccgaggtggctgtgaagatcatggctcgtatttgcatcgaggcagaatcttccctggaccacgaggcagttttcaaggccatgatcaggtccgcgcctcttccaatgagccctctggagtcccttgcatcatctgctgtgaggactgccaacaaggccaaggctgcactgattgtcgtcctgactcgcggtggcaccacggccaaactggtcgccaagtaccgccccagggtccccatcctctccgttgtcgtacccgtgcttacgaccgactctttcgactggaccatcagctccgagggcccagctaggcacagcctgatctacagaggcctcattcccctcctcgccgagggctccgcgaaggctacggattcagagtcgacggaggtgatccttgaggccgcgttgaagtcggccgtgcagaagcagctctgcaagcctggtgatgccatcgtggctcttcatcgtattggcgtcgcctccgtcatcaagatctgcatcgtgaagtgatcaccacgacctggttctcactgctgggattccatgaaacagcttttctgcctcctttttactgcatttttttccggagacagatatttatgttgtaagcctgcgtctgttgtttgcagttgcggaatgttttttgttcacgtagttatttagctggtaaatggggagggagaggactccattgatgttagtggtaataagatttgtgtctatggagttgagttgaaagggttttttcatgctaagccccgagacactaggagatggagatcgaggttgagatgagataagcaataagtgaaaaaaatgttgatttgctttctttgtatgcacacgcttttgaggggtaagattagtctccattggagttgagttgaattgtttgttggttgcaactggagctagcatcttaacattttaataccaaaccaatggattgagttagaaacaaagacattcagatcacatctatgacagcaaccggtactgcatcaactgagtgatcgagacagtttggggaaggaagcaccaataataggggaaaaaacaaagaaaatactagtactagaggctagagcagcaagttctagaaatatatagggatgaaagatacatgagactatgacaggctag

SEQ ID NO: 18840 - DNA, 2123 bp, Zea Mays
attgccatctctctgtatctcgtattctcattctcattgcattgcacggaaattcacagctgcgtgcccacccgatcctcgcttgacaccggggaaatccacggcctgctgctacagagcatcgccgctgagcacactggggcactaactcagagtagtgtcgctcaatgaatttcctctaccgaactacgcagcctgcagcgactgagctgccaagaatttcagagcaagatcacaggaatgccttacaaaagacgacttcgacactggagggtctcattgcggacgattcacaccaccagccctcctctgcccacatcgaagatggagctgctaataatgggtccagggatatcagtggggattcttcatctgttgatttgaaaagcccagtcccactggggacacatgccgatgtcatggaagacgaaggatggatcacaattccatgcaaggcacttcctgaaagttggaacgacatatcagaaatggttcagttgcaggctctggaccgttccttcctttttccaggcgagcaggttcctatactggcgtgcctgtcagcttctaagcaagatgtacaggttatatccccctttagaattgctgcagtaatgtctaagaatggaacttctatgcaaaactttacaaataaatctagccctgtcagtgcaaatggtcatgataatggagcagctggagaaagtggctatcaggatgttgaacccaatggtgaagcatctccttcaggacatgatattttggagactcaatctctccttcagatggaggatcataagcagcagatcgaacatgtgttgcgaagatttagagaatcaaatttttttgtccggattgcggaatcagtggaacctctatggtccaagaaaagtgtaacttcaactacgatggcagatgaacgatcagataaccagggaaatagtaagagctcaaggagtaatgtttataataccatttctgataaaggggtttttgatggtaacacatctgggggagttgctcgagatgttgtcaagtgttattctctgcaaaatggagacatagtggttgttttgcaagtgaatgttagcgttaacaaattggaagatcctgtgcttgaagtccttcagtttgagaaaacctcttctgttcagacaccaaataatataagaccaccaccaatatctgaaagtcaagaatttatgcctgaaaaacctgcaaaaaccccagatattataaatgatgggcaactttcgtttagaggagttcctttagaacctgaacggtattctaatattgctcctactcatgcaaaagatatagtcgtattcatcgatgcaattactattgtatttgaggaggcatccaaaggaggtgctcctttgtctttaccaattgctagtattgaggttgggcatggtcacagcttgccaaacctagcactcaggaggggcgaggaacactcttttattctcaaaccagcaactatgtcctcaagggaacggaagaccaacagtcatgcacctctggccttatcactcccaacgatgaccggtgctactttaaatactcatacaccaaaggctggtgagccgtatgctgatctaagcgaccaatatgctgtactgatactaacactcgaagctactaatatgacatccgaaaaccttacattaactgtccttgctcctgaagcatctggttcttcttcagttgtatccttgaactcatctccaaccaccccaaatggttcttttgatggtgttaatgagtcatcaaaaagatctgggctgggaaaagatggaattggctttcgaagattgaattctgtcctagctactccaaaagaaggtgataatggaggaaacagaatgagtaatgcttcaggctgtactcatctgtggttgcaaagtgcagtgcccctagggtgtgttcctgcccgctcaagcaccactgtcaaacttgagctgctaccattatcagatggaattatcacacttgatactctgcaaataaccgcaagggagaaaggccttgcttacattccggagcactccttggagatacatgccacctctgtactggaagcagaatcccagatcatggcccggattgaacggtag

SEQ ID NO: 18841 - DNA, 2081 bp, Zea Mays
cattgcattgcacggaaattcacagctgcgtgcccacccgatcctcgcttgacaccggggaaatccacggcctgctgctacagagcatcgccgctgagcacactggggcactaactcagagtagtgtcgctcaatgaatttcctctaccgaactacgcagcctgcagcgactgagctgccaagaatttcagagcaagatcacaggaatgccttacaaaagacgacttcgacactggagggtctcattgcggacgattcacaccaccagccctcctctgcccacatcgaagatggagctgctaataatgggtccagggatatcagtggggattcttcatctgttgatttgaaaagcccagtcccactggggacacatgccgatgtcatggaagacgaaggatggatcacaattccatgcaaggcacttcctgaaagttggaacgacatatcagaaatggttcagttgcaggctctggaccgttccttcctttttccaggttcctatactggcgtgcctgtcagcttctaagcaagatgtacaggttatatccccctttagaattgctgcagtaatgtctaagaatggaacttctatgcaaaactttacaaataaatctagccctgtcagtgcaaatggtcatgataatggagcagctggagaaagtggctatcaggatgttgaacccaatggtgaagcatctccttcaggacatgatattttggagactcaatctctccttcagatggaggatcataagcagcagatcgaacatgtgttgcgaagatttagagaatcaaatttttttgtccggattgcggaatcagtggaacctctatggtccaagaaaagtgtaacttcaactacgatggcagatgaacgatcagataaccagggaaatagtaagagctcaaggagtaatgtttataataccatttctgataaaggggtttttgatggtaacacatctgggggagttgctcgagatgttgtcaagtgttattctctgcaaaatggagacatagtggttgttttgcaagtgaatgttagcgttaacaaattggaagatcctgtgcttgaagtccttcagtttgagaaaacctcttctgttcagacaccaaataatataagaccaccaccaatatctgaaagtcaagaatttatgcctgaaaaacctgcaaaaaccccagatattataaatgatgggcaactttcgtttagaggagttcctttagaacctgaacggtattctaatattgctcctactcatgcaaaagatatagtcgtattcatcgatgcaattactattgtatttgaggaggcatccaaaggaggtgctcctttgtctttaccaattgctagtattgaggttgggcatggtcacagcttgccaaacctagcactcaggaggggcgaggaacactcttttattctcaaaccagcaactatgtcctcaagggaacggaagaccaacagtcatgcacctctggccttatcactcccaacgatgaccggtgctactttaaatactcatacaccaaaggctggtgagccgtatgctgatctaagcgaccaatatgctgtactgatactaacactcgaagctactaatatgacatccgaaaaccttacattaactgtccttgctcctgaagcatctggttcttcttcagttgtatccttgaactcatctccaaccaccccaaatggttcttttgatggtgttaatgagtcatcaaaaagatctgggctgggaaaagatggaattggctttcgaagattgaattctgtcctagctactccaaaagaaggtgataatggaggaaacagaatgagtaatgcttcaggctgtactcatctgtggttgcaaagtgcagtgcccctagggtgtgttcctgcccgctcaagcaccactgtcaaacttgagctgctaccattatcagatggaattatcacacttgatactctgcaaataaccgcaagggagaaaggccttgcttacattccggagcactccttggagatacatgccacctctgtactggaagcagaatcccagatcatggcccggattgaacggtag

SEQ ID NO: 18842 - DNA, 2310 bp, Zea Mays
cacagctgcgtgcccacccgatcctcgcttgacaccggggaaatccacggcctgctgctacagagcatcgccgctgagcacactggggtgacagtgacaacccgtctccctctctctcgccagatccccctacctccgcgtctctctgtctactttttttttggggagggggggggggggggggggggggggggatccgcgtcgaggcgaggtctgctctggtcacctctggcgatcctccttcgcccattgcctccgccggtcaattcccttcgctggtactcagagatcggcgccctcctcccgtcttcccacgcttgcgggcactaactcagagtagtgtcgctcaatgaatttcctctaccgaactacgcagcctgcagcgactgagctgccaagaatttcagagcaagatcacaggaatgccttacaaaagacgacttcgacactggagggtctcattgcggacgattcacaccaccagccctcctctgcccacatcgaagatggagctgctaataatgggtccagggatatcagtggggattcttcatctgttgatttgaaaagcccagtcccactggggacacatgccgatgtcatggaagacgaaggatggatcacaattccatgcagtttgaggcacttcctgaaagttggaacgacatatcagaaatggttcagttgcaggctctggaccgttccttcctttttccaggcgagcaggttcctatactggcgtgcctgtcagcttctaagcaagatgtacaggttatatccccctttagaattgctgcagtaatgtctaagaatggaacttctatgcaaaactttacaaataaatctagccctgtcagtgcaaatggtcatgataatggagcagctggagaaagtggctatcaggatgttgaacccaatggtgaagcatctccttcaggacatgatattttggagactcaatctctccttcagatggaggatcataagcagcagatcgaacatgtgttgcgaagatttagagaatcaaatttttttgtccggattgcggaatcagtggaacctctatggtccaagaaaagtgtaacttcaactacgatggcagatgaacgatcagataaccagggaaatagtaagagctcaaggagtaatgtttataataccatttctgataaaggggtttttgatggtaacacatctgggggagttgctcgagatgttgtcaagtgttattctctgcaaaatggagacatagtggttgttttgcaagtgaatgttagcgttaacaaattggaagatcctgtgcttgaagtccttcagtttgagaaaacctcttctgttcagacaccaaataatataagaccaccaccaatatctgaaagtcaagaatttatgcctgaaaaacctgcaaaaaccccagatattataaatgatgggcaactttcgtttagaggagttcctttagaacctgaacggtattctaatattgctcctactcatgcaaaagatatagtcgtattcatcgatgcaattactattgtatttgaggaggcatccaaaggaggtgctcctttgtctttaccaattgctagtattgaggttgggcatggtcacagcttgccaaacctagcactcaggaggggcgaggaacactcttttattctcaaaccagcaactatgtcctcaagggaacggaagaccaacagtcatgcacctctggccttatcactcccaacgatgaccggtgctactttaaatactcatacaccaaaggctggtgagccgtatgctgatctaagcgaccaatatgctgtactgatactaacactcgaagctactaatatgacatccgaaaaccttacattaactgtccttgctcctgaagcatctggttcttcttcagttgtatccttgaactcatctccaaccaccccaaatggttcttttgatggtgttaatgagtcatcaaaaagatctgggctgggaaaagatggaattggctttcgaagattgaattctgtcctagctactccaaaagaaggtgataatggaggaaacagaatgagtaatgcttcaggctgtactcatctgtggttgcaaagtgcagtgcccctagggtgtgttcctgcccgctcaagcaccactgtcaaacttgagctgctaccattatcagatggaattatcacacttgatactctgcaaataaccgcaagggagaaaggccttgcttacattccggagcactccttggagatacatgccacctctgtactggaagcagaatcccagatcatggcccggattgaacggtag

SEQ ID NO: 18843 - DNA, 2304 bp, Zea Mays
acagctgcgtgcccacccgatcctcgcttgacaccggggaaatccacggcctgctgctacagagcatcgccgctgagcacactggggtgacagtgacaacccgtctccctctctctcgccagatccccctacctccgcgtctctctgtctactttttttttggggagggggggggggggggggggggggggggatccgcgtcgaggcgaggtctgctctggtcacctctggcgatcctccttcgcccattgcctccgccggtcaattcccttcgctggtactcagagatcggcgccctcctcccgtcttcccacgcttgcgggcactaactcagagtagtgtcgctcaatgaatttcctctaccgaactacgcagcctgcagcgactgagctgccaagaatttcagagcaagatcacaggaatgccttacaaaagacgacttcgacactggagggtctcattgcggacgattcacaccaccagccctcctctgcccacatcgaagatggagctgctaataatgggtccagggatatcagtggggattcttcatctgttgatttgaaaagcccagtcccactggggacacatgccgatgtcatggaagacgaaggatggatcacaattccatgcaaggcacttcctgaaagttggaacgacatatcagaaatggttcagttgcaggctctggaccgttccttcctttttccaggcgagcaggttcctatactggcgtgcctgtcagcttctaagcaagatgtacaggttatatccccctttagaattgctgcagtaatgtctaagaatggaacttctatgcaaaactttacaaataaatctagccctgtcagtgcaaatggtcatgataatggagcagctggagaaagtggctatcaggatgttgaacccaatggtgaagcatctccttcaggacatgatattttggagactcaatctctccttcagatggaggatcataagcagcagatcgaacatgtgttgcgaagatttagagaatcaaatttttttgtccggattgcggaatcagtggaacctctatggtccaagaaaagtgtaacttcaactacgatggcagatgaacgatcagataaccagggaaatagtaagagctcaaggagtaatgtttataataccatttctgataaaggggtttttgatggtaacacatctgggggagttgctcgagatgttgtcaagtgttattctctgcaaaatggagacatagtggttgttttgcaagtgaatgttagcgttaacaaattggaagatcctgtgcttgaagtccttcagtttgagaaaacctcttctgttcagacaccaaataatataagaccaccaccaatatctgaaagtcaagaatttatgcctgaaaaacctgcaaaaaccccagatattataaatgatgggcaactttcgtttagaggagttcctttagaacctgaacggtattctaatattgctcctactcatgcaaaagatatagtcgtattcatcgatgcaattactattgtatttgaggaggcatccaaaggaggtgctcctttgtctttaccaattgctagtattgaggttgggcatggtcacagcttgccaaacctagcactcaggaggggcgaggaacactcttttattctcaaaccagcaactatgtcctcaagggaacggaagaccaacagtcatgcacctctggccttatcactcccaacgatgaccggtgctactttaaatactcatacaccaaaggctggtgagccgtatgctgatctaagcgaccaatatgctgtactgatactaacactcgaagctactaatatgacatccgaaaaccttacattaactgtccttgctcctgaagcatctggttcttcttcagttgtatccttgaactcatctccaaccaccccaaatggttcttttgatggtgttaatgagtcatcaaaaagatctgggctgggaaaagatggaattggctttcgaagattgaattctgtcctagctactccaaaagaaggtgataatggaggaaacagaatgagtaatgcttcaggctgtactcatctgtggttgcaaagtgcagtgcccctagggtgtgttcctgcccgctcaagcaccactgtcaaacttgagctgctaccattatcagatggaattatcacacttgatactctgcaaataaccgcaagggagaaaggccttgcttacattccggagcactccttggagatacatgccacctctgtactggaagcagaatcccagatcatggcccggattgaacggtag

SEQ ID NO: 18844 - DNA, 1700 bp, Zea Mays
gtttacccgctaaacactctaagcccgataaggcacttcctgaaagttggaacgacatatcagaaatggttcagttgcaggctctggaccgttccttcctttttccaggcgagcaggttcctatactggcgtgcctgtcagcttctaagcaagatgtacaggttatatccccctttagaattgctgcagtaatgtctaagaatggaacttctatgcaaaactttacaaataaatctagccctgtcagtgcaaatggtcatgataatggagcagctggagaaagtggctatcaggatgttgaacccaatggtgaagcatctccttcaggacatgatattttggagactcaatctctccttcagatggaggatcataagcagcagatcgaacatgtgttgcgaagatttagagaatcaaatttttttgtccggattgcggaatcagtggaacctctatggtccaagaaaagtgtaacttcaactacgatggcagatgaacgatcagataaccagggaaatagtaagagctcaaggagtaatgtttataataccatttctgataaaggggtttttgatggtaacacatctgggggagttgctcgagatgttgtcaagtgttattctctgcaaaatggagacatagtggttgttttgcaagtgaatgttagcgttaacaaattggaagatcctgtgcttgaagtccttcagtttgagaaaacctcttctgttcagacaccaaataatataagaccaccaccaatatctgaaagtcaagaatttatgcctgaaaaacctgcaaaaaccccagatattataaatgatgggcaactttcgtttagaggagttcctttagaacctgaacggtattctaatattgctcctactcatgcaaaagatatagtcgtattcatcgatgcaattactattgtatttgaggaggcatccaaaggaggtgctcctttgtctttaccaattgctagtattgaggttgggcatggtcacagcttgccaaacctagcactcaggaggggcgaggaacactcttttattctcaaaccagcaactatgtcctcaagggaacggaagaccaacagtcatgcacctctggccttatcactcccaacgatgaccggtgctactttaaatactcatacaccaaaggctggtgagccgtatgctgatctaagcgaccaatatgctgtactgatactaacactcgaagctactaatatgacatccgaaaaccttacattaactgtccttgctcctgaagcatctggttcttcttcagttgtatccttgaactcatctccaaccaccccaaatggttcttttgatggtgttaatgagtcatcaaaaagatctgggctgggaaaagatggaattggctttcgaagattgaattctgtcctagctactccaaaagaaggtgataatggaggaaacagaatgagtaatgcttcaggctgtactcatctgtggttgcaaagtgcagtgcccctagggtgtgttcctgcccgctcaagcaccactgtcaaacttgagctgctaccattatcagatggaattatcacacttgatactctgcaaataaccgcaagggagaaaggccttgcttacattccggagcactccttggagatacatgccacctctgtactggaagcagaatcccagatcatggcccggattgaacggtag

SEQ ID NO: 18845 - DNA, 1741 bp, Zea Mays
tcttcaagggcacagccgcggccaccaccaacaccacctggccccgtccttcctttcttgtgttgccgctaggccagccatacacacacgacgtcgctgctccgcatggccaacgccaatggctcgtccaccggtgcaggccatagcgacctcgtcagggccatttcgcacgagcagcaccaggcgttcatggcctccgtgccccgggccgcaccgggcggggtgaatgtgcaccaccagcagcacttccaccaataccccgccggcttgatcccagcgccggtggcactgccggttcacgcaccggtgtcgtcacagacgtctccgtactccgcccagatcgcggtgccgccgccgccgccaccactcatcgcatctccagaccaccgcctgcactccctgccgcctaccggatgctaccagctggactattctccatatggcaacgctgctgcgccttcgcagcagcacacatcagcaataaggggttttgctgactggggaacgcacagcaatgcgctcatgtccttggctcatgccactagttttggtaacaacgggagcagcaatatcaacaacaatggattattacatcaaaacttatccccgtacaccacgcatacatggactactacttacgtgcagaggccttataacactgctgtttatgctcctgcaacaatgaatatgctccaaactcctccatttcatagcaacagccatgaaaaagagtcaggtgcagttttttcaaatagctttaacatggccccatcagtgacacctacctccccttttcaacttatgtctccaagctcaaccaactacacttccactcaaatcttcgaggaaaccaacaatttagaggacacttcaagagtctttggaggtggggataacgaaagcaacaacagtgaggaaccggatcccaagccggctgtggagatggaagacctaaaccaaggctaactgtcaagattaccgtatggtcctgcgcaaggacttgacaaacagtgatgttggaaacattggaagaatcgtgctgccaaagaaagatgcagagcctaaccttccaatcttggaagataaggatggcctgatactggaaatggacgattttgaactcccggttgtatggaatttcaagtacaggtactggcctaataacaagagtaggatgtatatattggaaagtactggtgaatttgttaagaggcatgggcttcaagctaaggacatcctcatcatttacaggaacaagaaatctggcagatatgttgcccgtgcggtgaaggctgaggacatagcgccgccagaatgcgagtgcgtcgaggcaggaaaccctagagaagagtgcggcttctccgtcagtccttcgatcaataagaagatcatcacgtagatggctggagcatcagaaatgtatggtgtaggctgtttgccgcgcaggagcacaccgagaatcggcggttgctgggagccaagcaactgtttcgatcgaggttgtgtcgtcaaagctgaattcccacccaacctgcgtaggcctgtactatactgtttcccttgtttttgtcggccgtttcgtgtagttcgagataaatgatgagtttgcttttgtagctgtatatatttcgtctttggataattcggtgacaaacaagtcaaggtcgttatataccgtctttttgaataattattacgattataagaagttttttttattatttttagatatatggttttc

SEQ ID NO: 18846 - DNA, 1720 bp, Zea Mays
tcttcaagggcacagccgcggccaccaccaacaccacctggccccgtccttcctttcttgtgttgccgctaggccagccatacacacacgacgtcgctgctccgcatggccaacgccaatggctcgtccaccggtgcaggccatagcgacctcgtcagggccatttcgcacgagcagcaccaggcgttcatggcctccgtgccccgggccgcaccgggcggggtgaatgtgcaccaccagcagcacttccaccaataccccgccggcttgatcccagcgccggtggcactgccggttcacgcaccggtgtcgtcacagacgtctccgtactccgcccagatcgcggtgccgccgccgccgccaccactcatcgcatctccagaccaccgcctgcactccctgccgcctaccggatgctaccagctggactattctccatatggcaacgctgctgcgccttcgcagcagcacacatcagcaataaggggttttgctgactggggaacgcacagcaatgcgctcatgtccttggctcatgccactagttttggtaacaacgggagcagcaatatcaacaacaatggattattacatcaaaacttatccccgtacaccacgcatacatggactactacttacgtgcagaggccttataacactgctgtttatgctcctgcaacaatgaatatgctccaaactcctccatttcatagcaacagccatgaaaaagagtcaggtgcagttttttcaaatagctttaacatggccccatcagtgacacctacctccccttttcaacttatgtctccaagctcaaccaactacacttccactcaaatcttcgaggaaaccaacaatttagaggacacttcaagagtctttggaggtggggataacgaaagcaacaacagtgaggaaccggatcccaagccggctgtggagatggaagacctaaaccaaggcaatgatcatacttcgaataaaacagctaactgtcaagattaccgtatggtcctgcgcaaggacttgacaaacagtgatgttggaaacattggaagaatcgtgctgccaaagaaagatgcagagcctaaccttccaatcttggaagataaggatggcctgatactggaaatggacgattttgaactcccggttgtatggaatttcaagtacaggtgaatttgttaagaggcatgggcttcaagctaaggacatcctcatcatttacaggaacaagaaatctggcagatatgttgcccgtgcggtgaaggctgaggacatagcgccgccagaatgcgagtgcgtcgaggcaggaaaccctagagaagagtgcggcttctccgtcagtccttcgatcaataagaagatcatcacgtagatggctggagcatcagaaatgtatggtgtaggctgtttgccgcgcaggagcacaccgagaatcggcggttgctgggagccaagcaactgtttcgatcgaggttgtgtcgtcaaagctgaattcccacccaacctgcgtaggcctgtactatactgtttcccttgtttttgtcggccgtttcgtgtagttcgagataaatgatgagtttgcttttgtagctgtatatatttcgtctttggataattcggtgacaaacaagtcaaggtcgttatataccgtctttttgaataattattacgattataagaagttttttttattatttttagatatatggttttc

SEQ ID NO: 18847 - DNA, 863 bp, Zea Mays
cattattgcacccatgtcttaaggagtttcctgttgatcatggcacagcgtgtgatgtgcttgcttcggcgctccatagggtttacagtgccaccagcacagagagccctgagtacaactgccacaccagcagcggagggtgcagcggtggccgaggcgacggcgaaggaggcaaagaagaggaagaagaaaaatctgttcgacgtggtgcagttcctgccagggtggggcgtcggatacaaggtcgccaagacgacctggcgcgatgtctcctaccagatcaccaagatcaacctgtacaaggatggtcggcatggaaaggcatgggggtttcggtacaaggcaggtgtgcaagctgcagacgccccaactaggatcagcggggttaacaagcgtgggtggaagtacataaaagaatcacagaagaaactacacgatgcccccaaagtagacgtagcgattgctggctagttgcatgttgtaagatgattcttggttccttcattagctaaatctttagatggctgttgccagatgaacagagatgagagatccacttttggatcgagacaatggttccatccattttgcttgtgtggactgaacctccatgcaatatgtccctttcttttatttctggaacctttaccataatgtactaatacaaaagaactgtgttgatggtggcaatctagttaagctttgtttgattcaagtcaattttcttaggtaatgctcattcatccaccaaatcgaaatcttttatatgaaattgctgaggatattggtttttccatgtgcattactttgtactgaaccccgcttttggggcacaaattaaccccacttttgggacacgaatt

SEQ ID NO: 18848 - DNA, 3054 bp, Zea Mays
acggagagagcaagatccatcggtccgcaacccctccctccggcgtccggcttcgccatcacgacgcctcctccctccctcctctcctcttcactgacgctttctccctcccgtccttgctttattccacccccgcaaaaacccccgacaccccgaaaagctcaccccgcacatggagagctccgtctagggttggttcccgggagcgcgtccatggtgatgccgactgtggcctccgcggccgcagcggcgcttcacccggcgatctcgacgcggcgcgcgggggtcgtcgggaacggcattgcgtccgccgcggcggcgggtggacgcctggccggcggcgggcgaggggcggtcgtgcgtgccagggtggcggaggccgcgccggtggcggccgagggcggcaggttggaggcgcctcccgctgcacccatggtggagatccccgtcacctgctatcagatgctaggcgttaccgagaaggctgagaaagatgaaatcgtgaaggccgcgatggagttgaaaaatgctgggatagaagatggatacacagctgaggtctccactttcagacaggctctcctagtagatgtcagagataaacttctgttcgaacaagattatgcaggaaacataaaagagaaggttccacctaggtcctctcttcatataccttggagctggttgcctgctgctctgtgtattttgcaggaggttggagaagagaagctagttttggaaattggtcaggcggctctacgacgccctgattctaaaccttatgttcacgatgtgcttcttgcaatggcattagcagaatgctctatagcaaaagccagctttgagaagagtaaagtgtcccttggctttgaggctctggcacgcgctcaatatcttttgaggagaaaaccatctttggagaagatgcccattcttgaacagattgaagaatcacttgaagagcttgcgcctgcttgcacattggagcttctaagcttgcctcagacacttgaaaattctgaacgcaggcgaggtgctattgcagctctctgtgaactgcttagacagggccttgatgttgaatcatcttgtagagtccatgactggccttgtttcttgggtcaagcaatggacaaactattagccaatgaaattgtggatcttcttacttgggatactttggctacaactcgtaaaaataaaagatcgttggagtcccagagccagcgggttgtagttgacttcaattgcttttacatggcgatgcttgctcaccttgcatttggatttacaacccgccagactgagttgatcaagaaagctaaaaccatctgtgaatgtttagttgcatctgagagcacagacctaaaatttgaggaatctttctgctcatatcttcttggagagtatttgaaaagcttcagcagcttcaaagtactggaagttcaaattcaaagaactatggattggataaaaagaaagacagcagtggcaaggttactgtcaaccaatcactggaactgtggctgaaggatgtggccctttctcgttttgcagatacaaaagattgtccgccatctttgaccaacttttttggagctcctaaacgtgtccttaacacatccaagcagaaactgggatccccaagatcagtccttttgagctctcagccatcttctagtgcttcattatgcaacagaacttcaacagaacagagcccaagattgagtcccaacagccatctgggggaggctgttaagcaacttgcacctgccaacttggggctccaatcatcaatggataggcaagtaaatggttcagggacagcatctgttcccctgaagcgcaatcctggatcccatatcagaacattggaattatggggactaagtggagatgttatgggaaagcttgcatgtagcgcactccttggctttgttgtatttagcacattaaaattgaccaggtttcagtttgggcatgtgagatacacggacccaagtagagagtctgcatccatgttgtccttgaatgaagcgtctgcaaaagaaggctcttttatcaccagtcgtgtcaggaagcattttgaaaatatatcaaaatttctttggctgagtgataggcctaattcaaatagcaaaggaagtgataaacacccagcggttaatgatattactgctgcagtttgcaagcaaaagatggatattcaagaagcagaaacacttgtaaaacagtggcaagacataaaatctgaagctcttggccctgactatcaaactgacatgctacctgagattcttgatggttcaatgctctctaagtgggaagacttagcgttattagcaaaggaccagtcttgctattggagatttgtgctgctaaatcttaatgttgttcgagccgagataatcttggatgaaataggtgctggtgaggcagcagaaattgatgctgtacttgaggaagcggctgagcttgttgacgattcccagcccaagaaaccgagttattacagcacatatgaagttcagtacgtattgaggaggcagaatgatggatcttggaaaatctccgaggctgctgtccgggacctgacgtgatttcggccaactcggcaaacgggctacacaaccattggcgtataggcggcatggcaatcttaacctattaggaatgtgtagtggcactattaggttacctgcagttcaatttgagttctttgcattagttagctgagctccgttgggatgctttgaggtcttgagctgctctcatggtgagcttggccctttggattcaggatttgacacaatagttgctggcagtacagatgctaaccagtgctgattccacattcttccttttccgatatgatgtgaattatgttatctagtttttgagttttacccacgtgtaattgaaatccgtgaccgccattgttcaaagaacaatgcaatttgctgaattgatgtttgcgtttcacggcacctgtctgttactactttgtgtgactgcaacctttagttcaataaagcaagagcaagcatattttta

SEQ ID NO: 18849 - DNA, 3033 bp, Zea Mays
ctccctccggcgtccggcttcgccatcacgacgcctcctccctccctcctctcctcttcactgacgctttctccctcccgtccttgctttattccacccccgcaaaaacccccgacaccccgaaaagctcaccccgcacatggagagctccgtctagggttggttcccgggagcgcgtccatggtgatgccgactgtggcctccgcggccgcagcggcgcttcacccggcgatctcgacgcggcgcgcgggggtcgtcgggaacggcattgcgtccgccgcggcggcgggtggacgcctggccggcggcgggcgaggggcggtcgtgcgtgccagggtggcggaggccgcgccggtggcggccgagggcggcaggttggaggcgcctcccgctgcacccatggtggagatccccgtcacctgctatcagatgctaggcgttaccgagaaggctgagaaagatgaaatcgtgaaggccgcgatggagttgaaaaatgctgggatagaagatggatacacagctgaggtctccactttcagacaggctctcctagtagatgtcagagataaacttctgttcgaacaagattatgcaggaaacataaaagagaaggttccacctaggtcctctcttcatataccttggagctggttgcctgctgctctgtgtattttgcaggaggttggagaagagaagctagttttggaaattggtcaggcggctctacgacgccctgattctaaaccttatgttcacgatgtgcttcttgcaatggcattagcagaatgctctatagcaaaagccagctttgagaagagtaaagtgtcccttggctttgaggctctggcacgcgctcaatatcttttgaggagaaaaccatctttggagaagatgcccattcttgaacagattgaagaatcacttgaagagcttgcgcctgcttgcacattggagcttctaagcttgcctcagacacttgaaaattctgaacgcaggcgaggtgctattgcagctctctgtgaactgcttagacagggccttgatgttgaatcatcttgtagagtccatgactggccttgtttcttgggtcaagcaatggacaaactattagccaatgaaattgtggatcttcttacttgggatactttggctacaactcgtaaaaataaaagatcgttggagtcccagagccagcgggttgtagttgacttcaattgcttttacatggcgatgcttgctcaccttgcatttggatttacaacccgccagactgaatcaagaaagctaaaaccatctgtgaatgtttagttgcatctgagagcacagacctaaaatttgaggaatctttctgctcatatcttcttggagaggaaactggaaccacagtatttgaaaagcttcagcagcttcaaagtactggaagttcaaattcaaagaactatggattggataaaaagaaagacagcagtggcaaggttactgtcaaccaatcactggaactgtggctgaaggatgtggccctttctcgttttgcagatacaaaagattgtccgccatctttgaccaacttttttggagctcctaaacgtgtccttaacacatccaagcagaaactgggatccccaagatcagtccttttgagctctcagccatcttctagtgcttcattatgcaacagaacttcaacagaacagagcccaagattgagtcccaacagccatctgggggaggctgttaagcaacttgcacctgccaacttggggctccaatcatcaatggataggcaagtaaatggttcagggacagcatctgttcccctgaagcgcaatcctggatcccatatcagaacattggaattatggggactaagtggagatgttatgggaaagcttgcatgtagcgcactccttggctttgttgtatttagcacattaaaattgaccaggtttcagtttgggcatgtgagatacacggacccaagtagagagtctgcatccatgttgtccttgaatgaagcgtctgcaaaagaaggctcttttatcaccagtcgtgtcaggaagcattttgaaaatatatcaaaatttctttggctgagtgataggcctaattcaaatagcaaaggaagtgataaacacccagcggttaatgatattactgctgcagtttgcaagcaaaagatggatattcaagaagcagaaacacttgtaaaacagtggcaagacataaaatctgaagctcttggccctgactatcaaactgacatgctacctgagattcttgatggttcaatgctctctaagtgggaagacttagcgttattagcaaaggaccagtcttgctattggagatttgtgctgctaaatcttaatgttgttcgagccgagataatcttggatgaaataggtgctggtgaggcagcagaaattgatgctgtacttgaggaagcggctgagcttgttgacgattcccagcccaagaaaccgagttattacagcacatatgaagttcagtacgtattgaggaggcagaatgatggatcttggaaaatctccgaggctgctgtccgggacctgacgtgatttcggccaactcggcaaacgggctacacaaccattggcgtataggcggcatggcaatcttaacctattaggaatgtgtagtggcactattaggttacctgcagttcaatttgagttctttgcattagttagctgagctccgttgggatgctttgaggtcttgagctgctctcatggtgagcttggccctttggattcaggatttgacacaatagttgctggcagtacagatgctaaccagtgctgattccacattcttccttttccgatatgatgtgaattatgttatctagtttttgagttttacccacgtgtaattgaaatccgtgaccgccattgttcaaagaacaatgcaatttgctgaattgatgtttgcgtttcacggcacctgtctgttactactttgtgtgactgcaacctttagttcaataaagcaagagcaagcatattttta

SEQ ID NO: 18850 - DNA, 2991 bp, Zea Mays
ccggcgtccggcttcgccatcacgacgcctcctccctccctcctctcctcttcactgacgctttctccctcccgtccttgctttattccacccccgcaaaaacccccgacaccccgaaaagctcaccccgcacatggagagctccgtctagggttggttcccgggagcgcgtccatggtgatgccgactgtggcctccgcggccgcagcggcgcttcacccggcgatctcgacgcggcgcgcgggggtcgtcgggaacggcattgcgtccgccgcggcggcgggtggacgcctggccggcggcgggcgaggggcggtcgtgcgtgccagggtggcggaggccgcgccggtggcggccgagggcggcaggttggaggcgcctcccgctgcacccatggtggagatccccgtcacctgctatcagatgctaggcgttaccgagaaggctgagaaagatgaaatcgtgaaggccgcgatggagttgaaaaatgctgggatagaagatggatacacagctgaggtctccactttcagacaggctctcctagtagatgtcagagataaacttctgttcgaacaagattatgcaggaaacataaaagagaaggttccacctaggtcctctcttcatataccttggagctggttgcctgctgctctgtgtattttgcaggaggttggagaagagaagctagttttggaaattggtcaggcggctctacgacgccctgattctaaaccttatgttcacgatgtgcttcttgcaatggcattagcagaatgctctatagcaaaagccagctttgagaagagtaaagtgtcccttggctttgaggctctggcacgcgctcaatatcttttgaggagaaaaccatctttggagaagatgcccattcttgaacagattgaagaatcacttgaagagcttgcgcctgcttgcacattggagcttctaagcttgcctcagacacttgaaaattctgaacgcaggcgaggtgctattgcagctctctgtgaactgcttagacagggccttgatgttgaatcatcttgtagagtccatgactggccttgtttcttgggtcaagcaatggacaaactattagccaatgaaattgtggatcttcttacttgggatactttggctacaactcgtaaaaataaaagatcgttggagtcccagagccagcgggttgtagttgacttcaattgcttttacatggcgatgcttgctcaccttgcatttggatttacaacccgccagactgagttgatcaagaaagctaaaaccatctgtgaatgtttagttgcatctgagagcacagacctaaaatttgaggaatctttctgctcatatcttcttggagaggaaactggaaccacagtatttgaaaagcttcagcagcttcaaagtactggaagttcaaattcaaagaactatggattggataaaaagaaagacagcagtggcaaggttactgtcaaccaatcactgatacaaaagattgtccgccatctttgaccaacttttttggagctcctaaacgtgtccttaacacatccaagcagaaactgggatccccaagatcagtccttttgagctctcagccatcttctagtgcttcattatgcaacagaacttcaacagaacagagcccaagattgagtcccaacagccatctgggggaggctgttaagcaacttgcacctgccaacttggggctccaatcatcaatggataggcaagtaaatggttcagggacagcatctgttcccctgaagcgcaatcctggatcccatatcagaacattggaattatggggactaagtggagatgttatgggaaagcttgcatgtagcgcactccttggctttgttgtatttagcacattaaaattgaccaggtttcagtttgggcatgtgagatacacggacccaagtagagagtctgcatccatgttgtccttgaatgaagcgtctgcaaaagaaggctcttttatcaccagtcgtgtcaggaagcattttgaaaatatatcaaaatttctttggctgagtgataggcctaattcaaatagcaaaggaagtgataaacacccagcggttaatgatattactgctgcagtttgcaagcaaaagatggatattcaagaagcagaaacacttgtaaaacagtggcaagacataaaatctgaagctcttggccctgactatcaaactgacatgctacctgagattcttgatggttcaatgctctctaagtgggaagacttagcgttattagcaaaggaccagtcttgctattggagatttgtgctgctaaatcttaatgttgttcgagccgagataatcttggatgaaataggtgctggtgaggcagcagaaattgatgctgtacttgaggaagcggctgagcttgttgacgattcccagcccaagaaaccgagttattacagcacatatgaagttcagtacgtattgaggaggcagaatgatggatcttggaaaatctccgaggctgctgtccgggacctgacgtgatttcggccaactcggcaaacgggctacacaaccattggcgtataggcggcatggcaatcttaacctattaggaatgtgtagtggcactattaggttacctgcagttcaatttgagttctttgcattagttagctgagctccgttgggatgctttgaggtcttgagctgctctcatggtgagcttggccctttggattcaggatttgacacaatagttgctggcagtacagatgctaaccagtgctgattccacattcttccttttccgatatgatgtgaattatgttatctagtttttgagttttacccacgtgtaattgaaatccgtgaccgccattgttcaaagaacaatgcaatttgctgaattgatgtttgcgtttcacggcacctgtctgttactactttgtgtgactgcaacctttagttcaataaagcaagagcaagcatattttta

SEQ ID NO: 18851 - DNA, 2131 bp, Zea Mays
cgctgtgcataggaccagatctcggccgctgccgcctcgcgtcgtcgtccctctttacacagcgccgctacgcatccgcgccgcaaattcgcttctcttctctgcctccgccatcttttatgcccgccggcgcatgccagccgcagccacatcagccgcggtgcgcgcggccatgcgcaagctcgggggtctcctcccccgcgcgcatcgtccgcactccaccacgacgggcccagacgccgtcgcgccaccgtcgtcgcacaccctccacgacttcaaccgcctcctggccgcgctcgcgcgggacggcgatggcgacgcggcgctccgcgtgctccgccgtatgcgcctatcgtcgcccgcgtgcgcgcccaccgccgcctcctacacctccgccatgtcggcgctcgccaaggccggccgccccgctgacgccgcgtccctcttcgacgacatgctcgccaacggcgtcgcccccgaccgcgccgccttctccctcctcctgcacgtctactcctcccacctccaccttcccgccgccgcgcactccgtgctcctctggatgaccgggctcggcctcccgccgacccccatcgactacactgatctcatcttctccttctgccgcgccggccgcctccacaacgccttccagctgctcgacgaaatgcgcgctctcaattacccgctgacaccacatgcattcgcgccaatcctcaaggcagtctgcgacaatgccgacatccaggcagctgacgcgctcataagctccatgcgttcctctggttgcctccccgatgtcgtcgtctacaatatatacatccatgggttgtgtaagatcggggattttgacgctgtggagagagttatttatgagagtgcccgtaatgggtgggaaccagatgcagtcacatacagcacctacattgttgggctttgctgctctggacacattgaggaagcatttcggcagctggaaattgtggtagcaaagggactgcaactgacagcagttggtttgaacatactgttggaccatgttgcccagaatcttgatatgtgggtaggcaaggaggtcctggagcggtgccaagagctgggctttgtggtcgacgtcgtgacatacaacacagtcatggatcatttctgcaagaaaggaaagtggctgcgcgtcctaaagctgttcacggatctgctcaagaaaccaatagcacccaatgtgcagacatacaacattttgatttcatgcctatgccgagctggcaagtttcactttgccaaatatgtgttcagcagcaaggggttcgtggcagacactgtgacttgtaacattctgatccatgagttctatgaggccggaaaggaaggtgagcttggttttctgttcgctgatgtgaatgctgggaagattgccccagacacaatcacatacaatacgttggttgactgtctctttaggtctgggaggaggtcacaggctgccaatcttgttaggcatatcgatggtggctaccctacagagcccgttgcgcatctgacgtattggttggttaggagtggaaatgtacgggaggcattgaggctgtttgatgatatccaaataaagggactggttttagattgtaggatttttgctaatgtgatcaaggcattctgcagaaagggtccaacagaatgctcagagatttcacagttgtgctttgtattggataggatgcttggaattgggtaatcattatgcggcatgggtctgtaactttgaaattttgggagctctgctggttctttttcgctaccttgcatggtataggtgtttttgtgtcaaaactcaaaaaaggaggatcctgaacttgtttgaaaagtcatggttacgaggatggatatgtagattagcatgacaaaaacaatgttaccagtactggacaagctattggctatcaaaattttgttttaaggacgagaacattgttgccactgttttgaacgggttcttggcgagccaaagtttgttcttgcccttctcgttgtaaccgacaacaggcacacaatggttcttcgcccccaatcatgggccgttgtagatgatgtcggcctgtctgttgtctctgctatattaaactatcaatttttt

SEQ ID NO: 18852 - DNA, 2559 bp, Zea Mays
ttttactgtagaatcctcgacccgaacctggcttgccgtcgcctccgcttggtctcgctctcgctgcattcgtcttccccgcccgtccgtccgcccgctgatctcagatccagaccaaacgaactccacactaccctctgcccagctcgcgcacgcatgaaaccctagtgaccccgtccagatctcggcgtccggatcactgcgcggcgccgccatggcgccccccgcgctggactctctcccggcgccgctccggtcgctgcggctcaagacgaagcagcaggagctcctgctccgcgtctcggcgctggcgctcatctacgtgctcgccttcgccgtccgcctcttctccgtcctccgctacgagtccatgatccacgagttcgacccttacttcaactaccgcaccacgctcttcctcaccgagaacggcttcagcgagttctggaactggttcgacttcgagagctggtacccgctcgggcgcgttgtcggggggacgctctacccgggtctgatggtgaccgccgcgctgctccaccgcctcctccgcgcgctctacctcaccgtccacatccgtgaggtctgcgtcctcaccgcgcccttcttcgctgccaacaccacgctcgtcgcctacgccttcggccgcgagatatgggactccggggcggggctcgtcgccgctgcgctgatcgccatcgtccctggctacatctcccgctccgtcgcggggtcctacgacaacgagggcgtcgccatcttcgcgctgctgctcaccttctacctcttcgtgcgcgccgttaacactgggtcgctcgcctgggcgctcgcctcggcgttcggttacttctatatggtgtcggcatggggaggctacgtgttcatcatcaatctcgtcccgctttatgtgcttgtgttgcttgtcactgggaggtactcgcagaggctctacgtggcctacaattgcatgtatgtgcttgggatgttgcttgcaatgcagattcgttttgttggattccagcatgtgcagtccggagagcacatggctgctatgggagtcttcttcctgttgcaggttttcttcttcttggactgggtgaaatatctgctaaatgatgccagactattcaagtcattccttcgaattaccctcacatgtgtgattactattggcaccctggctcttggacttggtactgcatctggttacatctccccttggacaggacggttttactccctgcttgatcctacctacgcaaaggaccatataccaatcatcgcatctgtttctgagcatcagccaacagcatggtcctctttcatgtttgacttccacatcctacttttcttgttcccagctggcctttatttctgtttcaagcgcctgtcagatgccacgatatttattgttatgtatggcctcacaactatgtactttgctggtgtgatggtccggttaattcttgtggcagcaccagccgtttgccttattagtgcgattgctgcatctgctacaataaaaaatctaaccactttgatccggacaaagagcaaaagtccacagactactggaaaaacaactggttcaaaggcaggtgcaaagggagcagttgatcaatctttaccattccaacacaatgcagctattgctcttcttctcggtgccttttacttgctcagtaggtatgcaatacactgcacttgggtgacatctgaggcctactcttctccatctatagttttggctgcaaggggtcataatggtggaagagtcatctttgatgattatcgtgaggcatactattggcttcgtcagaacacgcctcctgatgctaagattatgtcttggtgggactatggataccaaattacagctatgggtaacagaactgttattgttgataacaatacatggaataacacacacatagctacagttggacgagctatgtcatcttatgaagatgaagcatatgagatcatgcagtcacttgatgtgaactatgtgcttgttgtgtttggaggtgttactggatattcttcagatgatatcaacaagttcttatggatggtacgtattggtggaggagtttttcctgtaatcaaagagccagattaccttgttaatggggagtatcgtattgacaagggggcagcacccaaaatgctgaactgcctaatgtacaagctttgttactaccgatttggagaacttaccacagaatatggaaaacctccagggtatgatcgtgtacgaggagtggagattggcaacaaagacataaagcttgaatacttggaggaggcatttacaacttcaaactggatagtgcgcatatacaaggcgcaatgacatatttgagtagagaaacttgtctttgatcaatgcgcaaggcaagacaaagtatccggcactaaacgcaaaatatgactgttgattctgttctctgttatgtgtttacatcatccaatgtaggcgctagtgcagtttttaggtctcctttggaacaaagaaaaagtgcaggaattttggaggattaaaatttaatagaaatt

SEQ ID NO: 18853 - DNA, 2654 bp, Zea Mays
gggatttgttatggagcggcgaggggatgctgcagatagtctagcgccctcccctgtcctgcgcggctgcgcgccttatccccgccacgctccacctccgccccacacgcgcaagcggcggcaccagtccaccattctcctctcgatccgggatccaaatcggccgcctcatcgcgaccctctgtctccatccgctccggcgtgccacccacgcaggctaacgtctgggctcccctccttatcgccgggctccgcatcgccaatagtctgatggcgccgcagttgcagggctgcaactggatctcctcctggccgcggctccagcagatgtccccttggccgccgcgctcctccgaatcgccgcggtggagcttcctgcgtctcgcgacgcgccgacgcccctgcgcaggcgcggtccgcgccgtcgcgagcgcgggcgcggtgggaaccgagctcctggagatggaggagcaggccgaggacgtggacgagagggagaggctcaggcggacgcggatctcactggcgaacaagggtaacacgccatggaacaagggcaggaagcatagcccagagacgctgcagcgaatccgtgagaggaccaggatcgcaatgcaggaccccaaggtgaagtcatgttaagaaaaagttggtgaatctgggtcatgcacagagtgaggagacacgggtaaggatatcagtgggggtgaggcgaggttggagtttgcgtctacaaaaactaatggtccaggatggttgctttgtggaatggagggacatggtagctgatgcggctagaaagggttttgctggtggagtttcccttgaatggaattcatataaaatcttgagtgagcagatgcggcatgattggttggagaatcttcagaaaaggcgatcaatgccaaggccaagaggtaatagacgagcaccaaaaactcctgagcagaggagaaaaattgcagaagccattgctgcaaagtggttggatcaagaatatcgtgaacgagtttgtagtggaattgctagctatcatggatcatcttctgcaactaaaacaccgagaaagccaagacctgctggagaaccaggtgtaaagaaacagacgacaaggaaaaaacctatgcaagccaaacctgtaattttagaggatgctcatggaaaaagtgcagctcttaagagaaagaaaagcgcaactccctacaaagatccgatggcagttgaaaaattggagatgatatcaaagattcgagctcaaaggacagcacaggaaatagaaaagaaagaagctattaggagggccaggacactgattgcagaagcagaaaaggctgctgatgctctggaaactgctgcagcgatgaacccttttgcccaagcatcacttatagaggctagaaagcttgttacagaggcaagaatatcacttgaatgtgttgatgatgaagagcctcaagaaactgcttccaatgatgtgtcagggagctcagtgttactgaacttgcacgatcaccgtcatggactggagatgcagaatggaagtaatttgttgaagcaagagaataaacctgccaatgggatggaatttcctccaagcagtgtcaatggcctcgctttccatcttgatgtttctgaactcagcggaacaaagcaactatatcagaggatagagaattccatggaaagggcttttcttctcccttcggcttcgtcaaagcttaaaagtgcgaacggagattatggaataatagatttacatgtgaggcagtcgatggtcgatgacacggcaaagcataaaggcatcacagctgaaacttgtcctccagggacactagagctagaagaagatcctcccagtcccaggtctgcagaaaaggctggaaccagggaagattaccctgggggaaaaccggaagaagacgcaccctcatcggaagaaaaggctaggatgaggtgggtacgtgggaggttggtcaaggtaaaaacaaacggacctggggatttagaaatctagtattaggcagcaaatctggcctagataccgttgacaggcaatcgagtttgctcacttccatttagccaccattttgtatgccattcgcatgatttggtgtttacgacctgcacctgctcgatgggaggaaccaagtataaaatgtactagcgttgacaggagtggcgtggtcctggggaactttactgatttgcagtctacagtgaacgtgcaggagcgagcacattacgatcaccctgttttcctcatatgcgttgagattgtagttgtggtaggtaataggagctggatctttttttcttgtaaggccttgttcggttagctctggattgcggtgatttggtgggtttaaatcccaagtaggtcaaactccttaattttttccaatcacattcaattcatgggtaacgggattaagttgtagtcgactgtgaaagcatgattcgaggaagtctggaaaaagaaacatgcaaatggaacagtagcctggtcacctggttgcatcaaatgctatgagcctatgactgagggccgaggtgccccagtttattgtacgaattgacaattttacccgctgctcagtaacgaaaccacgtttagcccgtaggctagcagcctatcatcgtagctgatttcagta

SEQ ID NO: 18854 - DNA, 1809 bp, Zea Mays
cttgcttttgttttcttcgtaggaagcattcgtgagtcacccaacaacaatgaacaatctttgcacgggacacatgcattgcgcgccccgcctcaacttgcatcctcaccacatcacagtaacctatgctactgtgagcttgtgactgtgcatggtcatgggctcatggtcatggcttcccgggccgctgaggcgacaggcaaatctccccaccttctgatccctcccggctctcgcctccccagattttatactccacggcctccgttgcacctcccattttttcctttccgtttcgtaccttcttcttcctgctcctcctcccgtgagccatgaatgagctctgcgacctcgaggtgcacatcaatggccatcacacgcttcatctccaccaggcacgtatcactcccagtctcccacgccgcgttccaagtgctcttcttcttcttcctcctcctaattaacagggcgtctcatcacatcaatatataaacgaaccttgttttcttttctggctccgaattggtctcatctcaccgccgtcgttgcaatgcaatgtaacagagcgtcatgtgcgccttctcggggaggctgaggacactggtgaagcaggagaagaagaagaagaagggcggcggcaggaaggaagccgtgtccatcaatctcgccggcggcttcccgggcggcgccgacggcttcgagctcgtggccaggttctgctacaacgacggccgcgtcctgctctgcacctccaacctcccgctcctgcactgcgccgccgtgtccctggagatgaccgaggaggtgtgcgcctgcaacctgctggcgcaggcggaggccttcgtcaacgggctctactactggacctggggcgacgtgctggccgcggtccggagctgcgagcccttcgccgcggcggccgacgcctcgggactcctggacaggctcatctccgcgctcttctccaagatcaccggcgccaccccgggcccgggcccggggacgccgaaccgctcctcgtcgtcgtgctcgtcgtcgcccgacaccgcgggcttgcgccggtcgtcgtcgtccgccaacaagacgccggactcgatgcggccctgcgccggcagggagtggtggttcgacgacatgacgtcgctgtccccgccgaccgtcgagaaggtgatgcgcgtgctcggctgctacggcgtcgagaacaagaacctgatcctcacgcggttcctgctgcactacctccgcgccgccacgcgcaggccgccggcgcttgagcgggagggcgccgcgctcgccggcctcgcggaaacggccgtccacggcgtggcgctcgtcgggggcacggcgttctcgtgccggggcctcttctgggtgctccggatcgtgtcggcggtggggctgagcagggagtgccgccacaagctggagcggctcatggggctgatgctggaccaggccacgctcgacgacctcctcgtctccggcgacgacggcggcggcgtgtacgacgtcaacctggtcatgaggctggtcagggtgttcgtggcctccgaagaggaggcagacgcgccgtcggagaggatgcggaaggtggggcgcctggtcgacaagtacctcggcgaaatctcgccggaccaggggctgaaggtgtccaagttcctcgccgtcgccgagagcctgccggactcggccagggactgctacgacggcgtgtaccgggcgctggacatctacctcgagtttccctcgcacacgcaagcttttccttgtgcgagcatatggtcagagtcagacacaccaaaagctttt

SEQ ID NO: 18855 - DNA, 2121 bp, Zea Mays
aaaggcagttcttacacgcgggccctcggcttcaccggaaatcgcctcgggacgggagatctcgcgggccggccggcggcgagaggatgtccaccgcgcccgcgcggcgcgcccgcccgccgctgccgctgcagaacggcgcggagggcgacgacgagcgcgaggaggaggttgatgaggaggaagtgggcgatgacgaagcggaggaggaggaggacgacgacgacgaggaggagccgcggctcaagtaccagcggctaggcgggagcgtgccggcgatcctctccaccgacgccgcggccgccatcgccgtcgccgaccgcatggtcgcgctcggcactcacaacggcacgctccacatcctcgacttccagggcaaccaggtgaaagaaattgctgcgcacacagcaactatcaacgacataagctttgacgcagacggtgaatatataggcagctgctcggatgatggcacagtggcaataaacagcctcttcaccgatgaaaagctaaagtttgagtaccatcgccccatgaaggcaattgctctagaccctaattatgcccggaactatagaagatttgctactggtggtttagcaggccaagtacttgtgctgacaaagaagtcttggggaggttaccataagaaggttttgcgtgatggtgaagggccaatccattcgatgaagtggagggcggatcttcttgcttgggctaatgatgcaggggtcaaagtgcatgatatgagaacagacaaagggatcgcattcatagagagaccaaaaggcattcatcgaccagagttcttgcttccccacctagtctggcaggatgatacagtcttagttgttggatggggaacaagtgtcaagattgcagcgatccgaacagatctatctcagggactcaatggcctacaaagaactatcaccacagctagttctgagaagtatgtggacattgtgggctcattccaaacaggctatcacatatctggggttgctccatttggtgaccttttagtcgtacttgcctatattcctgatgaggatgaaaaagagaaaacatttagtacttctgttacttcacgacagggaactgcacagcgtccagaaatacatcttgtatcatggaaaaatgatgagcttactacagatgctctgcctattcatggttatgagcattacaaggcaaaggactatgctcttgcacatgcacctttctcaggaagtagcaatgcaggtggacagtgggctgctggtgatgaacctttgtattacattgtgtctcctaaggacatagtcgttgcaaagccaagagatgctgaagatcatattgcttggcttcttcaacatggttgccatgaaaaagcattggctgcagttgaggcagggcaaggacgcactgagcttcttgatgaggtgggctcaagataccttgatcacttgataattgaaagaaaatatgctgaagctgctcaacgctgcccaaagttgttgcgaggatccccttcagcatgggagagatgggtcttccactttgctcatctccgccaacttcctgttttggtcccttatattcctacagaaaatcctcagctgagtgatactgcatatgaggttgcccttgttgctctaactaccaatccttctttccatgaacttctcttgactactataaaaaattggccaccgacattatactcagcctcaccggtcatatctgccattgagccacagctaaactcctcatcgatggctgattcattgaaagagtcattagctgaattgtatgtgatcaatggtcaatacgaaaaggcactttctctttatgctgaactcctgaagccagaagtattcgagtttattgagaaatacaacttgcatgatgccattcatgataagattgtcaatcttatgatagtggacaataaaagaacagttcacctactgatccaacatcgtgatatcattcccccatatgaagttgtggagcagctgttgcataccagtaaaaaatgtgacaagagatatttgttacacctgtatttgcatgctttatttgagatagatatacacgctggaaaggattttcatgatatgcagtcaaaactgtttg

SEQ ID NO: 18856 - DNA, 3513 bp, Zea Mays
aaaggcagttcttacacgcgggccctcggcttcaccggaaatcgcctcgggacgggagatctcgcgggccggccggcggcgagaggatgtccaccgcgcccgcgcggcgcgcccgcccgccgctgccgctgcagaacggcgcggagggcgacgacgagcgcgaggaggaggttgatgaggaggaagtgggcgatgacgaagcggaggaggaggaggacgacgacgacgaggaggagccgcggctcaagtaccagcggctaggcgggagcgtgccggcgatcctctccaccgacgccgcggccgccatcgccgtcgccgaccgcatggtcgcgctcggcactcacaacggcacgctccacatcctcgacttccagggcaaccaggtgaaagaaattgctgcgcacacagcaactatcaacgacataagctttgacgcagacggtgaatatataggcagctgctcggatgatggcacagtggcaataaacagcctcttcaccgatgaaaagctaaagtttgagtaccatcgccccatgaaggcaattgctctagaccctaattatgcccggaactatagaagatttgctactggtggtttagcaggccaagtacttgtgctgacaaagaagtcttggggaggttaccataagaaggttttgcgtgatggtgaagggccaatccattcgatgaagtggagggcggatcttcttgcttgggctaatgatgcaggggtcaaagtgcatgatatgagaacagacaaagggatcgcattcatagagagaccaaaaggcattcatcgaccagagttcttgcttccccacctagtctggcaggatgatacagtcttagttgttggatggggaacaagtgtcaagattgcagcgatccgaacagatctatctcagggactcaatggcctacaaagaactatcaccacagctagttctgagaagtatgtggacattgtgggctcattccaaacaggctatcacatatctggggttgctccatttggtgaccttttagtcgtacttgcctatattcctgatgaggatgaaaaagagaaaacatttagtacttctgttacttcacgacagggaactgcacagcgtccagaaatacatcttgtatcatggaaaaatgatgagcttactacagatgctctgcctattcatggttatgagcattacaaggcaaaggactatgctcttgcacatgcacctttctcaggaagtagcaatgcaggtggacagtgggctgctggtgatgaacctttgtattacattgtgtctcctaaggacatagtcgttgcaaagccaagagatgctgaagatcatattgcttggcttcttcaacatggttgccatgaaaaagcattggctgcagttgaggcagggcaaggacgcactgagcttcttgatgaggtgggctcaagataccttgatcacttgataattgaaagaaaatatgctgaagctgctcaacgctgcccaaagttgttgcgaggatccccttcagcatgggagagatgggtcttccactttgctcatctccgccaacttcctgttttggtcccttatattcctacagaaaatcctcagctgagtgatactgcatatgaggttgcccttgttgctctaactaccaatccttctttccatgaacttctcttgactactataaaaaattggccaccgacattatactcagcctcaccggtcatatctgccattgagccacagctaaactcctcatcgatggctgattcattgaaagagtcattagctgaattgtatgtgatcaatggtcaatacgaaaaggcactttctctttatgctgaactcctgaagccagaagtattcgagtttattgagaaatacaacttgcatgatgccattcatgataagattgtcaatcttatgatagtggacaataaaagaacagttcacctactgatccaacatcgtgatatcattcccccatatgaagttgtggagcagctgttgcataccagtaaaaaatgtgacaagagatatttgttacacctgtatttgcatgctttatttgagatagatatacacgctggaaaggattttcatgatatgcaggtggagctttatgctgactacgagacaaggatgctactacccttccttcgaaccagtcagcattacaggcttgacaaggcatatgaaatctttgcacaaaaagaacttgtaagggagcaagtttttgtccttggtcgaatgggcaatgctaaggaagctctgtcgacaattataaacaaactggaagacatgcaggaggctgttgaatttgttacggaacagcatgatgatgaactgtgggaggaactgattagacaatgcctccagaagcctgaaatgggaatctattggaacatacagttggcaatcttgatcctctgtacattgtcagtttggttcctgatggcttagaaatacctcggttgcgggatcgtcttgtgaaaattgtgacggattaccggacagaaacttcattgcgaaatggatgcaacgatatacttaaggctgactgtgttaaccttttggttaaatactaccacgaggctcggcgtggggtatacatggtaagcatggacgaggaggtacacggaaacagagctgacgatggatcatcgcggggacacgagagatcatctagcgtccgggctctagatatcaagtccagaacaagatgtggtgcccggtgttgtttgtgcttcgatcctttgcctatccaggacatatctgtcatcgtgttctactgctgccatgcgtatcatctgtcttgccttgaaggtggcttagactcgatgagatcaaacagtggtcaggatagtgacggaggcatggacgatgaggatggttccccatcaggccagtctcgcatgcgctgtgtcttgtgcactactgctgcttcataattttataccgtgttgggtagtacacactaccttgtgttgtgttgtaagttttgagccatgtaattattgtgttcttttcgcgtgttacacataacacatgcttacaatagcgtaattcttttgagggaggccatgtcctcggcaaggagagttctgtgtaaatttgatgaaccagcatgagcaaagctgtgcggcatttccatctttttttaatgccacgtttgccagataatcaaaagtttattgacattacacgatgcagaactgttcatgtagaatgtgcctgtctatattatacactgttctatttgggactagggcatggtagaattccccagtttcttctcacttcctccaggtcttcatgaaagtgcttctcgcaatatacagaaatcagatcgcttgagaccggcttttgttgcccatgggaagtaatgcgtttctcactgaaccttgagggcaatttgaacaggatactcagcgttcgattctagccgaagtgtttggacggtgacatattgcgctgtagctattggattctgaaggcagtatgtatccttcgctgc

SEQ ID NO: 18857 - DNA, 3507 bp, Zea Mays
aaaggcagttcttacacgcgggccctcggcttcaccggaaatcgcctcgggacgggagatctcgcgggccggccggcggcgagaggatgtccaccgcgcccgcgcggcgcgcccgcccgccgctgccgctgcagaacggcgcggagggcgacgacgagcgcgaggaggaggttgatgaggaggaagtgggcgatgacgaagcggaggaggaggaggacgacgacgacgaggaggagccgcggctcaagtaccagcggctaggcgggagcgtgccggcgatcctctccaccgacgccgcggccgccatcgccgtcgccgaccgcatggtcgcgctcggcactcacaacggcacgctccacatcctcgacttccagggcaaccaggtgaaagaaattgctgcgcacacagcaactatcaacgacataagctttgacgcagacggtgaatatataggcagctgctcggatgatggcacagtggcaataaacagcctcttcaccgatgaaaagctaaagtttgagtaccatcgccccatgaaggcaattgctctagaccctaattatgcccggaactatagaagatttgctactggtggtttagcaggccaagtacttgtgctgacaaagaagtcttggggaggttaccataagaaggttttgcgtgatggtgaagggccaatccattcgatgaagtggagggcggatcttcttgcttgggctaatgatgcaggggtcaaagtgcatgatatgagaacagacaaagggatcgcattcatagagagaccaaaaggcattcatcgaccagagttcttgcttccccacctagtctggcagtcttagttgttggatggggaacaagtgtcaagattgcagcgatccgaacagatctatctcagggactcaatggcctacaaagaactatcaccacagctagttctgagaagtatgtggacattgtgggctcattccaaacaggctatcacatatctggggttgctccatttggtgaccttttagtcgtacttgcctatattcctgatgaggatgaaaaagagaaaacatttagtacttctgttacttcacgacagggaactgcacagcgtccagaaatacatcttgtatcatggaaaaatgatgagcttactacagatgctctgcctattcatggttatgagcattacaaggcaaaggactatgctcttgcacatgcacctttctcaggaagtagcaatgcaggtggacagtgggctgctggtgatgaacctttgtattacattgtgtctcctaaggacatagtcgttgcaaagccaagagatgctgaagatcatattgcttggcttcttcaacatggttgccatgaaaaagcattggctgcagttgaggcagggcaaggacgcactgagcttcttgatgaggtgggctcaagataccttgatcacttgataattgaaagaaaatatgctgaagctgctcaacgctgcccaaagttgttgcgaggatccccttcagcatgggagagatgggtcttccactttgctcatctccgccaacttcctgttttggtcccttatattcctacagaaaatcctcagctgagtgatactgcatatgaggttgcccttgttgctctaactaccaatccttctttccatgaacttctcttgactactataaaaaattggccaccgacattatactcagcctcaccggtcatatctgccattgagccacagctaaactcctcatcgatggctgattcattgaaagagtcattagctgaattgtatgtgatcaatggtcaatacgaaaaggcactttctctttatgctgaactcctgaagccagaagtattcgagtttattgagaaatacaacttgcatgatgccattcatgataagattgtcaatcttatgatagtggacaataaaagaacagttcacctactgatccaacatcgtgatatcattcccccatatgaagttgtggagcagctgttgcataccagtaaaaaatgtgacaagagatatttgttacacctgtatttgcatgctttatttgagatagatatacacgctggaaaggattttcatgatatgcaggtggagctttatgctgactacgagacaaggatgctactacccttccttcgaaccagtcagcattacaggcttgacaaggcatatgaaatctttgcacaaaaagaacttgtaagggagcaagtttttgtccttggtcgaatgggcaatgctaaggaagctctgtcgacaattataaacaaactggaagacatgcaggaggctgttgaatttgttacggaacagcatgatgatgaactgtgggaggaactgattagacaatgcctccagaagcctgaaatggtagggaatctattggaacatacagttggcaatcttgatcctctgtacattgtcagtttggttcctgatggcttagaaatacctcggttgcgggatcgtcttgtgaaaattgtgacggattaccggacagaaacttcattgcgaaatggatgcaacgatatacttaaggctgactgtgttaaccttttggttaaatactaccacgaggctcggcgtggggtatacatggtaagcatggacgaggaggtacacggaaacagagctgacgatggatcatcgcggggacacgagagatcatctagcgtccgggctctagatatcaagtccagaacaagatgtggtgcccggtgttgtttgtgcttcgatcctttgcctatccaggacatatctgtcatcgtgttctactgctgccatgcgtatcatctgtcttgccttgaaggtggcttagactcgatgagatcaaacagtggtcaggatagtgacggaggcatggacgatgaggatggttccccatcaggccagtctcgcatgcgctgtgtcttgtgcactactgctgcttcataattttataccgtgttgggtagtacacactaccttgtgttgtgttgtaagttttgagccatgtaattattgtgttcttttcgcgtgttacacataacacatgcttacaatagcgtaattcttttgagggaggccatgtcctcggcaaggagagttctgtgtaaatttgatgaaccagcatgagcaaagctgtgcggcatttccatctttttttaatgccacgtttgccagataatcaaaagtttattgacattacacgatgcagaactgttcatgtagaatgtgcctgtctatattatacactgttctatttgggactagggcatggtagaattccccagtttcttctcacttcctccaggtcttcatgaaagtgcttctcgcaatatacagaaatcagatcgcttgagaccggcttttgttgcccatgggaagtaatgcgtttctcactgaaccttgagggcaatttgaacaggatactcagcgttcgattctagccgaagtgtttggacggtgacatattgcgctgtagctattggattctgaaggcagtatgtatccttcgctgc

SEQ ID NO: 18858 - DNA, 3413 bp, Zea Mays
aaaggcagttcttacacgcgggccctcggcttcaccggaaatcgcctcgggacgggagatctcgcgggccggccggcggcgagaggatgtccaccgcgcccgcgcggcgcgcccgcccgccgctgccgctgcagaacggcgcggagggcgacgacgagcgcgaggaggaggttgatgaggaggaagtgggcgatgacgaagcggaggaggaggaggacgacgacgacgaggaggagccgcggctcaagtaccagcggctaggcgggagcgtgccggcgatcctctccaccgacgccgcggccgccatcgccgtcgccgaccgcatggtcgcgctcggcactcacaacggcacgctccacatcctcgacttccagggcaaccaggtgaaagaaattgctgcgcacacagcaactatcaacgacataagctttgacgcagacggtgaatatataggcagctgctcggatgatggcacagtggcaataaacagcctcttcaccgatgaaaagctaaagtttgagtaccatcgccccatgaaggcaattgctctagaccctaattatgcccggaactatagaagatttgctactggtggtttagcaggccaagtacttgtgctgacaaagaagtcttggggaggttaccataagaaggttttgcgtgatggtgaagggccaatccattcgatgaagtggagggcggatcttcttgcttgggctaatgatgcaggggtcaaagtgcatgatatgagaacagacaaagggatcgcattcatagagagaccaaaaggcattcatcgaccagagttcttgcttccccacctagtctggcaggatgatacagtcttagttgttggatggggaacaagtgtcaagattgcagcgatccgaacagatctatctcagggactcaatggcctacaaagaactatcaccacagctagttctgagaagtatgtggacattgtgggctcattccaaacaggctatcacatatctggggttgctccatttggtgaccttttagtcgtacttgcctatattcctgatgaggatgaaaaagagaaaacatttagtacttctgttacttcacgacagggaactgcacagcgtccagaaatacatcttgtatcatggaaaaatgatgagcttactacagatgctctgcctattcatggttatgagcattacaaggcaaaggactatgctcttgcacatgcacctttctcaggaagtagcaatgcaggtggacagtgggctgctggtgatgaacctttgtattacattgtgtctcctaaggacatagtcgttgcaaagccaagagatgctgaagatcatattgcttggcttcttcaacatggttgccatgaaaaagcattggctgcagttgaggcagggcaaggacgcactgagcttcttgatgagatgggtcttccactttgctcatctccgccaacttcctgttttggtcccttatattcctacagaaaatcctcagctgagtgatactgcatatgaggttgcccttgttgctctaactaccaatccttctttccatgaacttctcttgactactataaaaaattggccaccgacattatactcagcctcaccggtcatatctgccattgagccacagctaaactcctcatcgatggctgattcattgaaagagtcattagctgaattgtatgtgatcaatggtcaatacgaaaaggcactttctctttatgctgaactcctgaagccagaagtattcgagtttattgagaaatacaacttgcatgatgccattcatgataagattgtcaatcttatgatagtggacaataaaagaacagttcacctactgatccaacatcgtgatatcattcccccatatgaagttgtggagcagctgttgcataccagtaaaaaatgtgacaagagatatttgttacacctgtatttgcatgctttatttgagatagatatacacgctggaaaggattttcatgatatgcaggtggagctttatgctgactacgagacaaggatgctactacccttccttcgaaccagtcagcattacaggcttgacaaggcatatgaaatctttgcacaaaaagaacttgtaagggagcaagtttttgtccttggtcgaatgggcaatgctaaggaagctctgtcgacaattataaacaaactggaagacatgcaggaggctgttgaatttgttacggaacagcatgatgatgaactgtgggaggaactgattagacaatgcctccagaagcctgaaatggtagggaatctattggaacatacagttggcaatcttgatcctctgtacattgtcagtttggttcctgatggcttagaaatacctcggttgcgggatcgtcttgtgaaaattgtgacggattaccggacagaaacttcattgcgaaatggatgcaacgatatacttaaggctgactgtgttaaccttttggttaaatactaccacgaggctcggcgtggggtatacatggtaagcatggacgaggaggtacacggaaacagagctgacgatggatcatcgcggggacacgagagatcatctagcgtccgggctctagatatcaagtccagaacaagatgtggtgcccggtgttgtttgtgcttcgatcctttgcctatccaggacatatctgtcatcgtgttctactgctgccatgcgtatcatctgtcttgccttgaaggtggcttagactcgatgagatcaaacagtggtcaggatagtgacggaggcatggacgatgaggatggttccccatcaggccagtctcgcatgcgctgtgtcttgtgcactactgctgcttcataattttataccgtgttgggtagtacacactaccttgtgttgtgttgtaagttttgagccatgtaattattgtgttcttttcgcgtgttacacataacacatgcttacaatagcgtaattcttttgagggaggccatgtcctcggcaaggagagttctgtgtaaatttgatgaaccagcatgagcaaagctgtgcggcatttccatctttttttaatgccacgtttgccagataatcaaaagtttattgacattacacgatgcagaactgttcatgtagaatgtgcctgtctatattatacactgttctatttgggactagggcatggtagaattccccagtttcttctcacttcctccaggtcttcatgaaagtgcttctcgcaatatacagaaatcagatcgcttgagaccggcttttgttgcccatgggaagtaatgcgtttctcactgaaccttgagggcaatttgaacaggatactcagcgttcgattctagccgaagtgtttggacggtgacatattgcgctgtagctattggattctgaaggcagtatgtatccttcgctgc

SEQ ID NO: 18859 - DNA, 3478 bp, Zea Mays
aaaggcagttcttacacgcgggccctcggcttcaccggaaatcgcctcgggacgggagatctcgcgggccggccggcggcgagaggatgtccaccgcgcccgcgcggcgcgcccgcccgccgctgccgctgcagaacggcgcggagggcgacgacgagcgcgaggaggaggttgatgaggaggaagtgggcgatgacgaagcggaggaggaggaggacgacgacgacgaggaggagccgcggctcaagtaccagcggctaggcgggagcgtgccggcgatcctctccaccgacgccgcggccgccatcgccgtcgccgaccgcatggtcgcgctcggcactcacaacggcacgctccacatcctcgacttccagggcaaccaggtgaaagaaattgctgcgcacacagcaactatcaacgacataagctttgacgcagacggtgaatatataggcagctgctcggatgatggcacagtggcaataaacagcctcttcaccgatgaaaagctaaagtttgagtaccatcgccccatgaaggcaattgctctagaccctaattatgcccggaactatagaagatttgctactggtggtttagcaggccaagtacttgtgctgacaaagaagtcttggggaggttaccataagaaggttttgcgtgatggtgaagggccaatccattcgatgaagtggagggcggatcttcttgcttgggctaatgatgcaggggtcaaagtgcatgatatgagaacagacaaagggatcgcattcatagagagaccaaaaggcattcatcgaccagagttcttgcttccccacctagtctggcaggatgatacagtcttagttgttggatggggaacaagtgtcaagattgcagcgatccgaacagatctatctcagggactcaatggcctacaaagaactatcaccacagctagttctgagaagtatgtggacattgtgggctcattccaaacaggctatcacatatctggggttgctccatttggtgaccttttagtcgtacttgcctatattcctgatgaggatgaaaaagagaaaacatttagtacttctgttacttcacgacagggaactgcacagcgtccagaaatacatcttgtatcatggaaaaatgatgagcttactacagatgctctgcctattcatggttatgagcattacaaggcaaaggactatgctcttgcacatgcacctttctcaggaagtagcaatgcaggtggacagtgggctgctggtgatgaacctttgtattacattgtgtctcctaaggacatagtcgttgcaaagccaagagatgctgaagatcatattgcttggcttcttcaacatggttgccatgaaaaagcattggctgcagttgaggcagggcaaggacgcactgagcttcttgatgaggtgggctcaagataccttgatcacttgataattgaaagaaaatatgctgaagctgctcaacgctgcccaaagttgttgcgaggatccccttcagcatgggagagatgggtcttccactttgctcatctccgccaacttcctgttttggtcccttatattcctacagaaaatcctcagctgagtgatactgcatatgaggttgcccttgttgctctaactaccaatccttctttccatgaacttctcttgactactataaaaaattggccaccgacattatactcagcctcaccggtcatatctgccattgagccacagctaaactcctcatcgatggctgattcattgaaagagtcattagctgaattgtatgtgatcaatggtcaatacgaaaaggcactttctctttatgctgaactcctgaagccagaagtattcgagtttattgagaaatacaacttgcatgatgccattcatgataagattgtcaatcttatgatagtggacaataaaagaacagttcacctactgatccaacatcgtgatatcattcccccatatgaagttgtggagcagctgttgcataccagtaaaaaatgtgacaagagatatttgttacacctgtatttgcatgctttatttgagatagatatacacgctggaaaggattttcatgatatgcaggtggagctttatgctgactacgagacaaggatgctactacccttccttcgaaccagtcagcattacaggcttgacaaggcatatgaaatctttgcacaaaaagaacttgtaagggagcaagtttttgtccttggtcgaatgggcaatgctaaggaagctctgtcgacaattataaacaaactggaagacatgcaggaggctgttgaatttgttacggaacagcatgatgatgaactgtgggaggaactgattagacaatgcctccagaagcctgaaatggtagggaatctattggaacatacagttggcaatcttgatcctctgtacattgtcagtttggttcctgatggcttagaaatacctcggttgcgggatcgtcttgtgaaaattgtgacggattaccggacagaaacttcattgcgaaatggatgcaacgatatacttaaggctcggcgtggggtatacatggtaagcatggacgaggaggtacacggaaacagagctgacgatggatcatcgcggggacacgagagatcatctagcgtccgggctctagatatcaagtccagaacaagatgtggtgcccggtgttgtttgtgcttcgatcctttgcctatccaggacatatctgtcatcgtgttctactgctgccatgcgtatcatctgtcttgccttgaaggtggcttagactcgatgagatcaaacagtggtcaggatagtgacggaggcatggacgatgaggatggttccccatcaggccagtctcgcatgcgctgtgtcttgtgcactactgctgcttcataattttataccgtgttgggtagtacacactaccttgtgttgtgttgtaagttttgagccatgtaattattgtgttcttttcgcgtgttacacataacacatgcttacaatagcgtaattcttttgagggaggccatgtcctcggcaaggagagttctgtgtaaatttgatgaaccagcatgagcaaagctgtgcggcatttccatctttttttaatgccacgtttgccagataatcaaaagtttattgacattacacgatgcagaactgttcatgtagaatgtgcctgtctatattatacactgttctatttgggactagggcatggtagaattccccagtttcttctcacttcctccaggtcttcatgaaagtgcttctcgcaatatacagaaatcagatcgcttgagaccggcttttgttgcccatgggaagtaatgcgtttctcactgaaccttgagggcaatttgaacaggatactcagcgttcgattctagccgaagtgtttggacggtgacatattgcgctgtagctattggattctgaaggcagtatgtatccttcgctgc

SEQ ID NO: 18860 - DNA, 3492 bp, Zea Mays
aaaggcagttcttacacgcgggccctcggcttcaccggaaatcgcctcgggacgggagatctcgcgggccggccggcggcgagaggatgtccaccgcgcccgcgcggcgcgcccgcccgccgctgccgctgcagaacggcgcggagggcgacgacgagcgcgaggaggaggttgatgaggaggaagtgggcgatgacgaagcggaggaggaggaggacgacgacgacgaggaggagccgcggctcaagtaccagcggctaggcgggagcgtgccggcgatcctctccaccgacgccgcggccgccatcgccgtcgccgaccgcatggtcgcgctcggcactcacaacggcacgctccacatcctcgacttccagggcaaccaggtgaaagaaattgctgcgcacacagcaactatcaacgacataagctttgacgcagacggtgaatatataggcagctgctcggatgatggcacagtggcaataaacagcctcttcaccgatgaaaagctaaagtttgagtaccatcgccccatgaaggcaattgctctagaccctaattatgcccggaactatagaagatttgctactggtggtttagcaggccaagtacttgtgctgacaaagaagtcttggggaggttaccataagaaggttttgcgtgatggtgaagggccaatccattcgatgaagtggagggcggatcttcttgcttgggctaatgatgcaggggtcaaagtgcatgatatgagaacagacaaagggatcgcattcatagagagaccaaaaggcattcatcgaccagagttcttgcttccccacctagtctggcaggatgatacagtcttagttgttggatggggaacaagtgtcaagattgcagcgatccgaacagatctatctcagggactcaatggcctacaaagaactatcaccacagctagttctgagaagtatgtggacattgtgggctcattccaaacaggctatcacatatctggggttgctccatttggtgaccttttagtcgtacttgcctatattcctgatgaggatgaaaaagagaaaacatttagtacttctgttacttcacgacagggaactgcacagcgtccagaaatacatcttgtatcatggaaaaatgatgagcttactacagatgctctgcctattcatggttatgagcattacaaggcaaaggactatgctcttgcacatgcacctttctcaggaagtagcaatgcaggtggacagtgggctgctggtgatgaacctttgtattacattgtgtctcctaaggacatagtcgttgcaaagccaagagatgctgaagatcatattgcttggcttcttcaacatggttgccatgaaaaagcattggctgcagttgaggcagggcaaggacgcactgagcttcttgatgaggtgggctcaagataccttgatcacttgataattgaaagaaaatatgctgaagctgctcaacgctgcccaaagttgttgcgaggatccccttcagcatgggagagatgggtcttccactttgctcatctccgccaacttcctgttttggtcccttatattcctacagaaaatcctcagctgagtgatactgcatatgaggttgcccttgttgctctaactaccaatccttctttccatgaacttctcttgactactataaaaaattggccaccgacattatactcagcctcaccggtcatatctgccattgagccacagctaaactcctcatcgatggctgattcattgaaagagtcattagctgaattgtatgtgatcaatggtcaatacgaaaaggcactttctctttatgctgaactcctgaagccagaagtattcgagtttattgagaaatacaacttgcatgatgccattcatgataagattgtcaatcttatgatagtggacaataaaagaacagttcacctactgatccaacatcgtgatatcattcccccatatgaagttgtggagcagctgttgcataccagtaaaaaatgtgacaagagatatttgttacacctgtatttgcatgctttatttgagatagatatacacgctggaaaggattttcatgatatgcaggtggagctttatgctgactacgagacaaggatgctactacccttccttcgaaccagtcagcattacaggcttgacaagaacttgtaagggagcaagtttttgtccttggtcgaatgggcaatgctaaggaagctctgtcgacaattataaacaaactggaagacatgcaggaggctgttgaatttgttacggaacagcatgatgatgaactgtgggaggaactgattagacaatgcctccagaagcctgaaatggtagggaatctattggaacatacagttggcaatcttgatcctctgtacattgtcagtttggttcctgatggcttagaaatacctcggttgcgggatcgtcttgtgaaaattgtgacggattaccggacagaaacttcattgcgaaatggatgcaacgatatacttaaggctgactgtgttaaccttttggttaaatactaccacgaggctcggcgtggggtatacatggtaagcatggacgaggaggtacacggaaacagagctgacgatggatcatcgcggggacacgagagatcatctagcgtccgggctctagatatcaagtccagaacaagatgtggtgcccggtgttgtttgtgcttcgatcctttgcctatccaggacatatctgtcatcgtgttctactgctgccatgcgtatcatctgtcttgccttgaaggtggcttagactcgatgagatcaaacagtggtcaggatagtgacggaggcatggacgatgaggatggttccccatcaggccagtctcgcatgcgctgtgtcttgtgcactactgctgcttcataattttataccgtgttgggtagtacacactaccttgtgttgtgttgtaagttttgagccatgtaattattgtgttcttttcgcgtgttacacataacacatgcttacaatagcgtaattcttttgagggaggccatgtcctcggcaaggagagttctgtgtaaatttgatgaaccagcatgagcaaagctgtgcggcatttccatctttttttaatgccacgtttgccagataatcaaaagtttattgacattacacgatgcagaactgttcatgtagaatgtgcctgtctatattatacactgttctatttgggactagggcatggtagaattccccagtttcttctcacttcctccaggtcttcatgaaagtgcttctcgcaatatacagaaatcagatcgcttgagaccggcttttgttgcccatgggaagtaatgcgtttctcactgaaccttgagggcaatttgaacaggatactcagcgttcgattctagccgaagtgtttggacggtgacatattgcgctgtagctattggattctgaaggcagtatgtatccttcgctgc

SEQ ID NO: 18861 - DNA, 3433 bp, Zea Mays
aaaggcagttcttacacgcgggccctcggcttcaccggaaatcgcctcgggacgggagatctcgcgggccggccggcggcgagaggatgtccaccgcgcccgcgcggcgcgcccgcccgccgctgccgctgcagaacggcgcggagggcgacgacgagcgcgaggaggaggttgatgaggaggaagtgggcgatgacgaagcggaggaggaggaggacgacgacgacgaggaggagccgcggctcaagtaccagcggctaggcgggagcgtgccggcgatcctctccaccgacgccgcggccgccatcgccgtcgccgaccgcatggtcgcgctcggcactcacaacggcacgctccacatcctcgacttccagggcaaccagctgctcggatgatggcacagtggcaataaacagcctcttcaccgatgaaaagctaaagtttgagtaccatcgccccatgaaggcaattgctctagaccctaattatgcccggaactatagaagatttgctactggtggtttagcaggccaagtacttgtgctgacaaagaagtcttggggaggttaccataagaaggttttgcgtgatggtgaagggccaatccattcgatgaagtggagggcggatcttcttgcttgggctaatgatgcaggggtcaaagtgcatgatatgagaacagacaaagggatcgcattcatagagagaccaaaaggcattcatcgaccagagttcttgcttccccacctagtctggcagtcttagttgttggatggggaacaagtgtcaagattgcagcgatccgaacagatctatctcagggactcaatggcctacaaagaactatcaccacagctagttctgagaagtatgtggacattgtgggctcattccaaacaggctatcacatatctggggttgctccatttggtgaccttttagtcgtacttgcctatattcctgatgaggatgaaaaagagaaaacatttagtacttctgttacttcacgacagggaactgcacagcgtccagaaatacatcttgtatcatggaaaaatgatgagcttactacagatgctctgcctattcatggttatgagcattacaaggcaaaggactatgctcttgcacatgcacctttctcaggaagtagcaatgcaggtggacagtgggctgctggtgatgaacctttgtattacattgtgtctcctaaggacatagtcgttgcaaagccaagagatgctgaagatcatattgcttggcttcttcaacatggttgccatgaaaaagcattggctgcagttgaggcagggcaaggacgcactgagcttcttgatgaggtgggctcaagataccttgatcacttgataattgaaagaaaatatgctgaagctgctcaacgctgcccaaagttgttgcgaggatccccttcagcatgggagagatgggtcttccactttgctcatctccgccaacttcctgttttggtcccttatattcctacagaaaatcctcagctgagtgatactgcatatgaggttgcccttgttgctctaactaccaatccttctttccatgaacttctcttgactactataaaaaattggccaccgacattatactcagcctcaccggtcatatctgccattgagccacagctaaactcctcatcgatggctgattcattgaaagagtcattagctgaattgtatgtgatcaatggtcaatacgaaaaggcactttctctttatgctgaactcctgaagccagaagtattcgagtttattgagaaatacaacttgcatgatgccattcatgataagattgtcaatcttatgatagtggacaataaaagaacagttcacctactgatccaacatcgtgatatcattcccccatatgaagttgtggagcagctgttgcataccagtaaaaaatgtgacaagagatatttgttacacctgtatttgcatgctttatttgagatagatatacacgctggaaaggattttcatgatatgcaggtggagctttatgctgactacgagacaaggatgctactacccttccttcgaaccagtcagcattacaggcttgacaaggcatatgaaatctttgcacaaaaagaacttgtaagggagcaagtttttgtccttggtcgaatgggcaatgctaaggaagctctgtcgacaattataaacaaactggaagacatgcaggaggctgttgaatttgttacggaacagcatgatgatgaactgtgggaggaactgattagacaatgcctccagaagcctgaaatggtagggaatctattggaacatacagttggcaatcttgatcctctgtacattgtcagtttggttcctgatggcttagaaatacctcggttgcgggatcgtcttgtgaaaattgtgacggattaccggacagaaacttcattgcgaaatggatgcaacgatatacttaaggctgactgtgttaaccttttggttaaatactaccacgaggctcggcgtggggtatacatggtaagcatggacgaggaggtacacggaaacagagctgacgatggatcatcgcggggacacgagagatcatctagcgtccgggctctagatatcaagtccagaacaagatgtggtgcccggtgttgtttgtgcttcgatcctttgcctatccaggacatatctgtcatcgtgttctactgctgccatgcgtatcatctgtcttgccttgaaggtggcttagactcgatgagatcaaacagtggtcaggatagtgacggaggcatggacgatgaggatggttccccatcaggccagtctcgcatgcgctgtgtcttgtgcactactgctgcttcataattttataccgtgttgggtagtacacactaccttgtgttgtgttgtaagttttgagccatgtaattattgtgttcttttcgcgtgttacacataacacatgcttacaatagcgtaattcttttgagggaggccatgtcctcggcaaggagagttctgtgtaaatttgatgaaccagcatgagcaaagctgtgcggcatttccatctttttttaatgccacgtttgccagataatcaaaagtttattgacattacacgatgcagaactgttcatgtagaatgtgcctgtctatattatacactgttctatttgggactagggcatggtagaattccccagtttcttctcacttcctccaggtcttcatgaaagtgcttctcgcaatatacagaaatcagatcgcttgagaccggcttttgttgcccatgggaagtaatgcgtttctcactgaaccttgagggcaatttgaacaggatactcagcgttcgattctagccgaagtgtttggacggtgacatattgcgctgtagctattggattctgaaggcagtatgtatccttcgctgc

SEQ ID NO: 18862 - DNA, 3705 bp, Zea Mays
aaaggcagttcttacacgcgggccctcggcttcaccggaaatcgcctcgggacgggagatctcgcgggccggccggcggcgagaggatgtccaccgcgcccgcgcggcgcgcccgcccgccgctgccgctgcagaacggcgcggagggcgacgacgagcgcgaggaggaggttgatgaggaggaagtgggcgatgacgaagcggaggaggaggaggacgacgacgacgaggaggagccgcggctcaagtaccagcggctaggcgggagcgtgccggcgatcctctccaccgacgccgcggccgccatcgccgtcgccgaccgcatggtcgcgctcggcactcacaacggcacgctccacatcctcgacttccagggcaaccaggtgaaagaaattgctgcgcacacagcaactatcaacgacataagctttgacgcagacggtgaatatataggcagctgctcggatgatggcacagtggcaataaacagcctcttcaccgatgaaaagctaaagtttgagtaccatcgccccatgaaggcaattgctctagaccctaattatgcccggaactatagaagatttgctactggtggtttagcaggccaagtacttgtgctgacaaagaagtcttggggaggttaccataagaaggttttgcgtgatggtgaagggccaatccattcgatgaagtggagggcggatcttcttgcttgggctaatgatgcaggggtcaaagtgcatgatatgagaacagacaaagggatcgcattcatagagagaccaaaaggcattcatcgaccagagttcttgcttccccacctagtctggcaggatgatacagtcttagttgttggatggggaacaagtgtcaagattgcagcgatccgaacagatctatctcagggactcaatggcctacaaagaactatcaccacagctagttctgagaagtatgtggacattgtgggctcattccaaacaggctatcacatatctggggttgctccatttggtgaccttttagtcgtacttgcctatattcctgatgaggatgaaaaagagaaaacatttagtacttctgttacttcacgacagggaactgcacagcgtccagaaatacatcttgtatcatggaaaaatgatgagcttactacagatgctctgcctattcatggttatgagcattacaaggcaaaggactatgctcttgcacatgcacctttctcaggaagtagcaatgcaggtggacagtgggctgctggtgatgaacctttgtattacattgtgtctcctaaggacatagtcgttgcaaagccaagagatgctgaagatcatattgcttggcttcttcaacatggttgccatgaaaaagcattggctgcagttgaggcagggcaaggacgcactgagcttcttgatgaggtgggctcaagataccttgatcacttgataattgaaagaaaatatgctgaagctgctcaacgctgcccaaagttgttgcgaggatccccttcagcatgggagagatgggtcttccactttgctcatctccgccaacttcctgttttggtcccttatattcctacagaaaatcctcagctgagtgatactgcatatgaggttgcccttgttgctctaactaccaatccttctttccatgaacttctcttgactactataaaaaattggccaccgacattatactcagcctcaccggtcatatctgccattgagccacagctaaactcctcatcgatggctgattcattgaaagagtcattagctgaattgtatgtgatcaatggtcaatacgaaaaggcactttctctttatgctgaactcctgaagccagaagtattcgagtttattgagaaatacaacttgcatgatgccattcatgataagattgtcaatcttatgatagtggacaataaaagaacagttcacctactgatccaacatcgtgatatcattcccccatatgaagttgtggagcagctgttgcataccagtaaaaaatgtgacaagagatatttgttacacctgtatttgcatgctttatttgagatagatatacacgctggaaaggattttcatgatatgcaggtggagctttatgctgactacgagacaaggatgctactacccttccttcgaaccagtcagcattacaggcttgacaaggcatatgaaatctttgcacaaaaagaacttgtaagggagcaagtttttgtccttggtcgaatgggcaatgctaaggaagctctgtcgacaattataaacaaactggaagacatgcaggaggctgttgaatttgttacggaacagcatgatgatgaactgtgggaggaactgattagacaatgcctccagaagcctgaaatggtagggaatctattggaacatacagttggcaatcttgatcctctgtacattgtcagtttggttcctgatggcttagaaatacctcggttattgggttcaatgcttgtggtggtctgcatttggtgtacatgagcaggtctaaggcgagattggaaattggggatatccctggtgcacttggggatgctgaggaagcaataagaatagctcccagatttcctcaggctcacttattgcgaggcgacgcactttttgcaatgggtgaatattctgtcgcggaagatgcctatgcagatgccttggatcttgatccatctattcgccggtccaagtctttcagggctcgcgtggaaaggctacgagagaagcttgttagtgccaataatccgtagttcattttgaagctctctctccatcagaagttcgatccacaagtaacgtagatatgttcttggtgaaggtaataatgctcacacactttgcaagccactggtcaggaattgattgttgccacagcttggaggatccaacagttcatatgaatggcttctggaattttctcatgattacatctggactgatgagaacaaactactaagtctcaactacaagtgttttgaagttcaagcatcgcctgaagtcaaagtcagatgtgcggccaacggaatgcacgagtctggcggctcaggcgcccaacgttttggttcccaccgcttccgatgcgtggcggtaaagccaagcatgcgtggaggcaactgtaggagtagccacaccagatagtactgtactgcactgctgctgccttggggcgtatagcgtttatggtcccgttatttgttgttctgcagtgaaatggaggctttgcccctcgggctgtttgacgttctgatttcactcctttgttttcaaaatgaaggtctccagacgaaaggaaaagtgaaggaattttgaaggattgaaatctaataagaaatttttctatgtgactctttggaacaaaggattgatctcctataaatcctataaaattcctatagaatggaccattttagtaagattttggagaatttttaacacgagatccaaattcttggaaatttttctatggaatgcaagtgtcatataacactattcctacattttttccctatccctatgttttagcaatcctgcaatgcaaaggaggctgaagggagtttgtctatattccgtgaagatccaaaggaggccgaagagagtttgtctatattccgtgaagtcgttcgtctaaacgatgttaagttttggatacaaggaccggttttccggaatgagtttg

SEQ ID NO: 18863 - DNA, 1692 bp, Zea Mays
cacgtaccaccgcatcttgggcttccctccgccgatgcggttctgtaggttgtcgtagaaggcctcgtcccagtacagcaggtcggcggagcccggcgggcagcgcaccccgaagttcgcgaacgcgtcgttgtaggcctggcggtggaggtgctctgactccagtatgacgccgtcgcaatcaaagatgagggcctcgagagacgccgaggcggagaccatgacgagccggggcgcgcggcggaggcgcggggcgcttgaggctgatcggttgctgatgaatggatagcggcgagagccggcgacgccgacggcgccggtggggacggcgagggaagtggaaggcatcgggagggagtgaggatggagcggagtggagtaggcgccaacggcaacggtcgcttatctagctgactagctcttctcagggaatataccatccacagaaaaaaagcgccccgcctcatcccgagatcagaatcagaggccacgcggcgatggcgatggcgatgccgatggcagtggcgcgggtgaccagcctcgcctgcgccccccgacaggcgcagcatcgccgccgccatagccttgccccgccgtgcgcctcgggtgcggtggaggtgcgggtctgcacgaaccgcacgtgcgcgcggcagggtgggcgcgaggtcctggctgcgctcgcgggactcgcgccgccggcggtcgacgtggcctcctgcgggtgcctcgggcgctgcggcgccgggcccaacgttgcggcgtccgtccctgggagcgccgcggtgttcggccacgtgggcacggcggcgcgaggcgcgcagctactggagcacctcctcggccccgcggaattcgatgcggccctagggctcaccgcgctggccacgagggagaaggcggaggctgccctcgagaagggaaacgcggacgaagcggaagcccttctcaccgaggttattgggttcaatgcttgtggtggtctgcatttggtgtacatgagcaggtctaaggcgagattggaaattggggatatccctggtgcacttggggatgctgaggaagcaataagaatagctcccagatttcctcaggctcacttattgcgaggcgacgcactttttgcaatgggtgaatattctgtcgcggaagatgcctatgcagatgccttggatcttgatccatctattcgccggtccaagtctttcagggctcgcgtggaaaggctacgagagaagcttgttagtgccaataatccgtagttcattttgaagctctctctccatcagaagttcgatccacaagtaacgtagatatgttcttggtgaaggtaataatgctcacacactttgcaagccactggtcaggaattgattgttgccacagcttggaggatccaacagttcatatgaatgtagggcactgttgtttttcccacctgaacggctgaactacactatgatctacaaacttagaatagtctagtgtattttattgtatgtttatgccctacaatgtaagctactgacttccaaaccatgctagtatgtattgagatttgagagtcattctcatttcagaaaattgtatggctgcactctctgttgatatgatcttggcattctcatttggttagcatttatttgttcattgataaatgagaaatttggaatacctccaggatttaatgttaag

SEQ ID NO: 18864 - DNA, 1462 bp, Zea Mays
cacgtaccaccgcatcttgggcttccctccgccgatgcggttctgtaggttgtcgtagaaggcctcgtcccagtacagcaggtcggcggagcccggcgggcagcgcaccccgaagttcgcgaacgcgtcgttgtaggcctggcggtggaggtgctctgactccagtatgacgccgtcgcaatcaaagatgagggcctcgagagacgccgaggcggagaccatgacgagccggggcgcgcggcggaggcgcggggcgcttgaggctgatcggttgctgatgaatggatagcggcgagagccggcgacgccgacggcgccggtggggacggcgagggaagtggaaggcatcgggagggagtgaggatggagcggagtggagtaggcgccaacggcaacggtcgcttatctagctgactagctcttctcagggaatataccatccacagaaaaaaagcgccccgcctcatcccgagatcagaatcagaggccacgcggcgatggcgatggcgatgccgatggcagtggcgcgggtgaccagcctcgcctgcgccccccgacaggcgcagcatcgccgccgccatagccttgccccgccgtgcgcctcgggtgcggtggaggtgcgggtctgcacgaaccgcacgtgcgcgcggcagggtgggcgcgaggtcctggctgcgctcgcgggactcgcgccgccggcggtcgacgtggcctcctgcgggtgcctcgggcgctgcggcgccgggcccaacgttgcggcgtccgtccctgggagcgccgcggtgttcggccacgtgggcacggcggcgcgaggcgcgcagctactggagcacctcctcggccccgcggaattcgatgcggccctagggctcaccgcgctggccacgagggagaaggcggaggctgccctcgagaagggaaacgcggacgaagcggaagcccttctcaccgaggttattgggttcaatgcttgtggtggtctgcatttggtgtacatgagcaggtctaaggcgagattggaaattggggatatccctggtgcacttggggatgctgaggaagcaataagaatagctcccagatttcctcaggtgaaggtaataatgctcacacactttgcaagccactggtcaggaattgattgttgccacagcttggaggatccaacagttcatatgaatgtagggcactgttgtttttcccacctgaacggctgaactacactatgatctacaaacttagaatagtctagtgtattttattgtatgtttatgccctacaatgtaagctactgacttccaaaccatgctagtatgtattgagatttgagagtcattctcatttcagaaaattgtatggctgcactctctgttgatatgatcttggcattctcatttggttagcatttatttgttcattgataaatgagaaatttggaatacctccaggatttaatgttaag

SEQ ID NO: 18865 - DNA, 1579 bp, Zea Mays
cacgtaccaccgcatcttgggcttccctccgccgatgcggttctgtaggttgtcgtagaaggcctcgtcccagtacagcaggtcggcggagcccggcgggcagcgcaccccgaagttcgcgaacgcgtcgttgtaggcctggcggtggaggtgctctgactccagtatgacgccgtcgcaatcaaagatgagggcctcgagagacgccgaggcggagaccatgacgagccggggcgcgcggcggaggcgcggggcgcttgaggctgatcggttgctgatgaatggatagcggcgagagccggcgacgccgacggcgccggtggggacggcgagggaagtggaaggcatcgggagggagtgaggatggagcggagtggagtaggcgccaacggcaacggtcgcttatctagctgactagctcttctcagggaatataccatccacagaaaaaaagcgccccgcctcatcccgagatcagaatcagaggccacgcggcgatggcgatggcgatgccgatggcagtggcgcgggtgaccagcctcgcctgcgccccccgacaggcgcagcatcgccgccgccatagccttgccccgccgtgcgcctcgggtgcggtggaggtgcgggtctgcacgaaccgcacgtgcgcgcggcagggtgggcgcgaggtcctggctgcgctcgcgggactcgcgccgccggcggtcgacgtggcctcctgcgggtgcctcgggcgctgcggcgccgggcccaacgttgcggcgtccgtccctgggagcgccgcggtgttcggccacgtgggcacggcggcgcgaggcgcgcagctactggagcacctcctcggccccgcggaattcgatgcggccctagggctcaccgcgctggccacgagggagaaggcggaggctgccctcgagaagggaaacgcggacgaagcggaagcccttctcaccgaggttattgggttcaatgcttgtggtggtctgcatttggtgtacatgagcaggtctaaggcgagattggaaattggggatatccctggtgcacttggggatgctgaggaagcaataagaatagctcccagatttcctcaggctcacttattgcgaggcgacgcactttttgcaatgggtgaatattctgtcgcggaagatgcctatgcagatgccttggatcttgatccatctattcgccggtccaagtctttcagggtgaaggtaataatgctcacacactttgcaagccactggtcaggaattgattgttgccacagcttggaggatccaacagttcatatgaatgtagggcactgttgtttttcccacctgaacggctgaactacactatgatctacaaacttagaatagtctagtgtattttattgtatgtttatgccctacaatgtaagctactgacttccaaaccatgctagtatgtattgagatttgagagtcattctcatttcagaaaattgtatggctgcactctctgttgatatgatcttggcattctcatttggttagcatttatttgttcattgataaatgagaaatttggaatacctccaggatttaatgttaag

SEQ ID NO: 18866 - DNA, 1415 bp, Zea Mays
cacgtaccaccgcatcttgggcttccctccgccgatgcggttctgtaggttgtcgtagaaggcctcgtcccagtacagcaggtcggcggagcccggcgggcagcgcaccccgaagttcgcgaacgcgtcgttgtaggcctggcggtggaggtgctctgactccagtatgacgccgtcgcaatcaaagatgagggcctcgagagacgccgaggcggagaccatgacgagccggggcgcgcggcggaggcgcggggcgcttgaggctgatcggttgctgatgaatggatagcggcgagagccggcgacgccgacggcgccggtggggacggcgagggaagtggaaggcatcgggagggagtgaggatggagcggagtggagtaggcgccaacggcaacggtcgcttatctagctgactagctcttctcagggaatataccatccacagaaaaaaagcgccccgcctcatcccgagatcagaatcagaggccacgcggcgatggcgatggcgatgccgatggcagtggcgcgggtgaccagcctcgcctgcgccccccgacaggcgcagcatcgccgccgccatagccttgccccgccgtgcgcctcgggtgcggtggaggtgcgggtctgcacgaaccgcacgtgcgcgcggcagggtgggcgcgaggtcctggctgcgctcgcgggactcgcgccgccggcggtcgacgtggcctcctgcgggtgcctcgggcgctgcggcgccgggcccaacgttgcggcgtccgtccctgggagcgccgcggtgttcggccacgtgggcacggcggcgcgaggcgcgcagctactggagcacctcctcggccccgcggaattcgatgcggccctagggctcaccgcgctggccacgagggagaaggcggaggctgccctcgagaagggaaacgcggacgaagcggaagcccttctcaccgaggttattgggttcaatgcttgtggtggtctgcatttggtgtacatgagcaggtctaaggcgagattggaaattggggatatccctggtgcacttggggatgctgaggaagcaataagaatagctcccagatttcctcaggctcacttattgcgaggcgacgcactttttgcaatgggtgaatattctgtcgcggaagatgcctatgcagatgccttggatcttgatccatctattcgccggtccaagtctttcagggctcgcgtggaaaggctacgagagaagcttgttagtgccaataatccgtagttcattttgaagctctctctccatcagaagttcgatccacaagtaacgtagatatgttcttggtgaaggtaataatgctcacacactttgcaagccactggtcaggaattgattgttgccacagcttggaggatccaacagttcatatgaatgctt

SEQ ID NO: 18867 - DNA, 2152 bp, Zea Mays
cacgtaccaccgcatcttgggcttccctccgccgatgcggttctgtaggttgtcgtagaaggcctcgtcccagtacagcaggtcggcggagcccggcgggcagcgcaccccgaagttcgcgaacgcgtcgttgtaggcctggcggtggaggtgctctgactccagtatgacgccgtcgcaatcaaagatgagggcctcgagagacgccgaggcggagaccatgacgagccggggcgcgcggcggaggcgcggggcgcttgaggctgatcggttgctgatgaatggatagcggcgagagccggcgacgccgacggcgccggtggggacggcgagggaagtggaaggcatcgggagggagtgaggatggagcggagtggagtaggcgccaacggcaacggtcgcttatctagctgactagctcttctcagggaatataccatccacagaaaaaaagcgccccgcctcatcccgagatcagaatcagaggccacgcggcgatggcgatggcgatgccgatggcagtggcgcgggtgaccagcctcgcctgcgccccccgacaggcgcagcatcgccgccgccatagccttgccccgccgtgcgcctcgggtgcggtggaggtgcgggtctgcacgaaccgcacgtgcgcgcggcagggtgggcgcgaggtcctggctgcgctcgcgggactcgcgccgccggcggtcgacgtggcctcctgcgggtgcctcgggcgctgcggcgccgggcccaacgttgcggcgtccgtccctgggagcgccgcggtgttcggccacgtgggcacggcggcgcgaggcgcgcagctactggagcacctcctcggccccgcggaattcgatgcggccctagggctcaccgcgctggccacgagggagaaggcggaggctgccctcgagaagggaaacgcggacgaagcggaagcccttctcaccgaggttattgggttcaatgcttgtggtggtctgcatttggtgtacatgagcaggtctaaggcgagattggaaattggggatatccctggtgcacttggggatgctgaggaagcaataagaatagctcccagatttcctcaggctcacttattgcgaggcgacgcactttttgcaatgggtgaatattctgtcgcggaagatgcctatgcagatgccttggatcttgatccatctattcgccggtccaagtctttcagggctcgcgtggaaaggctacgagagaagcttgttagtgccaataatccgtagttcattttgaagctctctctccatcagaagttcgatccacaagtaacgtagatatgttcttggtaggtctgaattgctagatgcaacatctggaagtagtatacatagatagctgcatcccttttggttagcagtggacaccttacagttctccttttttttcccgaacacagtgtcctcttttttttagcaaaagacacagtgttctctttgttactgttgtcaagctgatatgtgcaataaatgggatgatgataataagatgttgcctaagtgccattaatttctgttttttttaatataagatgctgatgattgaacaggtgaaggtaataatgctcacacactttgcaagccactggtcaggaattgattgttgccacagcttggaggatccaacagttcatatgaatggcttctggaattttctcatgattacatctggactgatgagaacaaactactaagtctcaactacaagtgttttgaaggtctccagacgaaaggaaaagtgaaggaattttgaaggattgaaatctaataagaaatttttctatgtgactctttggaacaaaggattgatctcctataaatcctataaaattcctatagaatggaccattttagtaagattttggagaatttttaacacgagatccaaattcttggaaatttttctatggaatgcaagtgtcatataacactattcctacattttttccctatccctatgttttagcaatcctgcaatgcaaaggaggctgaagggagtttgtctatattccgtgaagatccaaaggaggccgaagagagtttgtctatattccgtgaagtcgttcgtctaaacgatgttaagttttggatacaaggaccggttttccggaatgagtttg

SEQ ID NO: 18868 - DNA, 2185 bp, Zea Mays
cacgtaccaccgcatcttgggcttccctccgccgatgcggttctgtaggttgtcgtagaaggcctcgtcccagtacagcaggtcggcggagcccggcgggcagcgcaccccgaagttcgcgaacgcgtcgttgtaggcctggcggtggaggtgctctgactccagtatgacgccgtcgcaatcaaagatgagggcctcgagagacgccgaggcggagaccatgacgagccggggcgcgcggcggaggcgcggggcgcttgaggctgatcggttgctgatgaatggatagcggcgagagccggcgacgccgacggcgccggtggggacggcgagggaagtggaaggcatcgggagggagtgaggatggagcggagtggagtaggcgccaacggcaacggtcgcttatctagctgactagctcttctcagggaatataccatccacagaaaaaaagcgccccgcctcatcccgagatcagaatcagaggccacgcggcgatggcgatggcgatgccgatggcagtggcgcgggtgaccagcctcgcctgcgccccccgacaggcgcagcatcgccgccgccatagccttgccccgccgtgcgcctcgggtgcggtggaggtgcgggtctgcacgaaccgcacgtgcgcgcggcagggtgggcgcgaggtcctggctgcgctcgcgggactcgcgccgccggcggtcgacgtggcctcctgcgggtgcctcgggcgctgcggcgccgggcccaacgttgcggcgtccgtccctgggagcgccgcggtgttcggccacgtgggcacggcggcgcgaggcgcgcagctactggagcacctcctcggccccgcggaattcgatgcggccctagggctcaccgcgctggccacgagggagaaggcggaggctgccctcgagaagggaaacgcggacgaagcggaagcccttctcaccgaggttattgggttcaatgcttgtggtggtctgcatttggtgtacatgagcaggtctaaggcgagattggaaattggggatatccctggtgcacttggggatgctgaggaagcaataagaatagctcccagatttcctcaggctcacttattgcgaggcgacgcactttttgcaatgggtgaatattctgtcgcggaagatgcctatgcagatgccttggatcttgatccatctattcgccggtccaagtctttcagggctcgcgtggaaaggctacgagagaagcttgttagtgccaataatccgtagttcattttgaagctctctctccatcagaagttcgatccacaagtaacgtagatatgttcttggtgaaggtaataatgctcacacactttgcaagccactggtcaggaattgattgttgccacagcttggaggatccaacagttcatatgaatggcttctggaattttctcatgattacatctggactgatgagaacaaactactaagtctcaactacaagtgttttgaagttcaagcatcgcctgaagtcaaagtcagatgtgcggccaacggaatgcacgagtctggcggctcaggcgcccaacgttttggttcccaccgcttccgatgcgtggcggtaaagccaagcatgcgtggaggcaactgtaggagtagccacaccagatagtactgtactgcactgctgctgccttggggcgtatagcgtttatggtcccgttatttgttgttctgcagtgaaatggaggctttgcccctcgggctgtttgacgttctgatttcactcctttgttttcaaaatgaaggtctccagacgaaaggaaaagtgaaggaattttgaaggattgaaatctaataagaaatttttctatgtgactctttggaacaaaggattgatctcctataaatcctataaaattcctatagaatggaccattttagtaagattttggagaatttttaacacgagatccaaattcttggaaatttttctatggaatgcaagtgtcatataacactattcctacattttttccctatccctatgttttagcaatcctgcaatgcaaaggaggctgaagggagtttgtctatattccgtgaagatccaaaggaggccgaagagagtttgtctatattccgtgaagtcgttcgtctaaacgatgttaagttttggatacaaggaccggttttccggaatgagtttg

SEQ ID NO: 18869 - DNA, 1955 bp, Zea Mays
cacgtaccaccgcatcttgggcttccctccgccgatgcggttctgtaggttgtcgtagaaggcctcgtcccagtacagcaggtcggcggagcccggcgggcagcgcaccccgaagttcgcgaacgcgtcgttgtaggcctggcggtggaggtgctctgactccagtatgacgccgtcgcaatcaaagatgagggcctcgagagacgccgaggcggagaccatgacgagccggggcgcgcggcggaggcgcggggcgcttgaggctgatcggttgctgatgaatggatagcggcgagagccggcgacgccgacggcgccggtggggacggcgagggaagtggaaggcatcgggagggagtgaggatggagcggagtggagtaggcgccaacggcaacggtcgcttatctagctgactagctcttctcagggaatataccatccacagaaaaaaagcgccccgcctcatcccgagatcagaatcagaggccacgcggcgatggcgatggcgatgccgatggcagtggcgcgggtgaccagcctcgcctgcgccccccgacaggcgcagcatcgccgccgccatagccttgccccgccgtgcgcctcgggtgcggtggaggtgcgggtctgcacgaaccgcacgtgcgcgcggcagggtgggcgcgaggtcctggctgcgctcgcgggactcgcgccgccggcggtcgacgtggcctcctgcgggtgcctcgggcgctgcggcgccgggcccaacgttgcggcgtccgtccctgggagcgccgcggtgttcggccacgtgggcacggcggcgcgaggcgcgcagctactggagcacctcctcggccccgcggaattcgatgcggccctagggctcaccgcgctggccacgagggagaaggcggaggctgccctcgagaagggaaacgcggacgaagcggaagcccttctcaccgaggttattgggttcaatgcttgtggtggtctgcatttggtgtacatgagcaggtctaaggcgagattggaaattggggatatccctggtgcacttggggatgctgaggaagcaataagaatagctcccagatttcctcaggtgaaggtaataatgctcacacactttgcaagccactggtcaggaattgattgttgccacagcttggaggatccaacagttcatatgaatggcttctggaattttctcatgattacatctggactgatgagaacaaactactaagtctcaactacaagtgttttgaagttcaagcatcgcctgaagtcaaagtcagatgtgcggccaacggaatgcacgagtctggcggctcaggcgcccaacgttttggttcccaccgcttccgatgcgtggcggtaaagccaagcatgcgtggaggcaactgtaggagtagccacaccagatagtactgtactgcactgctgctgccttggggcgtatagcgtttatggtcccgttatttgttgttctgcagtgaaatggaggctttgcccctcgggctgtttgacgttctgatttcactcctttgttttcaaaatgaaggtctccagacgaaaggaaaagtgaaggaattttgaaggattgaaatctaataagaaatttttctatgtgactctttggaacaaaggattgatctcctataaatcctataaaattcctatagaatggaccattttagtaagattttggagaatttttaacacgagatccaaattcttggaaatttttctatggaatgcaagtgtcatataacactattcctacattttttccctatccctatgttttagcaatcctgcaatgcaaaggaggctgaagggagtttgtctatattccgtgaagatccaaaggaggccgaagagagtttgtctatattccgtgaagtcgttcgtctaaacgatgttaagttttggatacaaggaccggttttccggaatgagtttg

SEQ ID NO: 18870 - DNA, 3394 bp, Zea Mays
cacgtaccaccgcatcttgggcttccctccgccgatgcggttctgtaggttgtcgtagaaggcctcgtcccagtacagcaggtcggcggagcccggcgggcagcgcaccccgaagttcgcgaacgcgtcgttgtaggcctggcggtggaggtgctctgactccagtatgacgccgtcgcaatcaaagatgagggcctcgagagacgccgaggcggagaccatgacgagccggggcgcgcggcggaggcgcggggcgcttgaggctgatcggttgctgatgaatggatagcggcgagagccggcgacgccgacggcgccggtggggacggcgagggaagtggaaggcatcgggagggagtgaggatggagcggagtggagtaggcgccaacggcaacggtcgcttatctagctgactagctcttctcagggaatataccatccacagaaaaaaagcgccccgcctcatcccgagatcagaatcagaggccacgcggcgatggcgatggcgatgccgatggcagtggcgcgggtgaccagcctcgcctgcgccccccgacaggcgcagcatcgccgccgccatagccttgccccgccgtgcgcctcgggtgcggtggaggtgcgggtctgcacgaaccgcacgtgcgcgcggcagggtgggcgcgaggtcctggctgcgctcgcgggactcgcgccgccggcggtcgacgtggcctcctgcgggtgcctcgggcgctgcggcgccgggcccaacgttgcggcgtccgtccctgggagcgccgcggtgttcggccacgtgggcacggcggcgcgaggcgcgcagctactggagcacctcctcggccccgcggaattcgatgcggccctagggctcaccgcgctggccacgagggagaaggcggaggctgccctcgagaagggaaacgcggacgaagcggaagcccttctcaccgaggttattgggttcaatgcttgtggtggtctgcatttggtgtacatgagcaggtctaaggcgagattggaaattggggatatccctggtgcacttggggatgctgaggaagcaataagaatagctcccagatttcctcaggctcacttattgcgaggcgacgcactttttgcaatgggtgaatattctgtcgcggaagatgcctatgcagatgccttggatcttgatccatctattcgccggtccaagtctttcagggctcgcgtggaaaggctacgagagaagcttgttagtgccaataatccgtagttcattttgaagctctctctccatcagaagttcgatccacaagtaacgtagatatgttcttggtgaaggtaataatgctcacacactttgcaagccactggtcaggaattgattgttgccacagcttggaggatccaacagttcatatgaatggcttctggaattttctcatgattacatctggactgatgagaacaaactactaagtctcaactacaagtgttttgaaggtatgattgttcatatcaagtttatcttcatgtgtgaatgctgatcagcatggactccatgtgtatcccacataaaggaatcgatcctttttgcacctgtatttttttttgggaacggagctccttttgtccccaaaatcagttggcatatatatttttataaagaaccaaggatatgtgtctacatatggcccacaacattgaagtatgaacttgcaattctggtcttcaaagctgaccagaccaatttggccttgctgccagcaaattgccaccttgctgagattccacaccagcttttgagacaggaaactaatttgtttagtaccatattttttggaggccatcacctggattagtttacgcacatgcagcatgatgagaacattcttagcatggtatattatttattaaaaactaaaaaaaggaggaaatgttagctgttctgattgtgatgttgagctgattggctgccccgtgtgatgcagtgtacagaaagaaaacttatatggataaccttgctgactcgcacattgtctgctggctttgatttggaaaacgccaagtcctgtcttggacattaagatctttgaaatgctcatcccgtctatatattacaccaaataatcgtatcaacacaaaccatatttttttcagttgtagacagcagacatgagacatgcccttatggtacctttttatgatgcagctatgcataaacagaatcctaatatcgttagacttgcaccacctgttttaagaaaatgataaagtcaaggctgtagcaattttattttctgttcctctgccgaatcatcagcatctattgaattgtatatgcaattgtaatcccatttcccttcacagaatgttagcacacccacttattccattccccccaagtgctacagcatgttgctaaaccaaatggtggaaaccgttgctgccataacccctgtcagcttttgtgtaaacttcatatgtaaacttgtgttacttgttaggttgccctagttcaaagctacacatctcagacttcaggtgcaccctcccccagctccccctcactgtaaagcaatgtttggttggtgggatgatccctccttttggtgctgtttggtctgtctacgtcaaacggggccttgattccaggcttacactctttcttaaagacttgttcgtcctcattatccatgtgcttgtgtgcagttcaagcatcgcctgaagtcaaagtcagatgtgcggccaacggaatgcacgagtctggcggctcaggcgcccaacgttttggttcccaccgcttccgatgcgtggcggtaaagccaagcatgcgtggaggcaactgtaggagtagccacaccagatagtactgtactgcactgctgctgccttggggcgtatagcgtttatggtcccgttatttgttgttctgcagtgaaatggaggctttgcccctcgggctgtttgacgttctgatttcactcctttgttttcaaaatgaaggtctccagacgaaaggaaaagtgaaggaattttgaaggattgaaatctaataagaaatttttctatgtgactctttggaacaaaggattgatctcctataaatcctataaaattcctatagaatggaccattttagtaagattttggagaatttttaacacgagatccaaattcttggaaatttttctatggaatgcaagtgtcatataacactattcctacattttttccctatccctatgttttagcaatcctgcaatgcaaaggaggctgaagggagtttgtctatattccgtgaagatccaaaggaggccgaagagagtttgtctatattccgtgaagtcgttcgtctaaacgatgttaagttttggatacaaggaccggttttccggaatgagtttg

SEQ ID NO: 18871 - DNA, 3696 bp, Zea Mays
cacgtaccaccgcatcttgggcttccctccgccgatgcggttctgtaggttgtcgtagaaggcctcgtcccagtacagcaggtcggcggagcccggcgggcagcgcaccccgaagttcgcgaacgcgtcgttgtaggcctggcggtggaggtgctctgactccagtatgacgccgtcgcaatcaaagatgagggcctcgagagacgccgaggcggagaccatgacgagccggggcgcgcggcggaggcgcggggcgcttgaggctgatcggttgctgatgaatggatagcggcgagagccggcgacgccgacggcgccggtggggacggcgagggaagtggaaggcatcgggagggagtgaggatggagcggagtggagtaggcgccaacggcaacggtcgcttatctagctgactagctcttctcagggaatataccatccacagaaaaaaagcgccccgcctcatcccgagatcagaatcagaggccacgcggcgatggcgatggcgatgccgatggcagtggcgcgggtgaccagcctcgcctgcgccccccgacaggcgcagcatcgccgccgccatagccttgccccgccgtgcgcctcgggtgcggtggaggtgcgggtctgcacgaaccgcacgtgcgcgcggcagggtgggcgcgaggtcctggctgcgctcgcgggactcgcgccgccggcggtcgacgtggcctcctgcgggtgcctcgggcgctgcggcgccgggcccaacgttgcggcgtccgtccctgggagcgccgcggtgttcggccacgtgggcacggcggcgcgaggcgcgcagctactggagcacctcctcggccccgcggaattcgatgcggccctagggctcaccgcgctggccacgagggagaaggcggaggctgccctcgagaagggaaacgcggacgaagcggaagcccttctcaccgaggtctggactagacgcatgcgccagtctgcgattgtgcatgctctctcagttgctggatccgagtttgatgattacacttgtatgtttgcataggttattgggttcaatgcttgtggtggtctgcatttggtgtacatgagcaggtctaaggcgagattggaaattggggatatccctggtgcacttggggatgctgaggaagcaataagaatagctcccagatttcctcaggctcacttattgcgaggcgacgcactttttgcaatgggtgaatattctgtcgcggaagatgcctatgcagatgccttggatcttgatccatctattcgccggtccaagtctttcagggctcgcgtggaaaggctacgagagaagcttgttagtgccaataatccgtagttcattttgaagctctctctccatcagaagttcgatccacaagtaacgtagatatgttcttggtgaaggtaataatgctcacacactttgcaagccactggtcaggaattgattgttgccacagcttggaggatccaacagttcatatgaatggcttctggaattttctcatgattacatctggactgatgagaacaaactactaagtctcaactacaagtgttttgaaggaaagagggaagaactggactgataaggagaaaatatgatggagatcagtagttacaaaacacagttagcaaatccaatacccaagcatttacaaaacagcattgagcactggttttgtaggattcaagttgtagcagctgcttgatgtctgaccttttctatttctttatctattttaggtgctatatccatttttttgtgtatgaaggtatgattgttcatatcaagtttatcttcatgtgtgaatgctgatcagcatggactccatgtgtatcccacataaaggaatcgatcctttttgcacctgtatttttttttgggaacggagctccttttgtccccaaaatcagttggcatatatatttttataaagaaccaaggatatgtgtctacatatggcccacaacattgaagtatgaacttgcaattctggtcttcaaagctgaccagaccaatttggccttgctgccagcaaattgccaccttgctgagattccacaccagcttttgagacaggaaactaatttgtttagtaccatattttttggaggccatcacctggattagtttacgcacatgcagcatgatgagaacattcttagcatggtatattatttattaaaaactaaaaaaaggaggaaatgttagctgttctgattgtgatgttgagctgattggctgccccgtgtgatgcagtgtacagaaagaaaacttatatggataaccttgctgactcgcacattgtctgctggctttgatttggaaaacgccaagtcctgtcttggacattaagatctttgaaatgctcatcccgtctatatattacaccaaataatcgtatcaacacaaaccatatttttttcagttgtagacagcagacatgagacatgcccttatggtacctttttatgatgcagctatgcataaacagaatcctaatatcgttagacttgcaccacctgttttaagaaaatgataaagtcaaggctgtagcaattttattttctgttcctctgccgaatcatcagcatctattgaattgtatatgcaattgtaatcccatttcccttcacagaatgttagcacacccacttattccattccccccaagtgctacagcatgttgctaaaccaaatggtggaaaccgttgctgccataacccctgtcagcttttgtgtaaacttcatatgtaaacttgtgttacttgttaggttgccctagttcaaagctacacatctcagacttcaggtgcaccctcccccagctccccctcactgtaaagcaatgtttggttggtgggatgatccctccttttggtgctgtttggtctgtctacgtcaaacggggccttgattccaggcttacactctttcttaaagacttgttcgtcctcattatccatgtgcttgtgtgcagttcaagcatcgcctgaagtcaaagtcagatgtgcggccaacggaatgcacgagtctggcggctcaggcgcccaacgttttggttcccaccgcttccgatgcgtggcggtaaagccaagcatgcgtggaggcaactgtaggagtagccacaccagatagtactgtactgcactgctgctgccttggggcgtatagcgtttatggtcccgttatttgttgttctgcagtgaaatggaggctttgcccctcgggctgtttgacgttctgatttcactcctttgttttcaaaatgaaggtctccagacgaaaggaaaagtgaaggaattttgaaggattgaaatctaataagaaatttttctatgtgactctttggaacaaaggattgatctcctataaatcctataaaattcctatagaatggaccattttagtaagattttggagaatttttaacacgagatccaaattcttggaaatttttctatggaatgcaagtgtcatataacactattcctacattttttccctatccctatgttttagcaatcctgcaatgcaaaggaggctgaagggagtttgtctatattccgtgaagatccaaaggaggccgaagagagtttgtctatattccgtgaagtcgttcgtctaaacgatgttaagttttggatacaaggaccggttttccggaatgagtttg

SEQ ID NO: 18872 - DNA, 3423 bp, Zea Mays
cacgtaccaccgcatcttgggcttccctccgccgatgcggttctgtaggttgtcgtagaaggcctcgtcccagtacagcaggtcggcggagcccggcgggcagcgcaccccgaagttcgcgaacgcgtcgttgtaggcctggcggtggaggtgctctgactccagtatgacgccgtcgcaatcaaagatgagggcctcgagagacgccgaggcggagaccatgacgagccggggcgcgcggcggaggcgcggggcgcttgaggctgatcggttgctgatgaatggatagcggcgagagccggcgacgccgacggcgccggtggggacggcgagggaagtggaaggcatcgggagggagtgaggatggagcggagtggagtaggcgccaacggcaacggtcgcttatctagctgactagctcttctcagggaatataccatccacagaaaaaaagcgccccgcctcatcccgagatcagaatcagaggccacgcggcgatggcgatggcgatgccgatggcagtggcgcgggtgaccagcctcgcctgcgccccccgacaggcgcagcatcgccgccgccatagccttgccccgccgtgcgcctcgggtgcggtggaggtgcgggtctgcacgaaccgcacgtgcgcgcggcagggtgggcgcgaggtcctggctgcgctcgcgggactcgcgccgccggcggtcgacgtggcctcctgcgggtgcctcgggcgctgcggcgccgggcccaacgttgcggcgtccgtccctgggagcgccgcggtgttcggccacgtgggcacggcggcgcgaggcgcgcagctactggagcacctcctcggccccgcggaattcgatgcggccctagggctcaccgcgctggccacgagggagaaggcggaggctgccctcgagaagggaaacgcggacgaagcggaagcccttctcaccgaggttattgggttcaatgcttgtggtggtctgcatttggtgtacatgagcaggtctaaggcgagattggaaattggggatatccctggtgcacttggggatgctgaggaagcaataagaatagctcccagatttcctcaggctcacttattgcgaggcgacgcactttttgcaatgggtgaatattctgtcgcggaagatgcctatgcagatgccttggatcttgatccatctattcgccggtccaagtctttcagggctcgcgtggaaaggctacgagagaagcttgttagtgccaataatccgtagttcattttgaagctctctctccatcagaagttcgatccacaagtaacgtagatatgttcttggtgaaggtaataatgctcacacactttgcaagccactggtcaggaattgattgttgccacagcttggaggatccaacagttcatatgaatggcttctggaattttctcatgattacatctggactgatgagaacaaactactaagtctcaactacaagtgttttgaaggtgctatatccatttttttgtgtatgaaggtatgattgttcatatcaagtttatcttcatgtgtgaatgctgatcagcatggactccatgtgtatcccacataaaggaatcgatcctttttgcacctgtatttttttttgggaacggagctccttttgtccccaaaatcagttggcatatatatttttataaagaaccaaggatatgtgtctacatatggcccacaacattgaagtatgaacttgcaattctggtcttcaaagctgaccagaccaatttggccttgctgccagcaaattgccaccttgctgagattccacaccagcttttgagacaggaaactaatttgtttagtaccatattttttggaggccatcacctggattagtttacgcacatgcagcatgatgagaacattcttagcatggtatattatttattaaaaactaaaaaaaggaggaaatgttagctgttctgattgtgatgttgagctgattggctgccccgtgtgatgcagtgtacagaaagaaaacttatatggataaccttgctgactcgcacattgtctgctggctttgatttggaaaacgccaagtcctgtcttggacattaagatctttgaaatgctcatcccgtctatatattacaccaaataatcgtatcaacacaaaccatatttttttcagttgtagacagcagacatgagacatgcccttatggtacctttttatgatgcagctatgcataaacagaatcctaatatcgttagacttgcaccacctgttttaagaaaatgataaagtcaaggctgtagcaattttattttctgttcctctgccgaatcatcagcatctattgaattgtatatgcaattgtaatcccatttcccttcacagaatgttagcacacccacttattccattccccccaagtgctacagcatgttgctaaaccaaatggtggaaaccgttgctgccataacccctgtcagcttttgtgtaaacttcatatgtaaacttgtgttacttgttaggttgccctagttcaaagctacacatctcagacttcaggtgcaccctcccccagctccccctcactgtaaagcaatgtttggttggtgggatgatccctccttttggtgctgtttggtctgtctacgtcaaacggggccttgattccaggcttacactctttcttaaagacttgttcgtcctcattatccatgtgcttgtgtgcagttcaagcatcgcctgaagtcaaagtcagatgtgcggccaacggaatgcacgagtctggcggctcaggcgcccaacgttttggttcccaccgcttccgatgcgtggcggtaaagccaagcatgcgtggaggcaactgtaggagtagccacaccagatagtactgtactgcactgctgctgccttggggcgtatagcgtttatggtcccgttatttgttgttctgcagtgaaatggaggctttgcccctcgggctgtttgacgttctgatttcactcctttgttttcaaaatgaaggtctccagacgaaaggaaaagtgaaggaattttgaaggattgaaatctaataagaaatttttctatgtgactctttggaacaaaggattgatctcctataaatcctataaaattcctatagaatggaccattttagtaagattttggagaatttttaacacgagatccaaattcttggaaatttttctatggaatgcaagtgtcatataacactattcctacattttttccctatccctatgttttagcaatcctgcaatgcaaaggaggctgaagggagtttgtctatattccgtgaagatccaaaggaggccgaagagagtttgtctatattccgtgaagtcgttcgtctaaacgatgttaagttttggatacaaggaccggttttccggaatgagtttg

SEQ ID NO: 18873 - DNA, 3310 bp, Zea Mays
cacgtaccaccgcatcttgggcttccctccgccgatgcggttctgtaggttgtcgtagaaggcctcgtcccagtacagcaggtcggcggagcccggcgggcagcgcaccccgaagttcgcgaacgcgtcgttgtaggcctggcggtggaggtgctctgactccagtatgacgccgtcgcaatcaaagatgagggcctcgagagacgccgaggcggagaccatgacgagccggggcgcgcggcggaggcgcggggcgcttgaggctgatcggttgctgatgaatggatagcggcgagagccggcgacgccgacggcgccggtggggacggcgagggaagtggaaggcatcgggagggagtgaggatggagcggagtggagtaggcgccaacggcaacggtcgcttatctagctgactagctcttctcagggaatataccatccacagaaaaaaagcgccccgcctcatcccgagatcagaatcagaggccacgcggcgatggcgatggcgatgccgatggcagtggcgcgggtgaccagcctcgcctgcgccccccgacaggcgcagcatcgccgccgccatagccttgccccgccgtgcgcctcgggtgcggtggaggtgcgggtctgcacgaaccgcacgtgcgcgcggcagggtgggcgcgaggtcctggctgcgctcgcgggactcgcgccgccggcggtcgacgtggcctcctgcgggtgcctcgggcgctgcggcgccgggcccaacgttgcggcgtccgtccctgggagcgccgcggtgttcggccacgtgggcacggcggcgcgaggcgcgcagctactggagcacctcctcggccccgcggaattcgatgcggccctagggctcaccgcgctggccacgagggagaaggcggaggctgccctcgagaagggaaacgcggacgaagcggaagcccttctcaccgaggttattgggttcaatgcttgtggtggtctgcatttggtgtacatgagcaggtctaaggcgagattggaaattggggatatccctggtgcacttggggatgctgaggaagcaataagaatagctcccagatttcctcaggctcacttattgcgaggcgacgcactttttgcaatgggtgaatattctgtcgcggaagatgcctatgcagatgccttggatcttgatccatctattcgccggtccaagtctttcagggtgaaggtaataatgctcacacactttgcaagccactggtcaggaattgattgttgccacagcttggaggatccaacagttcatatgaatggcttctggaattttctcatgattacatctggactgatgagaacaaactactaagtctcaactacaagtgttttgaaggtgctatatccatttttttgtgtatgaaggtatgattgttcatatcaagtttatcttcatgtgtgaatgctgatcagcatggactccatgtgtatcccacataaaggaatcgatcctttttgcacctgtatttttttttgggaacggagctccttttgtccccaaaatcagttggcatatatatttttataaagaaccaaggatatgtgtctacatatggcccacaacattgaagtatgaacttgcaattctggtcttcaaagctgaccagaccaatttggccttgctgccagcaaattgccaccttgctgagattccacaccagcttttgagacaggaaactaatttgtttagtaccatattttttggaggccatcacctggattagtttacgcacatgcagcatgatgagaacattcttagcatggtatattatttattaaaaactaaaaaaaggaggaaatgttagctgttctgattgtgatgttgagctgattggctgccccgtgtgatgcagtgtacagaaagaaaacttatatggataaccttgctgactcgcacattgtctgctggctttgatttggaaaacgccaagtcctgtcttggacattaagatctttgaaatgctcatcccgtctatatattacaccaaataatcgtatcaacacaaaccatatttttttcagttgtagacagcagacatgagacatgcccttatggtacctttttatgatgcagctatgcataaacagaatcctaatatcgttagacttgcaccacctgttttaagaaaatgataaagtcaaggctgtagcaattttattttctgttcctctgccgaatcatcagcatctattgaattgtatatgcaattgtaatcccatttcccttcacagaatgttagcacacccacttattccattccccccaagtgctacagcatgttgctaaaccaaatggtggaaaccgttgctgccataacccctgtcagcttttgtgtaaacttcatatgtaaacttgtgttacttgttaggttgccctagttcaaagctacacatctcagacttcaggtgcaccctcccccagctccccctcactgtaaagcaatgtttggttggtgggatgatccctccttttggtgctgtttggtctgtctacgtcaaacggggccttgattccaggcttacactctttcttaaagacttgttcgtcctcattatccatgtgcttgtgtgcagttcaagcatcgcctgaagtcaaagtcagatgtgcggccaacggaatgcacgagtctggcggctcaggcgcccaacgttttggttcccaccgcttccgatgcgtggcggtaaagccaagcatgcgtggaggcaactgtaggagtagccacaccagatagtactgtactgcactgctgctgccttggggcgtatagcgtttatggtcccgttatttgttgttctgcagtgaaatggaggctttgcccctcgggctgtttgacgttctgatttcactcctttgttttcaaaatgaaggtctccagacgaaaggaaaagtgaaggaattttgaaggattgaaatctaataagaaatttttctatgtgactctttggaacaaaggattgatctcctataaatcctataaaattcctatagaatggaccattttagtaagattttggagaatttttaacacgagatccaaattcttggaaatttttctatggaatgcaagtgtcatataacactattcctacattttttccctatccctatgttttagcaatcctgcaatgcaaaggaggctgaagggagtttgtctatattccgtgaagatccaaaggaggccgaagagagtttgtctatattccgtgaagtcgttcgtctaaacgatgttaagttttggatacaaggaccggttttccggaatgagtttg

SEQ ID NO: 18874 - DNA, 1275 bp, Zea Mays
ccgaacatccttccccaaaacccccccacccaaaggcgaggcagggggagagccgtgcctggtgtggtggctcctgaccaaaacggagtccctcgccgccgccgcttcccgaaatccgccaaatccggagccaatgccgccgtcccctcccaccccggcggcacccaaaactatcgccgacttcttcgcgcgccccgccaagcgcctgcgcgctgccccggccgcctccctctcctccaactcctctccctcctcgctgtcgccggagcagcgccgtcgcgccgacaccaacctggcgctcgcccgcgcgcggcgcaacctccgcctcgccgagtccaaagcgcaagcatcggggggcgcaccgaagctggaggagctcctggtggaggagacgtgggcggaggcgcttcgcggtgagctgcgcaagtcatacgcgctcgagctctgccgcttcgtggcccacgagaggctccacggcccgctgcccgtgtacccgccgccgcacctcgtgttccacgcgctcaacgccaccccgttcgaccgtgtcaaggcagtcatcatcggtcagggtgttcttatgctcaataccgtcctaactgtgagggagcatcaagccaactcacatgccaagaaaggatgggagcagtttacggatgaggtcattaagactatatcacaaaagaaatcaggattagtattccttctttggggaaattctgctcaatctaagacaagattgattgacgaaacaaaacatcacatattgaaatctgctcatccatcaggtctgtctgcaaacaggggtttctttggatgcaggcacttctccaaaacaaacgagatcttagagaagctggggctgtctgccatcgattggcagctctagaaaaatcccaagacgacatgtgatttctctgtttgagcttgacaaccaccgttgctgtatggagtggagcagaagcacatgcctcaagggctatcatattcggtcaagattatgtggcgactaaagttgttattcatacatggccaatatggatgtgagtgcttaacgcttcttttgtgccgtgtcttatcctgctttatttactttggcactgtaccagcttgttgcggccattgtggttgtcgtgcgtacgtgcaactactttgcttggcgctaggacacgcccatttgggctgccttgctagatctaagcatctgacgtactagagcttaaccaaccaccctatatatatgcataaagggcctgcctctacggctctaccttccgc

SEQ ID NO: 18875 - DNA, 2201 bp, Zea Mays
agcggcagggtgtttaagaacaaagactccgaaccaaaacccgacgcgacatttttttttttgttggaagggggtgggggctttgttggtgctgtcgttagaagagatcaaacgggtccgtggaaaaaagaaagaggtttcattcgcgtgcgtgcgtgcctgcgccgagcgcccgagctaatctagtagttagcacgcgacgggagcatctaattcacccccacagcgagccgagcgagcgagaattcgaattggagttggacttgcggctgctgcgtccggtggggctggaattctcaccgcctccccgtgcggggtgagaggcggtgggtcgtggttgcggtcggcgcgcgaggagggtcgacggcctcgcgccattgggtacgaaaccggccgagactgtgagcggtgggcggccgctgcctggagacagctcaaggttgatccaggttcgagcgcctcgggttgctggaggatttgcgggggggtgcgtgtttatgggcggctagatcggtgattcttcagctgctctcggtgtgatggcagctgactctagcatggggtttcaccaggggatcaccgcctcgctgtacaaccatcacatgctctcgttccagtccaacagcgacgtcggcatcagcggcgacgccaccggtgccatggtcatggccccggggagtgtgggtggcggcagtagcaacgccgggctgttcctctccgcaaacacaggggtcatgggcaacgcgccgggggtcgccccgtcaaggacctcgtcgggggatgcactccttggtaccgggacgcccaagtataagtacgtaactggtcctccttcggattggagtgaccgcgaggtggccatactgaaggaaggacttgtgagatatgctcgtgaaccgagtatcatgaggtacattaagatagcagctatgcttcctaacaggaccatcagggatgttgcgttgcgatgctggtggtctacaggtaaagagagaaggaagaaacctgatggattctatacaggaaaaaaaatgagagacatgaagccaatccaggacaaaatggttgcatctgtcccaatagctaattttcacatgacacctacaaccaatgtaacccctttttcgatatcaatgcaacatccaaatcaacaaagtcaggttcccaaagaagctcctattgtcgacagtgcaacccagcgtctcctggaggaaaataatcagttgcttaaccagatttctgcaaatattaaaacattcaagacagtggagaacacagatctttttctccgcacgagtaacaacatcaaaacaattttaagcagaatgagcgaaacgcatggtatcatgggtcaaatgcctccattgcctttatccataaatgaagaccatataaattcgcttattcaactgaacagactggttgcatcatatggtacgacaagcatttctcatcatacgaagcaagagccatgaagctagtttaccatacccagggggaaaaacgagacgaccagatggccggacctcctgcaatcctgtaaacgtgctgttgaggaaggcttacatgttgttatactgaccaagcaccagggaaaaatcactgttttccagataatgtttttgcagtgatcaccagagtatcagacactttatcctggactccgcaagtgactgtaaatatcggatgactggaggcattccatgttttgttttactgatcgttcgtgaatgcatttcttcttttcttgttttttattgttatcccagacagggttgcattgctcccaatatgtaactatgtacaatagccactgccctagactgctaggcgtagaacgactccattttctgactatttggacactggaacccaaacatgttgtccaggtgttctgcattcttttttatcttcacttcagaagctttggattagcacttctgatgcagcaatggttagctgtgccccaacatggacaacaacagtttattccttttgtttcgtttcaaattgtaagccattttagcattgtctcaaaaaatctctagttttgaccaaggttattcgaaaaaaagaaaagaaaacatatctacaacgtgagcctaggttcgtttcgtttatttgatatcgtatatgcaatacatgtatctttaaacttagttaaagttagacaaatttgacttacaaagccaaaaaacgat

SEQ ID NO: 18876 - DNA, 2483 bp, Zea Mays
agcggcagggtgtttaagaacaaagactccgaaccaaaacccgacgcgacatttttttttttgttggaagggggtgggggctttgttggtgctgtcgttagaagagatcaaacgggtccgtggaaaaaagaaagaggtttcattcgcgtgcgtgcgtgcctgcgccgagcgcccgagctaatctagtagttagcacgcgacgggagcatctaattcacccccacagcgagccgagcgagcgagaattcgaattggagttggacttgcggctgctgcgtccggtggggctggaattctcaccgcctccccgtgcggggtgagaggcggtgggtcgtggttgcggtcggcgcgcgaggagggtcgacggcctcgcgccattgggtacgaaaccggccgagactgtgagcggtgggcggccgctgcctggagacagctcaaggcaggtgagttggcccggattccgcgggcgtgtttgttcgtacttcgtggtgggggatttggacggcttcgttgcggttgcgccgttgcggtggttgcttcggtgggtgggggcgggcggctggctggctgggggaggggtcttccctgtcgcctcgccgttcactcgctcagcgacctcgatcggatcctcctcgggactcgggagtgaggaaaaatgcgaggctcctgcggggagctcagagtgcagcgggcacggctcccgagtcaggcggtttccttggtgcccgtgcagggttgatccaggttcgagcgcctcgggttgctggaggatttgcgggggggtgcgtgtttatgggcggctagatcggtgattcttcagctgctctcggtgtgatggcagctgactctagcatggggtttcaccaggggatcaccgcctcgctgtacaaccatcacatgctctcgttccagtccaacagcgacgtcggcatcagcggcgacgccaccggtgccatggtcatggccccggggagtgtgggtggcggcagtagcaacgccgggctgttcctctccgcaaacacaggggtcatgggcaacgcgccgggggtcgccccgtcaaggacctcgtcgggggatgcactccttggtaccgggacgcccaagtataagtacgtaactggtcctccttcggattggagtgaccgcgaggtggccatactgaaggaaggacttgtgagatatgctcgtgaaccgagtatcatgaggtacattaagatagcagctatgcttcctaacaggaccatcagggatgttgcgttgcgatgctggtggtctacacagggtaaagagagaaggaagaaacctgatggattctatacaggaaaaaaaatgagagacatgaagccaatccaggacaaaatggttgcatctgtcccaatagctaattttcacatgacacctacaaccaatgtaacccctttttcgatatcaatgcaacatccaaatcaacaaagtcaggttcccaaagaagtgcaacccagcgtctcctggaggaaaataatcagttgcttaaccagatttctgcaaatattaaaacattcaagacagtggagaacacagatctttttctccgcacgagtaacaacatcaaaacaattttaagcagaatgagcgaaacgcatggtatcatgggtcaaatgcctccattgcctttatccataaatgaagaccatataaattcgcttattcaactgaacagactggttgcatcatatggtacgacaagcatttctcatcatacgaagcaagagccatgaagctagtttaccatacccagggggaaaaacgagacgaccagatggccggacctcctgcaatcctgtaaacgtgctgttgaggaaggcttacatgttgttatactgaccaagcaccagggaaaaatcactgttttccagataatgtttttgcagtgatcaccagagtatcagacactttatcctggactccgcaagtgactgtaaatatcggatgactggaggcattccatgttttgttttactgatcgttcgtgaatgcatttcttcttttcttgttttttattgttatcccagacagggttgcattgctcccaatatgtaactatgtacaatagccactgccctagactgctaggcgtagaacgactccattttctgactatttggacactggaacccaaacatgttgtccaggtgttctgcattcttttttatcttcacttcagaagctttggattagcacttctgatgcagcaatggttagctgtgccccaacatggacaacaacagtttattccttttgtttcgtttcaaattgtaagccattttagcattgtctcaaaaaatctctagttttgaccaaggttattcgaaaaaaagaaaagaaaacatatctacaacgtgagcctaggttcgtttcgtttatttgatatcgtatatgcaatacatgtatctttaaacttagttaaagttagacaaatttgacttacaaagccaaaaaacgat

SEQ ID NO: 18877 - DNA, 2205 bp, Zea Mays
agcggcagggtgtttaagaacaaagactccgaaccaaaacccgacgcgacatttttttttttgttggaagggggtgggggctttgttggtgctgtcgttagaagagatcaaacgggtccgtggaaaaaagaaagaggtttcattcgcgtgcgtgcgtgcctgcgccgagcgcccgagctaatctagtagttagcacgcgacgggagcatctaattcacccccacagcgagccgagcgagcgagaattcgaattggagttggacttgcggctgctgcgtccggtggggctggaattctcaccgcctccccgtgcggggtgagaggcggtgggtcgtggttgcggtcggcgcgcgaggagggtcgacggcctcgcgccattgggtacgaaaccggccgagactgtgagcggtgggcggccgctgcctggagacagctcaaggcaggttgatccaggttcgagcgcctcgggttgctggaggatttgcgggggggtgcgtgtttatgggcggctagatcggtgattcttcagctgctctcggtgtgatggcagctgactctagcatggggtttcaccaggggatcaccgcctcgctgtacaaccatcacatgctctcgttccagtccaacagcgacgtcggcatcagcggcgacgccaccggtgccatggtcatggccccggggagtgtgggtggcggcagtagcaacgccgggctgttcctctccgcaaacacaggggtcatgggcaacgcgccgggggtcgccccgtcaaggacctcgtcgggggatgcactccttggtaccgggacgcccaagtataagtacgtaactggtcctccttcggattggagtgaccgcgaggtggccatactgaaggaaggacttgtgagatatgctcgtgaaccgagtatcatgaggtacattaagatagcagctatgcttcctaacaggaccatcagggatgttgcgttgcgatgctggtggtctacaggtaaagagagaaggaagaaacctgatggattctatacaggaaaaaaaatgagagacatgaagccaatccaggacaaaatggttgcatctgtcccaatagctaattttcacatgacacctacaaccaatgtaacccctttttcgatatcaatgcaacatccaaatcaacaaagtcaggttcccaaagaagctcctattgtcgacagtgcaacccagcgtctcctggaggaaaataatcagttgcttaaccagatttctgcaaatattaaaacattcaagacagtggagaacacagatctttttctccgcacgagtaacaacatcaaaacaattttaagcagaatgagcgaaacgcatggtatcatgggtcaaatgcctccattgcctttatccataaatgaagaccatataaattcgcttattcaactgaacagactggttgcatcatatggtacgacaagcatttctcatcatacgaagcaagagccatgaagctagtttaccatacccagggggaaaaacgagacgaccagatggccggacctcctgcaatcctgtaaacgtgctgttgaggaaggcttacatgttgttatactgaccaagcaccagggaaaaatcactgttttccagataatgtttttgcagtgatcaccagagtatcagacactttatcctggactccgcaagtgactgtaaatatcggatgactggaggcattccatgttttgttttactgatcgttcgtgaatgcatttcttcttttcttgttttttattgttatcccagacagggttgcattgctcccaatatgtaactatgtacaatagccactgccctagactgctaggcgtagaacgactccattttctgactatttggacactggaacccaaacatgttgtccaggtgttctgcattcttttttatcttcacttcagaagctttggattagcacttctgatgcagcaatggttagctgtgccccaacatggacaacaacagtttattccttttgtttcgtttcaaattgtaagccattttagcattgtctcaaaaaatctctagttttgaccaaggttattcgaaaaaaagaaaagaaaacatatctacaacgtgagcctaggttcgtttcgtttatttgatatcgtatatgcaatacatgtatctttaaacttagttaaagttagacaaatttgacttacaaagccaaaaaacgat

SEQ ID NO: 18878 - DNA, 2123 bp, Zea Mays
agcggcagggtgtttaagaacaaagactccgaaccaaaacccgacgcgacatttttttttttgttggaagggggtgggggctttgttggtgctgtcgttagaagagatcaaacgggtccgtggaaaaaagaaagaggtttcattcgcgtgcgtgcgtgcctgcgccgagcgcccgagctaatctagtagttagcacgcgacgggagcatctaattcacccccacagcgagccgagcgagcgagaattcgaattggagttggacttgcggctgctgcgtccggtggggctggaattctcaccgcctccccgtgcggggtgagaggcggtgggtcgtggttgcggtcggcgcgcgaggagggtcgacggcctcgcgccattgggtacgaaaccggccgagactgtgagcggtgggcggccgctgcctggagacagctcaaggcaggttgatccaggttcgagcgcctcgggttgctggaggatttgcgggggggggatcaccgcctcgctgtacaaccatcacatgctctcgttccagtccaacagcgacgtcggcatcagcggcgacgccaccggtgccatggtcatggccccggggagtgtgggtggcggcagtagcaacgccgggctgttcctctccgcaaacacaggggtcatgggcaacgcgccgggggtcgccccgtcaaggacctcgtcgggggatgcactccttggtaccgggacgcccaagtataagtacgtaactggtcctccttcggattggagtgaccgcgaggtggccatactgaaggaaggacttgtgagatatgctcgtgaaccgagtatcatgaggtacattaagatagcagctatgcttcctaacaggaccatcagggatgttgcgttgcgatgctggtggtctacacagggtaaagagagaaggaagaaacctgatggattctatacaggaaaaaaaatgagagacatgaagccaatccaggacaaaatggttgcatctgtcccaatagctaattttcacatgacacctacaaccaatgtaacccctttttcgatatcaatgcaacatccaaatcaacaaagtcaggttcccaaagaagctcctattgtcgacagtgcaacccagcgtctcctggaggaaaataatcagttgcttaaccagatttctgcaaatattaaaacattcaagacagtggagaacacagatctttttctccgcacgagtaacaacatcaaaacaattttaagcagaatgagcgaaacgcatggtatcatgggtcaaatgcctccattgcctttatccataaatgaagaccatataaattcgcttattcaactgaacagactggttgcatcatatggtacgacaagcatttctcatcatacgaagcaagagccatgaagctagtttaccatacccagggggaaaaacgagacgaccagatggccggacctcctgcaatcctgtaaacgtgctgttgaggaaggcttacatgttgttatactgaccaagcaccagggaaaaatcactgttttccagataatgtttttgcagtgatcaccagagtatcagacactttatcctggactccgcaagtgactgtaaatatcggatgactggaggcattccatgttttgttttactgatcgttcgtgaatgcatttcttcttttcttgttttttattgttatcccagacagggttgcattgctcccaatatgtaactatgtacaatagccactgccctagactgctaggcgtagaacgactccattttctgactatttggacactggaacccaaacatgttgtccaggtgttctgcattcttttttatcttcacttcagaagctttggattagcacttctgatgcagcaatggttagctgtgccccaacatggacaacaacagtttattccttttgtttcgtttcaaattgtaagccattttagcattgtctcaaaaaatctctagttttgaccaaggttattcgaaaaaaagaaaagaaaacatatctacaacgtgagcctaggttcgtttcgtttatttgatatcgtatatgcaatacatgtatctttaaacttagttaaagttagacaaatttgacttacaaagccaaaaaacgat

SEQ ID NO: 18879 - DNA, 2204 bp, Zea Mays
agcggcagggtgtttaagaacaaagactccgaaccaaaacccgacgcgacatttttttttttgttggaagggggtgggggctttgttggtgctgtcgttagaagagatcaaacgggtccgtggaaaaaagaaagaggtttcattcgcgtgcgtgcgtgcctgcgccgagcgcccgagctaatctagtagttagcacgcgacgggagcatctaattcacccccacagcgagccgagcgagcgagaattcgaattggagttggacttgcggctgctgcgtccggtggggctggaattctcaccgcctccccgtgcggggtgagaggcggtgggtcgtggttgcggtcggcgcgcgaggagggtcgacggcctcgcgccattgggtacgaaaccggccgagactgtgagcggtgggcggccgctgcctggagacagctcaaggttgatccaggttcgagcgcctcgggttgctggaggatttgcgggggggtgcgtgtttatgggcggctagatcggtgattcttcagctgctctcggtgtgatggcagctgactctagcatggggtttcaccaggggatcaccgcctcgctgtacaaccatcacatgctctcgttccagtccaacagcgacgtcggcatcagcggcgacgccaccggtgccatggtcatggccccggggagtgtgggtggcggcagtagcaacgccgggctgttcctctccgcaaacacaggggtcatgggcaacgcgccgggggtcgccccgtcaaggacctcgtcgggggatgcactccttggtaccgggacgcccaagtataagtacgtaactggtcctccttcggattggagtgaccgcgaggtggccatactgaaggaaggacttgtgagatatgctcgtgaaccgagtatcatgaggtacattaagatagcagctatgcttcctaacaggaccatcagggatgttgcgttgcgatgctggtggtctacacagggtaaagagagaaggaagaaacctgatggattctatacaggaaaaaaaatgagagacatgaagccaatccaggacaaaatggttgcatctgtcccaatagctaattttcacatgacacctacaaccaatgtaacccctttttcgatatcaatgcaacatccaaatcaacaaagtcaggttcccaaagaagctcctattgtcgacagtgcaacccagcgtctcctggaggaaaataatcagttgcttaaccagatttctgcaaatattaaaacattcaagacagtggagaacacagatctttttctccgcacgagtaacaacatcaaaacaattttaagcagaatgagcgaaacgcatggtatcatgggtcaaatgcctccattgcctttatccataaatgaagaccatataaattcgcttattcaactgaacagactggttgcatcatatggtacgacaagcatttctcatcatacgaagcaagagccatgaagctagtttaccatacccagggggaaaaacgagacgaccagatggccggacctcctgcaatcctgtaaacgtgctgttgaggaaggcttacatgttgttatactgaccaagcaccagggaaaaatcactgttttccagataatgtttttgcagtgatcaccagagtatcagacactttatcctggactccgcaagtgactgtaaatatcggatgactggaggcattccatgttttgttttactgatcgttcgtgaatgcatttcttcttttcttgttttttattgttatcccagacagggttgcattgctcccaatatgtaactatgtacaatagccactgccctagactgctaggcgtagaacgactccattttctgactatttggacactggaacccaaacatgttgtccaggtgttctgcattcttttttatcttcacttcagaagctttggattagcacttctgatgcagcaatggttagctgtgccccaacatggacaacaacagtttattccttttgtttcgtttcaaattgtaagccattttagcattgtctcaaaaaatctctagttttgaccaaggttattcgaaaaaaagaaaagaaaacatatctacaacgtgagcctaggttcgtttcgtttatttgatatcgtatatgcaatacatgtatctttaaacttagttaaagttagacaaatttgacttacaaagccaaaaaacgat

SEQ ID NO: 18880 - DNA, 1359 bp, Zea Mays
caaagcctaaagaaatgattatgcaacggggcctttacttaatatgctcgtgaaccgagtatcatgaggtacattaagatagcagctatgcttcctaacaggaccatcagggatgttgcgttgcgatgctggtggtctacaggtaaagagagaaggaagaaacctgatggattctatacaggaaaaaaaatgagagacatgaagccaatccaggacaaaatggttgcatctgtcccaatagctaattttcacatgacacctacaaccaatgtaacccctttttcgatatcaatgcaacatccaaatcaacaaagtcaggttcccaaagaagctcctattgtcgacagtgcaacccagcgtctcctggaggaaaataatcagttgcttaaccagatttctgcaaatattaaaacattcaagacagtggagaacacagatctttttctccgcacgagtaacaacatcaaaacaattttaagcagaatgagcgaaacgcatggtatcatgggtcaaatgcctccattgcctttatccataaatgaagaccatataaattcgcttattcaactgaacagactggttgcatcatatggtacgacaagcatttctcatcatacgaagcaagagccatgaagctagtttaccatacccagggggaaaaacgagacgaccagatggccggacctcctgcaatcctgtaaacgtgctgttgaggaaggcttacatgttgttatactgaccaagcaccagggaaaaatcactgttttccagataatgtttttgcagtgatcaccagagtatcagacactttatcctggactccgcaagtgactgtaaatatcggatgactggaggcattccatgttttgttttactgatcgttcgtgaatgcatttcttcttttcttgttttttattgttatcccagacagggttgcattgctcccaatatgtaactatgtacaatagccactgccctagactgctaggcgtagaacgactccattttctgactatttggacactggaacccaaacatgttgtccaggtgttctgcattcttttttatcttcacttcagaagctttggattagcacttctgatgcagcaatggttagctgtgccccaacatggacaacaacagtttattccttttgtttcgtttcaaattgtaagccattttagcattgtctcaaaaaatctctagttttgaccaaggttattcgaaaaaaagaaaagaaaacatatctacaacgtgagcctaggttcgtttcgtttatttgatatcgtatatgcaatacatgtatctttaaacttagttaaagttagacaaatttgacttacaaagccaaaaaacgat

SEQ ID NO: 18881 - DNA, 390 bp, Zea Mays
ggctggggacgggggcgtggagcggccagcgcgggcacgccgtcgaggcggcgcggcgttggctgcgctggtgcgccctatacgcgtcggcacatcgaacaatctgacttcgtgcggctcctgaccctggttggaagtgttcgcttcagctaaaacagctccagctgcggcctctctctgcagatcattgtagcagcagcagcgctgccaagggattagttgttgcatcctatgatgcaaccataatatgttcatgcagcaactcagttcagttgtactgtttgactcgagaaatgtaacaagctgtactgttaaaccaggtgatcctattggtgtctcggcgtcccaagttctgtgacactgaggccagagttcgttgtattcaaacac

SEQ ID NO: 18882 - DNA, 1018 bp, Zea Mays
  misc_feature (1017)..(1018): n is a, c, g, or t
cttcgattgccgcgcccgtgctgggcggctggcccccacctgcaggccgcgccattgatctggctcggctgcaccgtgcccatggccgtctgaccaatccccttcatcctccccccacaagctacagggctccggtccatggaactggtcttcgcggcgcgggcgagagcgcctcgtgagccaaaccaaaccgcctccttcctgctcccttcatggcttcctgtctgtcctgctcctgccgccgctttaccactccagactgcactcttcttccttccgcttccgccttcgccacctcccccacctctccctccgtctggtcctgcccgcgcctcccctccccccagtccgtcgataaagccgaggcatcgggacggcggcaggtagaaggagcacccattgcttccgcatctcgcgcaggctctccccaccgcactcccacgcctgataccataccattccgccgccgcatcgacttctcctcctctgaacccgcggcgggggcggacggagatccattccagccggacctggatcggcctactccgacaccggcgctttttgggaagataaacaagactgcccttcagctgagtgctcggaagaagtgggagggatttcacggttcatatccgtatctgcctcgaggaacccgctgcgagaaaaagggagtggacaggggccccccggctgggtcacgagctatggacagaaccgccaatgcggtgttggatatcgagggtctgcctcaaccacctgataaatgctgctccggaagtccaaaaatgatcagggccttgtcacgcaagggttcgaatcggatggaaatgaagggtggtgatgagctggagcagcaagaggatctgaccagaaaacttatcatcaaagctggagcagcagcgggccatgggtcactgcactccctgcgcgcctgtcctcctcattgactccgcggaaggaaggagcagcaggaggtttggccggctcatcacgcccgtcaataaccctcggaggatnn

SEQ ID NO: 18883 - DNA, 1545 bp, Zea Mays
  misc_feature (1544)..(1545): n is a, c, g, or t
ccactccagactgcactcttcttccttccgcttccgccttcgccacctcccccacctctccctccgtctggtcctgcccgcgcctcccctccccccagtccgtcgataaagccgaggcatcgggacggcggcaggtagaaggagcacccattgcttccgcatctcgcgcaggctctccccaccgcactcccacgcctgataccataccattccgccgccgcatcgacttctcctcctctgaacccgcggcgggggcggacggagatccattccagccggacctggatcggcctactccgacaccggcgctttttgggaagataaacaagactgcccttcagctgagtgctcggaagaagtgggagggatttcacggttcatatccgtatctgcctcgaggaacccgctgcgagaaaaagggagtggacaggtactgactccccatttcttgtcctatttttttctttttaataataatttgtcactggtcgcttgcaagttgcaacggctcaacaaacgactacaccaaacctgtgcagccttttgttttagcccccacgagttttagctggatagcatgtgtgatctactgatctgtccagttttaacttgagttcttctcgagagcgtgtggtatccctttttttttcttttattctgccaccatccacttgccatattttgcaagtggatggttgcaaagctgcaggttttgttcctataatactagcgcatagacatatccgctgcatgttgggaaggatatcacagtatattaaacaccattatacatgtaccactgatccagtagtaccgtgattggattttatgcccctgtgcaactgtgctttcccaaacaacgctttgttgtactggtagcggtgggtcaaggacattaattagtatgctcatgtgtttagattagatgatgcaagcgcatagacatagacatatccgctgcatgttgggaaggatatcacaatatattaaataccattatacatatccagtagtaccgtgcttggattttatgccgctgtgcaactgtgctttcccaaacaacgctttgttgtactggtagcggtgggtcaaacacattaattagtgtgctcatgtgtttagattagatgatgcaagcgcacacactgatagggtattctgtactgttcgtacttgtcatgagttgtgatcaagcatttgccgcaggggccccccggctgggtcacgagctatggacagaaccgccaatgcggtgttggatatcgagggtctgcctcaaccacctgataaatgctgctccggaagtccaaaaatgatcagggccttgtcacgcaagggttcgaatcggatggaaatgaagggtggtgatgagctggagcagcaagaggatctgaccagaaaacttatcatcaaagctggagcagcagcgggccatgggtcactgcactccctgcgcgcctgtcctcctcattgactccgcggaaggaaggagcagcaggaggtttggccggctcatcacgcccgtcaataaccctcggaggatnn

SEQ ID NO: 18884 - DNA, 3248 bp, Zea Mays
cccctcatcctcctccgctttattattcgaaagggaaatactgggctggctgcctgggcgcagcagcggcactgttgcgacgcggacgaactcgcacacgcgcacacgctcctgcttgacgcttcttcgcaccccgcccgcttgcttaaatgccctagacctaatcattcccatcccccctccttccttttcctaccaccccacaccctctcccatctctctctccgtgccctcctcctcccccccagtccgccccacccttccggccctccccctcttttatatccagtaccatggtgatctccgagctcgggtgagctgatgagaatgcggccgatttgaggaaggctgtgggcgcgatggatgcggtttcgggcggattcgctaggaggctgtagaggttaggttccggtgtcccccggcccggccggtcgtgggagatgagctcctcgtccgcggccagcatcgggcagccgccgccgcccgcgccgccgccggaagaagagaagaagtgcctcaactcggagctgtggcacgcctgcgccggcccgctcgtctgcctccccaccgtcggtacgcgcgtcgtctacttcccgcagggccacagcgagcaggtggcagcgtcgacgaacaaggaggtggacgggcacatccccaactaccccaacctgccgccgcagctgatctgccagctccatgatgtcacaatgcatgcggatgtggagacagacgaagtgtacgcgcagatgacgctgcagccgctcaatccacaagagcagaacgacgcgtacctgcctgccgagatgggaatcatgagcaagcagccgacgaattacttctgcaagacgctgactgcgagcgacaccagcacgcacggcgggttctctgtgccccgtcgtgcggccgagcgcgtcttccccccgctgtgtggtttgtaggatttcacacagcagcctccagcacaggagcttattgcacgggatattcatgatgttgagtggaagttcaggcatatcttccgaggccagcccaaaagacacctgctgacgactggctggagtgtgtttgtcagtgctaagagacttgttgctggagattctgtgctattcatatggaatgagaaaaaccagcttttgcttggaatcagacacgctacccggccacagactgtgatgccctcttctgttctttcgagtgacagcatgcacatcggactccttgcagcagcagctcatgctgctgcaacaaacagccgcttcacaattttctataatcctagggcaagtccaacagaatttgttatacccctttcgaaatacatcaaggctgtttttcacacgcggatatcagttgggatgcgattcaggatgttatttgagactgaggaatcaagtgtccgcaggtacatggggacaataacagaagtgagtgatgctgacccagtgcgttggcctagttcctattggagatcagtgaaggttggttgggatgaatcaaccgcaggagaaaggccacctagagtttctctgtgggaaattgagccactgacaacctttcctatgtatccatccctgttcccactgcgagttaagcatccttggtattcaggacttgctgctcttcatgatgacagcaatgctttgatgtggctgagaggagtaaccggtgaagggggctttcattctttgaacttccagtcacctggtataggttcctggggacaacagagactccatccatccttacttagcaatgaccatgatcagtatcaagcagtggttgctgccgcagctgcctcccagtccggtggttatctgaagcagcaattcctacaccttcaacaacctatgcagtccccacaggagcagtgcaatctcaatccgctgttgcagcaacaaatactacagcaagcgagccaacagcagatggttagttctgatgctcaaaatattcagtccgtgctcaacccaggtgctattcagcagcagctccaccaactccagcagatgcagcatactcataatgaccagaagcaaaagattcaaccagatcaacagtaccaagttgctagcagtgcggttctcccgagtccaacatcattaccaagccatttgcgtgaaaaatttggcttctctgatcctaatgtgaactcttccagcttcatcagctctagcagcaacgaaaacatgctggaatcaaacttccttcagaaccagtccctttttagccctcaagtcgactcttcctccctactgtacaatatggtacctaatcttacctcaaatgttgctgataataatatatcagcgtttccctctggatcaacatatctgcaaagtccaatgtatggttgtctggatgactcttctggtttattgcaaaatacaggagagaatgatccgacaactagaacttttgttaaggtttacaagtcaggatcagtggggagatccttggacatcacccggttctctaattatgctgaacttcgagaggaactgggtcagatgttcggcattaagggtcagttggacgaccctgatagatcaggctggcagcttgtatttgtcgacagggagaacgatgtgcttctccttggagacgacccgtgggagtcatttgtgaatagtgtatggtacatcaagatactttcacctgaggatgtgcataagatgggaaagccaggaaacgatccacgctacctatcttagctacctatcttaaatcgatacatggagctctttctggctcccatgacgattctgcggcacactgcagcactgttcacgacggccctgctctactgtgctcgcatgttcgcccgtgtcatctctactctctagcatgcacaccgtgctcgtcttcagaagacgaactccccgtcgcttgtatccggtgcaggtcacccgctcctggactgatattttgtaggttccacgtaggaatcagtatcagcaactctatcctagtttgtggtaggctcgcgcggcgctcgttcctgtgtcgcatcaggatcttcggactaaaatgcgtagtcgaaaccgttctcgtgattcgtaagctattcatgtatttgaggattcctcgacatgctttcgacgatgaactgcaataatctgaatgcaggaggattgtttgagatttgtacttcagttttgtgtctgccggtttgcagggttgctgtgatgacgtttcaggtgttctctgtctgaaactattttttatggattggcgagttggtgaccgct

SEQ ID NO: 18885 - DNA, 3109 bp, Zea Mays
ctcatcctcctccgctttattattcgaaagggaaatactgggctggctgcctgggcgcagcagcggcactgttgcgacgcggacgaactcgcacacgcgcacacgctcctgcttgacgcttcttcgcaccccgcccgcttgcttaaatgccctagacctaatcattcccatcccccctccttccttttcctaccaccccacaccctctcccatctctctctccgtgccctcctcctcccccccagtccgccccacccttccggccctccccctcttttatatccagtaccatggtgatctccgagctcgggtgagctgatgagaatgcggccgatttgaggaaggctgtgggcgcgatggatgcggtttcgggcggattcgctaggaggctgtagaggttaggttccggtgtcccccggcccggccggtcgtgggagatgagctcctcgtccgcggccagcatcgggcagccgccgccgcccgcgccgccgccggaagaagagaagaagtgcctcaactcggagctgtggcacgcctgcgccggcccgctcgtctgcctccccaccgtcggtacgcgcgtcgtctacttcccgcagggccacagcgagcaggtggcagcgtcgacgaacaaggaggtggacgggcacatccccaactaccccaacctgccgccgcagctgatctgccagctccatgatgtcacaatgcatgcggatgtggagacagacgaagtgtacgcgcagatgacgctgcagccgctcaatccacaagagcagaacgacgcgtacctgcctgccgagatgggaatcatgagcaagcagccgacgaattacttctgcaagacgctgactgcgagcgacaccagcacgcacggcgggttctctgtgccccgtcgtgcggccgagcgcgtcttccccccgctggatttcacacagcagcctccagcacaggagcttattgcacgggatattcatgatgttgagtggaagttcaggcatatcttccgaggccagcccaaaagacacctgctgacgactggctggagtgtgtttgtcagtgctaagagacttgttgctggagattctgtgctattcatatggaatgagaaaaaccagcttttgcttggaatcagacacgctacccggccacagactgtgatgccctcttctgttctttcgagtgacagcatgcacatcggactccttgcagcagcagctcatgctgctgcaacaaacagccgcttcacaattttctataatcctagggcaagtccaacagaatttgttatacccctttcgaaatacatcaaggctgtttttcacacgcggatatcagttgggatgcgattcaggatgttatttgagactgaggaatcaagtgtccgcaggtacatggggacaataacagaagtgagtgatgctgacccagtgcgttggcctagttcctattggagatcagtgaaggttggttgggatgaatcaaccgcaggagaaaggccacctagagtttctctgtgggaaattgagccactgacaacctttcctatgtatccatccctgttcccactgcgagttaagcatccttggtattcaggacttgctgctcttcatgatgacagcaatgctttgatgtggctgagaggagtaaccggtgaagggggctttcattctttgaacttccagtcacctggtataggttcctggggacaacagagactccatccatccttacttagcaatgaccatgatcagtatcaagcagtggttgctgccgcagctgcctcccagtccggtggttatctgaagcagcaattcctacaccttcaacaacctatgcagtccccacaggagcagtgcaatctcaatccgctgttgcagcaacaaatactacagcaagcgagccaacagcagatggttagttctgatgctcaaaatattcagtccgtgctcaacccaggtgctattcagcagcagctccaccaactccagcagatgcagcatactcataatgaccagaagcaaaagattcaaccagatcaacagtaccaagttgctagcagtgcggttctcccgagtccaacatcattaccaagccatttgcgtgaaaaatttggcttctctgatcctaatgtgaactcttccagcttcatcagctctagcagcaacgaaaacatgctggaatcaaacttccttcagaaccagtccctttttagccctcaagtcgactcttcctccctactgtacaatatggagagaatgatccgacaactagaacttttgttaaggtttacaagtcaggatcagtggggagatccttggacatcacccggttctctaattatgctgaacttcgagaggaactgggtcagatgttcggcattaagggtcagttggacgaccctgatagatcaggctggcagcttgtatttgtcgacagggagaacgatgtgcttctccttggagacgacccgtgggagtcatttgtgaatagtgtatggtacatcaagatactttcacctgaggatgtgcataagatgggaaagccaggaaacgatccacgctacctatcttagctacctatcttaaatcgatacatggagctctttctggctcccatgacgattctgcggcacactgcagcactgttcacgacggccctgctctactgtgctcgcatgttcgcccgtgtcatctctactctctagcatgcacaccgtgctcgtcttcagaagacgaactccccgtcgcttgtatccggtgcaggtcacccgctcctggactgatattttgtaggttccacgtaggaatcagtatcagcaactctatcctagtttgtggtaggctcgcgcggcgctcgttcctgtgtcgcatcaggatcttcggactaaaatgcgtagtcgaaaccgttctcgtgattcgtaagctattcatgtatttgaggattcctcgacatgctttcgacgatgaactgcaataatctgaatgcaggaggattgtttgagatttgtacttcagttttgtgtctgccggtttgcagggttgctgtgatgacgtttcaggtgttctctgtctgaaactattttttatggattggcgagttggtgaccgct

SEQ ID NO: 18886 - DNA, 3221 bp, Zea Mays
gggaaatactgggctggctgcctgggcgcagcagcggcactgttgcgacgcggacgaactcgcacacgcgcacacgctcctgcttgacgcttcttcgcaccccgcccgcttgcttaaatgccctagacctaatcattcccatcccccctccttccttttcctaccaccccacaccctctcccatctctctctccgtgccctcctcctcccccccagtccgccccacccttccggccctccccctcttttatatccagtaccatggtgatctccgagctcgggtgagctgatgagagaagaagtgcctcaactcggagctgtggcacgcctgcgccggcccgctcgtctgcctccccaccgtcggtacgcgcgtcgtctacttcccgcagggccacagcgagcaggtggcagcgtcgacgaacaaggaggtggacgggcacatccccaactaccccaacctgccgccgcagctgatctgccagctccatgatgtcacaatgcatgcggatgtggagacagacgaagtgtacgcgcagatgacgctgcagccgctcaatccacaagagcagaacgacgcgtacctgcctgccgagatgggaatcatgagcaagcagccgacgaattacttctgcaagacgctgactgcgagcgacaccagcacgcacggcgggttctctgtgccccgtcgtgcggccgagcgcgtcttccccccgctggatttcacacagcagcctccagcacaggagcttattgcacgggatattcatgatgttgagtggaagttcaggcatatcttccgaggccagcccaaaagacacctgctgacgactggctggagtgtgtttgtcagtgctaagagacttgttgctggagattctgtgctattcatatggaatgagaaaaaccagcttttgcttggaatcagacacgctacccggccacagactgtgatgccctcttctgttctttcgagtgacagcatgcacatcggactccttgcagcagcagctcatgctgctgcaacaaacagccgcttcacaattttctataatcctagggcaagtccaacagaatttgttatacccctttcgaaatacatcaaggctgtttttcacacgcggatatcagttgggatgcgattcaggatgttatttgagactgaggaatcaagtgtccgcaggtacatggggacaataacagaagtgagtgatgctgacccagtgcgttggcctagttcctattggagatcagtgaaggttggttgggatgaatcaaccgcaggagaaaggccacctagagtttctctgtgggaaattgagccactgacaacctttcctatgtatccatccctgttcccactgcgagttaagcatccttggtattcaggacttgctgctcttcatgatgacagcaatgctttgatgtggctgagaggagtaaccggtgaagggggctttcattctttgaacttccagtcacctggtataggttcctggggacaacagagactccatccatccttacttagcaatgaccatgatcagtatcaagcagtggttgctgccgcagctgcctcccagtccggtggttatctgaagcagcaattcctacaccttcaacaacctatgcagtccccacaggagcagtgcaatctcaatccgctgttgcagcaacaaatactacagcaagcgagccaacagcagatggttagttctgatgctcaaaatattcagtccgtgctcaacccaggtgctattcagcagcagctccaccaactccagcagatgcagcatactcataatgaccagaagcaaaagattcaaccagatcaacagtaccaagttgctagcagtgcggttctcccgagtccaacatcattaccaagccatttgcgtgaaaaatttggcttctctgatcctaatgtgaactcttccagcttcatcagctctagcagcaacgaaaacatgctggaatcaaacttccttcaggtaagttcaaaatccgtggatttgtctagattcaaccaaccagtagttagcgagcagcagcagccgcaacaacaacaggcatggaagcaaaagtttatgggctcacagtcaatgtcttttgggggctcggtttcgcttaactcgcccactagcaaagatggttctgttgacaacaaagttggtcgtgatgtgcagaaccagtccctttttagccctcaagtcgactcttcctccctactgtacaatatggtacctaatcttacctcaaatgttgctgataataatatatcagcgtttccctctggatcaacatatctgcaaagtccaatgtatggttgtctggatgactcttctggtttattgcaaaatacaggagagaatgatccgacaactagaacttttgttaaggtttacaagtcaggatcagtggggagatccttggacatcacccggttctctaattatgctgaacttcgagaggaactgggtcagatgttcggcattaagggtcagttggacgaccctgatagatcaggctggcagcttgtatttgtcgacagggagaacgatgtgcttctccttggagacgacccgtgggagtcatttgtgaatagtgtatggtacatcaagatactttcacctgaggatgtgcataagatgggaaagccaggaaacgatccacgctacctatcttagctacctatcttaaatcgatacatggagctctttctggctcccatgacgattctgcggcacactgcagcactgttcacgacggccctgctctactgtgctcgcatgttcgcccgtgtcatctctactctctagcatgcacaccgtgctcgtcttcagaagacgaactccccgtcgcttgtatccggtgcaggtcacccgctcctggactgatattttgtaggttccacgtaggaatcagtatcagcaactctatcctagtttgtggtaggctcgcgcggcgctcgttcctgtgtcgcatcaggatcttcggactaaaatgcgtagtcgaaaccgttctcgtgattcgtaagctattcatgtatttgaggattcctcgacatgctttcgacgatgaactgcaataatctgaatgcaggaggattgtttgagatttgtacttcagttttgtgtctgccggtttgcagggttgctgtgatgacgtttcaggtgttctctgtctgaaactattttttatggattggcgagttggtgaccgct

SEQ ID NO: 18887 - DNA, 3400 bp, Zea Mays
ccttttcctaccaccccacaccctctcccatctctctctccgtgccctcctcctcccccccagtccgccccacccttccggccctccccctcttttatatccagtaccatggtgatctccgagctcgggtgagctgatgagaatgcggccgatttgaggaaggctgtgggcgcgatggatgcggtttcgggcggattcgctaggaggctgtagaggttaggttccggtgtcccccggcccggccggtcgtgggagatgagctcctcgtccgcggccagcatcgggcagccgccgccgcccgcgccgccgccggaagaagagaagaagtgcctcaactcggagctgtggcacgcctgcgccggcccgctcgtctgcctccccaccgtcggtacgcgcgtcgtctacttcccgcagggccacagcgagcaggtggcagcgtcgacgaacaaggaggtggacgggcacatccccaactaccccaacctgccgccgcagctgatctgccagctccatgatgtcacaatgcatgcggatgtggagacagacgaagtgtacgcgcagatgacgctgcagccgctcaatccacaagagcagaacgacgcgtacctgcctgccgagatgggaatcatgagcaagcagccgacgaattacttctgcaagacgctgactgcgagcgacaccagcacgcacggcgggttctctgtgccccgtcgtgcggccgagcgcgtcttccccccgctgtgtggtttgtaggatttcacacagcagcctccagcacaggagcttattgcacgggatattcatgatgttgagtggaagttcaggcatatcttccgagcccaaaagacacctgctgacgactggctggagtgtgtttgtcagtgctaagagacttgttgctggagattctgtgctattcatatggaatgagaaaaaccagcttttgcttggaatcagacacgctacccggccacagactgtgatgccctcttctgttctttcgagtgacagcatgcacatcggactccttgcagcagcagctcatgctgctgcaacaaacagccgcttcacaattttctataatcctaggtaatttgaactgcttgatgagcaaatggcaattatatgtttcctatgttccacttgattcgaaaaatgtgcttgcagggcaagtccaacagaatttgttatacccctttcgaaatacatcaaggctgtttttcacacgcggatatcagttgggatgcgattcaggatgttatttgagactgaggaatcaagtgtccgcaggtacatggggacaataacagaagtgagtgatgctgacccagtgcgttggcctagttcctattggagatcagtgaaggttggttgggatgaatcaaccgcaggagaaaggccacctagagtttctctgtgggaaattgagccactgacaacctttcctatgtatccatccctgttcccactgcgagttaagcatccttggtattcaggacttgctgctcttcatgatgacagcaatgctttgatgtggctgagaggagtaaccggtgaagggggctttcattctttgaacttccagtcacctggtataggttcctggggacaacagagactccatccatccttacttagcaatgaccatgatcagtatcaagcagtggttgctgccgcagctgcctcccagtccggtggttatctgaagcagcaattcctacaccttcaacaacctatgcagtccccacaggagcagtgcaatctcaatccgctgttgcagcaacaaatactacagcaagcgagccaacagcagatggttagttctgatgctcaaaatattcagtccgtgctcaacccaggtgctattcagcagcagctccaccaactccagcagatgcagcatactcataatgaccagaagcaaaagattcaaccagatcaacagtaccaagttgctagcagtgcggttctcccgagtccaacatcattaccaagccatttgcgtgaaaaatttggcttctctgatcctaatgtgaactcttccagcttcatcagctctagcagcaacgaaaacatgctggaatcaaacttccttcaggtaagttcaaaatccgtggatttgtctagattcaaccaaccagtagttagcgagcagcagcagccgcaacaacaacaggcatggaagcaaaagtttatgggctcacagtcaatgtcttttgggggctcggtttcgcttaactcgcccactagcaaagatggttctgttgacaacaaagttggtcgtgatgtgcagaaccagtccctttttagccctcaagtcgactcttcctccctactgtacaatatggtacctaatcttacctcaaatgttgctgataataatatatcagcgtttccctctggatcaacatatctgcaaagtccaatgtatggttgtctggatgactcttctggtttattgcaaaatacaggagagaatgatccgacaactagaacttttgttaaggtaagtataatcgagtctactaaaaacaaatttaagcccttcctcatgtaatcattttttaaaattcaggtttacaagtcaggatcagtggggagatccttggacatcacccggttctctaattatgctgaacttcgagaggaactgggtcagatgttcggcattaagggtcagttggacgaccctgatagatcaggctggcagcttgtatttgtcgacagggagaacgatgtgcttctccttggagacgacccgtgggagtcatttgtgaatagtgtatggtacatcaagatactttcacctgaggatgtgcataagatgggaaagccaggaaacgatccacgctacctatcttagctacctatcttaaatcgatacatggagctctttctggctcccatgacgattctgcggcacactgcagcactgttcacgacggccctgctctactgtgctcgcatgttcgcccgtgtcatctctactctctagcatgcacaccgtgctcgtcttcagaagacgaactccccgtcgcttgtatccggtgcaggtcacccgctcctggactgatattttgtaggttccacgtaggaatcagtatcagcaactctatcctagtttgtggtaggctcgcgcggcgctcgttcctgtgtcgcatcaggatcttcggactaaaatgcgtagtcgaaaccgttctcgtgattcgtaagctattcatgtatttgaggattcctcgacatgctttcgacgatgaactgcaataatctgaatgcaggaggattgtttgagatttgtacttcagttttgtgtctgccggtttgcagggttgctgtgatgacgtttcaggtgttctctgtctgaaactattttttatggattggcgagttggtgaccgct

SEQ ID NO: 18888 - DNA, 3302 bp, Zea Mays
ccaccccacaccctctcccatctctctctccgtgccctcctcctcccccccagtccgccccacccttccggccctccccctcttttatatccagtaccatggtgatctccgagctcgggtgagctgatgagaatgcggccgatttgaggaaggctgtgggcgcgatggatgcggtttcgggcggattcgctaggaggctgtagaggttaggttccggtgtcccccggcccggccggtcgtgggagatgagctcctcgtccgcggccagcatcgggcagccgccgccgcccgcgccgccgccggaagaagagaagaagtgcctcaactcggagctgtggcacgcctgcgccggcccgctcgtctgcctccccaccgtcggtacgcgcgtcgtctacttcccgcagggccacagcgagcaggtggcagcgtcgacgaacaaggaggtggacgggcacatccccaactaccccaacctgccgccgcagctgatctgccagctccatgatgtcacaatgcatgcggatgtggagacagacgaagtgtacgcgcagatgacgctgcagccgctcaatccacaagagcagaacgacgcgtacctgcctgccgagatgggaatcatgagcaagcagccgacgaattacttctgcaagacgctgactgcgagcgacaccagcacgcacggcgggttctctgtgccccgtcgtgcggccgagcgcgtcttccccccgctgtgtggtttgtaggatttcacacagcagcctccagcacaggagcttattgcacgggatattcatgatgttgagtggaagttcaggcatatcttccgaggccagcccaaaagacacctgctgacgactggctggagtgtgtttgtcagtgctaagagacttgttgctggagattctgtgctattcatatggaatgagaaaaaccagcttttgcttggaatcagacacgctacccggccacagactgtgatgccctcttctgttctttcgagtgacagcatgcacatcggactccttgcagcagcagctcatgctgctgcaacaaacagccgcttcacaattttctataatcctagggcaagtccaacagaatttgttatacccctttcgaaatacatcaaggctgtttttcacacgcggatatcagttgggatgcgattcaggatgttatttgagactgaggaatcaagtgtccgcaggtacatggggacaataacagaagtgagtgatgctgacccagtgcgttggcctagttcctattggagatcagtgaaggttggttgggatgaatcaaccgcaggagaaaggccacctagagtttctctgtgggaaattgagccactgacaacctttcctatgtatccatccctgttcccactgcgagttaagcatccttggtattcaggacttgctgctcttcatgatgacagcaatgctttgatgtggctgagaggagtaaccggtgaagggggctttcattctttgaacttccagtcacctggtataggttcctggggacaacagagactccatccatccttacttagcaatgaccatgatcagtatcaagcagtggttgctgccgcagctgcctcccagtccggtggttatctgaagcagcaattcctacaccttcaacaacctatgcagtccccacaggagcagtgcaatctcaatccgctgttgcagcaacaaatactacagcaagcgagccaacagcagatggttagttctgatgctcaaaatattcagtccgtgctcaacccaggtgctattcagcagcagctccaccaactccagcagatgcagcatactcataatgaccagaagcaaaagattcaaccagatcaacagtaccaagttgctagcagtgcggttctcccgagtccaacatcattaccaagccatttgcgtgaaaaatttggcttctctgatcctaatgtgaactcttccagcttcatcagctctagcagcaacgaaaacatgctggaatcaaacttccttcaggtaagttcaaaatccgtggatttgtctagattcaaccaaccagtagttagcgagcagcagcagccgcaacaacaacaggcatggaagcaaaagtttatgggctcacagtcaatgtcttttgggggctcggtttcgcttaactcgcccactagcaaagatggttctgttgacaacaaagttggtcgtgatgtgcagaaccagtccctttttagccctcaagtcgactcttcctccctactgtacaatatggtacctaatcttacctcaaatgttgctgataataatatatcagcgtttccctctggatcaacatatctgcaaagtccaatgtatggttgtctggatgactcttctggtttattgcaaaatacaggagagaatgatccgacaactagaacttttgttaaggtaagtataatcgagtctactaaaaacaaatttaagcccttcctcatgtaatcattttttaaaattcaggtttacaagtcaggatcagtggggagatccttggacatcacccggttctctaattatgctgaacttcgagaggaactgggtcagatgttcggcattaagggtcagttggacgaccctgatagatcaggctggcagcttgtatttgtcgacagggagaacgatgtgcttctccttggagacgacccgtgggatgtatggtacatcaagatactttcacctgaggatgtgcataagatgggaaagccaggaaacgatccacgctacctatcttagctacctatcttaaatcgatacatggagctctttctggctcccatgacgattctgcggcacactgcagcactgttcacgacggccctgctctactgtgctcgcatgttcgcccgtgtcatctctactctctagcatgcacaccgtgctcgtcttcagaagacgaactccccgtcgcttgtatccggtgcaggtcacccgctcctggactgatattttgtaggttccacgtaggaatcagtatcagcaactctatcctagtttgtggtaggctcgcgcggcgctcgttcctgtgtcgcatcaggatcttcggactaaaatgcgtagtcgaaaccgttctcgtgattcgtaagctattcatgtatttgaggattcctcgacatgctttcgacgatgaactgcaataatctgaatgcaggaggattgtttgagatttgtacttcagttttgtgtctgccggtttgcagggttgctgtgatgacgtttcaggtgttctctgtctgaaactattttttatggattggcgagttggtgaccgct

SEQ ID NO: 18889 - DNA, 3878 bp, Zea Mays
ccaccccacaccctctcccatctctctctccgtgccctcctcctcccccccagtccgccccacccttccggccctccccctcttttatatccagtaccatggtgatctccgagctcgggtgagctgatgagaatgcggccgatttgaggaaggctgtgggcgcgatggatgcggtttcgggcggattcgctaggaggctgtagaggttaggttccggtgtcccccggcccggccggtcgtgggagatgagctcctcgtccgcggccagcatcgggcagccgccgccgcccgcgccgccgccggaagaagagaagaagtgcctcaactcggagctgtggcacgcctgcgccggcccgctcgtctgcctccccaccgtcggtacgcgcgtcgtctacttcccgcagggccacagcgagcaggtggcagcgtcgacgaacaaggaggtggacgggcacatccccaactaccccaacctgccgccgcagctgatctgccagctccatgatgtcacaatgcatgcggatgtggagacagacgaagtgtacgcgcagatgacgctgcagccgctcaatccacaagagcagaacgacgcgtacctgcctgccgagatgggaatcatgagcaagcagccgacgaattacttctgcaagacgctgactgcgagcgacaccagcacgcacggcgggttctctgtgccccgtcgtgcggccgagcgcgtcttccccccgctggatttcacacagcagcctccagcacaggagcttattgcacgggatattcatgatgttgagtggaagttcaggcatatcttccgaggccagcccaaaagacacctgctgacgactggctggagtgtgtttgtcagtgctaagagacttgttgctggagattctgtgctattcatatggaatgagaaaaaccagcttttgcttggaatcagacacgctacccggccacagactgtgatgccctcttctgttctttcgagtgacagcatgcacatcggactccttgcagcagcagctcatgctgctgcaacaaacagccgcttcacaattttctataatcctagggcaagtccaacagaatttgttatacccctttcgaaatacatcaaggctgtttttcacacgcggatatcagttgggatgcgattcaggatgttatttgagactgaggaatcaagtgtccgcaggtacatggggacaataacagaagtgagtgatgctgacccagtgcgttggcctagttcctattggagatcagtgaaggttggttgggatgaatcaaccgcaggagaaaggccacctagagtttctctgtgggaaattgagccactgacaacctttcctatgtatccatccctgttcccactgcgagttaagcatccttggtattcaggacttgctgctcttcatgatgacagcaatgctttgatgtggctgagaggagtaaccggtgaagggggctttcattctttgaacttccagtcacctggtataggttcctggggacaacagagactccatccatccttacttagcaatgaccatgatcagtatcaagcagtggttgctgccgcagctgcctcccagtccggtggttatctgaagcagcaattcctacaccttcaacaacctatgcagtccccacaggagcagtgcaatctcaatccgctgttgcagcaacaaatactacagcaagcgagccaacagcagatggttagttctgatgctcaaaatattcagtccgtgctcaacccaggtgctattcagcagcagctccaccaactccagcagatgcagcatactcataatgaccagaagcaaaagattcaaccagatcaacagtaccaagttgctagcagtgcggttctcccgagtccaacatcattaccaagccatttgcgtgaaaaatttggcttctctgatcctaatgtgaactcttccagcttcatcagctctagcagcaacgaaaacatgctggaatcaaacttccttcaggtaagttcaaaatccgtggatttgtctagattcaaccaaccagtagttagcgagcagcagcagccgcaacaacaacaggcatggaagcaaaagtttatgggctcacagtcaatgtcttttgggggctcggtttcgcttaactcgcccactagcaaagatggttctgttgacaacaaagttggtcgtgatgtgcagaaccagtccctttttagccctcaagtcgactcttcctccctactgtacaatatggtacctaatcttacctcaaatgttgctgataataatatatcagcgtttccctctggatcaacatatctgcaaagtccaatgtatggttgtctggatgactcttctggtttattgcaaaatacaggagagaatgatccgacaactagaacttttgttaaggtttacaagtcaggatcagtggggagatccttggacatcacccggttctctaattatgctgaacttcgagaggaactgggtcagatgttcggcattaagggtcagttggacgaccctgatagatcaggctggcagcttgtatttgtcgacagggagaacgatgtgcttctccttggagacgacccgtgggagtaagaaaccatcactacaattatagtttcaaattgtgattttcaatagtatatacatttgaattttttatatctttacaatgtattagaaaaaatatcacactgcatagttcacgctctgatagagtgatagtaacttgttttttttttgtttaatttgtgtaggcagtttttttacccaactgcccattagcctcatcaatatctattgtcccttgcatttgaatggacctacatgttgttttcaatggctcctgatgacctcagacatatctacatgtgcttgattctggcatacatctactatatgcattcaagttacaaaaatgattaatccacgtcccttgatttatgatacttcaatactcaggaagccattttagctaatggctctcagtgtcagcctgataactggggtttgggggtcatctcggtcatgcgaacgagttgttttgtcttaatgcaacacccgggggaggtcttcctccctcctttattacaaactaaagcttacttgtgatacggatatcatgtttctggatattttaagtgatggatgcaacatatcaatcttagtgtgtgcattattatgcatgctagttgtggatctcgcctgaaactgagcttgctcacccaatgcaggtcatttgtgaatagtgtatggtacatcaagatactttcacctgaggatgtgcataagatgggaaagccaggaaacgatccacgctacctatcttagctacctatcttaaatcgatacatggagctctttctggctcccatgacgattctgcggcacactgcagcactgttcacgacggccctgctctactgtgctcgcatgttcgcccgtgtcatctctactctctagcatgcacaccgtgctcgtcttcagaagacgaactccccgtcgcttgtatccggtgcaggtcacccgctcctggactgatattttgtaggttccacgtaggaatcagtatcagcaactctatcctagtttgtggtaggctcgcgcggcgctcgttcctgtgtcgcatcaggatcttcggactaaaatgcgtagtcgaaaccgttctcgtgattcgtaagctattcatgtatttgaggattcctcgacatgctttcgacgatgaactgcaataatctgaatgcaggaggattgtttgagatttgtacttcagttttgtgtctgccggtttgcagggttgctgtgatgacgtttcaggtgttctctgtctgaaactattttttatggattggcgagttggtgaccgct

SEQ ID NO: 18890 - DNA, 3074 bp, Zea Mays
ccaccccacaccctctcccatctctctctccgtgccctcctcctcccccccagtccgccccacccttccggccctccccctcttttatatccagtaccatggtgatctccgagctcgggtgagctgatgagaatgcggccgatttgaggaaggctgtgggcgcgatggatgcggtttcgggcggattcgctaggaggctgtagaggttaggttccggtgtcccccggcccggccggtcgtgggagatgagctcctcgtccgcggccagcatcgggcagccgccgccgcccgcgccgccgccggaagaagagaagaagtgcctcaactcggagctgtggcacgcctgcgccggcccgctcgtctgcctccccaccgtcggtacgcgcgtcgtctacttcccgcagggccacagcgagcaggtggcagcgtcgacgaacaaggaggtggacgggcacatccccaactaccccaacctgccgccgcagctgatctgccagctccatgatgtcacaatgcatgcggatgtggagacagacgaagtgtacgcgcagatgacgctgcagccgctcaatccacaagagcagaacgacgcgtacctgcctgccgagatgggaatcatgagcaagcagccgacgaattacttctgcaagacgctgactgcgagcgacaccagcacgcacggcgggttctctgtgccccgtcgtgcggccgagcgcgtcttccccccgctgtgtggtttgtaggatttcacacagcagcctccagcacaggagcttattgcacgggatattcatgatgttgagtggaagttcaggcatatcttccgaggccagcccaaaagacacctgctgacgactggctggagtgtgtttgtcagtgctaagagacttgttgctggagattctgtgctattcatatggaatgagaaaaaccagcttttgcttggaatcagacacgctacccggccacagactgtgatgccctcttctgttctttcgagtgacagcatgcacatcggactccttgcagcagcagctcatgctgctgcaacaaacagccgcttcacaattttctataatcctagggcaagtccaacagaatttgttatacccctttcgaaatacatcaaggctgtttttcacacgcggatatcagttgggatgcgattcaggatgttatttgagactgaggaatcaagtgtccgcaggtacatggggacaataacagaagtgagtgatgctgacccagtgcgttggcctagttcctattggagatcagtgaaggttggttgggatgaatcaaccgcaggagaaaggccacctagagtttctctgtgggaaattgagccactgacaacctttcctatgtatccatccctgttcccactgcgagttaagcatccttggtattcaggacttgctgctcttcatgatgacagcaatgctttgatgtggctgagaggagtaaccggtgaagggggctttcattctttgaacttccagtcacctggtataggttcctggggacaacagagactccatccatccttacttagcaatgaccatgatcagtatcaagcagtggttgctgccgcagctgcctcccagtccggtggttatctgaagcagcaattcctacaccttcaacaacctatgcagtccccacaggagcagtgcaatctcaatccgctgttgcagcaacaaatactacagcaagcgagccaacagcagatggttagttctgatgctcaaaatattcagtccgtgctcaacccaggtgctattcagcagcagctccaccaactccagcagatgcagcatactcataatgaccagaagcaaaagattcaaccagatcaacagtaccaagttgctagcagtgcggttctcccgagtccaacatcattaccaagccatttgcgtgaaaaatttggcttctctgatcctaatgtgaactcttccagcttcatcagctctagcagcaacgaaaacatgctggaatcaaacttccttcaggtaagttcaaaatccgtggatttgtctagattcaaccaaccagtagttagcgagcagcagcagccgcaacaacaacaggcatggaagcaaaagtttatgggctcacagtcaatgtcttttgggggctcggtttcgcttaactcgcccactagcaaagatggttctgttgacaacaaagttggtcgtgatgtgcagaaccagtccctttttagccctcaagtcgactcttcctccctactgtacaatatggtttacaagtcaggatcagtggggagatccttggacatcacccggttctctaattatgctgaacttcgagaggaactgggtcagatgttcggcattaagggtcagttggacgaccctgatagatcaggctggcagcttgtatttgtcgacagggagaacgatgtgcttctccttggagacgacccgtgggatgtatggtacatcaagatactttcacctgaggatgtgcataagatgggaaagccaggaaacgatccacgctacctatcttagctacctatcttaaatcgatacatggagctctttctggctcccatgacgattctgcggcacactgcagcactgttcacgacggccctgctctactgtgctcgcatgttcgcccgtgtcatctctactctctagcatgcacaccgtgctcgtcttcagaagacgaactccccgtcgcttgtatccggtgcaggtcacccgctcctggactgatattttgtaggttccacgtaggaatcagtatcagcaactctatcctagtttgtggtaggctcgcgcggcgctcgttcctgtgtcgcatcaggatcttcggactaaaatgcgtagtcgaaaccgttctcgtgattcgtaagctattcatgtatttgaggattcctcgacatgctttcgacgatgaactgcaataatctgaatgcaggaggattgtttgagatttgtacttcagttttgtgtctgccggtttgcagggttgctgtgatgacgtttcaggtgttctctgtctgaaactattttttatggattggcgagttggtgaccgct

SEQ ID NO: 18891 - DNA, 3070 bp, Zea Mays
ccaccccacaccctctcccatctctctctccgtgccctcctcctcccccccagtccgccccacccttccggccctccccctcttttatatccagtaccatggtgatctccgagctcgggtgagctgatgagagaagaagtgcctcaactcggagctgtggcacgcctgcgccggcccgctcgtctgcctccccaccgtcggtacgcgcgtcgtctacttcccgcagggccacagcgagcaggtggcagcgtcgacgaacaaggaggtggacgggcacatccccaactaccccaacctgccgccgcagctgatctgccagctccatgatgtcacaatgcatgcggatgtggagacagacgaagtgtacgcgcagatgacgctgcagccgctcaatccacaagagcagaacgacgcgtacctgcctgccgagatgggaatcatgagcaagcagccgacgaattacttctgcaagacgctgactgcgagcgacaccagcacgcacggcgggttctctgtgccccgtcgtgcggccgagcgcgtcttccccccgctgtgtggtttgtaggatttcacacagcagcctccagcacaggagcttattgcacgggatattcatgatgttgagtggaagttcaggcatatcttccgaggccagcccaaaagacacctgctgacgactggctggagtgtgtttgtcagtgctaagagacttgttgctggagattctgtgctattcatatggaatgagaaaaaccagcttttgcttggaatcagacacgctacccggccacagactgtgatgccctcttctgttctttcgagtgacagcatgcacatcggactccttgcagcagcagctcatgctgctgcaacaaacagccgcttcacaattttctataatcctagggcaagtccaacagaatttgttatacccctttcgaaatacatcaaggctgtttttcacacgcggatatcagttgggatgcgattcaggatgttatttgagactgaggaatcaagtgtccgcaggtacatggggacaataacagaagtgagtgatgctgacccagtgcgttggcctagttcctattggagatcagtgaaggttggttgggatgaatcaaccgcaggagaaaggccacctagagtttctctgtgggaaattgagccactgacaacctttcctatgtatccatccctgttcccactgcgagttaagcatccttggtattcaggacttgctgctcttcatgatgacagcaatgctttgatgtggctgagaggagtaaccggtgaagggggctttcattctttgaacttccagtcacctggtataggttcctggggacaacagagactccatccatccttacttagcaatgaccatgatcagtatcaagcagtggttgctgccgcagctgcctcccagtccggtggttatctgaagcagcaattcctacaccttcaacaacctatgcagtccccacaggagcagtgcaatctcaatccgctgttgcagcaacaaatactacagcaagcgagccaacagcagatggttagttctgatgctcaaaatattcagtccgtgctcaacccaggtgctattcagcagcagctccaccaactccagcagatgcagcatactcataatgaccagaagcaaaagattcaaccagatcaacagtaccaagttgctagcagtgcggttctcccgagtccaacatcattaccaagccatttgcgtgaaaaatttggcttctctgatcctaatgtgaactcttccagcttcatcagctctagcagcaacgaaaacatgctggaatcaaacttccttcaggtaagttcaaaatccgtggatttgtctagattcaaccaaccagtagttagcgagcagcagcagccgcaacaacaacaggcatggaagcaaaagtttatgggctcacagtcaatgtcttttgggggctcggtttcgcttaactcgcccactagcaaagatggttctgttgacaacaaagttggtcgtgatgtgcagaaccagtccctttttagccctcaagtcgactcttcctccctactgtacaatatggtacctaatcttacctcaaatgttgctgataataatatatcagcgtttccctctggatcaacatatctgcaaagtccaatgtatggttgtctggatgactcttctggtttattgcaaaatacaggagagaatgatccgacaactagaacttttgttaaggtttacaagtcaggatcagtggggagatccttggacatcacccggttctctaattatgctgaacttcgagaggaactgggtcagatgttcggcattaagggtcagttggacgaccctgatagatcaggctggcagcttgtatttgtcgacagggagaacgatgtgcttctccttggagacgacccgtgggagtcatttgtgaatagtgtatggtacatcaagatactttcacctgaggatgtgcataagatgggaaagccaggaaacgatccacgctacctatcttagctacctatcttaaatcgatacatggagctctttctggctcccatgacgattctgcggcacactgcagcactgttcacgacggccctgctctactgtgctcgcatgttcgcccgtgtcatctctactctctagcatgcacaccgtgctcgtcttcagaagacgaactccccgtcgcttgtatccggtgcaggtcacccgctcctggactgatattttgtaggttccacgtaggaatcagtatcagcaactctatcctagtttgtggtaggctcgcgcggcgctcgttcctgtgtcgcatcaggatcttcggactaaaatgcgtagtcgaaaccgttctcgtgattcgtaagctattcatgtatttgaggattcctcgacatgctttcgacgatgaactgcaataatctgaatgcaggaggattgtttgagatttgtacttcagttttgtgtctgccggtttgcagggttgctgtgatgacgtttcaggtgttctctgtctgaaactattttttatggattggcgagttggtgaccgct

SEQ ID NO: 18892 - DNA, 3300 bp, Zea Mays
ccaccccacaccctctcccatctctctctccgtgccctcctcctcccccccagtccgccccacccttccggccctccccctcttttatatccagtaccatggtgatctccgagctcgggtgagctgatgagaatgcggccgatttgaggaaggctgtgggcgcgatggatgcggtttcgggcggattcgctaggaggctgtagaggttaggttccggtgtcccccggcccggccggtcgtgggagatgagctcctcgtccgcggccagcatcgggcagccgccgccgcccgcgccgccgccggaagaagagaagaagtgcctcaactcggagctgtggcacgcctgcgccggcccgctcgtctgcctccccaccgtcggtacgcgcgtcgtctacttcccgcagggccacagcgagcaggtggcagcgtcgacgaacaaggaggtggacgggcacatccccaactaccccaacctgccgccgcagctgatctgccagctccatgatgtcacaatgcatgcggatgtggagacagacgaagtgtacgcgcagatgacgctgcagccgctcaatccacaagagcagaacgacgcgtacctgcctgccgagatgggaatcatgagcaagcagccgacgaattacttctgcaagacgctgactgcgagcgacaccagcacgcacggcgggttctctgtgccccgtcgtgcggccgagcgcgtcttccccccgctggatttcacacagcagcctccagcacaggagcttattgcacgggatattcatgatgttgagtggaagttcaggcatatcttccgagcccaaaagacacctgctgacgactggctggagtgtgtttgtcagtgctaagagacttgttgctggagattctgtgctattcatatggaatgagaaaaaccagcttttgcttggaatcagacacgctacccggccacagactgtgatgccctcttctgttctttcgagtgacagcatgcacatcggactccttgcagcagcagctcatgctgctgcaacaaacagccgcttcacaattttctataatcctagggcaagtccaacagaatttgttatacccctttcgaaatacatcaaggctgtttttcacacgcggatatcagttgggatgcgattcaggatgttatttgagactgaggaatcaagtgtccgcaggtacatggggacaataacagaagtgagtgatgctgacccagtgcgttggcctagttcctattggagatcagtgaaggttggttgggatgaatcaaccgcaggagaaaggccacctagagtttctctgtgggaaattgagccactgacaacctttcctatgtatccatccctgttcccactgcgagttaagcatccttggtattcaggacttgctgctcttcatgatgacagcaatgctttgatgtggctgagaggagtaaccggtgaagggggctttcattctttgaacttccagtcacctggtataggttcctggggacaacagagactccatccatccttacttagcaatgaccatgatcagtatcaagcagtggttgctgccgcagctgcctcccagtccggtggttatctgaagcagcaattcctacaccttcaacaacctatgcagtccccacaggagcagtgcaatctcaatccgctgttgcagcaacaaatactacagcaagcgagccaacagcagatggttagttctgatgctcaaaatattcagtccgtgctcaacccaggtgctattcagcagcagctccaccaactccagcagatgcagcatactcataatgaccagaagcaaaagattcaaccagatcaacagtaccaagttgctagcagtgcggttctcccgagtccaacatcattaccaagccatttgcgtgaaaaatttggcttctctgatcctaatgtgaactcttccagcttcatcagctctagcagcaacgaaaacatgctggaatcaaacttccttcaggtaagttcaaaatccgtggatttgtctagattcaaccaaccagtagttagcgagcagcagcagccgcaacaacaacaggcatggaagcaaaagtttatgggctcacagtcaatgtcttttgggggctcggtttcgcttaactcgcccactagcaaagatggttctgttgacaacaaagttggtcgtgatgtgcagaaccagtccctttttagccctcaagtcgactcttcctccctactgtacaatatggtacctaatcttacctcaaatgttgctgataataatatatcagcgtttccctctggatcaacatatctgcaaagtccaatgtatggttgtctggatgactcttctggtttattgcaaaatacaggagagaatgatccgacaactagaacttttgttaaggtaagtataatcgagtctactaaaaacaaatttaagcccttcctcatgtaatcattttttaaaattcaggtttacaagtcaggatcagtggggagatccttggacatcacccggttctctaattatgctgaacttcgagaggaactgggtcagatgttcggcattaagggtcagttggacgaccctgatagatcaggctggcagcttgtatttgtcgacagggagaacgatgtgcttctccttggagacgacccgtgggagtcatttgtgaatagtgtatggtacatcaagatactttcacctgaggatgtgcataagatgggaaagccaggaaacgatccacgctacctatcttagctacctatcttaaatcgatacatggagctctttctggctcccatgacgattctgcggcacactgcagcactgttcacgacggccctgctctactgtgctcgcatgttcgcccgtgtcatctctactctctagcatgcacaccgtgctcgtcttcagaagacgaactccccgtcgcttgtatccggtgcaggtcacccgctcctggactgatattttgtaggttccacgtaggaatcagtatcagcaactctatcctagtttgtggtaggctcgcgcggcgctcgttcctgtgtcgcatcaggatcttcggactaaaatgcgtagtcgaaaccgttctcgtgattcgtaagctattcatgtatttgaggattcctcgacatgctttcgacgatgaactgcaataatctgaatgcaggaggattgtttgagatttgtacttcagttttgtgtctgccggtttgcagggttgctgtgatgacgtttcaggtgttctctgtctgaaactattttttatggattggcgagttggtgaccgct

SEQ ID NO: 18893 - DNA, 854 bp, Zea Mays
attcctcctgatgaaggttcgtcggcccaaaccaagtagcgtctagggttttagcctctccaaccgcacgatggacaccgacgcgagaaggcagggggagagaaaatggcgtatttgtcccgcacagccgccgccgtcgccgtcgccgtgaggtcggcggtccgctccgcacctctcactggccgcgtcctcggagcgccactgccttcccttgcctcgccttccgctgcccggtccgcccgaatcctccgcaggacggcggccgcggcgtcggcggggctggagactctaatgccgctgcacagcgcggtggcggccgcgcggcttaggtcctgcatcgtcgtcgactcctcgtgctggagctcgctctcgcaaggtttaaacaagcgcatctgatcatggctaggagctgagcacagaagagaagtgaggacaacgagttagaacgaagtcatctcttttgcagatatttgtaacattttggtcatgagctatgctgaaggaaaaaacttgtacttgtaataaaaaaacacttcagttttttctttaggatatgctttgcctttatgagaggagaggtgcacctgaagaaaccaatgaacattaggaattacaaacaagggctgtaataatgtgattgttgtaaactaattttacctttgatgttcattgaatcatccacagatgtacaactggcatttgttgatgttgggattttatttacgtggatccatgaattacctgcagctcctctttcaaacggttgcttcattattggcattgggatgctcagatattattttcaattccgatgtaggcatcacttgaaatagcttcaattatgtgccttcctt

SEQ ID NO: 18894 - DNA, 1445 bp, Zea Mays
tttccccacccggtttccagaaagcgcgaggacacgcccgtcatggctcctacatcaacagttcagcagccgccgaatgcagatccaacggttgctatttaaaagacatactctgagacaaaaggccataatttcacactgaatgcttcatttgatgagattactgctagtgaatatgatggattggtaattcctggagggcgtgcaccagaataccttgcgatggatgaaaaggtgcttgacctagtcagaatgttctctggtgctaagaagcctattgcatcagtttgtcatggacagttgattttagcggcagcaagagtagtcgagaaccgtacctgcacagcatttccggctgttaaaccagttttggttgctgctggtgccaagtgggaagagcctgacacaatggcaaaatgcactgttgatggcaatctcatcacagcagcgacttataattctcatcccgaattcatcagcctatttgtcaaagcactcggaggttcagtggcaggctcagataagagaatactgttcctatgtggggactacatggaggattatgaggtcatggtcccattccaggctctccaagctcttggctgccatgtcgatgccgtttgccccgacaagggagctggggagacgtgcccgacagccattcatgatttcgaaggtgaccagacctacagcgagaagcctggccacgattttactctgacagcgtcgtttggaagtgtggatgcttcgagctacgacgcgcttgtggttcctggcggacgggctccagagtacctggctctgaacgataaggtcatcagcttggtgaaggccttcgcggagagcggaaagccaatcgcgtcgatctgccacggccagcagatattatccgctgccggagtcctcaaggggaagaagtgcaccgcatacccagccgtgaagctgaacgtgttgctcggtggcgggacctggctggagcctgacccgatccaccgctgcttcaccgatggcaaccttgtgaccggcgcagcctggccaggccacccagagttcgtgtcccagctcatggcgttgctcggcgtcaaggtttccttctgaagtccaaactgaaagggcaaggcagaaagagctctggctcaacctggggaggggcgtgatagcatagctttggatttccagatagaagagaacagactcaaaacgacaccttatagcgatcgctgcacttaatccttgttccatgcgcagcaagcctcaggcttattacccttgtttgtcagcgttgtgtaaaaactgtaacccggatgctgtttcttcttcttcttcttggttccttcttttttctgagtcgtcctttgtggattcaaataataaataaagtcttgtatactgctgtttgttgatctggtactgtgcttcgagcagctagatggccaacaaagaaa

SEQ ID NO: 18895 - DNA, 2271 bp, Zea Mays
tagaaaaaatatgaaatgcgtggatggaagcgaaatagaggcgctgggccgctggcacggagaaacaacgcagcgtaaggcgcgccagccgtggacgtgtacgtgtacccgtgtcgtgtctaaacggacttcctcatctccgcgtctatttaaggcccactcctcgcatcgcctttaactcccatcccagatcaggattagccgaccacccgccgaaggccagagagaaatatctcatcttctctccaccggatcggttcaatcgagagcgagggagaaagggaggtggtgcgtcgaggggggccgagattttgccggtttggagccagataggggtatgagctgcttcgcgcaccgccgccgctccgacgtcgcccgccgccaggacggcctcctcgtcttcgtcttcttcctctcgattcccggcgaagccggcggctggtatggatcccaatggcctcaaaactggagatattttgttctcacctggttggctggttccgtatgaatctcgtcctgatctcaaataaataaatgaaaaaaatccaggccttttgctcccgaccatcgagaggcggtgcacgtcgcctccatccgtcattgtcatcggcggtggcatctcgggcgttgcagctgcccgtgccctctccaattcttcatttaaggtgactgttttggaatcgagagatcgtattggcgggcgcattcatactgataactcgtttggatgcccaattgatatgggagcctcatggctacacggcgtgtgcaatgagaatccactggcaccattgataagctatcttgggctgaggttataccgcacaagcgatgataactcagttctgtatgatcatgatttagaaagctatgctctctttgataaggatggtaatcaggtcccaaaggagacagtcgataaagttggagaaacattcgagagaattcttgaagagacggtgaaagtgcgcgatgagcaggaacacgacatgccactgctacaggcaatttctattgtgtttgagaggcacccccatctaaagcttgaagggctagatgatcaggtcttacaatggtgtgtctgccggcttgaggcatggtttgctgcagatgcagatgaaatatctctgaagaactgggatcaggagcgtgttcttactggtggacatggactgatggtaaatgggtactatcctgttattgaagctcttgctcaaggtcttgacatcaggcttaaccaaagggtcaccgaaattacccgccagcacaatggagtcaaggtcactactgaagatggcacaagctacttggccgacgcctgcataatctcagtgccactcggcgtgctcaaggcgaacgtaataaagttcgagcctgagctgccccagtggaagagctccgccatcgccgacctcggcgtgggcaccgagaacaagatcgccatgcacttcgacagggtcttttggcccaacgtcgaggtgctgggaatggtcgggccgacgcccaaagcctgtgggtacttcctgaacctgcacaaagccaccggcaatccggtcctcgtgtacatggccgccggaaggttcgcccaggaggtggagaagctgtcggacaaggaagccgtcggcctggtcgtttctcacctgaagaagatgctcccggatgccactgaaccgacgcagtacctggtgtcgcgatggggctccgaccccaactccctggggtcctactcgtgcgacctggtcgcgaagccggccgacgtgtgcgcgaggttcgccgcccccgtcgagaacctgcacttcgccggcgaggcggccagtgccgagcactcggggtccgtgcacggcgcctactcgtcgggcatcgccgctgccgaggaatgcaggaagcggctcctggcgctgaagggcatcccggacctggtccaggtcgcggcgtgggaggagatggccggagctgtggctcctctgcagatttgcaggacctgagtgagattggatcactggctgcctttggacattggagtggatcgtggatcgcttcgctgctccctgatggttgccgagtctttttttatatttaccttaccttgaaggccgttgtgtcttgtctggaataaatcaagattgactggcactgaaagtgtcatcgcgtcactctttcatacttattaataaatatcacaagtctgtcctgagatctcagcctggtgcctgcgtgctgcctttgccttgtatatgacgttttactttcttttagtctcaattattcaaa

SEQ ID NO: 18896 - DNA, 2057 bp, Zea Mays
tagaaaaaatatgaaatgcgtggatggaagcgaaatagaggcgctgggccgctggcacggagaaacaacgcagcgtaaggcgcgccagccgtggacgtgtacgtgtacccgtgtcgtgtctaaacggacttcctcatctccgcgtctatttaaggcccactcctcgcatcgcctttaactcccatcccagatcaggattagccgaccacccgccgaaggccagagagaaatatctcatcttctctccaccggatcggttcaatcgagagcgagggagaaagggaggtggtgcgtcgaggggggccgagattttgccggtttggagccagataggggccttttgctcccgaccatcgagaggcggtgcacgtcgcctccatccgtcattgtcatcggcggtggcatctcgggcgttgcagctgcccgtgccctctccaattcttcatttaaggtgactgttttggaatcgagagatcgtattggcgggcgcattcatactgataactcgtttggatgcccaattgatatgggagcctcatggctacacggcgtgtgcaatgagaatccactggcaccattgataagctatcttgggctgaggttataccgcacaagcgatgataactcagttctgtatgatcatgatttagaaagctatgctctctttgataaggatggtaatcaggtcccaaaggagacagtcgataaagttggagaaacattcgagagaattcttgaagagacggtgaaagtgcgcgatgagcaggaacacgacatgccactgctacaggcaatttctattgtgtttgagaggcacccccatctaaagcttgaagggctagatgatcaggtcttacaatggtgtgtctgccggcttgaggcatggtttgctgcagatgcagatgaaatatctctgaagaactgggatcaggagcgtgttcttactggtggacatggactgatggtaaatgggtactatcctgttattgaagctcttgctcaaggtcttgacatcaggcttaaccaaagggtcaccgaaattacccgccagcacaatggagtcaaggtcactactgaagatggcacaagctacttggccgacgcctgcataatctcagtgccactcggcgtgctcaaggcgaacgtaataaagttcgagcctgagctgccccagtggaagagctccgccatcgccgacctcggcgtgggcaccgagaacaagatcgccatgcacttcgacagggtcttttggcccaacgtcgaggtgctgggaatggtcgggccgacgcccaaagcctgtgggtacttcctgaacctgcacaaagccaccggcaatccggtcctcgtgtacatggccgccggaaggttcgcccaggaggtggagaagctgtcggacaaggaagccgtcggcctggtcgtttctcacctgaagaagatgctcccggatgccactgaaccgacgcagtacctggtgtcgcgatggggctccgaccccaactccctggggtcctactcgtgcgacctggtcgcgaagccggccgacgtgtgcgcgaggttcgccgcccccgtcgagaacctgcacttcgccggcgaggcggccagtgccgagcactcggggtccgtgcacggcgcctactcgtcgggcatcgccgctgccgaggaatgcaggaagcggctcctggcgctgaagggcatcccggacctggtccaggtcgcggcgtgggaggagatggccggagctgtggctcctctgcagatttgcaggacctgagtgagattggatcactggctgcctttggacattggagtggatcgtggatcgcttcgctgctccctgatggttgccgagtctttttttatatttaccttaccttgaaggccgttgtgtcttgtctggaataaatcaagattgactggcactgaaagtgtcatcgcgtcactctttcatacttattaataaatatcacaagtctgtcctgagatctcagcctggtgcctgcgtgctgcctttgccttgtatatgacgttttactttcttttagtctcaattattcaaa

SEQ ID NO: 18897 - DNA, 2183 bp, Zea Mays
ttgctccattttttctttgttcgaattgaccgaaattcgctggtgcccttttcctgttctatccccgtcaccctttttcaccccaccccattctccttcttcctccagagtccagacggcgtgcttccgcctgccgccgccggcgagctgcttgcccgcagcatgactccgcatcctggccgcctcgtcctaccaccggcggctccttctccctgaaccccgccgcgcgccaggcaccacgcctccctccgcagtcacacgagcacgcggccgtcctctgccgcaccgcgccgcctccagacgcctcgctcgtcaggtctctccacctccgcctgcgaacgttcggcccagctccggcgagttcctccgcaattccggatctgctggagcgccagcaaggcggtctctccaaccctccggagtccggaccagcaagggacctgggggtgtgtggtgtgatgttgatgttgttgaattttcttattatggtgcaccagccccaacaccaaaggaacaactttatgatgagcttgttgatggattgcgtggtagcgaccctattgtaggctcaggttcacaggtggctagtcttgagacctatgggactttgggtgccattgtgaagagtcaaactggcaataaacaagttgggttccttacaaacaggcatgttgcggttgatctggattatcccaaccagaagatgttccatccgctacctcctaatcttgggcctggagtttacctaggtgccgttgagagagcaacatcatttataacagatgatgtttggtacgggatttacgcaggaacaaacccagaaacttttgtccgagctgatggtgcatttataccgtttgctgatgactttgacattacaagtgtcagcacatcggttaaaggagttggagtcattggtgatgtaaaggcaattgatttgcaatcctcaattggcagtctcattgggagacaagttgtcaaagttggaagaagttctggtctgacaacaggaactgttgtcgcatacgcacttgagtacaatgatgagaagggaatatgcttcttcactgactttcttgtcgttggggagaaccaacaaacatttgatcttgaaggggacagcggaagcctcataatcttgacaggacaagacggtgagaagccacagcctatagggattatttggggtggtacagctaatcggggaaggttgaaacttaaaagtggccagggtccggagaactggaccagtggagttgaccttggccgccttcttgatctcttggagctagatctgatcacaacaagtgaagggctacaagctgccttggaagaacaaaggattactctagccgccgctgctgctgcggcaactaattcaactgccacagaatcgtcacctgttgctggccctcaagagaatgataaaatcgacaaaatctatgaacctctcggcatcaacatcattcctcgggacagttcttccatatcaacagaccaacccaacgagaatgtggaagagctaaacctgatgtctccgatgcgcaacggtcaagaaggcaacggtgacttgaataacttgatggacttggaactggaaaattcacctgatggtatttgtattgccctgaacctgggagagcgggagccaaaaagactccgctcagattttgattcgaccctggacatggacttgcagaaatgaggctgttatgctgcagacttgttgcaggaggctctgcactattcagcttttgtgttgatcattgaaggtatggccataaaggaaataatatgtttctggacgactggacctgttgtcctgcttggagccggtctgggttaagctgtgaagctcctgctgcagttttgcgtctagtgtcaagtgctctagtatatctagtgttgcgtaagatgtcggcacctcaatttgacagaggcgccatacttcttgcccatgtaatgttgtcatttgttgtatgctcgtgtatatgtactacatgaagcattgtaaaattgagcaacagcaaccggagctcgagaatcttaggcgcatgcgcaaccatccaccaaccccgtacctgatgaattgacaataaagctggatattttaggtgtttggaaagtgtgttgctcttggaattttggggagagatttgggtactaactttggtaaaggcagg

SEQ ID NO: 18898 - DNA, 2635 bp, Zea Mays
ctttgttcgaattgaccgaaattcgctggtgcccttttcctgttctatccccgtcaccctttttcaccccaccccattctccttcttcctccagagtccagacggcgtgcttccgcctgccgccgccggcgagctgcttgcccgcagcatgactccgcatcctggccgcctcgtcctaccaccggcggctccttctccctgaaccccgccgcgcgccaggcaccacgcctccctccgcagtcacacgagcacgcggccgtcctctgccgcaccgcgccgcctccagacgcctcgctcgtcaggtctctccacctccgcctgcgaacgttcggcccagctccggcgagttcctccgcaattccggatctgctggagcgccagcaaggcggtctctccaaccctccggagtccggaccagcaagggttctgatctcccatgccacagtttataacgttgaaggattcaaaaatctacagaactagatgatacttgcataatgcagtcctcaggtatttggaaggcgcatgctggttcatcacagtcagagggttcgggtctggatatggagaggaacggatgcaatcataattattgtccatctcctctccaaccaattgcctcagctggtcagcactctgaaagcagcgctgcatacttttcttggcctacatctactctaatgcacgggtcagctgaaggccgtgctaattactttgggaacctacagaagggtgtactaccaggacatcttggtcgcttgccaaagggccagcaagctaccaccttacttgatttaatgattataagagcattccacagcaagatcctccgccggtttagtcttggtacagcaataggctttagaatcaggaaaggaacattgactgacacacctgccatccttgtgtttgttgctcgaaaggttcacaggaagtggctcagcgctactcaatgtcttccaactgcccttgagggacctgggggtgtgtggtgtgatgttgatgttgttgaattttcttattatggtgcaccagccccaacaccaaaggaacaactttatgatgagcttgttgatggattgcgtggtagcgaccctattgtaggctcaggttcacaggcatgttgcggttgatctggattatcccaaccagaagatgttccatccgctacctcctaatcttgggcctggagtttacctaggtgccgttgagagagcaacatcatttataacagatgatgtttggtacgggatttacgcaggaacaaacccagaaacttttgtccgagctgatggtgcatttataccgtttgctgatgactttgacattacaagtgtcagcacatcggttaaaggagttggagtcattggtgatgtaaaggcaattgatttgcaatcctcaattggcagtctcattgggagacaagttgtcaaagttggaagaagttctggtctgacaacaggaactgttgtcgcatacgcacttgagtacaatgatgagaagggaatatgcttcttcactgactttcttgtcgttggggagaaccaacaaacatttgatcttgaaggggacagcggaagcctcataatcttgacaggacaagacggtgagaagccacagcctatagggattatttggggtggtacagctaatcggggaaggttgaaacttaaaagtggccagggtccggagaactggaccagtggagttgaccttggccgccttcttgatctcttggagctagatctgatcacaacaagtgaagggctacaagctgccttggaagaacaaaggattactctagccgccgctgctgctgcggcaactaattcaactgccacagaatcgtcacctgttgctggccctcaagagaatgataaaatcgacaaaatctatgaacctctcggcatcaacatcattcctcgggacagttcttccatatcaacagaccaacccaacgagaatgtggaagagctaaacctgatgtctccgatgcgcaacggtcaagaaggcaacggtgacttgaataacttgatggacttggaactggaaaattcacctgatggtatttgtattgccctgaacctgggagagcgggagccaaaaagactccgctcagattttgattcgaccctggacatggacttgcagaaatgaggctgttatgctgcagacttgttgcaggaggctctgcactattcagcttttgtgttgatcattgaaggtatggccataaaggaaataatatgtttctggacgactggacctgttgtcctgcttggagccggtctgggttaagctgtgaagctcctgctgcagttttgcgtctagtgtcaagtgctctagtatatctagtgttgcgtaagatgtcggcacctcaatttgacagaggcgccatacttcttgcccatgtaatgttgtcatttgttgtatgctcgtgtatatgtactacatgaagcattgtaaaattgagcaacagcaaccggagctcgagaatcttaggcgcatgcgcaaccatccaccaaccccgtacctgatgaattgacaataaagctggatattttaggtgtttggaaagtgtgttgctcttggaattttggggagagatttgggtactaactttggtaaaggcagg

SEQ ID NO: 18899 - DNA, 2267 bp, Zea Mays
gtattgtgcatgtttctactgaatccatgcttcctttgtgcacttttactgggttctgatctcccatgccacagtttataacgttgaaggattcaaaaatctacagaactagatgatacttgcataatgcagtcctcaggtatttggaaggcgcatgctggttcatcacagtcagagggttcgggtctggatatggagaggaacggatgcaatcataattattgtccatctcctctccaaccaattgcctcagctggtcagcactctgaaagcagcgctgcatacttttcttggcctacatctactctaatgcacgggtcagctgaaggccgtgctaattactttgggaacctacagaagggtgtactaccaggacatcttggtcgcttgccaaagggccagcaagctaccaccttacttgatttaatgattataagagcattccacagcaagatcctccgccggtttagtcttggtacagcaataggctttagaatcaggaaaggaacattgactgacacacctgccatccttgtgtttgttgctcgaaaggttcacaggaagtggctcagcgctactcaatgtcttccaactgcccttgagggacctgggggtgtgtggtgtgatgttgatgttgttgaattttcttattatggtgcaccagccccaacaccaaaggaacaactttatgatgagcttgttgatggattgcgtggtagcgaccctattgtaggctcaggttcacagcaggcatgttgcggttgatctggattatcccaaccagaagatgttccatccgctacctcctaatcttgggcctggagtttacctaggtgccgttgagagagcaacatcatttataacagatgatgtttggtacgggatttacgcaggaacaaacccagaaacttttgtccgagctgatggtgcatttataccgtttgctgatgactttgacattacaagtgtcagcacatcggttaaaggagttggagtcattggtgatgtaaaggcaattgatttgcaatcctcaattggcagtctcattgggagacaagttgtcaaagttggaagaagttctggtctgacaacaggaactgttgtcgcatacgcacttgagtacaatgatgagaagggaatatgcttcttcactgactttcttgtcgttggggagaaccaacaaacatttgatcttgaaggggacagcggaagcctcataatcttgacaggacaagacggtgagaagccacagcctatagggattatttggggtggtacagctaatcggggaaggttgaaacttaaaagtggccagggtccggagaactggaccagtggagttgaccttggccgccttcttgatctcttggagctagatctgatcacaacaagtgaagggctacaagctgccttggaagaacaaaggattactctagccgccgctgctgctgcggcaactaattcaactgccacagaatcgtcacctgttgctggccctcaagagaatgataaaatcgacaaaatctatgaacctctcggcatcaacatcattcctcgggacagttcttccatatcaacagaccaacccaacgagaatgtggaagagctaaacctgatgtctccgatgcgcaacggtcaagaaggcaacggtgacttgaataacttgatggacttggaactggaaaattcacctgatggtatttgtattgccctgaacctgggagagcgggagccaaaaagactccgctcagattttgattcgaccctggacatggacttgcagaaatgaggctgttatgctgcagacttgttgcaggaggctctgcactattcagcttttgtgttgatcattgaaggtatggccataaaggaaataatatgtttctggacgactggacctgttgtcctgcttggagccggtctgggttaagctgtgaagctcctgctgcagttttgcgtctagtgtcaagtgctctagtatatctagtgttgcgtaagatgtcggcacctcaatttgacagaggcgccatacttcttgcccatgtaatgttgtcatttgttgtatgctcgtgtatatgtactacatgaagcattgtaaaattgagcaacagcaaccggagctcgagaatcttaggcgcatgcgcaaccatccaccaaccccgtacctgatgaattgacaataaagctggatattttaggtgtttggaaagtgtgttgctcttggaattttggggagagatttgggtactaactttggtaaaggcagg

SEQ ID NO: 18900 - DNA, 2342 bp, Zea Mays
catgtttctactgaatccatgcttcctttgtgcacttttactgggttctgatctcccatgccacagtttataacgttgaaggattcaaaaatctacagaactagatgatacttgcataatgcagtcctcaggtatttggaaggcgcatgctggttcatcacagtcagagggttcgggtctggatatggagaggaacggatgcaatcataattattgtccatctcctctccaaccaattgcctcagctggtcagcactctgaaagcagcgctgcatacttttcttggcctacatctactctaatgcacgggtcagctgaaggccgtgctaattactttgggaacctacagaagggtgtactaccaggacatcttggtcgcttgccaaagggccagcaagctaccaccttacttgatttaatgattataagagcattccacagcaagatcctccgccggtttagtcttggtacagcaataggctttagaatcaggaaaggaacattgactgacacacctgccatccttgtgtttgttgctcgaaaggttcacaggaagtggctcagcgctactcaatgtcttccaactgcccttgagggacctgggggtgtgtggtgtgatgttgatgttgttgaattttcttattatggtgcaccagccccaacaccaaaggaacaactttatgatgagcttgttgatggattgcgtggtagcgaccctattgtaggctcaggttcacaggtggctagtcttgagacctatgggactttgggtgccattgtgaagagtcaaactggcaataaacaagttgggttccttacaaacaggcatgttgcggttgatctggattatcccaaccagaagatgttccatccgctacctcctaatcttgggcctggagtttacctaggtgccgttgagagagcaacatcatttataacagatgatgtttggtacgggatttacgcaggaacaaacccagaaacttttgtccgagctgatggtgcatttataccgtttgctgatgactttgacattacaagtgtcagcacatcggttaaaggagttggagtcattggtgatgtaaaggcaattgatttgcaatcctcaattggcagtctcattgggagacaagttgtcaaagttggaagaagttctggtctgacaacaggaactgttgtcgcatacgcacttgagtacaatgatgagaagggaatatgcttcttcactgactttcttgtcgttggggagaaccaacaaacatttgatcttgaaggggacagcggaagcctcataatcttgacaggacaagacggtgagaagccacagcctatagggattatttggggtggtacagctaatcggggaaggttgaaacttaaaagtggccagggtccggagaactggaccagtggagttgaccttggccgccttcttgatctcttggagctagatctgatcacaacaagtgaagggctacaagctgccttggaagaacaaaggattactctagccgccgctgctgctgcggcaactaattcaactgccacagaatcgtcacctgttgctggccctcaagagaatgataaaatcgacaaaatctatgaacctctcggcatcaacatcattcctcgggacagttcttccatatcaacagaccaacccaacgagaatgtggaagagctaaacctgatgtctccgatgcgcaacggtcaagaaggcaacggtgacttgaataacttgatggacttggaactggaaaattcacctgatggtatttgtattgccctgaacctgggagagcgggagccaaaaagactccgctcagattttgattcgaccctggacatggacttgcagaaatgaggctgttatgctgcagacttgttgcaggaggctctgcactattcagcttttgtgttgatcattgaaggtatggccataaaggaaataatatgtttctggacgactggacctgttgtcctgcttggagccggtctgggttaagctgtgaagctcctgctgcagttttgcgtctagtgtcaagtgctctagtatatctagtgttgcgtaagatgtcggcacctcaatttgacagaggcgccatacttcttgcccatgtaatgttgtcatttgttgtatgctcgtgtatatgtactacatgaagcattgtaaaattgagcaacagcaaccggagctcgagaatcttaggcgcatgcgcaaccatccaccaaccccgtacctgatgaattgacaataaagctggatattttaggtgtttggaaagtgtgttgctcttggaattttggggagagatttgggtactaactttggtaaaggcagg

SEQ ID NO: 18901 - DNA, 2271 bp, Zea Mays
ctgaatccatgcttcctttgtgcacttttactgggttctgatctcccatgccacagtttataacgttgaaggattcaaaaatctacagaactagatgatacttgcataatgcagtcctcaggtatttggaaggcgcatgctggttcatcacagtcagagggttcgggtctggatatggagaggaacggatgcaatcataattattgtccatctcctctccaaccaattgcctcagctggtcagcactctgaaagcagcgctgcatacttttcttggcctacatctactctaatgcacgggtcagctgaaggccgtgctaattactttgggaacctacagaagggtgtactaccaggacatcttggtcgcttgccaaagggccagcaagctaccaccttacttgatttaatgattataagagcattccacagcaagatcctccgccggtttagtcttggtacagcaataggctttagaatcaggaaaggaacattgactgacacacctgccatccttgtgtttgttgctcgaaaggttcacaggaagtggctcagcgctactcaatgtcttccaactgcccttgagccccaacaccaaaggaacaactttatgatgagcttgttgatggattgcgtggtagcgaccctattgtaggctcaggttcacaggtggctagtcttgagacctatgggactttgggtgccattgtgaagagtcaaactggcaataaacaagttgggttccttacaaacaggcatgttgcggttgatctggattatcccaaccagaagatgttccatccgctacctcctaatcttgggcctggagtttacctaggtgccgttgagagagcaacatcatttataacagatgatgtttggtacgggatttacgcaggaacaaacccagaaacttttgtccgagctgatggtgcatttataccgtttgctgatgactttgacattacaagtgtcagcacatcggttaaaggagttggagtcattggtgatgtaaaggcaattgatttgcaatcctcaattggcagtctcattgggagacaagttgtcaaagttggaagaagttctggtctgacaacaggaactgttgtcgcatacgcacttgagtacaatgatgagaagggaatatgcttcttcactgactttcttgtcgttggggagaaccaacaaacatttgatcttgaaggggacagcggaagcctcataatcttgacaggacaagacggtgagaagccacagcctatagggattatttggggtggtacagctaatcggggaaggttgaaacttaaaagtggccagggtccggagaactggaccagtggagttgaccttggccgccttcttgatctcttggagctagatctgatcacaacaagtgaagggctacaagctgccttggaagaacaaaggattactctagccgccgctgctgctgcggcaactaattcaactgccacagaatcgtcacctgttgctggccctcaagagaatgataaaatcgacaaaatctatgaacctctcggcatcaacatcattcctcgggacagttcttccatatcaacagaccaacccaacgagaatgtggaagagctaaacctgatgtctccgatgcgcaacggtcaagaaggcaacggtgacttgaataacttgatggacttggaactggaaaattcacctgatggtatttgtattgccctgaacctgggagagcgggagccaaaaagactccgctcagattttgattcgaccctggacatggacttgcagaaatgaggctgttatgctgcagacttgttgcaggaggctctgcactattcagcttttgtgttgatcattgaaggtatggccataaaggaaataatatgtttctggacgactggacctgttgtcctgcttggagccggtctgggttaagctgtgaagctcctgctgcagttttgcgtctagtgtcaagtgctctagtatatctagtgttgcgtaagatgtcggcacctcaatttgacagaggcgccatacttcttgcccatgtaatgttgtcatttgttgtatgctcgtgtatatgtactacatgaagcattgtaaaattgagcaacagcaaccggagctcgagaatcttaggcgcatgcgcaaccatccaccaaccccgtacctgatgaattgacaataaagctggatattttaggtgtttggaaagtgtgttgctcttggaattttggggagagatttgggtactaactttggtaaaggcagg

SEQ ID NO: 18902 - DNA, 1262 bp, Zea Mays
ggagatctaacagtccatatgcctatataaataactaggaccctgcccaagtttcatcgctactcgtcttgtctgattcccccgagctagcctagccagcgagatggcggggatctctcgcgcgatcagggcctgcgccgccacgtcccagcgcaccctggccgctgcttcggcggtgacgctgccgaaggaggcgggggtgaaaccggcaacggtcgggcgcagggggcggggtccggaggacgggaggcgcgtgcagtgggcgttcctcgggtgccccggggtggggaagggcacctacgccagccgcctctcgcagctgctcggcgtcccacacattgccaccggcgacctcgtccgcgacgccctggcctcccctggccccttctcgaaaaagcttgctgagattgtcaatcaaggaaaactggtgtctgatgagatcatcataaatctgctgtcaagacgcctggaagagggagaagaaaagggtgaattggggttcatccttgatggctttcctcgaaccatgagacaagcggagatacttgaaggagtcacaaatattgacttggtgatcaatctcaagcttcgagaagaagctctggttgcaagatgtcttggcagaaggatgtgcagccagtgtggagaaaacttcaatgtggcctccattgatattgagggagaaaatggtggagctccaatgtacctgcctccactattgcctccgccacagtgtgaatcgaagctaataaccagagcagatgatactgaagaagtggtaaagaaccggctacgtgtgtaccatgatctgactgaaccagtggagggattctacaaagcgcgtcaaaagctcttggagttcaatatacctggtggaatacccgaatcatggcgaaagttattggaagccttgaacatagaagactccaacaatatgagatctgcagtagcatgatttttttttaggaatgcacattaaattaaacatctgtagcttatgtcaaagttagtcaatttttctgaacattccttatatctttagaaagcacggtcgaatttggattgagattagattatttggcgtagcactctaactgtacagtagatttgtgatcgatgggcaagatgaacgaaagcggtctgtaaaaggaaagaaatagttgttcgatgaccagacatttatttgtagcctgtaccatatatgaacttgttgaaagaggtgcataccagaagcaatttgaatcgttgtggatatgattgaa

SEQ ID NO: 18903 - DNA, 1110 bp, Zea Mays
atggcggggatctctcgcgcgatcagggcctgcgccgccacgtcccagcgcaccctggccgctgcttcggcggtgacgctgccgaaggaggcgggggtgaaaccggcaacggtcgggcgcagggggcggggtccggaggacgggaggcgcgtgcagtgggcgttcctcgggtgccccggggtggggaagggcacctacgccagccgcctctcgcagctgctcggcgtcccacacattgccaccggcgacctcgtccgcgacgccctggcctcccctggccccttctcgaaaaagcttgctgagattgtcaatcaaggaaaactggtgtctgatgagatcatcataaatctgctgtcaagacgcctggaagagggagaagaaaagggtgaattggggttcatccttgatggctttcctcgaaccatgagacaagcggagatacttgaaggagtcacaaatattgacttggtgatcaatctcaagcttcgagaagaagctctggttgcaagatgtcttggcagaaggatgtgcagccagtgtggagaaaacttcaatgtggcctccattgatattgagggagaaaatggtggagctccaatgtacctgcctccactattgcctccgccacagtgtgaatcgaagctaataaccagagcagatgatactgaagaagtggtaaagaaccggctacgtgtgtaccatgatctgactgaaccggtggagggattctacaaagcgcgtcaaaagctcttggagttcaatatacctggtggaatatccgaatcatggcgaaagttattggaagccttgaatatagaagactccgacaatatgagatctgcagcagcatgattttttttaggaatgcacgttaaattaaacatctgtagcttatgtcaaagttagtcaatttttctgaacattccttatatctttagaaagcatggtcaaatctggatcgatatttgattattttagcgtagcactctaactgtacagtagattagtcatcgatgggcaagatgaacaaaagcggtctgtaaaaggaaagagatagttgttcgatgaccagacattcatttgtagcctgtaccatatatgaacttgttg

SEQ ID NO: 18904 - DNA, 1553 bp, Zea Mays
aacggctctgcgacttctccgggcaccgcttgcacgccatcagcgccatccccgatacctcaacttgcatatcgcgcgccgccatccaccttgcccatcgtgtgtcgcatgcccaaatctcatatttttatgccccacgcagcctaggccatcccaccgcagagcaggaaaaccctagcgtacccacggaccattgctggcccacatggcatcccggcctgtggccacatccatctcggcgcctcgcccgccacacccaacacgctgcaccgccgctgccgcttctcctcccccaccgcaccatcgccctgagtaccaccgcacacgccgccggggccgcatctctccccgtcagggcccagccgaacactgtcgtcgcctccacctccgcgtttgggccaccgcaagagttcagggctcctctagggttcgagatcaaatccggccagtagagcagcatcctcagcaccacgctcaccatccccctctacctcggcaccggcgtcttcaccctcggattcctgatcagcaggagagtcgttgaggctgagacgacggcacgaatgcggcaaggagcttcagattcactgccattagaaacttgcaggtaagaaatactgtggtggtttggacctcagttattggccagatgaagggcggaggccattatcagatcctcgtccacctttgggctactgctgataagaggacgagtgtcgtacacctctccaattccccccttcaatgtggtcagtgctgaatcatctacgtcatacagtgaacaagggcatactgatgagagaagggatgacatggatttttctcattcgagcatcaggttttgtgcgctgattatggtgtggtcgttggtgagactgcaacgccctctgtaatcatctctctgacaagttagattatgtgctgaaatttctgttatttttgttggattgtattgttgtgaaagggggcatagtacgatgaattggggactgaaagagcatagcagagcagagggcctatgtaatataattttttatgtataaattgtgcaaaaacaaattacctcttttgggtttcaatcatttgacaacccttggaccctgacattatattagtttacttaccttgaccttgtgatgagttttggaatatttggaggaggttcacatggaccgaacagcctgtttagtagctttgcttcagcacagtaaactatatttagaacatttggatggtaaactattccaatcgttgttgttacatggtatcagaggatttggcagtcaagtcaatgcctcaattgtgagatatagaaatcgatgataatatatgtcagctccggcgaacgagaaggcgtaccgcagggccatgaagtgcgcctgcctagccgctgcggccgttctccacgaggtccggtcactgagcgtttaccattttatggcccactatctccctccttgtcatggcttggtatggcgtggcgcctggattttagccgctgatcggaattgtcgagtgcgtagggtacaattgggatcgggagattggggcac

SEQ ID NO: 18905 - DNA, 2269 bp, Zea Mays
aacggctctgcgacttctccgggcaccgcttgcacgccatcagcgccatccccgatacctcaacttgcatatcgcgcgccgccatccaccttgcccatcgtgtgtcgcatgcccaaatctcatatttttatgccccacgcagcctaggccatcccaccgcagagcaggaaaaccctagcgtacccacggaccattgctggcccacatggcatcccggcctgtggccacatccatctcggcgcctcgcccgccacacccaacacgctgcaccgccgctgccgcttctcctcccccaccgcaccatcgccctgagtaccaccgcacacgccgccggggccgcatctctccccgtcagggcccagccgaacactgtcgtcgcctccacctccgcgtttgggccaccgcaagagttcagggctcctctagggttcgagatcaaatccggccagtagagcagcatcctcagcaccacgctcaccatccccctctacctcggcaccggcgtcttcaccctcgggtacacaccacgccttttctcaccatctgagcattgccaaggagctcctctccatccccgatggcaccacttcagattcctgatcagcaggagagtcgttgaggctgagacgacggcacgaatgcggcaaggagcttcagattcactgccattagaaacttgcaggtgaggaaggagagggtccaagttcctgacctctgcatcgactgagagggtccaagttcctgacccctgcattgactaattatctttgagtttcatcattatgttgaaattggtatgcgttcaaaatactcaattgattctcacggctaccgtgcctcctagcgaaacttgcttttcgttggagtatctggcgtagtaatggaaaaaattaccttctccctttgagggttcagtccatttcgttctctataattgtcacctacccttcccgagcctacttttgttgctactataagaataagaatgaaataagcttcatctctatttgtttctgatatgaattgtgtagcttagagttgtctcttaacttacaatcttacattggtgtaaaacagtgaccacactaaaagcacaaatgcaaggttttacagaccagttgtgatgctactaccactaacatgtacaaataggaaaggcaagaaaatggcttagagcaagtatttttaaagaaaaagtgatccatttaagaaacctttttattaagttactcctgataccagctcctcattccgcgagtgtcttcagcttcactttctctatctgttgtacgcgggtgtctcttcgtcttgtgtgtgagttggatgagaactagacaactggtaggaaccactctctgtttcagtttctgtttgtgtttcacttcagttcaggttgtctgcgctcttctcttagggatcgagaatcatagggaggttcctcgcttctataagaaatatgtgcctttttgtttcattttccttgtggagttgtagttcagttcagttcatcttcgtgcatggggagtgcttggttcgattgttcacagccataggtgctacagattcgtctatggcgaagacagaagtttttgttttcatgatgttttcatggaagatggcgagaagctctccacccttatcatagttaactcttttgattaagtgattaaccaatttagtaacacatatttaatgttttagcttgtttggtttagatatggaggtccgtcagtaattttgtaattttttgtattatctttatctggaaactaagttgtatgtagtgacaggtaagaaatactgtggtggtttggacctcagttattggccagatgaagggcggaggccattatcagatcctcgtccacctttgggctactgctgataagaggacgagtgtcgtacacctctccaattccccccttcaatgtggtcagtgctgaatcatctacgtcatacagtgaacaagggcatactgatgagagaagggatgacatggatttttctcattcgagcatcaggttttgtgcgctgattatggtgtggtcgttgctccggcgaacgagaaggcgtaccgcagggccatgaagtgcgcctgcctagccgctgcggccgttctccacgaggtccggtcactgagcgtttaccattttatggcccactatctccctccttgtcatggcttggtatggcgtggcgcctggattttagccgctgatcggaattgtcgagtgcgtagggtacaattgggatcgggagattggggcac

SEQ ID NO: 18906 - DNA, 1606 bp, Zea Mays
cttgcacgccatcagcgccatccccgatacctcaacttgcatatcgcgcgccgccatccaccttgcccatcgtgtgtcgcatgcccaaatctcatatttttatgccccacgcagcctaggccatcccaccgcagagcaggaaaaccctagcgtacccacggaccattgctggcccacatggcatcccggcctgtggccacatccatctcggcgcctcgcccgccacacccaacacgctgcaccgccgctgccgcttctcctcccccaccgcaccatcgccctgagtaccaccgcacacgccgccggggccgcatctctccccgtcagggcccagccgaacactgtcgtcgcctccacctccgcgtttgggccaccgcaagagttcagggctcctctagggttcgagatcaaatccggccagtagagcagcatcctcagcaccacgctcaccatccccctctacctcggcaccggcgtcttcaccctcgggtacacaccacgccttttctcaccatctgagcattgccaaggagctcctctccatccccgatggcaccacttcagattcctgatcagcaggagagtcgttgaggctgagacgacggcacgaatgcggcaaggagcttcagattcactgccattagaaacttgcagtgacaggtaagaaatactgtggtggtttggacctcagttattggccagatgaagggcggaggccattatcagatcctcgtccacctttgggctactgctgataagaggacgagtgtcgtacacctctccaattccccccttcaatgtggtcagtgctgaatcatctacgtcatacagtgaacaagggcatactgatgagagaagggatgacatggatttttctcattcgagcatcaggttttgtgcgctgattatggtgtggtcgttggtgagactgcaacgccctctgtaatcatctctctgacaagttagattatgtgctgaaatttctgttatttttgttggattgtattgttgtgaaagggggcatagtacgatgaattggggactgaaagagcatagcagagcagagggcctatgtaatataattttttatgtataaattgtgcaaaaacaaattacctcttttgggtttcaatcatttgacaacccttggaccctgacattatattagtttacttaccttgaccttgtgatgagttttggaatatttggaggaggttcacatggaccgaacagcctgtttagtagctttgcttcagcacagtaaactatatttagaacatttggatggtaaactattccaatcgttgttgttacatggtatcagaggatttggcagtcaagtcaatgcctcaattgtgagatatagaaatcgatgataatatatgtcagctccggcgaacgagaaggcgtaccgcagggccatgaagtgcgcctgcctagccgctgcggccgttctccacgaggtccggtcactgagcgtttaccattttatggcccactatctccctccttgtcatggcttggtatggcgtggcgcctggattttagccgctgatcggaattgtcgagtgcgtagggtacaattgggatcgggagattggggcac

SEQ ID NO: 18907 - DNA, 1510 bp, Zea Mays
cttgcacgccatcagcgccatccccgatacctcaacttgcatatcgcgcgccgccatccaccttgcccatcgtgtgtcgcatgcccaaatctcatatttttatgccccacgcagcctaggccatcccaccgcagagcaggaaaaccctagcgtacccacggaccattgctggcccacatggcatcccggcctgtggccacatccatctcggcgcctcgcccgccacacccaacacgctgcaccgccgctgccgcttctcctcccccaccgcaccatcgccctgagtaccaccgcacacgccgccggggccgcatctctccccgtcagggcccagccgaacactgtcgtcgcctccacctccgcgtttgggccaccgcaagagttcagggctcctctagggttcgagatcaaatccggccagtagagcagcatcctcagcaccacgctcaccatccccctctacctcggcaccggcgtcttcaccctcgggagagtcgttgaggctgagacgacggcacgaatgcggcaaggagcttcagattcactgccattagaaacttgcaggtaagaaatactgtggtggtttggacctcagttattggccagatgaagggcggaggccattatcagatcctcgtccacctttgggctactgctgataagaggacgagtgtcgtacacctctccaattccccccttcaatgtggtcagtgctgaatcatctacgtcatacagtgaacaagggcatactgatgagagaagggatgacatggatttttctcattcgagcatcaggttttgtgcgctgattatggtgtggtcgttggtgagactgcaacgccctctgtaatcatctctctgacaagttagattatgtgctgaaatttctgttatttttgttggattgtattgttgtgaaagggggcatagtacgatgaattggggactgaaagagcatagcagagcagagggcctatgtaatataattttttatgtataaattgtgcaaaaacaaattacctcttttgggtttcaatcatttgacaacccttggaccctgacattatattagtttacttaccttgaccttgtgatgagttttggaatatttggaggaggttcacatggaccgaacagcctgtttagtagctttgcttcagcacagtaaactatatttagaacatttggatggtaaactattccaatcgttgttgttacatggtatcagaggatttggcagtcaagtcaatgcctcaattgtgagatatagaaatcgatgataatatatgtcagctccggcgaacgagaaggcgtaccgcagggccatgaagtgcgcctgcctagccgctgcggccgttctccacgaggtccggtcactgagcgtttaccattttatggcccactatctccctccttgtcatggcttggtatggcgtggcgcctggattttagccgctgatcggaattgtcgagtgcgtagggtacaattgggatcgggagattggggcac

SEQ ID NO: 18908 - DNA, 1198 bp, Zea Mays
cttgcacgccatcagcgccatccccgatacctcaacttgcatatcgcgcgccgccatccaccttgcccatcgtgtgtcgcatgcccaaatctcatatttttatgccccacgcagcctaggccatcccaccgcagagcaggaaaaccctagcgtacccacggaccattgctggcccacatggcatcccggcctgtggccacatccatctcggcgcctcgcccgccacacccaacacgctgcaccgccgctgccgcttctcctcccccaccgcaccatcgccctgagtaccaccgcacacgccgccggggccgcatctctccccgtcagggcccagccgaacactgtcgtcgcctccacctccgcgtttgggccaccgcaagagttcagggctcctctagggttcgagatcaaatccggccagtagagcagcatcctcagcaccacgctcaccatccccctctacctcggcaccggcgtcttcaccctcgggtacacaccacgccttttctcaccatctgagcattgccaaggagctcctctccatccccgatggcaccacttcagattcctgatcagcaggagagtcgttgaggctgagacgacggcacgaatgcggcaaggagcttcagattcactgccattagaaacttgcaggtaagaaatactgtggtggtttggacctcagttattggccagatgaagggcggaggccattatcagatcctcgtccacctttgggctactgctgataagaggacgagtgtcgtacacctctccaattccccccttcaatgtggtcagtgctgaatcatctacgtcatacagtgaacaagggcatactgatgagagaagggatgacatggatttttctcattcgagcatcaggttttgtgcgctgattatggtgtggtcgttgaggatttggcagtcaagtcaatgcctcaattgtgagatatagaaatcgatgataatatatgtcagctccggcgaacgagaaggcgtaccgcagggccatgaagtgcgcctgcctagccgctgcggccgttctccacgaggtccggtcactgagcgtttaccattttatggcccactatctccctccttgtcatggcttggtatggcgtggcgcctggattttagccgctgatcggaattgtcgagtgcgtagggtacaattgggatcgggagattggggcac

SEQ ID NO: 18909 - DNA, 1043 bp, Zea Mays
cttgcacgccatcagcgccatccccgatacctcaacttgcatatcgcgcgccgccatccaccttgcccatcgtgtgtcgcatgcccaaatctcatatttttatgccccacgcagcctaggccatcccaccgcagagcaggaaaaccctagcgtacccacggaccattgctggcccacatggcatcccggcctgtggccacatccatctcggcgcctcgcccgccacacccaacacgctgcaccgccgctgccgcttctcctcccccaccgcaccatcgccctgagtaccaccgcacacgccgccggggccgcatctctccccgtcagggcccagccgaacactgtcgtcgcctccacctccgcgtttgggccaccgcaagagttcagggctcctctagggttcgagatcaaatccggccagtagagcagcatcctcagcaccacgctcaccatccccctctacctcggcaccggcgtcttcaccctcgggagagtcgttgaggctgagacgacggcacgaatgcggcaaggagcttcagattcactgccattagaaacttgcaggtaagaaatactgtggtggtttggacctcagttattggccagatgaagggcggaggccattatcagatcctcgtccacctttgggctactgctgataagaggacgagtgtcgtacacctctccaattccccccttcaatgtggtcagtgctgaatcatctacgtcatacagtgaacaagggcatactgatgagagaagggatgacatggatttttctcattcgagcatcaggttttgtgcgctgattatggtgtggtcgttgctccggcgaacgagaaggcgtaccgcagggccatgaagtgcgcctgcctagccgctgcggccgttctccacgaggtccggtcactgagcgtttaccattttatggcccactatctccctccttgtcatggcttggtatggcgtggcgcctggattttagccgctgatcggaattgtcgagtgcgtagggtacaattgggatcgggagattggggcac

SEQ ID NO: 18910 - DNA, 1562 bp, Zea Mays
cttgcacgccatcagcgccatccccgatacctcaacttgcatatcgcgcgccgccatccaccttgcccatcgtgtgtcgcatgcccaaatctcatatttttatgccccacgcagcctaggccatcccaccgcagagcaggaaaaccctagcgtacccacggaccattgctggcccacatggcatcccggcctgtggccacatccatctcggcgcctcgcccgccacacccaacacgctgcaccgccgctgccgcttctcctcccccaccgcaccatcgccctgagtaccaccgcacacgccgccggggccgcatctctccccgtcagggcccagccgaacactgtcgtcgcctccacctccgcgtttgggccaccgcaagagttcagggctcctctagggttcgagatcaaatccggccagtagagcagcatcctcagcaccacgctcaccatccccctctacctcggcaccggcgtcttcaccctcgggtacacaccacgccttttctcaccatctgagcattgccaaggagctcctctccatccccgatggcaccacttcagattcctgatcagcaggagagtcgttgaggctgagacgacggcacgaatgcggcaaggagcttcagattcactgccattagaaacttgcaggtaagaaatactgtggtggtttggacctcagttattggccagatgaagggcggaggccattatcagatcctcgtccacctttgggctactgctgataagaggacgagtgtcgtacacctctccaattccccccttcaatgtggtcagtgctgaatcatctacgtcatacagtgaacaagggcatactgatgaggttttgtgcgctgattatggtgtggtcgttggtgagactgcaacgccctctgtaatcatctctctgacaagttagattatgtgctgaaatttctgttatttttgttggattgtattgttgtgaaagggggcatagtacgatgaattggggactgaaagagcatagcagagcagagggcctatgtaatataattttttatgtataaattgtgcaaaaacaaattacctcttttgggtttcaatcatttgacaacccttggaccctgacattatattagtttacttaccttgaccttgtgatgagttttggaatatttggaggaggttcacatggaccgaacagcctgtttagtagctttgcttcagcacagtaaactatatttagaacatttggatggtaaactattccaatcgttgttgttacatggtatcagaggatttggcagtcaagtcaatgcctcaattgtgagatatagaaatcgatgataatatatgtcagctccggcgaacgagaaggcgtaccgcagggccatgaagtgcgcctgcctagccgctgcggccgttctccacgaggtccggtcactgagcgtttaccattttatggcccactatctccctccttgtcatggcttggtatggcgtggcgcctggattttagccgctgatcggaattgtcgagtgcgtagggtacaattgggatcgggagattggggcac

SEQ ID NO: 18911 - DNA, 1311 bp, Zea Mays
cctcaacttgcatatcgcgcgccgccatccaccttgcccatcgtgtgtcgcatgcccaaatctcatatttttatgccccacgcagcctaggccatcccaccgcagagcaggaaaaccctagcgtacccacggaccattgctggcccacatggcatcccggcctgtggccacatccatctcggcgcctcgcccgccacacccaacacgctgcaccgccgctgccgcttctcctcccccaccgcaccatcgccctgagtaccaccgcacacgccgccggggccgcatctctccccgtcagggcccagccgaacactgtcgtcgcctccacctccgcgtttgggccaccgcaagagttcagggctcctctagggttcgagatcaaatccggccagtagagcagcatcctcagcaccacgctcaccatccccctctacctcggcaccggcgtcttcaccctcgggtaagaaatactgtggtggtttggacctcagttattggccagatgaagggcggaggccattatcagatcctcgtccacctttgggctactgctgataagaggacgagtgtcgtacacctctccaattccccccttcaatgtggtcagtgctgaatcatctacgtcatacagtgaacaagggcatactgatgagagaagggatgacatggatttttctcattcgagcatcaggttttgtgcgctgattatggtgtggtcgttgggggcatagtacgatgaattggggactgaaagagcatagcagagcagagggcctatgtaatataattttttatgtataaattgtgcaaaaacaaattacctcttttgggtttcaatcatttgacaacccttggaccctgacattatattagtttacttaccttgaccttgtgatgagttttggaatatttggaggaggttcacatggaccgaacagcctgtttagtagctttgcttcagcacagtaaactatatttagaacatttggatggtaaactattccaatcgttgttgttacatggtatcagaggatttggcagtcaagtcaatgcctcaattgtgagatatagaaatcgatgataatatatgtcagctccggcgaacgagaaggcgtaccgcagggccatgaagtgcgcctgcctagccgctgcggccgttctccacgaggtccggtcactgagcgtttaccattttatggcccactatctccctccttgtcatggcttggtatggcgtggcgcctggattttagccgctgatcggaattgtcgagtgcgtagggtacaattgggatcgggagattggggcac

SEQ ID NO: 18912 - DNA, 2277 bp, Zea Mays
cctcaacttgcatatcgcgcgccgccatccaccttgcccatcgtgtgtcgcatgcccaaatctcatatttttatgccccacgcagcctaggccatcccaccgcagagcaggaaaaccctagcgtacccacggaccattgctggcccacatggcatcccggcctgtggccacatccatctcggcgcctcgcccgccacacccaacacgctgcaccgccgctgccgcttctcctcccccaccgcaccatcgccctgagtaccaccgcacacgccgccggggccgcatctctccccgtcagggcccagccgaacactgtcgtcgcctccacctccgcgtttgggccaccgcaagagttcagggctcctctagggttcgagatcaaatccggccagtagagcagcatcctcagcaccacgctcaccatccccctctacctcggcaccggcgtcttcaccctcgggtacacaccacgccttttctcaccatctgagcattgccaaggagctcctctccatccccgatggcaccacttcagattcctgatcagcaggagagtcgttgaggctgagacgacggcacgaatgcggcaaggagcttcagattcactgccattagaaacttgcaggtgaggaaggagagggtccaagttcctgacctctgcatcgactgagagggtccaagttcctgacccctgcattgactaattatctttgagtttcatcattatgttgaaattggtatgcgttcaaaatactcaattgattctcacggctaccgtgcctcctagcgaaacttgcttttcgttggagtatctggcgtagtaatggaaaaaattaccttctccctttgagggttcagtccatttcgttctctataattgtcacctacccttcccgagcctacttttgttgctactataagaataagaatgaaataagcttcatctctatttgtttctgatatgaattgtgtagcttagagttgtctcttaacttacaatcttacattggtgtaaaacagtgaccacactaaaagcacaaatgcaaggttttacagaccagttgtgatgctactaccactaacatgtacaaataggaaaggcaagaaaatggcttagagcaagtatttttaaagaaaaagtgatccatttaagaaacctttttattaagttactcctgataccagctcctcattccgcgagtgtcttcagcttcactttctctatctgttgtacgcgggtgtctcttcgtcttgtgtgtgagttggatgagaactagacaactggtaggaaccactctctgtttcagtttctgtttgtgtttcacttcagttcaggttgtctgcgctcttctcttagggatcgagaatcatagggaggttcctcgcttctataagaaatatgtgcctttttgtttcattttccttgtggagttgtagttcagttcagttcatcttcgtgcatggggagtgcttggttcgattgttcacagccataggtgctacagattcgtctatggcgaagacagaagtttttgttttcatgatgttttcatggaagatggcgagaagctctccacccttatcatagttaactcttttgattaagtgattaaccaatttagtaacacatatttaatgttttagcttgtttggtttagatatggaggtccgtcagtaattttgtaattttttgtattatctttatctggaaactaagttgtatgtagtgacaggtaagaaatactgtggtggtttggacctcagttattggccagatgaagggcggaggccattatcagatcctcgtccacctttgggctactgctgataagaggacgagtgtcgtacacctctccaattccccccttcaatgtggtcagtgctgaatcatctacgtcatacagtgaacaagggcatactgatgagagaagggatgacatggatttttctcattcgagcatcaggttttgtgcgctgattatggtgtggtcgttgaggatttggcagtcaagtcaatgcctcaattgtgagatatagaaatcgatgataatatatgtcagctccggcgaacgagaaggcgtaccgcagggccatgaagtgcgcctgcctagccgctgcggccgttctccacgaggtccggtcactgagcgtttaccattttatggcccactatctccctccttgtcatggcttggtatggcgtggcgcctggattttagccgctgatcggaattgtcgagtgcgtagggtacaattgggatcgggagattggggcac

SEQ ID NO: 18913 - DNA, 1159 bp, Zea Mays
atggcggggatctctcgcgcgatcagggcctgcgccgccacgtcccagcgcaccctggccgctgcttcggcggtgacgctgccgaaggaggcgggggtgaaaccggcaacggtcgggcgcagggggcggggtccggaggacgggaggcgcgtgcagtgggcgttcctcgggtgccccggggtggggaagggcacctacgccagccgcctctcgcagctgctcggcgtcccacacattgccaccggcgacctcgtccgcgacgccctggcctcccctggccccttctcgaaaaagcttgctgagattgtcaatcaaggaaaactggtgtccgatgagatcatcataaatctgctgtcaagacgcctggaagagggagaagaaaagggtgaattggggttcatccttgatggctttcctcgaaccatgagacaagcggagatacttgaaggagtcacaaatattgacttggtgatcaatctcaagcttcgagaagaagctctggttgcaagatgtcttggcagaaggatgtgcagccagtgtggagaaaacttcaatgtggcctccattgatattgagggagaaaatggtggagctccaatgtacctgcctccactattgcctccgccacagtgtgaatcgaagctaataaccagagcagatgatactgaagaagtggtaaagaaccggctacgtgtgtaccatgatctgactgaaccagtggagggattctacaaagcgcgtcaaaagctcttggagttcaatatacctggtggaatacccgaatcatggcgaaagttattggaagccttgaacatagaagactccaacaatatgagatctgcagtagcatgatttttttttaggaatgcacattaaattaaacatctgtagcttatgtcaaagttagtcaatttttctgaacattccttatatctttagaaagcacggtcgaatttggattgagattagattatttggcgtagcactctaactgtacagtagatttgtgatcgatgggcaagatgaacgaaagcggtctgtaaaaggaaagaaatagttgttcgatgaccagacatttatttgtagcctgtaccatatatgaacttgttgaaagaggtgcataccagaagcaatttgaatcgttgtggatatgattgaa

SEQ ID NO: 18914 - DNA, 1749 bp, Zea Mays
atcatgtttatttgtttaatctgccttcttcatctacctgccatgtttaatttgcaaatggatttgagtagctatattacatgttttcatgtcctggaattgctactgttcattgctgttataattacatatggcatttatctgagttatatgcttgttttattcggaattagtatatttaatctatttaaatatgtagaaagcatgtcacttattcctctaaatttacaacagccccttctcgaggaaggtaaatctcagcgttactggattactacctggcacttagattgatcaggttgatggatccggtgcgtcatgttgtagttcgcttgtaagctccaagcaatctcacgaagctgctcattgtggctgcttccacgatgcattgctttccgtctgtgcggaataaagagatttttacttgacctgtagagtaatatggttaaataaatctttgggcaaataatccataaacccttcagaagcttgtaaaatcaataagtagctccacataggctgctagctgtttgttgtttaaataaattaaacagtgtaaatatgtaatttaatcgtttggcctctgaatgtaggctgtagtttagttgtagttagaccataaccttgccaatgcaatttcacatagaaaattagaatctcctgttgtgcctcctctttgaccactttgtagttctgtttgcttgattttgtgttagctgtgtgtttcttttccagcttgctgagattgacaatcatggaaaactggcatctaatgagatcaacataaatcttctgtcagttttttaattgattgtgttggttgtatgcttcctttccagcttgctgagattgtcaatcaaggaaaactggtgtctgatgagatcatcataaatctgctgtcaagacgcctggaagagagagaagaaaaggggtgaattggggttcatccttgatggctttcctcgaaccatgagacaagcggagatacttgaaggagtcacaaatattgacttggtgatcaatctcaagctccgagaagaagttgtggttgcaagatgtcttggcagaaggatgtgcagccagtgtggaggaaacttcaatgtggcctccattgatattgagggagaaaatggtggagctccaatgcacctgcctccactattgcctccgccacagtgtgaatcgaagctaataaccagagcagatgatactgaagaagtggtaaagaaccggctacgtgtgtaccatgatctgatgtttggtgtggtgccatcatatatcttaccaagtgggttgtcctctttacagactgaaccagtggagggattctacagagcgcgtcaaaagctcttggagttcaatatacctggtggaatacccgaatcatggcgaaagttattagaagccttgaatatagaagactccgacaatatgagatctgcagcagcatgatttttttaggaatgcacgttaaactaaacatctgtagcttatgtcaaagttagtcaatttttctgaacattccttatatctttagaaagcatggtcaaatctggatcgagattagattattttagcgtagcactctaactgtacagtagattagtcattgatgggcaagatgaacgaaagcggtctgtaaaagcaaagaaatagttgttcgatgaccagacattcattcgtagcctgtaccatatatgaacttgttgaaagaggtgcataccagaagcaatttgaaacgttgtggat

SEQ ID NO: 18915 - DNA, 3315 bp, Zea Mays
agaaacttggcccgttcagcccatcaatgtaaccgagccgtactcgtcaaggctcagcctgctctcttcctgcccccccgtccgatctctacccggcggaattccgtagacctcgccgtcggccaccgcccgtgcaatttggagttgagggaagttcaccggaaggcagcacgatggttcagaagaagaagaaagcggccgcggcgcccaaactccgcaagcttccgaagcgcgacgcggataagaagctcgggaagaagggtgacatggcagagttcagggcgcagctggactcccttgggctgaagatagtccaagtcacggcagatgggaactgcttcttcagtatgcagggcaatgggtgaccagcttgagggcgatgaggaagagcacatgaagtaccgagatatggttgtggattacattgtgaaacaccgtgaggagtttgagccatttatcgaggatgaagttccgtttgaagaatattgcaactctatgctaaaggatgggacttgggctggccacatggagctgcaagccgcttctctgctgacaagaagaaatatatgcattcacatgcttaattcaccacgttggtacataaacaacttttctggccgtgaagctactaacatggttcacttgtcttatcatcatggtgagcattacaacagtgtcaggctgagagaagatccatgtcaaggtcctgcaatgccagttgtcatcaagactgattccaatatatccaacacaaacaataacgctcaaacaaaagcaaaggaggtgaagaaatcttcacacaggtcaacctatgacgacacatcagttaaattggtcatggctggaactggatgttctgacattgccatagctgagcatgttctcggagaaatggatggtgatgttgatgctgctattgagtacctgatagcggagcgacttgcagtcagtactgatgatgcggaggtagacctttatataaaccatgcatttaacggagatgaacctaccaagaggcaagaggataataacatgatcgagcacaaggatgaagcaaattgttccaacgaagatgaaactgtcgagaaaccaaagcattcaaacgctgtgcattctaagaaggagaagtccaaaaccaatggttgttgctcttgtggatctgcaaggaagcacaaggcgtcttgtagtctagccacagcatcatcatcaagagagcctccaagggccaagggcgggcaagggaaaggccagagaggaaagaagcagaagaagaaagagcaagcggaagcagcagctgccaaggccaaggagtctgcaattgtgccagacctaggagctctttgcatctgaacacaagcagcagatacgccagccctgcttttcatccacctgtggcttatcatctcatgcttagttgaagcgaacgcagcagatctgctgcgtgctgactgagggaccgacgtgtaattcatccacaccacacgacaggaggggcgatgatgtcgctaaactagcaggttttgcgatggtatagaatcacaatcgtgtcattggtgtcatgcttactaaacaaatcttgttttgacgcgtaagctgatgagcctgtcgaatggcctctggtgacgcgttggcctccactggacccatcttggtgccactgatgcccagccgtcaggccagtcgcctggcctgacgactgatgcccaggcccagcctccttgagatccgtggatctgcccttccaaatgctgaactcttgtgtagattataagcactagggactagatcactagagttaagaccacttatcatttctgagttctcactctgttcatccactcgttaggaaggctattttgatgccgcacaggcaactctcctagacagctaaggatataagaacggatttaattgatgttgaaacgatttagctgcaggtgcatgcagctagggatgaaagtaggatgggaaaatctcgtaccgaccgttatcgtataactgattttgttagttttattccgatcgatttcgaacccgaggtaaaaaacgaaaacggaacggaaatgggatatacaaaacggtaaacggaaacggaaacggtagagctagtttcccgaccgtttcatcgggatcccgtttttaatcggaatgatcccgtttcgttaccgtattttctaattcgggatcactgcaatatggccagctccaactcccatccataatcactgaggcccagcccatgtaagaaaaacctagcgatccgacctgtctcgcctggcgctgctctgcctctctcccaggcggccagccgcacgtccgcaccacagcatcacacattcacacgccgccacgcgcccacgccggagtccggacgccgccagccgcacgccgacgccggcgacgcgtctcgctctcgcctgctctctccctgtctcccagccggccggccgcaccaggcaccacacgcggtgacgcggcacgccggacgcagacaccgccatccgcccatccgccgaacgccatccctccactgctcgtcctccagacctccactccactgctcgcccatccgcggtccgctcatccgccatccgccatccgcggtcctccagacctccactgctcgcccatccggccatccgcggtctccctgtctccacggttgctcacagcagtaccgcaccaagctgcagtgtgctgtccagggctgctgattgctgaacacctgctgtccaggggctctgctctccacttcggctagccggctacaactccattcctcagatgacgcctccggttggaaataatcctccctcaggctcagccataagattggccaagttgatgtgtgctagtagacttatatgacttcttatgttagccaagagcccaagacttatcacttatgtgctacattaaactatgtgtgctccggatttatatggattttatctatgtttaattaagacttgtgtttacaattttttatatttgtttttaagttttgaatatatgttttcatgtgtgattttaccgaacaaaaataccggttcccgtccgatttcggctttaacccgatcagatagtatcggttttcgattaccgtatttatcccgttcgttttcgttaccgatatatcccgttttcgtttccgtcccgcaagttaaatatgaaaatgaaaacggtagaggtatccgcaagttaaatatgaaaatgaaaacggtagaggtattttaccgaccgttttcatccctacatgtagctttgaaatgagaagggcatcttgaaatgcctatatttattataaaaggaaac

SEQ ID NO: 18916 - DNA, 3308 bp, Zea Mays
agaaacttggcccgttcagcccatcaatgtaaccgagccgtactcgtcaaggctcagcctgctctcttcctgcccccccgtccgatctctacccggcggaattccgtagacctcgccgtcggccaccgcccgtgcaatttggagttgagggaagttcaccggaaggcagcacgatggttcagaagaagaagaaagcggccgcggcgcccaaactccgcaagcttccgaagcgcgacgcggataagaagctcgggaagaagggtgacatggcagagttcagggcgcagctggactcccttgggctgaagatagtccaagtcacggcagatgggaactgcttcttcagggcaatgggtgaccagcttgagggcgatgaggaagagcacatgaagtaccgagatatggttgtggattacattgtgaaacaccgtgaggagtttgagccatttatcgaggatgaagttccgtttgaagaatattgcaactctatgctaaaggatgggacttgggctggccacatggagctgcaagccgcttctctgctgacaagaagaaatatatgcattcacatgcttaattcaccacgttggtacataaacaacttttctggccgtgaagctactaacatggttcacttgtcttatcatcatggtgagcattacaacagtgtcaggctgagagaagatccatgtcaaggtcctgcaatgccagttgtcatcaagactgattccaatatatccaacacaaacaataacgctcaaacaaaagcaaaggaggtgaagaaatcttcacacaggtcaacctatgacgacacatcagttaaattggtcatggctggaactggatgttctgacattgccatagctgagcatgttctcggagaaatggatggtgatgttgatgctgctattgagtacctgatagcggagcgacttgcagtcagtactgatgatgcggaggtagacctttatataaaccatgcatttaacggagatgaacctaccaagaggcaagaggataataacatgatcgagcacaaggatgaagcaaattgttccaacgaagatgaaactgtcgagaaaccaaagcattcaaacgctgtgcattctaagaaggagaagtccaaaaccaatggttgttgctcttgtggatctgcaaggaagcacaaggcgtcttgtagtctagccacagcatcatcatcaagagagcctccaagggccaagggcgggcaagggaaaggccagagaggaaagaagcagaagaagaaagagcaagcggaagcagcagctgccaaggccaaggagtctgcaattgtgccagacctaggagctctttgcatctgaacacaagcagcagatacgccagccctgcttttcatccacctgtggcttatcatctcatgcttagttgaagcgaacgcagcagatctgctgcgtgctgactgagggaccgacgtgtaattcatccacaccacacgacaggaggggcgatgatgtcgctaaactagcaggttttgcgatggtatagaatcacaatcgtgtcattggtgtcatgcttactaaacaaatcttgttttgacgcgtaagctgatgagcctgtcgaatggcctctggtgacgcgttggcctccactggacccatcttggtgccactgatgcccagccgtcaggccagtcgcctggcctgacgactgatgcccaggcccagcctccttgagatccgtggatctgcccttccaaatgctgaactcttgtgtagattataagcactagggactagatcactagagttaagaccacttatcatttctgagttctcactctgttcatccactcgttaggaaggctattttgatgccgcacaggcaactctcctagacagctaaggatataagaacggatttaattgatgttgaaacgatttagctgcaggtgcatgcagctagggatgaaagtaggatgggaaaatctcgtaccgaccgttatcgtataactgattttgttagttttattccgatcgatttcgaacccgaggtaaaaaacgaaaacggaacggaaatgggatatacaaaacggtaaacggaaacggaaacggtagagctagtttcccgaccgtttcatcgggatcccgtttttaatcggaatgatcccgtttcgttaccgtattttctaattcgggatcactgcaatatggccagctccaactcccatccataatcactgaggcccagcccatgtaagaaaaacctagcgatccgacctgtctcgcctggcgctgctctgcctctctcccaggcggccagccgcacgtccgcaccacagcatcacacattcacacgccgccacgcgcccacgccggagtccggacgccgccagccgcacgccgacgccggcgacgcgtctcgctctcgcctgctctctccctgtctcccagccggccggccgcaccaggcaccacacgcggtgacgcggcacgccggacgcagacaccgccatccgcccatccgccgaacgccatccctccactgctcgtcctccagacctccactccactgctcgcccatccgcggtccgctcatccgccatccgccatccgcggtcctccagacctccactgctcgcccatccggccatccgcggtctccctgtctccacggttgctcacagcagtaccgcaccaagctgcagtgtgctgtccagggctgctgattgctgaacacctgctgtccaggggctctgctctccacttcggctagccggctacaactccattcctcagatgacgcctccggttggaaataatcctccctcaggctcagccataagattggccaagttgatgtgtgctagtagacttatatgacttcttatgttagccaagagcccaagacttatcacttatgtgctacattaaactatgtgtgctccggatttatatggattttatctatgtttaattaagacttgtgtttacaattttttatatttgtttttaagttttgaatatatgttttcatgtgtgattttaccgaacaaaaataccggttcccgtccgatttcggctttaacccgatcagatagtatcggttttcgattaccgtatttatcccgttcgttttcgttaccgatatatcccgttttcgtttccgtcccgcaagttaaatatgaaaatgaaaacggtagaggtatccgcaagttaaatatgaaaatgaaaacggtagaggtattttaccgaccgttttcatccctacatgtagctttgaaatgagaagggcatcttgaaatgcctatatttattataaaaggaaac

SEQ ID NO: 18917 - DNA, 3280 bp, Zea Mays
gagccgtactcgtcaaggctcagcctgctctcttcctgcccccccgtccgatctctacccggcggaattccgtagacctcgccgtcggccaccgcccgtgcaatttggagttgagggaagttcaccggaaggcagcacgatggttcagaagaagaagaaagcggccgcggcgcccaaactccgcaagcttccgaagcgcgacgcggataagaagctcgggaagaagggtgacatggcagagttcagggcgcagctggactcccttgggctgaagatagtccaagtcacggcagatgggaactgcttcttcagggcaatgggtgaccagcttgagggcgatgaggaagagcacatgaagtaccgagatatggttgtggattacattgtgaaacaccgtgaggagtttgagccatttatcgaggatgaagttccgtttgaagaatattgcaactctatgctaaaggatgggacttgggctggccacatggagctgcaagccgcttctctgctgacaagaagaaatatatgcattcacatgcttaattcaccacgttggtacataaacaacttttctggccgtgaagctactaacatggttcacttgtcttatcatcatggtgagcattacaacagtgtcaggctgagagaagatccatgtcaaggtcctgcaatgccagttgtcatcaagttacagactgattccaatatatccaacacaaacaataacgctcaaacaaaagcaaaggaggtgaagaaatcttcacacaggtcaacctatgacgacacatcagttaaattggtcatggctggaactggatgttctgacattgccatagctgagcatgttctcggagaaatggatggtgatgttgatgctgctattgagtacctgatagcggagcgacttgcagtcagtactgatgatgcggaggtagacctttatataaaccatgcatttaacggagatgaacctaccaagaggcaagaggataataacatgatcgagcacaaggatgaagcaaattgttccaacgaagatgaaactgtcgagaaaccaaagcattcaaacgctgtgcattctaagaaggagaagtccaaaaccaatggttgttgctcttgtggatctgcaaggaagcacaaggcgtcttgtagtctagccacagcatcatcatcaagagagcctccaagggccaagggcgggcaagggaaaggccagagaggaaagaagcagaagaagaaagagcaagcggaagcagcagctgccaaggccaaggagtctgcaattgtgccagacctaggagctctttgcatctgaacacaagcagcagatacgccagccctgcttttcatccacctgtggcttatcatctcatgcttagttgaagcgaacgcagcagatctgctgcgtgctgactgagggaccgacgtgtaattcatccacaccacacgacaggaggggcgatgatgtcgctaaactagcaggttttgcgatggtatagaatcacaatcgtgtcattggtgtcatgcttactaaacaaatcttgttttgacgcgtaagctgatgagcctgtcgaatggcctctggtgacgcgttggcctccactggacccatcttggtgccactgatgcccagccgtcaggccagtcgcctggcctgacgactgatgcccaggcccagcctccttgagatccgtggatctgcccttccaaatgctgaactcttgtgtagattataagcactagggactagatcactagagttaagaccacttatcatttctgagttctcactctgttcatccactcgttaggaaggctattttgatgccgcacaggcaactctcctagacagctaaggatataagaacggatttaattgatgttgaaacgatttagctgcaggtgcatgcagctagggatgaaagtaggatgggaaaatctcgtaccgaccgttatcgtataactgattttgttagttttattccgatcgatttcgaacccgaggtaaaaaacgaaaacggaacggaaatgggatatacaaaacggtaaacggaaacggaaacggtagagctagtttcccgaccgtttcatcgggatcccgtttttaatcggaatgatcccgtttcgttaccgtattttctaattcgggatcactgcaatatggccagctccaactcccatccataatcactgaggcccagcccatgtaagaaaaacctagcgatccgacctgtctcgcctggcgctgctctgcctctctcccaggcggccagccgcacgtccgcaccacagcatcacacattcacacgccgccacgcgcccacgccggagtccggacgccgccagccgcacgccgacgccggcgacgcgtctcgctctcgcctgctctctccctgtctcccagccggccggccgcaccaggcaccacacgcggtgacgcggcacgccggacgcagacaccgccatccgcccatccgccgaacgccatccctccactgctcgtcctccagacctccactccactgctcgcccatccgcggtccgctcatccgccatccgccatccgcggtcctccagacctccactgctcgcccatccggccatccgcggtctccctgtctccacggttgctcacagcagtaccgcaccaagctgcagtgtgctgtccagggctgctgattgctgaacacctgctgtccaggggctctgctctccacttcggctagccggctacaactccattcctcagatgacgcctccggttggaaataatcctccctcaggctcagccataagattggccaagttgatgtgtgctagtagacttatatgacttcttatgttagccaagagcccaagacttatcacttatgtgctacattaaactatgtgtgctccggatttatatggattttatctatgtttaattaagacttgtgtttacaattttttatatttgtttttaagttttgaatatatgttttcatgtgtgattttaccgaacaaaaataccggttcccgtccgatttcggctttaacccgatcagatagtatcggttttcgattaccgtatttatcccgttcgttttcgttaccgatatatcccgttttcgtttccgtcccgcaagttaaatatgaaaatgaaaacggtagaggtatccgcaagttaaatatgaaaatgaaaacggtagaggtattttaccgaccgttttcatccctacatgtagctttgaaatgagaagggcatcttgaaatgcctatatttattataaaaggaaac

SEQ ID NO: 18918 - DNA, 3324 bp, Zea Mays
gtcaaggctcagcctgctctcttcctgcccccccgtccgatctctacccggcggaattccgtagacctcgccgtcggccaccgcccgtgcaatttggagttgagggaagttcaccggaaggcagcacgatggttcagaagaagaagaaagcggccgcggcgcccaaactccgcaagcttccgaagcgcgacgcggataagaagctcgggaagaagggtgacatggcagagttcagggcgcagctggactcccttgggctgaagatagtccaagtcacggcagatgggaactgcttcttcagggcaatgggtgaccagcttgagggcgatgaggaagagcacatgaagtaccgagatatggttgtggattacattgtgaaacaccgtgaggagtttgagccatttatcgaggatgaagttccgtttgaagaatattgcaactctatgctaaaggatgggacttgggctggccacatggagctgcaagccgcttctctgctgacaagaagaaatatatgcattcacatgcttaattcaccacgttggtacataaacaacttttctggccgtgaagctactaacatggttcacttgtcttatcatcatggtgagcattacaacagtgtcaggctgagagaagatccatgtcaaggtcctgcaatgccagttgtcatcaagactgattccaatatatccaacacaaacaataacgctcaaacaaaagcaaaggaggtgaagaaatcttcacacaggtcaacctatgacgacacatcagttaaattggtcatggctggaactggatgttctgacattgccatagctgagcatgttctcggagaaatggatggtgatgttgatgctgctattgagtacctgatagcggagcgacttgcagtcagtactgatgatgcggaggtagacctttatataaaccatgcatttaacgtagcgtttttgctaaaatatggatgttggagcaagaaaattccttggttgtacagagtatggagatgaacctaccaagaggcaagaggataataacatgatcgagcacaaggatgaagcaaattgttccaacgaagatgaaactgtcgagaaaccaaagcattcaaacgctgtgcattctaagaaggagaagtccaaaaccaatggttgttgctcttgtggatctgcaaggaagcacaaggcgtcttgtagtctagccacagcatcatcatcaagagagcctccaagggccaagggcgggcaagggaaaggccagagaggaaagaagcagaagaagaaagagcaagcggaagcagcagctgccaaggccaaggagtctgcaattgtgccagacctaggagctctttgcatctgaacacaagcagcagatacgccagccctgcttttcatccacctgtggcttatcatctcatgcttagttgaagcgaacgcagcagatctgctgcgtgctgactgagggaccgacgtgtaattcatccacaccacacgacaggaggggcgatgatgtcgctaaactagcaggttttgcgatggtatagaatcacaatcgtgtcattggtgtcatgcttactaaacaaatcttgttttgacgcgtaagctgatgagcctgtcgaatggcctctggtgacgcgttggcctccactggacccatcttggtgccactgatgcccagccgtcaggccagtcgcctggcctgacgactgatgcccaggcccagcctccttgagatccgtggatctgcccttccaaatgctgaactcttgtgtagattataagcactagggactagatcactagagttaagaccacttatcatttctgagttctcactctgttcatccactcgttaggaaggctattttgatgccgcacaggcaactctcctagacagctaaggatataagaacggatttaattgatgttgaaacgatttagctgcaggtgcatgcagctagggatgaaagtaggatgggaaaatctcgtaccgaccgttatcgtataactgattttgttagttttattccgatcgatttcgaacccgaggtaaaaaacgaaaacggaacggaaatgggatatacaaaacggtaaacggaaacggaaacggtagagctagtttcccgaccgtttcatcgggatcccgtttttaatcggaatgatcccgtttcgttaccgtattttctaattcgggatcactgcaatatggccagctccaactcccatccataatcactgaggcccagcccatgtaagaaaaacctagcgatccgacctgtctcgcctggcgctgctctgcctctctcccaggcggccagccgcacgtccgcaccacagcatcacacattcacacgccgccacgcgcccacgccggagtccggacgccgccagccgcacgccgacgccggcgacgcgtctcgctctcgcctgctctctccctgtctcccagccggccggccgcaccaggcaccacacgcggtgacgcggcacgccggacgcagacaccgccatccgcccatccgccgaacgccatccctccactgctcgtcctccagacctccactccactgctcgcccatccgcggtccgctcatccgccatccgccatccgcggtcctccagacctccactgctcgcccatccggccatccgcggtctccctgtctccacggttgctcacagcagtaccgcaccaagctgcagtgtgctgtccagggctgctgattgctgaacacctgctgtccaggggctctgctctccacttcggctagccggctacaactccattcctcagatgacgcctccggttggaaataatcctccctcaggctcagccataagattggccaagttgatgtgtgctagtagacttatatgacttcttatgttagccaagagcccaagacttatcacttatgtgctacattaaactatgtgtgctccggatttatatggattttatctatgtttaattaagacttgtgtttacaattttttatatttgtttttaagttttgaatatatgttttcatgtgtgattttaccgaacaaaaataccggttcccgtccgatttcggctttaacccgatcagatagtatcggttttcgattaccgtatttatcccgttcgttttcgttaccgatatatcccgttttcgtttccgtcccgcaagttaaatatgaaaatgaaaacggtagaggtatccgcaagttaaatatgaaaatgaaaacggtagaggtattttaccgaccgttttcatccctacatgtagctttgaaatgagaagggcatcttgaaatgcctatatttattataaaaggaaac

SEQ ID NO: 18919 - DNA, 3331 bp, Zea Mays
gtcaaggctcagcctgctctcttcctgcccccccgtccgatctctacccggcggaattccgtagacctcgccgtcggccaccgcccgtgcaatttggagttgagggaagttcaccggaaggcagcacgatggttcagaagaagaagaaagcggccgcggcgcccaaactccgcaagcttccgaagcgcgacgcggataagaagctcgggaagaagggtgacatggcagagttcagggcgcagctggactcccttgggctgaagatagtccaagtcacggcagatgggaactgcttcttcagtatgcagggcaatgggtgaccagcttgagggcgatgaggaagagcacatgaagtaccgagatatggttgtggattacattgtgaaacaccgtgaggagtttgagccatttatcgaggatgaagttccgtttgaagaatattgcaactctatgctaaaggatgggacttgggctggccacatggagctgcaagccgcttctctgctgacaagaagaaatatatgcattcacatgcttaattcaccacgttggtacataaacaacttttctggccgtgaagctactaacatggttcacttgtcttatcatcatggtgagcattacaacagtgtcaggctgagagaagatccatgtcaaggtcctgcaatgccagttgtcatcaagactgattccaatatatccaacacaaacaataacgctcaaacaaaagcaaaggaggtgaagaaatcttcacacaggtcaacctatgacgacacatcagttaaattggtcatggctggaactggatgttctgacattgccatagctgagcatgttctcggagaaatggatggtgatgttgatgctgctattgagtacctgatagcggagcgacttgcagtcagtactgatgatgcggaggtagacctttatataaaccatgcatttaacgtagcgtttttgctaaaatatggatgttggagcaagaaaattccttggttgtacagagtatggagatgaacctaccaagaggcaagaggataataacatgatcgagcacaaggatgaagcaaattgttccaacgaagatgaaactgtcgagaaaccaaagcattcaaacgctgtgcattctaagaaggagaagtccaaaaccaatggttgttgctcttgtggatctgcaaggaagcacaaggcgtcttgtagtctagccacagcatcatcatcaagagagcctccaagggccaagggcgggcaagggaaaggccagagaggaaagaagcagaagaagaaagagcaagcggaagcagcagctgccaaggccaaggagtctgcaattgtgccagacctaggagctctttgcatctgaacacaagcagcagatacgccagccctgcttttcatccacctgtggcttatcatctcatgcttagttgaagcgaacgcagcagatctgctgcgtgctgactgagggaccgacgtgtaattcatccacaccacacgacaggaggggcgatgatgtcgctaaactagcaggttttgcgatggtatagaatcacaatcgtgtcattggtgtcatgcttactaaacaaatcttgttttgacgcgtaagctgatgagcctgtcgaatggcctctggtgacgcgttggcctccactggacccatcttggtgccactgatgcccagccgtcaggccagtcgcctggcctgacgactgatgcccaggcccagcctccttgagatccgtggatctgcccttccaaatgctgaactcttgtgtagattataagcactagggactagatcactagagttaagaccacttatcatttctgagttctcactctgttcatccactcgttaggaaggctattttgatgccgcacaggcaactctcctagacagctaaggatataagaacggatttaattgatgttgaaacgatttagctgcaggtgcatgcagctagggatgaaagtaggatgggaaaatctcgtaccgaccgttatcgtataactgattttgttagttttattccgatcgatttcgaacccgaggtaaaaaacgaaaacggaacggaaatgggatatacaaaacggtaaacggaaacggaaacggtagagctagtttcccgaccgtttcatcgggatcccgtttttaatcggaatgatcccgtttcgttaccgtattttctaattcgggatcactgcaatatggccagctccaactcccatccataatcactgaggcccagcccatgtaagaaaaacctagcgatccgacctgtctcgcctggcgctgctctgcctctctcccaggcggccagccgcacgtccgcaccacagcatcacacattcacacgccgccacgcgcccacgccggagtccggacgccgccagccgcacgccgacgccggcgacgcgtctcgctctcgcctgctctctccctgtctcccagccggccggccgcaccaggcaccacacgcggtgacgcggcacgccggacgcagacaccgccatccgcccatccgccgaacgccatccctccactgctcgtcctccagacctccactccactgctcgcccatccgcggtccgctcatccgccatccgccatccgcggtcctccagacctccactgctcgcccatccggccatccgcggtctccctgtctccacggttgctcacagcagtaccgcaccaagctgcagtgtgctgtccagggctgctgattgctgaacacctgctgtccaggggctctgctctccacttcggctagccggctacaactccattcctcagatgacgcctccggttggaaataatcctccctcaggctcagccataagattggccaagttgatgtgtgctagtagacttatatgacttcttatgttagccaagagcccaagacttatcacttatgtgctacattaaactatgtgtgctccggatttatatggattttatctatgtttaattaagacttgtgtttacaattttttatatttgtttttaagttttgaatatatgttttcatgtgtgattttaccgaacaaaaataccggttcccgtccgatttcggctttaacccgatcagatagtatcggttttcgattaccgtatttatcccgttcgttttcgttaccgatatatcccgttttcgtttccgtcccgcaagttaaatatgaaaatgaaaacggtagaggtatccgcaagttaaatatgaaaatgaaaacggtagaggtattttaccgaccgttttcatccctacatgtagctttgaaatgagaagggcatcttgaaatgcctatatttattataaaaggaaac

SEQ ID NO: 18920 - DNA, 3276 bp, Zea Mays
gtcaaggctcagcctgctctcttcctgcccccccgtccgatctctacccggcggaattccgtagacctcgccgtcggccaccgcccgtgcaatttggagttgagggaagttcaccggaaggcagcacgatggttcagaagaagaagaaagcggccgcggcgcccaaactccgcaagcttccgaagcgcgacgcggataagaagctcgggaagaagggtgacatggcagagttcagggcgcagctggactcccttgggctgaagatagtccaagtcacggcagatgggaactgcttcttcagtatgcagggcaatgggtgaccagcttgagggcgatgaggaagagcacatgaagtaccgagatatggttgtggattacattgtgaaacaccgtgaggagtttgagccatttatcgaggatgaagttccgtttgaagaatattgcaactctatgctaaaggatgggacttgggctggccacatggagctgcaagccgcttctctgctgacaagaagaaatatatgcattcacatgcttaattcaccacgttggtacataaacaacttttctggccgtgaagctactaacatggttcacttgtcttatcatcatggtgagcattacaacagtgtcaggctgagagaagatccatgtcaaggtcctgcaatgccagttgtcatcaagttacagactgattccaatatatccaacacaaacaataacgctcaaacaaaagcaaaggaggtgaagaaatcttcacacaggtcaacctatgacgacacatcagttaaattggtcatggctggaactggatgttctgacattgccatagctgagcatgttctcggagaaatggatggtgatgttgatgctgctattgagtacctgatagcggagcgacttgcagtcagtactgatgatgcggaggtagacctttatataaaccatgcatttaacggagatgaacctaccaagaggcaagaggataataacatgatcgagcacaaggatgaagcaaattgttccaacgaagatgaaactgtcgagaaaccaaagcattcaaacgctgtgcattctaagaaggagaagtccaaaaccaatggttgttgctcttgtggatctgcaaggaagcacaaggcgtcttgtagtctagccacagcatcatcatcaagagagcctccaagggccaagggcgggcaagggaaaggccagagaggaaagaagcagaagaagaaagagcaagcggaagcagcagctgccaaggccaaggagtctgcaattgtgccagacctaggagctctttgcatctgaacacaagcagcagatacgccagccctgcttttcatccacctgtggcttatcatctcatgcttagttgaagcgaacgcagcagatctgctgcgtgctgactgagggaccgacgtgtaattcatccacaccacacgacaggaggggcgatgatgtcgctaaactagcaggttttgcgatggtatagaatcacaatcgtgtcattggtgtcatgcttactaaacaaatcttgttttgacgcgtaagctgatgagcctgtcgaatggcctctggtgacgcgttggcctccactggacccatcttggtgccactgatgcccagccgtcaggccagtcgcctggcctgacgactgatgcccaggcccagcctccttgagatccgtggatctgcccttccaaatgctgaactcttgtgtagattataagcactagggactagatcactagagttaagaccacttatcatttctgagttctcactctgttcatccactcgttaggaaggctattttgatgccgcacaggcaactctcctagacagctaaggatataagaacggatttaattgatgttgaaacgatttagctgcaggtgcatgcagctagggatgaaagtaggatgggaaaatctcgtaccgaccgttatcgtataactgattttgttagttttattccgatcgatttcgaacccgaggtaaaaaacgaaaacggaacggaaatgggatatacaaaacggtaaacggaaacggaaacggtagagctagtttcccgaccgtttcatcgggatcccgtttttaatcggaatgatcccgtttcgttaccgtattttctaattcgggatcactgcaatatggccagctccaactcccatccataatcactgaggcccagcccatgtaagaaaaacctagcgatccgacctgtctcgcctggcgctgctctgcctctctcccaggcggccagccgcacgtccgcaccacagcatcacacattcacacgccgccacgcgcccacgccggagtccggacgccgccagccgcacgccgacgccggcgacgcgtctcgctctcgcctgctctctccctgtctcccagccggccggccgcaccaggcaccacacgcggtgacgcggcacgccggacgcagacaccgccatccgcccatccgccgaacgccatccctccactgctcgtcctccagacctccactccactgctcgcccatccgcggtccgctcatccgccatccgccatccgcggtcctccagacctccactgctcgcccatccggccatccgcggtctccctgtctccacggttgctcacagcagtaccgcaccaagctgcagtgtgctgtccagggctgctgattgctgaacacctgctgtccaggggctctgctctccacttcggctagccggctacaactccattcctcagatgacgcctccggttggaaataatcctccctcaggctcagccataagattggccaagttgatgtgtgctagtagacttatatgacttcttatgttagccaagagcccaagacttatcacttatgtgctacattaaactatgtgtgctccggatttatatggattttatctatgtttaattaagacttgtgtttacaattttttatatttgtttttaagttttgaatatatgttttcatgtgtgattttaccgaacaaaaataccggttcccgtccgatttcggctttaacccgatcagatagtatcggttttcgattaccgtatttatcccgttcgttttcgttaccgatatatcccgttttcgtttccgtcccgcaagttaaatatgaaaatgaaaacggtagaggtatccgcaagttaaatatgaaaatgaaaacggtagaggtattttaccgaccgttttcatccctacatgtagctttgaaatgagaagggcatcttgaaatgcctatatttattataaaaggaaac

SEQ ID NO: 18921 - DNA, 3170 bp, Zea Mays
ctgcccccccgtccgatctctacccggcggaattccgtagacctcgccgtcggccaccgcccgtgcaatttggagttgagggaagttcaccggaaggcagcacgatggttcagaagaagaagaaagcggccgcggcgcccaaactccgcaagcttccgaagcgcgacgcggataagaagctcgggaagaagggtgacatggcagagttcagggcgcagctggactcccttgggctgaagatagtccaagtcacggcagatgggaactgcttcttcagtatgcagggcaatgggtgaccagcttgagggcgatgaggaagagcacatgaagtaccgagatatggttgtggattacattgtgaaacaccgtgaggagtttgagccatttatcgaggatgaagttccgtttgaagaatattgcaactctatgctaaaggatgggacttgggctggccacatggagctgcaagccgcttctctgctgacaagaagaaatatatgcattcacatgcttaattcaccacgttggtacataaacaacttttctggccgtgaagctactaacatggttcacttgtcttatcatcatggtgagcattacaacagtgtcaggctgagagaagatccatgtcaaggtcctgcaatgccagttgtcatcaagactgattccaatatatccaacacaaacaataacgctcaaacaaaagcaaaggaggtgaagaaatcttcacacaggttctcggagaaatggatggtgatgttgatgctgctattgagtacctgatagcggagcgacttgcagtcagtactgatgatgcggaggtagacctttatataaaccatgcatttaacggagatgaacctaccaagaggcaagaggataataacatgatcgagcacaaggatgaagcaaattgttccaacgaagatgaaactgtcgagaaaccaaagcattcaaacgctgtgcattctaagaaggagaagtccaaaaccaatggttgttgctcttgtggatctgcaaggaagcacaaggcgtcttgtagtctagccacagcatcatcatcaagagagcctccaagggccaagggcgggcaagggaaaggccagagaggaaagaagcagaagaagaaagagcaagcggaagcagcagctgccaaggccaaggagtctgcaattgtgccagacctaggagctctttgcatctgaacacaagcagcagatacgccagccctgcttttcatccacctgtggcttatcatctcatgcttagttgaagcgaacgcagcagatctgctgcgtgctgactgagggaccgacgtgtaattcatccacaccacacgacaggaggggcgatgatgtcgctaaactagcaggttttgcgatggtatagaatcacaatcgtgtcattggtgtcatgcttactaaacaaatcttgttttgacgcgtaagctgatgagcctgtcgaatggcctctggtgacgcgttggcctccactggacccatcttggtgccactgatgcccagccgtcaggccagtcgcctggcctgacgactgatgcccaggcccagcctccttgagatccgtggatctgcccttccaaatgctgaactcttgtgtagattataagcactagggactagatcactagagttaagaccacttatcatttctgagttctcactctgttcatccactcgttaggaaggctattttgatgccgcacaggcaactctcctagacagctaaggatataagaacggatttaattgatgttgaaacgatttagctgcaggtgcatgcagctagggatgaaagtaggatgggaaaatctcgtaccgaccgttatcgtataactgattttgttagttttattccgatcgatttcgaacccgaggtaaaaaacgaaaacggaacggaaatgggatatacaaaacggtaaacggaaacggaaacggtagagctagtttcccgaccgtttcatcgggatcccgtttttaatcggaatgatcccgtttcgttaccgtattttctaattcgggatcactgcaatatggccagctccaactcccatccataatcactgaggcccagcccatgtaagaaaaacctagcgatccgacctgtctcgcctggcgctgctctgcctctctcccaggcggccagccgcacgtccgcaccacagcatcacacattcacacgccgccacgcgcccacgccggagtccggacgccgccagccgcacgccgacgccggcgacgcgtctcgctctcgcctgctctctccctgtctcccagccggccggccgcaccaggcaccacacgcggtgacgcggcacgccggacgcagacaccgccatccgcccatccgccgaacgccatccctccactgctcgtcctccagacctccactccactgctcgcccatccgcggtccgctcatccgccatccgccatccgcggtcctccagacctccactgctcgcccatccggccatccgcggtctccctgtctccacggttgctcacagcagtaccgcaccaagctgcagtgtgctgtccagggctgctgattgctgaacacctgctgtccaggggctctgctctccacttcggctagccggctacaactccattcctcagatgacgcctccggttggaaataatcctccctcaggctcagccataagattggccaagttgatgtgtgctagtagacttatatgacttcttatgttagccaagagcccaagacttatcacttatgtgctacattaaactatgtgtgctccggatttatatggattttatctatgtttaattaagacttgtgtttacaattttttatatttgtttttaagttttgaatatatgttttcatgtgtgattttaccgaacaaaaataccggttcccgtccgatttcggctttaacccgatcagatagtatcggttttcgattaccgtatttatcccgttcgttttcgttaccgatatatcccgttttcgtttccgtcccgcaagttaaatatgaaaatgaaaacggtagaggtatccgcaagttaaatatgaaaatgaaaacggtagaggtattttaccgaccgttttcatccctacatgtagctttgaaatgagaagggcatcttgaaatgcctatatttattataaaaggaaac

SEQ ID NO: 18922 - DNA, 3274 bp, Zea Mays
gtccgatctctacccggcggaattccgtagacctcgccgtcggccaccgcccgtgcaatttggagttgagggaagttcaccggaaggcagcacgatggttcagaagaagaagaaagcggccgcggcgcccaaactccgcaagcttccgaagcgcgacgcggataagaagctcgggaagaagggtgacatggcagagttcagggcgcagctggactcccttgggctgaagatagtccaagtcacggcagatgggaactgcttcttcagcttgagggcgatgaggaagagcacatgaagtaccgagatatggttgtggattacattgtgaaacaccgtgaggagtttgagccatttatcgaggatgaagttccgtttgaagaatattgcaactctatgctaaaggatgggacttgggctggccacatggagctgcaagccgcttctctgctgacaagaagaaatatatgcattcacatgcttaattcaccacgttggtacataaacaacttttctggccgtgaagctactaacatggttcacttgtcttatcatcatggtgagcattacaacagtgtcaggctgagagaagatccatgtcaaggtcctgcaatgccagttgtcatcaagactgattccaatatatccaacacaaacaataacgctcaaacaaaagcaaaggaggtgaagaaatcttcacacaggtcaacctatgacgacacatcagttaaattggtcatggctggaactggatgttctgacattgccatagctgagcatgttctcggagaaatggatggtgatgttgatgctgctattgagtacctgatagcggagcgacttgcagtcagtactgatgatgcggaggtagacctttatataaaccatgcatttaacgtagcgtttttgctaaaatatggatgttggagcaagaaaattccttggttgtacagagtatggagatgaacctaccaagaggcaagaggataataacatgatcgagcacaaggatgaagcaaattgttccaacgaagatgaaactgtcgagaaaccaaagcattcaaacgctgtgcattctaagaaggagaagtccaaaaccaatggttgttgctcttgtggatctgcaaggaagcacaaggcgtcttgtagtctagccacagcatcatcatcaagagagcctccaagggccaagggcgggcaagggaaaggccagagaggaaagaagcagaagaagaaagagcaagcggaagcagcagctgccaaggccaaggagtctgcaattgtgccagacctaggagctctttgcatctgaacacaagcagcagatacgccagccctgcttttcatccacctgtggcttatcatctcatgcttagttgaagcgaacgcagcagatctgctgcgtgctgactgagggaccgacgtgtaattcatccacaccacacgacaggaggggcgatgatgtcgctaaactagcaggttttgcgatggtatagaatcacaatcgtgtcattggtgtcatgcttactaaacaaatcttgttttgacgcgtaagctgatgagcctgtcgaatggcctctggtgacgcgttggcctccactggacccatcttggtgccactgatgcccagccgtcaggccagtcgcctggcctgacgactgatgcccaggcccagcctccttgagatccgtggatctgcccttccaaatgctgaactcttgtgtagattataagcactagggactagatcactagagttaagaccacttatcatttctgagttctcactctgttcatccactcgttaggaaggctattttgatgccgcacaggcaactctcctagacagctaaggatataagaacggatttaattgatgttgaaacgatttagctgcaggtgcatgcagctagggatgaaagtaggatgggaaaatctcgtaccgaccgttatcgtataactgattttgttagttttattccgatcgatttcgaacccgaggtaaaaaacgaaaacggaacggaaatgggatatacaaaacggtaaacggaaacggaaacggtagagctagtttcccgaccgtttcatcgggatcccgtttttaatcggaatgatcccgtttcgttaccgtattttctaattcgggatcactgcaatatggccagctccaactcccatccataatcactgaggcccagcccatgtaagaaaaacctagcgatccgacctgtctcgcctggcgctgctctgcctctctcccaggcggccagccgcacgtccgcaccacagcatcacacattcacacgccgccacgcgcccacgccggagtccggacgccgccagccgcacgccgacgccggcgacgcgtctcgctctcgcctgctctctccctgtctcccagccggccggccgcaccaggcaccacacgcggtgacgcggcacgccggacgcagacaccgccatccgcccatccgccgaacgccatccctccactgctcgtcctccagacctccactccactgctcgcccatccgcggtccgctcatccgccatccgccatccgcggtcctccagacctccactgctcgcccatccggccatccgcggtctccctgtctccacggttgctcacagcagtaccgcaccaagctgcagtgtgctgtccagggctgctgattgctgaacacctgctgtccaggggctctgctctccacttcggctagccggctacaactccattcctcagatgacgcctccggttggaaataatcctccctcaggctcagccataagattggccaagttgatgtgtgctagtagacttatatgacttcttatgttagccaagagcccaagacttatcacttatgtgctacattaaactatgtgtgctccggatttatatggattttatctatgtttaattaagacttgtgtttacaattttttatatttgtttttaagttttgaatatatgttttcatgtgtgattttaccgaacaaaaataccggttcccgtccgatttcggctttaacccgatcagatagtatcggttttcgattaccgtatttatcccgttcgttttcgttaccgatatatcccgttttcgtttccgtcccgcaagttaaatatgaaaatgaaaacggtagaggtatccgcaagttaaatatgaaaatgaaaacggtagaggtattttaccgaccgttttcatccctacatgtagctttgaaatgagaagggcatcttgaaatgcctatatttattataaaaggaaac

SEQ ID NO: 18923 - DNA, 3292 bp, Zea Mays
ccgatctctacccggcggaattccgtagacctcgccgtcggccaccgcccgtgcaatttggagttgagggaagttcaccggaaggcagcacgatggttcagaagaagaagaaagcggccgcggcgcccaaactccgcaagcttccgaagcgcgacgcggataagaagctcgggaagaagggtgacatggcagagttcagggcgcagctggactcccttgggctgaagatagtccaagtcacggcagatgggaactgcttcttcagtatgcagggcaatgggtgaccagcttgagggcgatgaggaagagcacatgaagtaccgagatatggttgtggattacattgtgaaacaccgtgaggagtttgagccatttatcgaggatgaagttccgtttgaagaatattgcaactctatgctaaaggatgggacttgggctggccacatggagctgcaagccgcttctctgctgacaagaagaaatatatgcattcacatgcttaattcaccacgttggtacataaacaacttttctggccgtgaagctactaacatggttcacttgtcttatcatcatggtgagcattacaacagtgtcaggctgagagaagatccatgtcaaggtcctgcaatgccagttgtcatcaagactgattccaatatatccaacacaaacaataacgctcaaacaaaagcaaaggaggtgaagaaatcttcacacaggtcaacctatgacgacacatcagttaaattggtcatggctggaactggatgttctgacattgccatagctgagcatgttctcggagaaatggatggtgatgttgatgctgctattgagtacctgatagcggagcgacttgcagtcagtactgatgatgcggaggtagacctttatataaaccatgcatttaacgcgtttttgctaaaatatggatgttggagcaagaaaattccttggttgtacagagtatggagatgaacctaccaagaggcaagaggataataacatgatcgagcacaaggatgaagcaaattgttccaacgaagatgaaactgtcgagaaaccaaagcattcaaacgctgtgcattctaagaaggagaagtccaaaaccaatggttgttgctcttgtggatctgcaaggaagcacaaggcgtcttgtagtctagccacagcatcatcatcaagagagcctccaagggccaagggcgggcaagggaaaggccagagaggaaagaagcagaagaagaaagagcaagcggaagcagcagctgccaaggccaaggagtctgcaattgtgccagacctaggagctctttgcatctgaacacaagcagcagatacgccagccctgcttttcatccacctgtggcttatcatctcatgcttagttgaagcgaacgcagcagatctgctgcgtgctgactgagggaccgacgtgtaattcatccacaccacacgacaggaggggcgatgatgtcgctaaactagcaggttttgcgatggtatagaatcacaatcgtgtcattggtgtcatgcttactaaacaaatcttgttttgacgcgtaagctgatgagcctgtcgaatggcctctggtgacgcgttggcctccactggacccatcttggtgccactgatgcccagccgtcaggccagtcgcctggcctgacgactgatgcccaggcccagcctccttgagatccgtggatctgcccttccaaatgctgaactcttgtgtagattataagcactagggactagatcactagagttaagaccacttatcatttctgagttctcactctgttcatccactcgttaggaaggctattttgatgccgcacaggcaactctcctagacagctaaggatataagaacggatttaattgatgttgaaacgatttagctgcaggtgcatgcagctagggatgaaagtaggatgggaaaatctcgtaccgaccgttatcgtataactgattttgttagttttattccgatcgatttcgaacccgaggtaaaaaacgaaaacggaacggaaatgggatatacaaaacggtaaacggaaacggaaacggtagagctagtttcccgaccgtttcatcgggatcccgtttttaatcggaatgatcccgtttcgttaccgtattttctaattcgggatcactgcaatatggccagctccaactcccatccataatcactgaggcccagcccatgtaagaaaaacctagcgatccgacctgtctcgcctggcgctgctctgcctctctcccaggcggccagccgcacgtccgcaccacagcatcacacattcacacgccgccacgcgcccacgccggagtccggacgccgccagccgcacgccgacgccggcgacgcgtctcgctctcgcctgctctctccctgtctcccagccggccggccgcaccaggcaccacacgcggtgacgcggcacgccggacgcagacaccgccatccgcccatccgccgaacgccatccctccactgctcgtcctccagacctccactccactgctcgcccatccgcggtccgctcatccgccatccgccatccgcggtcctccagacctccactgctcgcccatccggccatccgcggtctccctgtctccacggttgctcacagcagtaccgcaccaagctgcagtgtgctgtccagggctgctgattgctgaacacctgctgtccaggggctctgctctccacttcggctagccggctacaactccattcctcagatgacgcctccggttggaaataatcctccctcaggctcagccataagattggccaagttgatgtgtgctagtagacttatatgacttcttatgttagccaagagcccaagacttatcacttatgtgctacattaaactatgtgtgctccggatttatatggattttatctatgtttaattaagacttgtgtttacaattttttatatttgtttttaagttttgaatatatgttttcatgtgtgattttaccgaacaaaaataccggttcccgtccgatttcggctttaacccgatcagatagtatcggttttcgattaccgtatttatcccgttcgttttcgttaccgatatatcccgttttcgtttccgtcccgcaagttaaatatgaaaatgaaaacggtagaggtatccgcaagttaaatatgaaaatgaaaacggtagaggtattttaccgaccgttttcatccctacatgtagctttgaaatgagaagggcatcttgaaatgcctatatttattataaaaggaaac

SEQ ID NO: 18924 - DNA, 3217 bp, Zea Mays
ccgatctctacccggcggaattccgtagacctcgccgtcggccaccgcccgtgcaatttggagttgagggaagttcaccggaaggcagcacgatggttcagaagaagaagaaagcggccgcggcgcccaaactccgcaagcttccgaagcgcgacgcggataagaagctcgggaagaagggtgacatggcagagttcagggcgcagctggactcccttgggctgaagatagtccaagtcacggcagatgggaactgcttcttcagcttgagggcgatgaggaagagcacatgaagtaccgagatatggttgtggattacattgtgaaacaccgtgaggagtttgagccatttatcgaggatgaagttccgtttgaagaatattgcaactctatgctaaaggatgggacttgggctggccacatggagctgcaagccgcttctctgctgacaagaagaaatatatgcattcacatgcttaattcaccacgttggtacataaacaacttttctggccgtgaagctactaacatggttcacttgtcttatcatcatggtgagcattacaacagtgtcaggctgagagaagatccatgtcaaggtcctgcaatgccagttgtcatcaagttacagactgattccaatatatccaacacaaacaataacgctcaaacaaaagcaaaggaggtgaagaaatcttcacacaggtcaacctatgacgacacatcagttaaattggtcatggctggaactggatgttctgacattgccatagctgagcatgttctcggagaaatggatggtgatgttgatgctgctattgagtacctgatagcggagcgacttgcagtcagtactgatgatgcggaggtagacctttatataaaccatgcatttaacggagatgaacctaccaagaggcaagaggataataacatgatcgagcacaaggatgaagcaaattgttccaacgaagatgaaactgtcgagaaaccaaagcattcaaacgctgtgcattctaagaaggagaagtccaaaaccaatggttgttgctcttgtggatctgcaaggaagcacaaggcgtcttgtagtctagccacagcatcatcatcaagagagcctccaagggccaagggcgggcaagggaaaggccagagaggaaagaagcagaagaagaaagagcaagcggaagcagcagctgccaaggccaaggagtctgcaattgtgccagacctaggagctctttgcatctgaacacaagcagcagatacgccagccctgcttttcatccacctgtggcttatcatctcatgcttagttgaagcgaacgcagcagatctgctgcgtgctgactgagggaccgacgtgtaattcatccacaccacacgacaggaggggcgatgatgtcgctaaactagcaggttttgcgatggtatagaatcacaatcgtgtcattggtgtcatgcttactaaacaaatcttgttttgacgcgtaagctgatgagcctgtcgaatggcctctggtgacgcgttggcctccactggacccatcttggtgccactgatgcccagccgtcaggccagtcgcctggcctgacgactgatgcccaggcccagcctccttgagatccgtggatctgcccttccaaatgctgaactcttgtgtagattataagcactagggactagatcactagagttaagaccacttatcatttctgagttctcactctgttcatccactcgttaggaaggctattttgatgccgcacaggcaactctcctagacagctaaggatataagaacggatttaattgatgttgaaacgatttagctgcaggtgcatgcagctagggatgaaagtaggatgggaaaatctcgtaccgaccgttatcgtataactgattttgttagttttattccgatcgatttcgaacccgaggtaaaaaacgaaaacggaacggaaatgggatatacaaaacggtaaacggaaacggaaacggtagagctagtttcccgaccgtttcatcgggatcccgtttttaatcggaatgatcccgtttcgttaccgtattttctaattcgggatcactgcaatatggccagctccaactcccatccataatcactgaggcccagcccatgtaagaaaaacctagcgatccgacctgtctcgcctggcgctgctctgcctctctcccaggcggccagccgcacgtccgcaccacagcatcacacattcacacgccgccacgcgcccacgccggagtccggacgccgccagccgcacgccgacgccggcgacgcgtctcgctctcgcctgctctctccctgtctcccagccggccggccgcaccaggcaccacacgcggtgacgcggcacgccggacgcagacaccgccatccgcccatccgccgaacgccatccctccactgctcgtcctccagacctccactccactgctcgcccatccgcggtccgctcatccgccatccgccatccgcggtcctccagacctccactgctcgcccatccggccatccgcggtctccctgtctccacggttgctcacagcagtaccgcaccaagctgcagtgtgctgtccagggctgctgattgctgaacacctgctgtccaggggctctgctctccacttcggctagccggctacaactccattcctcagatgacgcctccggttggaaataatcctccctcaggctcagccataagattggccaagttgatgtgtgctagtagacttatatgacttcttatgttagccaagagcccaagacttatcacttatgtgctacattaaactatgtgtgctccggatttatatggattttatctatgtttaattaagacttgtgtttacaattttttatatttgtttttaagttttgaatatatgttttcatgtgtgattttaccgaacaaaaataccggttcccgtccgatttcggctttaacccgatcagatagtatcggttttcgattaccgtatttatcccgttcgttttcgttaccgatatatcccgttttcgtttccgtcccgcaagttaaatatgaaaatgaaaacggtagaggtatccgcaagttaaatatgaaaatgaaaacggtagaggtattttaccgaccgttttcatccctacatgtagctttgaaatgagaagggcatcttgaaatgcctatatttattataaaaggaaac

SEQ ID NO: 18925 - DNA, 3254 bp, Zea Mays
gtagacctcgccgtcggccaccgcccgtgcaatttggagttgagggaagttcaccggaaggcagcacgatggttcagaagaagaagaaagcggccgcggcgcccaaactccgcaagcttccgaagcgcgacgcggataagaagctcgggaagaagggtgacatggcagagttcagggcgcagctggactcccttgggctgaagatagtccaagtcacggcagatgggaactgcttcttcagcttgagggcgatgaggaagagcacatgaagtaccgagatatggttgtggattacattgtgaaacaccgtgaggagtttgagccatttatcgaggatgaagttccgtttgaagaatattgcaactctatgctaaaggatgggacttgggctggccacatggagctgcaagccgcttctctgctgacaagaagaaatatatgcattcacatgcttaattcaccacgttggtacataaacaacttttctggccgtgaagctactaacatggttcacttgtcttatcatcatggtgagcattacaacagtgtcaggctgagagaagatccatgtcaaggtcctgcaatgccagttgtcatcaagttacagactgattccaatatatccaacacaaacaataacgctcaaacaaaagcaaaggaggtgaagaaatcttcacacaggtcaacctatgacgacacatcagttaaattggtcatggctggaactggatgttctgacattgccatagctgagcatgttctcggagaaatggatggtgatgttgatgctgctattgagtacctgatagcggagcgacttgcagtcagtactgatgatgcggaggtagacctttatataaaccatgcatttaacgtagcgtttttgctaaaatatggatgttggagcaagaaaattccttggttgtacagagtatggagatgaacctaccaagaggcaagaggataataacatgatcgagcacaaggatgaagcaaattgttccaacgaagatgaaactgtcgagaaaccaaagcattcaaacgctgtgcattctaagaaggagaagtccaaaaccaatggttgttgctcttgtggatctgcaaggaagcacaaggcgtcttgtagtctagccacagcatcatcatcaagagagcctccaagggccaagggcgggcaagggaaaggccagagaggaaagaagcagaagaagaaagagcaagcggaagcagcagctgccaaggccaaggagtctgcaattgtgccagacctaggagctctttgcatctgaacacaagcagcagatacgccagccctgcttttcatccacctgtggcttatcatctcatgcttagttgaagcgaacgcagcagatctgctgcgtgctgactgagggaccgacgtgtaattcatccacaccacacgacaggaggggcgatgatgtcgctaaactagcaggttttgcgatggtatagaatcacaatcgtgtcattggtgtcatgcttactaaacaaatcttgttttgacgcgtaagctgatgagcctgtcgaatggcctctggtgacgcgttggcctccactggacccatcttggtgccactgatgcccagccgtcaggccagtcgcctggcctgacgactgatgcccaggcccagcctccttgagatccgtggatctgcccttccaaatgctgaactcttgtgtagattataagcactagggactagatcactagagttaagaccacttatcatttctgagttctcactctgttcatccactcgttaggaaggctattttgatgccgcacaggcaactctcctagacagctaaggatataagaacggatttaattgatgttgaaacgatttagctgcaggtgcatgcagctagggatgaaagtaggatgggaaaatctcgtaccgaccgttatcgtataactgattttgttagttttattccgatcgatttcgaacccgaggtaaaaaacgaaaacggaacggaaatgggatatacaaaacggtaaacggaaacggaaacggtagagctagtttcccgaccgtttcatcgggatcccgtttttaatcggaatgatcccgtttcgttaccgtattttctaattcgggatcactgcaatatggccagctccaactcccatccataatcactgaggcccagcccatgtaagaaaaacctagcgatccgacctgtctcgcctggcgctgctctgcctctctcccaggcggccagccgcacgtccgcaccacagcatcacacattcacacgccgccacgcgcccacgccggagtccggacgccgccagccgcacgccgacgccggcgacgcgtctcgctctcgcctgctctctccctgtctcccagccggccggccgcaccaggcaccacacgcggtgacgcggcacgccggacgcagacaccgccatccgcccatccgccgaacgccatccctccactgctcgtcctccagacctccactccactgctcgcccatccgcggtccgctcatccgccatccgccatccgcggtcctccagacctccactgctcgcccatccggccatccgcggtctccctgtctccacggttgctcacagcagtaccgcaccaagctgcagtgtgctgtccagggctgctgattgctgaacacctgctgtccaggggctctgctctccacttcggctagccggctacaactccattcctcagatgacgcctccggttggaaataatcctccctcaggctcagccataagattggccaagttgatgtgtgctagtagacttatatgacttcttatgttagccaagagcccaagacttatcacttatgtgctacattaaactatgtgtgctccggatttatatggattttatctatgtttaattaagacttgtgtttacaattttttatatttgtttttaagttttgaatatatgttttcatgtgtgattttaccgaacaaaaataccggttcccgtccgatttcggctttaacccgatcagatagtatcggttttcgattaccgtatttatcccgttcgttttcgttaccgatatatcccgttttcgtttccgtcccgcaagttaaatatgaaaatgaaaacggtagaggtatccgcaagttaaatatgaaaatgaaaacggtagaggtattttaccgaccgttttcatccctacatgtagctttgaaatgagaagggcatcttgaaatgcctatatttattataaaaggaaac

SEQ ID NO: 18926 - DNA, 1212 bp, Zea Mays
ctatttttagggttacagtttaactatcttccaaaccgctttttctggtgaagttgctgggctttctctgcagtaagctcagtagaaagcgttaaccaaattgttactggtgagatggtgaccttgtccgagcaggagcttgtagagtgctcgactgatggagggaacagcggctgcaatggtgggcttatggatgccgcatttgattttatcataaagaacgggggcattgatactgaaggagactacccttacaaagctgtggatgggaagtgtgacatcaacagggaaaatgccaaggttgtgagcatcgatggctttgaagatgtgcctgaaaacgacgagaaatcattgcagaaggcagttgctcaccagcccgtcagcgttgccattgaggctggtggccgggagttccagctgtacaaagcgggtgtctttactggaacttgcaccacgaatcttgaccacggtgtcgtcgctgtcggctacggcaccgaaaatgggaaggactactggattgtccgcaactcttggggtgcaaagtggggcgaggatggttacatccgtatggagaggaacgtcaatgccaccactgggaagtgcgggattgctatgatggcatcctaccctaccaagaagggcgcaaaccctcccaagccgtctccaacccctccaacgccgccgcctcccccggttgccccggacaatgtctgcgatgagaacttctcctgcgcagcgggcagcacctgctgctgtgcgtttggtttcaggaacgtctgcttggtctggggttgctgtccgatggaaggtgccacctgctgcaaggaccacgccagctgttgcccgccgggttaccctgtgtgcaacgtcagagccggaacttgctcggtgagcaagaacagcccgctgagcgtgaaggccttgaagcgcaccctcgccaagctgaacagcgcatgagctcgtccagacatcagggatcatcgatctggagaggaatgggaccaccgcccggagcttttcagactctgcgtcctgatacaagctttcatagataacattatattgtatctaagtattacttggcgtcccatgaatccgttgtaaatatcaagctataatttctactatctttgttctcgaatttttattgcccgctaatttttttttttgaacagggctcctttgaaatgtaggaatttcatagaaatgata

SEQ ID NO: 18927 - DNA, 1330 bp, Zea Mays
gctgcaccttcacagccagtcaaacctcaaacggacacgcgacgggcgcggccgtgatcgtcatcgcgcaggcggcactttcggagccaccaagggaaggaaagagacgatccgctgatcgccggacgactctcatccgttctccaacaaagcgggctgattggcactcctgctcccaagttccccactcccttccccgaattccggaccgagtcgatggcggcgacggcggagagcccctcgaccggcggcttcgtgctgtggctgcacggctccggcgggtcgggcgacgagagccgcgcgcaggtcgcgccctacttctccgacccgggcgtcgcctcctccgtccggctgtccttccccaccgcgcccacgtccttcatcccttgctacggatgcgatctgctctgttgcttcgcgctatggctgctttgcaaggctcgtgatgtggtgatcacggcttggttcggcatctcggaggttcctattaccgcgaaaactgttagagatgagaaagaagtccttaaagctgttgagtatgtgcatgaattgatagacaaagaagtagctgcgggaacgagcccgtcaaacatattcgtttgtgggatgagccaaggaggtgctctagctatagcgagtgctctactctacccaaaaactctgggtggctgtgctgtcttcagtggctcagttccgccgaataaatcattcgccgataaggtgtcacctgaagctagaaagacaccggtgttatggtttcatgggatggcagatggggtggtcctatttgaagcaggacatgctgggtgtgcatttttagaggagcttggcatgtcctgtgaattcaaggcttatcctacccttggacattcattggttgacgaagagcttcaatactttcagcaatggatcctgattcgtctagggatggctgcatctggagcggctgaaaccgcaaggccatcatcgtcatctaaccacaacgaccatctccaatagctgttttttttgtcattgcttagtttctagtacaattcattgctgctatctttgcgtggcacatcagttctcgttgtgacgaacataaacatctttcttaatctccttcacattatttttttataatagcagtaattgacttaacattattcaactaaggaattgaaagcctcacgagttctaacgtgatccgagaaggtttatgataataacagtagttgacttccatcgtgattcgtgtccgtgaatttgattcgttccttctgaaacaaaaagatcttgaattaacactcaattttcggaaatcacaaaagtgaagaccggttttttt

SEQ ID NO: 18928 - DNA, 860 bp, Zea Mays
ggatcccaacccaaaacaactgcagaaaactgttagagatgagaaagaagtccttaaagctgttgagtatgtgcatgaattgatagacaaagaagtagctgcgggaacgagcccgtcaaacatattcgtttgtgggatgagccaaggaggtgctctagctatagcgagtgctctactctacccaaaaactctgggtggctgtgctgtcttcagtggctcagttccgccgaataaatcattcgccgataaggtgtcacctgaagctagaaagacaccggtgttatggtttcatgggatggcagatggggtggtcctatttgaagcaggacatgctgggtgtgcatttttagaggagcttggcatgtcctgtgaattcaaggcttatcctacccttggacattcattggttgacgaagagcttcaatactttcagcaatggatcctgattcgtctagggatggctgcatctggagcggctgaaaccgcaaggccatcatcgtcatctaaccacaacgaccatctccaatagctgttttttttgtcattgcttagtttctagtacaattcattgctgctatctttgcgtggcacatcagttctcgttgtgacgaacataaacatctttcttaatctccttcacattatttttttataatagcagtaattgacttaacattattcaactaaggaattgaaagcctcacgagttctaacgtgatccgagaaggtttatgataataacagtagttgacttccatcgtgattcgtgtccgtgaatttgattcgttccttctgaaacaaaaagatcttgaattaacactcaattttcggaaatcacaaaagtgaagaccggttttttt

SEQ ID NO: 18929 - DNA, 588 bp, Zea Mays
aacttcgtcaacgttatgttctcttgcaccaactattgcatcaagaaaagccaataccgattgggatgaccccgtttctttggtcacatggaatggctgacaaagtagtattgtttgaagctggccaggctggtccaccgtttttgcaaagcgctggtgttaactgtgagttcaaggcatatccagatctgggtcattcgctttcccaagaagagctactttatcttgagtcgtggatcaagagtcgtctaaatgcctctcaagagaaggacggttaactgattccatcatgcttaagtggcatttatttagtatttttattatacgatacacagatcaactacttgtcctggaatttgttatttggaatttccgattggttatcgttgtcgggtgaataagggcacatagaaccgggatcttctgctggccatggatgttctaaatgcacttgtaacggccctggtatctgacactctcctacaatacaagggctgcagctctagcttgaattgcctggtcaactaaactgtctttgccatggattagcatgttcgtttgaaagatcgagatggaaaggaacaccag

SEQ ID NO: 18930 - DNA, 3060 bp, Zea Mays
ttttcgatgctgttacttgtcttctccctcgactcattgcgctgcagctaatatcatatcactgcttatgtggcaccatctacacgtagtagcgcgtggactccgttccggccaaaaaaaatcctgcgtcgtcaagcaggaatcgatgaccacagagaccggccaaaaaaaaaaaaaaaccaaacgtgttattgctgcacctaaggaaacgcggccgaggacgagagtgggccagcggggtcgaggaggtaaagaaaactaatggcagcgaaggagggaggcagtggggaaggtgggaagcggctgcccaaagccacctccaccaccaggccttcttctacccccatcccaacgcccaggccacaccagcgcagcgagctctctcctcgtagcggagtcccagcccctcacgccctcccgatcgcgctcgtcggcgcccttgtcgactcgagcccgcttctgggccgatcgacagcgagagcgagagcagcggcgcgccgaggagagctctttcggtgctgctgtataacgacgacgacagcaggcggcagataacacataaaggcgcgcgatgtgcgacgcggcggccgtggcggctccgcggtacaggggcgtgcggaagcggccgtggggccggttcgcggcggagatccgggacccggcgaagcgcgcgcgcgtctggctcggcaccttcgactccgccgaggccgcggcgcgcgcctacgacgtggccgcgcgggccctgcgcggcccgctcgccaggaccaacttccccgcgctcacctcccgccctcctgccaacctgcccgcgcccacgcccacgtgcagctcaagctccaccgtcgagtcctccagcgggccccgggccggggtgcccagggcgggcaggcgcgctgctgggaagccgcgtgccccgcggcaggcggccgcgcccgccgacgccgactgccgtagcgactgcgcctcgtcggcctccgtcgtggacgacggcgacgacgcctccacggtccggtcgcgcccggcgctcgacctcaatctccccgcgccgctcgacgtcgacgatggtcatgacctcgagctttgcacggacctgcggctctgaataggcgaccggatccacggacggatcgggacgaagggagagaaggcggtttttgctttggtcttcttttcttgatcagattctgccttgctttgacttgtcgtgctcgagggagcttgtaccagtgctgcactgtactactcgatacgaatggcaatagaattggatgacgattcctgcaacgctatgcagactgcggatccgttcagagaggctccgctcggcgctcctgacaccatcggccatcgcgcttcgcgcccgcaactgctcgaccgagccgggaccgggcggcgcccgttcgttgcgtatcccgcaagttggccggcctccctccgccttgggaggggaaagcggaggaggaagagggagccaagcggtcaagccggctcggccgatcgcctcccaccaaaatacccccgaatccccatccccaagcaacacccagaaaaggcgacaagtgccgaggtctggggagcgatggttgtgcggcggctgggcggcacggggcgcgcgctgctcacgctccccaacatccggaggcgggcgtccaactcctgggccgccgtctgcgacaccttcttctccaccaagcaagtgttcgagagccaccgcatcgtcttcaccgtcggcacctcaatcgcctccgtcctcacggcttgggccggttattcacttcgccatgtgcaacaattaaagattgaaaggaggcttgagtcaattgaatcatctctgaaggataaccacaaagttgaacatgaagagataaaaaagatcgtcacttccagcaatattagcgctccaggctgtgtagccacggcgatgaccacaatggttgttgggtacgcgttaggctggcgaggcggtgcttggtacgctcgaagggccttcagaagagagcagcaaaagctgatgatgggtcacatgaagtcgtcacagaacaggtggcactggcggcccttcaacaggctcaggaacagcaggaggaggctccgcgtggaggcgatcaggacgcagcgaacggaggtgcccgtcgaggagtccgcccccgccagggacgccgccgctgccgcgcccctggacggaaacggagccggagcggacggctccgtggttccttcctcggacgacagctgggttgtcaagctcgagcagtcgttcaacattttcgccacggattcggtgattatggtactcaagggcgtgtacggtgatcggtactacgccaggttctttgcgctggagacgattgcgagggtgccgtacttcgcattcatatcggtgcttcacttgtatgcgacctttggatggtggagacgagctgattacataaaggttcactttgcgcagagctggaacgagttccatcacctcttgatcatggaagaattgggtggcgactctttgtggtttgactgttttcttgctcggtttatggcattcttttactacttcatgactgttgcaatgtacatgctgagcccacgaatggcatatcacttttccgaatgtgtggagagacatgcatattccacctatgatgagttcctcaagctccatgaagaggaattgaaaagactaccagctccagaggcagcattgaactattacatgaatgaggacctttacttattcgatgagtttcaggcatcaagaactccaggttctaggaggcctaaaatagataacttatacgatgtattcgttaatatacgagaagatgaggcagagcactgcaagacaatgaagacctgtcaaacacatggaaatcttcgttctcctcattcaacgccgaactgcttagaagatgatacggaatgtgtaatacctgaaaacgactgtgaaggtgtcgtagtatacaaagtataaaattttgatgatatcctctcttttttctatgtctcattcaaagtaaaatccaggtcatatatcacagaaaccaatttaaatgcaggatcaaa

SEQ ID NO: 18931 - DNA, 1798 bp, Zea Mays
aaaaaaaaaaaaaaaccaaacgtgttattgctgcacctaaggaaacgcggccgaggacgagagtgggccagcggggtcgaggaggtaaagaaaactaatggcagcgaaggagggaggcagtggggaaggtgggaagcggctgcccaaagccacctccaccaccaggccttcttctacccccatcccaacgcccaggccacaccagcgcagcgagctctctcctcgtagcggagtcccagcccctcacgccctcccgatcgcgctcgtcggcgcccttgtcgactcgagcccgcttctgggccgatcgacagcgagagcgagagcagcggcgcgccgaggagagctctttcggtgctgctgtataacgacgacgacagcaggcggcagataacacataaaggcgcgcgatgtgcgacgcggcggccgtggcggctccgcggtacaggggcgtgcggaagcggccgtggggccggttcgcggcggagatccgggacccggcgaagcgcgcgcgcgtctggctcggcaccttcgactccgccgaggccgcggcgcgcgcctacgacgtggccgcgcgggccctgcgcggcccgctcgccaggaccaacttccccgcgctcacctcccgccctcctgccaacctgcccgcgcccacgcccacgtgcagctcaagctccaccgtcgagtcctccagcgggccccgggccggggtgcccagggcgggcaggcgcgctgctgggaagccgcgtgccccgcggcaggcggccgcgcccgccgacgccgactgccgtagcgactgcgcctcgtcggcctccgtcgtggacgacggcgacgacgcctccacggtccggtcgcgcccggcgctcgacctcaatctccccgcgccgctcgacgtcgacgatggtcatgacctcgagctttgcacggacctgcggctctgaataggcgaccggatccacggacggatcgggacgaagggagagaaggcggtttttgctttggtcttcttttcttgatcagattctgccttgctttgacttgtcgtgctcgagggagcttgtaccagtgctgcactgtactactcgatacgaatggcaatagaattggatgacgattcctgcaacgctatgcagactgcggatccgttcagaggttattcacttcgccatgtgcaacaattaaagattgaaaggaggcttgagtcaattgaatcatctctgaaggataaccacaaagttgaacatgaagagataaaaaagatcgtcacttccagcaatattagcgctccaggctgtgtagccacggcgatgaccacaatggttgttgggtacgcgttaggctggcgaggcggtgcttggtacgctcgaagggccttcagaagagagcagcaaaagctgatgatgggtcacatgaagtcgtcacagaacaggtggcactggcggcccttcaacaggctcaggaacagcaggttaaccgcctccaagaacaagagcaccgatgccctctcaacctcacgcagcggggcctctgcgaacgttggcagcgcagcgggcagtgcttgagctatacgcataatggactaggatgtggacttagggcgcgtagtagtccatacaactttactacgtagaacagatcatgtgactggtaggtacgcagattgatctacatgcgcgcagtggatcatttttttgtgtagtatattaaggtcataatgcacccaactgcatgcatggaacaactgactgacgataggattgagttgagacagccatatggtggcagatcgtttgacttcccg

SEQ ID NO: 18932 - DNA, 3761 bp, Zea Mays
aaaaaaaaaaaaaaaccaaacgtgttattgctgcacctaaggaaacgcggccgaggacgagagtgggccagcggggtcgaggaggtaaagaaaactaatggcagcgaaggagggaggcagtggggaaggtgggaagcggctgcccaaagccacctccaccaccaggccttcttctacccccatcccaacgcccaggccacaccagcgcagcgagctctctcctcgtagcggagtcccagcccctcacgccctcccgatcgcgctcgtcggcgcccttgtcgactcgagcccgcttctgggccgatcgacagcgagagcgagagcagcggcgcgccgaggagagctctttcggtgctgctgtataacgacgacgacagcaggcggcagataacacataaaggcgcgcgatgtgcgacgcggcggccgtggcggctccgcggtacaggggcgtgcggaagcggccgtggggccggttcgcggcggagatccgggacccggcgaagcgcgcgcgcgtctggctcggcaccttcgactccgccgaggccgcggcgcgcgcctacgacgtggccgcgcgggccctgcgcggcccgctcgccaggaccaacttccccgcgctcacctcccgccctcctgccaacctgcccgcgcccacgcccacgtgcagctcaagctccaccgtcgagtcctccagcgggccccgggccggggtgcccagggcgggcaggcgcgctgctgggaagccgcgtgccccgcggcaggcggccgcgcccgccgacgccgactgccgtagcgactgcgcctcgtcggcctccgtcgtggacgacggcgacgacgcctccacggtccggtcgcgcccggcgctcgacctcaatctccccgcgccgctcgacgtcgacgatggtcatgacctcgagctttgcacggacctgcggctctgaataggcgaccggatccacggacggatcgggacgaagggagagaaggcggtttttgctttggtcttcttttcttgatcagattctgccttgctttgacttgtcgtgctcgagggagcttgtaccagtgctgcactgtactactcgatacgaatggcaatagaattggatgacgattcctgcaacgctatgcagactgcggatccgttcagagaggctccgctcggcgctcctgacaccatcggccatcgcgcttcgcgcccgcaactgctcgaccgagccgggaccgggcggcgcccgttcgttgcgtatcccgcaagttggccggcctccctccgccttgggaggggaaagcggaggaggaagagggagccaagcggtcaagccggctcggccgatcgcctcccaccaaaatacccccgaatccccatccccaagcaacacccagaaaaggcgacaagtgccgaggtctggggagcgatggttgtgcggcggctgggcggcacggggcgcgcgctgctcacgctccccaacatccggaggcgggcgtccaactcctgggccgccgtctgcgacaccttcttctccaccaagcaagtgttcgagagccaccgcatcgtcttcaccgtcggcacctcaatcgcctccgtcctcacggcttgggccggttattcacttcgccatgtgcaacaattaaagattgaaaggaggcttgagtcaattgaatcatctctgaaggataaccacaaagttgaacatgaagagataaaaaagatcgtcacttccagcaatattagcgctccaggctgtgtagccacggcgatgaccacaatggttgttgggtacgcgttaggctggcgaggcggtgcttggtacgctcgaagggccttcagaagagagcagcaaaagctgatgatgggtcacatgaagtcgtcacagaacaggtggcactggcggcccttcaacaggctcaggaacagcaggttaaccgcctccaagaacaagagcaccgatgccctctcaacctcacgcagcggggcctctgcgaacgttggcagcgcagcgggcagtgcttgagctatacgcataatggactaggatgtggacttagggcgcgtagtagtccatacaactttactacgtagaacagatcatgtgactggtaggtacgcagattgatctacatgcgcgcagtggatcatttttttgtgtagtatattaaggtcataatgcacccaactgcatgcatggaacaactgactgacgataggattgagttgagacagccatatggtggcagatcgtttgacttcccgtgatactactagtctactactagtttgatgaagggtctagtgtgcttcgcgctggcgagtgctcgcaaagtacatccactagcgagcagtgaaaaagagatccactagtgataaaggagcggagcgcatcgtgacacggcaggaaatcaatcaggcgccgcgatcggcaccggagtctatccatcaatcctgtatatttttttctctcctcgtggtcgccagcactgccgtgccgagccggaggccgagctcggcagctgcccgcctcggtgtgtcgccgccgcaccccacccacgtagcaaaagccgtcttcccgtaccgtaggcagcggcaaacagcgccccctcatcactcggtctcgttccctcctctccaacttcactcgcgtcgcgcccctccactgcaccagcgtcatggcggtggcctcgacctcgccgctgtccgccaagcccgccacggccccttcgccgcccgctcccggatccgggctcctcgctctcggcgttcgccgcgcccccgccactgccgcgtggaggaggctccgcgtggaggcgatcaggacgcagcgaacggaggtgcccgtcgaggagtccgcccccgccagggacgccgccgctgccgcgcccctggacggaaacggagccggagcggacggctccgtggttccttcctcggacgacagctgggttgtcaagctcgagcagtcgttcaacattttcgccacggattcggtgattatggtactcaagggcgtgtacggtgatcggtactacgccaggttctttgcgctggagacgattgcgagggtgccgtacttcgcattcatatcggtgcttcacttgtatgcgacctttggatggtggagacgagctgattacataaaggttcactttgcgcagagctggaacgagttccatcacctcttgatcatggaagaattgggtggcgactctttgtggtttgactgttttcttgctcggtttatggcattcttttactacttcatgactgttgcaatgtacatgctgagcccacgaatggcatatcacttttccgaatgtgtggagagacatgcatattccacctatgatgagttcctcaagctccatgaagaggaattgaaaagactaccagctccagaggcagcattgaactattacatgaatgaggacctttacttattcgatgagtttcaggcatcaagaactccaggttctaggaggcctaaaatagataacttatacgatgtattcgttaatatacgagaagatgaggcagagcactgcaagacaatgaagacctgtcaaacacatggaaatcttcgttctcctcattcaacgccgaactgcttagaagatgatacggaatgtgtaatacctgaaaacgactgtgaaggtgtcgtagtatacaaagtataaaattttgatgatatcctctcttttttctatgtctcattcaaagtaaaatccaggtcatatatcacagaaaccaatttaaatgcaggatcaaa

SEQ ID NO: 18933 - DNA, 3976 bp, Zea Mays
aaaaaaaaaaaaaaaccaaacgtgttattgctgcacctaaggaaacgcggccgaggacgagagtgggccagcggggtcgaggaggtaaagaaaactaatggcagcgaaggagggaggcagtggggaaggtgggaagcggctgcccaaagccacctccaccaccaggccttcttctacccccatcccaacgcccaggccacaccagcgcagcgagctctctcctcgtagcggagtcccagcccctcacgccctcccgatcgcgctcgtcggcgcccttgtcgactcgagcccgcttctgggccgatcgacagcgagagcgagagcagcggcgcgccgaggagagctctttcggtgctgctgtataacgacgacgacagcaggcggcagataacacataaaggcgcgcgatgtgcgacgcggcggccgtggcggctccgcggtacaggggcgtgcggaagcggccgtggggccggttcgcggcggagatccgggacccggcgaagcgcgcgcgcgtctggctcggcaccttcgactccgccgaggccgcggcgcgcgcctacgacgtggccgcgcgggccctgcgcggcccgctcgccaggaccaacttccccgcgctcacctcccgccctcctgccaacctgcccgcgcccacgcccacgtgcagctcaagctccaccgtcgagtcctccagcgggccccgggccggggtgcccagggcgggcaggcgcgctgctgggaagccgcgtgccccgcggcaggcggccgcgcccgccgacgccgactgccgtagcgactgcgcctcgtcggcctccgtcgtggacgacggcgacgacgcctccacggtccggtcgcgcccggcgctcgacctcaatctccccgcgccgctcgacgtcgacgatggtcatgacctcgagctttgcacggacctgcggctctgaataggcgaccggatccacggacggatcgggacgaagggagagaaggcggtttttgctttggtcttcttttcttgatcagattctgccttgctttgacttgtcgtgctcgagggagcttgtaccagtgctgcactgtactactcgatacgaatggcaatagaattggatgacgattcctgcaacgctatgcagactgcggatccgttcagagaggctccgctcggcgctcctgacaccatcggccatcgcgcttcgcgcccgcaactgctcgaccgagccgggaccgggcggcgcccgttcgttgcgtatcccgcaagttggccggcctccctccgccttgggaggggaaagcggaggaggaagagggagccaagcggtcaagccggctcggccgatcgcctcccaccaaaatacccccgaatccccatccccaagcaacacccagaaaaggcgacaagtgccgaggtctggggagcgatggttgtgcggcggctgggcggcacggggcgcgcgctgctcacgctccccaacatccggaggcgggcgtccaactcctgggccgccgtctgcgacaccttcttctccaccaagcaagtgttcgagagccaccgcatcgtcttcaccgtcggcacctcaatcgcctccgtcctcacggcttgggccggttattcacttcgccatgtgcaacaattaaagattgaaaggaggcttgagtcaattgaatcatctgtaagtaatttagaaggaatactgtttttgttggtgaagcgagtttgttctctcctttcggctctgtttatttataagctgataatccagcaggtggtgtgagcgctaagacgctgttgtgtaaactcttagcctctgaccaaaaaaggaaaaaaaaacactgattttctcaagtgtgcaggagtgttatgtgtctttaagtcaaaaagagataactggtctgaaaacacacacttttgaaatacaaactctctcacataagcactgacaacaaatgcacaccccccagacagacagtaagatcacacagaagaaatactgtcaaagctttttttagttactctttaacagtgttgtatcctctacacctgtttgggccattttcatttctcacttcttagcttaaccttaacctacatatgcaaagatgaaagctgacaacaaagcaattttggaatttggactgctccaccgtaggcttaaaatttcagggcatattagaaacttatgtggtgctattttgtttcccgagcaacattttgtttgttgaaacgaacatgcaggaaagctgcctgttgtattacaaggaaaattggttttgggggactatttttttcctgattttttcagtaggatgctgttaattaaccccttgtctgcaggacagtgtctagaagttttttttcatgtgtctagaagttttttcgtcctgtagacaaatttttcatattagaaaggaagagcaaaaatgtcttgcagacaaacttcccatattagaaaggaagagcaaaacactctctgaaggggaactaccatcacagattacaataccaccttaagccacacctagtattccaacagaacataccttgttgtgctgttgacaacaagattaaagtgttctcactgttcacttcatttgcatctatttcagttgcttattttcatttttatggtgcactccgatgttgaagatacactctttaacccagccaaaaaaacttgatgctttaggtttttatattgtatcacgttgctttttgaatggttggattatctgctttctttgtccctttctattttcatctgttcttttttctcgtattgactgctggacatatttacttgtaccatttcttgatatgttaacagctgaaggataaccacaaagttgaacatgaagagataaaaaagatcgtcacttccagcaatattagcgctccaggctgtgtagccacggcgatgaccacaatggttgttgggtacgcgttaggctggcgaggcggtgcttggtacgctcgaagggccttcagaagagagcagcaaaagctgatgatgggtcacatgaagtcgtcacagaacaggtggcactggcggcccttcaacaggctcaggaacagcaggaggaggctccgcgtggaggcgatcaggacgcagcgaacggaggtgcccgtcgaggagtccgcccccgccagggacgccgccgctgccgcgcccctggacggaaacggagccggagcggacggctccgtggttccttcctcggacgacagctgggttgtcaagctcgagcagtcgttcaacattttcgccacggattcggtgattatggtactcaagggcgtgtacggtgatcggtactacgccaggttctttgcgctggagacgattgcgagggtgccgtacttcgcattcatatcggtgcttcacttgtatgcgacctttggatggtggagacgagctgattacataaaggttcactttgcgcagagctggaacgagttccatcacctcttgatcatggaagaattgggtggcgactctttgtggtttgactgttttcttgctcggtttatggcattcttttactacttcatgactgttgcaatgtacatgctgagcccacgaatggcatatcacttttccgaatgtgtggagagacatgcatattccacctatgatgagttcctcaagctccatgaagatgagtttcaggcatcaagaactccaggttctaggaggcctaaaatagataacttatacgatgtattcgttaatatacgagaagatgaggcagagcactgcaagacaatgaagacctgtcaaacacatggaaatcttcgttctcctcattcaacgccgaactgcttagaagatgatacggaatgtgtaatacctgaaaacgactgtgaaggtgtcgtagtatacaaagtataaaattttgatgatatcctctcttttttctatgtctcattcaaagtaaaatccaggtcatatatcacagaaaccaatttaaatgcaggatcaaa

SEQ ID NO: 18934 - DNA, 2518 bp, Zea Mays
aaaaaaaaaaaaaaaccaaacgtgttattgctgcacctaaggaaacgcggccgaggacgagagtgggccagcggggtcgaggaggtaaagaaaactaatggcagcgaaggagggaggcagtggggaaggtgggaagcggctgcccaaagccacctccaccaccaggccttcttctacccccatcccaacgcccaggccacaccagcgcagcgagctctctcctcgtagcggagtcccagcccctcacgccctcccgatcgcgctcgtcggcgcccttgtcgactcgagcccgcttctgggccgatcgacagcgagagcgagagcagcggcgcgccgaggagagctctttcggtgctgctgtataacgacgacgacagcaggcggccgcgcccgccgacgccgactgccgtagcgactgcgcctcgtcggcctccgtcgtggacgacggcgacgacgcctccacggtccggtcgcgcccggcgctcgacctcaatctccccgcgccgctcgacgtcgacgatggtcatgacctcgagctttgcacggacctgcggctctgaataggcgaccggatccacggacggatcgggacgaagggagagaaggcggtttttgctttggtcttcttttcttgatcagattctgccttgctttgacttgtcgtgctcgagggagcttgtaccagtgctgcactgtactactcgatacgaatggcaatagaattggatgacgattcctgcaacgctatgcagactgcggatccgttcagagaggctccgctcggcgctcctgacaccatcggccatcgcgcttcgcgcccgcaactgctcgaccgagccgggaccgggcggcgcccgttcgttgcgtatcccgcaagttggccggcctccctccgccttgggaggggaaagcggaggaggaagagggagccaagcggtcaagccggctcggccgatcgcctcccaccaaaatacccccgaatccccatccccaagcaacacccagaaaaggcgacaagtgccgaggtctggggagcgatggttgtgcggcggctgggcggcacggggcgcgcgctgctcacgctccccaacatccggaggcgggcgtccaactcctgggccgccgtctgcgacaccttcttctccaccaagcaagtgttcgagagccaccgcatcgtcttcaccgtcggcacctcaatcgcctccgtcctcacggcttgggccggttattcacttcgccatgtgcaacaattaaagattgaaaggaggcttgagtcaattgaatcatctctgaaggataaccacaaagttgaacatgaagagataaaaaagatcgtcacttccagcaatattagcgctccaggctgtgtagccacggcgatgaccacaatggttgttgggtacgcgttaggctggcgaggcggtgcttggtacgctcgaagggccttcagaagagagcagcaaaagctgatgatgggtcacatgaagtcgtcacagaacaggtggcactggcggcccttcaacaggctcaggaacagcaggaggaggctccgcgtggaggcgatcaggacgcagcgaacggaggtgcccgtcgaggagtccgcccccgccagggacgccgccgctgccgcgcccctggacggaaacggagccggagcggacggctccgtggttccttcctcggacgacagctgggttgtcaagctcgagcagtcgttcaacattttcgccacggattcggtgattatggtactcaagggcgtgtacggtgatcggtactacgccaggttctttgcgctggagacgattgcgagggtgccgtacttcgcattcatatcggtgcttcacttgtatgcgacctttggatggtggagacgagctgattacataaaggttcactttgcgcagagctggaacgagttccatcacctcttgatcatggaagaattgggtggcgactctttgtggtttgactgttttcttgctcggtttatggcattcttttactacttcatgactgttgcaatgtacatgctgagcccacgaatggcatatcacttttccgaatgtgtggagagacatgcatattccacctatgatgagttcctcaagctccatgaagaggaattgaaaagactaccagctccagaggcagcattgaactattacatgaatgaggacctttacttattcgatgagtttcaggcatcaagaactccaggttctaggaggcctaaaatagataacttatacgatgtattcgttaatatacgagaagatgaggcagagcactgcaagacaatgaagacctgtcaaacacatggaaatcttcgttctcctcattcaacgccgaactgcttagaagatgatacggaatgtgtaatacctgaaaacgactgtgaaggtgtcgtagtatacaaagtataaaattttgatgatatcctctcttttttctatgtctcattcaaagtaaaatccaggtcatatatcacagaaaccaatttaaatgcaggatcaaa

SEQ ID NO: 18935 - DNA, 2518 bp, Zea Mays
aaaaaaaaaaaaaaaccaaacgtgttattgctgcacctaaggaaacgcggccgaggacgagagtgggccagcggggtcgaggaggtaaagaaaactaatggcagcgaaggagggaggcagtggggaaggtgggaagcggctgcccaaagccacctccaccaccaggccttcttctacccccatcccaacgcccaggccacaccagcgcagcgagctctctcctcgtagcggagtcccagcccctcacgccctcccgatcgcgctcgtcggcgcccttgtcgactcgagcccgcttctgggccgatcgacagcgagagcgagagcagcggcgcgccgaggagagctctttcggtgctgctgtataacgacgacgacagcaggcggcagataacacataaaggcgcgcgatgtgcgacgcggcggccgtggcggctccgcggtacaggggcgtgcggaagcggccgtggggccggttcgcggcggagatccgggacccggcgaagcgcgcgcgcgtctggctcggcaccttcgactccgccgaggccgcggcgcgcgcctacgacgtggccgcgcgggccctgcgcggcccgctcgccaggaccaacttccccgcgctcacctcccgccctcctgccaacctgcccgcgcccacgcccacgtgcagctcaagctccaccgtcgagtcctccagcgggccccgggccggggtgcccagggcgggcaggcgcgctgctgggaagccgcgtgccccgcggcaggcggccgcgcccgccgacgccgactgccgtagcgactgcgcctcgtcggcctccgtcgtggacgacggcgacgacgcctccacggtccggtcgcgcccggcgctcgacctcaatctccccgcgccgctcgacgtcgacgatggtcatgacctcgagctttgcacggacctgcggctctgaataggcgaccggatccacggacggatcgggacgaagggagagaaggcggtttttgctttggtcttcttttcttgatcagattctgccttgctttgacttgtcgtgctcgagggagcttgtaccagtgctgcactgtactactcgatacgaatggcaatagaattggatgacgattcctgcaacgctatgcagactgcggatccgttcagaggttattcacttcgccatgtgcaacaattaaagattgaaaggaggcttgagtcaattgaatcatctctgaaggataaccacaaagttgaacatgaagagataaaaaagatcgtcacttccagcaatattagcgctccaggctgtgtagccacggcgatgaccacaatggttgttgggtacgcgttaggctggcgaggcggtgcttggtacgctcgaagggccttcagaagagagcagcaaaagctgatgatgggtcacatgaagtcgtcacagaacaggtggcactggcggcccttcaacaggctcaggaacagcaggaggaggctccgcgtggaggcgatcaggacgcagcgaacggaggtgcccgtcgaggagtccgcccccgccagggacgccgccgctgccgcgcccctggacggaaacggagccggagcggacggctccgtggttccttcctcggacgacagctgggttgtcaagctcgagcagtcgttcaacattttcgccacggattcggtgattatggtactcaagggcgtgtacggtgatcggtactacgccaggttctttgcgctggagacgattgcgagggtgccgtacttcgcattcatatcggtgcttcacttgtatgcgacctttggatggtggagacgagctgattacataaaggttcactttgcgcagagctggaacgagttccatcacctcttgatcatggaagaattgggtggcgactctttgtggtttgactgttttcttgctcggtttatggcattcttttactacttcatgactgttgcaatgtacatgctgagcccacgaatggcatatcacttttccgaatgtgtggagagacatgcatattccacctatgatgagttcctcaagctccatgaagaggaattgaaaagactaccagctccagaggcagcattgaactattacatgaatgaggacctttacttattcgatgagtttcaggcatcaagaactccaggttctaggaggcctaaaatagataacttatacgatgtattcgttaatatacgagaagatgaggcagagcactgcaagacaatgaagacctgtcaaacacatggaaatcttcgttctcctcattcaacgccgaactgcttagaagatgatacggaatgtgtaatacctgaaaacgactgtgaaggtattgtggactgtgtcaaaaagtcccttacaaagtaaatagactatattctttaatgtgtttgactgttttcaggtgtcgtagtatacaaagtataaaattttgatgatatcctctcttttttctatgtctcattcaaagtaaaatccaggtcatatatcacagaaaccaatttaaatgcaggatcaaa

SEQ ID NO: 18936 - DNA, 3413 bp, Zea Mays
caagcacggcaaacagcggctcccggcactgcgaatatagccctcgttccctccgtccctcgtctcgtctccagactctccaccatcactcgcgcgccggcgccgctcacacgcccatttccaccccacaagacccacacggaatcccggcaccctacctctccaacacgcaccagcatcatggcggtggcttcgacctcgccgctatccgccacggccccctcgccgcccgctccggtgtccgggttcctcgctctccccgcccgccgcggctgcgcaacgcgcctcggctccgccgccgcgtggaggaggcttcgcgtggaggcgatctggaagcagcaggagaagcagcgggcagaggtgtccgtcgaggaacccgcccccgtcagggaggccgccgcgcccctggacggagtcggagctgacgaccccatggttccttcctcggacgagagctgggtggtcaggctcgagcagtcggtcaacattttcctcacggaatcggtgattatactactcaataccgtgtaccgtgatcggaactacgccaggttttttgtgctggagacgattgccagggtgccgtatttcggaattgggtggcaacgctatatggattgattgtttccttgctcgatttatggcgtttttttactacttcatgactgttgcgatgtacatgttgagcccacgaatggcatatcacttctctgaatgtgtggagagacatgcgtactccacctatgataagttcctcaagctccatgaagaggaattgaaaacactaccagctccagaggcagcattgaactattacctgaatgaggacctttacttatttgatgagtttcagacaacaagaattccatgttctaggaggcctaaaatagataacttgtatgatgtattcgtcaatatacgagatgacgaggcagagcactgcaagacaatgaaggcatgtcaaacacatggaactcttcgttctcctcactcaatgccgaactgcttagaagctgctacagaatgtgtaatacctgaaaacgattgtgaaggtattgtggactgtgtcaaaaagtcccttacaaagtaaatagtatgtagaatcctctttcgtgtgttttcaggcatcatagtatacaaaagtacaaattctggatgatatcctctcttttttcctgtgtatctttgttaaagcaaaatccgggtcatatatcacacagaagtcagtgtagatacaattatgcaacagaatcaaatatctaacattgaagatatgagaatattcaggctgtgaagcattgcctcgtcgcttgctgtgctgtggatatgatttataaaacgttgcattcttgttgcatcgtatactcacgaatgcagtgtccaaaaagcagtatagacaaatcccatgatcaggacttgaggcaccgtgcaatcccaccagtcacaacagcacattccgtggaagttttcaccgtaaaatatcttgccgtcaaaccagcacagtgtacatacaaatgtatatatttacattttttcagaaaatgtatatatttacttcgacaaaccattacataagctattcgcccttttcaataccattgtgattattttttgtgttaaaactatgtatatgagcctatctaagcactaagcatgaatataggtgagtgaggtatgtagcacagtagaacattttttatgctcacatcttgcatactttgtcatctttacattcgccctgcggaagggaaatgcagtcagtaaactgaagctgctgaaatgttcactcgcaaccagtatgattactgattggtactgagcacagcatcaggcaaaagaagtgagctgatgatcagaaggacaacttactgcagcttttctagcggaggtcgacctatcgtaggtaggaaaaaagagtgatcaaatttgctcacccaatgcgaaatattcagtgcacatttgcattaagtttcgttgaagttttgatccaactaccacaacaaatggaagtacactgtcataagtcaaccatgtgcaaagttcttagcacctatacctgtaatttgcattcggtatttcgcccacacgccatatattgcatttgccatcgtagctacctgcatagaattagaagatgaacaaagaagtacaggtgtcagcaagaaggtaaaacttatctcatttggaaaatgttctgcttatataaaaagcatgaagtgaatggaacaagacgatcatatgttctctctgtaagtagtgacttacaggttgaacctagtaaggctggctccaacaagaccctctaaaaggtcctgtaccctaaatttagaggacgatgacatcctctactcactccagcaacgtcctctaaacggtcctctaaatttagagaacgccgctggatcctctatatgtagagtttctctaaacggttctctatctatttgaatactttaaacaaccggtttaataaaactaaaatatgtacaatacatttgaaagtatgacaaatacgtacgtacaaaaattaaaaaattaaaaatgtttttaatataggtatttacatatagaggacgtgatttaaaggacgttgttgaagagaaagtagatataggagatggaatcttttaaagaagactgtaaaggacggatatagaggatgtatatagaggacgttgctggagacagtctaacagcataaacccagtcgagtcctacttcctcgtacaattttctaaatgcctgcaataataacataataaatattagcatgaaacatacctgatgcttagactaaaaagaatcaaaattctgacttggtcttttatttgccttggcatcacactcatactctgttagaacagtgtttcaactatgttgatagatcagagtattctacatcaagttctttagaacattgtttcgaaggtgtcgcctaggcaccaagacgtacgcagctccccttgggaaacagcggcggcatgtggcctaggcatcgcctaggcgtgtaggcggacccagcactagcctggatcctagtcaacttttaaacgctgctttagaatgatttactgtggttaaactactgtgacagtttagtgattataagctatgcatgtaatgctgtcctgaatcctgtcaagaaaacatagcttgcttggtgctggaagagaacagcattgattttggcttgtacaaactcatctatgcattaacagttgcacatagttaagtgaacacaagggaaacagctgtatcacagtattatgttaaagaaacttctaatcattcataaataacatgtatagctcggccggggagggaaagaccgtcctcccggtattatattaagaagagaccgaaacatggtcccggccgagaaaatccccgaaccctggcccccatcactagcg

SEQ ID NO: 18937 - DNA, 3529 bp, Zea Mays
caagcacggcaaacagcggctcccggcactgcgaatatagccctcgttccctccgtccctcgtctcgtctccagactctccaccatcactcgcgcgccggcgccgctcacacgcccatttccaccccacaagacccacacggaatcccggcaccctacctctccaacacgcaccagcatcatggcggtggcttcgacctcgccgctatccgccacggccccctcgccgcccgctccggtgtccgggttcctcgctctccccgcccgccgcggctgcgcaacgcgcctcggctccgccgccgcgtggaggaggcttcgcgtggaggcgatctggaagcagcaggagaagcagcgggcagaggtgtccgtcgaggaacccgcccccgtcagggaggccgccgcgcccctggacggagtcggagctgacgaccccatggttccttcctcggacgagagctgggtggtcaggctcgagcagtcggtcaacattttcctcacggaatcggtgattatactactcaataccgtgtaccgtgatcggaactacgccaggttttttgtgctggagacgattgccagggtgccgtatttcgcgttcatatcggtgcttcacatgtatgaaacctttggctggtggagacgagctgattatctaaaagttcactttgcgcagagcttgaacgagtttcatcatctcttgatcatggaagaattgggtggcaacgctatatggattgattgtttccttgctcgatttatggcgtttttttactacttcatgactgttgcgatgtacatgttgagcccacgaatggcatatcacttctctgaatgtgtggagagacatgcgtactccacctatgataagttcctcaagctccatgaagaggaattgaaaacactaccagctccagaggcagcattgaactattacctgaatgaggacctttacttatttgatgagtttcagacaacaagaattccatgttctaggaggcctaaaatagataacttgtatgatgtattcgtcaatatacgagatgacgaggcagagcactgcaagacaatgaaggcatgtcaaacacatggaactcttcgttctcctcactcaatgccgaactgcttagaagctgctacagaatgtgtaatacctgaaaacgattgtgaaggtattgtggactgtgtcaaaaagtcccttacaaagtaaatagtatgtagaatcctctttcgtgtgttttcaggcatcatagtatacaaaagtacaaattctggatgatatcctctcttttttcctgtgtatctttgttaaagcaaaatccgggtcatatatcacacagaagtcagtgtagatacaattatgcaacagaatcaaatatctaacattgaagatatgagaatattcaggctgtgaagcattgcctcgtcgcttgctgtgctgtggatatgatttataaaacgttgcattcttgttgcatcgtatactcacgaatgcagtgtccaaaaagcagtatagacaaatcccatgatcaggacttgaggcaccgtgcaatcccaccagtcacaacagcacattccgtggaagttttcaccgtaaaatatcttgccgtcaaaccagcacagtgtacatacaaatgtatatatttacattttttcagaaaatgtatatatttacttcgacaaaccattacataagctattcgcccttttcaataccattgtgattattttttgtgttaaaactatgtatatgagcctatctaagcactaagcatgaatataggtgagtgaggtatgtagcacagtagaacattttttatgctcacatcttgcatactttgtcatctttacattcgccctgcggaagggaaatgcagtcagtaaactgaagctgctgaaatgttcactcgcaaccagtatgattactgattggtactgagcacagcatcaggcaaaagaagtgagctgatgatcagaaggacaacttactgcagcttttctagcggaggtcgacctatcgtaggtaggaaaaaagagtgatcaaatttgctcacccaatgcgaaatattcagtgcacatttgcattaagtttcgttgaagttttgatccaactaccacaacaaatggaagtacactgtcataagtcaaccatgtgcaaagttcttagcacctatacctgtaatttgcattcggtatttcgcccacacgccatatattgcatttgccatcgtagctacctgcatagaattagaagatgaacaaagaagtacaggtgtcagcaagaaggtaaaacttatctcatttggaaaatgttctgcttatataaaaagcatgaagtgaatggaacaagacgatcatatgttctctctgtaagtagtgacttacaggttgaacctagtaaggctggctccaacaagaccctctaaaaggtcctgtaccctaaatttagaggacgatgacatcctctactcactccagcaacgtcctctaaacggtcctctaaatttagagaacgccgctggatcctctatatgtagagtttctctaaacggttctctatctatttgaatactttaaacaaccggtttaataaaactaaaatatgtacaatacatttgaaagtatgacaaatacgtacgtacaaaaattaaaaaattaaaaatgtttttaatataggtatttacatatagaggacgtgatttaaaggacgttgttgaagagaaagtagatataggagatggaatcttttaaagaagactgtaaaggacggatatagaggatgtatatagaggacgttgctggagacagtctaacagcataaacccagtcgagtcctacttcctcgtacaattttctaaatgcctgcaataataacataataaatattagcatgaaacatacctgatgcttagactaaaaagaatcaaaattctgacttggtcttttatttgccttggcatcacactcatactctgttagaacagtgtttcaactatgttgatagatcagagtattctacatcaagttctttagaacattgtttcgaaggtgtcgcctaggcaccaagacgtacgcagctccccttgggaaacagcggcggcatgtggcctaggcatcgcctaggcgtgtaggcggacccagcactagcctggatcctagtcaacttttaaacgctgctttagaatgatttactgtggttaaactactgtgacagtttagtgattataagctatgcatgtaatgctgtcctgaatcctgtcaagaaaacatagcttgcttggtgctggaagagaacagcattgattttggcttgtacaaactcatctatgcattaacagttgcacatagttaagtgaacacaagggaaacagctgtatcacagtattatgttaaagaaacttctaatcattcataaataacatgtatagctcggccggggagggaaagaccgtcctcccggtattatattaagaagagaccgaaacatggtcccggccgagaaaatccccgaaccctggcccccatcactagcg

SEQ ID NO: 18938 - DNA, 4100 bp, Zea Mays
caagcacggcaaacagcggctcccggcactgcgaatatagccctcgttccctccgtccctcgtctcgtctccagactctccaccatcactcgcgcgccggcgccgctcacacgcccatttccaccccacaagacccacacggaatcccggcaccctacctctccaacacgcaccagcatcatggcggtggcttcgacctcgccgctatccgccacggccccctcgccgcccgctccggtgtccgggttcctcgctctccccgcccgccgcggctgcgcaacgcgcctcggctccgccgccgcgtggaggaggcttcgcgtggaggcgatctggaagcagcaggagaagcagcgggcagaggtgtccgtcgaggaacccgcccccgtcagggaggccgccgcgcccctggacggagtcggagctgacgaccccatggttccttcctcggacgagagctgggtggtcaggctcgagcagtcggtcaacattttcctcacggaatcggtgattatactactcaataccgtgtaccgtgatcggaactacgccaggttttttgtgctggagacgattgccagggtgccgtatttcggtgagggctccgttttgtcatatgcttgcagttgcggtgtatgaaaaggtccctaaagagttttgcagcgttggtttcggtcgtgccgttgctgttctttcttttttactctgcttggttatgaacagcgttcatatcggtgcttcacatgtatgaaacctttggctggtggagacgagctgattatctaaaagttcactttgcgcagagcttgaacgagtttcatcatctcttgatcatggaagtacgcatctttccagtaaaatccatgtgtgccagatcttcctttcagtgctattatgtcaaagttatatcacggcttaattttattccgttctgttggtttgactaattaattttccatattaattatcagttcatttctttacatgaattcatcctacttatggattgagcccttggctcatatcaggaattgggtggcaacgctatatggattgattgtttccttgctcgatttatggcgtttttttactacttcatgactgttgcgatgtacatgttgagcccacgaatggcatatcacttctctgaatgtgtggagagacatgcgtactccacctatgataagttcctcaagctccatgaagaggaattgaaaacactaccagctccagaggcagcattgaactattacctgaatgaggacctttacttatttgatgagtttcagacaacaagaattccatgttctaggaggcctaaaataggtaaacttgctgttctctcttttgtcccctcaataggtgtgtattccttttttttgtacttcttcggaaggttggaactaaacatgttagctgcgtttgtgaaatttaactggctgctccatcatggagtcgtaaaatctcgattttgattccttgtttactggattctggcctcctgacgtgaaccatttgtactgcctttctatttctctgccataagactgttgtaagtactcactgattcccatatgcagataacttgtatgatgtattcgtcaatatacgagatgacgaggcagagcactgcaagacaatgaaggcatgtcaaacacatggaactcttcgttctcctcactcaatgccgaactgcttagaagctgctacagaatgtgtaatacctgaaaacgattgtgaaggtattgtggactgtgtcaaaaagtcccttacaaagtaaatagtatgtagaatcctctttcgtgtgttttcaggcatcatagtatacaaaagtacaaattctggatgatatcctctcttttttcctgtgtatctttgttaaagcaaaatccgggtcatatatcacacagaagtcagtgtagatacaattatgcaacagaatcaaatatctaacattgaagatatgagaatattcaggctgtgaagcattgcctcgtcgcttgctgtgctgtggatatgatttataaaacgttgcattcttgttgcatcgtatactcacgaatgcagtgtccaaaaagcagtatagacaaatcccatgatcaggacttgaggcaccgtgcaatcccaccagtcacaacagcacattccgtggaagttttcaccgtaaaatatcttgccgtcaaaccagcacagtgtacatacaaatgtatatatttacattttttcagaaaatgtatatatttacttcgacaaaccattacataagctattcgcccttttcaataccattgtgattattttttgtgttaaaactatgtatatgagcctatctaagcactaagcatgaatataggtgagtgaggtatgtagcacagtagaacattttttatgctcacatcttgcatactttgtcatctttacattcgccctgcggaagggaaatgcagtcagtaaactgaagctgctgaaatgttcactcgcaaccagtatgattactgattggtactgagcacagcatcaggcaaaagaagtgagctgatgatcagaaggacaacttactgcagcttttctagcggaggtcgacctatcgtaggtaggaaaaaagagtgatcaaatttgctcacccaatgcgaaatattcagtgcacatttgcattaagtttcgttgaagttttgatccaactaccacaacaaatggaagtacactgtcataagtcaaccatgtgcaaagttcttagcacctatacctgtaatttgcattcggtatttcgcccacacgccatatattgcatttgccatcgtagctacctgcatagaattagaagatgaacaaagaagtacaggtgtcagcaagaaggtaaaacttatctcatttggaaaatgttctgcttatataaaaagcatgaagtgaatggaacaagacgatcatatgttctctctgtaagtagtgacttacaggttgaacctagtaaggctggctccaacaagaccctctaaaaggtcctgtaccctaaatttagaggacgatgacatcctctactcactccagcaacgtcctctaaacggtcctctaaatttagagaacgccgctggatcctctatatgtagagtttctctaaacggttctctatctatttgaatactttaaacaaccggtttaataaaactaaaatatgtacaatacatttgaaagtatgacaaatacgtacgtacaaaaattaaaaaattaaaaatgtttttaatataggtatttacatatagaggacgtgatttaaaggacgttgttgaagagaaagtagatataggagatggaatcttttaaagaagactgtaaaggacggatatagaggatgtatatagaggacgttgctggagacagtctaacagcataaacccagtcgagtcctacttcctcgtacaattttctaaatgcctgcaataataacataataaatattagcatgaaacatacctgatgcttagactaaaaagaatcaaaattctgacttggtcttttatttgccttggcatcacactcatactctgttagaacagtgtttcaactatgttgatagatcagagtattctacatcaagttctttagaacattgtttcgaaggtgtcgcctaggcaccaagacgtacgcagctccccttgggaaacagcggcggcatgtggcctaggcatcgcctaggcgtgtaggcggacccagcactagcctggatcctagtcaacttttaaacgctgctttagaatgatttactgtggttaaactactgtgacagtttagtgattataagctatgcatgtaatgctgtcctgaatcctgtcaagaaaacatagcttgcttggtgctggaagagaacagcattgattttggcttgtacaaactcatctatgcattaacagttgcacatagttaagtgaacacaagggaaacagctgtatcacagtattatgttaaagaaacttctaatcattcataaataacatgtatagctcggccggggagggaaagaccgtcctcccggtattatattaagaagagaccgaaacatggtcccggccgagaaaatccccgaaccctggcccccatcactagcg

SEQ ID NO: 18939 - DNA, 1365 bp, Zea Mays
ccatatccgtccgttgccctttaaagtgtcccatgggcacatctaggacccggcccaaatcccccgactcctcgcttcctcccgttccgtcgccgccgcgcgcctcggagaagagatagaggcggccgctgcatcgaccccgcgccacccccgcctgcctcccccggcaccgatcgggtttgatcgatggcgtcgaagaggatcctgaaggagttgaaggacctgcagaaggacccgcccacctcctgcagcgcaggtcctgttggtgaggacatgttccattggcaagcgaccatcatggggccttcggacagcccatttgcaggtggggtattcttggtgaacattcacttcccaccggattaccctttcaagccaccaaaggtgtctttccgcaccaaggttttccacccgaacatcaacagcaacggcagcatttgccttgacattcttaaggaacagtggagtcctgctttaactatctcactgctcacggacccaaaccctgatgatcctcttgtccctgagattgctcacatgtacaagaccgacagggccaagtatgagtccaccgcacgctcctggacacagaagtatgccatgggctagaagcaaggctaaaagctggccaaactggtgaatgtgccggaccccaaatcgttatcacctaaataaccagtcaagtcgcaagtatgaatggacttttgaggaccattgtgccctgttgaactcatgtattaccttgtgaagtccgttgtgtctggtttctacctgaccgtttcgttatctgatgctgtttctttaatatctgatgctgcttcattaaccatacttctatatggtttgtggtgttgctgtttgtttaatctgtcagctgcttgacgtttcactgaaagaaagacgttccagtgagcgcagaaaaagttggtgattcggtgagaaacgttacaaccttatcacatgctctgaatttcgccaaagtgggtagatgcttgtgattatataactacagatttgcgaggcaaagctggagttctgagtagggcatggtattttgtgttttgctgagaagttgtcatcactatgcgataagttgcaattacttttagcttagcagatagcagaaggaatcaaacctgggtggaacaggtgaacaggttcagtggtgggttcgatgactatggggtgtgtatgctcgtagtcggagtatgaatgtcgtaaccctgaaactacatggttttctacttttattaattagggtgagatacgataatagaaataaggatgggtgttactagggaaaacagcgatatgataatagaattaaggaggaaagaaatttgtttttttatatttattaatccc

SEQ ID NO: 18940 - DNA, 2072 bp, Zea Mays
tctgcacaccgccactcgcccacacgttgaaggcacctagcagccgccactcgccgaactgaggaacacgccgggcgacgggatacagcagcagcgcgcccctctctatcctcgacgcgacggcgccctgcagctgcagataaacctgttccaatggccaaacaaaaagagggtgtggacaaaagaactgctaggaagatgatccgatctacggaaggctgtgcaaagagcattactttcgagaggaacaacaaatcagacgctgtgcagcttcacgatctgccgaatgacatcctaggtagcatactatcacggttgacattcagagcatcctcacagatgggccttgtttctcatacctggcggcggctgtggagaagctgttgccggaaactggtcttcaccggtgccaccatgttccaacccggaaataggagcatcaaacatacaaggaccaactttgccatgagagtcaacagtttcttgcgtcagctacgcactcatcctactcttaataagtttgttattaagtttgggctgcgcaggaagcacactcgccatgtcaacagatggattcgcttctgctccgtgtcgcgagcaaggcacatcactattaatttcactcctggagtgaaagattttgtcatgggtccagccaacagcaagtacatcttccccctgaacgttttcagtggtccagaaggctcctctacacatgtcagaactcttcatctgggctatgtctgtctggacacaacctcgtctgatttcatgatctttgcaaatcttaagaagctcactctgcacaaaatttcctttttgggagacctccagtgcctgatgctgccagaatgcaattctcttgagtgtctgagcatcagcttctgttccttgcctggtttaagcacatgccacccactgcaacgtctgcgatgtgttcgtttgcactactgctatctaaaaaagattgagctggaagctccaaatctaacatcgtttgacttgaccaaccaaccaattccatttgtgcttggtggacctctgaagttaatggaagccaacattaaactgttagctaaggactcaccttatggtgataatctggactacatctacactgagcttcctgctgcgctgtctcatgtgcataaactctcgataacctcggatctcttcatttatgatcagctgcaagggttttccaaaacctcagccagatttatcaatctgaggcatctgaccatgtatttgcctctttatggggaacctaagtcaattagtgggattcttcgcttggcctacctactggaattggccccagctctagaagaattggaattgcatgtgagtggcttactaactctataatctgttatagattttctcaaggtgaatggcggtggcgtggatgttgggtgggcactcagacggaatatgttaccgtactcacacaataggctcaagagggtccttatttcaggagccactgtatgggaggggctaatggagctggcatactacattcttcggagtgccaatagactcgaaagtatggtcttagatccaaagataaggattgggggtcctcagctggatggttggatgattgatattggtagggagacgatcaaaaatatttttgagggagaggagtttcagagcattattactattctgtaagaatggtaagataggccacaggattttggtggtcacaccaagtggccatgtttgattatgccataggtttgaccagtatggtcataaatgtttgttgttttcatttccgacctcaggaaatgtaaattaatactccctccatccatttttcattcgcgtatacttctcggcagtgaccaaattaagtttgaaaaaaaaaccgtttcatttttgctgttgcatgtgacgtggcccacgcctgcatgcatgcgaataaaagataggacacatgaagtttagttagtaagggtaagaataccaaaatacttttgagcattcttctgtcattaatgtaactgaaataaaggagggactgtcagtggaattaatatgatttaatctgggtgttttgt

SEQ ID NO: 18941 - DNA, 1616 bp, Zea Mays
cgcccacacgcgaaggcacctagcagccgccactcgccgaactgaggaacacgccgggcgacgggatacagcagcagcgcgcccctctatccccgacgcgacggcgccctgcagctgcagataaacctgttccaatggccaaacaaaaagagggtgtggacaaaagaactgctaggaagatgatccgatctacggaaggctgtgcaaagagcattactttggagaggaacaacaaatcagacgatgtgcagcttcacgatctgccgaatgacatcctaggtagcatactatcacggttgacattcagagaatcctcacagatgggccttgtttctcatacctggcggcggctgtggagaagctgttgccggaaactggtcttcaccagtgccaccatgttccaacccggaaataggagcatcaaacatacaaggaccaactttgccatgagagtcaacagtttcttgcgtcagctacgcactcatcctactcttaataagtttgttattaagttcgggctgcgcaggaagcacactcgccatgtcaacagatggattcgcttctgctccgtgtcgcgagcaagacacatcactattaatttcactcctggagtgaaagattttttcatgggtccagccaacagcaagtacatcttccccctgaacgttttcagtggtccagaaggctcctctacacatgtcagaactcttcatctgggctatgtctgtctggacacaacctcgtctgatttcatgatctttgcaaatcttaagaagctcactctgcacaaaatttcctttttgggagacctccagtgcctgatgctgccagaatgcaattctcttgagtgtctgagcatcagcttctgttccttgcctggtttaagcacatgccaaccgctgcaacgtctgcgatgtgttcgtttgcactactgctatctaaaaaagattgagctggaagctccaaatctaacatcgtttgacttgaccaaccaaccaattccatttgtgcttggtggatctctgaatgtaatggaagccaacattaaactgttagctaaggactcaccttatggtgataatctggactacatctacactgagcttcctgctgcgctgtctcatgtgcataaactctcgataacctcgggtctcttcgtttatgatcagctgcaagggttttccaaaacctcagccagattcatcaatctgaggcatctgaccatgtatttgcctctttatggggaacctaagtcaattagtgggattcttcgcttggcctacctactggaattggccccagctctagaagaattggaattgcatgtgaatggcggtggcgtggatgttgggtgggcactcagacggaatatgttaccgtactcacacaataggctcaagagggtccttatttcaggagccactgtatgggaggggctaatggagctggcatactacattcttcggagtgccaatagactcgaaagtatggtcttagatccaaagataaggattgggggtcctcagctggatggttggatgattgatattggtagggagacgatcaaaaatatttttgagggagaggagtttcagagcattattactattctgtaa

SEQ ID NO: 18942 - DNA, 1893 bp, Zea Mays
cgcccacacgcgaaggcacctagcagccgccactcgccgaactgaggaacacgccgggcgacgggatacagcagcagcgcgcccctctatccccgacgcgacggcgccctgcagctgcagataaacctgttccaatggccaaacaaaaagagggtgtggacaaaagaactgctaggaagatgatccgatctacggaaggctgtgcaaagagcattactttggagaggaacaacaaatcagacgatgtgcagcttcacgatctgccgaatgacatcctaggtagcatactatcacggttgacattcagagaatcctcacagatgggccttgtttctcatacctggcggcggctgtggagaagctgttgccggaaactggtcttcaccagtgccaccatgttccaacccggaaataggagcatcaaacatacaaggaccaactttgccatgagagtcaacagtttcttgcgtcagctacgcactcatcctactcttaataagtttgttattaagttcgggctgcgcaggaagcacactcgccatgtcaacagatggattcgcttctgctccgtgtcgcgagcaagacacatcactattaatttcactcctggagtgaaagattttttcatgggtccagccaacagcaagtacatcttccccctgaacgttttcagtggtccagaaggctcctctacacatgtcagaactcttcatctgggctatgtctgtctggacacaacctcgtctgatttcatgatctttgcaaatcttaagaagctcactctgcacaaaatttcctttttgggagacctccagtgcctgatgctgccagaatgcaattctcttgagtgtctgagcatcagcttctgttccttgcctggtttaagcacatgccaaccgctgcaacgtctgcgatgtgttcgtttgcactactgctatctaaaaaagattgagctggaagctccaaatctaacatcgtttgacttgaccaaccaaccaattccatttgtgcttggtggatctctgaatgtaatggaagccaacattaaactgttagctaaggactcaccttatggtgataatctggactacatctacactgagcttcctgctgcgctgtctcatgtgcataaactctcgataacctcgggtctcttcgtttatgatcagctgcaagggttttccaaaacctcagccagattcatcaatctgaggcatctgaccatgtatttgcctctttatggggaacctaagtcaattagtgggattcttcgcttggcctacctactggaattggccccagctctagaagaattggaattgcatgtgaatggcggtggcgtggatgttgggtgggcactcagacggaatatgttaccgtactcacacaataggctcaagagggtccttatttcaggagccagtgtatgggaggggctaatggagctggcatactacatttttcggagtgccaatagactcgaaagtatggtcttagatccaaagataaggattggggctcctcagctggatggttggatgattgatattggtagggagacgatcaaaaagctttttgagggagaggagtttcagagcattattactattctgtaagaatggtaagataggccacaggattttagtggtcacaccaagtggccatgtttgattatgccataggtttgaccagtatgctaaaaaatgtttgttgttttcatttccgaccttaggaaatgtaaattaagaccctgttccaatctcgcgagataaactttagcagtttttttagctacttttagtcatttgtaatctaaacagtagagctaatggtggtaattgaaactaaattttagcatttcaattcatatagctaaagtttagcaggaagcaa

SEQ ID NO: 18943 - DNA, 4143 bp, Zea Mays
aaatgatattgagggattgcctttcaattcctaccaaacaaggactgaggggattaaaatcctcttcgtattcaaattaaatagaaagtagattttagtcttccgatctcctgcaattcttactctcagataagctctaaatgcacttcgcctcagttggaagccacagaaaaacaaaacaaaaggtgctgccagtccgccacgcgaaaaagaagtcagtttcgcagttcgcagcacgtagacgggtgtcccccccccgcccatcgttgtcgtcagctccgggcagccgaaaccggaaacctcccgttccccatccccagtcggctgtcgccgtggattcagcggaacccccggcgcaaaaacaagcattatctgggagcccagcccagatgcgggcgcgttcagccgtcagccacacacgcagagacacgcacggcgcaagcgcaacttggcgcgagaataacagaaaaatatgcccactccacagctggtgaccactgccaagcgaaaggaaccggggcgatctgcctcctgggggaaagatcttgttcacctggacgcacgcgcgcgcccgcgcccgcacggacgggggccccgcggcctgctcctggaccgaaatcttcccttcccagcgcttttgcatcatcctcgtcgtcgtcgtcgtggtggtggcacctaaaagtctacgtacaaggtatttgcccagggtcagcttgcagagacaagaagaaaaaaaagggggggagggggtgtccactccactgtggccagtgggcactggcagtccccatcggctgctgccttttcgctgcacattcagcaaagcagagcctataaataggtacgtccgtcgcctggtggcatgcacaccactgcaccgagcttctccatctccagagctacactgactagggaactgctttgctggcttggaggttcacgacgaggcatgccggtctgcttcttaccagcatccatggcgggccaggtgcagcggacggcgccgtcctcgtcctcgccctcgccgcggcagctgccggtcatcaaccttggcaggctcgggaaggacccggccacgcgggcgctcgccatccaggacattaccagagcgtgccgcgagcagggctgcttccaggtggtgaaccacggcgtcagcaactccgtcatggcaggcgcattcgaggccgcctcggagttcttccagctctcgccagagcacaaggagctgtttgcatcgaccgacatcggaaggcctgtcaggtatgacacgagctcaagggacgggatcagcagggccaggtcgttcctgaagcactacgcgaaccctctggaagactgggtccagtactggccactgcaccctccatcatacaggaagaaaatgggggagtatgcagttgaaatacagagggtgtcaatgcagctcatggacgctatcctgcaaggtttagggttaaagccgctgtacatgcaagagaaacttgacaagggagtgcagttcctggccctgaacagctacccacagttctcacatcgaggtgacaaggtcggactggctcctcattccgactatggcttcctcacaatcctgatgcagagctccccggggctggaagtgatgccccatgaccgtgacacctggacgcccgtccccgcgatccccggggccctccatgtccatgttggggaccacctagaagtcttgagcaacggtcgtctcaagtcccttgtccaccgagccattctcaaccctgatgaagcaagaatttccattgccagcatccatggtctctccaaggatgagaaggtctgctgcgccgaggagctggtcgacgaggtgaacccagcaatgtacagggagagcagcttccaggacttcctcgacttcctaccgtcaaatatcaacaactacaagaggtttgttgagagcctcaagatcgacagagcttgagaagaaaagcattggttcggttccgctgcaccagaacatagctaaatggcattcttcagatacgaatggaaagccagatgataccaaaaataataataaaagattggatgtctttcaattaatagggtattgtgatgagaagacgggtctatatggcttgcagcattgctacattgaagatacagattcatatagacatagcaagcacattggcgctgctatgtgtattctgcagagcaggtctgtccaagtgatatcgatgtctctctgcaaattaaagagtctagttctacatccttagtactaaaatgctcatttaactatgtccaaatggaggagagccggccggctatgtactgttgcgttgtaccatatgtgtagcgtgtatctcttgttactactactagtctactactgtatctgcagtgtatatgcagtcaataatcgctgcaggtaaggtaaggtaaggtaatgtatcagtagagctgcacccgcactcagcctggctgcatcaagctggactgaggtcccttttttttctccttttctttctttggggaaatgcattgtggctgcatgtctctttcactaaaaggaggacctggggaaccttgctaggtttttcaggttgtttggtcctacactatgtgtataccaatcttgtatcagctacccaataaataaagtctaataactattgcatgagatttgctgcccaccatatgtccatatcatcatagcatacattggaaaggtttttcagttatctgaaaaaaacaaaagagaagtgtgtggagatccatgaaaagattgaccagcatgattgaggacacgacccgtttatgtatgtgcttgtgcttgtgctcgtgcagtcgtgcttgtgagcttgtccttactgtcagcggtattggccgacagagcaaaagtagatgtaaacctgagaagaagaagaagaaaaaagaggaggtgggcaatgcaacgagaaagagaagtgcgatggtacacggcacatatataagggtcattttcatgcagtccctattagccaataattcaagacggagatgtctgtttcagctgcagaaattcaacaaaagctgcttgcagctacagagggcaaaaaaaaaaggatcagcaaatgatcagatcatgaaggcacatgaaagttcaaattgaactgcaaccaaatccatatggcatgacacatcttttattggttgaaaatgagcagaggactgacgaagtgtcaattttattttattttagtcagttattttagtctagaatgagctcccccacctgaatgttgtggtgtttacctttgctgattgctaagacttgggcccttgggcaaggcccaaaaactaaaagaagaagaagaagagtgtctattttattttccagatccaggatgagcctgcccagccttcgttgaaagagattatctgcttggatctggaaggacagggctggaagggaacccattcttcttcagtttgacttgactgcgcggagcatttatccattgcaaagtcacatctgacatctcatggtgggaggtaagtatgatacacacctatagttgtttccttttttactttcccttttcctaaaatccaatgattatattttcatagggtatatctgcaaatttcttaataacattaatttgctgctagaaaaaaaaaggaacaacaaaacaatttgagtttaaaaaacaggaaggtcaatgtgaaaagaaaagacaaggaggtagcactcttagaacaaaattcgtttgggtactcacaaaatacaaaaaccaaaccaaaccaattctcctgtgacaatgaatgaagaatacattaaaaggggaagaggtttctttttagcacacgcgggacacgcacgcgcgtgtggcgacgtggcagtctgcaactcgtcagacgaccccgctagttctgcaactgccaacgaggtgaggagaaaggtggatcgcacgaaatacaagccagaaccggaacactgattcctcaggaaaccctaggccaaaccaatcgcaattaacgagagctcacgccggcaccggcattactgagaaaatggagaggagaacgaagcagcggtcgagcaagcagcaggtgcggaggggcgctgagctgaggctgactgaccagtacgcggatggggggtgcggtgcaggctcggacgac

SEQ ID NO: 18944 - DNA, 4849 bp, Zea Mays
cagcagcccacgccggcggccggcctcccaaaaatcatgagcgcttgcgcggcaaggaggacacggggagggggcaaaacaacagcggaacggaaggggggcccacggcgcctgtttttgtttaatccgctggtacggcagccttccgcctccgcctccgcctcgccatagcagtaccgccccctcgtgagcccgcctgccctctctcctccctccctctccacacctcgtcccgtcgtccccctcctcggctccggatctcgtcctgccggccgcggccggacgaggcgcccgcgacctggtccgagcctccctctcctcgccgaccgtgcgcctgtcgggactcacagccgacttacttataccgctcgcattgccgggggcttgctccgtttgtccacccgctcgccgcgccgactcgagggcggtcccggtatccggagctcagagctcggaccttccaggcgccgcctccccgtggcgttttcgatctgaggccgtgtcgcgggattggcttcgacgcttgcggcggtgatggcgattgcggacctgctgctcggcggtgacctgctgccgctggacgcgaggactcgatggccctgaggttgattgtggcttcggggaggctttactactactagctcggtagctcgctcctgaggaggaggaggcggaggcggaggagaagtacagcgcgtgaagatggcggccggcggggcggggcccgcgcagcaccaggcgccgaacggcgcctccgtcagcatcagcaacggcggcggtgccgccgccgccacgccgccgcaaggctcggcggcctccaccgccaacggcgccgccgccgacgggtacgacagcgacggctacagcttcgcgccccctacaccgtcaactttgtcaatgtccatacctcctgagcttgctggagctattccattaattgatcgatttcaggtcgagggttttctcaaagcaatgcaaaagcagattcattcagctggaaaacgtggatttttttctaaaaagtctgttgggccacaaactcgcgagaagttcactttggaagatatgctgtgctttcaaaaggattctattccaacttcattactaaagataagcaatgaccttgtaagccgctcgattaagttgttccatgtcatactaaagtacatgggcatcgattcaccagcaataattagtttggaggagagaatagaatttgttgagaagctctacaagcatacgttaaagcgttctgaacttcgagatgaactctttgcacagatttcaaaacaaacacgtaacaatcctgataggggttggtcaataagagcttgggagcttatgtacctgtgtgcatcatccatgccaccaagcaaagatattggggcatacttgtctgagtatattcactttgttgcccatggagccacaactgatgctgatgttcgagttctagcactgaacacactaaatgcattaaaacgatcagtcaaggcgggtcctaggattacaattcctgcatgggaggaaatagaagctctcttaacaagccggaagcttacaacaattgtatttttcttggatgaaacatttgaagagatcacctatgacatggcaacaactgttgctgatgctgttgaggaacttgctggcattatcaaactttcagtgtattctagcttcagcctatttgaatgtcggaaggttgttaatggatcgaagtcttcagagattggcaatgaggaatacattggattagatgataacaaatatattggtgacttgctatctgaattcaaatcagctaaggatcgcaacaaaggagaaattcttcattgcaaactcgtattcaagaaacgtctcttccgtgagtcggatgaggctgtgactgatccaatgtttgttcagctatcatatgtccagttgcaacatgattacattttgggaaactatcctgtcggcagggatgatgcttcacaactctctgctcttcagatcttggttgagattggattcattgataatcctgagtcctgtgttgaatggatatcacttttagagagatttcttcctagacaagtggcgattaccagagcaaagcgagactgggagcttgacatcatttcacgctttcagttaatggaacacttatcaaaggacgatgcacggcaacaatttctcagaatcttaaggactcttccatatgggaactctgttttcttcagtgttcggaagattgatgatccaataggattgctacctggaaaaattattttggggatcaacaaacgaggggttcactttttccgcccggttcccaaggaatatcttcattctgcagaactaagagacatcatgcaatttggtagcagcaatactgctgtcttctttaaaatgcgggttgctggtgttcttcatatctttcaatttgaaacaaagcagggcgaggaaatatgtgtagcacttcaaacacatataaatgatgtcatgctccgcagatattcaaaagcacgctctggtaatagtgttacatcacaaaatgatgttaaccaagcatataagccaccaaatatcgaaatgtttgaaaaacgtgtccaagaactgacaaaaacagccgaggattctcagaagaaagcagatcagttgcgagaagatttacagttgaagacaaaacaagaaacagagatgcaagaagagttggaagggctaagagataccttgcaatctgaacgacaaagttccaaagacataaaaaatgagcttgataagctaaaatctctatgtgatgagaaagaatctgctttgcaggctgccctgatggaaaaaagtagacttgaaaccagattaactagtggccagggccgtgagagagatacattgacaactgtaggcagcatcaataatgacattgaggatgcttgcaagcttgaggaggagttgaaatcataccaaaaagagcttgatgcatcaaaagaggtctcaaagaagctaatgttggaaaagaatattcttgaccagaaagttcaaaggcttgaaagaatgaaaaatgaagagaaaagcgcaatggaaaaggtttatgcggatgaatgctgtaaactgaaatctcagattgctgaattggagcagaaattggaagttgctacacgatccttaaatgtggctgaatcaaatcttgctgtaagaaatgctgaggttgatagcttgcaaaatagtctgaaagaacttgatgagctaagagagttcaaagcggatgttgacagaaagaatcaacagactgttgagattcttaaaaggcaaggagcacaattggtggaacttgagaatctttataagcaagaacaggttctacgaaagcgttactataatacaattgaagatatgaaaggaaaaataagagttttttgtcgcttgcgccctctaagcgacaaggaactttcttttgaggagaaaaatatagtttgcagtcctgatgaatttacaatttcacatccatggaaagatgaaaagtcaaagcaacatatatatgatcgtgtttttgatgcaaacacaagtcaagaagaagtctttgaggatactaagtatctggtacaatcagctgttgatggatataatgtctgtatatttgcgtatggccaaactggttctggaaagactttcactatttatggttcagaaaacaatcctggtcttactccaagggccacatctgaactttttagggtgataaagcgcgatggaaacaaatattcattttctttgaaggcatatatggtggagctttatcaagataatcttgtggacctgttattgcccagaaatgcaaagcagctgaagttagagataaaaaaagattccaagggtgttgttaccgttgaaaatgtaacagttgtgagcatttcaagtattgaggaactgagggctataatctcaagaggttctgagaggaggcacactgctggaacgaatatgaatgatgagagttcaaggtctcatttaattctttcaatcattattgaaagtacaaatctccaaactcaatcatatgcaagaggcaagctaagttttgtggaccttgctggttctgagagggtgaaaaaatcaggttcagcaggaaagcaattgaaagaagcgcaaagtataaataaatctctttctgctttggctgatgttattggtgctttatcttctgatggacaacatataccttaccggaaccataagttaacaatgcttatgagtgattctctcggaggcaatgcgaagaccttgatgtttgtgaatgtttcaccagctgagtctaacttggaggagacttacaactcgctaatgtatgcttcacgggttcgttgcattgttaatgatacgagcaagcatgttgccccaaaagaaatcatgaggttgaagaagttgatcgcctactggaaggagcaagcaggcaagcggagtgatgaggacgaactagaggagatacaggaagagaggatctcaaaagagagatcagacaatcgcatgactagctgacgatgctcctggtttcattcttccattacctggtgaagaggtgattgatgccgatgagcatttgtgactgccacgagttctgcgatcgctctctaacagaatgttcctatatcatctgacggccctgtaagtgtacactaattgtatagtagctacgtattatttctatggcggcggcgatgcccagcctgcttgtacaaagaggaatgtagcacatacattgatagaaggggaaaaagttgattatcgcttctttgctgacgagagattggcgatgtgttgctctatgccttggcgtcataccataaagaaaccttccaaagtcaga

SEQ ID NO: 18945 - DNA, 3904 bp, Zea Mays
atggaaagtaagaacaatcagcaccacattcaaggtcgagggttttctcaaagcaatgcaaaagcagattcattcagctggaaaacgtggatttttttctaaaaagtctgttgggccacaaactcgcgagaagttcactttggaagatatgctgtgctttcaaaaggattctattccaacttcattactaaagataagcaatgaccttgtaagccgctcgattaagttgttccatgtcatactaaagtacatgggcatcgattcaccagcaataattagtttggaggagagaatagaatttgttgagaagctctacaagcatacgttaaagcgttctgaacttcgagatgaactctttgcacagatttcaaaacaaacacgtaacaatcctgataggggttggtcaataagagcttgggagcttatgtacctgtgtgcatcatccatgccaccaagcaaagatattggggcatacttgtctgagtatattcactttgttgcccatggagccacaactgatgctgatgttcgagttctagcactgaacacactaaatgcattaaaacgatcagtcaaggcgggtcctaggattacaattcctgcatgggaggaaatagaagctctcttaacaagccggaagcttacaacaattgtatttttcttggatgaaacatttgaagagatcacctatgacatggcaacaactgttgctgatgctgttgagtgtattctagcttcagcctatttgaatgtcggaaggttgttaatggatcgaagtcttcagagattggcaatgaggaatacattggattagatgataacaaatatattggtgacttgctatctgaattcaaatcagctaaggatcgcaacaaaggagaaattcttcattgcaaactcgtattcaagaaacgtctcttccgtgagtcggatgaggctgtgactgatccaatgtttgttcagctatcatatgtccagttgcaacatgattacattttgggaaactatcctgtcggcagggatgatgcttcacaactctctgctcttcagatcttggttgagattggattcattgataatcctgagtcctgtgttgaatggatatcacttttagagagatttcttcctagacaagtggcgattaccagagcaaagcgagactgggagcttgacatcatttcacgctttcagttaatggaacacttatcaaaggacgatgcacggcaacaatttctcagaatcttaaggactcttccatatgggaactctgttttcttcagtgttcggaagattgatgatccaataggattgctacctggaaaaattattttggggatcaacaaacgaggggttcactttttccgcccggttcccaaggaatatcttcattctgcagaactaagagacatcatgcaatttggtagcagcaatactgctgtcttctttaaaatgcgggttgctggtgttcttcatatctttcaatttgaaacaaagcagggcgaggaaatatgtgtagcacttcaaacacatataaatgatgtcatgctccgcagatattcaaaagcacgctctggtaatagtgttacatcacaaaatgatgttaaccaagcatataagccaccaaatatcgaaatgtttgaaaaacgtgtccaagaactgacaaaaacagccgaggattctcagaagaaagcagatcagttgcgagaagatttacagttgaagacaaaacaagaaacagagatgcaagaagagttggaagggctaagagataccttgcaatctgaacgacaaagttccaaagacataaaaaatgagcttgataagctaaaatctctatgtgatgagaaagaatctgctttgcaggctgccctgatggaaaaaagtagacttgaaaccagattaactagtggccagggccgtgagagagatacattgacaactgtaggcagcatcaataatgacattgaggatgcttgcaagcttgaggaggagttgaaatcataccaaaaagagcttgatgcatcaaaagaggtctcaaagaagctaatgttggaaaagaatattcttgaccagaaagttcaaaggcttgaaagaatgaaaaatgaagagaaaagcgcaatggaaaaggtttatgcggatgaatgctgtaaactgaaatctcagattgctgaattggagcagaaattggaagttgctacacgatccttaaatgtggctgaatcaaatcttgctgtaagaaatgctgaggttgatagcttgcaaaatagtctgaaagaacttgatgagctaagagagttcaaagcggatgttgacagaaagaatcaacagactgttgagattcttaaaaggcaaggagcacaattggtggaacttgagaatctttataagcaagaacaggttctacgaaagcgttactataatacaattgaagatatgaaaggaaaaataagagttttttgtcgcttgcgccctctaagcgacaaggaactttcttttgaggagaaaaatatagtttgcagtcctgatgaatttacaatttcacatccatggaaagatgaaaagtcaaagcaacatatatatgatcgtgtttttgatgcaaacacaagtcaagaagaagtctttgaggatactaagtatctggtacaatcagctgttgatggatataatgtctgtatatttgcgtatggccaaactggttctggaaagactttcactatttatggttcagaaaacaatcctggtcttactccaagggccacatctgaactttttagggtgataaagcgcgatggaaacaaatattcattttctttgaaggcatatatggtggagctttatcaagataatcttgtggacctgttattgcccagaaatgcaaagcagctgaagttagagataaaaaaagattccaagggtgttgttaccgttgaaaatgtaacagttgtgagcatttcaagtattgaggaactgagggctataatctcaagaggttctgagaggaggcacactgctggaacgaatatgaatgatgagagttcaaggtctcatttaattctttcaatcattattgaaagtacaaatctccaaactcaatcatatgcaagaggcaagctaagttttgtggaccttgctggttctgagagggtgaaaaaatcaggttcagcaggaaagcaattgaaagaagcgcaaagtataaataaatctctttctgctttggctgatgttattggtgctttatcttctgatggacaacatataccttaccggaaccataagttaacaatgcttatgagtgattctctcggaggcaatgcgaagaccttgatgtttgtgaatgtttcaccagctgagtctaacttggaggagacttacaactcgctaatgtatgcttcacgggttcgttgcattgttaatgatacgagcaagcatgttgccccaaaagaaatcatgaggttgaagaagttgatcgcctactggaaggagcaagcaggcaagcggagtgatgaggacgaactagaggagatacaggaagagaggatctcaaaagagagatcagacaatcgcatgactagctgacgatgctcctggtttcattcttccattacctggtgaagaggtgattgatgccgatgagcatttgtgactgccacgagttctgcgatcgctctctaacagaatgttcctatatcatctgacggccctgtaagtgtacactaattgtatagtagctacgtattatttctatggcggcggcgatgcccagcctgcttgtacaaagaggaatgtagcacatacattgatagaaggggaaaaagttgattatcgcttctttgctgacgagagattggcgatgtgttgctctatgccttggcgtcataccataaagaaaccttccaaagtcaga

SEQ ID NO: 18946 - DNA, 2589 bp, Zea Mays
gtggcggttaaccggaggcgaggagaagggggagaaggaagacgaagaggaagcgagctgggcaagcaatcgacgcgagaagatcagaaggtgggggcaccagaaccgcactttatatgatttcttgtggtggtggagattttgacgactttcttgatgcgtttttttttggccttcgctcttttggtacggtaattagcaaatttattaggagatggttaaatgctattatatactagaagtagaaatgatttgtcttatgaatggtttgctgattgggagcttggaggctgtttagagttgtactggcagtgactaacaaccttcttctgcttgtgttgcttaattttgaagaaatggttccttgtggggttttttttccgaaaagatatgggcttagaggcggcaccgcagcgacgtgaagtgggcggccgtgacttacaaacggccacaagaaggttcctgaacgtgttgccgctcagacgctcagctgagcgtgacgccgtcattttccccctttttttccttcttcctattcttgttttttatgtgaaccataatttgttgcggtagaaataggcacagatataacatgactggattaatatgctttaataataaggaaatttgatttggagatggggccggaaatgatagagcaggatggatggtaggaaaaggaaggggaaattcagaaattctctcaggcgtatggctatggagtgcctgtgctctggtgagcagttgaaggcgtcagatgagaccatgcggtcatctgattctacgatcacaaaggatttctcggccagtgggtactcttcttggaatggagagattgagcagtaccttgataatggcaacatagaggaagccgagttgtcgctccgggagggcatttgcctaaattatgaggtaagttgttttcttttgtgaaacagattttgttatggcaccaagaacagctgaaatatatgctgaatgtgactaggaaatgccaccaattcagctagtatgattcctagttaagtcaatcttgggtttcttttgtcaattttacttccttgtgaagatttttgtacgtaactaaaatcaacctgcatgctgaatgtatttttttttctgcagttagttgaataaatatatggttattatctttttcttcactaaaattagttcactacctcctacctaggagtttatccaagctagccttttctgtaccagtataagtatttcaagggaaattctttcttatttcaagagaagacttaccatttttattactgccattctctttcttcgatttcgttagatgccagaatgtcatctgtttaagttctatatttcagcattacatttggacctagctgtttctagctcgactgacagcacatgctaaacaggaagcaagggcattgctaggaaggctagaatatcaacggggtcatgtagaggcagcactccgtgtctttgatgggatagacatctgcattagttcctaagatgaaaatctcaattgctagaaaaacaggccgtgggaagactcattcacagtgggattccccaccaatgcccttgcatgctgtcagccttctcatggaggccatatatcttaaagcaagagcacttcatgatcttgggaaagataaaggcctaatgaaaggcaaaacaattgtcgatgttgtgggaaagttcacctggacccaataaggcaagaaaacggcaaagagcacaatagttctcatatgcctaattattcccttgattcatgattataactttgcctcctgatttaatgaccctttcctatcatttgagatatacaggtcaccctaaggcataaaagaagaaaggccatttcttgtggagatttatgcagatgacataaatccaactacaactataaaagggaagcactacatcggctctggtgtgcttaactatatctttgattcgcgaatatagttttgttattaaattagtgaaaattcaagctatatccttttgtgctctctgacattatgacatttgtttagcaagtactttagtgaaaagatttcaccatatgcatgtccatgtttatgacaaatcatagttatccgttacattacatcgatgtaatcttcacacaaagtctcaacaatatttggttgctcacttacaccccaccctagattaacatgttctgaattttctttgttcactgctgcaattgacacatgctaaatggcaatttctttataatgatccaattgagtttgtaattgcacatgtttttgccaagtttcatcaagtactgctccaacagaacaagcaatcatggaatattgagctaaggcactggagtctcaagaaaaggtctaggaatcctaagaatggatggataacgatgcttaaatatggatgacatcatttatgtcttgataaccatctacatgccggtgataatgttttttgacattcattcatggggctcacctttctaatgtgcggtgcctggctgtaatggcttgcatgtattttatgcattgactacatgataagaaccgtgcacgttgttgatggcccaattattacctctgaatcaag

SEQ ID NO: 18947 - DNA, 1742 bp, Zea Mays
ggaggcgaggagaagggggagaaggaagacgaagaggaagcgagctgggcaagcaatcgacgcgagaagatcagaagaaatggttccttgtggggttttttttccgaaaagatatgggcttagaggcggcaccgcagcgacgtgaagtgggcggccgtgacttacaaacggccacaagaaggttcctgaacgtgttgccgctcagacgctcagctgagcgtgacgccgtcattttccccctttttttccttcttcctattcttgttttttatgtgaaccataatttgttgcggtagaaataggcacagatataacatgactggattaatatgctttaataataaggaaatttgatttggagatggggccggaaatgatagagcaggatggatggtaggaaaaggaaggggaaattcagaaattctctcaggcgtatggctatggagtgcctgtgctctggtgagcagttgaaggcgtcagatgagaccatgcggtcatctgattctacgatcacaaaggatttctcggccagtgggtactcttcttggaatggagagattgagcagtaccttgataatggcaacatagaggaagccgagttgtcgctccgggagggcatttgcctaaattatgagacatctgcattagttcctaagatgaaaatctcaattgctagaaaaacaggccgtgggaagactcattcacagtgggattccccaccaatgcccttgcatgctgtcagccttctcatggaggccatatatcttaaagcaagagcacttcatgatcttgggaaagataaaggcctaatgaaaggcaaaacaattgtcgatgttgtgggaaagttcacctggacccaataaggcaagaaaacggcaaagagcacaatagttctcatatgcctaattattcccttgattcatgattataactttgcctcctgatttaatgaccctttcctatcatttgagatatacaggtcaccctaaggcataaaagaagaaaggccatttcttgtggagatttatgcagatgacataaatccaactacaactataaaagggaagcactacatcggctctggtgtgcttaactatatctttgattcgcgaatatagttttgttattaaattagtgaaaattcaagctatatccttttgtgctctctgacattatgacatttgtttagcaagtactttagtgaaaagatttcaccatatgcatgtccatgtttatgacaaatcatagttatccgttacattacatcgatgtaatcttcacacaaagtctcaacaatatttggttgctcacttacaccccaccctagattaacatgttctgaattttctttgttcactgctgcaattgacacatgctaaatggcaatttctttataatgatccaattgagtttgtaattgcacatgtttttgccaagtttcatcaagtactgctccaacagaacaagcaatcatggaatattgagctaaggcactggagtctcaagaaaaggtctaggaatcctaagaatggatggataacgatgcttaaatatggatgacatcatttatgtcttgataaccatctacatgccggtgataatgttttttgacattcattcatggggctcacctttctaatgtgcggtgcctggctgtaatggcttgcatgtattttatgcattgactacatgataagaaccgtgcacgttgttgatggcccaattattacctctgaatcaag

SEQ ID NO: 18948 - DNA, 1508 bp, Zea Mays
gggagaaggaagacgaagaggaagcgagctgggcaagcaatcgacgcgagaagatcagaagaaatggttccttgtggggttttttttccgaaaagatatgggcttagaggcggcaccgcagcgacgtgaagtgggcggccgtgacttacaaacggccacaagaaggttcctgaacgtgttgccgctcagacgctcagctgagcgtgacgccgtcattttccccctttttttccttcttcctattcttgttttttatgtgaaccataatttgttgcggtagaaataggcacagatataacatgactggattaatatgctttaataataaggaaatttgatttggagatggggccggaaatgatagagcaggatggatggtaggaaaaggaaggggaaattcagaaattctctcaggcgtatggctatggagtgcctgtgctctggtgagcagttgaaggcgtcagatgagaccatgcggtcatctgattctacgatcacaaaggatttctcggccagtgggtactcttcttggaatggagagattgagcagtaccttgataatggcaacatagaggaagccgagttgtcgctccgggagggcatttgcctaaattatgaggacccaataaggcaagaaaacggcaaagagcacaatagttctcatatgcctaattattcccttgattcatgattataactttgcctcctgatttaatgaccctttcctatcatttgagatatacaggtcaccctaaggcataaaagaagaaaggccatttcttgtggagatttatgcagatgacataaatccaactacaactataaaagggaagcactacatcggctctggtgtgcttaactatatctttgattcgcgaatatagttttgttattaaattagtgaaaattcaagctatatccttttgtgctctctgacattatgacatttgtttagcaagtactttagtgaaaagatttcaccatatgcatgtccatgtttatgacaaatcatagttatccgttacattacatcgatgtaatcttcacacaaagtctcaacaatatttggttgctcacttacaccccaccctagattaacatgttctgaattttctttgttcactgctgcaattgacacatgctaaatggcaatttctttataatgatccaattgagtttgtaattgcacatgtttttgccaagtttcatcaagtactgctccaacagaacaagcaatcatggaatattgagctaaggcactggagtctcaagaaaaggtctaggaatcctaagaatggatggataacgatgcttaaatatggatgacatcatttatgtcttgataaccatctacatgccggtgataatgttttttgacattcattcatggggctcacctttctaatgtgcggtgcctggctgtaatggcttgcatgtattttatgcattgactacatgataagaaccgtgcacgttgttgatggcccaattattacctctgaatcaag

SEQ ID NO: 18949 - DNA, 2547 bp, Zea Mays
gggagaaggaagacgaagaggaagcgagctgggcaagcaatcgacgcgagaagatcagaagaaatggttccttgtggggttttttttccgaaaagatatgggcttagaggcggcaccgcagcgacgtgaagtgggcggccgtgacttacaaacggccacaagaaggttcctgaacgtgttgccgctcagacgctcagctgagcgtgacgccgtcattttccccctttttttccttcttcctattcttgttttttatgtgaaccataatttgttgcggtagaaataggcacagatataacatgactggattaatatgctttaataataaggaaatttgatttggagatggggccggaaatgatagagcaggatggatggtaggaaaaggaaggggaaattcagaaattctctcaggcgtatggctatggagtgcctgtgctctggtgagcagttgaaggcgtcagatgagaccatgcggtcatctgattctacgatcacaaaggatttctcggccagtgggtactcttcttggaatggagagattgagcagtaccttgataatggcaacatagaggaagccgagttgtcgctccgggagggcatttgcctaaattatgaggtaagttgttttcttttgtgaaacagattttgttatggcaccaagaacagctgaaatatatgctgaatgtgactaggaaatgccaccaattcagctagtatgattcctagttaagtcaatcttgggtttcttttgtcaattttacttccttgtgaagatttttgtacgtaactaaaatcaacctgcatgctgaatgtatttttttttctgcagttagttgaataaatatatggttattatctttttcttcactaaaattagttcactacctcctacctaggagtttatccaagctagccttttctgtaccagtataagtatttcaagggaaattctttcttatttcaagagaagacttaccatttttattactgccattctctttcttcgatttcgttagatgccagaatgtcatctgtttaagttctatatttcagcattacatttggacctagctgtttctagctcgactgacagcacatgctaaacaggaagcaagggcattgctaggaaggctagaatatcaacggggtcatgtagaggcagcactccgtgtctttgatgggatagacatctgcattagttcctaagatgaaaatctcaattgctagaaaaacaggccgtgggaagactcattcacagtgggattccccaccaatgcccttgcatgctgtcagccttctcatggaggccatatatcttaaagcaagagcacttcatgatcttgggaaagataaaggtaagcagcaccttgctatcatgttgcacacattaacagacttgcattgtgggttagtaattaattctaaaaaaacaatggactaagtacaaatttaactaaaatttgttttgttgttttgcatttgctttaggcctaatgaaaggcaaaacaattgtcgatgttgtgggaaagttcacctggtattttattttttgctcgagctaacattcaagcttcttctgtgtgtttatccttgatcctttctaatccttttagtgatgcatatgggaacgactaagtcaacaaatatgtgtgcaggacccaataaggcaagaaaacggcaaagagcacaatagttctcatatgcctaattattcccttgattcatgattataactttgcctcctgatttaatgaccctttcctatcatttgagatatacaggtcaccctaaggcataaaagaagaaaggccatttcttgtggagatttatgcagatgacataaatccaactacaactataaaagggaagcactacatcggctctggtgtgcttaactatatctttgattcgcgaatatagttttgttattaaattagtgaaaattcaagctatatccttttgtgctctctgacattatgacatttgtttagcaagtactttagtgaaaagatttcaccatatgcatgtccatgtttatgacaaatcatagttatccgttacattacatcgatgtaatcttcacacaaagtctcaacaatatttggttgctcacttacaccccaccctagattaacatgttctgaattttctttgttcactgctgcaattgacacatgctaaatggcaatttctttataatgatccaattgagtttgtaattgcacatgtttttgccaagtttcatcaagtactgctccaacagaacaagcaatcatggaatattgagctaaggcactggagtctcaagaaaaggtctaggaatcctaagaatggatggataacgatgcttaaatatggatgacatcatttatgtcttgataaccatctacatgccggtgataatgttttttgacattcattcatggggctcacctttctaatgtgcggtgcctggctgtaatggcttgcatgtattttatgcattgactacatgataagaaccgtgcacgttgttgatggcccaattattacctctgaatcaag

SEQ ID NO: 18950 - DNA, 2057 bp, Zea Mays
agaaggaagacgaagaggaagcgagctgggcaagcaatcgacgcgagaagatcagaaggaaaaggaaggggaaattcagaaattctctcaggcgtatggctatggagtgcctgtgctctggtgagcagttgaaggcgtcagatgagaccatgcggtcatctgattctacgatcacaaaggatttctcggccagtgggtactcttcttggaatggagagattgagcagtaccttgataatggcaacatagaggaagccgagttgtcgctccgggagggcatttgcctaaattatgaggtaagttgttttcttttgtgaaacagattttgttatggcaccaagaacagctgaaatatatgctgaatgtgactaggaaatgccaccaattcagctagtatgattcctagttaagtcaatcttgggtttcttttgtcaattttacttccttgtgaagatttttgtacgtaactaaaatcaacctgcatgctgaatgtatttttttttctgcagttagttgaataaatatatggttattatctttttcttcactaaaattagttcactacctcctacctaggagtttatccaagctagccttttctgtaccagtataagtatttcaagggaaattctttcttatttcaagagaagacttaccatttttattactgccattctctttcttcgatttcgttagatgccagaatgtcatctgtttaagttctatatttcagcattacatttggacctagctgtttctagctcgactgacagcacatgctaaacaggaagcaagggcattgctaggaaggctagaatatcaacggggtcatgtagaggcagcactccgtgtctttgatgggatagacatctgcattagttcctaagatgaaaatctcaattgctagaaaaacaggccgtgggaagactcattcacagtgggattccccaccaatgcccttgcatgctgtcagccttctcatggaggccatatatcttaaagcaagagcacttcatgatcttgggaaagataaaggacccaataaggcaagaaaacggcaaagagcacaatagttctcatatgcctaattattcccttgattcatgattataactttgcctcctgatttaatgaccctttcctatcatttgagatatacaggtcaccctaaggcataaaagaagaaaggccatttcttgtggagatttatgcagatgacataaatccaactacaactataaaagggaagcactacatcggctctggtgtgcttaactatatctttgattcgcgaatatagttttgttattaaattagtgaaaattcaagctatatccttttgtgctctctgacattatgacatttgtttagcaagtactttagtgaaaagatttcaccatatgcatgtccatgtttatgacaaatcatagttatccgttacattacatcgatgtaatcttcacacaaagtctcaacaatatttggttgctcacttacaccccaccctagattaacatgttctgaattttctttgttcactgctgcaattgacacatgctaaatggcaatttctttataatgatccaattgagtttgtaattgcacatgtttttgccaagtttcatcaagtactgctccaacagaacaagcaatcatggaatattgagctaaggcactggagtctcaagaaaaggtctaggaatcctaagaatggatggataacgatgcttaaatatggatgacatcatttatgtcttgataaccatctacatgccggtgataatgttttttgacattcattcatggggctcacctttctaatgtgtaagaaagaaaactacgttgatcttaatctgagttgtgtgttgatggttgatgtagtaaagaaggggcacttagacattgttgttcatggatttatgtactgccaacaaaccttctcttctgattcttataggcggtgcctggctgtaatggcttgcatgtattttatgcattgactacatgataagaaccgtgcacgttgttgatggcccaattattacctctgaatcaag

SEQ ID NO: 18951 - DNA, 1370 bp, Zea Mays
agacgaagaggaagcgagctgggcaagcaatcgacgcgagaagatcagaaggaagcaagggcattgctaggaaggctagaatatcaacggggtcatgtagaggcagcactccgtgtctttgatgggatagacatctgcattagttcctaagatgaaaatctcaattgctagaaaaacaggccgtgggaagactcattcacagtgggattccccaccaatgcccttgcatgctgtcagccttctcatggaggccatatatcttaaagcaagagcacttcatgatcttgggaaagataaaggtaagcagcaccttgctatcatgttgcacacattaacagacttgcattgtgggttagtaattaattctaaaaaaacaatggactaagtacaaatttaactaaaatttgttttgttgttttgcatttgctttaggcctaatgaaaggcaaaacaattgtcgatgttgtgggaaagttcacctggacccaataaggcaagaaaacggcaaagagcacaatagttctcatatgcctaattattcccttgattcatgattataactttgcctcctgatttaatgaccctttcctatcatttgagatatacaggtcaccctaaggcataaaagaagaaaggccatttcttgtggagatttatgcagatgacataaatccaactacaactataaaagggaagcactacatcggctctggtgtgcttaactatatctttgattcgcgaatatagttttgttattaaattagtgaaaattcaagctatatccttttgtgctctctgacattatgacatttgtttagcaagtactttagtgaaaagatttcaccatatgcatgtccatgtttatgacaaatcatagttatccgttacattacatcgatgtaatcttcacacaaagtctcaacaatatttggttgctcacttacaccccaccctagattaacatgttctgaattttctttgttcactgctgcaattgacacatgctaaatggcaatttctttataatgatccaattgagtttgtaattgcacatgtttttgccaagtttcatcaagtactgctccaacagaacaagcaatcatggaatattgagctaaggcactggagtctcaagaaaaggtctaggaatcctaagaatggatggataacgatgcttaaatatggatgacatcatttatgtcttgataaccatctacatgccggtgataatgttttttgacattcattcatggggctcacctttctaatgtgcggtgcctggctgtaatggcttgcatgtattttatgcattgactacatgataagaaccgtgcacgttgttgatggcccaattattacctctgaatcaag

SEQ ID NO: 18952 - DNA, 1188 bp, Zea Mays
agacgaagaggaagcgagctgggcaagcaatcgacgcgagaagatcagaaggaagcaagggcattgctaggaaggctagaatatcaacggggtcatgtagaggcagcactccgtgtctttgatgggatagacatctgcattagttcctaagatgaaaatctcaattgctagaaaaacaggccgtgggaagactcattcacagtgggattccccaccaatgcccttgcatgctgtcagccttctcatggaggccatatatcttaaagcaagagcacttcatgatcttgggaaagataaaggacccaataaggcaagaaaacggcaaagagcacaatagttctcatatgcctaattattcccttgattcatgattataactttgcctcctgatttaatgaccctttcctatcatttgagatatacaggtcaccctaaggcataaaagaagaaaggccatttcttgtggagatttatgcagatgacataaatccaactacaactataaaagggaagcactacatcggctctggtgtgcttaactatatctttgattcgcgaatatagttttgttattaaattagtgaaaattcaagctatatccttttgtgctctctgacattatgacatttgtttagcaagtactttagtgaaaagatttcaccatatgcatgtccatgtttatgacaaatcatagttatccgttacattacatcgatgtaatcttcacacaaagtctcaacaatatttggttgctcacttacaccccaccctagattaacatgttctgaattttctttgttcactgctgcaattgacacatgctaaatggcaatttctttataatgatccaattgagtttgtaattgcacatgtttttgccaagtttcatcaagtactgctccaacagaacaagcaatcatggaatattgagctaaggcactggagtctcaagaaaaggtctaggaatcctaagaatggatggataacgatgcttaaatatggatgacatcatttatgtcttgataaccatctacatgccggtgataatgttttttgacattcattcatggggctcacctttctaatgtgcggtgcctggctgtaatggcttgcatgtattttatgcattgactacatgataagaaccgtgcacgttgttgatggcccaattattacctctgaatcaag

SEQ ID NO: 18953 - DNA, 1669 bp, Zea Mays
cgaagaggaagcgagctgggcaagcaatcgacgcgagaagatcagaaggtgggggcaccagaaccgcactttatatgatttcttgtggtggtggagattttgacgactttcttgatgcgtttttttttggccttcgctcttttggtacggtaattagcaaatttattaggagatggttaaatgctattatatactagaagtagaaatgatttgtcttatgaatggtttgctgattgggagcttggaggctgtttagagttgtactggcagtgactaacaaccttcttctgcttgtgttgcttaattttgaagaaatggttccttgtggggttttttttccgaaaagatatgggcttagaggcggcaccgcagcgacgtgaagtgggcggccgtgacttacaaacggccacaagaaggttcctgaacgtgttgccgctcagacgctcagctgagcgtgacgccgtcattttccccctttttttccttcttcctattcttgttttttatgtgaaccataatttgttgcggtagaaataggcacagatataacatgactggattaatatgctttaataataaggaaatttgatttggagatggggccggaaatgatagagcaggatggatggtaggaaaaggaaggggaaattcagaaattctctcaggcgtatggctatggagtgcctgtgctctggtgagcagttgaaggcgtcagatgagaccatgcggtcatctgattctacgatcacaaaggatttctcggccagtgggtactcttcttggaatggagagattgagcagtaccttgataatggcaacatagaggaagccgagttgtcgctccgggagggcatttgcctaaattatgagacatctgcattagttcctaagatgaaaatctcaattgctagaaaaacaggccgtgggaagactcattcacagtgggattccccaccaatgcccttgcatgctgtcagccttctcatggaggccatatatcttaaagcaagagcacttcatgatcttgggaaagataaaggtaagcagcaccttgctatcatgttgcacacattaacagacttgcattgtgggttagtaattaattctaaaaaaacaatggactaagtacaaatttaactaaaatttgttttgttgttttgcatttgctttaggcctaatgaaaggcaaaacaattgtcgatgttgtgggaaagttcacctggtattttattttttgctcgagctaacattcaagcttcttctgtgtgtttatccttgatcctttctaatccttttagtgatgcatatgggaacgactaagtcaacaaatatgtgtgcaggacccaataaggcaagaaaacggcaaagagcacaatagttctcatatgcctaattattcccttgattcatgattataactttgcctcctgatttaatgaccctttcctatcatttgagatatacaggtcaccctaaggcataaaagaagaaaggccatttcttgtggagatttatgcagatgacataaatccaactacaactataaaagggaagcactacatcggctctggcggtgcctggctgtaatggcttgcatgtattttatgcattgactacatgataagaaccgtgcacgttgttgatggcccaattattacctctgaatcaag

SEQ ID NO: 18954 - DNA, 1543 bp, Zea Mays
cgaagaggaagcgagctgggcaagcaatcgacgcgagaagatcagaagagcaggatggatggtaggaaaaggaaggggaaattcagaaattctctcaggcgtatggctatggagtgcctgtgctctggtgagcagttgaaggcgtcagatgagaccatgcggtcatctgattctacgatcacaaaggatttctcggccagtgggtactcttcttggaatggagagattgagcagtaccttgataatggcaacatagaggaagccgagttgtcgctccgggagggcatttgcctaaattatgagacatctgcattagttcctaagatgaaaatctcaattgctagaaaaacaggccgtgggaagactcattcacagtgggattccccaccaatgcccttgcatgctgtcagccttctcatggaggccatatatcttaaagcaagagcacttcatgatcttgggaaagataaaggcctaatgaaaggcaaaacaattgtcgatgttgtgggaaagttcacctggacccaataaggcaagaaaacggcaaagagcacaatagttctcatatgcctaattattcccttgattcatgattataactttgcctcctgatttaatgaccctttcctatcatttgagatatacaggtcaccctaaggcataaaagaagaaaggccatttcttgtggagatttatgcagatgacataaatccaactacaactataaaagggaagcactacatcggctctggtgtgcttaactatatctttgattcgcgaatatagttttgttattaaattagtgaaaattcaagctatatccttttgtgctctctgacattatgacatttgtttagcaagtactttagtgaaaagatttcaccatatgcatgtccatgtttatgacaaatcatagttatccgttacattacatcgatgtaatcttcacacaaagtctcaacaatatttggttgctcacttacaccccaccctagattaacatgttctgaattttctttgttcactgctgcaattgacacatgctaaatggcaatttctttataatgatccaattgagtttgtaattgcacatgtttttgccaagtttcatcaagtactgctccaacagaacaagcaatcatggaatattgagctaaggcactggagtctcaagaaaaggtctaggaatcctaagaatggatggataacgatgcttaaatatggatgacatcatttatgtcttgataaccatctacatgccggtgataatgttttttgacattcattcatggggctcacctttctaatgtgtaagaaagaaaactacgttgatcttaatctgagttgtgtgttgatggttgatgtagtaaagaaggggcacttagacattgttgttcatggatttatgtactgccaacaaaccttctcttctgattcttataggcggtgcctggctgtaatggcttgcatgtattttatgcattgactacatgataagaaccgtgcacgttgttgatggcccaattattacctctgaatcaag

SEQ ID NO: 18955 - DNA, 2631 bp, Zea Mays
cgaagaggaagcgagctgggcaagcaatcgacgcgagaagatcagaaggtgggggcaccagaaccgcactttatatgatttcttgtggtggtggagattttgacgactttcttgatgcgtttttttttggccttcgctcttttggtacggtaattagcaaatttattaggagatggttaaatgctattatatactagaagtagaaatgatttgtcttatgaatggtttgctgattgggagcttggaggctgtttagagttgtactggcagtgactaacaaccttcttctgcttgtgttgcttaattttgaagaaatggttccttgtggggttttttttccgaaaagatatgggcttagaggcggcaccgcagcgacgtgaagtgggcggccgtgacttacaaacggccacaagaaggttcctgaacgtgttgccgctcagacgctcagctgagcgtgacgccgtcattttccccctttttttccttcttcctattcttgttttttatgtgaaccataatttgttgcggtagaaataggcacagatataacatgactggattaatatgctttaataataaggaaatttgatttggagatggggccggaaatgatagagcaggatggatggtaggaaaaggaaggggaaattcagaaattctctcaggcgtatggctatggagtgcctgtgctctggtgagcagttgaaggcgtcagatgagaccatgcggtcatctgattctacgatcacaaaggatttctcggccagtgggtactcttcttggaatggagagattgagcagtaccttgataatggcaacatagaggaagccgagttgtcgctccgggagggcatttgcctaaattatgaggtaagttgttttcttttgtgaaacagattttgttatggcaccaagaacagctgaaatatatgctgaatgtgactaggaaatgccaccaattcagctagtatgattcctagttaagtcaatcttgggtttcttttgtcaattttacttccttgtgaagatttttgtacgtaactaaaatcaacctgcatgctgaatgtatttttttttctgcagttagttgaataaatatatggttattatctttttcttcactaaaattagttcactacctcctacctaggagtttatccaagctagccttttctgtaccagtataagtatttcaagggaaattctttcttatttcaagagaagacttaccatttttattactgccattctctttcttcgatttcgttagatgccagaatgtcatctgtttaagttctatatttcagcattacatttggacctagctgtttctagctcgactgacagcacatgctaaacaggaagcaagggcattgctaggaaggctagaatatcaacggggtcatgtagaggcagcactccgtgtctttgatgggatagacatctgcattagttcctaagatgaaaatctcaattgctagaaaaacaggccgtgggaagactcattcacagtgggattccccaccaatgcccttgcatgctgtcagccttctcatggaggccatatatcttaaagcaagagcacttcatgatcttgggaaagataaaggacccaataaggcaagaaaacggcaaagagcacaatagttctcatatgcctaattattcccttgattcatgattataactttgcctcctgatttaatgaccctttcctatcatttgagatatacaggtcaccctaaggcataaaagaagaaaggccatttcttgtggagatttatgcagatgacataaatccaactacaactataaaagggaagcactacatcggctctggtgtgcttaactatatctttgattcgcgaatatagttttgttattaaattagtgaaaattcaagctatatccttttgtgctctctgacattatgacatttgtttagcaagtactttagtgaaaagatttcaccatatgcatgtccatgtttatgacaaatcatagttatccgttacattacatcgatgtaatcttcacacaaagtctcaacaatatttggttgctcacttacaccccaccctagattaacatgttctgaattttctttgttcactgctgcaattgacacatgctaaatggcaatttctttataatgatccaattgagtttgtaattgcacatgtttttgccaagtttcatcaagtactgctccaacagaacaagcaatcatggaatattgagctaaggcactggagtctcaagaaaaggtctaggaatcctaagaatggatggataacgatgcttaaatatggatgacatcatttatgtcttgataaccatctacatgccggtgataatgttttttgacattcattcatggggctcacctttctaatgtgtaagaaagaaaactacgttgatcttaatctgagttgtgtgttgatggttgatgtagtaaagaaggggcacttagacattgttgttcatggatttatgtactgccaacaaaccttctcttctgattcttataggcggtgcctggctgtaatggcttgcatgtattttatgcattgactacatgataagaaccgtgcacgttgttgatggcccaattattacctctgaatcaag

SEQ ID NO: 18956 - DNA, 1983 bp, Zea Mays
cgaagaggaagcgagctgggcaagcaatcgacgcgagaagatcagaaggtgggggcaccagaaccgcactttatatgatttcttgtggtggtggagattttgacgactttcttgatgcgtttttttttggccttcgctcttttggtacggtaattagcaaatttattaggagatggttaaatgctattatatactagaagtagaaatgatttgtcttatgaatggtttgctgattgggagcttggaggctgtttagagttgtactggcagtgactaacaaccttcttctgcttgtgttgcttaattttgaagaaatggttccttgtggggttttttttccgaaaagatatgggcttagaggcggcaccgcagcgacgtgaagtgggcggccgtgacttacaaacggccacaagaaggttcctgaacgtgttgccgctcagacgctcagctgagcgtgacgccgtcattttccccctttttttccttcttcctattcttgttttttatgtgaaccataatttgttgcggtagaaataggcacagatataacatgactggattaatatgctttaataataaggaaatttgatttggagatggggccggaaatgatagagcaggatggatggtaggaaaaggaaggggaaattcagaaattctctcaggcgtatggctatggagtgcctgtgctctggtgagcagttgaaggcgtcagatgagaccatgcggtcatctgattctacgatcacaaaggatttctcggccagtgggtactcttcttggaatggagagattgagcagtaccttgataatggcaacatagaggaagccgagttgtcgctccgggagggcatttgcctaaattatgagacatctgcattagttcctaagatgaaaatctcaattgctagaaaaacaggccgtgggaagactcattcacagtgggattccccaccaatgcccttgcatgctgtcagccttctcatggaggccatatatcttaaagcaagagcacttcatgatcttgggaaagataaaggtaagcagcaccttgctatcatgttgcacacattaacagacttgcattgtgggttagtaattaattctaaaaaaacaatggactaagtacaaatttaactaaaatttgttttgttgttttgcatttgctttaggcctaatgaaaggcaaaacaattgtcgatgttgtgggaaagttcacctggtattttattttttgctcgagctaacattcaagcttcttctgtgtgtttatccttgatcctttctaatccttttagtgatgcatatgggaacgactaagtcaacaaatatgtgtgcaggacccaataaggcaagaaaacggcaaagagcacaatagttctcatatgcctaattattcccttgattcatgattataactttgcctcctgatttaatgaccctttcctatcatttgagatatacaggtcaccctaaggcataaaagaagaaaggccatttcttgtggagatttatgcagatgacataaatccaactacaactataaaagggaagcactacatcggctctgaacaagcaatcatggaatattgagctaaggcactggagtctcaagaaaaggtctaggaatcctaagaatggatggataacgatgcttaaatatggatgacatcatttatgtcttgataaccatctacatgccggtgataatgttttttgacattcattcatggggctcacctttctaatgtgtaagaaagaaaactacgttgatcttaatctgagttgtgtgttgatggttgatgtagtaaagaaggggcacttagacattgttgttcatggatttatgtactgccaacaaaccttctcttctgattcttataggcggtgcctggctgtaatggcttgcatgtattttatgcattgactacatgataagaaccgtgcacgttgttgatggcccaattattacctctgaatcaag

SEQ ID NO: 18957 - DNA, 1707 bp, Zea Mays
cgaagaggaagcgagctgggcaagcaatcgacgcgagaagatcagaaggtgggggcaccagaaccgcactttatatgatttcttgtggtggtggagattttgacgactttcttgatgcgtttttttttggccttcgctcttttggtacggtaattagcaaatttattaggagatggttaaatgctattatatactagaagtagaaatgatttgtcttatgaatggtttgctgattgggagcttggaggctgtttagagttgtactggcagtgactaacaaccttcttctgcttgtgttgcttaattttgaagaaatggttccttgtggggttttttttccgaaaagatatgggcttagaggcggcaccgcagcgacgtgaagtgggcggccgtgacttacaaacggccacaagaaggttcctgaacgtgttgccgctcagacgctcagctgagcgtgacgccgtcattttccccctttttttccttcttcctattcttgttttttatgtgaaccataatttgttgcggtagaaataggcacagatataacatgactggattaatatgctttaataataaggaaatttgatttggagatggggccggaaatgatagagcaggatggatggtaggaaaaggaaggggaaattcagaaattctctcaggcgtatggctatggagtgcctgtgctctggtgagcagttgaaggcgtcagatgagaccatgcggtcatctgattctacgatcacaaaggatttctcggccagtgggtactcttcttggaatggagagattgagcagtaccttgataatggcaacatagaggaagccgagttgtcgctccgggagggcatttgcctaaattatgagacatctgcattagttcctaagatgaaaatctcaattgctagaaaaacaggccgtgggaagactcattcacagtgggattccccaccaatgcccttgcatgctgtcagccttctcatggaggccatatatcttaaagcaagagcacttcatgatcttgggaaagataaaggacccaataaggcaagaaaacggcaaagagcacaatagttctcatatgcctaattattcccttgattcatgattataactttgcctcctgatttaatgaccctttcctatcatttgagatatacaggtcaccctaaggcataaaagaagaaaggccatttcttgtggagatttatgcagatgacataaatccaactacaactataaaagggaagcactacatcggctctgtttcatcaagtactgctccaacagaacaagcaatcatggaatattgagctaaggcactggagtctcaagaaaaggtctaggaatcctaagaatggatggataacgatgcttaaatatggatgacatcatttatgtcttgataaccatctacatgccggtgataatgttttttgacattcattcatggggctcacctttctaatgtgtaagaaagaaaactacgttgatcttaatctgagttgtgtgttgatggttgatgtagtaaagaaggggcacttagacattgttgttcatggatttatgtactgccaacaaaccttctcttctgattcttataggcggtgcctggctgtaatggcttgcatgtattttatgcattgactacatgataagaaccgtgcacgttgttgatggcccaattattacctctgaatcaag

SEQ ID NO: 18958 - DNA, 1487 bp, Zea Mays
aggaagcgagctgggcaagcaatcgacgcgagaagatcagaagaaatggttccttgtggggttttttttccgaaaagatatgggcttagaggcggcaccgcagcgacgtgaagtgggcggccgtgacttacaaacggccacaagaaggttcctgaacgtgttgccgctcagacgctcagctgagcgtgacgccgtcattttccccctttttttccttcttcctattcttgttttttatgtgaaccataatttgttgcggtagaaataggcacagatataacatgactggattaatatgctttaataataaggaaatttgatttggagatggggccggaaatgatagagcaggatggatggtaggaaaaggaaggggaaattcagaaattctctcaggcgtatggctatggagtgcctgtgctctggtgagcagttgaaggcgtcagatgagaccatgcggtcatctgattctacgatcacaaaggatttctcggccagtgggtactcttcttggaatggagagattgagcagtaccttgataatggcaacatagaggaagccgagttgtcgctccgggagggcatttgcctaaattatgagacatctgcattagttcctaagatgaaaatctcaattgctagaaaaacaggccgtgggaagactcattcacagtgggattccccaccaatgcccttgcatgctgtcagccttctcatggaggccatatatcttaaagcaagagcacttcatgatcttgggaaagataaaggcctaatgaaaggcaaaacaattgtcgatgttgtgggaaagttcacctggacccaataaggcaagaaaacggcaaagagcacaatagttctcatatgcctaattattcccttgattcatgattataactttgcctcctgatttaatgaccctttcctatcatttgagatatacaggtcaccctaaggcataaaagaagaaaggccatttcttgtggagatttatgcagatgacataaatccaactacaactataaaagggaagcactacatcggctctgtttcatcaagtactgctccaacagaacaagcaatcatggaatattgagctaaggcactggagtctcaagaaaaggtctaggaatcctaagaatggatggataacgatgcttaaatatggatgacatcatttatgtcttgataaccatctacatgccggtgataatgttttttgacattcattcatggggctcacctttctaatgtgtaagaaagaaaactacgttgatcttaatctgagttgtgtgttgatggttgatgtagtaaagaaggggcacttagacattgttgttcatggatttatgtactgccaacaaaccttctcttctgattcttataggcggtgcctggctgtaatggcttgcatgtattttatgcattgactacatgataagaaccgtgcacgttgttgatggcccaattattacctctgaatcaag

SEQ ID NO: 18959 - DNA, 1795 bp, Zea Mays
aggaagcgagctgggcaagcaatcgacgcgagaagatcagaagaaatggttccttgtggggttttttttccgaaaagatatgggcttagaggcggcaccgcagcgacgtgaagtgggcggccgtgacttacaaacggccacaagaaggttcctgaacgtgttgccgctcagacgctcagctgagcgtgacgccgtcattttccccctttttttccttcttcctattcttgttttttatgtgaaccataatttgttgcggtagaaataggcacagatataacatgactggattaatatgctttaataataaggaaatttgatttggagatggggccggaaatgatagagcaggatggatggtaggaaaaggaaggggaaattcagaaattctctcaggcgtatggctatggagtgcctgtgctctggtgagcagttgaaggcgtcagatgagaccatgcggtcatctgattctacgatcacaaaggatttctcggccagtgggtactcttcttggaatggagagattgagcagtaccttgataatggcaacatagaggaagccgagttgtcgctccgggagggcatttgcctaaattatgagacatctgcattagttcctaagatgaaaatctcaattgctagaaaaacaggccgtgggaagactcattcacagtgggattccccaccaatgcccttgcatgctgtcagccttctcatggaggccatatatcttaaagcaagagcacttcatgatcttgggaaagataaaggacccaataaggcaagaaaacggcaaagagcacaatagttctcatatgcctaattattcccttgattcatgattataactttgcctcctgatttaatgaccctttcctatcatttgagatatacaggtcaccctaagcaggcataaaagaagaaaggccatttcttgtggagatttatgcagatgacataaatccaactacaactataaaagggaagcactacatcggctctggtgtgcttaactatatctttgattcgcgaatatagttttgttattaaattagtgaaaattcaagctatatccttttgtgctctctgacattatgacatttgtttagcaagtactttagtgaaaagatttcaccatatgcatgtccatgtttatgacaaatcatagttatccgttacattacatcgatgtaatcttcacacaaagtctcaacaatatttggttgctcacttacaccccaccctagattaacatgttctgaattttctttgttcactgctgcaattgacacatgctaaatggcaatttctttataatgatccaattgagtttgtaattgcacatgtttttgccaagtttcatcaagtactgctccaacagaacaagcaatcatggaatattgagctaaggcactggagtctcaagaaaaggtctaggaatcctaagaatggatggataacgatgcttaaatatggatgacatcatttatgtcttgataaccatctacatgccggtgataatgttttttgacattcattcatggggctcacctttctaatgtgtaagaaagaaaactacgttgatcttaatctgagttgtgtgttgatggttgatgtagtaaagaaggggcacttagacattgttgttcatggatttatgtactgccaacaaaccttctcttctgattcttataggcggtgcctggctgtaatggcttgcatgtattttatgcattgactacatgataagaaccgtgcacgttgttgatggcccaattattacctctgaatcaag

SEQ ID NO: 18960 - DNA, 2362 bp, Zea Mays
aggaagcgagctgggcaagcaatcgacgcgagaagatcagaagaaatggttccttgtggggttttttttccgaaaagatatgggcttagaggcggcaccgcagcgacgtgaagtgggcggccgtgacttacaaacggccacaagaaggttcctgaacgtgttgccgctcagacgctcagctgagcgtgacgccgtcattttccccctttttttccttcttcctattcttgttttttatgtgaaccataatttgttgcggtagaaataggcacagatataacatgactggattaatatgctttaataataaggaaatttgatttggagatggggccggaaatgatagagcaggatggatggtaggaaaaggaaggggaaattcagaaattctctcaggcgtatggctatggagtgcctgtgctctggtgagcagttgaaggcgtcagatgagaccatgcggtcatctgattctacgatcacaaaggatttctcggccagtgggtactcttcttggaatggagagattgagcagtaccttgataatggcaacatagaggaagccgagttgtcgctccgggagggcatttgcctaaattatgaggtaagttgttttcttttgtgaaacagattttgttatggcaccaagaacagctgaaatatatgctgaatgtgactaggaaatgccaccaattcagctagtatgattcctagttaagtcaatcttgggtttcttttgtcaattttacttccttgtgaagatttttgtacgtaactaaaatcaacctgcatgctgaatgtatttttttttctgcagttagttgaataaatatatggttattatctttttcttcactaaaattagttcactacctcctacctaggagtttatccaagctagccttttctgtaccagtataagtatttcaagggaaattctttcttatttcaagagaagacttaccatttttattactgccattctctttcttcgatttcgttagatgccagaatgtcatctgtttaagttctatatttcagcattacatttggacctagctgtttctagctcgactgacagcacatgctaaacaggaagcaagggcattgctaggaaggctagaatatcaacggggtcatgtagaggcagcactccgtgtctttgatgggatagacatctgcattagttcctaagatgaaaatctcaattgctagaaaaacaggccgtgggaagactcattcacagtgggattccccaccaatgcccttgcatgctgtcagccttctcatggaggccatatatcttaaagcaagagcacttcatgatcttgggaaagataaaggacccaataaggcaagaaaacggcaaagagcacaatagttctcatatgcctaattattcccttgattcatgattataactttgcctcctgatttaatgaccctttcctatcatttgagatatacaggtcaccctaaggcataaaagaagaaaggccatttcttgtggagatttatgcagatgacataaatccaactacaactataaaagggaagcactacatcggctctggtgtgcttaactatatctttgattcgcgaatatagttttgttattaaattagtgaaaattcaagctatatccttttgtgctctctgacattatgacatttgtttagcaagtactttagtgaaaagatttcaccatatgcatgtccatgtttatgacaaatcatagttatccgttacattacatcgatgtaatcttcacacaaagtctcaacaatatttggttgctcacttacaccccaccctagattaacatgttctgaattttctttgttcactgctgcaattgacacatgctaaatggcaatttctttataatgatccaattgagtttgtaattgcacatgtttttgccaagtttcatcaagtactgctccaacagaacaagcaatcatggaatattgagctaaggcactggagtctcaagaaaaggtctaggaatcctaagaatggatggataacgatgcttaaatatggatgacatcatttatgtcttgataaccatctacatgccggtgataatgttttttgacattcattcatggggctcacctttctaatgtgtaagaaagaaaactacgttgatcttaatctgagttgtgtgttgatggttgatgtagtaaagaaggggcacttagacattgttgttcatggatttatgtactgccaacaaaccttctcttctgattcttataggcggtgcctggctgtaatggcttgcatgtattttatgcattgactacatgataagaaccgtgcacgttgttgatggcccaattattacctctgaatcaag

SEQ ID NO: 18961 - DNA, 1746 bp, Zea Mays
agctgggcaagcaatcgacgcgagaagatcagaaggtgggggcaccagaaccgcactttatatgatttcttgtggtggtggagattttgacgactttcttgatgcgtttttttttggccttcgctcttttggtacggtaattagcaaatttattaggagatggttaaatgctattatatactagaagtagaaatgatttgtcttatgaatggtttgctgattgggagcttggaggctgtttagagttgtactggcagtgactaacaaccttcttctgcttgtgttgcttaattttgaagaaatggttccttgtggggttttttttccgaaaagatatgggcttagaggcggcaccgcagcgacgtgaagtgggcggccgtgacttacaaacggccacaagaaggttcctgaacgtgttgccgctcagacgctcagctgagcgtgacgccgtcattttccccctttttttccttcttcctattcttgttttttatgtgaaccataatttgttgcggtagaaataggcacagatataacatgactggattaatatgctttaataataaggaaatttgatttggagatggggccggaaatgatagagcaggatggatggtaggaaaaggaaggggaaattcagaaattctctcaggcgtatggctatggagtgcctgtgctctggtgagcagttgaaggcgtcagatgagaccatgcggtcatctgattctacgatcacaaaggatttctcggccagtgggtactcttcttggaatggagagattgagcagtaccttgataatggcaacatagaggaagccgagttgtcgctccgggagggcatttgcctaaattatgaggacccaataaggcaagaaaacggcaaagagcacaatagttctcatatgcctaattattcccttgattcatgattataactttgcctcctgatttaatgaccctttcctatcatttgagatatacaggtcaccctaaggcataaaagaagaaaggccatttcttgtggagatttatgcagatgacataaatccaactacaactataaaagggaagcactacatcggctctggtgtgcttaactatatctttgattcgcgaatatagttttgttattaaattagtgaaaattcaagctatatccttttgtgctctctgacattatgacatttgtttagcaagtactttagtgaaaagatttcaccatatgcatgtccatgtttatgacaaatcatagttatccgttacattacatcgatgtaatcttcacacaaagtctcaacaatatttggttgctcacttacaccccaccctagattaacatgttctgaattttctttgttcactgctgcaattgacacatgctaaatggcaatttctttataatgatccaattgagtttgtaattgcacatgtttttgccaagtttcatcaagtactgctccaacagaacaagcaatcatggaatattgagctaaggcactggagtctcaagaaaaggtctaggaatcctaagaatggatggataacgatgcttaaatatggatgacatcatttatgtcttgataaccatctacatgccggtgataatgttttttgacattcattcatggggctcacctttctaatgtgcggtgcctggctgtaatggcttgcatgtattttatgcattgactacatgataagaaccgtgcacgttgttgatggcccaattattacctctgaatcaag

SEQ ID NO: 18962 - DNA, 1253 bp, Zea Mays
agctgggcaagcaatcgacgcgagaagatcagaaggaaaaggaaggggaaattcagaaattctctcaggcgtatggctatggagtgcctgtgctctggtgagcagttgaaggcgtcagatgagaccatgcggtcatctgattctacgatcacaaaggatttctcggccagtgggtactcttcttggaatggagagattgagcagtaccttgataatggcaacatagaggaagccgagttgtcgctccgggagggcatttgcctaaattatgagacatctgcattagttcctaagatgaaaatctcaattgctagaaaaacaggccgtgggaagactcattcacagtgggattccccaccaatgcccttgcatgctgtcagccttctcatggaggccatatatcttaaagcaagagcacttcatgatcttgggaaagataaaggcctaatgaaaggcaaaacaattgtcgatgttgtgggaaagttcacctggtattttattttttgctcgagctaacattcaagcttcttctgtgtgtttatccttgatcctttctaatccttttagtgatgcatatgggaacgactaagtcaacaaatatgtgtgcaggacccaataaggcaagaaaacggcaaagagcacaatagttctcatatgcctaattattcccttgattcatgattataactttgcctcctgatttaatgaccctttcctatcatttgagatatacaggtcaccctaaggcataaaagaagaaaggccatttcttgtggagatttatgcagatgacataaatccaactacaactataaaagggaagcactacatcggctctgaacaagcaatcatggaatattgagctaaggcactggagtctcaagaaaaggtctaggaatcctaagaatggatggataacgatgcttaaatatggatgacatcatttatgtcttgataaccatctacatgccggtgataatgttttttgacattcattcatggggctcacctttctaatgtgtaagaaagaaaactacgttgatcttaatctgagttgtgtgttgatggttgatgtagtaaagaaggggcacttagacattgttgttcatggatttatgtactgccaacaaaccttctcttctgattcttataggcggtgcctggctgtaatggcttgcatgtattttatgcattgactacatgataagaaccgtgcacgttgttgatggcccaattattacctctgaatcaag

SEQ ID NO: 18963 - DNA, 2344 bp, Zea Mays
aagcaatcgacgcgagaagatcagaaggatggatggtaggaaaaggaaggggaaattcagaaattctctcaggcgtatggctatggagtgcctgtgctctggtgagcagttgaaggcgtcagatgagaccatgcggtcatctgattctacgatcacaaaggatttctcggccagtgggtactcttcttggaatggagagattgagcagtaccttgataatggcaacatagaggaagccgagttgtcgctccgggagggcatttgcctaaattatgagacatctgcattagttcctaagatgaaaatctcaattgctagaaaaacaggccgtgggaagactcattcacagtgggattccccaccaatgcccttgcatgctgtcagccttctcatggaggccatatatcttaaagcaagagcacttcatgatcttgggaaagataaaggacccaataaggcaagaaaacggcaaagagcacaatagttctcatatgcctaattattcccttgattcatgattataactttgcctcctgatttaatgaccctttcctatcatttgagatatacaggtcaccctaaggcataaaagaagaaaggccatttcttgtggagatttatgcagatgacataaatccaactacaactataaaagggaagcactacatcggctctggtgtgcttaactatatctttgattcgcgaatatagttttgttattaaattagtgaaaattcaagctatatccttttgtgctctctgacattatgacatttgtttagcaagtactttagtgaaaagatttcaccatatgcatgtccatgtttatgacaaatcatagttatccgttacattacatcgatgtaatcttcacacaaagtctcaacaatatttggttgctcacttacaccccaccctagattaacatgttctgaattttctttgttcactgctgcaattgacacatgctaaatggcaatttctttataatgatccaattgagtttgtaattgcacatgtttttgccaagtttcatcaagtactgctccaacagaacaagcaatcatggaatattgagctaaggcactggagtctcaagaaaaggtctaggaatcctaagaatggatggataacgatgcttaaatatggatgacatcatttatgtcttgataaccatctacatgccggtgataatgttttttgacattcattcatggggctcacctttctaatgtgtaagaaagaaaactacgttgatcttaatctgagttgtgtgttgatggttgatgtagtaaagaaggggcacttagacattgttgttcatggatttatgtactgccaacaaaccttctcttctgattcttataggcggtgcctggctgtaatggcttgcatgtattttatgcattgactacatgataagaaccgtgcacgttgttgatggcccaattattacctctgaatcaagaatgcggagctgttcacgctcacgtacggcgccatcgtgcggcagttgctcacggatctggaggaggtcgaggaggtcaacaagcagctcgatcagatgggttacaacattggaacacgattggttgatgagttcttagcaaagtcaaatgtatcaaggtgtgttgacttcaaggagactgccgatgttattgcgaagcttggcttcaaaatgttcttgggcgtgactgcaaccgtgaccaattgggatgctgagggtacaagttgcagccttgtcctggaagacaaccctcttgttgatttcgttgagctccctgacacttgccaaggccttcagtattgcaatttgttaagtggagttattaggggggcattggaaatggtgtctatgaaggcggaggtgacatgggtgcgtgacatgcttcgcggggacgatgcctatgagatgcgggtgaagcttatcaagcaagtcccggaggaatacccctacaaggatgatgactagttctactttagtgcaagattgcttgtttggattttgacatcgttttcgtcgatggtccgtagttctgctataacctgatatcatacgaggaaagctgcgtctgttttgcttgtgtattgtagaaatcatacataatctttcctgagttgcggctttgaattagtctgctggattcagggcgttcgctatgcaaattggtgttatctagaaataaagtattttcgatcttatcagtttgccctcatttcatgcaaagttatcgcctgctttgcctcccatttcctggagagctttagtttgttatttcccatgtttgtgaaataatacgtttctttgatgaaaacatttaaaatgaaacttgtttcagctaag

SEQ ID NO: 18964 - DNA, 915 bp, Zea Mays
agcaatcgacgcgagaagatcagaaggacccaataaggcaagaaaacggcaaagagcacaatagttctcatatgcctaattattcccttgattcatgattataactttgcctcctgatttaatgaccctttcctatcatttgagatatacaggtcaccctaaggcataaaagaagaaaggccatttcttgtggagatttatgcagatgacataaatccaactacaactataaaagggaagcactacatcggctctggtgtgcttaactatatctttgattcgcgaatatagttttgttattaaattagtgaaaattcaagctatatccttttgtgctctctgacattatgacatttgtttagcaagtactttagtgaaaagatttcaccatatgcatgtccatgtttatgacaaatcatagttatccgttacattacatcgatgtaatcttcacacaaagtctcaacaatatttggttgctcacttacaccccaccctagattaacatgttctgaattttctttgttcactgctgcaattgacacatgctaaatggcaatttctttataatgatccaattgagtttgtaattgcacatgtttttgccaagtttcatcaagtactgctccaacagaacaagcaatcatggaatattgagctaaggcactggagtctcaagaaaaggtctaggaatcctaagaatggatggataacgatgcttaaatatggatgacatcatttatgtcttgataaccatctacatgccggtgataatgttttttgacattcattcatggggctcacctttctaatgtgcggtgcctggctgtaatggcttgcatgtattttatgcattgactacatgataagaaccgtgcacgttgttgatggcccaattattacctctgaatcaag

SEQ ID NO: 18965 - DNA, 1922 bp, Zea Mays
ggaaaaggaaggggaaattcagaaattctctcaggcgtatggctatggagtgcctgtgctctggtgagcagttgaaggcgtcagatgagaccatgcggtcatctgattctacgatcacaaaggatttctcggccagtgggtactcttcttggaatggagagattgagcagtaccttgataatggcaacatagaggaagccgagttgtcgctccgggagggcatttgcctaaattatgaggtaagttgttttcttttgtgaaacagattttgttatggcaccaagaacagctgaaatatatgctgaatgtgactaggaaatgccaccaattcagctagtatgattcctagttaagtcaatcttgggtttcttttgtcaattttacttccttgtgaagatttttgtacgtaactaaaatcaacctgcatgctgaatgtatttttttttctgcagttagttgaataaatatatggttattatctttttcttcactaaaattagttcactacctcctacctaggagtttatccaagctagccttttctgtaccagtataagtatttcaagggaaattctttcttatttcaagagaagacttaccatttttattactgccattctctttcttcgatttcgttagatgccagaatgtcatctgtttaagttctatatttcagcattacatttggacctagctgtttctagctcgactgacagcacatgctaaacaggaagcaagggcattgctaggaaggctagaatatcaacggggtcatgtagaggcagcactccgtgtctttgatgggatagacatctgcattagttcctaagatgaaaatctcaattgctagaaaaacaggccgtgggaagactcattcacagtgggattccccaccaatgcccttgcatgctgtcagccttctcatggaggccatatatcttaaagcaagagcacttcatgatcttgggaaagataaaggtaagcagcaccttgctatcatgttgcacacattaacagacttgcattgtgggttagtaattaattctaaaaaaacaatggactaagtacaaatttaactaaaatttgttttgttgttttgcatttgctttaggcctaatgaaaggcaaaacaattgtcgatgttgtgggaaagttcacctggtattttattttttgctcgagctaacattcaagcttcttctgtgtgtttatccttgatcctttctaatccttttagtgatgcatatgggaacgactaagtcaacaaatatgtgtgcaggacccaataaggcaagaaaacggcaaagagcacaatagttctcatatgcctaattattcccttgattcatgattataactttgcctcctgatttaatgaccctttcctatcatttgagatatacaggtcaccctaaggcataaaagaagaaaggccatttcttgtggagatttatgcagatgacataaatccaactacaactataaaagggaagcactacatcggctctgaacaagcaatcatggaatattgagctaaggcactggagtctcaagaaaaggtctaggaatcctaagaatggatggataacgatgcttaaatatggatgacatcatttatgtcttgataaccatctacatgccggtgataatgttttttgacattcattcatggggctcacctttctaatgtgtaagaaagaaaactacgttgatcttaatctgagttgtgtgttgatggttgatgtagtaaagaaggggcacttagacattgttgttcatggatttatgtactgccaacaaaccttctcttctgattcttataggcggtgcctggctgtaatggcttgcatgtattttatgcattgactacatgataagaaccgtgcacgttgttgatggcccaattattacctctgaatcaag

SEQ ID NO: 18966 - DNA, 1475 bp, Zea Mays
ctactcggtactcgagagtcgagacctaataaccactacccagcgggcgtacccgttgccatctggctctcctccgtccatttactcacacggtcacaccgcctcaactcgcgctgcccgtcgcccccaagcctcggttccgccggcgcgcgaggggattcgagctgggtcttgggtagcctctcaccgtctcacgatgccgccagcacccaagtccggcgacgccctcttcgccagcgtggatcgcgtcaatgcggagctgttcacgctcacgtacggcgccatcgtgcggcagttgctcacggatctggaggaggtcgaggaggtcaacaagcagctcgatcagatgggttacaacattggaacacgattggttgatgagttcttagcaaagtcaaatgtatcaaggtgtgttgacttcaaggagactgccgatgttattgcgaagcttggcttcaaaatgttcttgggcgtgactgcaaccgtgaccaattgggatgctgagggtacaagttgcagccttgtcctggaagacaaccctcttgttgatttcgttgagctccctgacacttgccaaggccttcagtattgcaatttgttaagtggagttattaggggggcattggaaatggttggtttggctcttctgttaactgctatccccatttaactttcttcatttgcccttcatttcagtcatatactattgaatgttgttctgatgttgtttcagaatgcatacagccagcttcctgaaactttgattgctggctgatatggtggcgtgtcttagaattatttagatttatcacaaataagtgataccaatatatttgtcctctgaagtacttaacatttgatatttctccccctatagcatcgctacatggtggtggcactacctgctgtaggctgtagcacggaacctaacacacctacttattatggtgttactgattgattgcaaatgccgtatgtaggtgtctatgaaggcggaggtgacatgggtgcgtgacatgcttcgcggggacgatgcctatgagatgcgggtgaagcttatcaagcaagtcccggaggaatacccctacaaggatgatgactagttctactttagtgcaagattgcttgtttggattttgacatcgttttcgtcgatggtccgtagttctgctataacctgatatcatacgaggaaagctgcgtctgttttgcttgtgtattgtagaaatcatacataatctttcctgagttgcggctttgaattagtctgctggattcagggcgttcgctatgcaaattggtgttatctagaaataaagtattttcgatcttatcagtttgccctcatttcatgcaaagttatcgcctgctttgcctcccatttcctggagagctttagtttgttatttcccatgtttgtgaaataatacgtttctttgatgaaaacatttaaaatgaaacttgtttcagctaag

SEQ ID NO: 18967 - DNA, 3587 bp, Zea Mays
ttcagctccctcggagggcaagttcccgaaccggggaatcaaggacgtcgtcaggagcatctgctgcgggaacgtagggaaaatgtcaacgaatcctgatgaacctaagagtcgtgcccggacagactttttgctcaacaatgaactagaggtccagaagttttgggatgagaacaaggtttttcaggctgatcctggcaatgactctccaagccctggggaaaaattctttgggaactttccatacccttacatgaatggcttgctgcatctgggtcatgccttctcattgtccaagcttgagtttggtgctgcataccacaggcttcgtggctccaatgttcttttgccctttgctttccactgcactggaatgcccatcaaggcctccgctgataagctagctagggaaatccaacaatatggatatcctccggtgtttcctgtggcagagggttctagtgctgcagtagccgatgctacccaggctgaccaggttgatgttgttgccccagataagtttaaggggaagaagtccaaggctactgcaaaggctggtgcacaaaagtaccagtgggagatcatgaagagctttggtctagatgatgaagaaattgccagatttcaagatccttatcattggttgactcacttccctccgctggcaaaggaggttctcaagaaatttggcttgggttgtgactggaggagatcattcataactactgacatgaatccatactatgatgcttttgttaagtggcagatgaggaagctgaagaaattgggcaaagttgttaaagacatgaggtacacaatctactctccgttggatggccaaccttgtgctgatcatgatagggcaacaggtgaaggtgtgcagccacaagaatacgtcttgattaaaatggaggtgatatcaccttttcctcccaagctgaagtcattggaagggaggaaggtatacttggcagctgctacactaagacccgagacaatgtatggacagacaaattgctgggtccttcctgatggaatgtatggtgcttttgagattaatgacactgatgtcttcatccttacagcaaggtctgcttttaatcttgcataccaacacctatccagggtccctgaaaaaccaacctgcttatgtgagctatctggcagtgatttgattggtttgccactgaaatctcctcttgccttcaatgaaacaatatatgctcttccaatgctcactgtcttgactgacaaaggtactggcattgtgactagtgtccctagtgattcacctgatgatttcatggcactgcaagatttagtcacaaagccagcattgagagcaaagtatggagtgaaagatgagtgggttcttccttatgagattataccaataatccacattcctgaatttggagacaagtcagcagagaaggtttgccatgatcttaagattaaaagccagaacgacaaggagaagcttgctgaagcaaaaagaatgacatatctgaagggatttactgatggaacaatgattgtaggtgagttcagtggtagaaaggttcaggaagcgaaaccgctgattaaaagtaagcttttggaagaaggcacagctgtgttgtatagtgagccggagaagaaggtcatgtctagatctggtgatgaatgtgttgttgccctcactgatcagtggtatataacttatggcgaggctgaatggaagcagaaggcagtcaaatgtttggaccacatgaatacattctcaactgaaacccgcaatggttttgaacatacgctgggctggctgaaccagtgggcttgttcacgttcatttggactcggtactcgaattccatgggatgagcagttccttgtagaatctctttctgattctaccctatacatggcttattatacagttgcacaccttttgcaaaatggtaatatgtatgggaaagaaatatcttcagtaaggccagaagaaatgacagatgaagtctgggatttcgtgttttgtgatggcccggcaccaaaaagcgagatccctgccgctctgttgaacaagatgaaacatgaatttaagtattggtatccatttgatatccgtgtgtctggtaaagaccttattcaaaaccatttgacattctgcatatacaatcatacagcacttcttcctgagcaccactggcctattggtttccgctgcaatggacatctaatgcttaactctgagaaaatgtccaagtccacagggaatttcctaactctggaagatgccataaaaaagtactcttctgatgccactagatttgcccttgctgatgctggcgatggtatggatgatgcaaattttgtcactgaaactgcaaattctgctgttatgaggcttacaaaagaaatttcatggatggaggaggttacagctgctgaatcaaaattaagaactgggccgcccactacatatgctgaccgtgtgttttcaaacgagatgaacattgcaatcaaagaaactgagaagagctacaatgctttcatgttcagagacgccctgaagtctgggttctatgacctccaattggctagagatgagtacaggctctcttgtggtgcagcaggcatgaaccgtgatctgttgtggcgatttatggatgtccagaccaggcttatcacccccatttgcccacactatgctgagcacgtgtggcagaagatcatgaagaaagaaggctttgcaataaaagctggctggccagccgcggacaccccggatcccacactgagaattgcaaataaatacctgcaggattccatagttttgatgaggaaactgcttcagaagcaagagtctggttctaagaagcctaagaagggagctgcaccggcacctccgtccgaggaaaagaagatgagcattggcctcatatatgtgaacgagcactactctggatggaaagagcagtgcttgaaggtgctgcagtccaagttcgacagccaaagccgctccttctcacccgatcaggaaatcgcagaagctctgaaggagtgccccatcgggcaggaaatgaacctgaagcaggttcagaagctgtgcatgcccttcatcaagctgaagaaggacgaggcaagggaggttggtcctcaggcgctggacttgaagcttccgttcggtgagatggatgttctccgggagaacttggagctgatcaagaggcagctgggccttgagcaagtcgaggtgctctccgcgtcggacgaagctgctcgcgctaaggctggtgaacatgcttcgctgctggagaagaacccaccatcacccggcgaccccatcgccatcttcctcagcaaacagagctgaaaactgaccttgcatatggcccttttgttatttacttcgccgcacatttgcttcttttttgtttttgtttttgtgaaaccagtttcgtgtctgtaaacatagcatgttgtcctccggtttggtgaaaccagttttttctttttctttttctgtcaacagaatatgttatccattctctgggtaaccagttcggctattgtcgacaaagtatgttttgtgtcgctttacatca

SEQ ID NO: 18968 - DNA, 2344 bp, Zea Mays
agaaaatgacatccctcgccaaacgggcacccaatcgtactacaacattcaacacaaaaaccatattatttatgaaggccatctaatgattttaagtatgcagcaatgatctttcaatatatgagataaaataaaatacacaaacatctaaatcgtatattcaggcatattagagtaaaatataaacaaagcataataccatataataaaatgaaatttgaatctactcttacaaatacttcgaacactgaaaaagaatttccatttaatccaaacaccaccttgtaacctgtctatactaaatgcaccaaagcaagagtggattgaacgttgatatgttacatatgtatcgtactcatctaacatcttaagtaaccagaggggaaaaagcaagttgatctactgagatatattgaaacagagaagcttatatatcacgatttagtgttattattcaagtattccatatacctttggcatataaaatgaaacttccagataattgatttgctgtaagaagagtggaaaaaaagatacaggttaccattctgatgttatttcaggtaggttaagattataacctgaaaaacttggtgcaaggcttcgatttgcttgatagaccagtttgaaatgactccgtgtctgttgcataaaattaattacattttctcatgtgttagaagtttgcattgctgatcttctaatcaaatagatatatagatttgtctcgaatgtatgtgatgaaccgaatgtatgttatgaaccaaatgtatgtgatgaacgaacaagattttatatggtaaaagattccattgtagttatcctgcagaagatagttattatacagtcgaaaaaaagattgataaggtttctacactgataaataccatgtgtctgcatgtttcttcccgttcattgaactgatgaactgccaaattgaatttggattaatattcaagagccacaaggtggcttcattcccatatatgcttcagattactatttcttccgtaaaaaactgtctcttttcaacaaaatacatctaaatgatgtttccagactttcagttctacaactaattttactgtaccaaaattgtcgtgaggcacatacatgttgggagatttcttcttgctggttgaactggtgaattgtccaattacatcgatcaagattcaagaggcaaaaggtgctttgacttccatatatgcttcaaattaccatttcttcttaaaaaactttcctcttttaaacaacatacatctagatgaaccccgtactattacactatctgaactctactatgagttctaaactattttttactgcattactattttatgaggcacgtagtcctaactagatttgggaacacccaggctttgtcaccattctgtacttacttagtactaatggttgttacttaagaggggtaagttgctcaaataagaacatgttattgtgctccttacctgttagcactggcgaagttttttatcagtacctggaaaaaaattgtttatagcttctgcatatgtagcagatctaactgtgatacattccttcagatttcattgtattcttttgatccatcttcgagccacatacaacgctagcctttaaggtccaagtgagtagtcgaagttaagagagtaacagtctaaggcatcgttcgtttcagttggtttggcttattccaggtctggttccgggtgggaaaaatgagccggtttgaaattcggtcgtctcttcatgaaccgttcgtttcgacccgaatcaaaaacaaaagtgattcggtttagagtttcctctcccactactgcccggtacgaatcccggtcttctacccttcggatcgaatctcggcgagacggcgcatcactggcgagtggcgaccgaggaggcgaagaggcggctgagcgaagtgacggcgcaacgcagcctcgacggtgatcctccccgtcgccttctcactagtaagtgccgcatcctaccctcgtgttcttgatgtcgttgagcaccacgacgacagggattcatgtctggtccccgccgcccagagaaccagacctgttctgaatggtttttgaatgtacatgctactactcaaatcctgaagcaatacccaagtaataccaagtcagtttctttttacaggaaaaaaaggcagcaataccaccattcttgcttcccttgaaaagtgcagcgttcggttactgtggtaaccctgcaagatgattgaaaatgatggatatacactggatctgaagagtcagagaatccactagttgcaagctgattcaaatagtttcagtttgtgtttcagtttctgcttcagattgtc

SEQ ID NO: 18969 - DNA, 4018 bp, Zea Mays
ccggccgcccgctcccgaactgcgccgtcggccgcacccccgctcccgagctgcgccgtcggccgcccgcccgcctccgaggatatcgtcgccccggcgttcgcggcccgtgaaaacccacaggcagcaaccctggatttgggcctagcatttttccacgagggatttgggttatcatacagcccagactccaaacccaagaaaaggcacaaactaatcgaaccctaccttcttctccactccacaccagcgctagctagttcctagcttacccacgcacggccgccgcctcctcctcacgcacgcggcagccgcggtacgttatccaggtcgtgccgacgtccgacgacaaagaaggccttgggggcgctggcgcgcatcgcgagtcccctcgccggcaagaatatttgcaagcagaccttcgagctcgtgcgtttagcctcggagggcaagttcccgaaccggggaatcaaggacgtcgtcaggagcatctgctgcgggaacgtagggaaaatgtcaacgaatcctgatgaacctaagagtcgtgcccggacagactttttgctcaacaatgaactagaggtccagaagttttgggatgagaacaaggtttttcaggctgatcctggcaatgactctccaagccctggggaaaaattctttgggaactttccatacccttacatgaatggcttgctgcatctgggtcatgccttctcattgtccaagcttgagtttggtgctgcataccacaggcttcgtggctccaatgttcttttgccctttgctttccactgcactggaatgcccatcaaggcctccgctgataagctagctagggaaatccaacaatatggatatcctccggtgtttcctgtggcagagggttctagtgctgcagtagccgatgctacccaggctgaccaggttgatgttgttgccccagataagtttaaggggaagaagtccaaggctactgcaaaggctggtgcacaaaagtaccagtgggagatcatgaagagctttggtctagatgatgaagaaattgccagatttcaagatccttatcattggttgactcacttccctccgctggcaaaggaggttctcaagaaatttggcttgggttgtgactggaggagatcattcataactactgacatgaatccatactatgatgcttttgttaagtggcagatgaggaagctgaagaaattgggcaaagttgttaaagacatgaggtacacaatctactctccgttggatggccaaccttgtgctgatcatgatagggcaacaggtgaaggtgtgcagccacaagaatacgtcttgattaaaatggaggtgatatcaccttttcctcccaagctgaagtcattggaagggaggaaggtatacttggcagctgctacactaagacccgagacaatgtatggacagacaaattgctgggtccttcctgatggaatgtatggtgcttttgagattaatgacactgatgtcttcatccttacagcaaggtctgcttttaatcttgcataccaacacctatccagggtccctgaaaaaccaacctgcttatgtgagctatctggcagtgatttgattggtttgccactgaaatctcctcttgccttcaatgaaacaatatatgctcttccaatgctcactgtcttgactgacaaaggtactggcattgtgactagtgtccctagtgattcacctgatgatttcatggcactgcaagatttagtcacaaagccagcattgagagcaaagtatggagtgaaagatgagtgggttcttccttatgagattataccaataatccacattcctgaatttggagacaagtcagcagagaaggtttgccatgatcttaagattaaaagccagaacgacaaggagaagcttgctgaagcaaaaagaatgacatatctgaagggatttactgatggaacaatgattgtaggtgagttcagtggtagaaaggttcaggaagcgaaaccgctgattaaaagtaagcttttggaagaaggcacagctgtgttgtatagtgagccggagaagaaggtcatgtctagatctggtgatgaatgtgttgttgccctcactgatcagtggtatataacttatggcgaggctgaatggaagcagaaggcagtcaaatgtttggaccacatgaatacattctcaactgaaacccgcaatggttttgaacatacgctgggctggctgaaccagtgggcttgttcacgttcatttggactcggtactcgaattccatgggatgagcagttccttgtagaatctctttctgattctaccctatacatggcttattatacagttgcacaccttttgcaaaatggtaatatgtatgggaaagaaatatcttcagtaaggccagaagaaatgacagatgaagtctgggatttcgtgttttgtgatggcccggcaccaaaaagcgagatccctgccgctctgttgaacaagatgaaacatgaatttaagtattggtatccatttgatatccgtgtgtctggtaaagaccttattcaaaaccatttgacattctgcatatacaatcatacagcacttcttcctgagcaccactggcctattggtttccgctgcaatggacatctaatgcttaactctgagaaaatgtccaagtccacagggaatttcctaactctggaagatgccataaaaaagtactcttctgatgccactagatttgcccttgctgatgctggcgatggtatggatgatgcaaattttgtcactgaaactgcaaattctgctgttatgaggcttacaaaagaaatttcatggatggaggaggttacagctgctgaatcaaaattaagaactgggccgcccactacatatgctgaccgtgtgttttcaaacgagatgaacattgcaatcaaagaaactgagaagagctacaatgctttcatgttcagagacgccctgaagtctgggttctatgacctccaattggctagagatgagtacaggctctcttgtggtgcagcaggcatgaaccgtgatctgttgtggcgatttatggatgtccagaccaggcttatcacccccatttgcccacactatgctgagcacgtgtggcagaagatcatgaagaaagaaggctttgcaataaaagctggctggccagccgcggacaccccggatcccacactgagaattgcaaataaatacctgcaggattccatagttttgatgaggaaactgcttcagaagcaagagtctggttctaagaagcctaagaagggagctgcaccggcacctccgtccgaggaaaagaagatgagcattggcctcatatatgtgaacgagcactactctggatggaaagagcagtgcttgaaggtgctgcagtccaagttcgacagccaaagccgctccttctcacccgatcaggaaatcgcagaagctctgaaggagtgccccatcgggcaggaaatgaacctgaagcaggttcagaagctgtgcatgcccttcatcaagctgaagaaggacgaggcaagggaggttggtcctcaggcgctggacttgaagcttccgttcggtgagatggatgttctccgggagaacttggagctgatcaagaggcagctgggccttgagcaagtcgaggtgctctccgcgtcggacgaagctgctcgcgctaaggctggtgaacatgcttcgctgctggagaagaacccaccatcacccggcgaccccatcgccatcttcctcagcaaacagagctgaaaactgaccttgcatatggcccttttgttatttacttcgccgcacatttgcttcttttttgtttttgtttttgtgaaaccagtttcgtgtctgtaaacatagcatgttgtcctccggtttggtgaaaccagttttttctttttctttttctgtcaacagaatatgttatccattctctgggtaaccagttcggctattgtcgacaaagtatgttttgtgtcgctttacatca

SEQ ID NO: 18970 - DNA, 3766 bp, Zea Mays
gccgtcggccgcacccccgctcccgagctgcgccgtcggccgcccgcccgcctccgaggatatcgtcgccccggcgttcgcggcccgtgaaaacccacaggcagcaaccctggatttgggcctagcatttttccacgagggatttgggttatcatacagcccagactccaaacccaagaaaaggcacaaactaatcgaaccctaccttcttctccactccacaccagcgctagctagttcctagcttacccacgcacggccgccgcctcctcctcacgcacgcggcagccgcggtacgttatccaggtcgtgccgacgtccgacgacaaagaaggccttgggggcgctggcgcgcatcgcgagtcccctcgccggcaagaatatttgcaagcagaccttcgagctcgtgcgtttagcctcggagggcaagttcccgaaccggggaatcaaggacgtcgtcaggagcatctgctgcgggaacgtagggaaaatgtcaacgaatcctgatgaacctaagagtcgtgcccggacagactttttgctcaacaatgaactagaggtccagaagttttgggatgagaacaaggtttttcaggctgatcctggcaatgactctccaagccctggggaaaaattctttgggaactttccatacccttacatgaatggcttgctgcatctgggtcatgccttctcattgtccaagcttgagtttggtgctgcataccacaggctggtgcacaaaagtaccagtgggagatcatgaagagctttggtctagatgatgaagaaattgccagatttcaagatccttatcattggttgactcacttccctccgctggcaaaggaggttctcaagaaatttggcttgggttgtgactggaggagatcattcataactactgacatgaatccatactatgatgcttttgttaagtggcagatgaggaagctgaagaaattgggcaaagttgttaaagacatgaggtacacaatctactctccgttggatggccaaccttgtgctgatcatgatagggcaacaggtgaaggtgtgcagccacaagaatacgtcttgattaaaatggaggtgatatcaccttttcctcccaagctgaagtcattggaagggaggaaggtatacttggcagctgctacactaagacccgagacaatgtatggacagacaaattgctgggtccttcctgatggaatgtatggtgcttttgagattaatgacactgatgtcttcatccttacagcaaggtctgcttttaatcttgcataccaacacctatccagggtccctgaaaaaccaacctgcttatgtgagctatctggcagtgatttgattggtttgccactgaaatctcctcttgccttcaatgaaacaatatatgctcttccaatgctcactgtcttgactgacaaaggtactggcattgtgactagtgtccctagtgattcacctgatgatttcatggcactgcaagatttagtcacaaagccagcattgagagcaaagtatggagtgaaagatgagtgggttcttccttatgagattataccaataatccacattcctgaatttggagacaagtcagcagagaaggtttgccatgatcttaagattaaaagccagaacgacaaggagaagcttgctgaagcaaaaagaatgacatatctgaagggatttactgatggaacaatgattgtaggtgagttcagtggtagaaaggttcaggaagcgaaaccgctgattaaaagtaagcttttggaagaaggcacagctgtgttgtatagtgagccggagaagaaggtcatgtctagatctggtgatgaatgtgttgttgccctcactgatcagtggtatataacttatggcgaggctgaatggaagcagaaggcagtcaaatgtttggaccacatgaatacattctcaactgaaacccgcaatggttttgaacatacgctgggctggctgaaccagtgggcttgttcacgttcatttggactcggtactcgaattccatgggatgagcagttccttgtagaatctctttctgattctaccctatacatggcttattatacagttgcacaccttttgcaaaatggtaatatgtatgggaaagaaatatcttcagtaaggccagaagaaatgacagatgaagtctgggatttcgtgttttgtgatggcccggcaccaaaaagcgagatccctgccgctctgttgaacaagatgaaacatgaatttaagtattggtatccatttgatatccgtgtgtctggtaaagaccttattcaaaaccatttgacattctgcatatacaatcatacagcacttcttcctgagcaccactggcctattggtttccgctgcaatggacatctaatgcttaactctgagaaaatgtccaagtccacagggaatttcctaactctggaagatgccataaaaaagtactcttctgatgccactagatttgcccttgctgatgctggcgatggtatggatgatgcaaattttgtcactgaaactgcaaattctgctgttatgaggcttacaaaagaaatttcatggatggaggaggttacagctgctgaatcaaaattaagaactgggccgcccactacatatgctgaccgtgtgttttcaaacgagatgaacattgcaatcaaagaaactgagaagagctacaatgctttcatgttcagagacgccctgaagtctgggttctatgacctccaattggctagagatgagtacaggctctcttgtggtgcagcaggcatgaaccgtgatctgttgtggcgatttatggatgtccagaccaggcttatcacccccatttgcccacactatgctgagcacgtgtggcagaagatcatgaagaaagaaggctttgcaataaaagctggctggccagccgcggacaccccggatcccacactgagaattgcaaataaatacctgcaggattccatagttttgatgaggaaactgcttcagaagcaagagtctggttctaagaagcctaagaagggagctgcaccggcacctccgtccgaggaaaagaagatgagcattggcctcatatatgtgaacgagcactactctggatggaaagagcagtgcttgaaggtgctgcagtccaagttcgacagccaaagccgctccttctcacccgatcaggaaatcgcagaagctctgaaggagtgccccatcgggcaggaaatgaacctgaagcaggttcagaagctgtgcatgcccttcatcaagctgaagaaggacgaggcaagggaggttggtcctcaggcgctggacttgaagcttccgttcggtgagatggatgttctccgggagaacttggagctgatcaagaggcagctgggccttgagcaagtcgaggtgctctccgcgtcggacgaagctgctcgcgctaaggctggtgaacatgcttcgctgctggagaagaacccaccatcacccggcgaccccatcgccatcttcctcagcaaacagagctgaaaactgaccttgcatatggcccttttgttatttacttcgccgcacatttgcttcttttttgtttttgtttttgtgaaaccagtttcgtgtctgtaaacatagcatgttgtcctccggtttggtgaaaccagttttttctttttctttttctgtcaacagaatatgttatccattctctgggtaaccagttcggctattgtcgacaaagtatgttttgtgtcgctttacatca

SEQ ID NO: 18971 - DNA, 3953 bp, Zea Mays
gccgtcggccgcacccccgctcccgagctgcgccgtcggccgcccgcccgcctccgaggatatcgtcgccccggcgttcgcggcccgtgaaaacccacaggcagcaaccctggatttgggcctagcatttttccacgagggatttgggttatcatacagcccagactccaaacccaagaaaaggcacaaactaatcgaaccctaccttcttctccactccacaccagcgctagctagttcctagcttacccacgcacggccgccgcctcctcctcacgcacgcggcagccgcggtacgttatccaggtcgtgccgacgtccgacgacaaagaaggccttgggggcgctggcgcgcatcgcgagtcccctcgccgcctcggagggcaagttcccgaaccggggaatcaaggacgtcgtcaggagcatctgctgcgggaacgtagggaaaatgtcaacgaatcctgatgaacctaagagtcgtgcccggacagactttttgctcaacaatgaactagaggtccagaagttttgggatgagaacaaggtttttcaggctgatcctggcaatgactctccaagccctggggaaaaattctttgggaactttccatacccttacatgaatggcttgctgcatctgggtcatgccttctcattgtccaagcttgagtttggtgctgcataccacaggcttcgtggctccaatgttcttttgccctttgctttccactgcactggaatgcccatcaaggcctccgctgataagctagctagggaaatccaacaatatggatatcctccggtgtttcctgtggcagagggttctagtgctgcagtagccgatgctacccaggctgaccaggttgatgttgttgccccagataagtttaaggggaagaagtccaaggctactgcaaaggctggtgcacaaaagtaccagtgggagatcatgaagagctttggtctagatgatgaagaaattgccagatttcaagatccttatcattggttgactcacttccctccgctggcaaaggaggttctcaagaaatttggcttgggttgtgactggaggagatcattcataactactgacatgaatccatactatgatgcttttgttaagtggcagatgaggaagctgaagaaattgggcaaagttgttaaagacatgaggtacacaatctactctccgttggatggccaaccttgtgctgatcatgatagggcaacaggtgaaggtgtgcagccacaagaatacgtcttgattaaaatggaggtgatatcaccttttcctcccaagctgaagtcattggaagggaggaaggtatacttggcagctgctacactaagacccgagacaatgtatggacagacaaattgctgggtccttcctgatggaatgtatggtgcttttgagattaatgacactgatgtcttcatccttacagcaaggtctgcttttaatcttgcataccaacacctatccagggtccctgaaaaaccaacctgcttatgtgagctatctggcagtgatttgattggtttgccactgaaatctcctcttgccttcaatgaaacaatatatgctcttccaatgctcactgtcttgactgacaaaggtactggcattgtgactagtgtccctagtgattcacctgatgatttcatggcactgcaagatttagtcacaaagccagcattgagagcaaagtatggagtgaaagatgagtgggttcttccttatgagattataccaataatccacattcctgaatttggagacaagtcagcagagaaggtttgccatgatcttaagattaaaagccagaacgacaaggagaagcttgctgaagcaaaaagaatgacatatctgaagggatttactgatggaacaatgattgtaggtgagttcagtggtagaaaggttcaggaagcgaaaccgctgattaaaagtaagcttttggaagaaggcacagctgtgttgtatagtgagccggagaagaaggtcatgtctagatctggtgatgaatgtgttgttgccctcactgatcagtggtatataacttatggcgaggctgaatggaagcagaaggcagtcaaatgtttggaccacatgaatacattctcaactgaaacccgcaatggttttgaacatacgctgggctggctgaaccagtgggcttgttcacgttcatttggactcggtactcgaattccatgggatgagcagttccttgtagaatctctttctgattctaccctatacatggcttattatacagttgcacaccttttgcaaaatggtaatatgtatgggaaagaaatatcttcagtaaggccagaagaaatgacagatgaagtctgggatttcgtgttttgtgatggcccggcaccaaaaagcgagatccctgccgctctgttgaacaagatgaaacatgaatttaagtattggtatccatttgatatccgtgtgtctggtaaagaccttattcaaaaccatttgacattctgcatatacaatcatacagcacttcttcctgagcaccactggcctattggtttccgctgcaatggacatctaatgcttaactctgagaaaatgtccaagtccacagggaatttcctaactctggaagatgccataaaaaagtactcttctgatgccactagatttgcccttgctgatgctggcgatggtatggatgatgcaaattttgtcactgaaactgcaaattctgctgttatgaggcttacaaaagaaatttcatggatggaggaggttacagctgctgaatcaaaattaagaactgggccgcccactacatatgctgaccgtgtgttttcaaacgagatgaacattgcaatcaaagaaactgagaagagctacaatgctttcatgttcagagacgccctgaagtctgggttctatgacctccaattggctagagatgagtacaggctctcttgtggtgcagcaggcatgaaccgtgatctgttgtggcgatttatggatgtccagaccaggcttatcacccccatttgcccacactatgctgagcacgtgtggcagaagatcatgaagaaagaaggctttgcaataaaagctggctggccagccgcggacaccccggatcccacactgagaattgcaaataaatacctgcaggattccatagttttgatgaggaaactgcttcagaagcaagagtctggttctaagaagcctaagaagggagctgcaccggcacctccgtccgaggaaaagaagatgagcattggcctcatatatgtgaacgagcactactctggatggaaagagcagtgcttgaaggtgctgcagtccaagttcgacagccaaagccgctccttctcacccgatcaggaaatcgcagaagctctgaaggagtgccccatcgggcaggaaatgaacctgaagcaggttcagaagctgtgcatgcccttcatcaagctgaagaaggacgaggcaagggaggttggtcctcaggcgctggacttgaagcttccgttcggtgagatggatgttctccgggagaacttggagctgatcaagaggcagctgggccttgagcaagtcgaggtgctctccgcgtcggacgaagctgctcgcgctaaggctggtgaacatgcttcgctgctggagaagaacccaccatcacccggcgaccccatcgccatcttcctcagcaaacagagctgaaaactgaccttgcatatggcccttttgttatttacttcgccgcacatttgcttcttttttgtttttgtttttgtgaaaccagtttcgtgtctgtaaacatagcatgttgtcctccggtttggtgaaaccagttttttctttttctttttctgtcaacagaatatgttatccattctctgggtaaccagttcggctattgtcgacaaagtatgttttgtgtcgctttacatca

SEQ ID NO: 18972 - DNA, 3554 bp, Zea Mays
gaagtgatgtccatccgcatctccaaccttgctgtgacggcccgggaaaatgtcaacgaatcctgatgaacctaagagtcgtgcccggacagactttttgctcaacaatgaactagaggtccagaagttttgggatgagaacaaggtttttcaggctgatcctggcaatgactctccaagccctggggaaaaattctttgggaactttccatacccttacatgaatggcttgctgcatctgggtcatgccttctcattgtccaagcttgagtttggtgctgcataccacaggcttcgtggctccaatgttcttttgccctttgctttccactgcactggaatgcccatcaaggcctccgctgataagctagctagggaaatccaacaatatggatatcctccggtgtttcctgtggcagagggttctagtgctgcagtagccgatgctacccaggctgaccaggttgatgttgttgccccagataagtttaaggggaagaagtccaaggctactgcaaaggctggtgcacaaaagtaccagtgggagatcatgaagagctttggtctagatgatgaagaaattgccagatttcaagatccttatcattggttgactcacttccctccgctggcaaaggaggttctcaagaaatttggcttgggttgtgactggaggagatcattcataactactgacatgaatccatactatgatgcttttgttaagtggcagatgaggaagctgaagaaattgggcaaagttgttaaagacatgaggtacacaatctactctccgttggatggccaaccttgtgctgatcatgatagggcaacaggtgaaggtgtgcagccacaagaatacgtcttgattaaaatggaggtgatatcaccttttcctcccaagctgaagtcattggaagggaggaaggtatacttggcagctgctacactaagacccgagacaatgtatggacagacaaattgctgggtccttcctgatggaatgtatggtgcttttgagattaatgacactgatgtcttcatccttacagcaaggtctgcttttaatcttgcataccaacacctatccagggtccctgaaaaaccaacctgcttatgtgagctatctggcagtgatttgattggtttgccactgaaatctcctcttgccttcaatgaaacaatatatgctcttccaatgctcactgtcttgactgacaaaggtactggcattgtgactagtgtccctagtgattcacctgatgatttcatggcactgcaagatttagtcacaaagccagcattgagagcaaagtatggagtgaaagatgagtgggttcttccttatgagattataccaataatccacattcctgaatttggagacaagtcagcagagaaggtttgccatgatcttaagattaaaagccagaacgacaaggagaagcttgctgaagcaaaaagaatgacatatctgaagggatttactgatggaacaatgattgtaggtgagttcagtggtagaaaggttcaggaagcgaaaccgctgattaaaagtaagcttttggaagaaggcacagctgtgttgtatagtgagccggagaagaaggtcatgtctagatctggtgatgaatgtgttgttgccctcactgatcagtggtatataacttatggcgaggctgaatggaagcagaaggcagtcaaatgtttggaccacatgaatacattctcaactgaaacccgcaatggttttgaacatacgctgggctggctgaaccagtgggcttgttcacgttcatttggactcggtactcgaattccatgggatgagcagttccttgtagaatctctttctgattctaccctatacatggcttattatacagttgcacaccttttgcaaaatggtaatatgtatgggaaagaaatatcttcagtaaggccagaagaaatgacagatgaagtctgggatttcgtgttttgtgatggcccggcaccaaaaagcgagatccctgccgctctgttgaacaagatgaaacatgaatttaagtattggtatccatttgatatccgtgtgtctggtaaagaccttattcaaaaccatttgacattctgcatatacaatcatacagcacttcttcctgagcaccactggcctattggtttccgctgcaatggacatctaatgcttaactctgagaaaatgtccaagtccacagggaatttcctaactctggaagatgccataaaaaagtactcttctgatgccactagatttgcccttgctgatgctggcgatggtatggatgatgcaaattttgtcactgaaactgcaaattctgctgttatgaggcttacaaaagaaatttcatggatggaggaggttacagctgctgaatcaaaattaagaactgggccgcccactacatatgctgaccgtgtgttttcaaacgagatgaacattgcaatcaaagaaactgagaagagctacaatgctttcatgttcagagacgccctgaagtctgggttctatgacctccaattggctagagatgagtacaggctctcttgtggtgcagcaggcatgaaccgtgatctgttgtggcgatttatggatgtccagaccaggcttatcacccccatttgcccacactatgctgagcacgtgtggcagaagatcatgaagaaagaaggctttgcaataaaagctggctggccagccgcggacaccccggatcccacactgagaattgcaaataaatacctgcaggattccatagttttgatgaggaaactgcttcagaagcaagagtctggttctaagaagcctaagaagggagctgcaccggcacctccgtccgaggaaaagaagatgagcattggcctcatatatgtgaacgagcactactctggatggaaagagcagtgcttgaaggtgctgcagtccaagttcgacagccaaagccgctccttctcacccgatcaggaaatcgcagaagctctgaaggagtgccccatcgggcaggaaatgaacctgaagcaggttcagaagctgtgcatgcccttcatcaagctgaagaaggacgaggcaagggaggttggtcctcaggcgctggacttgaagcttccgttcggtgagatggatgttctccgggagaacttggagctgatcaagaggcagctgggccttgagcaagtcgaggtgctctccgcgtcggacgaagctgctcgcgctaaggctggtgaacatgcttcgctgctggagaagaacccaccatcacccggcgaccccatcgccatcttcctcagcaaacagagctgaaaactgaccttgcatatggcccttttgttatttacttcgccgcacatttgcttcttttttgtttttgtttttgtgaaaccagtttcgtgtctgtaaacatagcatgttgtcctccggtttggtgaaaccagttttttctttttctttttctgtcaacagaatatgttatccattctctgggtaaccagttcggctattgtcgacaaagtatgttttgtgtcgctttacatca

SEQ ID NO: 18973 - DNA, 1774 bp, Zea Mays
caaaacctgcgtttgtcccctaccctcgtgtccgacatggaagcctgcactttatatgctatcaccagtcccgatacctggtctggtgatcgctggatgatggacgccaagaagattaagctgcacgactaccacctctacggatcgcagcagctgtttcccgcggccggggggctctccttccacccggctgcggggctcatgagctccctgccgcagccgccgcatgccgcctggctgcacgaggaccaccacacgacgaccccgaggtcggtgctcgcgacgcatggctcgctgcagggcagcaggtgcgtcggctccgacgccgccgcgttcttcgccgccgaggagctgatgatgggcatgccgcgcttcgacgactgccctctcggcgggacggagatgacagcgtttgccaagaggccgacgacggaggacgagcagctgcactaccgtcgtccaggtccagtcgacccgctgccgctccgtgacagcgcggcggtgaggacgtactacgtccggccgcagcagcgcgacggcgccacggaggcgcctccttcgctcgaactgccattccagcaagggcggcggcagcagcagcagttgttcggcaacgcttccaccggcaggctgctcggcggcgaacccaaagcccactcctttacagctcatgttgcgacgagcacgcttctcccggcgatggaggcgccggcgggcatgcagcagagcccgacggagaatccgctgtccaggagctgcagtaccatcggtgcgccggcgacccacgtcgggagcgggaacgtcgccgccgccgccgcgccggggcatggcgcgccgagcaagacgcggatccggtggacgcaggacctccacgagcgcttcgtcgactccgtgaaccaactcggcggtgccgacagtgagcgtcgtccttgatcccaagctctctgtttttttgtctgcactagctcttggttaacctgtttgcttttgcttgaatcgaaggctattcgattctctttctcgtagagtagtcatatactctcgtttttttttgcatgcgtgacacttgcagaggcgactcccaaggggatcctcaagctgatgaactccgatggcctcacaatctaccacatcaagagccaccttcagaaataccgcatagctaagtacatgcccgcatcatcgacgtctgaagggaaacaggagaaacgagccgtcggaaacgacgtgcagaatctcgaccccagcactgggatgaagatcaccgaagcactacgcgtgcagctcgacgtgcagaggcgcctccacgagcagctcgagatccagaggaacctccagctgaggatcgaggtgcaggggaagaagctgcagaagatgttcgaggagcagatgaaggcgagcaggaccgtgatggagccacggcaggaggaggaagatgacgacgacgacgcgttcaacgacgtgcacgtgcagctgctggcggccgcggcccgcagcgacgccgggttccagttgaatataagctagcctttggccgccgcgcgcctccagctggctcgatcggctttgtaatcgtagggtttgactacaaatatcagcctagtgactcatggatggtgatgcctacaatgtttgggaggaggagctgaggagtgctttgttgccaaatcgaccgagttgtctatttcctcttcttttttagaaacaaaaaaaggaatttaaagtgttggaatacatgggagggaggatcctcgtcctcctccgtgaaggtaaa

SEQ ID NO: 18974 - DNA, 2414 bp, Zea Mays
caaaacctgcgtttgtcccctaccctcgtgtccgacatggaagcctgcactttatatgctatcaccaggtggatcatctttgcatctttttattccttgtcagttgcttcattgccttccacattccaatcggggtagatggtcctttctgctcccattcttcgttccccatcctcctgcagattccaatcccttcctccagatacatacagcatagggcgagagtggctgagtgagtgagggacacagtttcgttccaggaaagcctgctgcacacatgtgacgccttgaggctgtaagttgctctacccatatctgccgaaggatgcgcgtgtttgcattgcagtgttcttgcttcctcctcctcctccggtggctgctggctgcggcacgcatggccgtcggctgtctcgcgattcccggtagttctctttctctgcgcgccggccggaggcactcaccgccgtcgaattattctcgtcacgctgtgcgacacgccaccaaggtccaggaatacggatcctattcgaccactagctaagctaggagctagctagaaccacgaacccagcttccaaattcctttggattggatggaagtggaacctacgcgtcctcggcactacttaagctagcaaagcataccatagccctgctctcctgctagctccaaccgccgtcctgattcaatcgtctgtttcaggccctcacatgttgaattgctgatgctaaaatgtgctgcatatatatacgatgaaaactatcgtcgatgcttttgatcaagctcgtctatctactgctgcgactgataagttggttcgctgtgcccgtttgtttccctgctcgtttgttcagtcccgatacctggtctggtgatcgctggatgatggacgccaagaagattaagctgcacgactaccacctctacggatcgcagcagctgtttcccgcggccggggggctctccttccacccggctgcggggctcatgagctccctgccgcagccgccgcatgccgcctggctgcacgaggaccaccacacgacgaccccgaggtcggtgctcgcgacgcatggctcgctgcagggcagcaggtgcgtcggctccgacgccgccgcgttcttcgccgccgaggagctgatgatgggcatgccgcgcttcgacgactgccctctcggcgggacggagatgacagcgtttgccaagaggccgacgacggaggacgagcagctgcactaccgtcgtccaggtccagtcgacccgctgccgctccgtgacagcgcggcggtgaggacgtactacgtccggccgcagcagcgcgacggcgccacggaggcgcctccttcgctcgaactgccattccagcaagggcggcggcagcagcagcagttgttcggcaacgcttccaccggcaggctgctcggcggcgaacccaaagcccactcctttacagctcatctgctgcaggttgcgacgagcacgcttctcccggcgatggaggcgccggcgggcatgcagcagagcccgacggagaatccgctgtccaggagctgcagtaccatcggtgcgccggcgacccacgtcgggagcgggaacgtcgccgccgccgccgcgccggggcatggcgcgccgagcaagacgcggatccggtggacgcaggacctccacgagcgcttcgtcgactccgtgaaccaactcggcggtgccgacaaggcgactcccaaggggatcctcaagctgatgaactccgatggcctcacaatctaccacatcaagagccaccttcagaaataccgcatagctaagtacatgcccgcatcatcgacgtctgaagggaaacaggagaaacgagccgtcggaaacgacgtgcagaatctcgaccccagcactgggatgaagatcaccgaagcactacgcgtgcagctcgacgtgcagaggcgcctccacgagcagctcgagatccagaggaacctccagctgaggatcgaggtgcaggggaagaagctgcagaagatgttcgaggagcagatgaaggcgagcaggaccgtgatggagccacggcaggaggaggaagatgacgacgacgacgcgttcaacgacgtgcacgtgcagctgctggcggccgcggcccgcagcgacgccgggttccagttgaatataagctagcctttggccgccgcgcgcctccagctggctcgatcggctttgtaatcgtagggtttgactacaaatatcagcctagtgactcatggatggtgatgcctacaatgtttgggaggaggagctgaggagtgctttgttgccaaatcgaccgagttgtctatttcctcttcttttttagaaacaaaaaaaggaatttaaagtgttggaatacatgggagggaggatcctcgtcctcctccgtgaaggtaaa

SEQ ID NO: 18975 - DNA, 1845 bp, Zea Mays
caaaacctgcgtttgtcccctaccctcgtgtccgacatggaagcctgcactttatatgctatcaccaggtggatcatctttgcatctttttattccttgtcagttgcttcattgccttccacattccaatcggggtagatggtcctttctgctcccattcttcgttccccatcctcctgcagattccaatcccttcctccagatacatacagcatagggcgagagtggctgagtgagtgagggacacagtttcgttccaggaaagcctgctgcacacatgtgacgccttgaggcttcccgatacctggtctggtgatcgctggatgatggacgccaagaagattaagctgcacgactaccacctctacggatcgcagcagctgtttcccgcggccggggggctctccttccacccggctgcggggctcatgagctccctgccgcagccgccgcatgccgcctggctgcacgaggaccaccacacgacgaccccgaggtcggtgctcgcgacgcatggctcgctgcagggcagcaggtgcgtcggctccgacgccgccgcgttcttcgccgccgaggagctgatgatgggcatgccgcgcttcgacgactgccctctcggcgggacggagatgacagcgtttgccaagaggccgacgacggaggacgagcagctgcactaccgtcgtccaggtccagtcgacccgctgccgctccgtgacagcgcggcggtgaggacgtactacgtccggccgcagcagcgcgacggcgccacggaggcgcctccttcgctcgaactgccattccagcaagggcggcggcagcagcagcagttgttcggcaacgcttccaccggcaggctgctcggcggcgaacccaaagcccactcctttacagctcatgttgcgacgagcacgcttctcccggcgatggaggcgccggcgggcatgcagcagagcccgacggagaatccgctgtccaggagctgcagtaccatcggtgcgccggcgacccacgtcgggagcgggaacgtcgccgccgccgccgcgccggggcatggcgcgccgagcaagacgcggatccggtggacgcaggacctccacgagcgcttcgtcgactccgtgaaccaactcggcggtgccgacaaggcgactcccaaggggatcctcaagctgatgaactccgatggcctcacaatctaccacatcaagagccaccttcagaaataccgcatagctaagtacatgcccgcatcatcgacgtctgaagggaaacaggagaaacgagccgtcggaaacgacgtgcagaatctcgaccccagcactgggatgaagatcaccgaagcactacgcgtgcagctcgacgtgcagaggcgcctccacgagcagctcgagatccagaggaacctccagctgaggatcgaggtgcaggggaagaagctgcagaagatgttcgaggagcagatgaaggcgagcaggaccgtgatggagccacggcaggaggaggaagatgacgacgacgacgcgttcaacgacgtgcacgtgcagctgctggcggccgcggcccgcagcgacgccgggttccagttgaatataagctagcctttggccgccgcgcgcctccagctggctcgatcggctttgtaatcgtagggtttgactacaaatatcagcctagtgactcatggatggtgatgcctacaatgtttgggaggaggagctgaggagtgctttgttgccaaatcgaccgagttgtctatttcctcttcttttttagaaacaaaaaaaggaatttaaagtgttggaatacatgggagggaggatcctcgtcctcctccgtgaaggtaaa

SEQ ID NO: 18976 - DNA, 3059 bp, Zea Mays
catccatactgtaatactttagtttagaacaagaggatatgcttagttctggaatttttggaatatctactggactctggatgggcatcgaattttatgctataaacaccgattcccaagcccttattaattcacaagcgcaatatcctctgcaaattggagagcagttgacccgcggcttaggtgccggtggaaatccgaatttgggagagcaggctgctgaggaatcaagagaaaccatagccactgccctgagggattcagatcttgtcttcataacagctgggatgggagggggtactggatctggtgctgctccagttgttgcccagatatcaaaggaagctggttatcttactgttggtgttgtcacctatccattcagtttcgagggccgtaagcgctctgtacaggcattggaagcactagagaagctggaaaagagtgtagacacacttattgtgattccaaatgataagttattagatgttgcggatgaaaacatgcccttgcaagatgcatttctccttgcagatgatgtccttcgtcagggtgttcaaggaatatcagacatcatcacaataccgggacttgtcaatgttgattttgctgatgtaaaagctgtcatgaaaaactctggaactgccatgctcggtgttggtgtttcttccagcaaaaatcgggcccaagaagctgctgaacaggcaacacttgctcctttgattggatcatccatcgaggcagctactggcgttgtgtataatattactggtgggaaggacatcactttgcaagaagtgaacaaggtgtcccagattgtgacaagcctagctgacccatctgcgaacataattttcggtgccgttgttgatgaccgttacactggtgagatacatgtgacaatcattgcgacaggatttccacagtccttccagaaatcccttttggcggatccaaagggagcacggatagtggaatccaaagagaaagcagcaaccctcgcccataaagcagcagctgctgcagttcaaccggtccctgcttctgcttggtctcgaagactcttctcctgagaagctcatttggtgaaccgtgactcgtagtgcattagatttggcatttagcgtgttgagggcagtccctaaggtgatcttcggatatctggagatttatagcttgggctagtgttcggtagtggtagaataagtttcagtgtatgtatcgttgctttgctttatgtttttgaggatcaggcggtgaggctgagagaagtgctcagcaactcaacattgaactgttgtagaagatctttgattgcttttattgctgcaacatgccaacaaccctctgttggattcgacagaatgtgggtgcctatttctccaaccgtttgtttttcctcgattgcatgtcagggaattgttcttgctgcaatcacgctctcgattgcatgtcagggaattgttcttgatgcagttatgagtacagaagaaagtccagacctcagaatagataacctctggtttattgccttattgacttctaccctttctctcgtgttttcaacgaagtcttgctggtcctcctgccttgcagcagggcccagggcaaaaggttacaacttgcaagagatgaggttccagatacatatgaacatcagacactaattccagagacaaactctggccgccaccatcaggacttctaattccagagacaaactctggccgccaccatcaggacttctagatcaacacagggttcgtttcatgagcctccctagggatcaatggtgtggacctgttagggcttgttcggttattttcaatccatatggattggaggggattaatacggattggaagggattttgacttactggggattaaaatcctctcaatccctctcaatccgacttagggcttgttcggttattttcaatccatatggatcggaggggattgatacggattggaggggattttaactggctagggattgaaaccctctcaatccccctcaatccatatggattggggggagaaccgaacaagcccttactggggattaaaaccctctcaatctctctcaatccaaccgaacacgcccttagaggggtttgacgccacgacggaataagctcgaagagttggcgctgctaggtgtcggcacgtgcagtaaggtggctagcgcgatgacgaggggctgcgcgagcggagatgccgatgcagtgtaaccacgccatggaagaagggtcggcgaccgttggggaagggagtgcccgcgaggccacggcggctgctggccgggtagggaggccgattgccgacgagcgggacgccatcgggaaaggcccttgccgggtcaggccgaggcggatttaagccgccggggaagggagggggtcgcgaccgcgcctccggagccagaggggaggggcatgcagatccactgccgcagggggaggggtggcggcggatggccgcgccatggtgaggcagacgacgacaagggagctggggaagagagagggcgcgagggagggagagccgacggcctggctgctgggggaagtacaggcggggctcgccggcgagcggggagaagcgccgcgccgctgctggtggcaggcgcgcggccatggggccgcgccgacatggggagcggcgacgtcgcgagcttggtggccacgagcgggtcagcggccaaacgaagagagagccgatgccccgacggctaggaggagctccggttgggctcgtcggcgggtgcaccgtcgtgtgagcgtagacccaggtggcacgcgggcgcggagctccagcgttgcgtgccaggcgacgacggcgtggatcccgccgcgaccggcagcggggagcgtggcccacgggtcgcgctaggagcagcggcgcgccatgggcgcttggaggagggtagcaggggcggttgagcgtgtgcgctagcagcagggaggtaggccgcctgagagaaggggtagaggtgggaggtcccagcggctaggagaggttgccgcccctaagaggggaggacgagcctctcgg

SEQ ID NO: 18977 - DNA, 1878 bp, Zea Mays
ggcgaactgcgggtttctttggccgtacgtctcgggtggatcctggcgccggcagatccgaatgggccgatgtactacaacggcatgtaccatctcttctaccagtacaacccgcacggcgcgctctggggcgttggcaacctctcctggggccactccgtttccggcgacctcgtgaactgggccgccctggacacggcgctggacccgacgtcgcccttcgacgccaacggctgctggtcgggctccgccaccatcctccccggcggcaccccggccatcctctacacgggcatcgacgccaacggggagcaggtgcagaacgtggcgttccccagggacccggcggacccgctccttcgccggtgggacaagcccggctacaaccccgtcatcccgctccccgccgacgtcccgggcgacaagttccgggacccttcgacggcgtggctcggccgcgacgggctgtggcgcgtcgcggtgtccgccgaggtccgcggcgtggcgtccacgctcgtgtaccggagcgcggacttcctccgctgggagcgcgcccccgccgccgcgccgctgcacgcctcgcgcgccgcgggtatggtggagtgcccggacctgttcccggtgaaggaggagggtgacgacggcgacggccaagggctcgacgcgtcggcgagcggcgccgggctgcggcacgtgctgaagctcagcgtgatggacacgctccaggactactacatggtggggcggtacgacgacgcggcggacgcgttcgtgccggcggagcccgagcgcggggacgacgtgcgcggctggcggcggctggactacggccacgtgtacgcgtccaagaccttcttcgacgcgcgcgggagccggcgcgtgctgtgggcgtgggccaacgagtccgacagccaggccgacgacgtcgccaagtatagatgcccaaacggcccggcccgaccggcccgcacgttcccgcggaagctgtggctggacgaggacgggaagcagctgcggcagtggccggtggaggagatcgaaacgctgcggaggaagcgcgtcgtcctgcgccgcggcacggcgctggccaccggaggcatgaacgagatcgtcggcgtcgcgggctcgcaggcggacgtggaggtcgcgttcaaggtctcgagcctagcgggggccgaggcactggaccccaactggctgctggacccgcagaagctgtgcggggagaagggcgcctcggtgcccggcggcgtcgggccgttcgggctcatcgtgatggcctccagcgacctgcgcgagcacaccgctgtcttcttccgcgcgttcaggtaccatggcaggtacaagcttctcatgtgcactgacctgacaaggtcgtccacgagggcaggcgtgtacaagccgccatacggaggattcgtggacgtcgacgttgaggagcacgagaccatcaatttgagaaccctgattgatcactcggtggtggagagcttcggagctgacgggcggatgtgcatcacggctagagtgtaccctgagcacgcggagacgagcaacaaccacatgttcgtgttcaacaatggcacaggcacggtggaggtgtacaagctcgaggcatgggagctcgcggcggcgaccgtaaattccgttgggggcaacgacagcttggttatttctaaatctaatgaccaaagtgaatcctattaaaatcttcaggttaatgtgtcaaaaatggggtccgtttgatttgattgctatactttgttatagagagggggggaaaggtgtatttcaaataagaaatattggccgattgctgttgagaaattcatattggttgatttggagaggagaataaacaagttctactgatctggc

SEQ ID NO: 18978 - DNA, 3392 bp, Zea Mays
ccgctgcccggcatcggcaggcagcgaagcatgcttgcacagatgcggcatcatggcatcgcccctcctcctcgaaagtggcatgcaggcgcggtagggtagagttcctcacttctcgcccatcaacgatgacgaagtgcgcgtaagctgctgctgggaaacggagattggatagattcgccgggggtcttgttggcttcaagagagcccgagttctcctttttccagcttgggtctggtacgccatctctgggtctggggactgtagatgatgacgtcctcgtacgagaaggccacgtcgggtgtcctgaggaacgcggcggcgctgctcgacgaaatgcagctcatgggagaaacgcagggtgccaagaaggtgatcaactccgagctgtggcacgcgtgcgcggggccgctggtctgcttgccgcagcgggggagcctcgtctactacttcccccaggggcacagcgagcaggttgctgctaccactaaaaagatacccaactctcgcatcccaaactacccgagtctcccgtcgcagctgctatgtcaagtccacaacatcactttgcatgctgacaaagaaactgatgagatttatgcccagatgaccctgcaaccagtacactcggaaactgatgtgttcccaatcccaacgctcggtgcttataccaaaagcaagcaccccagtgaatatttctgcaagaatttgactgcaagtgatacaagtacgcatggtggtttctcggtgccacggagagctgcagagaagctgtttccgcagttggattattcaatgcagcctcctaatcaggagcttatcgttcgagatctgcatgataacatgtggacattccgtcacatttatcgtggccagccaaagcgacatcttctaacaactggatggagtctttttgttggtgcgaaacggcttaaagctggtgactctgtcttatttatcagggatgagaagtcacagctccttgtgggtgttaggcgggccaccagacaacaaccggctttgtcatcatccgtcctgtctactgacagtatgcacattggtgttcttgctgctgcagctcatgcagcatcaagtggtggctcgtttactgtttactacaatcctcggacaagcccgtcgccatttgtgattcctctcgcaaggtacaatatggccacatatctgcaaccatcagttggaatgagattcgcgatgatgtttgagacggaggagtcaagcaagcgcagatgcacaggtacaattgtgggaattagcgactatgaaccgatgcgatggccaaactcaaaatggcgcaacttgcaggtagaatgggatgaacatgggtatggagaaagacctgaaagagttagtctatgggatatcgaaactccagagaacatggttttctcttccccattgaattcgaaaaggcaatgtcttcctagttatggagtttctggcctacatgtgtcatcaatttcaaagccacaaggaagtccttttggtaacttgcagcacatgccagggatcagttcagacattgctttgctgcttctcaatcaatctgcccagaacctcgggagttcaattgcttgtcaacaatcatcattttccagcattattcaaaatgctaagcaaagctatttccctccaacgacattaggtgcttccactggttggaatgaatctcagcagcagttaaacgcccttggtattcaaaaaggtgatcaagtaagctgtgatgttcagccaggtattgattcaatcactgcaccggagatgaatgttaaaccaagagtcccaagaagcacggattcatactcaagtcagagcatttcggatccaaacagcaagagtgaccctaaaacaaaaacgcgaaggagcaagaagagctcgtctcacaaaaccatttcggataaatctgagatttcttcagtaccttctcagatctgtgacaagcaaaggcatggttcagaaccaacatcggcagactttgaagcagaacaagctacctgtgggaacaatgaggattcatctggtgcactcacacgtggtgattttgctggagagctacaagttcagcaggttgaacaagatggtctacttccaccaccgaagttagagtcatcaaagtcacctgatggagggaagtccgtcagctcgttcccaaaccaagggtgtttctcacagttctttgagggtctggattggatgatcccgccttcctgctaccaagactccaatggcatccattcagttaccacatcggatagcatctttaatccgtctgaaggtataccaccttccacaatgaacgcggacggcatggacgcgttccaaacctcttgcctttccgagtgctttcctaattccatccaagaattcatcagcagtccagatataaacacactgacatttatgtcgcctgagatgcaacatctggatgcccaacacgacggcagcaacttgcagagcacgtccaactcctatgtgcagatgagcttctcggaggagagccagagtgcatccttaagtggcctacacatggaagctgtccatatcaacagctcctgccttcaaccactggcgacagggagctttgatgcagggacgttctcaaaactatcaaacataaaagaatgccaggccttgcctctgcaggagattcacaacagctccatgggaacaccttcgtgcagtatggatgcggcggcggtcgagtactgtatggatcgaagtgtgaagccactgaaaccaccggtccggacatatacaaaggttcaaaagttaggatcagttggaagatctatcgacgttacacggtttagagactaccatgagttgaggtcagccattgcctgcatgtttggactacaggggaaactggaacaccctggcagttcagactggaagcttgtttatgtcgactacgagaacgatgttctcctcgttggagacgacccgtgggaggagttcatcaactgtgtgagatgcattcggatcctggcgccttcggaagtacagcagatgagcgagaatggcgtgcatgtcttgaacgactgcatgcaaatggcttagaaagtcagggctatatgtcctgcgcagcctgcacagtgtaacgtcgcaaatacgagaaatgagtgttcttcgtagccacgcagcggctcttcttgtaaataaaagatacatcacgtgcatccaattctctgaatgctttgattcttttctagcacgagaagagaccattattatatggcggtgcattacaggtctattttctattttttcatgcaatgacttaaattatgagcttacgaggaagggggtgataatgtatcaaattatcccatctatttatttattatattaatacaagaaatttaaaaaaaaa

SEQ ID NO: 18979 - DNA, 3547 bp, Zea Mays
caccactcgaccatcacagttcgctccgtcctgctacccagctacaacgcgccactcttcctcacactacgacgacgccttgccacggattcgatcgtcgccgcttgtctgccctatcatctcactccccccgcccgcttgcttttatatctggagcttcccaccagcaaagccttggcattgtgcttccttgctttgtgtgtggcgcgctccaggtgccagccccaggagagaagacaagccgaggcgcggtagggtagagttcctcacttctcgcccatcaacgatgacgaagtgcgcgtaagctgctgctgggaaacggagattggatagattcgccgggggtcttgttggcttcaagagagcccgagttctcctttttccagcttgggtctggtacgccatctctgggtctggggactgtagatgatgacgtcctcgtacgagaaggccacgtcgggtgtcctgaggaacgcggcggcgctgctcgacgaaatgcagctcatgggagaaacgcagggtgccaagaaggtgatcaactccgagctgtggcacgcgtgcgcggggccgctggtctgcttgccgcagcgggggagcctcgtctactacttcccccaggggcacagcgagcaggttgctgctaccactaaaaagatacccaactctcgcatcccaaactacccgagtctcccgtcgcagctgctatgtcaagtccacaacatcactttgcatgctgacaaagaaactgatgagatttatgcccagatgaccctgcaaccagtacactcggaaactgatgtgttcccaatcccaacgctcggtgcttataccaaaagcaagcaccccagtgaatatttctgcaagaatttgactgcaagtgatacaagtacgcatggtggtttctcggtgccacggagagctgcagagaagctgtttccgcagttggattattcaatgcagcctcctaatcaggagcttatcgttcgagatctgcatgataacatgtggacattccgtcacatttatcgccagccaaagcgacatcttctaacaactggatggagtctttttgttggtgcgaaacggcttaaagctggtgactctgtcttatttatcagggatgagaagtcacagctccttgtgggtgttaggcgggccaccagacaacaaccggctttgtcatcatccgtcctgtctactgacagtatgcacattggtgttcttgctgctgcagctcatgcagcatcaagtggtggctcgtttactgtttactacaatcctcggacaagcccgtcgccatttgtgattcctctcgcaaggtacaatatggccacatatctgcaaccatcagttggaatgagattcgcgatgatgtttgagacggaggagtcaagcaagcgcagatgcacaggtacaattgtgggaattagcgactatgaaccgatgcgatggccaaactcaaaatggcgcaacttgcaggtagaatgggatgaacatgggtatggagaaagacctgaaagagttagtctatgggatatcgaaactccagagaacatggttttctcttccccattgaattcgaaaaggcaatgtcttcctagttatggagtttctggcctacatgtgtcatcaatttcaaagccacaaggaagtccttttggtaacttgcagcacatgccagggatcagttcagacattgctttgctgcttctcaatcaatctgcccagaacctcgggagttcaattgcttgtcaacaatcatcattttccagcattattcaaaatgctaagcaaagctatttccctccaacgacattaggtgcttccactggttggaatgaatctcagcagcagttaaacgcccttggtattcaaaaaggtgatcaagtaagctgtgatgttcagccaggtattgattcaatcactgcaccggagatgaatgttaaaccaagagtcccaagaagcacggattcatactcaagtcagagcatttcggatccaaacagcaagagtgaccctaaaacaaaaacgcgaaggagcaagaagagctcgtctcacaaaaccatttcggataaatctgagatttcttcagtaccttctcagatctgtgacaagcaaaggcatggttcagaaccaacatcggcagactttgaagcagaacaagctacctgtgggaacaatgaggattcatctggtgcactcacacgtggtgattttgctggagagctacaagttcagcaggttgaacaagatggtctacttccaccaccgaagttagagtcatcaaagtcacctgatggagggaagtccgtcagctcgttcccaaaccaagggtgtttctcacagttctttgagggtctggattggatgatcccgccttcctgctaccaagactccaatggcatccattcagttaccacatcggatagcatctttaatccgtctgaaggtataccaccttccacaatgaacgcggacggcatggacgcgttccaaacctcttgcctttccgagtgctttcctaattccatccaagaattcatcagcagtccagatataaacacactgacatttatgtcgcctgagatgcaacatctggatgcccaacacgacggcagcaacttgcagagcacgtccaactcctatgtgcagatgagcttctcggaggagagccagagtgcatccttaagtggcctacacatggaagctgtccatatcaacagctcctgccttcaaccactggcgacagggagctttgatgcagggacgttctcaaaactatcaaacataaaagaatgccaggccttgcctctgcaggagattcacaacagctccatgggaacaccttcgtgcagtatggatgcggcggcggtcgagtactgtatggatcgaagtgtgaagccactgaaaccaccggtccggacatatacaaaggttcaaaagttaggatcagttggaagatctatcgacgttacacggtttagagactaccatgagttgaggtcagccattgcctgcatgtttggactacaggggaaactggaacaccctggcagttcagactggaagcttgtttatgtcgactacgagaacgatgttctcctcgttggagacgacccgtgggaggagttcatcaactgtgtgagatgcattcggatcctggcgccttcggaagtacagcagatgagcgagaatggcgtgcatgtcttgaacgactgcatgcaaatggcttagaaagtcagggctatatgtcctgcgcagcctgcacagtgtaacgtcgcaaatacgagaaatgagtgttcttcgtagccacgcagcggctcttcttgtaaataaaagatacatcacgtgcatccaattctctgaatgctttgattcttttctagcacgagaagagaccattattatatggcggtgcattacaggtctattttctattttttcatgcaatgacttaaattatgagcttacgaggaagggggtgataatgtatcaaattatcccatctatttatttattatattaatacaagaaatttaaaaaaaaa

SEQ ID NO: 18980 - DNA, 1925 bp, Zea Mays
gagtggcgaatcaactagggacgcgcgttgccgccacgcacctcccttccttcacttgcctgccccccacttctccgatctccgccccatcggacttcccaagggtcggctaggtctaggtggtctccaagctttccgcctttccacgccaccattctccccacccgcgcgcctcagcaatccccatccagcatcgccgtttcgccgcggcaccgacacctcgccggccatgggcgcgtcctcctcgactggcaacccgtccccagaggcgcacgagcagcgggagcaggagactctcgcctccgccgccctctccctcccgctcctccgcgccgccttctcccgctccgccgccaacgcgctgccggatgccctcgcgccgccgcccgcctcctttcgtctgcccggatccccggcgccgccgccgccgcacttccacggcatcctcggggggctcggccccgccatcgcctcccaattcttcggccacggagctgccgcggtgacggacgggggcgccgggtgggtccagttcctcagggggttcaaccgctgctgcgcgcgcgtgacggcctcccgctcgctcgcactgctcctccgcgtgtacgctgccgcctgcgccggcgcgggggcaccctgcggcgtccagctccagccggacgagggcggtggtgacgaggatgggaaggtcgtgggggagctcgcgccggaggagatcgcagtgttcctctgggtgtgctgggtcatggcgtggagcgcttcggcctcgagggtggtcagtgacggaggagataaatcggagcccgtcacggtgctcctcccggacgtgacgcacctggtgctgtcggcgctcgtctcggcgggcgtcgtcacggatgatgcaggcgtttggggctgggacgtctccagcggtgggaagggggtgaaggtccaggagttcatgtcgtgggtgctgtccacgcctttcggccttgggaactgcctctcgcggtatgtgcgggacaaattccggtccctggctgctgactctgtggaggagagctctgtttcaactgttagcacaacctttgacacttctgatgtttatctgctaacacgggggagagcatgggcaattgccctcagcctaagaaacaagttgagtgaaaagctgctgtcagcttctgttattggaatggacacagaagacctcctttataggtcatctgttcatggaaaaggactgagccggttctggtcttgtgttgaggggtacaaagggccaatgctgattctactttcagcattctcaaaaggtggtggtgagaatgttgattctgatcgaagatgggtgattggtgtattgaccgaggagggatttgagaacaaagataccttttatggtagctctgggttcctttgtgccgcacatccaatattccgcatgctaccaccatctgataagagcttatgaagcgaatccaaagcccgttggcttagcatttggtggaacaattggaaatgagaggatctttcttgatgaagacttctcgggagttttagtacgacaccatgctgttgataaaacttatcaacatggctctctcatccccaatcaggttaaattcagatttactggtgtccaaggaatatagtaacctgattgcctttgtgcactatttcaccttatttgcaatcttggatttaggctttgctgtttttctgctgaagatatttagttagcaatcttcctttctgtttggattcaaatatgttattatctatcccaaaagttgatctaccgatgcgcttttgaaatgacactgcgttttcagggcatagaatagggtgattgaccactcccatttaagaattgctcccaccttctcctaaagaacattccacaaatcataactcacgccctattagtgatgagcacaaataag

SEQ ID NO: 18981 - DNA, 1966 bp, Zea Mays
gagtggcgaatcaactagggacgcgcgttgccgccacgcacctcccttccttcacttgcctgccccccacttctccgatctccgccccatcggacttcccaagggtcggctaggtctaggtggtctccaagctttccgcctttccacgccaccattctccccacccgcgcgcctcagcaatccccatccagcatcgccgtttcgccgcggcaccgacacctcgccggccatgggcgcgtcctcctcgactggcaacccgtccccagaggcgcacgagcagcgggagcaggagactctcgcctccgccgccctctccctcccgctcctccgcgccgccttctcccgctccgccgccaacgcgctgccggatgccctcgcgccgccgcccgcctcctttcgtctgcccggatccccggcgccgccgccgccgcacttccacggcatcctcggggggctcggccccgccatcgcctcccaattcttcggccacggagctgccgcggtgacggacgggggcgccgggtgggtccagttcctcagggggttcaaccgctgctgcgcgcgcgtgacggcctcccgctcgctcgcactgctcctccgcgtgtacgctgccgcctgcgccggcgcgggggcaccctgcggcgtccagctccagccggacgagggcggtggtgacgaggatgggaaggtcgtgggggagctcgcgccggaggagatcgcagtgttcctctgggtgtgctgggtcatggcgtggagcgcttcggcctcgagggtggtcagtgacggaggagataaatcggagcccgtcacggtgctcctcccggacgtgacgcacctggtgctgtcggcgctcgtctcggcgggcgtcgtcacggatgatgcaggcgtttggggctgggacgtctccagcggtgggaagggggtgaaggtccaggagttcatgtcgtgggtgctgtccacgcctttcggccttgggaactgcctctcgcggtatgtgcgggacaaattccggtccctggctgctgactctgtggaggagagctctgtttcaactgttagcacaacctttgacacttctgatgtttatctgctaacacgggggagagcatgggcaattgccctcagcctaagaaacaagttgagtgaaaagctgctgtcagcttctgttattggaatggacacagaagacctcctttataggtcatctgttcatggaaaaggactgagccggttctggtcttgtgttgaggggtacaaagggccaatgctgattctactttcagcattctcaaaaggtggtggtgagaatgttgattctgatcgaagatgggtgattggtgtattgaccgaggagggatttgagaacaaagataccttttatggtagctctgggttcctttgtgccgcacatccaatattccgcatgctaccaccatctggcaaggaaaagaacttcatgtactgccacctacatcctcagataagagcttatgaagcgaatccaaagcccgttggcttagcatttggtggaacaattggaaatgagaggatctttcttgatgaagacttctcgggagttttagtacgacaccatgctgttgataaaacttatcaacatggctctctcatccccaatcaggttaaattcagatttactggtgtccaaggaatatagtaacctgattgcctttgtgcactatttcaccttatttgcaatcttggatttaggctttgctgtttttctgctgaagatatttagttagcaatcttcctttctgtttggattcaaatatgttattatctatcccaaaagttgatctaccgatgcgcttttgaaatgacactgcgttttcagggcatagaatagggtgattgaccactcccatttaagaattgctcccaccttctcctaaagaacattccacaaatcataactcacgccctattagtgatgagcacaaataag

SEQ ID NO: 18982 - DNA, 1953 bp, Zea Mays
gagtggcgaatcaactagggacgcgcgttgccgccacgcacctcccttccttcacttgcctgccccccacttctccgatctccgccccatcggacttcccaagggtcggctaggtctaggtggtctccaagctttccgcctttccacgccaccattctccccacccgcgcgcctcagcaatccccatccagcatcgccgtttcgccgcggcaccgacacctcgccggccatgggcgcgtcctcctcgactggcaacccgtccccagaggcgcacgagcagcgggagcaggagactctcgcctccgccgccctctccctcccgctcctccgcgccgccttctcccgctccgccgccaacgcgctgccggatgccctcgcgccgccgcccgcctcctttcgtctgcccggatccccggcgccgccgccgccgcacttccacggcatcctcggggggctcggccccgccatcgcctcccaattcttcggccacggagctgccgcggtgacggacgggggcgccgggtgggtccagttcctcagggggttcaaccgctgctgcgcgcgcgtgacggcctcccgctcgctcgcactgctcctccgcgtgtacgctgccgcctgcgccggcgcgggggcaccctgcggcgtccagctccagccggacgagggcggtggtgacgaggatgggaaggtcgtgggggagctcgcgccggaggagatcgcagtgttcctctgggtgtgctgggtcatggcgtggagcgcttcggcctcgagggtggtcagtgacggaggagataaatcggagcccgtcacggtgctcctcccggacgtgacgcacctggtgctgtcggcgctcgtctcggcgggcgtcgtcacggatgatgcaggcgtttggggctgggacgtctccagcggtgggaagggggtgaaggtccaggagttcatgtcgtgggtgctgtccacgcctttcggccttgggaactgcctctcgcggagagctctgtttcaactgttagcacaacctttgacacttctgatgtttatctgctaacacgggggagagcatgggcaattgccctcagcctaagaaacaagttgagtgaaaagctgctgtcagcttctgttattggaatggacacagaagacctcctttataggtcatctgttcatggaaaaggactgagccggttctggtcttgtgttgaggggtacaaagggccaatgctgattctactttcagcattctcaaaaggtggtggtgagaatgttgattctgatcgaagatgggtgattggtgtattgaccgaggagggatttgagaacaaagataccttttatggtagctctgggttcctttgtgccgcacatccaatattccgcatgctaccaccatctgggttatttgcctgttgaggcttcagtgcttgatgttgaggtatgggggctgggtggagaagcaacgaaacgacagcagaatatgtacaagaagagggaggacatcttctcagagcagcgaagaaaggttgatctcaaaacttttgctagctgggaagactctccagagaagatgatgatggacatgatgtcggacccaaacacggttcgacgggaagaccggtgattttggtttgcagcctccggggatgtacagacgacagcgtttgttgcacataggagtattttgcttgcgcatttggctgggtcacacgctttatttaggttgaagtactaaaagaagatttgtacagaacgtaattcccaataaatgaaatggagattctggacaggtctatggtgtccaagcttgctgacatgtcttacggtaccccttttgctggggaggttcatgttgatgttggtgttgtgtggcacaatggctgccagatactgtaattgttatggctgaacgaactgatgaaacaatgctggatttttcatgagcggagcttaattata

SEQ ID NO: 18983 - DNA, 3183 bp, Zea Mays
gagtggcgaatcaactagggacgcgcgttgccgccacgcacctcccttccttcacttgcctgccccccacttctccgatctccgccccatcggacttcccaagggtcggctaggtctaggtggtctccaagctttccgcctttccacgccaccattctccccacccgcgcgcctcagcaatccccatccagcatcgccgtttcgccgcggcaccgacacctcgccggccatgggcgcgtcctcctcgactggcaacccgtccccagaggcgcacgagcagcgggagcaggagactctcgcctccgccgccctctccctcccgctcctccgcgccgccttctcccgctccgccgccaacgcgctgccggatgccctcgcgccgccgcccgcctcctttcgtctgcccggatccccggcgccgccgccgccgcacttccacggcatcctcggggggctcggccccgccatcgcctcccaattcttcggccacggagctgccgcggtgacggacgggggcgccgggtgggtccagttcctcagggggttcaaccgctgctgcgcgcgcgtgacggcctcccgctcgctcgcactgctcctccgcgtgtacgctgccgcctgcgccggcgcgggggcaccctgcggcgtccagctccagccggacgagggcggtggtgacgaggatgggaaggtcgtgggggagctcgcgccggaggagatcgcagtgttcctctgggtgtgctgggtcatggcgtggagcgcttcggcctcgagggtggtcagtgacggaggagataaatcggagcccgtcacggtgctcctcccggacgtgacgcacctggtgctgtcggcgctcgtctcggcgggcgtcgtcacggatgatgcaggcgtttggggctgggacgtctccagcggtgggaagggggtgaaggtccaggagttcatgtcgtgggtgctgtccacgcctttcggccttgggaactgcctctcgcggtatgtgcgggacaaattccggtccctggctgctgactctgtggaggtaatcaaattatattgcagaatttgtagcgtccgtcaaacgttggatgcgtttgttctgtatctagtgtcatcagtagaatatgtgcgacattgttgttaccttgttagttcatagatcatacataagtgtagaaaaaagtttctattgttctgtttatacttgtttttttactgatcatgacttgtagcctaatatattctacagttattcattatctgttaagtctcgtttgtttcctttgatttagaggaattggaatcttactgatggaataggctatttttttagaatgtgacattccagcactttccagaattatcatataagcatatctcaaattcatgggttgatagatggaaattgattctataaatttaaatgctatttttccgatacacaacttatagcacactcttctacttgcttcgctataacataaatgtagtatataactatctctctcatatgatttaggataatatacaaatatattacatacataaatatagtttgaaatttgtctccagattgtcctgtttctgcaaagtatcagcaaattatgtaatgttatatcttggaccttttctttggtacttgatggaatgacagttcagaattacctctaaagaattctggtagaagttgtccagccacagattctacaatataatgatgatcgactaagtccactactgtgggagttggggtttacatacaaaaaaatgtgctctggaaacagttcctgcgctaggtttgaacaatgtgaaattgtgttgatgatattctcttctagataaatagatccttatttattttgccttttttaaggaaccatgcctatatttttttcttcaactgaaccttttttttgttatctcatgaattgactggagttcttactcgtcacaagcaggagagctctgtttcaactgttagcacaacctttgacacttctgatgtttatctgctaacacgggggagagcatgggcaattgccctcagcctaagaaacaagttgagtgaaaagctgctgtcagcttctgttattggaatggacacagaagacctcctttataggtcatctgttcatggaaaaggactgagccggttctggtcttgtgttgaggggtacaaagggccaatgctgattctactttcagcattctcaaaaggtggtggtgagaatgttgattctgatcgaagatgggtgattggtgtattgaccgaggagggatttgagaacaaagataccttttatggtagctctgggttcctttgtgccgcacatccaatattccgcatgctaccaccatctggtatgacttttattgaccataactttgtctgcgctaatagtatcttactataccccctaacctagcaggcaaggaaaagaacttcatgtactgccacctacatcctcagataagagcttatgaagcgaatccaaagcccgttggcttagcatttggtggaacaattggaaatgagaggatctttcttgatgaagacttctcgggagttttagtacgacaccatgctgttgataaaacttatcaacatggctctctcatccccaatcagggttatttgcctgttgaggcttcagtgcttgatgttgaggtatgggggctgggtggagaagcaacgaaacgacagcagaatatgtacaagaagagggaggacatcttctcagagcagcgaagaaaggttgatctcaaaacttttgctagctgggaagactctccagagaagatgatgatggacatgatgtcggacccaaacacggttcgacgggaagaccggtgattttggtttgcagcctccggggatgtacagacgacagcgtttgttgcacataggagtattttgcttgcgcatttggctgggtcacacgctttatttaggttgaagtactaaaagaagatttgtacagaacgtaattcccaataaatgaaatggagattctggacaggtctatggtgtccaagcttgctgacatgtcttacggtaccccttttgctggggaggttcatgttgatgttggtgttgtgtggcacaatggctgccagatactgtaattgttatggctgaacgaactgatgaaacaatgctggatttttcatgagcggagcttaattata

SEQ ID NO: 18984 - DNA, 3552 bp, Zea Mays
gagtggcgaatcaactagggacgcgcgttgccgccacgcacctcccttccttcacttgcctgccccccacttctccgatctccgccccatcggacttcccaagggtcggctaggtctaggtggtctccaagctttccgcctttccacgccaccattctccccacccgcgcgcctcagcaatccccatccagcatcgccgtttcgccgcggcaccgacacctcgccggccatgggcgcgtcctcctcgactggcaacccgtccccagaggcgcacgagcagcgggagcaggagactctcgcctccgccgccctctccctcccgctcctccgcgccgccttctcccgctccgccgccaacgcgctgccggatgccctcgcgccgccgcccgcctcctttcgtctgcccggatccccggcgccgccgccgccgcacttccacggcatcctcggggggctcggccccgccatcgcctcccaattcttcggccacggagctgccgcggtgacggacgggggcgccgggtgggtccagttcctcagggggttcaaccgctgctgcgcgcgcgtgacggcctcccgctcgctcgcactgctcctccgcgtgtacgctgccgcctgcgccggcgcgggggcaccctgcggcgtccagctccagccggacgagggcggtggtgacgaggatgggaaggtcgtgggggagctcgcgccggaggagatcgcagtgttcctctgggtgtgctgggtcatggcgtggagcgcttcggcctcgagggtggtcagtgacggaggagataaatcggagcccgtcacggtgctcctcccggacgtgacgcacctggtgctgtcggcgctcgtctcggcgggcgtcgtcacggatgatgcaggcgtttggggctgggacgtctccagcggtgggaagggggtgaaggtccaggagttcatgtcgtgggtgctgtccacgcctttcggccttgggaactgcctctcgcggtatgtgcgggacaaattccggtccctggctgctgactctgtggaggtaatcaaattatattgcagaatttgtagcgtccgtcaaacgttggatgcgtttgttctgtatctagtgtcatcagtagaatatgtgcgacattgttgttaccttgttagttcatagatcatacataagtgtagaaaaaagtttctattgttctgtttatacttgtttttttactgatcatgacttgtagcctaatatattctacagttattcattatctgttaagtctcgtttgtttcctttgatttagaggaattggaatcttactgatggaataggctatttttttagaatgtgacattccagcactttccagaattatcatataagcatatctcaaattcatgggttgatagatggaaattgattctataaatttaaatgctatttttccgatacacaacttatagcacactcttctacttgcttcgctataacataaatgtagtatataactatctctctcatatgatttaggataatatacaaatatattacatacataaatatagtttgaaatttgtctccagattgtcctgtttctgcaaagtatcagcaaattatgtaatgttatatcttggaccttttctttggtacttgatggaatgacagttcagaattacctctaaagaattctggtagaagttgtccagccacagattctacaatataatgatgatcgactaagtccactactgtgggagttggggtttacatacaaaaaaatgtgctctggaaacagttcctgcgctaggtttgaacaatgtgaaattgtgttgatgatattctcttctagataaatagatccttatttattttgccttttttaaggaaccatgcctatatttttttcttcaactgaaccttttttttgttatctcatgaattgactggagttcttactcgtcacaagcaggagagctctgtttcaactgttagcacaacctttgacacttctgatgtttatctgctaacacgggggagagcatgggcaattgccctcagcctaagaaacaagttgagtgaaaagctgctgtcagcttctgttattggaatggacacagaagacctcctttataggtcatctgttcatggaaaaggactgagccggttctggtcttgtgttgaggggtacaaagggccaatgctgattctactttcagcattctcaaaaggtggtggtgagaatgttgattctgatcgaagatgggtgattggtgtattgaccgaggagggatttgagaacaaagataccttttatggtagctctgggttcctttgtgccgcacatccaatattccgcatgctaccaccatctggcaaggaaaagaacttcatgtactgccacctacatcctcagataagagcttatgaagcgaatccaaagcccgttggcttagcatttggtggaacaattggaaatgagaggatctttcttgatgaagacttctcgggagttttagtacgacaccatgctgttgataaaacttatcaacatggctctctcatccccaatcaggttaaattcagatttactggtgtccaaggaatatagtaacctgattgcctttgtgcactatttcaccttatttgcaatcttggatttaggctttgctgtttttctgctgaagatatttagttagcaatcttcctttctgtttggattcaaatatgttattatctatcccaaaagttgatctaccgatgcgcttttgaaatgacactgcgttttcagggcatagaatagggtgattgaccactcccatttaagaattgctcccaccttctcctaaagaacattccacaaatcataactcacgccctattagtgatgagcacaaataagcccactcagttaccatgttcatgtgctggcataggttgtgaatgtttttatttttgtacgcttaactatgtatgctaacaaatttagattatggttttggggtaatgcagggttatttgcctgttgaggcttcagtgcttgatgttgaggtatgggggctgggtggagaagcaacgaaacgacagcagaatatgtacaagaagagggaggacatcttctcagagcagcgaagaaaggttgatctcaaaacttttgctagctgggaagactctccagagaagatgatgatggacatgatgtcggacccaaacacggttcgacgggaagaccggtgattttggtttgcagcctccggggatgtacagacgacagcgtttgttgcacataggagtattttgcttgcgcatttggctgggtcacacgctttatttaggttgaagtactaaaagaagatttgtacagaacgtaattcccaataaatgaaatggagattctggacaggtctatggtgtccaagcttgctgacatgtcttacggtaccccttttgctggggaggttcatgttgatgttggtgttgtgtggcacaatggctgccagatactgtaattgttatggctgaacgaactgatgaaacaatgctggatttttcatgagcggagcttaattata

SEQ ID NO: 18985 - DNA, 2991 bp, Zea Mays
gtcgagaacccaacaaaaacaaacaaaggcgggcgggggcaggcagagccgcagccgccgacgccagcacatcctcccatcccgcctcctccccaccttcccatcccttctcctcgcctccttccaaatccacacacttccgccgccgctgctatcgtcaccggtcaccatccgtccgacgaggagggatagggaccggcgggagcgaaccctagatgaccgatcccgggtcgggcccagagagccttccggattgcgccttcggtcgctgcgccgcctccgccgcctagggttcccgcgcctgtaggtcgattttggggacgaggaaggggagtgccaagtaatgatggggtcgaggcgctacaagcgcgtttcgtgggccaacggggccaatctgtgcaagttacattcatgacatcaattcagaatgagatgttaaaacatcgtgattgaatgccaaatccttcattgtgtggaacaaagcaagcagtacatatgtgtcttcttgtcagaaattatcttcacactacagctgaatgtatggactttatgtttagcgtgcctagaatcttgtgcttggatcatttgtttttatattttgatttgaagcactacaacatttatgatagtattggttgttaataggttctcttatggattctattggttttatgtctctatgcactgccattatgcatgctgcttgttgtttgtacgttcacccatggattaaaatgcctttttcaggaataaggaaaattggtttatccatgcttttgtgtttaattactaccgctttatttatgcatcatggatgattctcaatgtacttaacgtgatttgattgtttaaattgatcaaactcgtagatgaaatattttgactgctaatccaattaactatctgttatgattctggatatagtttttcttaaagataaaaacggccactgtttgtgtcatcatttcaattttatttttacttgagtcaacacctgattttgtcatatattgtggcagccatctactgaatagacgtgtggttagtatgcatgcactggcagttttcctgaatttttttggtatttcgtgaatctgtcaggtaaggctctttctttcagaggattccccttctcaagctggattaagaccacaggacaatctccaagcaaaaggctcatggttaatgcatgcagctggcccaagctcagatgattctctgccacctggcttcgaatcattgcagccaaccagcgatctcaaaattgacatgtcccaaatcgctcttattaggtggagatgcccaccacagatattgtataatcctgattggtgtgtcgctgctggagaagaaagtgaggaggttgccttgcagaatgagaggatgtttggagcactggaggctatatatccacgaccatcgaacattcctccaaacccattggttactcctgatgtgaaagactcccagtatgatgattcccgaacccaattggttcctttgctcccagttgaagaggatgatgcctctgaccagttcgaagaaccacctgttggtctaccaagtagttaccaccagtcagataagtatgatgatgcaatatccagggtcccacaagcctcagatgctctctttaccactgcacaacagcagccgaatggttccatcaacacaacaaggtctggtgtccccgccgaagcagacgtagtggctgctgcatctgctgcttacactgcaataatgcaaagcaaccaaatgggaaacatgattgaccaagatctgctcatcaaaatactaagtgatcctgcccaaattcagaggctaatgaaagaatatggtgcgcttaaacatgaacagtcaaccaacagttctgtggcgtcaatggtgcaaggtccaccaccccagatgacagctagtgtccccgtctctatcccagaccgttccaatgcatttcacaacataaaccctaagctgccgcctccacctgttccgaatcgtctacctccagcttcagttaccatgaatgcaccagcgagttcaagtcaagcaattagctttccaagtggcccaaccaggggtttgaactattaccagaacctgatccatcagcatggaggggagaggcaggagccacttcagcagcatggaatgcagtttgcaatgcatcaccagcctcttgcctcgcaggccagtgccgctgatgttgtcagcagtggtgctatgccagctagggataccaagcaaaggcctacgaagccttgtgcttacttcaacagcgcgagaggatgccggaacggtgcgaactgcacgtttctgcacgatgtgtctgccgcgaggaaagaacagtcaaagggttccaaaaggattaagcttgacagcagaatagccgggcggtattgaggggctgctgccgccggttgatttttgactgttcatttcgccttttttccccttcaaaaacgtttcagtaaatattgcgccccagctccttgtttctttcacttagccaatttctctttgttgactaaatgaggtgttttagaagaaagaaaaatatcccacgatttattggagctatgtcgtggtagctacgccgtggtcatttgtgttggttctgctttttttttttgtcaagaccgagaaatgcatagttgcatactttaacatatagaccttaaataaaaagaacataaaacgcgaaaacagagtcgtttgtcttgtgtcttggtccatgggagccgataagctgttggaaacttggaatatcgttttgcttggtgcatctctattttgcccgacttggtgcttgtaagagcaactccaacaactcctaagaaaattactcctatacaaggaatttgggatctccctaaatcatgtaattccaaaaaaaaatgttcaactccaacaaatcccaaaaatataagttagttatggtggacccacaacatctctttagccggacctctcgcaaaaatctgttgaggcttc

SEQ ID NO: 18986 - DNA, 2706 bp, Zea Mays
gtcgagaacccaacaaaaacaaacaaaggcgggcgggggcaggcagagccgcagccgccgacgccagcacatcctcccatcccgcctcctccccaccttcccatcccttctcctcgcctccttccaaatccacacacttccgccgccgctgctatcgtcaccggtcaccatccgtccgacgaggagggatagggaccggcgggagcgaaccctagatgaccgatcccgggtcgggcccagagagccttccggattgcgccttcggtcgctgcgccgcctccgccgcctagggttcccgcgcctgtaggtcgattttggggacgaggaaggggagtgccaagtaatgatggggtcgaggcgctacaagcgcgtttcgtgggccaacggggccaatctgtgcaaggtaaggctctttctttcagaggattccccttctcaagctggattaagaccacaggacaatctccaagcaaaaggctcatggttaatgcatgcagctggcccaagctcagatgattctctgccacctggcttcgaatcattgcagccaaccagcgatctcaaaattgacatgtcccaaatcgctcttattaggtggagatgcccaccacagatattgtataatcctgattggtgtgtcgctgctggagaagaaagtgaggaggttgccttgcagaatgagaggatgtttggagcactggaggctatatatccacgaccatcgaacattcctccaaacccattggttactcctgatgtgaaagactcccagtatgatgattcccgaacccaattggttcctttgctcccagttgaagaggatgatgcctctgaccagttcgaagaaccacctgttggtctaccaagtagttaccaccagtcagataagtatgatgatgcaatatccagggtcccacaagcctcagatgctctctttaccactgcacaacagcagccgaatggttccatcaacacaacaaggtctggtgtccccgccgaagcagacgtagtggctgctgcatctgctgcttacactgcaataatgcaaagcaaccaaatgggaaacatgattgaccaagatctgctcatcaaaatactaagtgatcctgcccaaattcagaggctaatgaaagaatatggtgcgcttaaacatgaacagtcaaccaacagttctgtggcgtcaatggtgcaaggtccaccaccccagatgacagctagtgtccccgtctctatcccagaccgttccaatgcatttcacaacataaaccctaagctgccgcctccacctgttccgaatcgtctacctccagcttcagttaccatgaatgcaccagcgagttcaagtcaagcaattagctttccaagtggcccaaccaggggtttgaactattaccagaacctgatccatcagcatggaggggagaggcaggagccacttcagcagcatggaatgcagtttgcaatgcatcaccagcctcttgcctcgcaggccagtgccgctgatgttgtcagcagtggtgctatgccagctagggataccaagcaaaggcctacgaagccttgtgcttacttcaacagcgcgagaggatgccggaacggtgcgaactgcacgtttctgcacgatgtgtctgccgcgaggaaagaacagtcaaagggttccaaaaggattaagcttgacagcagaatagccgggcggtattgaggggctgctgccgccggttgatttttgactgttcatttcgccttttttccccttcaaaaacgtttcagtaaatattgcgccccagctccttgtttctttcacttagccaatttctctttgttgactaaatgaggtgttttagaagaaagaaaaatatcccacgatttattggagctatgtcgtggtagctacgccgtggtcatttgtgttggttctgctttttttttttgtcaagaccgagaaatgcatagttgcatactttaacatatagaccttaaataaaaagaacataaaacgcgaaaacagagtcgtttgtcttgtgtcttggtccatgggagccgataagctgttggaaacttggaatatcgttttgcttggtgcatctctattttgcccgacttggtgcttgtaagagcaactccaacaactcctaagaaaattactcctatacaaggaatttgggatctccctaaatcatgtaattccaaaaaaaaatgttcaactccaacaaatcccaaaaatataagttagttatggtggacccacaacatctctttagccggacctctcgcaaaaatctgttgaggcttctgcgccgccattcaaagtcaccgtgcagaaactttcttctgccatcaatcttccaaaggagtagcaggtgccaccatcgttggagctgaccaggcaggtgctgccatccctggaccttcaccatcgcacagaaggcagaagctgcacacgaaatttgagttcctgcacagcctttacacagtaccttccatcatgagtcatcgaccatcgctattgcaaagaattttggatgagtcttcatccgatgatgatgatgatattagttttggcgagtacaatattttccatcatccatcgcatattcatcgaaaacgggttggttctatgcctggacatatagttaaatatcgagacagacaaggaggtcacgcaagaatgtttcaagattacttagcagataattctacattcag

SEQ ID NO: 18987 - DNA, 2405 bp, Zea Mays
atttgttccgcttgcctaaacggactttcctaacacaatgctgtgattgagatggttcacatggtctccacaaatgagccaggattgccgttgctccttgcatgaatttcagtcgattcagcaacagctctgacaaatatattttcaaagagactgaacgatattctcatatatcagttataaacaacagagatatgcaaatgagatgaacgtgaacttggtgcctacgtaaggtagcaaataatgccctaaataacatgaccaaaagagagagagagagatgagctgtttcacgaattccattgtacagataatttaattactctataagtctatataacctccatctctttattttgaatgacatatgcttatgtataatcaagcagaactcaacatgtcaaggtaaagtttgtatgaaagtgtacctctatttatgtcttatccagggaaaaggagtcctggttataatcatgcatttacgtaacttctaaacgtggacattcaatgaaactgtaaggctctttctttcagaggattccccttctcaagctggattaagaccacaggacaatctccaagcaaaaggctcatggttaatgcatgcagctggcccaagctcagatgattctctgccacctggcttcgaatcattgcagccaaccagcgatctcaaaattgacatgtcccaaatcgctcttattaggtggagatgcccaccacagatattgtataatcctgattggtgtgtcgctgctggagaagaaagtgaggaggttgccttgcagaatgagaggatgtttggagcactggaggctatatatccacgaccatcgaacattcctccaaacccattggttactcctgatgtgaaagactcccagtatgatgattcccgaacccaattggttcctttgctcccagttgaagaggatgatgcctctgaccagttcgaagaaccacctgttggtctaccaagtagttaccaccagtcagataagtatgatgatgcaatatccagggtcccacaagcctcagatgctctctttaccactgcacaacagcagccgaatggttccatcaacacaacaaggtctggtgtccccgccgaagcagacgtagtggctgctgcatctgctgcttacactgcaataatgcaaagcaaccaaatgggaaacatgattgaccaagatctgctcatcaaaatactaagtgatcctgcccaaattcagaggctaatgaaagaatatggtgcgcttaaacatgaacagtcaaccaacagttctgtggcgtcaatggtgcaaggtccaccaccccagatgacagctagtgtccccgtctctatcccagaccgttccaatgcatttcacaacataaaccctaagctgccgcctccacctgttccgaatcgtctacctccagcttcagttaccatgaatgcaccagcgagttcaagtcaagcaattagctttccaagtggcccaaccaggggtttgaactattaccagaacctgatccatcagcatggaggggagaggcaggagccacttcagcagcatggaatgcagtttgcaatgcatcaccagcctcttgcctcgcaggccagtgccgctgatgttgtcagcagtggtgctatgccagctagggataccaagcaaaggcctacgaagccttgtgcttacttcaacagcgcgagaggatgccggaacggtgcgaactgcacgtttctgcacgatgtgtctgccgcgaggaaagaacagtcaaagggttccaaaaggattaagcttgacagcagaatagccgggcggtattgaggggctgctgccgccggttgatttttgactgttcatttcgccttttttccccttcaaaaacgtttcagtaaatattgcgccccagctccttgtttctttcacttagccaatttctctttgttgactaaatgaggtgttttagaagaaagaaaaatatcccacgatttattggagctatgtcgtggtagctacgccgtggtcatttgtgttggttctgctttttttttttgtcaagaccgagaaatgcatagttgcatactttaacatatagaccttaaataaaaagaacataaaacgcgaaaacagagtcgtttgtcttgtgtcttggtccatgggagccgataagctgttggaaacttggaatatcgttttgcttggtgcatctctattttgcccgacttggtgcttgtaagagcaactccaacaactcctaagaaaattactcctatacaaggaatttgggatctccctaaatcatgtaattccaaaaaaaaatgttcaactccaacaaatcccaaaaatataagttagttatggtggacccacaacatctctttagccggacctctcgcaaaaatctgttgaggcttc

SEQ ID NO: 18988 - DNA, 2254 bp, Zea Mays
attatacaataccaaattgtggatttgatgaaagttattgatgtggtacatgtctgtgaatttcttttgaacgtggtcaaacatagaaaaaattaacttaggacagaactaaaacaccttacatttgggtctgagggagtatattttagttgttcatacatttaatgttcatttttgtatgatatatggttcaacaacaccttttactgacataaggtactacaaacagttacattcatgacatcaattcagaatgagatgttaaaacatcgtgattgaatgccaaatccttcattgtgtggaacaaagcaagcagtacatatgtgtcttcttgtcagaaattatcttcacactacagctgaatgtaaggctctttctttcagaggattccccttctcaagctggattaagaccacaggacaatctccaagcaaaaggctcatggttaatgcatgcagctggcccaagctcagatgattctctgccacctggcttcgaatcattgcagccaaccagcgatctcaaaattgacatgtcccaaatcgctcttattaggtggagatgcccaccacagatattgtataatcctgattggtgtgtcgctgctggagaagaaagtgaggaggttgccttgcagaatgagaggatgtttggagcactggaggctatatatccacgaccatcgaacattcctccaaacccattggttactcctgatgtgaaagactcccagtatgatgattcccgaacccaattggttcctttgctcccagttgaagaggatgatgcctctgaccagttcgaagaaccacctgttggtctaccaagtagttaccaccagtcagataagtatgatgatgcaatatccagggtcccacaagcctcagatgctctctttaccactgcacaacagcagccgaatggttccatcaacacaacaaggtctggtgtccccgccgaagcagacgtagtggctgctgcatctgctgcttacactgcaataatgcaaagcaaccaaatgggaaacatgattgaccaagatctgctcatcaaaatactaagtgatcctgcccaaattcagaggctaatgaaagaatatggtgcgcttaaacatgaacagtcaaccaacagttctgtggcgtcaatggtgcaaggtccaccaccccagatgacagctagtgtccccgtctctatcccagaccgttccaatgcatttcacaacataaaccctaagctgccgcctccacctgttccgaatcgtctacctccagcttcagttaccatgaatgcaccagcgagttcaagtcaagcaattagctttccaagtggcccaaccaggggtttgaactattaccagaacctgatccatcagcatggaggggagaggcaggagccacttcagcagcatggaatgcagtttgcaatgcatcaccagcctcttgcctcgcaggccagtgccgctgatgttgtcagcagtggtgctatgccagctagggataccaagcaaaggcctacgaagccttgtgcttacttcaacagcgcgagaggatgccggaacggtgcgaactgcacgtttctgcacgatgtgtctgccgcgaggaaagaacagtcaaagggttccaaaaggattaagcttgacagcagaatagccgggcggtattgaggggctgctgccgccggttgatttttgactgttcatttcgccttttttccccttcaaaaacgtttcagtaaatattgcgccccagctccttgtttctttcacttagccaatttctctttgttgactaaatgaggtgttttagaagaaagaaaaatatcccacgatttattggagctatgtcgtggtagctacgccgtggtcatttgtgttggttctgctttttttttttgtcaagaccgagaaatgcatagttgcatactttaacatatagaccttaaataaaaagaacataaaacgcgaaaacagagtcgtttgtcttgtgtcttggtccatgggagccgataagctgttggaaacttggaatatcgttttgcttggtgcatctctattttgcccgacttggtgcttgtaagagcaactccaacaactcctaagaaaattactcctatacaaggaatttgggatctccctaaatcatgtaattccaaaaaaaaatgttcaactccaacaaatcccaaaaatataagttagttatggtggacccacaacatctctttagccggacctctcgcaaaaatctgttgaggcttc

SEQ ID NO: 18989 - DNA, 1668 bp, Zea Mays
ctggtttctactccagcttatctcaagctatatcaccagggaatttcataggctacaggcaaaaagtaaaagacatagtgcaaggtgctctgtttccagaggttggtgtggataaaaggactggatctgctggtggaactggcgggcaagtagttgttcgagacattgaacttttctcctattgtgagtcatgcttgcttccattcagcatacagtgccatgtcgggtatgttccctcaggtggaagagtggttgggttaagcaagctttctagagtatctgatgtctttgccaagagattgcaaaaccctcaaagactagctaatgaaatctgtggtgcactgcatgctagcattcaacctgctggtgtggctgttgctctgcagtgctggcacattcctttaccagaaaacttggaatgcaagactttggaaggttggattagaacttcacattcatctcgctctggagtctttgaaggtgaaagcagcactttctggagtgacttcttggctcttgttaagcttaggggcatagacgtggaggctaaggaccgtactgtttctattccttggtgccctttaaggtctcatgaggttccactctctaacgggctctgcaagaaaaactcaactaatggcatggtttctgctgttacctcgatgctcttatcactcggagaggaccccctcaggaaagagcttttaggcactcctcagcgttatgtgcagtggctgatgaagttcaaagcatgtaatctactagacgtgaagctgaatggttttacacttagtaatgttagcttatatgagaggacaggtggaggcacaactgatcatggagcaatcagatcggagctgcacttgccattttgtgctcaatgtgaacaccatcttctgcccttctacggagtagttcacattgggtactttggcaatggaagcggagaaggcattgatcggtcgcattttcaggcgttggttcatttctacgggtgcaagcttcaggttcaagaaaggatgacaaggcagatagctgaagcggtttattcagtttcgcacaatggggccatggtcgttgttgaggccaaccacatttgcatgatctcaagggggatagagaaaataaggagcaacacggcaacaattgcagttttgggccagtttttggccgacccttctgccaaggcgtgcttcttacagaatgttttggattctgttggttctgcggtatgaatcgtatcgcaagcagcaaagaaaaaaatgtctagttggagtactatccagcaattgaaatttttagcaatctactggtctagcatgattcttctcgggtgcaaatttgtcacctgtgggactgtaccgaggatgtcacaagaaagcaccaaaagggttttggttctctcgtgttgtaccatgtcacttgtaaggcacttcaaataaaaaagaaatagtaatagttacaactgtgccaagaaggatatagtcattcgtacttttagatgttgtcaaaattgccatttgttcttgaaattttagtggagattactctggcttttgttgttgtaccgttgaatttgatgttacgccgatcgagatcagtaaaaaaaaaaaactcagatatctgttcgcttgaccatggtccaacgaaatgtaattcgttcttgca

SEQ ID NO: 18990 - DNA, 1644 bp, Zea Mays
gagaaggccaaagttgatatgaaaaaggctacaggcaaaaagtaaaagacatagtgcaaggtgctctgtttccagaggttggtgtggataaaaggactggatctgctggtggaactggcgggcaagtagttgttcgagacattgaacttttctcctattgtgagtcatgcttgcttccattcagcatacagtgccatgtcgggtatgttccctcaggtggaagagtggttgggttaagcaagctttctagagtatctgatgtctttgccaagagattgcaaaaccctcaaagactagctaatgaaatctgtggtgcactgcatgctagcattcaacctgctggtgtggctgttgctctgcagtgctggcacattcctttaccagaaaacttggaatgcaagactttggaaggttggattagaacttcacattcatctcgctctggagtctttgaaggtgaaagcagcactttctggagtgacttcttggctcttgttaagcttaggggcatagacgtggaggctaaggaccgtactgtttctattccttggtgccctttaaggtctcatgaggttccactctctaacgggctctgcaagaaaaactcaactaatggcatggtttctgctgttacctcgatgctcttatcactcggagaggaccccctcaggaaagagcttttaggcactcctcagcgttatgtgcagtggctgatgaagttcaaagcatgtaatctactagacgtgaagctgaatggttttacacttagtaatgttagcttatatgagaggacaggtggaggcacaactgatcatggagcaatcagatcggagctgcacttgccattttgtgctcaatgtgaacaccatcttctgcccttctacggagtagttcacattgggtactttggcaatggaagcggagaaggcattgatcggtcgcattttcaggcgttggttcatttctacgggtgcaagcttcaggttcaagaaaggatgacaaggcagatagctgaagcggtttattcagtttcgcacaatggggccatggtcgttgttgaggccaaccacatttgcatgatctcaagggggatagagaaaataaggagcaacacggcaacaattgcagttttgggccagtttttggccgacccttctgccaaggcgtgcttcttacagaatgttttggattctgttggttctgcggtatgaatcgtatcgcaagcagcaaagaaaaaaatgtctagttggagtactatccagcaattgaaatttttagcaatctactggtctagcatgattcttctcgggtgcaaatttgtcacctgtgggactgtaccgaggatgtcacaagaaagcaccaaaagggttttggttctctcgtgttgtaccatgtcacttgtaaggcacttcaaataaaaaagaaatagtaatagttacaactgtgccaagaaggatatagtcattcgtacttttagatgttgtcaaaattgccatttgttcttgaaattttagtggagattactctggcttttgttgttgtaccgttgaatttgatgttacgccgatcgagatcagtaaaaaaaaaaaactcagatatctgttcgcttgaccatggtccaacgaaatgtaattcgttcttgca

SEQ ID NO: 18991 - DNA, 2524 bp, Zea Mays
cgatcacctcccccaccattcctctttcctgccctcgtccgtttccgcatcggtgtatcttcgcccccggcgaaggcgctatcctcccgaccacccggcggtgccggtacgccggtaaggcagcacgggagaacatggagagtgcttcagatgtacaaatgcaacatcgtgctgaagattccgagactacaattgagatcaaaatcaagacattggattcccagacatacaatttgcgtgtgaataaatgtgtgccagttcctctgttgaaagagaaaattgctactgtaactggaatattgtctgaacagcaacgcttgatttgtcgtgggagagtcttgaaggatgatgaactcttgtctgcttatcatgtcgaagatggtcatacattacatcttgttgttagacatccaggccagtcagctacatttggaaatgcagcaaccgaagctaacacatcaaattctggccgtcgtcatgggcccacagtggcaagaagtgtagtacttgaggctgttaatgtggatcctgggagcagtgaactcccagcttttgttgcgcagattctccaaagtgtgcttggaacaatcaatgcacaatctacgggtacaccaacatcttctgacaccggatctttagatccttcacaatcttccatcccaaatactataagagttgaactcgaccagcaacaagctcctctgctttttcagtctgaacccgcacatgagtcatctcaaccaaatgtcatccctgatgctttgacaactatgtctcagtacattaactttatgagggactcatttaggagggagggctttagtcttaatggacaaacagagggtaatgtggaaaacagaactgcagagcctgaatcagcttctgtgcttgggcttcataatgcatcattgctagctgaaaatatgcactctactaggcaaattattgttgaacaggctggtgcattgctgtcttcagaagcggttgtaaactctggaccagctctttatatatctccatcagggccaaatcctcttatggttcaacctgttccatttccaggaaggtctgtccaaatgggtactttgttttctagtctgggttcacaaggatctgttctacatccgagagatgttgatatccatgtccgcacaagtgggtccgtgcctggagccagtactaacccaagtgattcagctggtgcgcaagcgcatcaaaatgtgaataggccaggagatgcttcgcatgcaaatattggtgaagcgttttcaggggttgcaggtggcactcctttttcagttgagtccggagttagactattgccacttagaacagtggttgccatgcctgctggcatcagtcgtgctccatcagggtcgtctagtggtgggcttggtattatctatccatttctcactagggttcgacaaagggcaaacactaatggtaatgatgaaaggaatggtcaatctccaaatgaatcggctcgtagtagcacccatcttaatcagcaatcaattccgcagtcatctcaaactcatgaagcaggtaatctgagatctccagttgatgtcaatgttggagatggctctgagacctcacctgggcagcagaatggtctggtcactctctctcagataatggacttttttggatcaatgctcccaggcgaaaatgttcgaggaaatacttcaagccagcaaccaccaatggcttccaccgagcagggagagggtagaaatcttgcaacaccagaagtgtcaggagccagtgaggaggccctacgctttgctggcatggtcagacaaattatgccatttatctcccaagttgaaacacagaatcaaagtgccccaccagacagcagcagcacacctgcacaggctgcatctgggagtgcagacagagctagggatgtcccaaatgattctacgagttcccgtcaacataaccgcgaccaaattgatgagcctaattctaaaaggcaaagaactagtgactgattggaatctacttgtgagctgagaatcttgccagttcttgatttaccccagcggatgatcaaaataaggacttgagacaaatggtggcagtattgagacaaaaatggattagctgtggtatatacttggcactgagggcactagacgaggcacctatgccttttttttttgagggggcgcatcttataagctgttatttttttagtgcaacgagcatacatgctgctggcatccaatccccaatatgtacaagttttaattcaggttgtgatcatttacgcaacgaatcaaagcctccgctctggtcattgccgtagcatacggaggactgacgcaatcaatcatattgttacgagaatgtatagcttaagattgtatgtttttttttaccatcgcttaagacaatcagagcatatagttcatgcttattatagtatgatccaaataggactagtagtattgttcatgcttatcattagcattgcttaagagcttgtttgggagtaagagaattaaaaaga

SEQ ID NO: 18992 - DNA, 2622 bp, Zea Mays
cgatcacctcccccaccattcctctttcctgccctcgtccgtttccgcatcggtgtatcttcgcccccggcgaaggcgctatcctcccgaccacccggcggtgccggtacgccggtaaggcaggttgccagaccccgcgaccccgatcccgatcggtcgctggcgaggcggcgtgacctaccccggctcatcctctcaagccagacggtctggctgctgtgcatccccgttttggcggctaccttacctctggcaaggcaatcccccctcacccctggcaagcacgggagaacatggagagtgcttcagatgtacaaatgcaacatcgtgctgaagattccgagactacaattgagatcaaaatcaagacattggattcccagacatacaatttgcgtgtgaataaatgtgtgccagttcctctgttgaaagagaaaattgctactgtaactggaatattgtctgaacagcaacgcttgatttgtcgtgggagagtcttgaaggatgatgaactcttgtctgcttatcatgtcgaagatggtcatacattacatcttgttgttagacatccaggccagtcagctacatttggaaatgcagcaaccgaagctaacacatcaaattctggccgtcgtcatgggcccacagtggcaagaagtgtagtacttgaggctgttaatgtggatcctgggagcagtgaactcccagcttttgttgcgcagattctccaaagtgtgcttggaacaatcaatgcacaatctacggacaaacagagggtaatgtggaaaacagaactgcagagcctgaatcagcttctgtgcttgggcttcataatgcatcattgctagctgaaaatatgcactctactaggcaaattattgttgaacaggctggtgcattgctgtctcaactctcaactcagctgggagatctagagaatgtaactgattctgcaatacgaagggacattcaaagtagtgcagttcgcacgggttctctatttcagaaccttggttctttgcttctggaacttgggcgcaccacaatgctcctgcgtataaatccgtcatcttcagaagcggttgtaaactctggaccagctctttatatatctccatcagggccaaatcctcttatggttcaacctgttccatttccaggaaggtctgtccaaatgggtactttgttttctagtctgggttcacaaggatctgttctacatccgagagatgttgatatccatgtccgcacaagtgggtccgtgcctggagccagtactaacccaagtgattcagctggtgcgcaagcgcatcaaaatgtgaataggccaggagatgcttcgcatgcaaatattggtgaagcgttttcaggggttgcaggtggcactcctttttcagttgagtccggagttagactattgccacttagaacagtggttgccatgcctgctggcatcagtcgtgctccatcagggtcgtctagtggtgggcttggtattatctatccatttctcactagggttcgacaaagggcaaacactaatggtaatgatgaaaggaatggtcaatctccaaatgaatcggctcgtagtagcacccatcttaatcagcaatcaattccgcagtcatctcaaactcatgaagcaggtaatctgagatctccagttgatgtcaatgttggagatggctctgagacctcacctgggcagcagaatggtctggtcactctctctcagataatggacttttttggatcaatgctcccaggcgaaaatgttcgaggaaatacttcaagccagcaaccaccaatggcttccaccgagcagggagagggtagaaatcttgcaacaccagaagtgtcaggagccagtgaggaggccctacgctttgctggcatggtcagacaaattatgccatttatctcccaagttgaaacacagaatcaaagtgccccaccagacagcagcagcacacctgcacaggctgcatctgggagtgcagacagagctagggatgtcccaaatgattctacgagttcccgtcaacataaccgcgaccaaattgatgagcctaattctaaaaggcaaagaactagtgactgattggaatctacttgtgagctgagaatcttgccagttcttgatttaccccagcggatgatcaaaataaggacttgagacaaatggtggcagtattgagacaaaaatggattagctgtggtatatacttggcactgagggcactagacgaggcacctatgccttttttttttgagggggcgcatcttataagctgttatttttttagtgcaacgagcatacatgctgctggcatccaatccccaatatgtacaagttttaattcaggttgtgatcatttacgcaacgaatcaaagcctccgctctggtcattgccgtagcatacggaggactgacgcaatcaatcatattgttacgagaatgtatagcttaagattgtatgtttttttttaccatcgcttaagacaatcagagcatatagttcatgcttattatagtatgatccaaataggactagtagtattgttcatgcttatcattagcattgcttaagagcttgtttgggagtaagagaattaaaaaga

SEQ ID NO: 18993 - DNA, 2840 bp, Zea Mays
cgatcacctcccccaccattcctctttcctgccctcgtccgtttccgcatcggtgtatcttcgcccccggcgaaggcgctatcctcccgaccacccggcggtgccggtacgccggtaaggcagaccccgcgaccccgatcccgatcggtcgctggcgaggcggcgtgacctaccccggctcatcctctcaagccagacggtctggctgctgtgcatccccgttttggcggctaccttacctctggcaaggcaatcccccctcacccctggcaagcacgggagaacatggagagtgcttcagatgtacaaatgcaacatcgtgctgaagattccgagactacaattgagatcaaaatcaagacattggattcccagacatacaatttgcgtgtgaataaatgtgtgccagttcctctgttgaaagagaaaattgctactgtaactggaatattgtctgaacagcaacgcttgatttgtcgtgggagagtcttgaaggatgatgaactcttgtctgcttatcatgtcgaagatggtcatacattacatcttgttgttagacatccaggccagtcagctacatttggaaatgcagcaaccgaagctaacacatcaaattctggccgtcgtcatgggcccacagtggcaagaagtgtagtacttgaggctgttaatgtggatcctgggagcagtgaactcccagcttttgttgcgcagattctccaaagtgtgcttggaacaatcaatgcacaatctacgggtacaccaacatcttctgacaccggatctttagatccttcacaatcttccatcccaaatactataagagttgaactcgaccagcaacaagctcctctgctttttcagtctgaacccgcacatgagtcatctcaaccaaatgtcatccctgatgctttgacaactatgtctcagtacattaactttatgagggactcatttaggagggagggctttagtcttaatggacaaacagagggtaatgtggaaaacagaactgcagagcctgaatcagcttctgtgcttgggcttcataatgcatcattgctagctgaaaatatgcactctactaggcaaattattgttgaacaggctggtgcattgctgtctcaactctcaactcagctgggagatctagagaatgtaactgattctgcaatacgaagggacattcaaagtagtgcagttcgcacgggttctctatttcagaaccttggttctttgcttctggaacttgggcgcaccacaatgctcctgcgtataaatccgtcatcttcagaagcggttgtaaactctggaccagctctttatatatctccatcagggccaaatcctcttatggttcaacctgttccatttccaggaaggtctgtccaaatgggtactttgttttctagtctgggttcacaaggatctgttctacatccgagagatgttgatatccatgtccgcacaagtgggtccgtgcctggagccagtactaacccaagtgattcagctggtgcgcaagcgcatcaaaatgtgaataggccaggagatgcttcgcatgcaaatattggtgaagcgttttcaggggttgcaggtggcactcctttttcagttgagtccggagttagactattgccacttagaacagtggttgccatgcctgctggcatcagtcgtgctccatcagggtcgtctagtggtgggcttggtattatctatccatttctcactagggttcgacaaagggcaaacactaatggtaatgatgaaaggaatggtcaatctccaaatgaatcggctcgtagtagcacccatcttaatcagcaatcaattccgcagtcatctcaaactcatgaagcaggtaatctgagatctccagttgatgtcaatgttggagatggctctgagacctcacctgggcagcagaatggtctggtcactctctctcagataatggacttttttggatcaatgctcccaggcgaaaatgttcgaggaaatacttcaagccagcaaccaccaatggcttccaccgagcagggagagggtagaaatcttgcaacaccagaagtgtcaggagccagtgaggaggccctacgctttgctggcatggtcagacaaattatgccatttatctcccaagttgaaacacagaatcaaagtgccccaccagacagcagcagcacacctgcacaggctgcatctgggagtgcagacagagctagggatgtcccaaatgattctacgagttcccgtcaacataaccgcgaccaaattgatgagcctaattctaaaaggcaaagaactagtgactgattggaatctacttgtgagctgagaatcttgccagttcttgatttaccccagcggatgatcaaaataaggacttgagacaaatggtggcagtattgagacaaaaatggattagctgtggtatatacttggcactgagggcactagacgaggcacctatgccttttttttttgagggggcgcatcttataagctgttatttttttagtgcaacgagcatacatgctgctggcatccaatccccaatatgtacaagttttaattcaggttgtgatcatttacgcaacgaatcaaagcctccgctctggtcattgccgtagcatacggaggactgacgcaatcaatcatattgttacgagaatgtatagcttaagattgtatgtttttttttaccatcgcttaagacaatcagagcatatagttcatgcttattatagtatgatccaaataggactagtagtattgttcatgcttatcattagcattgcttaagagcttgtttgggagtaagagaattaaaaaga

SEQ ID NO: 18994 - DNA, 2689 bp, Zea Mays
cgatcacctcccccaccattcctctttcctgccctcgtccgtttccgcatcggtgtatcttcgcccccggcgaaggcgctatcctcccgaccacccggcggtgccggtacgccggtaaggcagcacgggagaacatggagagtgcttcagatgtacaaatgcaacatcgtgctgaagattccgagactacaattgagatcaaaatcaagacattggattcccagacatacaatttgcgtgtgaataaatgtgtgccagttcctctgttgaaagagaaaattgctactgtaactggaatattgtctgaacagcaacgcttgatttgtcgtgggagagtcttgaaggatgatgaactcttgtctgcttatcatgtcgaagatggtcatacattacatcttgttgttagacatccaggccagtcagctacatttggaaatgcagcaaccgaagctaacacatcaaattctggccgtcgtcatgggcccacagtggcaagaagtgtagtacttgaggctgttaatgtggatcctgggagcagtgaactcccagcttttgttgcgcagattctccaaagtgtgcttggaacaatcaatgcacaatctacgggtacaccaacatcttctgacaccggatctttagatccttcacaatcttccatcccaaatactataagagttgaactcgaccagcaacaagctcctctgctttttcagtctgaacccgcacatgagtcatctcaaccaaatgtcatccctgatgctttgacaactatgtctcagtacattaactttatgagggactcatttaggagggagggctttagtcttaatggacaaacagagggtaatgtggaaaacagaactgcagagcctgaatcagcttctgtgcttgggcttcataatgcatcattgctagctgaaaatatgcactctactaggcaaattattgttgaacaggctggtgcattgctgtctcaactctcaactcagctgggagatctagagaatgtaactgattctgcaatacgaagggacattcaaagtagtgcagttcgcacgggttctctatttcagaaccttggttctttgcttctggaacttgggcgcaccacaatgctcctgcgtataaatccgtcatcttcagaagcggttgtaaactctggaccagctctttatatatctccatcagggccaaatcctcttatggttcaacctgttccatttccaggaaggtctgtccaaatgggtactttgttttctagtctgggttcacaaggatctgttctacatccgagagatgttgatatccatgtccgcacaagtgggtccgtgcctggagccagtactaacccaagtgattcagctggtgcgcaagcgcatcaaaatgtgaataggccaggagatgcttcgcatgcaaatattggtgaagcgttttcaggggttgcaggtggcactcctttttcagttgagtccggagttagactattgccacttagaacagtggttgccatgcctgctggcatcagtcgtgctccatcagggtcgtctagtggtgggcttggtattatctatccatttctcactagggttcgacaaagggcaaacactaatggtaatgatgaaaggaatggtcaatctccaaatgaatcggctcgtagtagcacccatcttaatcagcaatcaattccgcagtcatctcaaactcatgaagcaggtaatctgagatctccagttgatgtcaatgttggagatggctctgagacctcacctgggcagcagaatggtctggtcactctctctcagataatggacttttttggatcaatgctcccaggcgaaaatgttcgaggaaatacttcaagccagcaaccaccaatggcttccaccgagcagggagagggtagaaatcttgcaacaccagaagtgtcaggagccagtgaggaggccctacgctttgctggcatggtcagacaaattatgccatttatctcccaagttgaaacacagaatcaaagtgccccaccagacagcagcagcacacctgcacaggctgcatctgggagtgcagacagagctagggatgtcccaaatgattctacgagttcccgtcaacataaccgcgaccaaattgatgagcctaattctaaaaggcaaagaactagtgactgattggaatctacttgtgagctgagaatcttgccagttcttgatttaccccagcggatgatcaaaataaggacttgagacaaatggtggcagtattgagacaaaaatggattagctgtggtatatacttggcactgagggcactagacgaggcacctatgccttttttttttgagggggcgcatcttataagctgttatttttttagtgcaacgagcatacatgctgctggcatccaatccccaatatgtacaagttttaattcaggttgtgatcatttacgcaacgaatcaaagcctccgctctggtcattgccgtagcatacggaggactgacgcaatcaatcatattgttacgagaatgtatagcttaagattgtatgtttttttttaccatcgcttaagacaatcagagcatatagttcatgcttattatagtatgatccaaataggactagtagtattgttcatgcttatcattagcattgcttaagagcttgtttgggagtaagagaattaaaaaga

SEQ ID NO: 18995 - DNA, 2814 bp, Zea Mays
cgatcacctcccccaccattcctctttcctgccctcgtccgtttccgcatcggtgtatcttcgcccccggcgaaggcgctatcctcccgaccacccggcggtgccggtacgccggtaaggcaggttgccagaccccgcgaccccgatcccgatcggtcgctggcgaggcggcgtgacctaccccggctcatcctctcaagccagacggtctggctgctgtgcatccccgttttggcggctaccttacctctggcaaggcaatcccccctcacccctggcaagcacgggagaacatggagagtgcttcagatgtacaaatgcaacatcgtgctgaagattccgagactacaattgagatcaaaatcaagacattggattcccagacatacaatttgcgtgtgaataaatgtgtgccagttcctctgttgaaagagaaaattgctactgtaactggaatattgtctgaacagcaacgcttgatttgtcgtgggagagtcttgaaggatgatgaactcttgtctgcttatcatgtcgaagatggtcatacattacatcttgttgttagacatccaggccagtcagctacatttggaaatgcagcaaccgaagctaacacatcaaattctggccgtcgtcatgggcccacagtggcaagaagtgtagtacttgaggctgttaatgtggatcctgggagcagtgaactcccagcttttgttgcgcagattctccaaagtgtgcttggaacaatcaatgcacaatctacgatccttcacaatcttccatcccaaatactataagagttgaactcgaccagcaacaagctcctctgctttttcagtctgaacccgcacatgagtcatctcaaccaaatgtcatccctgatgctttgacaactatgtctcagtacattaactttatgagggactcatttaggagggagggctttagtcttaatggacaaacagagggtaatgtggaaaacagaactgcagagcctgaatcagcttctgtgcttgggcttcataatgcatcattgctagctgaaaatatgcactctactaggcaaattattgttgaacaggctggtgcattgctgtctcaactctcaactcagctgggagatctagagaatgtaactgattctgcaatacgaagggacattcaaagtagtgcagttcgcacgggttctctatttcagaaccttggttctttgcttctggaacttgggcgcaccacaatgctcctgcgtataaatccgtcatcttcagaagcggttgtaaactctggaccagctctttatatatctccatcagggccaaatcctcttatggttcaacctgttccatttccaggaaggtctgtccaaatgggtactttgttttctagtctgggttcacaaggatctgttctacatccgagagatgttgatatccatgtccgcacaagtgggtccgtgcctggagccagtactaacccaagtgattcagctggtgcgcaagcgcatcaaaatgtgaataggccaggagatgcttcgcatgcaaatattggtgaagcgttttcaggggttgcaggtggcactcctttttcagttgagtccggagttagactattgccacttagaacagtggttgccatgcctgctggcatcagtcgtgctccatcagggtcgtctagtggtgggcttggtattatctatccatttctcactagggttcgacaaagggcaaacactaatggtaatgatgaaaggaatggtcaatctccaaatgaatcggctcgtagtagcacccatcttaatcagcaatcaattccgcagtcatctcaaactcatgaagcaggtaatctgagatctccagttgatgtcaatgttggagatggctctgagacctcacctgggcagcagaatggtctggtcactctctctcagataatggacttttttggatcaatgctcccaggcgaaaatgttcgaggaaatacttcaagccagcaaccaccaatggcttccaccgagcagggagagggtagaaatcttgcaacaccagaagtgtcaggagccagtgaggaggccctacgctttgctggcatggtcagacaaattatgccatttatctcccaagttgaaacacagaatcaaagtgccccaccagacagcagcagcacacctgcacaggctgcatctgggagtgcagacagagctagggatgtcccaaatgattctacgagttcccgtcaacataaccgcgaccaaattgatgagcctaattctaaaaggcaaagaactagtgactgattggaatctacttgtgagctgagaatcttgccagttcttgatttaccccagcggatgatcaaaataaggacttgagacaaatggtggcagtattgagacaaaaatggattagctgtggtatatacttggcactgagggcactagacgaggcacctatgccttttttttttgagggggcgcatcttataagctgttatttttttagtgcaacgagcatacatgctgctggcatccaatccccaatatgtacaagttttaattcaggttgtgatcatttacgcaacgaatcaaagcctccgctctggtcattgccgtagcatacggaggactgacgcaatcaatcatattgttacgagaatgtatagcttaagattgtatgtttttttttaccatcgcttaagacaatcagagcatatagttcatgcttattatagtatgatccaaataggactagtagtattgttcatgcttatcattagcattgcttaagagcttgtttgggagtaagagaattaaaaaga

SEQ ID NO: 18996 - DNA, 2455 bp, Zea Mays
cgatcacctcccccaccattcctctttcctgccctcgtccgtttccgcatcggtgtatcttcgcccccggcgaaggcgctatcctcccgaccacccggcggtgccggtacgccggtaaggcaggttgccagaccccgcgaccccgatcccgatcggtcgctggcgaggcggcgtgacctaccccggctcatcctctcaagccagacggtctggctgctgtgcatccccgttttggcggctaccttacctctggcaaggcaatcccccctcacccctggcaagcacgggagaacatggagagtgcttcagatgtacaaatgcaacatcgtgctgaagattccgagactacaattgagatcaaaatcaagacattggattcccagacatacaatttgcgtgtgaataaatgtgtgccagttcctctgttgaaagagaaaattgctactgtaactggaatattgtctgaacagcaacgcttgatttgtcgtgggagagtcttgaaggatgatgaactcttgtctgcttatcatgtcgaagatggtcatacattacatcttgttgttagacatccaggccagtcagctacatttggaaatgcagcaaccgaagctaacacatcaaattctggccgtcgtcatgggcccacagtggcaagaagtgtagtacttgaggctgttaatgtggatcctgggagcagtgaactcccagcttttgttgcgcagattctccaaagtgtgcttggaacaatcaatgcacaatctacgggtacaccaacatcttctgacaccggatctttagatccttcacaatcttccatcccaaatactataagagttgaactcgaccagcaacaagctcctctgctttttcagtctgaacccgcacatgagtcatctcaaccaaatgtcatccctgatgctttgacaactatgtctcagtacattaactttatgagggactcatttaggagggagggctttagtcttaatggacaaacagagggtaatgtggaaaacagaactgcagagcctgaatcagcttctgtgcttgggcttcataatgcatcattgctagctgaaaatatgcactctactaggcaaattattgttgaacaggctggtgcattgctgtctcaactctcaactcagctgggagatctagagaatgtaactgattctgcaatacgaagggacattcaaagtagtgcagttcgcacgggttctctatttcagaaccttggttctttgcttctggaacttgggcgcaccacaatgctcctgcgtataaatccgtcatcttcagaagcggttgtaaactctggaccagctctttatatatctccatcagggccaaatcctcttatggttcaacctgttccatttccaggaaggtctgtccaaatgggtactttgttttctagtctgggttcacaaggatctgttctacatccgagagatgttgatatccatgtccgcacaagtaatctgagatctccagttgatgtcaatgttggagatggctctgagacctcacctgggcagcagaatggtctggtcactctctctcagataatggacttttttggatcaatgctcccaggcgaaaatgttcgaggaaatacttcaagccagcaaccaccaatggcttccaccgagcagggagagggtagaaatcttgcaacaccagaagtgtcaggagccagtgaggaggccctacgctttgctggcatggtcagacaaattatgccatttatctcccaagttgaaacacagaatcaaagtgccccaccagacagcagcagcacacctgcacaggctgcatctgggagtgcagacagagctagggatgtcccaaatgattctacgagttcccgtcaacataaccgcgaccaaattgatgagcctaattctaaaaggcaaagaactagtgactgattggaatctacttgtgagctgagaatcttgccagttcttgatttaccccagcggatgatcaaaataaggacttgagacaaatggtggcagtattgagacaaaaatggattagctgtggtatatacttggcactgagggcactagacgaggcacctatgccttttttttttgagggggcgcatcttataagctgttatttttttagtgcaacgagcatacatgctgctggcatccaatccccaatatgtacaagttttaattcaggttgtgatcatttacgcaacgaatcaaagcctccgctctggtcattgccgtagcatacggaggactgacgcaatcaatcatattgttacgagaatgtatagcttaagattgtatgtttttttttaccatcgcttaagacaatcagagcatatagttcatgcttattatagtatgatccaaataggactagtagtattgttcatgcttatcattagcattgcttaagagcttgtttgggagtaagagaattaaaaaga

SEQ ID NO: 18997 - DNA, 2839 bp, Zea Mays
cgatcacctcccccaccattcctctttcctgccctcgtccgtttccgcatcggtgtatcttcgcccccggcgaaggcgctatcctcccgaccacccggcggtgccggtacgccggttgccagaccccgcgaccccgatcccgatcggtcgctggcgaggcggcgtgacctaccccggctcatcctctcaagccagacggtctggctgctgtgcatccccgttttggcggctaccttacctctggcaaggcaatcccccctcacccctggcaagcacgggagaacatggagagtgcttcagatgtacaaatgcaacatcgtgctgaagattccgagactacaattgagatcaaaatcaagacattggattcccagacatacaatttgcgtgtgaataaatgtgtgccagttcctctgttgaaagagaaaattgctactgtaactggaatattgtctgaacagcaacgcttgatttgtcgtgggagagtcttgaaggatgatgaactcttgtctgcttatcatgtcgaagatggtcatacattacatcttgttgttagacatccaggccagtcagctacatttggaaatgcagcaaccgaagctaacacatcaaattctggccgtcgtcatgggcccacagtggcaagaagtgtagtacttgaggctgttaatgtggatcctgggagcagtgaactcccagcttttgttgcgcagattctccaaagtgtgcttggaacaatcaatgcacaatctacgggtacaccaacatcttctgacaccggatctttagatccttcacaatcttccatcccaaatactataagagttgaactcgaccagcaacaagctcctctgctttttcagtctgaacccgcacatgagtcatctcaaccaaatgtcatccctgatgctttgacaactatgtctcagtacattaactttatgagggactcatttaggagggagggctttagtcttaatggacaaacagagggtaatgtggaaaacagaactgcagagcctgaatcagcttctgtgcttgggcttcataatgcatcattgctagctgaaaatatgcactctactaggcaaattattgttgaacaggctggtgcattgctgtctcaactctcaactcagctgggagatctagagaatgtaactgattctgcaatacgaagggacattcaaagtagtgcagttcgcacgggttctctatttcagaaccttggttctttgcttctggaacttgggcgcaccacaatgctcctgcgtataaatccgtcatcttcagaagcggttgtaaactctggaccagctctttatatatctccatcagggccaaatcctcttatggttcaacctgttccatttccaggaaggtctgtccaaatgggtactttgttttctagtctgggttcacaaggatctgttctacatccgagagatgttgatatccatgtccgcacaagtgggtccgtgcctggagccagtactaacccaagtgattcagctggtgcgcaagcgcatcaaaatgtgaataggccaggagatgcttcgcatgcaaatattggtgaagcgttttcaggggttgcaggtggcactcctttttcagttgagtccggagttagactattgccacttagaacagtggttgccatgcctgctggcatcagtcgtgctccatcagggtcgtctagtggtgggcttggtattatctatccatttctcactagggttcgacaaagggcaaacactaatggtaatgatgaaaggaatggtcaatctccaaatgaatcggctcgtagtagcacccatcttaatcagcaatcaattccgcagtcatctcaaactcatgaagcaggtaatctgagatctccagttgatgtcaatgttggagatggctctgagacctcacctgggcagcagaatggtctggtcactctctctcagataatggacttttttggatcaatgctcccaggcgaaaatgttcgaggaaatacttcaagccagcaaccaccaatggcttccaccgagcagggagagggtagaaatcttgcaacaccagaagtgtcaggagccagtgaggaggccctacgctttgctggcatggtcagacaaattatgccatttatctcccaagttgaaacacagaatcaaagtgccccaccagacagcagcagcacacctgcacaggctgcatctgggagtgcagacagagctagggatgtcccaaatgattctacgagttcccgtcaacataaccgcgaccaaattgatgagcctaattctaaaaggcaaagaactagtgactgattggaatctacttgtgagctgagaatcttgccagttcttgatttaccccagcggatgatcaaaataaggacttgagacaaatggtggcagtattgagacaaaaatggattagctgtggtatatacttggcactgagggcactagacgaggcacctatgccttttttttttgagggggcgcatcttataagctgttatttttttagtgcaacgagcatacatgctgctggcatccaatccccaatatgtacaagttttaattcaggttgtgatcatttacgcaacgaatcaaagcctccgctctggtcattgccgtagcatacggaggactgacgcaatcaatcatattgttacgagaatgtatagcttaagattgtatgtttttttttaccatcgcttaagacaatcagagcatatagttcatgcttattatagtatgatccaaataggactagtagtattgttcatgcttatcattagcattgcttaagagcttgtttgggagtaagagaattaaaaaga

SEQ ID NO: 18998 - DNA, 2356 bp, Zea Mays
atagaattgatctaccgcggctgctttttcagaatgattgctaacacatcaaattctggccgtcgtcatgggcccacagtggcaagaagtgtagtacttgaggctgttaatgtggatcctgggagcagtgaactcccagcttttgttgcgcagattctccaaagtgtgcttggaacaatcaatgcacaatctacgggtacaccaacatcttctgacaccggatctttagatccttcacaatcttccatcccaaatactataagagttgaactcgaccagcaacaagctcctctgctttttcagtctgaacccgcacatgagtcatctcaaccaaatgtcatccctgatgctttgacaactatgtctcagtacattaactttatgagggactcatttaggagggagggctttagtcttaatggtctgattttagtcttctgtgagctacaaccatcatgtagtttgcttaaaatttacctccatttctcttttctacaggacaaacagagggtaatgtggaaaacagaactgcagagcctgaatcagcttctgtgcttgggcttcataatgcatcattgctagctgaaaatatgcactctactaggcaaattattgttgaacaggctggtgcattgctgtctcaactctcaactcagctgggagatctagagaatgtaactgattctgcaatacgaagggacattcaaagtagtgcagttcgcacgggttctctatttcagaaccttggttctttgcttctggaacttgggcgcaccacaatgctcctgcgtataaatccgtcatcttcagaagcggttgtaaactctggaccagctctttatatatctccatcagggccaaatcctcttatggttcaacctgttccatttccaggaaggtctgtccaaatgggtactttgttttctagtctgggttcacaaggatctgttctacatccgagagatgttgatatccatgtccgcacaagtgggtccgtgcctggagccagtactaacccaagtgattcagctggtgcgcaagcgcatcaaaatgtgaataggccaggagatgcttcgcatgcaaatattggtgaagcgttttcaggggttgcaggtggcactcctttttcagttgagtccggagttagactattgccacttagaacagtggttgccatgcctgctggcatcagtcgtgctccatcagggtcgtctagtggtgggcttggtattatctatccatttctcactagggttcgacaaagggcaaacactaatggtaatgatgaaaggaatggtcaatctccaaatgaatcggctcgtagtagcacccatcttaatcagcaatcaattccgcagtcatctcaaactcatgaagcaggtaatctgagatctccagttgatgtcaatgttggagatggctctgagacctcacctgggcagcagaatggtctggtcactctctctcagataatggacttttttggatcaatgctcccaggcgaaaatgttcgaggaaatacttcaagccagcaaccaccaatggcttccaccgagcagggagagggtagaaatcttgcaacaccagaagtgtcaggagccagtgaggaggccctacgctttgctggcatggtcagacaaattatgccatttatctcccaagttgaaacacagaatcaaagtgccccaccagacagcagcagcacacctgcacaggctgcatctgggagtgcagacagagctagggatgtcccaaatgattctacgagttcccgtcaacataaccgcgaccaaattgatgagcctaattctaaaaggcaaagaactagtgactgattggaatctacttgtgagctgagaatcttgccagttcttgatttaccccagcggatgatcaaaataaggacttgagacaaatggtggcagtattgagacaaaaatggattagctgtggtatatacttggcactgagggcactagacgaggcacctatgccttttttttttgagggggcgcatcttataagctgttatttttttagtgcaacgagcatacatgctgctggcatccaatccccaatatgtacaagttttaattcaggttgtgatcatttacgcaacgaatcaaagcctccgctctggtcattgccgtagcatacggaggactgacgcaatcaatcatattgttacgagaatgtatagcttaagattgtatgtttttttttaccatcgcttaagacaatcagagcatatagttcatgcttattatagtatgatccaaataggactagtagtattgttcatgcttatcattagcattgcttaagagcttgtttgggagtaagagaattaaaaaga

SEQ ID NO: 18999 - DNA, 1470 bp, Zea Mays
tgctcttcaagtggtgtttttttgtgcaaatcccacaaatacgtacaatgattgtgggcatatgccaataggaagtttgaatgttataatgtctaacaggtgtgggtccgtgcctggagccagtactaacccaagtgattcagctggtgcgcaagcgcatcaaaatgtgaataggccaggagatgcttcgcatgcaaatattggtgaagcgttttcaggggttgcaggtggcactcctttttcagttgagtccggagttagactattgccacttagaacagtggttgccatgcctgctggcatcagtcgtgctccatcagggtcgtctagtggtgggcttggtattatctatccatttctcactagggttcgacaaagggcaaacactaatggtaatgatgaaaggaatggtcaatctccaaatgaatcggctcgtagtagcacccatcttaatcagcaatcaattccgcagtcatctcaaactcatgaagcaggtaatctgagatctccagttgatgtcaatgttggagatggctctgagacctcacctgggcagcagaatggtctggtcactctctctcagataatggacttttttggatcaatgctcccaggcgaaaatgttcgaggaaatacttcaagccagcaaccaccaatggcttccaccgagcagggagagggtagaaatcttgcaacaccagaagtgtcaggagccagtgaggaggccctacgctttgctggcatggtcagacaaattatgccatttatctcccaagttgaaacacagaatcaaagtgccccaccagacagcagcagcacacctgcacaggctgcatctgggagtgcagacagagctagggatgtcccaaatgattctacgagttcccgtcaacataaccgcgaccaaattgatgagcctaattctaaaaggcaaagaactagtgactgattggaatctacttgtgagctgagaatcttgccagttcttgatttaccccagcggatgatcaaaataaggacttgagacaaatggtggcagtattgagacaaaaatggattagctgtggtatatacttggcactgagggcactagacgaggcacctatgccttttttttttgagggggcgcatcttataagctgttatttttttagtgcaacgagcatacatgctgctggcatccaatccccaatatgtacaagttttaattcaggttgtgatcatttacgcaacgaatcaaagcctccgctctggtcattgccgtagcatacggaggactgacgcaatcaatcatattgttacgagaatgtatagcttaagattgtatgtttttttttaccatcgcttaagacaatcagagcatatagttcatgcttattatagtatgatccaaataggactagtagtattgttcatgcttatcattagcattgcttaagagcttgtttgggagtaagagaattaaaaaga

SEQ ID NO: 19000 - DNA, 4761 bp, Zea Mays
gactcaccgagtcaggacggggaaaggagaaaaatccacctcgccccttttccaccaggtcccagcccaagcctcttcgcctccgctagtacgcctccatggacgcgtaccagcaccagcgacgcttcgccggcgccggcgacgcaccgccgccgccgcctcacccctcccacccgagcgctcagtggtacccggcgcccccactgccataccatcctccccaccccggacacccctaccctccgcagcaccaccaccagtgggccccgccacccgacatgcagcaccagcaccatccgccgctgccgcagccctacgtgtaccaaccgccacccccgcccatggcgatgcagcaacagccgcccccgcctcctgggaacccctggccccctcaccacggcgccgggcagcacccgccgcctacctaccctcctcctccgccggggcaggcttggaccaatcactcatgggctcagaatcatggatatcaaggtttactcttatatgtacctctgtttctttcatatataattttgcaaatcacgacgagtttagtttgatatgctatgttgtggaatttctactaaacattctatcctaatgcttattgacgtgggagtttttttttgctaaagattctattatacacacatttcaaccttgtttgtgaaaacacaatatctcaatactggtgtataacacatttctgaaactgcaaatatatatccatcgtggccatgttaatactggtgttgttattcaagtttaatcttagttggaaatttctttgcaccacttgattgtggtgctactgctatctgtcatgtattagtgactacacaggagatgtttactttaaaatatttagcctaacagatttactgtcgtgtaattcgctttctgtatacaaatctcttgagaactatttgttgataaatcactattaagtgattggttttgcatactcttgacgtgactgttattttcttatcttattatgagtgctttcttacataataagttcttggtagtttttggtgcgatactttgtttttatactggactaaaacgttttcttgtttgtcgatggaccagttgttcatttggggggccttgtcattaaatctatttaggctactctcaatgaaataaactttaaacatagcgtaagatttactatagtcaatcaactttagagagacttctgaagcagaataaatttcttgcgccgataaatcaattgttagtatgacgatagtttctctatttccttaaaaattaaataatggaaggtcatgacaatgaggaagattgggctacaaaggctaaggcatgggttgctgctaaatctgttatgggaaaccaccagattcaacagcatgccatatccacaagtagaactgaaggtcatcataatggttaccatgatcagtatcagcaaccagctggtctgccaacagaagttacagaagctttgcacccaccagtacctcaatcaagtattgatcatgtgccatttccaatgacaggtcaacagagagaaacaaaccatttattagatagaggtccaatggtgtctccagcaaagaattttggttcattttcgtccacctatgagcaggaggtatcttataattattcttctgctccaggtactgggaataatatgcttcaatatccaaactctcaagcacagccatttccaaccacggcagctgttcaaggtggattctcacagggttgccttagtatgcctgttcccttgacagaacagcctctttttgggcatgaaagacagccaattgatccaagtgaccaacctttggaatttaacagtaggaaagctcctgatttggcagtacatataaatgtcaattccaatatcccagctcctcaaacactagcacctaatcatgatgtagctgcaacctctacacattcatggacgccatctgctacagtagggtacctgcctcgagctcctgtgccaccacaaacagcacagatggatccttctgtgcatgctgcaccactttttggagcagcatctagttctagttatgtttcacctgcagcatttggtgttggtaatgtaacagaagtgttccctacagatccaaacactccttttagtgttgcagataaatcaaagaaacctccagtacctaactggcttcgggaagaacttttaaagaaaaaatcggaaccactgagtgcttcagcgcaaaactcagaaaacttaaatcccatggaagctaatgaggcagtacagacaataggaagacctgaccaaagtgacagcagaagcaatgattccgctaaatccactgaagacgatgacgatgatgaggatgaaattgaagcagctcgaatggcagcaatcaacaaggaaattaagcgtgtgttgactgaggtccttttgaaggttactgatgagctttttgatgagatagcaacaaaagttctaaatgaagacgactcagctgaatccaatgaagccactggtgttttcggatcaaaggagactggtctgggaagatcaagagccaaggcctcggctaaagttgttctccctgctaagtcaacaaatagttctgatcataaagatagtactgggttaagttcccctaaaggtgctcttctcggcctggctagttatgattcagatgatgacgacgatgctgacactgacagcaaggataagatgccaatatcaaatttatcttctaaagataatgctggtgctgtaaatactgaaggtgataaaagcactcttggtaaaagaaatgggaatcacaatgaacagaattcttcacttggaagttctccatcaggggaagatcttaaatctaataatcaaaactttcaaaggaatgcgaatgcagaacctgaacaaatgcatattcgtgatacagagaatggggagttccgtttcaaggccaagactcgtactgagccaaagggtgcatttgacagaatggatgagaaggcacatacgtatgcagaggtagatatccagaacagaaaaacctcttttggcaataatgctgaaaagcacaatgatttggaaagcagtcacagacattcagaaaagagcagcaaagaggactttgttaatgagttgaaggctgatcatacaaaagaactcgaatattctagagcagaaaaatataataacgatgacaaatacagcatgtatggaaatattgacaaaaggggtagctgcaaggagggaaaaggttctgatagtgctgcaaagcatgaatccgatacaagggagccacattacagaggtaactctaagcttgatggtgcaaagggagattggaaggatttgccgaaggatagagagagaaatagagatgatagaagggggaaaggaaaggatgaaaaggacgacaggttaaggcagatgacaagtcataacagcagaagttcacggtcacgatcaccaagggggagaagtcgtactagaaaggagaactcacatgttcgagggagtgtttcaagtgatgagccttctgatagtgtgaaaaagagaaagcattattcccataaaaccagcatgtcaccttcacccccaaaatctagaaacaggtacactgttcatgttgtctctctataatactagtgttggggtgtgtgtgctgtaatggggttctctccccctttcttattcttctattaatacaaagatgcgcagctctcctgtgtattccagaaaaaaaatactatgctaggaattattcttggattgagagaattttgaatgtggacagccccagtattcatacctattaatatgttttatggttggcattaagttctagtcacctagatttaaagaacacatcagctttttatgttttattatgaatgaagctgtccatgctagatgttcttgtcttcagttctactcattaaagaatgggatttatgtttatcataaggtggtacctggtaacactaaatgcgggtttctgctatatgctaatttgaaccatgctgctgttctttattggatatgtgatggcaagttgttgaatcacatagaaatggtttgttgtagatattttggatgtgatatgagcatgcaggtatcttctgcgtgaagaaacatcaggttcatatacctcttatccttacacttacccatttagtattatgtttcatctctagacgaatttcgcggtctccacatagcaagcattctcaccgcaggcattcgccttattcatcggctggcaggaagaggcggtcgagatcgagaactccggtcaaaaggagatagaaggcatggacagtttatccgacgagatctttgcctaaacattcctctgaaacaaccaaagacatttttgcggttctgctgttgtctatctagtgcgtcttttgctccgacaacataatggtagaacagcattcctacagtgacaaacatgaaggcgaggactggatgtaccttgatataagatgcacattgaactgtatcttgtttgatagatgagctatataactagctcacgcagctggctgtatgatctgtagttcccccgttatctgaattgttcatgtattaggccatgtactgctcagcagagctatgtagttagttgcacttgtatgacttcagcatgcctgttgccagttgtttgtttgtctatgcaggatttttttcccgtttcctacttttttgataaaaataaactgattcctgtgaaatctatatatgatttctctcaaattcctgccattccaaag

SEQ ID NO: 19001 - DNA, 4292 bp, Zea Mays
ggaaaggagaaaaatccacctcgccccttttccaccaggtcccagcccaagcctcttcgcctccgctagtacgcctccatggacgcgtaccagcaccagcgacgcttcgccggcgccggcgacgcaccgccgccgccgcctcacccctcccacccgagcgctcagtggtacccggcgcccccactgccataccatcctccccaccccggacacccctaccctccgcagcaccaccaccagtgggccccgccacccgacatgcagcaccagcaccatccgccgctgccgcagccctacgtgtaccaaccgccacccccgcccatggcgatgcagcaacagccgcccccgcctcctgggaacccctggccccctcaccacggcgccgggcagcacccgccgcctacctaccctcctcctccgccggggcaggcttggaccaatcactcatgggctcagaatcatggatatcaaggtcaacagagagaaacaaaccatttattagatagaggtccaatggtgtctccagcaaagaattttggttcattttcgtccacctatgagcaggaggtatcttataattattcttctgctccaggtactgggaataatatgcttcaatatccaaactctcaagcacagccatttccaaccacggcagctgttcaaggtggattctcacagggttgccttagtatgcctgttcccttgacagaacagcctctttttgggcatgaaagacagccaattgatccaagtgaccaacctttggaatttaacagtaggaaagctcctgatttggcagtacatataaatgtcaattccaatatcccagctcctcaaacactagcacctaatcatgatgtagctgcaacctctacacattcatggacgccatctgctacagtagggtacctgcctcgagctcctgtgccaccacaaacagcacagatggatccttctgtgcatgctgcaccactttttggagcagcatctagttctagttatgtttcacctgcagcatttggtgttggtaatgtaacagaagtgttccctacagatccaaacactccttttagtgttgcagataaatcaaagaaacctccagtacctaactggcttcgggaagaacttttaaagaaaaaatcggaaccactgagtgcttcagcgcaaaactcagaaaacttaaatcccatggaagctaatgaggcagtacagacaataggaagacctgaccaaagtgacagcagaagcaatgattccgctaaatccactgaagacgatgacgatgatgaggatgaaattgaagcagctcgaatggcagcaatcaacaaggaaattaagcgtgtgttgactgaggtccttttgaaggttactgatgagctttttgatgagatagcaacaaaagttctaaatgaagacgactcagctgaatccaatgaagccactggtgttttcggatcaaaggagactggtctgggaagatcaagagccaaggcctcggctaaagttgttctccctgctaagtcaacaaatagttctgatcataaagatagtactgggttaagttcccctaaaggtgctcttctcggcctggctagttatgattcagatgatgacgacgatgctgacactgacagcaaggataagatgccaatatcaaatttatcttctaaagataatgctggtgctgtaaatactgaaggtgataaaagcactcttggtaaaagaaatgggaatcacaatgaacagaattcttcacttggaagttctccatcaggggaagatcttaaatctaataatcaaaactttcaaaggaatgcgaatgcagaacctgaacaaatgcatattcgtgatacagagaatggggagttccgtttcaaggccaagactcgtactgagccaaagggtgcatttgacagaatggatgagaaggcacatacgtatgcagaggtagatatccagaacagaaaaacctcttttggcaataatgctgaaaagcacaatgatttggaaagcagtcacagacattcagaaaagagcagcaaagaggactttgttaatgagttgaaggctgatcatacaaaagaactcgaatattctagagcagaaaaatataataacgatgacaaatacagcatgtatggaaatattgacaaaaggggtagctgcaaggagggaaaaggttctgatagtgctgcaaagcatgaatccgatacaagggagccacattacagaggtaactctaagcttgatggtgcaaagggagattggaaggatttgccgaaggatagagagagaaatagagatgatagaagggggaaaggaaaggatgaaaaggacgacaggttaaggcagatgacaagtcataacagcagaagttcacggtcacgatcaccaagggggagaagtcgtactagaaaggagaactcacatgttcgagggagtgtttcaagtgatgagccttctgatagtgtgaaaaagagaaagcattattcccataaaaccagcatgtcaccttcacccccaaaatctagaaacaggtacactgttcatgttgtctctctataatactagtgttggggtgtgtgtgctgtaatggggttctctccccctttcttattcttctattaatacaaagatgcgcagctctcctgtgtattccagaaaaaaaatactatgctaggaattattcttggattgagagaattttgaatgtggacagccccagtattcatacctattaatatgttttatggttggcattaagttctagtcacctagatttaaagaacacatcagctttttatgttttattatgaatgaagctgtccatgctagatgttcttgtcttcagttctactcattaaagaatgggatttatgtttatcataaggtggtacctggtaacactaaatgcgggtttctgctatatgctaatttgaaccatgctgctgttctttattggatatgtgatggcaagttgttgaatcacatagaaatggtttgttgtagatattttggatgtgatatgagcatgcaggtatcttctgcgtgaagaaacatcaggttcatatacctcttatccttacacttacccatttagtattatgtttcatctctagacgaatttcgcggtctccacatagcaagcattctcaccgcaggcattcgccttattcatcggctggcaggtaagagattaatcagttcttcctttgccattatactattactcgtgctgatggttcatcatgaaatttctatttgctttcagatttaggatgcaaactagattagctatcaatctttctgtggctgattatggaaattagattagctgcaaacaaaaataagtaataaggaatttaagaataaaatcgaaccttaggtatttttacagcacattcttataaaaaatattgtttcgatcttactaggaaccttgtttatgaaatgtgatattttatagttctcccagaaaagttgtgttatcttgagaaataaagagattttctgcacaatttctcctgggtaagctgaaaactgcgcatcgtaaatttgtagcctgcagaaaagttttcagtttagttgttttagatttaactgtacttgtcttgaactcttgggtattctggacgggaactgctgattctttcaaatccgggatcttcaattgtctgcaccagctgattcctttaaatctggaatcctctatctgttggcccacttgtacagtaactcgtgatttatacttccttaactgtgtctaatcattgcaggaagaggcggtcgagatcgagaactccggtcaaaaggagatagaaggcatggacagtttatccgacgagatctttgcctaaacattcctctgaaacaaccaaagacatttttgcggttctgctgttgtctatctagtgcgtcttttgctccgacaacataatggtagaacagcattcctacagtgacaaacatgaaggcgaggactggatgtaccttgatataagatgcacattgaactgtatcttgtttgatagatgagctatataactagctcacgcagctggctgtatgatctgtagttcccccgttatctgaattgttcatgtattaggccatgtactgctcagcagagctatgtagttagttgcacttgtatgacttcagcatgcctgttgccagttgtttgtttgtctatgcaggatttttttcccgtttcctacttttttgataaaaataaactgattcctgtgaaatctatatatgatttctctcaaattcctgccattccaaag

SEQ ID NO: 19002 - DNA, 3933 bp, Zea Mays
gaaaaatccacctcgccccttttccaccaggtcccagcccaagcctcttcgcctccgctagtacgcctccatggacgcgtaccagcaccagcgacgcttcgccggcgccggcgacgcaccgccgccgccgcctcacccctcccacccgagcgctcagtggtacccggcgcccccactgccataccatcctccccaccccggacacccctaccctccgcagcaccaccaccagtgggccccgccacccgacatgcagcaccagcaccatccgccgctgccgcagccctacgtgtaccaaccgccacccccgcccatggcgatgcagcaacagccgcccccgcctcctgggaacccctggccccctcaccacggcgccgggcagcacccgccgcctacctaccctcctcctccgccggggcaggcttggaccaatcactcatgggctcagaatcatggatatcaaggtcatgacaatgaggaagattgggctacaaaggctaaggcatgggttgctgctaaatctgttatgggaaaccaccagattcaacagcatgccatatccacaagtagaactgaaggtcatcataatggttaccatgatcagtatcagcaaccagctggtctgccaacagaagttacagaagctttgcacccaccagtacctcaatcaagtattgatcatgtgccatttccaatgacaggtcaacagagagaaacaaaccatttattagatagaggtccaatggtgtctccagcaaagaattttggttcattttcgtccacctatgagcaggaggtatcttataattattcttctgctccaggtactgggaataatatgcttcaatatccaaactctcaagcacagccatttccaaccacggcagctgttcaaggtggattctcacagggttgccttagtatgcctgttcccttgacagaacagcctctttttgggcatgaaagacagccaattgatccaagtgaccaacctttggaatttaacagtaggaaagctcctgatttggcagtacatataaatgtcaattccaatatcccagctcctcaaacactagcacctaatcatgatgtagctgcaacctctacacattcatggacgccatctgctacagtagggtacctgcctcgagctcctgtgccaccacaaacagcacagatggatccttctgtgcatgctgcaccactttttggagcagcatctagttctagttatgtttcacctgcagcatttggtgttggtaatgtaacagaagtgttccctacagatccaaacactccttttagtgttgcagataaatcaaagaaacctccagtacctaactggcttcgggaagaacttttaaagaaaaaatcggaaccactgagtgcttcagcgcaaaactcagaaaacttaaatcccatggaagctaatgaggcagtacagacaataggaagacctgaccaaagtgacagcagaagcaatgattccgctaaatccactgaagacgatgacgatgatgaggatgaaattgaagcagctcgaatggcagcaatcaacaaggaaattaagcgtgtgttgactgaggtccttttgaaggttactgatgagctttttgatgagatagcaacaaaagttctaaatgaagacgactcagctgaatccaatgaagccactggtgttttcggatcaaaggagactggtctgggaagatcaagagccaaggcctcggctaaagttgttctccctgctaagtcaacaaatagttctgatcataaagatagtactgggttaagttcccctaaaggtgctcttctcggcctggctagttatgattcagatgatgacgacgatgctgacactgacagcaaggataagatgccaatatcaaatttatcttctaaagataatgctggtgctgtaaatactgaaggtgataaaagcactcttggtaaaagaaatgggaatcacaatgaacagaattcttcacttggaagttctccatcaggggaagatcttaaatctaataatcaaaactttcaaaggaatgcgaatgcagaacctgaacaaatgcatattcgtgatacagagaatggggagttccgtttcaaggccaagactcgtactgagccaaagggtgcatttgacagaatggatgagaaggcacatacgtatgcagaggtagatatccagaacagaaaaacctcttttggcaataatgctgaaaagcacaatgatttggaaagcagtcacagacattcagaaaagagcagcaaagaggactttgttaatgagttgaaggctgatcatacaaaagaactcgaatattctagagcagaaaaatataataacgatgacaaatacagcatgtatggaaatattgacaaaaggggtagctgcaaggagggaaaaggttctgatagtgctgcaaagcatgaatccgatacaagggagccacattacagaggtaactctaagcttgatggtgcaaagggagattggaaggatttgccgaaggatagagagagaaatagagatgatagaagggggaaaggaaaggatgaaaaggacgacaggttaaggcagatgacaagtcataacagcagaagttcacggtcacgatcaccaagggggagaagtcgtactagaaaggagaactcacatgttcgagggagtgtttcaagtgatgagccttctgatagtgtgaaaaagagaaagcattattcccataaaaccagcatgtcaccttcacccccaaaatctagaaacaggtacactgttcatgttgtctctctataatactagtgttggggtgtgtgtgctgtaatggggttctctccccctttcttattcttctattaatacaaagatgcgcagctctcctgtgtattccagaaaaaaaatactatgctaggaattattcttggattgagagaattttgaatgtggacagccccagtattcatacctattaatatgttttatggttggcattaagttctagtcacctagatttaaagaacacatcagctttttatgttttattatgaatgaagctgtccatgctagatgttcttgtcttcagttctactcattaaagaatgggatttatgtttatcataaggtggtacctggtaacactaaatgcgggtttctgctatatgctaatttgaaccatgctgctgttctttattggatatgtgatggcaagttgttgaatcacatagaaatggtttgttgtagatattttggatgtgatatgagcatgcaggtatcttctgcgtgaagaaacatcaggttcatatacctcttatccttacacttacccatttagtattatgtttcatctctagacgaatttcgcggtctccacatagcaagcattctcaccgcaggcattcgccttattcatcggctggcaggaagaggcggtcgagatcgagaactccggtcaaaaggagatagaaggcatggacagtttatccgacgagatctttgcctaaacattcctctgaaacaaccaaagacatttttgcggttctgctgttgtctatctagtgcgtcttttgctccgacaacataatggtagaacagcattcctacagtgacaaacatgaaggcgaggactggatgtaccttgatataagatgcacattgaactgtatcttgtttgatagatgagctatataactagctcacgcagctggctgtatgatctgtagttcccccgttatctgaattgttcatgtattaggccatgtactgctcagcagagctatgtagttagttgcacttgtatgacttcagcatgcctgttgccagttgtttgtttgtctatgcaggatttttttcccgtttcctacttttttgataaaaataaactgattcctgtgaaatctatatatgatttctctcaaattcctgccattccaaag

SEQ ID NO: 19003 - DNA, 3379 bp, Zea Mays
caggtcccagcccaagcctcttcgcctccgctagtacgcctccatggacgcgtaccagcaccagcgacgcttcgccggcgccggcgacgcaccgccgccgccgcctcacccctcccacccgagcgctcagtggtacccggcgcccccactgccataccatcctccccaccccggacacccctaccctccgcagcaccaccaccagtgggccccgccacccgacatgcagcaccagcaccatccgccgctgccgcagccctacgtgtaccaaccgccacccccgcccatggcgatgcagcaacagccgcccccgcctcctgggaacccctggccccctcaccacggcgccgggcagcacccgccgcctacctaccctcctcctccgccggggcaggcttggaccaatcactcatgggctcagaatcatggatatcaaggtcatgacaatgaggaagattgggctacaaaggctaaggcatgggttgctgctaaatctgttatgggaaaccaccagattcaacagcatgccatatccacaagtagaactgaaggtcatcataatggttaccatgatcagtatcagcaaccagctggtctgccaacagaagttacagaagctttgcacccaccagtacctcaatcaagtattgatcatgtgccatttccaatgacaggtcaacagagagaaacaaaccatttattaggtaaagtatcttattgcccttgatctatatattttacttatggatgtgtaagtttcagaatggagctgaagattatattgcagatagaggtccaatggtgtctccagcaaagaattttggttcattttcgtccacctatgagcaggaggtactgggaataatatgcttcaatatccaaactctcaagcacagccatttccaaccacggcagctgttcaaggtggattctcacagggttgccttagtatgcctgttcccttgacagaacagcctctttttgggcatgaaagacagccaattgatccaagtgaccaacctttggaatttaacagtaggaaagctcctgatttggcagtacatataaatgtcaattccaatatcccagctcctcaaacactagcacctaatcatgatgtagctgcaacctctacacattcatggacgccatctgctacagtagggtacctgcctcgagctcctgtgccaccacaaacagcacagatggatccttctgtgcatgctgcaccactttttggagcagcatctagttctagttatgtttcacctgcagcatttggtgttggtaatgtaacagaagtgttccctacagatccaaacactccttttagtgttgcagataaatcaaagaaacctccagtacctaactggcttcgggaagaacttttaaagaaaaaatcggaaccactgagtgcttcagcgcaaaactcagaaaacttaaatcccatggaagctaatgaggcagtacagacaataggaagacctgaccaaagtgacagcagaagcaatgattccgctaaatccactgaagacgatgacgatgatgaggatgaaattgaagcagctcgaatggcagcaatcaacaaggaaattaagcgtgtgttgactgaggtccttttgaaggttactgatgagctttttgatgagatagcaacaaaagttctaaatgaagacgactcagctgaatccaatgaagccactggtgttttcggatcaaaggagactggtctgggaagatcaagagccaaggcctcggctaaagttgttctccctgctaagtcaacaaatagttctgatcataaagatagtactgggttaagttcccctaaaggtgctcttctcggcctggctagttatgattcagatgatgacgacgatgctgacactgacagcaaggataagatgccaatatcaaatttatcttctaaagataatgctggtgctgtaaatactgaaggtgataaaagcactcttggtaaaagaaatgggaatcacaatgaacagaattcttcacttggaagttctccatcaggggaagatcttaaatctaataatcaaaactttcaaaggaatgcgaatgcagaacctgaacaaatgcatattcgtgatacagagaatggggagttccgtttcaaggccaagactcgtactgagccaaagggtgcatttgacagaatggatgagaaggcacatacgtatgcagaggtagatatccagaacagaaaaacctcttttggcaataatgctgaaaagcacaatgatttggaaagcagtcacagacattcagaaaagagcagcaaagaggactttgttaatgagttgaaggctgatcatacaaaagaactcgaatattctagagcagaaaaatataataacgatgacaaatacagcatgtatggaaatattgacaaaaggggtagctgcaaggagggaaaaggttctgatagtgctgcaaagcatgaatccgatacaagggagccacattacagaggtaactctaagcttgatggtgcaaagggagattggaaggatttgccgaaggatagagagagaaatagagatgatagaagggggaaaggaaaggatgaaaaggacgacaggttaaggcagatgacaagtcataacagcagaagttcacggtcacgatcaccaagggggagaagtcgtactagaaaggagaactcacatgttcgagggagtgtttcaagtgatgagccttctgatagtgtgaaaaagagaaagcattattcccataaaaccagcatgtcaccttcacccccaaaatctagaaacagacgaatttcgcggtctccacatagcaagcattctcaccgcaggcattcgccttattcatcggctggcaggaagaggcggtcgagatcgagaactccggtcaaaaggagatagaaggcatggacagtttatccgacgagatctttgcctaaacattcctctgaaacaaccaaagacatttttgcggttctgctgttgtctatctagtgcgtcttttgctccgacaacataatggtagaacagcattcctacagtgacaaacatgaaggcgaggactggatgtaccttgatataagatgcacattgaactgtatcttgtttgatagatgagctatataactagctcacgcagctggctgtatgatctgtagttcccccgttatctgaattgttcatgtattaggccatgtactgctcagcagagctatgtagttagttgcacttgtatgacttcagcatgcctgttgccagttgtttgtttgtctatgcaggatttttttcccgtttcctacttttttgataaaaataaactgattcctgtgaaatctatatatgatttctctcaaattcctgccattccaaag

SEQ ID NO: 19004 - DNA, 5311 bp, Zea Mays
ccagcccaagcctcttcgcctccgctagtacgcctccatggacgcgtaccagcaccagcgacgcttcgccggcgccggcgacgcaccgccgccgccgcctcacccctcccacccgagcgctcagtggtacccggcgcccccactgccataccatcctccccaccccggacacccctaccctccgcagcaccaccaccagtgggccccgccacccgacatgcagcaccagcaccatccgccgctgccgcagccctacgtgtaccaaccgccacccccgcccatggcgatgcagcaacagccgcccccgcctcctgggaacccctggccccctcaccacggcgccgggcagcacccgccgcctacctaccctcctcctccgccggggcaggcttggaccaatcactcatgggctcagaatcatggatatcaaggtcatgacaatgaggaagattgggctacaaaggctaaggcatgggttgctgctaaatctgttatgggaaaccaccagattcaacagcatgccatatccacaagtagaactgaaggtcatcataatggttaccatgatcagtatcagcaaccagctggtctgccaacagaagttacagaagctttgcacccaccagtacctcaatcaagtattgatcatgtgccatttccaatgacaggtcaacagagagaaacaaaccatttattagatagaggtccaatggtgtctccagcaaagaattttggttcattttcgtccacctatgagcaggaggtatcttataattattcttctgctccaggtatgccttgcttggcaatttaatttctttgcgcagcctgaatcataaaaggctggtcgctctgggtatgttaccagattcagttgtggaaagactttaaatctagagcgtcatttattttagaatagaaagtctggtacacttaacctatctctgtgatacttagttagcagtacctgttgtgagtactcattgcgtcccatttgaagcaccgttggttatatctattgtgtttgcctctatcaaatggagggaagaggaagacaaagacacgtattagtggttaaatgtatcaagatgttgacttaatggatcttttcattactgactataattgtatatcaaggattcaatagttactagcggtggtatatcatgtaaatgttatgtattgtccttaatgctgaaaaaaggacagacctagtgctggcggttcccacatgaggggtctgtggaaggaataatcgaggcaagccttgctcctgcattttgcacattcgcagagaatctgtgtcgaacccaggaccttttagctcagcaggaaggtttctaacagctgccagacccgtccttaatgctgaaaataagaagaaaaaactaactggtgcaatatatttcattgatggtgtttttactgtaaaataaagtgcagaagtgtacatttctttaaatgatcacttctacaatgtatttgagcattcatccttttctgctatatatagagctgaactcatttgtttgtcttgcataaagtacaatgatcatgatgagtaatattttttgtaaagaaaattctgactttgactttaccatgtaataataggtactgggaataatatgcttcaatatccaaactctcaagcacagccatttccaaccacggcagctgttcaaggtggattctcacagggttgccttagtatgcctgttcccttgacagaacagcctctttttgggcatgaaagacagccaattgatccaagtgaccaacctttggaatttaacagtaggaaagctcctgatttggcagtacatataaatgtcaattccaatatcccagctcctcaaacactagcacctaatcatgatgtagctgcaacctctacacattcatggacgccatctgctacagtagggtacctgcctcgagctcctgtgccaccacaaacagcacagatggatccttctgtgcatgctgcaccactttttggagcagcatctagttctagttatgtttcacctgcagcatttggtgttggtaatgtaacagaagtgttccctacagatccaaacactccttttagtgttgcagataaatcaaagaaacctccagtacctaactggcttcgggaagaacttttaaagaaaaaatcggaaccactgagtgcttcagcgcaaaactcagaaaacttaaatcccatggaagctaatgaggcagtacagacaataggaagacctgaccaaagtgacagcagaagcaatgattccgctaaatccactgaagacgatgacgatgatgaggatgaaattgaagcagctcgaatggcagcaatcaacaaggaaattaagcgtgtgttgactgaggtccttttgaaggttactgatgagctttttgatgagatagcaacaaaagttctaaatgaagacgactcagctgaatccaatgaagccactggtgttttcggatcaaaggagactggtctgggaagatcaagagccaaggcctcggctaaagttgttctccctgctaagtcaacaaatagttctgatcataaagatagtactgggttaagttcccctaaaggtgctcttctcggcctggctagttatgattcagatgatgacgacgatgctgacactgacagcaaggataagatgccaatatcaaatttatcttctaaagataatgctggtgctgtaaatactgaaggtgataaaagcactcttggtaaaagaaatgggaatcacaatgaacagaattcttcacttggaagttctccatcaggggaagatcttaaatctaataatcaaaactttcaaaggaatgcgaatgcagaacctgaacaaatgcatattcgtgatacagagaatggggagttccgtttcaaggccaagactcgtactgagccaaagggtgcatttgacagaatggatgagaaggcacatacgtatgcagaggtagatatccagaacagaaaaacctcttttggcaataatgctgaaaagcacaatgatttggaaagcagtcacagacattcagaaaagagcagcaaagaggactttgttaatgagttgaaggctgatcatacaaaagaactcgaatattctagagcagaaaaatataataacgatgacaaatacagcatgtatggaaatattgacaaaaggggtagctgcaaggagggaaaaggttctgatagtgctgcaaagcatgaatccgatacaagggagccacattacagaggtaactctaagcttgatggtgcaaagggagattggaaggatttgccgaaggatagagagagaaatagagatgatagaagggggaaaggaaaggatgaaaaggacgacaggttaaggcagatgacaagtcataacagcagaagttcacggtcacgatcaccaagggggagaagtcgtactagaaaggagaactcacatgttcgagggagtgtttcaagtgatgagccttctgatagtgtgaaaaagagaaagcattattcccataaaaccagcatgtcaccttcacccccaaaatctagaaacaggtacactgttcatgttgtctctctataatactagtgttggggtgtgtgtgctgtaatggggttctctccccctttcttattcttctattaatacaaagatgcgcagctctcctgtgtattccagaaaaaaaatactatgctaggaattattcttggattgagagaattttgaatgtggacagccccagtattcatacctattaatatgttttatggttggcattaagttctagtcacctagatttaaagaacacatcagctttttatgttttattatgaatgaagctgtccatgctagatgttcttgtcttcagttctactcattaaagaatgggatttatgtttatcataaggtggtacctggtaacactaaatgcgggtttctgctatatgctaatttgaaccatgctgctgttctttattggatatgtgatggcaagttgttgaatcacatagaaatggtttgttgtagatattttggatgtgatatgagcatgcaggtatcttctgcgtgaagaaacatcaggttcatatacctcttatccttacacttacccatttagtattatgtttcatctctagacgaatttcgcggtctccacatagcaagcattctcaccgcaggcattcgccttattcatcggctggcaggtaagagattaatcagttcttcctttgccattatactattactcgtgctgatggttcatcatgaaatttctatttgctttcagatttaggatgcaaactagattagctatcaatctttctgtggctgattatggaaattagattagctgcaaacaaaaataagtaataaggaatttaagaataaaatcgaaccttaggtatttttacagcacattcttataaaaaatattgtttcgatcttactaggaaccttgtttatgaaatgtgatattttatagttctcccagaaaagttgtgttatcttgagaaataaagagattttctgcacaatttctcctgggtaagctgaaaactgcgcatcgtaaatttgtagcctgcagaaaagttttcagtttagttgttttagatttaactgtacttgtcttgaactcttgggtattctggacgggaactgctgattctttcaaatccgggatcttcaattgtctgcaccagctgattcctttaaatctggaatcctctatctgttggcccacttgtacagtaactcgtgatttatacttccttaactgtgtctaatcattgcaggaagaggcggtcgagatcgagaactccggtcaaaaggagatagaaggcatggacagtttatccgacgagatctttgcctaaacattcctctgaaacaaccaaagacatttttgcggttctgctgttgtctatctagtgcgtcttttgctccgacaacataatggtagaacagcattcctacagtgacaaacatgaaggcgaggactggatgtaccttgatataagatgcacattgaactgtatcttgtttgatagatgagctatataactagctcacgcagctggctgtatgatctgtagttcccccgttatctgaattgttcatgtattaggccatgtactgctcagcagagctatgtagttagttgcacttgtatgacttcagcatgcctgttgccagttgtttgtttgtctatgcaggatttttttcccgtttcctacttttttgataaaaataaactgattcctgtgaaatctatatatgatttctctcaaattcctgccattccaaag

SEQ ID NO: 19005 - DNA, 4388 bp, Zea Mays
cgccggcgacgcaccgccgccgccgcctcacccctcccacccgagcgctcagtggtacccggcgcccccactgccataccatcctccccaccccggacacccctaccctccgcagcaccaccaccagtgggccccgccacccgacatgcagcaccagcaccatccgccgctgccgcagccctacgtgtaccaaccgccacccccgcccatggcgatgcagcaacagccgcccccgcctcctgggaacccctggccccctcaccacggcgccgggcagcacccgccgcctacctaccctcctcctccgccggggcaggcttggaccaatcactcatgggctcagaatcatggatatcaaggtcatgacaatgaggaagattgggctacaaaggctaaggcatgggttgctgctaaatctgttatgggaaaccaccagattcaacagcatgccatatccacaagtagaactgaaggtcatcataatggttaccatgatcagtatcagcaaccagctggtctgccaacagaagttacagaagctttgcacccaccagtacctcaatcaagtattgatcatgtgccatttccaatgacaggtcaacagagagaaacaaaccatttattagatagaggtccaatggtgtctccagcaaagaattttggttcattttcgtccacctatgagcaggaggtactgggaataatatgcttcaatatccaaactctcaagcacagccatttccaaccacggcagctgttcaaggtggattctcacagggttgccttagtatgcctgttcccttgacagaacagcctctttttgggcatgaaagacagccaattgatccaagtgaccaacctttggaatttaacagtaggaaagctcctgatttggcagtacatataaatgtcaattccaatatcccagctcctcaaacactagcacctaatcatgatgtagctgcaacctctacacattcatggacgccatctgctacagtagggtacctgcctcgagctcctgtgccaccacaaacagcacagatggatccttctgtgcatgctgcaccactttttggagcagcatctagttctagttatgtttcacctgcagcatttggtgttggtaatgtaacagaagtgttccctacagatccaaacactccttttagtgttgcagataaatcaaagaaacctccagtacctaactggcttcgggaagaacttttaaagaaaaaatcggaaccactgagtgcttcagcgcaaaactcagaaaacttaaatcccatggaagctaatgaggcagtacagacaataggaagacctgaccaaagtgacagcagaagcaatgattccgctaaatccactgaagacgatgacgatgatgaggatgaaattgaagcagctcgaatggcagcaatcaacaaggaaattaagcgtgtgttgactgaggtccttttgaaggttactgatgagctttttgatgagatagcaacaaaagttctaaatgaagacgactcagctgaatccaatgaagccactggtgttttcggatcaaaggagactggtctgggaagatcaagagccaaggcctcggctaaagttgttctccctgctaagtcaacaaatagttctgatcataaagatagtactgggttaagttcccctaaaggtgctcttctcggcctggctagttatgattcagatgatgacgacgatgctgacactgacagcaaggataagatgccaatatcaaatttatcttctaaagataatgctggtgctgtaaatactgaaggtgataaaagcactcttggtaaaagaaatgggaatcacaatgaacagaattcttcacttggaagttctccatcaggggaagatcttaaatctaataatcaaaactttcaaaggaatgcgaatgcagaacctgaacaaatgcatattcgtgatacagagaatggggagttccgtttcaaggccaagactcgtactgagccaaagggtgcatttgacagaatggatgagaaggcacatacgtatgcagaggtagatatccagaacagaaaaacctcttttggcaataatgctgaaaagcacaatgatttggaaagcagtcacagacattcagaaaagagcagcaaagaggactttgttaatgagttgaaggctgatcatacaaaagaactcgaatattctagagcagaaaaatataataacgatgacaaatacagcatgtatggaaatattgacaaaaggggtagctgcaaggagggaaaaggttctgatagtgctgcaaagcatgaatccgatacaagggagccacattacagaggtaactctaagcttgatggtgcaaagggagattggaaggatttgccgaaggatagagagagaaatagagatgatagaagggggaaaggaaaggatgaaaaggacgacaggttaaggcagatgacaagtcataacagcagaagttcacggtcacgatcaccaagggggagaagtcgtactagaaaggagaactcacatgttcgagggagtgtttcaagtgatgagccttctgatagtgtgaaaaagagaaagcattattcccataaaaccagcatgtcaccttcacccccaaaatctagaaacaggtacactgttcatgttgtctctctataatactagtgttggggtgtgtgtgctgtaatggggttctctccccctttcttattcttctattaatacaaagatgcgcagctctcctgtgtattccagaaaaaaaatactatgctaggaattattcttggattgagagaattttgaatgtggacagccccagtattcatacctattaatatgttttatggttggcattaagttctagtcacctagatttaaagaacacatcagctttttatgttttattatgaatgaagctgtccatgctagatgttcttgtcttcagttctactcattaaagaatgggatttatgtttatcataaggtggtacctggtaacactaaatgcgggtttctgctatatgctaatttgaaccatgctgctgttctttattggatatgtgatggcaagttgttgaatcacatagaaatggtttgttgtagatattttggatgtgatatgagcatgcaggtatcttctgcgtgaagaaacatcaggttcatatacctcttatccttacacttacccatttagtattatgtttcatctctagacgaatttcgcggtctccacatagcaagcattctcaccgcaggcattcgccttattcatcggctggcaggtaagagattaatcagttcttcctttgccattatactattactcgtgctgatggttcatcatgaaatttctatttgctttcagatttaggatgcaaactagattagctatcaatctttctgtggctgattatggaaattagattagctgcaaacaaaaataagtaataaggaatttaagaataaaatcgaaccttaggtatttttacagcacattcttataaaaaatattgtttcgatcttactaggaaccttgtttatgaaatgtgatattttatagttctcccagaaaagttgtgttatcttgagaaataaagagattttctgcacaatttctcctgggtaagctgaaaactgcgcatcgtaaatttgtagcctgcagaaaagttttcagtttagttgttttagatttaactgtacttgtcttgaactcttgggtattctggacgggaactgctgattctttcaaatccgggatcttcaattgtctgcaccagctgattcctttaaatctggaatcctctatctgttggcccacttgtacagtaactcgtgatttatacttccttaactgtgtctaatcattgcaggaagaggcggtcgagatcgagaactccggtcaaaaggagatagaaggcatggacagtttatccgacgagatctttgcctaaacattcctctgaaacaaccaaagacatttttgcggttctgctgttgtctatctagtgcgtcttttgctccgacaacataatggtagaacagcattcctacagtgacaaacatgaaggcgaggactggatgtaccttgatataagatgcacattgaactgtatcttgtttgatagatgagctatataactagctcacgcagctggctgtatgatctgtagttcccccgttatctgaattgttcatgtattaggccatgtactgctcagcagagctatgtagttagttgcacttgtatgacttcagcatgcctgttgccagttgtttgtttgtctatgcaggatttttttcccgtttcctacttttttgataaaaataaactgattcctgtgaaatctatatatgatttctctcaaattcctgccattccaaag

SEQ ID NO: 19006 - DNA, 2973 bp, Zea Mays
ccacccgagcgctcagtggtacccggcgcccccactgccataccatcctccccaccccggacacccctaccctccgcagcaccaccaccagtgggccccgccacccgacatgcagcaccagcaccatccgccgctgccgcagccctacgtgtaccaaccgccacccccgcccatggcgatgcagcaacagccgcccccgcctcctgggaacccctggccccctcaccacggcgccgggcagcacccgccgcctacctaccctcctcctccgccggggcaggcttggaccaatcactcatgggctcagaatcatggatatcaaggtcaacagagagaaacaaaccatttattagatagaggtccaatggtgtctccagcaaagaattttggttcattttcgtccacctatgagcaggaggtatcttataattattcttctgctccaggtactgggaataatatgcttcaatatccaaactctcaagcacagccatttccaaccacggcagctgttcaaggtggattctcacagggttgccttagtatgcctgttcccttgacagaacagcctctttttgggcatgaaagacagccaattgatccaagtgaccaacctttggaatttaacagtaggaaagctcctgatttggcagtacatataaatgtcaattccaatatcccagctcctcaaacactagcacctaatcatgatgtagctgcaacctctacacattcatggacgccatctgctacagtagggtacctgcctcgagctcctgtgccaccacaaacagcacagatggatccttctgtgcatgctgcaccactttttggagcagcatctagttctagttatgtttcacctgcagcatttggtgttggtaatgtaacagaagtgttccctacagatccaaacactccttttagtgttgcagataaatcaaagaaacctccagtacctaactggcttcgggaagaacttttaaagaaaaaatcggaaccactgagtgcttcagcgcaaaactcagaaaacttaaatcccatggaagctaatgaggcagtacagacaataggaagacctgaccaaagtgacagcagaagcaatgattccgctaaatccactgaagacgatgacgatgatgaggatgaaattgaagcagctcgaatggcagcaatcaacaaggaaattaagcgtgtgttgactgaggtccttttgaaggttactgatgagctttttgatgagatagcaacaaaagttctaaatgaagacgactcagctgaatccaatgaagccactggtgttttcggatcaaaggagactggtctgggaagatcaagagccaaggcctcggctaaagttgttctccctgctaagtcaacaaatagttctgatcataaagatagtactgggttaagttcccctaaaggtgctcttctcggcctggctagttatgattcagatgatgacgacgatgctgacactgacagcaaggataagatgccaatatcaaatttatcttctaaagataatgctggtgctgtaaatactgaaggtgataaaagcactcttggtaaaagaaatgggaatcacaatgaacagaattcttcacttggaagttctccatcaggggaagatcttaaatctaataatcaaaactttcaaaggaatgcgaatgcagaacctgaacaaatgcatattcgtgatacagagaatggggagttccgtttcaaggccaagactcgtactgagccaaagggtgcatttgacagaatggatgagaaggcacatacgtatgcagaggtagatatccagaacagaaaaacctcttttggcaataatgctgaaaagcacaatgatttggaaagcagtcacagacattcagaaaagagcagcaaagaggactttgttaatgagttgaaggctgatcatacaaaagaactcgaatattctagagcagaaaaatataataacgatgacaaatacagcatgtatggaaatattgacaaaaggggtagctgcaaggagggaaaaggttctgatagtgctgcaaagcatgaatccgatacaagggagccacattacagaggtaactctaagcttgatggtgcaaagggagattggaaggatttgccgaaggatagagagagaaatagagatgatagaagggggaaaggaaaggatgaaaaggacgacaggttaaggcagatgacaagtcataacagcagaagttcacggtcacgatcaccaagggggagaagtcgtactagaaaggagaactcacatgttcgagggagtgtttcaagtgatgagccttctgatagtgtgaaaaagagaaagcattattcccataaaaccagcatgtcaccttcacccccaaaatctagaaacagacgaatttcgcggtctccacatagcaagcattctcaccgcaggcattcgccttattcatcggctggcaggaagaggcggtcgagatcgagaactccggtcaaaaggagatagaaggcatggacagtttatccgacgagatctttgcctaaacattcctctgaaacaaccaaagacatttttgcggttctgctgttgtctatctagtgcgtcttttgctccgacaacataatggtagaacagcattcctacagtgacaaacatgaaggcgaggactggatgtaccttgatataagatgcacattgaactgtatcttgtttgatagatgagctatataactagctcacgcagctggctgtatgatctgtagttcccccgttatctgaattgttcatgtattaggccatgtactgctcagcagagctatgtagttagttgcacttgtatgacttcagcatgcctgttgccagttgtttgtttgtctatgcaggatttttttcccgtttcctacttttttgataaaaataaactgattcctgtgaaatctatatatgatttctctcaaattcctgccattccaaag

SEQ ID NO: 19007 - DNA, 3771 bp, Zea Mays
gcccccactgccataccatcctccccaccccggacacccctaccctccgcagcaccaccaccagtgggccccgccacccgacatgcagcaccagcaccatccgccgctgccgcagccctacgtgtaccaaccgccacccccgcccatggcgatgcagcaacagccgcccccgcctcctgggaacccctggccccctcaccacggcgccgggcagcacccgccgcctacctaccctcctcctccgccggggcaggcttggaccaatcactcatgggctcagaatcatggatatcaaggtcatgacaatgaggaagattgggctacaaaggctaaggcatgggttgctgctaaatctgttatgggaaaccaccagattcaacagcatgccatatccacaagtagaactgaaggtcatcataatggttaccatgatcagtatcagcaaccagctggtctgccaacagaagttacagaagctttgcacccaccagtacctcaatcaagtattgatcatgtgccatttccaatgacaggtcaacagagagaaacaaaccatttattagatagaggtccaatggtgtctccagcaaagaattttggttcattttcgtccacctatgagcaggaggtatcttataattattcttctgctccaggtactgggaataatatgcttcaatatccaaactctcaagcacagccatttccaaccacggcagctgttcaaggtggattctcacagggttgccttagtatgcctgttcccttgacagaacagcctctttttgggcatgaaagacagccaattgatccaagtgaccaacctttggaatttaacagtaggaaagctcctgatttggcagtacatataaatgtcaattccaatatcccagctcctcaaacactagcacctaatcatgatgtagctgcaacctctacacattcatggacgccatctgctacagtagggtacctgcctcgagctcctgtgccaccacaaacagcacagatggatccttctgtgcatgctgcaccactttttggagcagcatctagttctagttatgtttcacctgcagcatttggtgttggtaatgtaacagaagtgttccctacagatccaaacactccttttagtgttgcagataaatcaaagaaacctccagtacctaactggcttcgggaagaacttttaaagaaaaaatcggaaccactgagtgcttcagcgcaaaactcagaaaacttaaatcccatggaagctaatgaggcagtacagacaataggaagacctgaccaaagtgacagcagaagcaatgattccgctaaatccactgaagacgatgacgatgatgaggatgaaattgaagcagctcgaatggcagcaatcaacaaggaaattaagcgtgtgttgactgaggtccttttgaaggttactgatgagctttttgatgagatagcaacaaaagttctaaatgaagacgactcagctgaatccaatgaagccactggtgttttcggatcaaaggagactggtctgggaagatcaagagccaaggcctcggctaaagttgttctccctgctaagtcaacaaatagttctgatcataaagatagtactgggttaagttcccctaaaggtgctcttctcggcctggctagttatgattcagatgatgacgacgatgctgacactgacagcaaggataagatgccaatatcaaatttatcttctaaagataatgctggtgctgtaaatactgaaggtgataaaagcactcttggtaaaagaaatgggaatcacaatgaacagaattcttcacttggaagttctccatcaggggaagatcttaaatctaataatcaaaactttcaaaggaatgcgaatgcagaacctgaacaaatgcatattcgtgatacagagaatggggagttccgtttcaaggccaagactcgtactgagccaaagggtgcatttgacagaatggatgagaaggcacatacgtatgcagaggtagatatccagaacagaaaaacctcttttggcaataatgctgaaaagcacaatgatttggaaagcagtcacagacattcagaaaagagcagcaaagaggactttgttaatgagttgaaggctgatcatacaaaagaactcgaatattctagagcagaaaaatataataacgatgacaaatacagcatgtatggaaatattgacaaaaggggtagctgcaaggagggaaaaggttctgatagtgctgcaaagcatgaatccgatacaagggagccacattacagaggtaactctaagcttgatggtgcaaagggagattggaaggatttgccgaaggatagagagagaaatagagatgatagaagggggaaaggaaaggatgaaaaggacgacaggttaaggcagatgacaagtcataacagcagaagttcacggtcacgatcaccaagggggagaagtcgtactagaaaggagaactcacatgttcgagggagtgtttcaagtgatgagccttctgatagtgtgaaaaagagaaagcattattcccataaaaccagcatgtcaccttcacccccaaaatctagaaacagacgaatttcgcggtctccacatagcaagcattctcaccgcaggcattcgccttattcatcggctggcaggtaagagattaatcagttcttcctttgccattatactattactcgtgctgatggttcatcatgaaatttctatttgctttcagatttaggatgcaaactagattagctatcaatctttctgtggctgattatggaaattagattagctgcaaacaaaaataagtaataaggaatttaagaataaaatcgaaccttaggtatttttacagcacattcttataaaaaatattgtttcgatcttactaggaaccttgtttatgaaatgtgatattttatagttctcccagaaaagttgtgttatcttgagaaataaagagattttctgcacaatttctcctgggtaagctgaaaactgcgcatcgtaaatttgtagcctgcagaaaagttttcagtttagttgttttagatttaactgtacttgtcttgaactcttgggtattctggacgggaactgctgattctttcaaatccgggatcttcaattgtctgcaccagctgattcctttaaatctggaatcctctatctgttggcccacttgtacagtaactcgtgatttatacttccttaactgtgtctaatcattgcaggaagaggcggtcgagatcgagaactccggtcaaaaggagatagaaggcatggacagtttatccgacgagatctttgcctaaacattcctctgaaacaaccaaagacatttttgcggttctgctgttgtctatctagtgcgtcttttgctccgacaacataatggtagaacagcattcctacagtgacaaacatgaaggcgaggactggatgtaccttgatataagatgcacattgaactgtatcttgtttgatagatgagctatataactagctcacgcagctggctgtatgatctgtagttcccccgttatctgaattgttcatgtattaggccatgtactgctcagcagagctatgtagttagttgcacttgtatgacttcagcatgcctgttgccagttgtttgtttgtctatgcaggatttttttcccgtttcctacttttttgataaaaataaactgattcctgtgaaatctatatatgatttctctcaaattcctgccattccaaag

SEQ ID NO: 19008 - DNA, 3293 bp, Zea Mays
gcccccactgccataccatcctccccaccccggacacccctaccctccgcagcaccaccaccagtgggccccgccacccgacatgcagcaccagcaccatccgccgctgccgcagccctacgtgtaccaaccgccacccccgcccatggcgatgcagcaacagccgcccccgcctcctgggaacccctggccccctcaccacggcgccgggcagcacccgccgcctacctaccctcctcctccgccggggcaggcttggaccaatcactcatgggctcagaatcatggatatcaaggtcatgacaatgaggaagattgggctacaaaggctaaggcatgggttgctgctaaatctgttatgggaaaccaccagattcaacagcatgccatatccacaagtagaactgaaggtcatcataatggttaccatgatcagtatcagcaaccagctggtctgccaacagaagttacagaagctttgcacccaccagtacctcaatcaagtattgatcatgtgccatttccaatgacaggtcaacagagagaaacaaaccatttattagatagaggtccaatggtgtctccagcaaagaattttggttcattttcgtccacctatgagcaggaggtatcttataattattcttctgctccaggtactgggaataatatgcttcaatatccaaactctcaagcacagccatttccaaccacggcagctgttcaaggtggattctcacagggttgccttagtatgcctgttcccttgacagaacagcctctttttgggcatgaaagacagccaattgatccaagtgaccaacctttggaatttaacagtaggaaagctcctgatttggcagtacatataaatgtcaattccaatatcccagctcctcaaacactagcacctaatcatgatgtagctgcaacctctacacattcatggacgccatctgctacagtagggtacctgcctcgagctcctgtgccaccacaaacagcacagatggatccttctgtgcatgctgcaccactttttggagcagcatctagttctagttatgtttcacctgcagcatttggtgttggtaatgtaacagaagtgttccctacagatccaaacactccttttagtgttgcagataaatcaaagaaacctccagtacctaactggcttcgggaagaacttttaaagaaaaaatcggaaccactgagtgcttcagcgcaaaactcagaaaacttaaatcccatggaagctaatgaggcagtacagacaataggaagacctgaccaaagtgacagcagaagcaatgattccgctaaatccactgaagacgatgacgatgatgaggatgaaattgaagcagctcgaatggcagcaatcaacaaggaaattaagcgtgtgttgactgaggtccttttgaaggttactgatgagctttttgatgagatagcaacaaaagttctaaatgaagacgactcagctgaatccaatgaagccactggtgttttcggatcaaaggagactggtctgggaagatcaagagccaaggcctcggctaaagttgttctccctgctaagtcaacaaatagttctgatcataaagatagtactgggttaagttcccctaaaggtgctcttctcggcctggctagttatgattcagatgatgacgacgatgctgacactgacagcaaggataagatgccaatatcaaatttatcttctaaagataatgctggtgctgtaaatactgaaggtgataaaagcactcttggtaaaagaaatgggaatcacaatgaacagaattcttcacttggaagttctccatcaggggaagatcttaaatctaataatcaaaactttcaaaggaatgcgaatgcagaacctgaacaaatgcatattcgtgatacagagaatggggagttccgtttcaaggccaagactcgtactgagccaaagggtgcatttgacagaatggatgagaaggcacatacgtatgcagaggtagatatccagaacagaaaaacctcttttggcaataatgctgaaaagcacaatgatttggaaagcagtcacagacattcagaaaagagcagcaaagaggactttgttaatgagttgaaggctgatcatacaaaagaactcgaatattctagagcagaaaaatataataacgatgacaaatacagcatgtatggaaatattgacaaaaggggtagctgcaaggagggaaaaggttctgatagtgctgcaaagcatgaatccgatacaagggagccacattacagaggtaactctaagcttgatggtgcaaagggagattggaaggatttgccgaaggatagagagagaaatagagatgatagaagggggaaaggaaaggatgaaaaggacgacaggttaaggcagatgacaagtcataacagcagaagttcacggtcacgatcaccaagggggagaagtcgtactagaaaggagaactcacatgttcgagggagtgtttcaagtgatgagccttctgatagtgtgaaaaagagaaagcattattcccataaaaccagcatgtcaccttcacccccaaaatctagaaacagatattttggatgtgatatgagcatgcaggtatcttctgcgtgaagaaacatcaggttcatatacctcttatccttacacttacccatttagtattatgtttcatctctagacgaatttcgcggtctccacatagcaagcattctcaccgcaggcattcgccttattcatcggctggcaggaagaggcggtcgagatcgagaactccggtcaaaaggagatagaaggcatggacagtttatccgacgagatctttgcctaaacattcctctgaaacaaccaaagacatttttgcggttctgctgttgtctatctagtgcgtcttttgctccgacaacataatggtagaacagcattcctacagtgacaaacatgaaggcgaggactggatgtaccttgatataagatgcacattgaactgtatcttgtttgatagatgagctatataactagctcacgcagctggctgtatgatctgtagttcccccgttatctgaattgttcatgtattaggccatgtactgctcagcagagctatgtagttagttgcacttgtatgacttcagcatgcctgttgccagttgtttgtttgtctatgcaggatttttttcccgtttcctacttttttgataaaaataaactgattcctgtgaaatctatatatgatttctctcaaattcctgccattccaaag

SEQ ID NO: 19009 - DNA, 3881 bp, Zea Mays
gcccccactgccataccatcctccccaccccggacacccctaccctccgcagcaccaccaccagtgggccccgccacccgacatgcagcaccagcaccatccgccgctgccgcagccctacgtgtaccaaccgccacccccgcccatggcgatgcagcaacagccgcccccgcctcctgggaacccctggccccctcaccacggcgccgggcagcacccgccgcctacctaccctcctcctccgccggggcaggcttggaccaatcactcatgggctcagaatcatggatatcaaggtcatgacaatgaggaagattgggctacaaaggctaaggcatgggttgctgctaaatctgttatgggaaaccaccagattcaacagcatgccatatccacaagtagaactgaaggtcatcataatggttaccatgatcagtatcagcaaccagctggtctgccaacagaagttacagaagctttgcacccaccagtacctcaatcaagtattgatcatgtgccatttccaatgacaggtcaacagagagaaacaaaccatttattagatagaggtccaatggtgtctccagcaaagaattttggttcattttcgtccacctatgagcaggaggtatcttataattattcttctgctccaggtactgggaataatatgcttcaatatccaaactctcaagcacagccatttccaaccacggcagctgttcaaggtggattctcacagggttgccttagtatgcctgttcccttgacagaacagcctctttttgggcatgaaagacagccaattgatccaagtgaccaacctttggaatttaacagtaggaaagctcctgatttggcagtacatataaatgtcaattccaatatcccagctcctcaaacactagcacctaatcatgatgtagctgcaacctctacacattcatggacgccatctgctacagtagggtacctgcctcgagctcctgtgccaccacaaacagcacagatggatccttctgtgcatgctgcaccactttttggagcagcatctagttctagttatgtttcacctgcagcatttggtgttggtaatgtaacagaagtgttccctacagatccaaacactccttttagtgttgcagataaatcaaagaaacctccagtacctaactggcttcgggaagaacttttaaagaaaaaatcggaaccactgagtgcttcagcgcaaaactcagaaaacttaaatcccatggaagctaatgaggcagtacagacaataggaagacctgaccaaagtgacagcagaagcaatgattccgctaaatccactgaagacgatgacgatgatgaggatgaaattgaagcagctcgaatggcagcaatcaacaaggaaattaagcgtgtgttgactgaggtccttttgaaggttactgatgagctttttgatgagatagcaacaaaagttctaaatgaagacgactcagctgaatccaatgaagccactggtgttttcggatcaaaggagactggtctgggaagatcaagagccaaggcctcggctaaagttgttctccctgctaagtcaacaaatagttctgatcataaagatagtactgggttaagttcccctaaaggtgctcttctcggcctggctagttatgattcagatgatgacgacgatgctgacactgacagcaaggataagatgccaatatcaaatttatcttctaaagataatgctggtgctgtaaatactgaaggtgataaaagcactcttggtaaaagaaatgggaatcacaatgaacagaattcttcacttggaagttctccatcaggggaagatcttaaatctaataatcaaaactttcaaaggaatgcgaatgcagaacctgaacaaatgcatattcgtgatacagagaatggggagttccgtttcaaggccaagactcgtactgagccaaagggtgcatttgacagaatggatgagaaggcacatacgtatgcagaggtagatatccagaacagaaaaacctcttttggcaataatgctgaaaagcacaatgatttggaaagcagtcacagacattcagaaaagagcagcaaagaggactttgttaatgagttgaaggctgatcatacaaaagaactcgaatattctagagcagaaaaatataataacgatgacaaatacagcatgtatggaaatattgacaaaaggggtagctgcaaggagggaaaaggttctgatagtgctgcaaagcatgaatccgatacaagggagccacattacagaggtaactctaagcttgatggtgcaaagggagattggaaggatttgccgaaggatagagagagaaatagagatgatagaagggggaaaggaaaggatgaaaaggacgacaggttaaggcagatgacaagtcataacagcagaagttcacggtcacgatcaccaagggggagaagtcgtactagaaaggagaactcacatgttcgagggagtgtttcaagtgatgagccttctgatagtgtgaaaaagagaaagcattattcccataaaaccagcatgtcaccttcacccccaaaatctagaaacagatattttggatgtgatatgagcatgcaggtatcttctgcgtgaagaaacatcaggttcatatacctcttatccttacacttacccatttagtattatgtttcatctctagacgaatttcgcggtctccacatagcaagcattctcaccgcaggcattcgccttattcatcggctggcaggtaagagattaatcagttcttcctttgccattatactattactcgtgctgatggttcatcatgaaatttctatttgctttcagatttaggatgcaaactagattagctatcaatctttctgtggctgattatggaaattagattagctgcaaacaaaaataagtaataaggaatttaagaataaaatcgaaccttaggtatttttacagcacattcttataaaaaatattgtttcgatcttactaggaaccttgtttatgaaatgtgatattttatagttctcccagaaaagttgtgttatcttgagaaataaagagattttctgcacaatttctcctgggtaagctgaaaactgcgcatcgtaaatttgtagcctgcagaaaagttttcagtttagttgttttagatttaactgtacttgtcttgaactcttgggtattctggacgggaactgctgattctttcaaatccgggatcttcaattgtctgcaccagctgattcctttaaatctggaatcctctatctgttggcccacttgtacagtaactcgtgatttatacttccttaactgtgtctaatcattgcaggaagaggcggtcgagatcgagaactccggtcaaaaggagatagaaggcatggacagtttatccgacgagatctttgcctaaacattcctctgaaacaaccaaagacatttttgcggttctgctgttgtctatctagtgcgtcttttgctccgacaacataatggtagaacagcattcctacagtgacaaacatgaaggcgaggactggatgtaccttgatataagatgcacattgaactgtatcttgtttgatagatgagctatataactagctcacgcagctggctgtatgatctgtagttcccccgttatctgaattgttcatgtattaggccatgtactgctcagcagagctatgtagttagttgcacttgtatgacttcagcatgcctgttgccagttgtttgtttgtctatgcaggatttttttcccgtttcctacttttttgataaaaataaactgattcctgtgaaatctatatatgatttctctcaaattcctgccattccaaag

SEQ ID NO: 19010 - DNA, 4999 bp, Zea Mays
gcccccactgccataccatcctccccaccccggacacccctaccctccgcagcaccaccaccagtgggccccgccacccgacatgcagcaccagcaccatccgccgctgccgcagccctacgtgtaccaaccgccacccccgcccatggcgatgcagcaacagccgcccccgcctcctgggaacccctggccccctcaccacggcgccgggcagcacccgccgcctacctaccctcctcctccgccggggcaggcttggaccaatcactcatgggctcagaatcatggatatcaaggtttactcttatatgtacctctgtttctttcatatataattttgcaaatcacgacgagtttagtttgatatgctatgttgtggaatttctactaaacattctatcctaatgcttattgacgtgggagtttttttttgctaaagattctattatacacacatttcaaccttgtttgtgaaaacacaatatctcaatactggtgtataacacatttctgaaactgcaaatatatatccatcgtggccatgttaatactggtgttgttattcaagtttaatcttagttggaaatttctttgcaccacttgattgtggtgctactgctatctgtcatgtattagtgactacacaggagatgtttactttaaaatatttagcctaacagatttactgtcgtgtaattcgctttctgtatacaaatctcttgagaactatttgttgataaatcactattaagtgattggttttgcatactcttgacgtgactgttattttcttatcttattatgagtgctttcttacataataagttcttggtagtttttggtgcgatactttgtttttatactggactaaaacgttttcttgtttgtcgatggaccagttgttcatttggggggccttgtcattaaatctatttaggctactctcaatgaaataaactttaaacatagcgtaagatttactatagtcaatcaactttagagagacttctgaagcagaataaatttcttgcgccgataaatcaattgttagtatgacgatagtttctctatttccttaaaaattaaataatggaaggtcatgacaatgaggaagattgggctacaaaggctaaggcatgggttgctgctaaatctgttatgggaaaccaccagattcaacagcatgccatatccacaagtagaactgaaggtcatcataatggttaccatgatcagtatcagcaaccagctggtctgccaacagaagttacagaagctttgcacccaccagtacctcaatcaagtattgatcatgtgccatttccaatgacaggtcaacagagagaaacaaaccatttattaggtaaagtatcttattgcccttgatctatatattttacttatggatgtgtaagtttcagaatggagctgaagattatattgcagatagaggtccaatggtgtctccagcaaagaattttggttcattttcgtccacctatgagcaggaggtatcttataattattcttctgctccaggtatgccttgcttggcaatttaatttctttgcgcagcctgaatcataaaaggctggtcgctctgggtatgttaccagattcagttgtggaaagactttaaatctagagcgtcatttattttagaatagaaagtctggtacacttaacctatctctgtgatacttagttagcagtacctgttgtgagtactcattgcgtcccatttgaagcaccgttggttatatctattgtgtttgcctctatcaaatggagggaagaggaagacaaagacacgtattagtggttaaatgtatcaagatgttgacttaatggatcttttcattactgactataattgtatatcaaggattcaatagttactagcggtggtatatcatgtaaatgttatgtattgtccttaatgctgaaaaaaggacagacctagtgctggcggttcccacatgaggggtctgtggaaggaataatcgaggcaagccttgctcctgcattttgcacattcgcagagaatctgtgtcgaacccaggaccttttagctcagcaggaaggtttctaacagctgccagacccgtccttaatgctgaaaataagaagaaaaaactaactggtgcaatatatttcattgatggtgtttttactgtaaaataaagtgcagaagtgtacatttctttaaatgatcacttctacaatgtatttgagcattcatccttttctgctatatatagagctgaactcatttgtttgtcttgcataaagtacaatgatcatgatgagtaatattttttgtaaagaaaattctgactttgactttaccatgtaataataggtactgggaataatatgcttcaatatccaaactctcaagcacagccatttccaaccacggcagctgttcaaggtggattctcacagggttgccttagtatgcctgttcccttgacagaacagcctctttttgggcatgaaagacagccaattgatccaagtgaccaacctttggaatttaacagtaggaaagctcctgatttggcagtacatataaatgtcaattccaatatcccagctcctcaaacactagcacctaatcatgatgtagctgcaacctctacacattcatggacgccatctgctacagtagggtacctgcctcgagctcctgtgccaccacaaacagcacagatggatccttctgtgcatgctgcaccactttttggagcagcatctagttctagttatgtttcacctgcagcatttggtgttggtaatgtaacagaagtgttccctacagatccaaacactccttttagtgttgcagataaatcaaagaaacctccagtacctaactggcttcgggaagaacttttaaagaaaaaatcggaaccactgagtgcttcagcgcaaaactcagaaaacttaaatcccatggaagctaatgaggcagtacagacaataggaagacctgaccaaagtgacagcagaagcaatgattccgctaaatccactgaagacgatgacgatgatgaggatgaaattgaagcagctcgaatggcagcaatcaacaaggaaattaagcgtgtgttgactgaggtccttttgaaggttactgatgagctttttgatgagatagcaacaaaagttctaaatgaagacgactcagctgaatccaatgaagccactggtgttttcggatcaaaggagactggtctgggaagatcaagagccaaggcctcggctaaagttgttctccctgctaagtcaacaaatagttctgatcataaagatagtactgggttaagttcccctaaaggtgctcttctcggcctggctagttatgattcagatgatgacgacgatgctgacactgacagcaaggataagatgccaatatcaaatttatcttctaaagataatgctggtgctgtaaatactgaaggtgataaaagcactcttggtaaaagaaatgggaatcacaatgaacagaattcttcacttggaagttctccatcaggggaagatcttaaatctaataatcaaaactttcaaaggaatgcgaatgcagaacctgaacaaatgcatattcgtgatacagagaatggggagttccgtttcaaggccaagactcgtactgagccaaagggtgcatttgacagaatggatgagaaggcacatacgtatgcagaggtagatatccagaacagaaaaacctcttttggcaataatgctgaaaagcacaatgatttggaaagcagtcacagacattcagaaaagagcagcaaagaggactttgttaatgagttgaaggctgatcatacaaaagaactcgaatattctagagcagaaaaatataataacgatgacaaatacagcatgtatggaaatattgacaaaaggggtagctgcaaggagggaaaaggttctgatagtgctgcaaagcatgaatccgatacaagggagccacattacagaggtaactctaagcttgatggtgcaaagggagattggaaggatttgccgaaggatagagagagaaatagagatgatagaagggggaaaggaaaggatgaaaaggacgacaggttaaggcagatgacaagtcataacagcagaagttcacggtcacgatcaccaagggggagaagtcgtactagaaaggagaactcacatgttcgagggagtgtttcaagtgatgagccttctgatagtgtgaaaaagagaaagcattattcccataaaaccagcatgtcaccttcacccccaaaatctagaaacagatattttggatgtgatatgagcatgcaggtatcttctgcgtgaagaaacatcaggttcatatacctcttatccttacacttacccatttagtattatgtttcatctctagacgaatttcgcggtctccacatagcaagcattctcaccgcaggcattcgccttattcatcggctggcaggaagaggcggtcgagatcgagaactccggtcaaaaggagatagaaggcatggacagtttatccgacgagatctttgcctaaacattcctctgaaacaaccaaagacatttttgcggttctgctgttgtctatctagtgcgtcttttgctccgacaacataatggtagaacagcattcctacagtgacaaacatgaaggcgaggactggatgtaccttgatataagatgcacattgaactgtatcttgtttgatagatgagctatataactagctcacgcagctggctgtatgatctgtagttcccccgttatctgaattgttcatgtattaggccatgtactgctcagcagagctatgtagttagttgcacttgtatgacttcagcatgcctgttgccagttgtttgtttgtctatgcaggatttttttcccgtttcctacttttttgataaaaataaactgattcctgtgaaatctatatatgatttctctcaaattcctgccattccaaag

SEQ ID NO: 19011 - DNA, 5763 bp, Zea Mays
gtttactcttatatgtacctctgtttctttcatatataattttgcaaatcacgacgagtttagtttgatatgctatgttgtggaatttctactaaacattctatcctaatgcttattgacgtgggagtttttttttgctaaagattctattatacacacatttcaaccttgtttgtgaaaacacaatatctcaatactggtgtataacacatttctgaaactgcaaatatatatccatcgtggccatgttaatactggtgttgttattcaagtttaatcttagttggaaatttctttgcaccacttgattgtggtgctactgctatctgtcatgtattagtgactacacaggagatgtttactttaaaatatttagcctaacagatttactgtcgtgtaattcgctttctgtatacaaatctcttgagaactatttgttgataaatcactattaagtgattggttttgcatactcttgacgtgactgttattttcttatcttattatgagtgctttcttacataataagttcttggtagtttttggtgcgatactttgtttttatactggactaaaacgttttcttgtttgtcgatggaccagttgttcatttggggggccttgtcattaaatctatttaggctactctcaatgaaataaactttaaacatagcgtaagatttactatagtcaatcaactttagagagacttctgaagcagaataaatttcttgcgccgataaatcaattgttagtatgacgatagtttctctatttccttaaaaattaaataatggaaggtcatgacaatgaggaagattgggctacaaaggctaaggcatgggttgctgctaaatctgttatgggaaaccaccagattcaacagcatgccatatccacaagtagaactgaaggtcatcataatggttaccatgatcagtatcagcaaccagctggtctgccaacagaagttacagaagctttgcacccaccagtacctcaatcaagtattgatcatgtgccatttccaatgacaggtcaacagagagaaacaaaccatttattaggtaaagtatcttattgcccttgatctatatattttacttatggatgtgtaagtttcagaatggagctgaagattatattgcagatagaggtccaatggtgtctccagcaaagaattttggttcattttcgtccacctatgagcaggaggtatcttataattattcttctgctccaggtatgccttgcttggcaatttaatttctttgcgcagcctgaatcataaaaggctggtcgctctgggtatgttaccagattcagttgtggaaagactttaaatctagagcgtcatttattttagaatagaaagtctggtacacttaacctatctctgtgatacttagttagcagtacctgttgtgagtactcattgcgtcccatttgaagcaccgttggttatatctattgtgtttgcctctatcaaatggagggaagaggaagacaaagacacgtattagtggttaaatgtatcaagatgttgacttaatggatcttttcattactgactataattgtatatcaaggattcaatagttactagcggtggtatatcatgtaaatgttatgtattgtccttaatgctgaaaaaaggacagacctagtgctggcggttcccacatgaggggtctgtggaaggaataatcgaggcaagccttgctcctgcattttgcacattcgcagagaatctgtgtcgaacccaggaccttttagctcagcaggaaggtttctaacagctgccagacccgtccttaatgctgaaaataagaagaaaaaactaactggtgcaatatatttcattgatggtgtttttactgtaaaataaagtgcagaagtgtacatttctttaaatgatcacttctacaatgtatttgagcattcatccttttctgctatatatagagctgaactcatttgtttgtcttgcataaagtacaatgatcatgatgagtaatattttttgtaaagaaaattctgactttgactttaccatgtaataataggtactgggaataatatgcttcaatatccaaactctcaagcacagccatttccaaccacggcagctgttcaaggtggattctcacagggttgccttagtatgcctgttcccttgacagaacagcctctttttgggcatgaaagacagccaattgatccaagtgaccaacctttggaatttaacagtaggaaagctcctgatttggcagtacatataaatgtcaattccaatatcccagctcctcaaacactagcacctaatcatgatgtagctgcaacctctacacattcatggacgccatctgctacagtagggtacctgcctcgagctcctgtgccaccacaaacagcacagatggatccttctgtgcatgctgcaccactttttggagcagcatctagttctagttatgtttcacctgcagcatttggtgttggtaatgtaacagaagtgttccctacagatccaaacactccttttagtgttgcagataaatcaaagaaacctccagtacctaactggcttcgggaagaacttttaaagaaaaaatcggaaccactgagtgcttcagcgcaaaactcagaaaacttaaatcccatggaagctaatgaggcagtacagacaataggaagacctgaccaaagtgacagcagaagcaatgattccgctaaatccactgaagacgatgacgatgatgaggatgaaattgaagcagctcgaatggcagcaatcaacaaggaaattaagcgtgtgttgactgaggtccttttgaaggttactgatgagctttttgatgagatagcaacaaaagttctaaatgaagacgactcagctgaatccaatgaagccactggtgttttcggatcaaaggagactggtctgggaagatcaagagccaaggcctcggctaaagttgttctccctgctaagtcaacaaatagttctgatcataaagatagtactgggttaagttcccctaaaggtgctcttctcggcctggctagttatgattcagatgatgacgacgatgctgacactgacagcaaggataagatgccaatatcaaatttatcttctaaagataatgctggtgctgtaaatactgaaggtgataaaagcactcttggtaaaagaaatgggaatcacaatgaacagaattcttcacttggaagttctccatcaggggaagatcttaaatctaataatcaaaactttcaaaggaatgcgaatgcagaacctgaacaaatgcatattcgtgatacagagaatggggagttccgtttcaaggccaagactcgtactgagccaaagggtgcatttgacagaatggatgagaaggcacatacgtatgcagaggtagatatccagaacagaaaaacctcttttggcaataatgctgaaaagcacaatgatttggaaagcagtcacagacattcagaaaagagcagcaaagaggactttgttaatgagttgaaggctgatcatacaaaagaactcgaatattctagagcagaaaaatataataacgatgacaaatacagcatgtatggaaatattgacaaaaggggtagctgcaaggagggaaaaggttctgatagtgctgcaaagcatgaatccgatacaagggagccacattacagaggtaactctaagcttgatggtgcaaagggagattggaaggatttgccgaaggatagagagagaaatagagatgatagaagggggaaaggaaaggatgaaaaggacgacaggttaaggcagatgacaagtcataacagcagaagttcacggtcacgatcaccaagggggagaagtcgtactagaaaggagaactcacatgttcgagggagtgtttcaagtgatgagccttctgatagtgtgaaaaagagaaagcattattcccataaaaccagcatgtcaccttcacccccaaaatctagaaacaggtacactgttcatgttgtctctctataatactagtgttggggtgtgtgtgctgtaatggggttctctccccctttcttattcttctattaatacaaagatgcgcagctctcctgtgtattccagaaaaaaaatactatgctaggaattattcttggattgagagaattttgaatgtggacagccccagtattcatacctattaatatgttttatggttggcattaagttctagtcacctagatttaaagaacacatcagctttttatgttttattatgaatgaagctgtccatgctagatgttcttgtcttcagttctactcattaaagaatgggatttatgtttatcataaggtggtacctggtaacactaaatgcgggtttctgctatatgctaatttgaaccatgctgctgttctttattggatatgtgatggcaagttgttgaatcacatagaaatggtttgttgtagatattttggatgtgatatgagcatgcaggtatcttctgcgtgaagaaacatcaggttcatatacctcttatccttacacttacccatttagtattatgtttcatctctagacgaatttcgcggtctccacatagcaagcattctcaccgcaggcattcgccttattcatcggctggcaggtaagagattaatcagttcttcctttgccattatactattactcgtgctgatggttcatcatgaaatttctatttgctttcagatttaggatgcaaactagattagctatcaatctttctgtggctgattatggaaattagattagctgcaaacaaaaataagtaataaggaatttaagaataaaatcgaaccttaggtatttttacagcacattcttataaaaaatattgtttcgatcttactaggaaccttgtttatgaaatgtgatattttatagttctcccagaaaagttgtgttatcttgagaaataaagagattttctgcacaatttctcctgggtaagctgaaaactgcgcatcgtaaatttgtagcctgcagaaaagttttcagtttagttgttttagatttaactgtacttgtcttgaactcttgggtattctggacgggaactgctgattctttcaaatccgggatcttcaattgtctgcaccagctgattcctttaaatctggaatcctctatctgttggcccacttgtacagtaactcgtgatttatacttccttaactgtgtctaatcattgcaggaagaggcggtcgagatcgagaactccggtcaaaaggagatagaaggcatggacagtttatccgacgagatctttgcctaaacattcctctgaaacaaccaaagacatttttgcggttctgctgttgtctatctagtgcgtcttttgctccgacaacataatggtagaacagcattcctacagtgacaaacatgaaggcgaggactggatgtaccttgatataagatgcacattgaactgtatcttgtttgatagatgagctatataactagctcacgcagctggctgtatgatctgtagttcccccgttatctgaattgttcatgtattaggccatgtactgctcagcagagctatgtagttagttgcacttgtatgacttcagcatgcctgttgccagttgtttgtttgtctatgcaggatttttttcccgtttcctacttttttgataaaaataaactgattcctgtgaaatctatatatgatttctctcaaattcctgccattccaaag

SEQ ID NO: 19012 - DNA, 3687 bp, Zea Mays
gtttactcttatatgtacctctgtttctttcatatataattttgcaaatcacgacgagtttagtttgatatgctatgttgtggaatttctactaaacattctatcctaatgcttattgacgtgggagtttttttttgctaaagattctattatacacacatttcaaccttgtttgtgaaaacacaatatctcaatactggtgtataacacatttctgaaactgcaaatatatatccatcgtggccatgttaatactggtgttgttattcaagtttaatcttagttggaaatttctttgcaccacttgattgtggtgctactgctatctgtcatgtattagtgactacacaggagatgtttactttaaaatatttagcctaacagatttactgtcgtgtaattcgctttctgtatacaaatctcttgagaactatttgttgataaatcactattaagtgattggttttgcatactcttgacgtgactgttattttcttatcttattatgagtgctttcttacataataagttcttggtagtttttggtgcgatactttgtttttatactggactaaaacgttttcttgtttgtcgatggaccagttgttcatttggggggccttgtcattaaatctatttaggctactctcaatgaaataaactttaaacatagcgtaagatttactatagtcaatcaactttagagagacttctgaagcagaataaatttcttgcgccgataaatcaattgttagtatgacgatagtttctctatttccttaaaaattaaataatggaaggtcatgacaatgaggaagattgggctacaaaggctaaggcatgggttgctgctaaatctgttatgggaaaccaccagattcaacagcatgccatatccacaagtagaactgaaggtcatcataatggttaccatgatcagtatcagcaaccagctggtctgccaacagaagttacagaagctttgcacccaccagtacctcaatcaagtattgatcatgtgccatttccaatgacaggtcaacagagagaaacaaaccatttattagatagaggtccaatggtgtctccagcaaagaattttggttcattttcgtccacctatgagcaggaggtatcttataattattcttctgctccaggtactgggaataatatgcttcaatatccaaactctcaagcacagccatttccaaccacggcagctgttcaaggtggattctcacagggttgccttagtatgcctgttcccttgacagaacagcctctttttgggcatgaaagacagccaattgatccaagtgaccaacctttggaatttaacagtaggaaagctcctgatttggcagtacatataaatgtcaattccaatatcccagctcctcaaacactagcacctaatcatgatgtagctgcaacctctacacattcatggacgccatctgctacagtagggtacctgcctcgagctcctgtgccaccacaaacagcacagatggatccttctgtgcatgctgcaccactttttggagcagcatctagttctagttatgtttcacctgcagcatttggtgttggtaatgtaacagaagtgttccctacagatccaaacactccttttagtgttgcagataaatcaaagaaacctccagtacctaactggcttcgggaagaacttttaaagaaaaaatcggaaccactgagtgcttcagcgcaaaactcagaaaacttaaatcccatggaagctaatgaggcagtacagacaataggaagacctgaccaaagtgacagcagaagcaatgattccgctaaatccactgaagacgatgacgatgatgaggatgaaattgaagcagctcgaatggcagcaatcaacaaggaaattaagcgtgtgttgactgaggtccttttgaaggttactgatgagctttttgatgagatagcaacaaaagttctaaatgaagacgactcagctgaatccaatgaagccactggtgttttcggatcaaaggagactggtctgggaagatcaagagccaaggcctcggctaaagttgttctccctgctaagtcaacaaatagttctgatcataaagatagtactgggttaagttcccctaaaggtgctcttctcggcctggctagttatgattcagatgatgacgacgatgctgacactgacagcaaggataagatgccaatatcaaatttatcttctaaagataatgctggtgctgtaaatactgaaggtgataaaagcactcttggtaaaagaaatgggaatcacaatgaacagaattcttcacttggaagttctccatcaggggaagatcttaaatctaataatcaaaactttcaaaggaatgcgaatgcagaacctgaacaaatgcatattcgtgatacagagaatggggagttccgtttcaaggccaagactcgtactgagccaaagggtgcatttgacagaatggatgagaaggcacatacgtatgcagaggtagatatccagaacagaaaaacctcttttggcaataatgctgaaaagcacaatgatttggaaagcagtcacagacattcagaaaagagcagcaaagaggactttgttaatgagttgaaggctgatcatacaaaagaactcgaatattctagagcagaaaaatataataacgatgacaaatacagcatgtatggaaatattgacaaaaggggtagctgcaaggagggaaaaggttctgatagtgctgcaaagcatgaatccgatacaagggagccacattacagaggtaactctaagcttgatggtgcaaagggagattggaaggatttgccgaaggatagagagagaaatagagatgatagaagggggaaaggaaaggatgaaaaggacgacaggttaaggcagatgacaagtcataacagcagaagttcacggtcacgatcaccaagggggagaagtcgtactagaaaggagaactcacatgttcgagggagtgtttcaagtgatgagccttctgatagtgtgaaaaagagaaagcattattcccataaaaccagcatgtcaccttcacccccaaaatctagaaacagacgaatttcgcggtctccacatagcaagcattctcaccgcaggcattcgccttattcatcggctggcaggaagaggcggtcgagatcgagaactccggtcaaaaggagatagaaggcatggacagtttatccgacgagatctttgcctaaacattcctctgaaacaaccaaagacatttttgcggttctgctgttgtctatctagtgcgtcttttgctccgacaacataatggtagaacagcattcctacagtgacaaacatgaaggcgaggactggatgtaccttgatataagatgcacattgaactgtatcttgtttgatagatgagctatataactagctcacgcagctggctgtatgatctgtagttcccccgttatctgaattgttcatgtattaggccatgtactgctcagcagagctatgtagttagttgcacttgtatgacttcagcatgcctgttgccagttgtttgtttgtctatgcaggatttttttcccgtttcctacttttttgataaaaataaactgattcctgtgaaatctatatatgatttctctcaaattcctgccattccaaag

SEQ ID NO: 19013 - DNA, 1793 bp, Zea Mays
atgtggagcggggctcctcgcatggcagaacggctggagctggagcgccaagcaactctcgatgggcacgtgcctcaagatctcgaagccggagtgaacagcggcggcgcacaaggtctgcatcctgtgcgagttcgtcgtcttcctccgactacaggacggtaaaaataatttcctctccgtagatctgggcatgttcccctgttttggcatgcaaccgcaccagtttgctcccagtatatctacatcgatgttgcctcatctttttagattgtttttcatctccctgagcacaacgatgcccattggtaggctttgttcggttcagtagtgcaacactgttgattgtatgcatccgaggagacaaaaattagaaactttgaaaactatatttcaacaaattattgattttttctgactcttacaaatagttgaaagaaatgacctacccaaacaagctttttaaaatttacctgtgctctggtaacaatgtatccaccgtcatttgcaagatttggtgggatggacaacatttggcagcaatacggagacaccaaccaagcttatggtaatgtcacctacaccccaggaattgacttgactctctccccgggaaatgacttgactcggttccaagattcagctgttgtgcatggcccaggtccaattattcaggaaaaccagtcgttcagctctacctcacaagtgcctcaacctgtcaatgatcgaagaaagaagggggttgccaagcgtgagaagaactactccaatttggaggatgaaacattatgctcggcgtacctaaatgtgtcgaaggatccagtggtaggtgtgaaccagccaatgaaatcatactgggcaagaatcactgactacttcaacgagatgaggactactgacgtggagcgcagcagctcctctctccaacatagatggggcgatatctcaagggacaccgcattgttctgcagttactatgctgagattgaacggaagcatcaaagcggtaaaagtgaggacgacaagataaaggatgcactgaaaatgtatgaagggcttcgaagcagcaaattcaaatttttgcattgttggttgatccttagaaaagagcagaagtggtctgaatttctcgccaccacaacatcaagcacctcccaagctcgatcaaaggctgatcccgtgcagcaaggcgacccaacagcaacatccacacctgaggtgaatgtctcagagaaaattgcaaggccaattggtagggacagagcaaagaaacaaaggagcaacaactcatccagctcctctgcttgctttgaaatgcttcaaaagatacaattggaccgctccaggttcgaggaagacatgaaggctgcaagcaaatatgagtcagaagaaatggctgtccggtatgataggaaactggccattcaagaacaacaccttaaacttgtagcagagtcgacgatgatacagaaggagatgttaaggttccaacaaaaagaacgtgaggatcgcgtaatgaccatggacttggacaaggtggctccttgggtacgcgagtactacatcaacgagcagaaggctatagcggcaaaatcacgtcatgaagtgtcaagttctgatgtgtagcttttctatctcaagcgtttatagttgtgtgcctttgttctagttgaaatattagtatttatctatgtatcagtttagatggacaaattaagatatgttctaacagtgttaactgtgtgagttgtatctatttcagttcagtggatcagatgttcggtatgaaatca

SEQ ID NO: 19014 - DNA, 2509 bp, Zea Mays
ctcttctcgctccttccgcttctcgagacttccatggttggcccgtgcagtgcatgcctctcctcgctccctccgcctcgtctctctctgagtcccttcgtctctctgccagctgcttcaccttctgccgctttgatcgtccacttcacttcagcacagtcacgtcgtttattgtcgccttcatcgtctgctccagtgtttggtgatatccatcgctttcttcgtcagctccacttcctcgtcgagttgctgcttgtttcattggggtttctaagttcctcttgcttccttatatatttacacattttaatcttccctgcacttcaatgtgagatgtggaaaggcttgccacagctagatttgtgcatttttatctagtcagctttatttggaaaatacacgccaaaaatgaccactcttttttgggggtcaattcaacattccgcttccctcccactgtttctctctgctcttgaatctacgatgtgtagactttgttattttagtgttttgcaatttcattttcccttgaaaatatagggaacctcattgcattctttttggatcgatggattccgtggcccataaatccctgctcttcaatttacaccctccgtcttcatctgcaacctgcttcgtctaccgttgtttttgtcaggctatgaaaaagtgtcttcggcgtaaaaggtcaatcgccccgcctccagcaaaatgacttcatttttccccgacttttgttacggttagtgctctttgctgctgactcccttgtgtctgttatccaagctacgatttctcccccaaatttaaggtttagggtttatgttacaaaggaaaaaggaaggataccaatgaaaaaaaccctcactgttacttgttgttcgatttaatccctggttcttgtacttcaagccttgaatttgtttggtttctcccccaaatttgaagttcgggactaatgttatagcaaagggaaaaagtaaggaaagcaagacaaaaaatcctccctgttacttggggctagtttggaaactcaaatcccctccaatcccgaaggggattcgaggttcccaaagtagtgtttgatttaatccctggttcttgtagttcaaaccttgaatatgttcgtcttattttgtgtagtccttttccttttttggtccccggcacatgcttcacatgatctgttacaaatttgtggttggtcaatccgttgttccccacgtatattttttaaaacttctttaccttgaagagttcttttctgtcctattttgtttggttttacccacactggtttcggttccctgcttttcctctgttcctgttttcaatcccactcgattatgcccaacttagtttgaattcacagttattttcaatatggtaaggaaatgtttgctacttatatattagatcgcagccacattttcatccacatgctctcacttcgagattttgaccctttttccacgattttcaatacgaaaaggacataggaaagaaacgagtaaaaaagaaggaaacaaattctttcagctacttgctgttcgatttacttccacatctaggattagttgttctttttttccacagcaccccccccggggcatgtctcactggaacttttacaaatttgggtttagggtacataaaaggtatgttttttacaccatcaagttgttgattctttatcactttaaattgctattgatgtgtaaaaagagttgattatgtgttccacataaattgctagaatcctttgtggctacaaaagaattgaatcaattgattatagttttaagctgcttccattcgcactggttgtctgctacatggcgcgtagtgattttacagttacttttcttgaactaagtttaaatgctccgcgtcttatatgtactgtttgtttctgctcttttatcgaagcacgtggagtgatacctctgcacctcagtggctttatcggcgaggcttggttgctgagtcatctacaaagacatggatcagctgaccaagctcgagctaccatcgcctccaaaaaaatgaagcatacccaacttaacaaagagctaccatattctatgggttcaaaaaatgaagacgactagcccaccacgaagcactcgaaggtattggttttttgcaagcattagaagagctccatcactttttaatataaaagccttttgtgtacatatgaaccaactgttggagcatttctaaaactgtattgacttatgcaacctctagaaacacactgttactgcatattggagtacactgcttaaatgctacttgatatatattgtaatttcatttgatattacaaatgcggttagcaaccaaattcagctataaatttcgtaagcatgtggcgccttatccgacaaaaaaacacaaaagagcaaagcaacaacttttgcttacgtcatagcatgtttccgtatgcttatttgcttcataacaactcttatacatgttcatgtacactttctttacattaaac

SEQ ID NO: 19015 - DNA, 2569 bp, Zea Mays
gagacttccatggttggcccgtgcagtgcatgcctctcctcgctccctccgcctcgtctctctctgagtcccttcgtctctctgccagctgcttcaccttctgccgctttgatcgtccacttcacttcagcacagtcacgtcgtttattgtcgccttcatcgtctgctccagtgtttggtgatatccatcgctttcttcgtcagctccacttcctcgtcgagttgctgcttgtttcattggggtttctaagttcctcttgcttccttatatatttacacattttaatcttccctgcacttcaatgtgagatgtggaaaggcttgccacagctagatttgtgcatttttatctagtcagctttatttggaaaatacacgccaaaaatgaccactcttttttgggggtcaattcaacattccgcttccctcccactgtttctctctgctcttgaatctacgatgtgtagactttgttattttagtgttttgcaatttcattttcccttgaaaatatagggaacctcattgcattctttttggatcgatggattccgtggcccataaatccctgctcttcaatttacaccctccgtcttcatctgcaacctgcttcgtctaccgttgtttttgtcaggctatgaaaaagtgtcttcggcgtaaaaggtcaatcgccccgcctccagcaaaatgacttcatttttccccgacttttgttacggttagtgctctttgctgctgactcccttgtgtctgttatccaagctacgatttctcccccaaatttaaggtttagggtttatgttacaaaggaaaaaggaaggataccaatgaaaaaaaccctcactgttacttgttgttcgatttaatccctggttcttgtacttcaagccttgaatttgtttggtttctcccccaaatttgaagttcgggactaatgttatagcaaagggaaaaagtaaggaaagcaagacaaaaaatcctccctgttacttggggctagtttggaaactcaaatcccctccaatcccgaaggggattcgaggttcccaaagtagtgtttgatttaatccctggttcttgtagttcaaaccttgaatatgttcgtcttattttgtgtagtccttttccttttttggtccccggcacatgcttcacatgatctgttacaaatttgtggttggtcaatccgttgttccccacgtatattttttaaaacttctttaccttgaagagttcttttctgtcctattttgtttggttttacccacactggtttcggttccctgcttttcctctgttcctgttttcaatcccactcgattatgcccaacttagtttgaattcacagttattttcaatatggtaaggaaatgtttgctacttatatattagatcgcagccacattttcatccacatgctctcacttcgagattttgaccctttttccacgattttcaatacggtaaggaaatgtttgctacttattccctgttgtccattatccaaagtatggtttttaggccaaatttaaggattactgtttatattacagaaaaggacataggaaagaaacgagtaaaaaagaaggaaacaaattctttcagctacttgctgttcgatttacttccacatctaggattagttgttctttttttccacagcaccccccccggggcatgtctcactggaacttttacaaatttgggtttagggtacataaaaggtatgttttttacaccatcaagttgttgattctttatcactttaaattgctattgatgtgtaaaaagagttgattatgtgttccacataaattgctagaatcctttgtggctacaaaagaattgaatcaattgattatagttttaagctgcttccattcgcactggttgtctgctacatggcgcgtagtgattttacagttacttttcttgaactaagtttaaatgctccgcgtcttatatgtactgtttgtttctgctcttttatcgaagcacgtggagtgatacctctgcacctcagtggctttatcggcgaggcttggttgctgagtcatctacaaagacatggatcagctgaccaagctcgagctaccatcgcctccaaaaaacatacccaacttaacaaagagctaccatattctatgggttcaaaaaatgaagacgactagcccaccacgaagcactcgaaggtattggttttttgcaagcattagaagagctccatcactttttaatataaaagccttttgtgtacatatgaaccaactgttggagcatttctaaaactgtattgacttatgcaacctctagaaacacactgttactgcatattggagtacactgcttaaatgctacttgatatatattgtaatttcatttgatattacaaatgcggttagcaaccaaattcagctataaatttcgtaagcatgtggcgccttatccgacaaaaaaacacaaaagagcaaagcaacaacttttgcttacgtcatagcatgtttccgtatgcttatttgcttcataacaactcttatacatgttcatgtacactttctttacattaaac

SEQ ID NO: 19016 - DNA, 2982 bp, Zea Mays
gagacttccatggttggcccgtgcagtgcatgcctctcctcgctccctccgcctcgtctctctctgagtcccttcgtctctctgccagctgcttcaccttctgccgctttgatcgtccacttcacttcagcacagtcacgtcgtttattgtcgccttcatcgtctgctccagtgtttggtgatatccatcgctttcttcgtcagctccacttcctcgtcgagttgctgcttgtttcattggggtttctaagttcctcttgcttccttatatatttacacattttaatcttccctgcacttcaatgtgagatgtggaaaggcttgccacagctagatttgtgcatttttatctagtcagctttatttggaaaatacacgccaaaaatgaccactcttttttgggggtcaattcaacattccgcttccctcccactgtttctctctgctcttgaatctacgatgtgtagactttgttattttagtgttttgcaatttcattttcccttgaaaatatagggaacctcattgcattctttttggatcgatggattccgtggcccataaatccctgctcttcaatttacaccctccgtcttcatctgcaacctgcttcgtctaccgttgtttttgtcaggctatgaaaaagtgtcttcggcgtaaaaggtcaatcgccccgcctccagcaaaatgacttcatttttccccgacttttgttacggttagtgctctttgctgctgactcccttgtgtctgttatccaagctacgatttctcccccaaatttaaggtttagggtttatgttacaaaggaaaaaggaaggataccaatgaaaaaaaccctcactgttacttgttgttcgatttaatccctggttcttgtacttcaagccttgaatttgtttggtttctcccccaaatttgaagttcgggactaatgttatagcaaagggaaaaagtaaggaaagcaagacaaaaaatcctccctgttacttggggctagtttggaaactcaaatcccctccaatcccgaaggggattcgaggttcccaaagtagtgtttgatttaatccctggttcttgtagttcaaaccttgaatatgttcgtcttattttgtgtagtccttttccttttttggtccccggcacatgcttcacatgatctgttacaaatttgtggttggtcaatccgttgttccccacgtatattttttaaaacttctttaccttgaagagttcttttctgtcctattttgtttggttttacccacactggtttcggttccctgcttttcctctgttcctgttttcaatcccactcgattatgcccaacttagtttgaattcacagttattttcaatatggtaaggaaatgtttgctacttatatattagatcgcagccacattttcatccacatgctctcacttcgagattttgaccctttttccacgattttcaatacgaaaaggacataggaaagaaacgagtaaaaaagaaggaaacaaattctttcagctacttgctgttcgatttacttccacatctaggattagttgttctttttttccacagcaccccccccggggcatgtctcactggaacttttacaaatttgggtttagggtacataaaaggtatgttttttacaccatcaagttgttgattctttatcactttaaattgctattgatgtgtaaaaagagttgattatgtgttccacataaattgctagaatcctttgtggctacaaaagaattgaatcaattgattatagttttaagctgcttccattcgcactggttgtctgctacatggcgcgtagtgattttacagttacttttcttgaactaagtttaaatgctccgcgtcttatatgtactgtttgtttctgctcttttatcgaagcacgtggagtgatacctctgcacctcagtggctttatcggcgaggcttggttgctgaggtaattagcattagttttgatctactttccttcgtgctggttgttcactaatagattaatgtttgatgtcctgttcggcctaggatacttaccagtgtgtctatgtgttccaccaatatactgcattatgcacgcttgctagtttaaagtgtgatttcgtgtacagaacacagtacagagcttcttatttaaaaatatttgtaactttaacaaatcaactcttagatatacaacctaatgaaatatattcaataggctcgatgtgttctagcatattccgatgtgccatgcagtgcagaggtaaattcagtgtacttacatgcttaacttctatatatactaatgaagatagatatctgtatactgttaatgtctctacaacaaatgataaaaacatgttttccaagttaaacacctacaaattcttcggcacaaaagtgctctcccactttggactaccatagtaagatagcaatgtttatcttatcgttcacaagtcatctacaaagacatggatcagctgaccaagctcgagctaccatcgcctccaaaaaaatgaagcatacccaacttaacaaagagctaccatattctatgggttcaaaaaatgaagacgactagcccaccacgaagcactcgaaggtattggttttttgcaagcattagaagagctccatcactttttaatataaaagccttttgtgtacatatgaaccaactgttggagcatttctaaaactgtattgacttatgcaacctctagaaacacactgttactgcatattggagtacactgcttaaatgctacttgatatatattgtaatttcatttgatattacaaatgcggttagcaaccaaattcagctataaatttcgtaagcatgtggcgccttatccgacaaaaaaacacaaaagagcaaagcaacaacttttgcttacgtcatagcatgtttccgtatgcttatttgcttcataacaactcttatacatgttcatgtacactttctttacattaaac

SEQ ID NO: 19017 - DNA, 2012 bp, Zea Mays
ggcccgtgcagtgcatgcctctcctcgctccctccgcctcgtctctctctgagtcccttcgtctctctgccagctgcttcaccttctgccgctttgatcgtccacttcacttcagcacagtcacgtcgtttattgtcgccttcatcgtctgctccagtgtttggtgatatccatcgctttcttcgtcagctccacttcctcgtcgagttgctgcttgtttcattggggtttctaagttcctcttgcttccttatatatttacacattttaatcttccctgcacttcaatgtgagatgtggaaaggcttgccacagctagatttgtgcatttttatctagtcagctttatttggaaaatacacgccaaaaatgaccactcttttttgggggtcaattcaacattccgcttccctcccactgtttctctctgctcttgaatctacgatgtgtagactttgttattttagtgttttgcaatttcattttcccttgaaaatatagggaacctcattgcattctttttggatcgatggattccgtggcccataaatccctgctcttcaatttacaccctccgtcttcatctgcaacctgcttcgtctaccgttgtttttgtcaggctatgaaaaaggtttgttttctttgtccctgatgctttgtgcttctaccagatctagttccttcagctagatttgccagtcgcttagatttttggatttgttcatcgccttaaactacaaccgcttttcgtctccgtcttctagtgtcttcggcgtaaaaggtcaatcgccccgcctccagcaaaatgacttcatttttccccgacttttgttacgccacattttcatccacatgctctcacttcgagattttgaccctttttccacgattttcaatacggtaaggaaatgtttgctacttattccctgttgtccattatccaaagtatggtttttaggccaaatttaaggattactgtttatattacagaaaaggacataggaaagaaacgagtaaaaaagaaggaaacaaattctttcagctacttgctgttcgatttacttccacatctaggattagttgttctttttttccacagcaccccccccggggcatgtctcactggaacttttacaaatttgggtttagggtacataaaaggtatgttttttacaccatcaagttgttgattctttatcactttaaattgctattgatgtgtaaaaagagttgattatgtgttccacataaattgctagaatcctttgtggctacaaaagaattgaatcaattgattatagttttaagctgcttccattcgcactggttgtctgctacatggcgcgtagtgattttacagttacttttcttgaactaagtttaaatgctccgcgtcttatatgtactgtttgtttctgctcttttatcgaagcacgtggagtgatacctctgcacctcagtggctttatcggcgaggcttggttgctgagtcatctacaaagacatggatcagctgaccaagctcgagctaccatcgcctccaaaaaaatgaagcatacccaacttaacaaagagctaccatattctatgggttcaaaaaatgaagacgactagcccaccacgaagcactcgaaggtattggttttttgcaagcattagaagagctccatcactttttaatataaaagccttttgtgtacatatgaaccaactgttggagcatttctaaaactgtattgacttatgcaacctctagaaacacactgttactgcatattggagtacactgcttaaatgctacttgatatatattgtaatttcatttgatattacaaatgcggttagcaaccaaattcagctataaatttcgtaagcatgtggcgccttatccgacaaaaaaacacaaaagagcaaagcaacaacttttgcttacgtcatagcatgtttccgtatgcttatttgcttcataacaactcttatacatgttcatgtacactttctttacattaaac

SEQ ID NO: 19018 - DNA, 2019 bp, Zea Mays
ggcccgtgcagtgcatgcctctcctcgctccctccgcctcgtctctctctgagtcccttcgtctctctgccagctgcttcaccttctgccgctttgatcgtccacttcacttcagcacagtcacgtcgtttattgtcgccttcatcgtctgctccagtgtttggtgatatccatcgctttcttcgtcagctccacttcctcgtcgagttgctgcttgtttcattggggtttctaagttcctcttgcttccttatatatttacacattttaatcttccctgcacttcaatgtgagatgtggaaaggcttgccacagctagatttgtgcatttttatctagtcagctttatttggaaaatacacgccaaaaatgaccactcttttttgggggtcaattcaacattccgcttccctcccactgtttctctctgctcttgaatctacgatgtgtagactttgttattttagtgttttgcaatttcattttcccttgaaaatatagggaacctcattgcattctttttggatcgatggattccgtggcccataaatccctgctcttcaatttacaccctccgtcttcatctgcaacctgcttcgtctaccgttgtttttgtcaggctatgaaaaaggtttgttttctttgtccctgatgctttgtgcttctaccagatctagttccttcagctagatttgccagtcgcttagatttttggatttgttcatcgccttaaactacaaccgcttttcgtctccgtcttctagtgtcttcggcgtaaaaggtcaatcgccccgcctccagcaaaatgacttcatttttccccgacttttgttacgatcgcagccacattttcatccacatgctctcacttcgagattttgaccctttttccacgattttcaatacggtaaggaaatgtttgctacttattccctgttgtccattatccaaagtatggtttttaggccaaatttaaggattactgtttatattacagaaaaggacataggaaagaaacgagtaaaaaagaaggaaacaaattctttcagctacttgctgttcgatttacttccacatctaggattagttgttctttttttccacagcaccccccccggggcatgtctcactggaacttttacaaatttgggtttagggtacataaaaggtatgttttttacaccatcaagttgttgattctttatcactttaaattgctattgatgtgtaaaaagagttgattatgtgttccacataaattgctagaatcctttgtggctacaaaagaattgaatcaattgattatagttttaagctgcttccattcgcactggttgtctgctacatggcgcgtagtgattttacagttacttttcttgaactaagtttaaatgctccgcgtcttatatgtactgtttgtttctgctcttttatcgaagcacgtggagtgatacctctgcacctcagtggctttatcggcgaggcttggttgctgagtcatctacaaagacatggatcagctgaccaagctcgagctaccatcgcctccaaaaaaatgaagcatacccaacttaacaaagagctaccatattctatgggttcaaaaaatgaagacgactagcccaccacgaagcactcgaaggtattggttttttgcaagcattagaagagctccatcactttttaatataaaagccttttgtgtacatatgaaccaactgttggagcatttctaaaactgtattgacttatgcaacctctagaaacacactgttactgcatattggagtacactgcttaaatgctacttgatatatattgtaatttcatttgatattacaaatgcggttagcaaccaaattcagctataaatttcgtaagcatgtggcgccttatccgacaaaaaaacacaaaagagcaaagcaacaacttttgcttacgtcatagcatgtttccgtatgcttatttgcttcataacaactcttatacatgttcatgtacactttctttacattaaac

SEQ ID NO: 19019 - DNA, 1283 bp, Zea Mays
ggcccgtgcagtgcatgcctctcctcgctccctccgcctcgtctctctctgagtcccttcgtctctctgccagctgcttcaccttctgccgctttgatcgtccacttcacttcagcacagtcacgtcgtttattgtcgccttcatcgtctgctccagtgtttggtgatatccatcgctttcttcgtcagctccacttcctcgtcgagttgctgcttgtttcattggggtttctaagttcctcttgcttccttatatatttacacattttaatcttccctgcacttcaatgtgagatgtggaaaggcttgccacagctagatttgtgcatttttatctagtcagctttatttggaaaatacacgccaaaaatgaccactcttttttgggggtcaattcaacattccgcttccctcccactgtttctctctgctcttgaatctacgatgtgtagactttgttattttagtgttttgcaatttcattttcccttgaaaatatagggaacctcattgcattctttttggatcgatggattccgtggcccataaatccctgctcttcaatttacaccctccgtcttcatctgcaacctgcttcgtctaccgttgtttttgtcaggctatgaaaaagtgtcttcggcgtaaaaggtcaatcgccccgcctccagcaaaatgacttcatttttccccgacttttgttacgcacgtggagtgatacctctgcacctcagtggctttatcggcgaggcttggttgctgagtcatctacaaagacatggatcagctgaccaagctcgagctaccatcgcctccaaaaaaatgaagcatacccaacttaacaaagagctaccatattctatgggttcaaaaaatgaagacgactagcccaccacgaagcactcgaaggtattggttttttgcaagcattagaagagctccatcactttttaatataaaagccttttgtgtacatatgaaccaactgttggagcatttctaaaactgtattgacttatgcaacctctagaaacacactgttactgcatattggagtacactgcttaaatgctacttgatatatattgtaatttcatttgatattacaaatgcggttagcaaccaaattcagctataaatttcgtaagcatgtggcgccttatccgacaaaaaaacacaaaagagcaaagcaacaacttttgcttacgtcatagcatgtttccgtatgcttatttgcttcataacaactcttatacatgttcatgtacactttctttacattaaac

SEQ ID NO: 19020 - DNA, 2028 bp, Zea Mays
ggcccgtgcagtgcatgcctctcctcgctccctccgcctcgtctctctctgagtcccttcgtctctctgccagctgcttcaccttctgccgctttgatcgtccacttcacttcagcacagtcacgtcgtttattgtcgccttcatcgtctgctccagtgtttggtgatatccatcgctttcttcgtcagctccacttcctcgtcgagttgctgcttgtttcattggggtttctaagttcctcttgcttccttatatatttacacattttaatcttccctgcacttcaatgtgagatgtggaaaggcttgccacagctagatttgtgcatttttatctagtcagctttatttggaaaatacacgccaaaaatgaccactcttttttgggggtcaattcaacattccgcttccctcccactgtttctctctgctcttgaatctacgatgtgtagactttgttattttagtgttttgcaatttcattttcccttgaaaatatagggaacctcattgcattctttttggatcgatggattccgtggcccataaatccctgctcttcaatttacaccctccgtcttcatctgcaacctgcttcgtctaccgttgtttttgtcaggctatgaaaaagtgtcttcggcgtaaaaggtcaatcgccccgcctccagcaaaatgacttcatttttccccgacttttgttacggttagtgctctttgctgctgactcccttgtgtctgttatccaagctacgatttctcccccaaatttaaggtttagggtttatgttacaaaggaaaaaggaaggataccaatgaaaaaaaccctcactgttacttgttgttcgatttaatccctggttcttgtacttcaagccttgaatttgtttggtttctcccccaaatttgaagttcgggactaatgttatagcaaagggaaaaagtaaggaaagcaagacaaaaaatcctccctgttacttggggctagtttggaaactcaaatcccctccaatcccgaaggggattcgaggttcccaaagtagtgtttgatttaatccctggttcttgtagttcaaaccttgaatatgttcgtcttattttgtgtagtccttttccttttttggtccccggcacatgcttcacatgatctgttacaaatttgtggttggtcaatccgttgttccccacgtatattttttaaaacttctttaccttgaagagttcttttctgtcctattttgtttggttttacccacactggtttcggttccctgcttttcctctgttcctgttttcaatcccactcgattatgcccaacttagtttgaattcacagttattttcaatatggtaaggaaatgtttgctacttatatattagatcgcagccacattttcatccacatgctctcacttcgagattttgaccctttttccacgattttcaatacgcacgtggagtgatacctctgcacctcagtggctttatcggcgaggcttggttgctgagtcatctacaaagacatggatcagctgaccaagctcgagctaccatcgcctccaaaaaaatgaagcatacccaacttaacaaagagctaccatattctatgggttcaaaaaatgaagacgactagcccaccacgaagcactcgaaggtattggttttttgcaagcattagaagagctccatcactttttaatataaaagccttttgtgtacatatgaaccaactgttggagcatttctaaaactgtattgacttatgcaacctctagaaacacactgttactgcatattggagtacactgcttaaatgctacttgatatatattgtaatttcatttgatattacaaatgcggttagcaaccaaattcagctataaatttcgtaagcatgtggcgccttatccgacaaaaaaacacaaaagagcaaagcaacaacttttgcttacgtcatagcatgtttccgtatgcttatttgcttcataacaactcttatacatgttcatgtacactttctttacattaaac

SEQ ID NO: 19021 - DNA, 2786 bp, Zea Mays
ggcccgtgcagtgcatgcctctcctcgctccctccgcctcgtctctctctgagtcccttcgtctctctgccagctgcttcaccttctgccgctttgatcgtccacttcacttcagcacagtcacgtcgtttattgtcgccttcatcgtctgctccagtgtttggtgatatccatcgctttcttcgtcagctccacttcctcgtcgagttgctgcttgtttcattggggtttctaagttcctcttgcttccttatatatttacacattttaatcttccctgcacttcaatgtgagatgtggaaaggcttgccacagctagatttgtgcatttttatctagtcagctttatttggaaaatacacgccaaaaatgaccactcttttttgggggtcaattcaacattccgcttccctcccactgtttctctctgctcttgaatctacgatgtgtagactttgttattttagtgttttgcaatttcattttcccttgaaaatatagggaacctcattgcattctttttggatcgatggattccgtggcccataaatccctgctcttcaatttacaccctccgtcttcatctgcaacctgcttcgtctaccgttgtttttgtcaggctatgaaaaagtgtcttcggcgtaaaaggtcaatcgccccgcctccagcaaaatgacttcatttttccccgacttttgttacggttagtgctctttgctgctgactcccttgtgtctgttatccaagctacgatttctcccccaaatttaaggtttagggtttatgttacaaaggaaaaaggaaggataccaatgaaaaaaaccctcactgttacttgttgttcgatttaatccctggttcttgtacttcaagccttgaatttgtttggtttctcccccaaatttgaagttcgggactaatgttatagcaaagggaaaaagtaaggaaagcaagacaaaaaatcctccctgttacttggggctagtttggaaactcaaatcccctccaatcccgaaggggattcgaggttcccaaagtagtgtttgatttaatccctggttcttgtagttcaaaccttgaatatgttcgtcttattttgtgtagtccttttccttttttggtccccggcacatgcttcacatgatctgttacaaatttgtggttggtcaatccgttgttccccacgtatattttttaaaacttctttaccttgaagagttcttttctgtcctattttgtttggttttacccacactggtttcggttccctgcttttcctctgttcctgttttcaatcccactcgattatgcccaacttagtttgaattcacagttattttcaatatggtaaggaaatgtttgctacttatatattagatcgcagccacattttcatccacatgctctcacttcgagattttgaccctttttccacgattttcaatacggtaaggaaatgtttgctacttattccctgttgtccattatccaaagtatggtttttaggccaaatttaaggattactgtttatattacagaaaaggacataggaaagaaacgagtaaaaaagaaggaaacaaattctttcagctacttgctgttcgatttacttccacatctaggattagttgttctttttttccacagcaccccccccggggcatgtctcactggaacttttacaaatttgggtttagggtacataaaagcacgtggagtgatacctctgcacctcagtggctttatcggcgaggcttggttgctgaggtaattagcattagttttgatctactttccttcgtgctggttgttcactaatagattaatgtttgatgtcctgttcggcctaggatacttaccagtgtgtctatgtgttccaccaatatactgcattatgcacgcttgctagtttaaagtgtgatttcgtgtacagaacacagtacagagcttcttatttaaaaatatttgtaactttaacaaatcaactcttagatatacaacctaatgaaatatattcaataggctcgatgtgttctagcatattccgatgtgccatgcagtgcagaggtaaattcagtgtacttacatgcttaacttctatatatactaatgaagatagatatctgtatactgttaatgtctctacaacaaatgataaaaacatgttttccaagttaaacacctacaaattcttcggcacaaaagtgctctcccactttggactaccatagtaagatagcaatgtttatcttatcgttcacaagtcatctacaaagacatggatcagctgaccaagctcgagctaccatcgcctccaaaaaaatgaagcatacccaacttaacaaagagctaccatattctatgggttcaaaaaatgaagacgactagcccaccacgaagcactcgaaggtattggttttttgcaagcattagaagagctccatcactttttaatataaaagccttttgtgtacatatgaaccaactgttggagcatttctaaaactgtattgacttatgcaacctctagaaacacactgttactgcatattggagtacactgcttaaatgctacttgatatatattgtaatttcatttgatattacaaatgcggttagcaaccaaattcagctataaatttcgtaagcatgtggcgccttatccgacaaaaaaacacaaaagagcaaagcaacaacttttgcttacgtcatagcatgtttccgtatgcttatttgcttcataacaactcttatacatgttcatgtacactttctttacattaaac

SEQ ID NO: 19022 - DNA, 2802 bp, Zea Mays
ggcccgtgcagtgcatgcctctcctcgctccctccgcctcgtctctctctgagtcccttcgtctctctgccagctgcttcaccttctgccgctttgatcgtccacttcacttcagcacagtcacgtcgtttattgtcgccttcatcgtctgctccagtgtttggtgatatccatcgctttcttcgtcagctccacttcctcgtcgagttgctgcttgtttcattggggtttctaagttcctcttgcttccttatatatttacacattttaatcttccctgcacttcaatgtgagatgtggaaaggcttgccacagctagatttgtgcatttttatctagtcagctttatttggaaaatacacgccaaaaatgaccactcttttttgggggtcaattcaacattccgcttccctcccactgtttctctctgctcttgaatctacgatgtgtagactttgttattttagtgttttgcaatttcattttcccttgaaaatatagggaacctcattgcattctttttggatcgatggattccgtggcccataaatccctgctcttcaatttacaccctccgtcttcatctgcaacctgcttcgtctaccgttgtttttgtcaggctatgaaaaagtgtcttcggcgtaaaaggtcaatcgccccgcctccagcaaaatgacttcatttttccccgacttttgttacggttagtgctctttgctgctgactcccttgtgtctgttatccaagctacgatttctcccccaaatttaaggtttagggtttatgttacaaaggaaaaaggaaggataccaatgaaaaaaaccctcactgttacttgttgttcgatttaatccctggttcttgtacttcaagccttgaatttgtttggtttctcccccaaatttgaagttcgggactaatgttatagcaaagggaaaaagtaaggaaagcaagacaaaaaatcctccctgttacttggggctagtttggaaactcaaatcccctccaatcccgaaggggattcgaggttcccaaagtagtgtttgatttaatccctggttcttgtagttcaaaccttgaatatgttcgtcttattttgtgtagtccttttccttttttggtccccggcacatgcttcacatgatctgttacaaatttgtggttggtcaatccgttgttccccacgtatattttttaaaacttctttaccttgaagagttcttttctgtcctattttgtttggttttacccacactggtttcggttccctgcttttcctctgttcctgttttcaatcccactcgattatgcccaacttagtttgaattcacagttattttcaatatggtaaggaaatgtttgctacttatatattagatcgcagccacattttcatccacatgctctcacttcgagattttgaccctttttccacgattttcaatacggtaaggaaatgtttgctacttattccctgttgtccattatccaaagtatggtttttaggccaaatttaaggattactgtttatattacagaaaaggacataggaaagaaacgagtaaaaaagaaggaaacaaattctttcagctacttgctgttcgatttacttccacatctaggattagttgttctttttttccacagcaccccccccggggcatgtctcactggaacttttacaaatttgggtttagggtacataaaaggtatgttttttacaccatcaagttgttgattctttatcactttaaattgctattgatgtgtaaaaagagttgattatgtgttccacataaattgctagaatcctttgtggctacaaaagaattgaatcaattgattatagttttaagctgcttccattcgcactggttgtctgctacatggcgcgtagtgattttacagttacttttcttgaactaagtttaaatgctccgcgtcttatatgtactgtttgtttctgctcttttatcgaagcacgtggagtgatacctctgcacctcagtggctttatcggcgaggcttggttgctgaggctcgatgtgttctagcatattccgatgtgccatgcagtgcagaggtaaattcagtgtacttacatgcttaacttctatatatactaatgaagatagatatctgtatactgttaatgtctctacaacaaatgataaaaacatgttttccaagttaaacacctacaaattcttcggcacaaaagtgctctcccactttggactaccatagtaagatagcaatgtttatcttatcgttcacaagtcatctacaaagacatggatcagctgaccaagctcgagctaccatcgcctccaaaaaaatgaagcatacccaacttaacaaagagctaccatattctatgggttcaaaaaatgaagacgactagcccaccacgaagcactcgaaggtattggttttttgcaagcattagaagagctccatcactttttaatataaaagccttttgtgtacatatgaaccaactgttggagcatttctaaaactgtattgacttatgcaacctctagaaacacactgttactgcatattggagtacactgcttaaatgctacttgatatatattgtaatttcatttgatattacaaatgcggttagcaaccaaattcagctataaatttcgtaagcatgtggcgccttatccgacaaaaaaacacaaaagagcaaagcaacaacttttgcttacgtcatagcatgtttccgtatgcttatttgcttcataacaactcttatacatgttcatgtacactttctttacattaaac

SEQ ID NO: 19023 - DNA, 1780 bp, Zea Mays
ggcccgtgcagtgcatgcctctcctcgctccctccgcctcgtctctctctgagtcccttcgtctctctgccagctgcttcaccttctgccgctttgatcgtccacttcacttcagcacagtcacgtcgtttattgtcgccttcatcgtctgctccagtgtttggtgatatccatcgctttcttcgtcagctccacttcctcgtcgagttgctgcttgtttcattggggtttctaagttcctcttgcttccttatatatttacacattttaatcttccctgcacttcaatgtgagatgtggaaaggcttgccacagctagatttgtgcatttttatctagtcagctttatttggaaaatacacgccaaaaatgaccactcttttttgggggtcaattcaacattccgcttccctcccactgtttctctctgctcttgaatctacgatgtgtagactttgttattttagtgttttgcaatttcattttcccttgaaaatatagggaacctcattgcattctttttggatcgatggattccgtggcccataaatccctgctcttcaatttacaccctccgtcttcatctgcaacctgcttcgtctaccgttgtttttgtcaggctatgaaaaagtgtcttcggcgtaaaaggtcaatcgccccgcctccagcaaaatgacttcatttttccccgacttttgttacgcacgtggagtgatacctctgcacctcagtggctttatcggcgaggcttggttgctgaggtaattagcattagttttgatctactttccttcgtgctggttgttcactaatagattaatgtttgatgtcctgttcggcctaggatacttaccagtgtgtctatgtgttccaccaatatactgcattatgcacgcttgctagtttaaagtgtgatttcgtgtacagaacacagtacagagcttcttatttaaaaatatttgtaactttaacaaatcaactcttagatatacaacctaatgaaatatattcaataggctcgatgtgttctagcatattccgatgtgccatgcagtgcagaggtaaattcagtgtacttacatgcttaacttctatatatactaatgaagatagatatctgtatactgttaatgtctctacaacaaatgataaaaacatgttttccaagttaaacacctacaaattcttcggcacaaaagtgctctcccactttggactaccatagtaagatagcaatgtttatcttatcgttcacaagtcatctacaaagacatggatcagctgaccaagctcgagctaccatcgcctccaaaaaaatgaagcatacccaacttaacaaagagctaccatattctatgggttcaaaaaatgaagacgactagcccaccacgaagcactcgaaggtattggttttttgcaagcattagaagagctccatcactttttaatataaaagccttttgtgtacatatgaaccaactgttggagcatttctaaaactgtattgacttatgcaacctctagaaacacactgttactgcatattggagtacactgcttaaatgctacttgatatatattgtaatttcatttgatattacaaatgcggttagcaaccaaattcagctataaatttcgtaagcatgtggcgccttatccgacaaaaaaacacaaaagagcaaagcaacaacttttgcttacgtcatagcatgtttccgtatgcttatttgcttcataacaactcttatacatgttcatgtacactttctttacattaaac

SEQ ID NO: 19024 - DNA, 2289 bp, Zea Mays
ggcccgtgcagtgcatgcctctcctcgctccctccgcctcgtctctctctgagtcccttcgtctctctgccagctgcttcaccttctgccgctttgatcgtccacttcacttcagcacagtcacgtcgtttattgtcgccttcatcgtctgctccagtgtttggtgatatccatcgctttcttcgtcagctccacttcctcgtcgagttgctgcttgtttcattggggtttctaagttcctcttgcttccttatatatttacacattttaatcttccctgcacttcaatgtgagatgtggaaaggcttgccacagctagatttgtgcatttttatctagtcagctttatttggaaaatacacgccaaaaatgaccactcttttttgggggtcaattcaacattccgcttccctcccactgtttctctctgctcttgaatctacgatgtgtagactttgttattttagtgttttgcaatttcattttcccttgaaaatatagggaacctcattgcattctttttggatcgatggattccgtggcccataaatccctgctcttcaatttacaccctccgtcttcatctgcaacctgcttcgtctaccgttgtttttgtcaggctatgaaaaagtgtcttcggcgtaaaaggtcaatcgccccgcctccagcaaaatgacttcatttttccccgacttttgttacggttagtgctctttgctgctgactcccttgtgtctgttatccaagctacgatttctcccccaaatttaaggtttagggtttatgttacaaaggaaaaaggaaggataccaatgaaaaaaaccctcactgttacttgttgttcgatttaatccctggttcttgtacttcaagccttgaatttgtttggtttctcccccaaatttgaagttcgggactaatgttatagcaaagggaaaaagtaaggaaagcaagacaaaaaatcctccctgttacttggggctagtttggaaactcaaatcccctccaatcccgaaggggattcgaggttcccaaagtagtgtttgatttaatccctggttcttgtagttcaaaccttgaatatgttcgtcttattttgtgtagtccttttccttttttggtccccggcacatgcttcacatgatctgttacaaatttgtggttggtcaatccgttgttccccacgtatattttttaaaacttctttaccttgaagagttcttttctgtcctattttgtttggttttacccacactggtttcggttccctgcttttcctctgttcctgttttcaatcccactcgattatgcccaacttagtttgaattcacagttattttcaatatggtaaggaaatgtttgctacttatatattagatcgcagccacattttcatccacatgctctcacttcgagattttgaccctttttccacgattttcaatacggtaaggaaatgtttgctacttattccctgttgtccattatccaaagtatggtttttaggccaaatttaaggattactgtttatattacagaaaaggacataggaaagaaacgagtaaaaaagaaggaaacaaattctttcagctacttgctgttcgatttacttccacatctaggattagttgttctttttttccacagcaccccccccggggcatgtctcactggaacttttacaaatttgggtttagggtacataaaagcacgtggagtgatacctctgcacctcagtggctttatcggcgaggcttggttgctgagtcatctacaaagacatggatcagctgaccaagctcgagctaccatcgcctccaaaaaaatgaagcatacccaacttaacaaagagctaccatattctatgggttcaaaaaatgaagacgactagcccaccacgaagcactcgaaggtattggttttttgcaagcattagaagagctccatcactttttaatataaaagccttttgtgtacatatgaaccaactgttggagcatttctaaaactgtattgacttatgcaacctctagaaacacactgttactgcatattggagtacactgcttaaatgctacttgatatatattgtaatttcatttgatattacaaatgcggttagcaaccaaattcagctataaatttcgtaagcatgtggcgccttatccgacaaaaaaacacaaaagagcaaagcaacaacttttgcttacgtcatagcatgtttccgtatgcttatttgcttcataacaactcttatacatgttcatgtacactttctttacattaaac

SEQ ID NO: 19025 - DNA, 2284 bp, Zea Mays
cccagttgaagccgggtcgggttttgctagggtttactgcttgtcttcctttctcggcagtcggcacattcgcggcttcgcctgatcgcgtacgccgcttcgtcctgattctcaatctctggtgctcccatgaagaaagacagggaatgaaggaccgccacctcgcgctgaaccagacccagagggtccgcctcgaggccgcgcttcaagagctccagtccgttgcgcccgccgctgccgtcaccgtcgcggacaccattcccgtcaatcaagaggacaacatcctcaaggggcatgggacgtcggaccaggacggggaggtggttgcgacgctctgcggggtggtggagcgggtcaacaagctggtctacgtccgcactcttcgcgcgagctgcagattctcgatggagatgaatggggttctgcaagccgcggatgccaagtactgggtttacaagggtgagggcgccgcgaatctcatcctcagctacaccggctcatcccctactatgcttggcaaggtattgcgggtcaagaagcttctaaatgacaagtcacagctgccaccaagttgtatggtcttctcaagtcatgagcaactcctgtggggccatattccagaactggttgagtctgtcaaacaagattgcttggctcaagcctatgctgtacatgttatgagccaacatctgggtgccaatcatgtcgatggtgggattcagttcacttatggaagaaattggagaattgcgacaatttccctgttcatgtacgtgtttctagggattttctagagcttgttgaaaagaatgttcttagcagccgtcctccttggagagtaaatgcaagttcaattgatatcactgctgatgccgctcttctaatagcagaccactctttattctctggtactccaaagggtagcagctgcatagctgtagagataaaggccaaatgtgggtttgtgccatcatcagaatatatatcaaaagataattctatcaagaaacaagtaacgagatataaaatgcatcagcacctcaaatttcatcagggtgaggttgatttccaatacattcttgaacacatttcagatatcgaagactagtgaatacaatcctcttgatctattttctgagtcgaaagaaagaataagcatggccatcaagtcatttttctcaactcctcagaacaacttcaggatttttgtcaatggatctttagcttttggtggcatgggaggtggtgcagatagtgttcatcctgctgacactgataagtgcattaaagatctcagcaaggtcagtggcctggaactccctgacttcactgagctcctgtcagagacaattttcaaatctggggtattgggcaaactgttgaccactcaaaagctggatgatcatgacattgaaggggcaattcatctgtactacaacataatttctcagccttgtttagtctgcaaaaacctaactgatgtagagctattgcggaagtacacactcttgcattctcttccgttggacaagagcttgaagattgtcagaaacttcctcatttctgctactgcaaaggactgtagcctgatgatcagctttcggccaagagagaatggaagtacagattctgagtatgattcagtgtttcttgaatcagcgaagcgaacctatgagtacaagacatatttcgttgatctggatgtgaaacctctggacaagatggtacattattttaaactggatcagaggatagtcaattcctacacaagatatggggaggtcttgccacctccaaagggcaagtaataccaaagacacttcggcgattcagctccaacaatgaggagcctctcttcttactatatacgtctggactatggagaagggtgcatcagagagctccagcccactacgcccttaggttctgtgcatatattgttgtatctcttaactgtttgatgatatggaatattcttttcccaatatggtaccgagcctttcttgagcctcctcctcgctgccgctcttcttcggaatgccgcggcatttgccctcccctcatgtttggcgagccggctgcacgtacagcacgacagtgagtgccagggacatgcacatcatggcgacggtttaagcttgtggacactcagcagatagggtgatgaccgccattccctgtatgacagacacgatgtgcatgcaacatgatcagccattcgatgcatttgatttgatggatccatcgatgttaaccaatcttataatatgctatcctagtccag

SEQ ID NO: 19026 - DNA, 2091 bp, Zea Mays
gccgggtcgggttttgctagggtttactgcttgtcttcctttctcggcagtcggcacattcgcggcttcgcctgatcgcgtacgccgcttcgtcctgattctcaatctctggtgctcccatgaagaaagacagggaatgaaggaccgccacctcgcgctgaaccagacccagagggtccgcctcgaggccgcgcttcaagagctccagtccgttgcgcccgccgctgccgtcaccgtcgcggacaccattcccgtcaatcaagaggacaacatcctcaactgcagattctcgatggagatgaatggggttctgcaagccgcggatgccaagtactgggtttacaagggtgagggcgccgcgaatctcatcctcagctacaccggctcatcccctactatgcttggcaaggtattgcgggtcaagaagcttctaaatgacaagtcacagctgccaccaagttgtatggtcttctcaagtcatgagcaactcctgtggggccatattccagaactggttgagtctgtcaaacaagattgcttggctcaagcctatgctgtacatgttatgagccaacatctgggtgccaatcatgtcgatggtggggttcatgtacgtgtttctagggattttctagagcttgttgaaaagaatgttcttagcagccgtcctccttggagagtaaatgcaagttcaattgatatcactgctgatgccgctcttctaatagcagaccactctttattctctggtactccaaagggtagcagctgcatagctgtagagataaaggccaaatgtgggtttgtgccatcatcagaatatatatcaaaagataattctatcaagaaacaagtaacgagatataaaatgcatcagcacctcaaatttcatcagggtgagatatcgaagactagtgaatacaatcctcttgatctattttctgagtcgaaagaaagaataagcatggccatcaagtcatttttctcaactcctcagaacaacttcaggatttttgtcaatggatctttagcttttggtggcatgggaggtggtgcagatagtgttcatcctgctgacactgataagtgcattaaagatctcagcaaggtcagtggcctggaactccctgacttcactgagctcctgtcagagacaattttcaaatctggggtattgggcaaactgttgaccactcaaaagctggatgatcatgacattgaaggggcaattcatctgtactacaacataatttctcagccttgtttagtctgcaaaaacctaactgatgtagagctattgcggaagtacacactcttgcattctcttccgttggacaagagcttgaagattgtcagaaacttcctcatttctgctactgcaaaggactgtagcctgatgatcagctttcggccaagagagaatggaagtacagattctgagtatgattcagtgtttcttgaatcagcgaagcgaacctatgagtacaagacatatttcgttgatctggatgtgaaacctctggacaagatggtacattattttaaactggatcagaggatagtcaattcctacacaagatatggggaggtcttgccacctccaaagggcaagtaataccaaagacacttcggcgattcagctccaacaatgaggagcctctcttcttactatatacgtctggactatggagaagggtgcatcagagagctccagcccactacgcccttaggttctgtgcatatattgttgtatctcttaactgtttgatgatatggaatattcttttcccaatatggtaccgagcctttcttgagcctcctcctcgctgccgctcttcttcggaatgccgcggcatttgccctcccctcatgtttggcgagccggctgcacgtacagcacgacagtgagtgccagggacatgcacatcatggcgacggtttaagcttgtggacactcagcagatagggtgatgaccgccattccctgtatgacagacacgatgtgcatgcaacatgatcagccattcgatgcatttgatttgatggatccatcgatgttaaccaatcttataatatgctatcctagtccag

SEQ ID NO: 19027 - DNA, 2138 bp, Zea Mays
gccgggtcgggttttgctagggtttactgcttgtcttcctttctcggcagtcggcacattcgcggcttcgcctgatcgcgtacgccgcttcgtcctgattctcaatctctggtgctcccatgaagaaagacagggaatgaaggaccgccacctcgcgctgaaccagacccagagggtccgcctcgaggccgcgcttcaagagctccagtccgttgcgcccgccgctgccgtcaccgtcgcggacaccattcccgtcaatcaagaggacaacatcctcaactgcagattctcgatggagatgaatggggttctgcaagccgcggatgccaagtactgggtttacaagggtgagggcgccgcgaatctcatcctcagctacaccggctcatcccctactatgcttggcaaggtattgcgggtcaagaagcttctaaatgacaagtcacagctgccaccaagttgtatggtcttctcaagtcatgagcaactcctgtggggccatattccagaactggttgagtctgtcaaacaagattgcttggctcaagcctatgctgtacatgttatgagccaacatctgggtgccaatcatgtcgatggtgggattcagttcacttatggaagaaattggagaattgcgacaatttccctgttcatgtacgtgtttctagggattttctagagcttgttgaaaagaatgttcttagcagccgtcctccttggagagtaaatgcaagttcaattgatatcactgctgatgccgctcttctaatagcagaccactctttattctctggtactccaaagggtagcagctgcatagctgtagagataaaggccaaatgtgggtttgtgccatcatcagaatatatatcaaaagataattctatcaagaaacaagtaacgagatataaaatgcatcagcacctcaaatttcatcagggtgagatatcgaagactagtgaatacaatcctcttgatctattttctgagtcgaaagaaagaataagcatggccatcaagtcatttttctcaactcctcagaacaacttcaggatttttgtcaatggatctttagcttttggtggcatgggaggtggtgcagatagtgttcatcctgctgacactgataagtgcattaaagatctcagcaaggtcagtggcctggaactccctgacttcactgagctcctgtcagagacaattttcaaatctggggtattgggcaaactgttgaccactcaaaagctggatgatcatgacattgaaggggcaattcatctgtactacaacataatttctcagccttgtttagtctgcaaaaacctaactgatgtagagctattgcggaagtacacactcttgcattctcttccgttggacaagagcttgaagattgtcagaaacttcctcatttctgctactgcaaaggactgtagcctgatgatcagctttcggccaagagagaatggaagtacagattctgagtatgattcagtgtttcttgaatcagcgaagcgaacctatgagtacaagacatatttcgttgatctggatgtgaaacctctggacaagatggtacattattttaaactggatcagaggatagtcaattcctacacaagatatggggaggtcttgccacctccaaagggcaagtaataccaaagacacttcggcgattcagctccaacaatgaggagcctctcttcttactatatacgtctggactatggagaagggtgcatcagagagctccagcccactacgcccttaggttctgtgcatatattgttgtatctcttaactgtttgatgatatggaatattcttttcccaatatggtaccgagcctttcttgagcctcctcctcgctgccgctcttcttcggaatgccgcggcatttgccctcccctcatgtttggcgagccggctgcacgtacagcacgacagtgagtgccagggacatgcacatcatggcgacggtttaagcttgtggacactcagcagatagggtgatgaccgccattccctgtatgacagacacgatgtgcatgcaacatgatcagccattcgatgcatttgatttgatggatccatcgatgttaaccaatcttataatatgctatcctagtccag

SEQ ID NO: 19028 - DNA, 1887 bp, Zea Mays
gaaaaattaaccagcttagcgcagcccacttccttccactgctgcagattctcgatggagatgaatggggttctgcaagccgcggatgccaagtactgggtttacaagggtgagggcgccgcgaatctcatcctcagctacaccggctcatcccctactatgcttggcaaggtattgcgggtcaagaagcttctaaatgacaagtcacagctgccaccaagttgtatggtcttctcaagtcatgagcaactcctgtggggccatattccagaactggttgagtctgtcaaacaagattgcttggctcaagcctatgctgtacatgttatgagccaacatctgggtgccaatcatgtcgatggtggggttcatgtacgtgtttctagggattttctagagcttgttgaaaagaatgttcttagcagccgtcctccttggagagtaaatgcaagttcaattgatatcactgctgatgccgctcttctaatagcagaccactctttattctctggtactccaaagggtagcagctgcatagctgtagagataaaggccaaatgtgggtttgtgccatcatcagaatatatatcaaaagataattctatcaagaaacaagtaacgagatataaaatgcatcagcacctcaaatttcatcagggtgaggttgatttccaatacattcttgaacacatttcagatatcgaagactagtgaatacaatcctcttgatctattttctgagtcgaaagaaagaataagcatggccatcaagtcatttttctcaactcctcagaacaacttcaggatttttgtcaatggatctttagcttttggtggcatgggaggtggtgcagatagtgttcatcctgctgacactgataagtgcattaaagatctcagcaaggtcagtggcctggaactccctgacttcactgagctcctgtcagagacaattttcaaatctggggtattgggcaaactgttgaccactcaaaagctggatgatcatgacattgaaggggcaattcatctgtactacaacataatttctcagccttgtttagtctgcaaaaacctaactgatgtagagctattgcggaagtacacactcttgcattctcttccgttggacaagagcttgaagattgtcagaaacttcctcatttctgctactgcaaaggactgtagcctgatgatcagctttcggccaagagagaatggaagtacagattctgagtatgattcagtgtttcttgaatcagcgaagcgaacctatgagtacaagacatatttcgttgatctggatgtgaaacctctggacaagatggtacattattttaaactggatcagaggatagtcaattcctacacaagatatggggaggtcttgccacctccaaagggcaagtaataccaaagacacttcggcgattcagctccaacaatgaggagcctctcttcttactatatacgtctggactatggagaagggtgcatcagagagctccagcccactacgcccttaggttctgtgcatatattgttgtatctcttaactgtttgatgatatggaatattcttttcccaatatggtaccgagcctttcttgagcctcctcctcgctgccgctcttcttcggaatgccgcggcatttgccctcccctcatgtttggcgagccggctgcacgtacagcacgacagtgagtgccagggacatgcacatcatggcgacggtttaagcttgtggacactcagcagatagggtgatgaccgccattccctgtatgacagacacgatgtgcatgcaacatgatcagccattcgatgcatttgatttgatggatccatcgatgttaaccaatcttataatatgctatcctagtccag

SEQ ID NO: 19029 - DNA, 2197 bp, Zea Mays
cgcagttcctctccgtgggcccgagcccctcgccgctgctcctggatgtctgcagattctcgatggagatgaatggggttctgcaagccgcggatgccaagtactgggtttacaagggtgagggcgccgcgaatctcatcctcagctacaccggctcatcccctactatgcttggcaaggtattgcgggtcaagaagcttctaaatgacaagtcacagctgccaccaagttgtatggtcttctcaagtcatgagcaactcctgtggggccatattccagaactggttgagtctgtcaaacaagattgcttggctcaagcctatgctgtacatgttatgagccaacatctgggtgccaatcatgtcgatggtggggtatggttcagattcagtttatttatatcctgttattgtgattttgattgttaacatatctacaaccttgacacttggagtcagattcagttcacttatggaagaaattggagaattgcgacaatttccctgtaaatacccctactgaaatagaaataacatgacatcaatgtgcatactattatatttttacacaaatatgctttattgcatcatctgttgctaattccacttccagtaggcactactctttggatctgcgtgactcgacaaagaaatcatgtcatatttccatgatgtaggttcatgtacgtgtttctagggattttctagagcttgttgaaaagaatgttcttagcagccgtcctccttggagagtaaatgcaagttcaattgatatcactgctgatgccgctcttctaatagcagaccactctttattctctggtactccaaagggtagcagctgcatagctgtagagataaaggccaaatgtgggtttgtgccatcatcagaatatatatcaaaagataattctatcaagaaacaagtaacgagatataaaatgcatcagcacctcaaatttcatcagggtgaggttgatttccaatacattcttgaacacatttcagatatcgaagactagtgaatacaatcctcttgatctattttctgagtcgaaagaaagaataagcatggccatcaagtcatttttctcaactcctcagaacaacttcaggatttttgtcaatggatctttagcttttggtggcatgggaggtggtgcagatagtgttcatcctgctgacactgataagtgcattaaagatctcagcaaggtcagtggcctggaactccctgacttcactgagctcctgtcagagacaattttcaaatctggggtattgggcaaactgttgaccactcaaaagctggatgatcatgacattgaaggggcaattcatctgtactacaacataatttctcagccttgtttagtctgcaaaaacctaactgatgtagagctattgcggaagtacacactcttgcattctcttccgttggacaagagcttgaagattgtcagaaacttcctcatttctgctactgcaaaggactgtagcctgatgatcagctttcggccaagagagaatggaagtacagattctgagtatgattcagtgtttcttgaatcagcgaagcgaacctatgagtacaagacatatttcgttgatctggatgtgaaacctctggacaagatggtacattattttaaactggatcagaggatagtcaattcctacacaagatatggggaggtcttgccacctccaaagggcaagtaataccaaagacacttcggcgattcagctccaacaatgaggagcctctcttcttactatatacgtctggactatggagaagggtgcatcagagagctccagcccactacgcccttaggttctgtgcatatattgttgtatctcttaactgtttgatgatatggaatattcttttcccaatatggtaccgagcctttcttgagcctcctcctcgctgccgctcttcttcggaatgccgcggcatttgccctcccctcatgtttggcgagccggctgcacgtacagcacgacagtgagtgccagggacatgcacatcatggcgacggtttaagcttgtggacactcagcagatagggtgatgaccgccattccctgtatgacagacacgatgtgcatgcaacatgatcagccattcgatgcatttgatttgatggatccatcgatgttaaccaatcttataatatgctatcctagtccag

SEQ ID NO: 19030 - DNA, 4452 bp, Zea Mays
gttagtttccctcgcccagaaaatatcggaatgaccaaaaaagagtaagaattacagaaaagcccctccggtagtctctctcttttccgtttctcttctccggccttcgtcttcctgcttctccccgtccgccaattcccttccccacccaaaccctagagcaaagctcaatggccctcgtcacgagttcgcgagagactctgcaccgccgccgttgactgctgatccaaccgctcccgcggcgcccggggccctgtcacggaggcggcggcgacatggcgtcgaggcagcacaatgcgcagttccacaaatccaagacgcttgacaacaaatacatgcttggagatgaaatagggaagggggcgtacggccgcgtatacaaggggcttgacctggagaatggcgatttcgtggccatcaaacaggtctcgctggagaacattccgcaggaggatctcaacataataatgcaagagatcgaccttttgaaaaatcttaatcataaaaatattgtcaagtatttgggatcattgaagacaaagagccacctccatattattttggagtatgtggagaatggctcacttgctaatattatcaagccaaacaaattcggaccttttcctgaatctttggtggctgtatacattgctcaggtgttggaaggtcttgtttatctgcatgaacaaggtgtcattcatagagatatcaagggcgcaaatatactgactaccaaagaggtcatcgaaatgtctggtgtttgtgctgcctctgatatctggagtgtgggttgcaccgtaattgaattgctgacatgtgtcccgccatattatgatctccaacctatgcctgccctgttccgtattgttcaggatgtgcatccaccaataccagaaggactgtcacctgagattactgattttctccggcaatgttttcaaaaggatgcgatgcaaaggcctgatgcgaagacattattgatgcatccatggttgcagaactcaagacgtgctttgcctgcttcccttcggcaacctactccattaaggaatatcgacggggatgatgaaagctcaagaggggacaataactcgggtttttgcgacacaccaggagatacccgagcaactattgcttctaatgttgaccaggtgaatgggaggaacggaccaaatatggactctgctgcgcaaagtaaatctgaagagcttcatgatggaaatttagaacttacagagggcattagttcgaacaatgtggcgcttgtgaaagataatgtggtccttaataaagatccgacactagttttacatgagaagttaccggtggaatcttcatttggagatgctgatttgaatggcaaagtaatggcacatgaactattgcaaggtggtctgccaagtaagatagagctggagaataaagaaagttcaactgttgaggatggtgatgtattctcatttcaggctggaagacagaatattgacttccaaatggtggttgaaccttcagttgttgagggaccgaaacagcttagtagatttagtgacaaacctgaagatgcctctttggaagacttatttccaccaatcgacaaacggggagataatggggctgaaccttcaacatcaactactgtccaagaacttcaatataatggtgtacacaatggattcgtgaaggggctcaatgccagggtggagaagcaaaaagaaaatgatagcgagtccatgaatggtggaaaactaattgaatttgccatgcagctagaaaatattgatgcatcgggttttggtgaacatattcctggagagagtcttttccctctgcagtctgtggagtacagcaaaatagtagcacaactgaaaccaggggaaagtgaagatgtaatactgttggcgtgccaaaagcttctatcaatcttcagtcaccggcctgagcaaaaacagatctatatggcacagaatggtttcctcccgctgatggaactccttgaaattcctaaaaatcgtattttatgctcagttctgcagcttatcaacaacattgtaaaagatagtacaggcttcctggaaaatgcttgccttgttggccttattccagtggtgatgaattttgcagaaccaaatcgcccaaaggatgttcgggtgcaagcatccttgtttcttcagcagctttgtcaagccagcaccttgacattgcaaatgttcattgcatgtcaagggatccctgttttggtaagctttatggagcctgactatgcaaaatacagggatatggttcatcttgcaattgacggcatttggcaggtctttaagctccagcactcaactccaagaaatgacttctgccgtatagcagcaaaaaatgggatgcttcctaggctggtgaatacactatatagcttgaacgaagcaacacgatttgcctcagtctcagggtcaggtgcttcagtaacacagaatggctcaaccccccgacgaagatctggccaattagacccttcagttcttgaaagttgcaaggcgaggctggatcatcatcattcatctggttctttgcaatctctacaagcagatgcagataagcaccacatattaatggactcctcgtcatctcctaggttcagcgacaaaacaagcagtaacttggagaggaatgagaacgacttggttattcggccacagaggcttagtgtttctgccggaaggacatctacagacagatcaccgaagcacatagaactagtttcaaatggtcataataacagtcaaaatgaccaggtccgacctctactgagtttattggagaaagaaccaccttctcgacatgtatctggacaacttgattatgttcgccatatatctggtttggaaaggcatgaaaccattctgccactattacatacatcgacagagaggaaaacgaatggtgaacttgacttaatgatggattttgctgaggtttctagacatggaagggagaatggccatctggactctagtataaaagcttcaaatagagttcatagtatgaaatatgcaccttcagcaagtgcgtctaatgaaggggcatcaacttctggagctgcatcacaaactgcatctggtgtgttatcaggatcaggggtgctcaatttaagacctgggagtacaacatcatcaggcccattagctcagatgttctcttccatgagcgcagatgtggcacgtgaatatcttgagaaagtagcagatcttcttttggagtttgcacaggcagacaccgtggtaaaatctctgatggccagccaaagccttcttacaagggttttccaaatgtttaacaagatagagcctcctattcttcttaagattcttaggtgcattaatcatttgtcgggtgatcctaattgtcttgagacacttcaacgcacagatgcaatcaaacatctgataccgattctggagcttcgtgatggacctctggtttatcaaatacatagtgaggtccttaatgctttgttcaacctttgcaaaattaataaaagaagacaggaacaagcagccgaaaatggaatcatccctcacttgatgaaatttgtcatgtcagactcacctttgcggcagtatgccctgcctttgctgtgtgatatggctcatgcttctcgcaactctagagagcagttgagggttcatggaggactagatgtgtacttaaatctgctggaggatgatgcatgggcatgcacggcattagattctattgctgtttgtttggctcacgataatgatcacagaaaagtggaacaagcactgttgaaaaaagaggccattcagaaattagtgaagttcttccaagattgcccagaacagtattttggccatatattggacgctttcttgaagataatcacgaaatcttctaggctaaatacagcaatggctaccaatggtttaacaacattgctcattgcaagacttgaccatcgagaagctattgcccgcttgactctgctgaaactcataaaggttgtctatgagcaccatcctcgaccaaaacagctcatagtagagaatgacctccctcagaagctacagaacctcattgaagagcgcagggatggacaacggggcggccaacaagtgttggtcaaacaaatggccacctcattgctgaaagcgctgcacatcaatacagtattgtgatattggtggatcatatgttttcctctcaagttgtatatgcttgccctagaggagaaggtgccttttccttttgctctgctgtggtggtttctcatgagcaccagactcatctgttgtacctgatccctcttttttcgggagaaaggttttttaggtgcaggatgaaatggacgttctgtccttcagtgttgtttatatttagagtgttagtgaggacattgtaaattaagacatataattaataaacaaaacccatgttgagata

SEQ ID NO: 19031 - DNA, 4543 bp, Zea Mays
atcggaatgaccaaaaaagagtaagaattacagaaaagcccctccggtagtctctctcttttccgtttctcttctccggccttcgtcttcctgcttctccccgtccgccaattcccttccccacccaaaccctagagcaaagctcaatggccctcgtcacgagttcgcgagagactctgcaccgccgccgttgactgctgatccaaccgctcccgcggcgcccggggccctgtcacggaggcggcggcgacatggcgtcgaggcagcacaatgcgcagttccacaaatccaagacgcttgacaacaaatacatgcttggagatgaaatagggaagggggcgtacggccgcgtatacaaggggcttgacctggagaatggcgatttcgtggccatcaaacaggtctcgctggagaacattccgcaggaggatctcaacataataatgcaagagatcgaccttttgaaaaatcttaatcataaaaatattgtcaagtatttgggatcattgaagacaaagagccacctccatattattttggagtatgtggagaatggctcacttgctaatattatcaagccaaacaaattcggaccttttcctgaatctttggtggctgtatacattgctcaggtgttggaaggtcttgtttatctgcatgaacaaggtgtcattcatagagatatcaagggcgcaaatatactgactaccaaagagggccttgtcaaacttgctgactttggagttgccactaaattgactgaagctgacatcaacactcattctgtggtcggcactccatactggatggcgcctgaggtcatcgaaatgtctggtgtttgtgctgcctctgatatctggagtgtgggttgcaccgtaattgaattgctgacatgtgtcccgccatattatgatctccaacctatgcctgccctgttccgtattgttcaggatgtgcatccaccaataccagaaggactgtcacctgagattactgattttctccggcaatgttttcaaaaggatgcgatgcaaaggcctgatgcgaagacattattgatgcatccatggttgcagaactcaagacgtgctttgcctgcttcccttcggcaacctactccattaaggaatatcgacggggatgatgaaagctcaagaggggacaataactcgggtttttgcgacacaccaggagatacccgagcaactattgcttctaatgttgaccaggtgaatgggaggaacggaccaaatatggactctgctgcgcaaagtaaatctgaagagcttcatgatggaaatttagaacttacagagggcattagttcgaacaatgtggcgcttgtgaaagataatgtggtccttaataaagatccgacactagttttacatgagaagttaccggtggaatcttcatttggagatgctgatttgaatggcaaagtaatggcacatgaactattgcaaggtggtctgccaagtaagatagagctggagaataaagaaagttcaactgttgaggatggtgatgtattctcatttcaggctggaagacagaatattgacttccaaatggtggttgaaccttcagttgttgagggaccgaaacagcttagtagatttagtgacaaacctgaagatgcctctttggaagacttatttccaccaatcgacaaacggggagataatggggctgaaccttcaacatcaactactgtccaagaacttcaatataatggtgtacacaatggattcgtgaaggggctcaatgccagggtggagaagcaaaaagaaaatgatagcgagtccatgaatggtggaaaactaattgaatttgccatgcagctagaaaatattgatgcatcgggttttggtgaacatattcctggagagagtcttttccctctgcagtctgtggagtacagcaaaatagtagcacaactgaaaccaggggaaagtgaagatgtaatactgttggcgtgccaaaagcttctatcaatcttcagtcaccggcctgagcaaaaacagatctatatggcacagaatggtttcctcccgctgatggaactccttgaaattcctaaaaatcgtattttatgctcagttctgcagcttatcaacaacattgtaaaagatagtacaggcttcctggaaaatgcttgccttgttggccttattccagtggtgatgaattttgcagaaccaaatcgcccaaaggatgttcgggtgcaagcatccttgtttcttcagcagctttgtcaagccagtttccatctccagcaccttgacattgcaaatgttcattgcatgtcaagggatccctgttttggtaagctttatggagcctgactatgcaaaatacagggatatggttcatcttgcaattgacggcatttggcaggtctttaagctccagcactcaactccaagaaatgacttctgccgtatagcagcaaaaaatgggatgcttcctaggctggtgaatacactatatagcttgaacgaagcaacacgatttgcctcagtctcagggtcaggtgcttcagtaacacagaatggctcaaccccccgacgaagatctggccaattagacccttcagttcttgaaagttgcaaggcgaggctggatcatcatcattcatctggttctttgcaatctctacaagcagatgcagataagcaccacatattaatggactcctcgtcatctcctaggttcagcgacaaaacaagcagtaacttggagaggaatgagaacgacttggttattcggccacagaggcttagtgtttctgccggaaggacatctacagacagatcaccgaagcacatagaactagtttcaaatggtcataataacagtcaaaatgaccaggtccgacctctactgagtttattggagaaagaaccaccttctcgacatgtatctggacaacttgattatgttcgccatatatctggtttggaaaggcatgaaaccattctgccactattacatacatcgacagagaggaaaacgaatggtgaacttgacttaatgatggattttgctgaggtttctagacatggaagggagaatggccatctggactctagtataaaagcttcaaatagagttcatagtatgaaatatgcaccttcagcaagtgcgtctaatgaaggggcatcaacttctggagctgcatcacaaactgcatctggtgtgttatcaggatcaggggtgctcaatttaagacctgggagtacaacatcatcaggcccattagctcagatgttctcttccatgagcgcagatgtggcacgtgaatatcttgagaaagtagcagatcttcttttggagtttgcacaggcagacaccgtggtaaaatctctgatggccagccaaagccttcttacaagggttttccaaatgtttaacaagatagagcctcctattcttcttaagattcttaggtgcattaatcatttgtcgggtgatcctaattgtcttgagacacttcaacgcacagatgcaatcaaacatctgataccgattctggagcttcgtgatggacctctggtttatcaaatacatagtgaggtccttaatgctttgttcaacctttgcaaaattaataaaagaagacaggaacaagcagccgaaaatggaatcatccctcacttgatgaaatttgtcatgtcagactcacctttgcggcagtatgccctgcctttgctgtgtgatatggctcatgcttctcgcaactctagagagcagttgagggttcatggaggactagatgtgtacttaaatctgctggaggatgatgcatgggcatgcacggcattagattctattgctgtttgtttggctcacgataatgatcacagaaaagtggaacaagcactgttgaaaaaagaggccattcagaaattagtgaagttcttccaagattgcccagaacagtattttggccatatattggacgctttcttgaagataatcacgaaatcttctaggctaaatacagcaatggctaccaatggtttaacaacattgctcattgcaagacttgaccatcgagaagctattgcccgcttgactctgctgaaactcataaaggttgtctatgagcaccatcctcgaccaaaacagctcatagtagagaatgacctccctcagaagctacagaacctcattgaagagcgcagggatggacaacggggcggccaacaagtgttggtcaaacaaatggccacctcattgctgaaagcgctgcacatcaatacagtattgtgatattggtggatcatatgttttcctctcaagttgtatatgcttgccctagaggagaaggtgccttttccttttgctctgctgtggtggtttctcatgagcaccagactcatctgttgtacctgatccctcttttttcgggagaaaggttttttaggtgcaggatgaaatggacgttctgtccttcagtgttgtttatatttagagtgttagtgaggacattgtaaattaagacatataattaataaacaaaacccatgttgagata

SEQ ID NO: 19032 - DNA, 4555 bp, Zea Mays
atcggaatgaccaaaaaagagtaagaattacagaaaagcccctccggtagtctctctcttttccgtttctcttctccggccttcgtcttcctgcttctccccgtccgccaattcccttccccacccaaaccctagagcaaagctcaatggccctcgtcacgagttcgcgagagactctgcaccgccgccgttgactgctgatccaaccgctcccgcggcgcccggggccctgtcacggaggcggcggcgacatggcgtcgaggcagcacaatgcgcagttccacaaatccaagacgcttgacaacaaatactgcgcctgcacgggcccgtgtgcagatgcttggagatgaaatagggaagggggcgtacggccgcgtatacaaggggcttgacctggagaatggcgatttcgtggccatcaaacaggtctcgctggagaacattccgcaggaggatctcaacataataatgcaagagatcgaccttttgaaaaatcttaatcataaaaatattgtcaagtatttgggatcattgaagacaaagagccacctccatattattttggagtatgtggagaatggctcacttgctaatattatcaagccaaacaaattcggaccttttcctgaatctttggtggctgtatacattgctcaggtgttggaaggtcttgtttatctgcatgaacaaggtgtcattcatagagatatcaagggcgcaaatatactgactaccaaagagggccttgtcaaacttgctgactttggagttgccactaaattgactgaagctgacatcaacactcattctgtggtcggcactccatactggatggcgcctgaggtcatcgaaatgtctggtgtttgtgctgcctctgatatctggagtgtgggttgcaccgtaattgaattgctgacatgtgtcccgccatattatgatctccaacctatgcctgccctgttccgtattgttcaggatgtgcatccaccaataccagaaggactgtcacctgagattactgattttctccggcaatgttttcaaaaggatgcgatgcaaaggcctgatgcgaagacattattgatgcatccatggttgcagaactcaagacgtgctttgcctgcttcccttcggcaacctactccattaaggaatatcgacggggatgatgaaagctcaagaggggacaataactcgggtttttgcgacacaccaggagatacccgagcaactattgcttctaatgttgaccaggtgaatgggaggaacggaccaaatatggactctgctgcgcaaagtaaatctgaagagcttcatgatggaaatttagaacttacagagggcattagttcgaacaatgtggcgcttgtgaaagataatgtggtccttaataaagatccgacactagttttacatgagaagttaccggtggaatcttcatttggagatgctgatttgaatggcaaagtaatggcacatgaactattgcaaggtggtctgccaagtaagatagagctggagaataaagaaagttcaactgttgaggatggtgatgtattctcatttcaggctggaagacagaatattgacttccaaatggtggttgaaccttcagttgttgagggaccgaaacagcttagtagatttagtgacaaacctgaagatgcctctttggaagacttatttccaccaatcgacaaacggggagataatggggctgaaccttcaacatcaactactgtccaagaacttcaatataatggtgtacacaatggattcgtgaaggggctcaatgccagggtggagaagcaaaaagaaaatgatagcgagtccatgaatggtggaaaactaattgaatttgccatgcagctagaaaatattgatgcatcgggttttggtgaacatattcctggagagagtcttttccctctgcagtctgtggagtacagcaaaatagtagcacaactgaaaccaggggaaagtgaagatgtaatactgttggcgtgccaaaagcttctatcaatcttcagtcaccggcctgagcaaaaacagatctatatggcacagaatggtttcctcccgctgatggaactccttgaaattcctaaaaatcgtattttatgctcagttctgcagcttatcaacaacattgtaaaagatagtacaggcttcctggaaaatgcttgccttgttggccttattccagtggtgatgaattttgcagaaccaaatcgcccaaaggatgttcgggtgcaagcatccttgtttcttcagcagctttgtcaagccagcaccttgacattgcaaatgttcattgcatgtcaagggatccctgttttggtaagctttatggagcctgactatgcaaaatacagggatatggttcatcttgcaattgacggcatttggcaggtctttaagctccagcactcaactccaagaaatgacttctgccgtatagcagcaaaaaatgggatgcttcctaggctggtgaatacactatatagcttgaacgaagcaacacgatttgcctcagtctcagggtcaggtgcttcagtaacacagaatggctcaaccccccgacgaagatctggccaattagacccttcagttcttgaaagttgcaaggcgaggctggatcatcatcattcatctggttctttgcaatctctacaagcagatgcagataagcaccacatattaatggactcctcgtcatctcctaggttcagcgacaaaacaagcagtaacttggagaggaatgagaacgacttggttattcggccacagaggcttagtgtttctgccggaaggacatctacagacagatcaccgaagcacatagaactagtttcaaatggtcataataacagtcaaaatgaccaggtccgacctctactgagtttattggagaaagaaccaccttctcgacatgtatctggacaacttgattatgttcgccatatatctggtttggaaaggcatgaaaccattctgccactattacatacatcgacagagaggaaaacgaatggtgaacttgacttaatgatggattttgctgaggtttctagacatggaagggagaatggccatctggactctagtataaaagcttcaaatagagttcatagtatgaaatatgcaccttcagcaagtgcgtctaatgaaggggcatcaacttctggagctgcatcacaaactgcatctggtgtgttatcaggatcaggggtgctcaatttaagacctgggagtacaacatcatcaggcccattagctcagatgttctcttccatgagcgcagatgtggcacgtgaatatcttgagaaagtagcagatcttcttttggagtttgcacaggcagacaccgtggtaaaatctctgatggccagccaaagccttcttacaagggttttccaaatgtttaacaagatagagcctcctattcttcttaagattcttaggtgcattaatcatttgtcgggtgatcctaattgtcttgagacacttcaacgcacagatgcaatcaaacatctgataccgattctggagcttcgtgatggacctctggtttatcaaatacatagtgaggtccttaatgctttgttcaacctttgcaaaattaataaaagaagacaggaacaagcagccgaaaatggaatcatccctcacttgatgaaatttgtcatgtcagactcacctttgcggcagtatgccctgcctttgctgtgtgatatggctcatgcttctcgcaactctagagagcagttgagggttcatggaggactagatgtgtacttaaatctgctggaggatgatgcatgggcatgcacggcattagattctattgctgtttgtttggctcacgataatgatcacagaaaagtggaacaagcactgttgaaaaaagaggccattcagaaattagtgaagttcttccaagattgcccagaacagtattttggccatatattggacgctttcttgaagataatcacgaaatcttctaggctaaatacagcaatggctaccaatggtttaacaacattgctcattgcaagacttgaccatcgagaagctattgcccgcttgactctgctgaaactcataaaggttgtctatgagcaccatcctcgaccaaaacagctcatagtagagaatgacctccctcagaagctacagaacctcattgaagagcgcagggatggacaacggggcggccaacaagtgttggtcaaacaaatggccacctcattgctgaaagcgctgcacatcaatacagtattgtgatattggtggatcatatgttttcctctcaagttgtatatgcttgccctagaggagaaggtgccttttccttttgctctgctgtggtggtttctcatgagcaccagactcatctgttgtacctgatccctcttttttcgggagaaaggttttttaggtgcaggatgaaatggacgttctgtccttcagtgttgtttatatttagagtgttagtgaggacattgtaaattaagacatataattaataaacaaaacccatgttgagata

SEQ ID NO: 19033 - DNA, 4391 bp, Zea Mays
atcggaatgaccaaaaaagagtaagaattacagaaaagcccctccggtagtctctctcttttccgtttctcttctccggccttcgtcttcctgcttctccccgtccgccaattcccttccccacccaaaccctagagcaaagctcaatggccctcgtcacgagttcgcgagagactctgcaccgccgccgttgactgctgatccaaccgctcccgcggcgcccggggccctgtcacggaggcggcggcgacatggcgtcgaggcagcacaatgcgcagttccacaaatccaagacgcttgacaacaaatacatgcttggagatgaaatagggaagggggcgtacggccgcgtatacaaggggcttgacctggagaatggcgatttcgtggccatcaaacaggtctcgctggagaacattccgcaggaggatctcaacataataatgcaagagatcgaccttttgaaaaatcttaatcataaaaatattgtcaagtatttgggatcattgaagacaaagagccacctccatattattttggagtatgtggagaatggctcacttgctaatattatcaagccaaacaaattcggaccttttcctgaatctttggtggctgtatacattgctcaggtgttggaaggtcttgtttatctgcatgaacaaggtgtcattcatagagatatcaagggcgcaaatatactgactaccaaagaggtcatcgaaatgtctggtgtttgtgctgcctctgatatctggagtgtgggttgcaccgtaattgaattgctgacatgtgtcccgccatattatgatctccaacctatgcctgccctgttccgtattgttcaggatgtgcatccaccaataccagaaggactgtcacctgagattactgattttctccggcaatgttttcaaaaggatgcgatgcaaaggcctgatgcgaagacattattgatgcatccatggttgcagaactcaagacgtgctttgcctgcttcccttcggcaacctactccattaaggaatatcgacggggatgatgaaagctcaagaggggacaataactcgggtttttgcgacacaccaggagatacccgagcaactattgcttctaatgttgaccaggtgaatgggaggaacggaccaaatatggactctgctgcgcaaagtaaatctgaagagcttcatgatggaaatttagaacttacagagggcattagttcgaacaatgtggcgcttgtgaaagataatgtggtccttaataaagatccgacactagttttacatgagaagttaccggtggaatcttcatttggagatgctgatttgaatggcaaagtaatggcacatgaactattgcaaggtggtctgccaagtaagatagagctggagaataaagaaagttcaactgttgaggatggtgatgtattctcatttcaggctggaagacagaatattgacttccaaatggtggttgaaccttcagttgttgagggaccgaaacagcttagtagatttagtgacaaacctgaagatgcctctttggaagacttatttccaccaatcgacaaacggggagataatggggctgaaccttcaacatcaactactgtccaagaacttcaatataatggtgtacacaatggattcgtgaaggggctcaatgccagggtggagaagcaaaaagaaaatgatagcgagtccatgaatggtggaaaactaattgaatttgccatgcagctagaaaatattgatgcatcgggttttggtgaacatattcctggagagagtcttttccctctgcagtctgtggagtacagcaaaatagtagcacaactgaaaccaggggaaagtgaagatgtaatactgttggcgtgccaaaagcttctatcaatcttcagtcaccggcctgagcaaaaacagatctatatggcacagaatggtttcctcccgctgatggaactccttgaaattcctaaaaatcgtattttatgctcagttctgcagcttatcaacaacattgtaaaagatagtacaggcttcctggaaaatgcttgccttgttggccttattccagtggtgatgaattttgcagaaccaaatcgcccaaaggatgttcgggtgcaagcatccttgtttcttcagcagctttgtcaagccagcaccttgacattgcaaatgttcattgcatgtcaagggatccctgttttggtaagctttatggagcctgactatgcaaaatacaggtctttaagctccagcactcaactccaagaaatgacttctgccgtatagcagcaaaaaatgggatgcttcctaggctggtgaatacactatatagcttgaacgaagcaacacgatttgcctcagtctcagggtcaggtgcttcagtaacacagaatggctcaaccccccgacgaagatctggccaattagacccttcagttcttgaaagttgcaaggcgaggctggatcatcatcattcatctggttctttgcaatctctacaagcagatgcagataagcaccacatattaatggactcctcgtcatctcctaggttcagcgacaaaacaagcagtaacttggagaggaatgagaacgacttggttattcggccacagaggcttagtgtttctgccggaaggacatctacagacagatcaccgaagcacatagaactagtttcaaatggtcataataacagtcaaaatgaccaggtccgacctctactgagtttattggagaaagaaccaccttctcgacatgtatctggacaacttgattatgttcgccatatatctggtttggaaaggcatgaaaccattctgccactattacatacatcgacagagaggaaaacgaatggtgaacttgacttaatgatggattttgctgaggtttctagacatggaagggagaatggccatctggactctagtataaaagcttcaaatagagttcatagtatgaaatatgcaccttcagcaagtgcgtctaatgaaggggcatcaacttctggagctgcatcacaaactgcatctggtgtgttatcaggatcaggggtgctcaatttaagacctgggagtacaacatcatcaggcccattagctcagatgttctcttccatgagcgcagatgtggcacgtgaatatcttgagaaagtagcagatcttcttttggagtttgcacaggcagacaccgtggtaaaatctctgatggccagccaaagccttcttacaagggttttccaaatgtttaacaagatagagcctcctattcttcttaagattcttaggtgcattaatcatttgtcgggtgatcctaattgtcttgagacacttcaacgcacagatgcaatcaaacatctgataccgattctggagcttcgtgatggacctctggtttatcaaatacatagtgaggtccttaatgctttgttcaacctttgcaaaattaataaaagaagacaggaacaagcagccgaaaatggaatcatccctcacttgatgaaatttgtcatgtcagactcacctttgcggcagtatgccctgcctttgctgtgtgatatggctcatgcttctcgcaactctagagagcagttgagggttcatggaggactagatgtgtacttaaatctgctggaggatgatgcatgggcatgcacggcattagattctattgctgtttgtttggctcacgataatgatcacagaaaagtggaacaagcactgttgaaaaaagaggccattcagaaattagtgaagttcttccaagattgcccagaacagtattttggccatatattggacgctttcttgaagataatcacgaaatcttctaggctaaatacagcaatggctaccaatggtttaacaacattgctcattgcaagacttgaccatcgagaagctattgcccgcttgactctgctgaaactcataaaggttgtctatgagcaccatcctcgaccaaaacagctcatagtagagaatgacctccctcagaagctacagaacctcattgaagagcgcagggatggacaacggggcggccaacaagtgttggtcaaacaaatggccacctcattgctgaaagcgctgcacatcaatacagtattgtgatattggtggatcatatgttttcctctcaagttgtatatgcttgccctagaggagaaggtgccttttccttttgctctgctgtggtggtttctcatgagcaccagactcatctgttgtacctgatccctcttttttcgggagaaaggttttttaggtgcaggatgaaatggacgttctgtccttcagtgttgtttatatttagagtgttagtgaggacattgtaaattaagacatataattaataaacaaaacccatgttgagata

SEQ ID NO: 19034 - DNA, 4425 bp, Zea Mays
ggaatgaccaaaaaagagtaagaattacagaaaagcccctccggtagtctctctcttttccgtttctcttctccggccttcgtcttcctgcttctccccgtccgccaattcccttccccacccaaaccctagagcaaagctcaatggccctcgtcacgagttcgcgagagactctgcaccgccgccgttgactgctgatccaaccgctcccgcggcgcccggggccctgtcacggaggcggcggcgacatggcgtcgaggcagcacaatgcgcagttccacaaatccaagacgcttgacaacaaatacatgcttggagatgaaatagggaagggggcgtacggccgcgtatacaaggggcttgacctggagaatggcgatttcgtggccatcaaacaggtctcgctggagaacattccgcaggaggatctcaacataataatgcaagagatcgaccttttgaaaaatcttaatcataaaaatattgtcaagtatttgggatcattgaagacaaagagccacctccatattattttggagtatgtggagaatggctcacttgctaatattatcaagccaaacaaattcggaccttttcctgaatctttggtggctgtatacattgctcaggtgttggaaggtcttgtttatctgcatgaacaaggtgtcattcatagagatatcaagggcgcaaatatactgactaccaaagaggtcatcgaaatgtctggtgtttgtgctgcctctgatatctggagtgtgggttgcaccgtaattgaattgctgacatgtgtcccgccatattatgatctccaacctatgcctgccctgttccgtattgttcaggatgtgcatccaccaataccagaaggactgtcacctgagattactgattttctccggcaatgttttcaaaaggatgcgatgcaaaggcctgatgcgaagacattattgatgcatccatggttgcagaactcaagacgtgctttgcctgcttcccttcggcaacctactccattaaggaatatcgacggggatgatgaaagctcaagaggggacaataactcgggtttttgcgacacaccaggagatacccgagcaactattgcttctaatgttgaccaggtgaatgggaggaacggaccaaatatggactctgctgcgcaaagtaaatctgaagagcttcatgatggaaatttagaacttacagagggcattagttcgaacaatgtggcgcttgtgaaagataatgtggtccttaataaagatccgacactagttttacatgagaagttaccggtggaatcttcatttggagatgctgatttgaatggcaaagtaatggcacatgaactattgcaaggtggtctgccaagtaagatagagctggagaataaagaaagttcaactgttgaggatggtgatgtattctcatttcaggctggaagacagaatattgacttccaaatggtggttgaaccttcagttgttgagggaccgaaacagcttagtagatttagtgacaaacctgaagatgcctctttggaagacttatttccaccaatcgacaaacggggagataatggggctgaaccttcaacatcaactactgtccaagaacttcaatataatggtgtacacaatggattcgtgaaggggctcaatgccagggtggagaagcaaaaagaaaatgatagcgagtccatgaatggtggaaaactaattgaatttgccatgcagctagaaaatattgatgcatcgggttttggtgaacatattcctggagagagtcttttccctctgcagtctgtggagtacagcaaaatagtagcacaactgaaaccaggggaaagtgaagatgtaatactgttggcgtgccaaaagcttctatcaatcttcagtcaccggcctgagcaaaaacagatctatatggcacagaatggtttcctcccgctgatggaactccttgaaattcctaaaaatcgtattttatgctcagttctgcagcttatcaacaacattgtaaaagatagtacaggcttcctggaaaatgcttgccttgttggccttattccagtggtgatgaattttgcagaaccaaatcgcccaaaggatgttcgggtgcaagcatccttgtttcttcagcagctttgtcaagccagcaccttgacattgcaaatgttcattgcatgtcaagggatccctgttttggtaagctttatggagcctgactatgcaaaatacagggatatggttcatcttgcaattgacggcatttggcaggtctttaagctccagcactcaactccaagaaatgacttctgccgtatagcagcaaaaaatgggatgcttcctaggctggtgaatacactatatagcttgaacgaagcaacacgatttgcctcagtctcagggtcaggtgcttcagtaacacagaatggctcaaccccccgacgaagatctggccaattagacccttcagttcttgaaagttgcaaggcgaggctggatcatcatcattcatctggttctttgcaatctctacaagcagatgcagataagcaccacatattaatggactcctcgtcatctcctaggttcagcgacaaaacaagcagtaacttggagaggaatgagaacgacttggttattcggccacagaggcttagtgtttctgccggaaggacatctacagacagatcaccgaagcacatagaactagtttcaaatggtcataataacagtcaaaatgaccaggtccgacctctactgagtttattggagaaagaaccaccttctcgacatgtatctggacaacttgattatgttcgccatatatctggtttggaaaggcatgaaaccattctgccactattacatacatcgacagagaggaaaacgaatggtgaacttgacttaatgatggattttgctgaggtttctagacatggaagggagaatggccatctggactctagtataaaagcttcaaatagagttcatagtatgaaatatgcaccttcagcaagtgcgtctaatgaaggggcatcaacttctggagctgcatcacaaactgcatctggtgtgttatcaggatcaggggtgctcaatttaagacctgggagtacaacatcatcaggcccattagctcagatgttctcttccatgagcgcagatgtggcacgtgaatatcttgagaaagtagcagatcttcttttggagtttgcacaggcagacaccgtggtaaaatctctgatggccagccaaagccttcttacaagggttttccaaatgtttaacaagatagagcctcctattcttcttaagattcttaggtgcattaatcatttgtcgggtgatcctaattgtcttgagacacttcaacgcacagatgcaatcaaacatctgataccgattctggagcttcgtgatggacctctggtttatcaaatacatagtgaggtccttaatgctttgttcaacctttgcaaaattaataaaagaagacaggaacaagcagccgaaaatggaatcatccctcacttgatgaaatttgtcatgtcagactcacctttgcggcagtatgccctgcctttgctgtgtgatatggctcatgcttctcgcaactctagagagcagttgagggttcatggaggactagatgtgtacttaaatctgctggaggatgatgcatgggcatgcacggcattagattctattgctgtttgtttggctcacgataatgatcacagaaaagtggaacaagcactgttgaaaaaagaggccattcagaaattagtgaagttcttccaagattgcccagaacagtattttggccatatattggacgctttcttgaagataatcacgaaatcttctaggctaaatacagcaatggctaccaatggtttaacaacattgctcattgcaagacttgaccatcgagaagctattgcccgcttgactctgctgaaactcataaaggttgtctatgagcaccatcctcgaccaaaacagctcatagtagagaatgacctccctcagaagctacagaacctcattgaagagcgcagggatggacaacggggcggccaacaagtgttggtcaaacaaatggccacctcattgctgaaagcgctgcacatcaatacagtattgtgatattggtggatcatatgttttcctctcaagttgtatatgcttgccctagaggagaaggtgccttttccttttgctctgctgtggtggtttctcatgagcaccagactcatctgttgtacctgatccctcttttttcgggagaaaggttttttaggtgcaggatgaaatggacgttctgtccttcagtgttgtttatatttagagtgttagtgaggacattgtaaattaagacatataattaataaacaaaacccatgttgagata

SEQ ID NO: 19035 - DNA, 2711 bp, Zea Mays
gtcccctcgctcggcttggtccgccatggtcatgcgtgtccctgccattgccgttgggtggctcagtttgccatcgtcacgcccatccgggtctgtggagtacagcaaaatagtagcacaactgaaaccaggggaaagtgaagatgtaatactgttggcgtgccaaaagcttctatcaatcttcagtcaccggcctgagcaaaaacagatctatatggcacagaatggtttcctcccgctgatggaactccttgaaattcctaaaaatcgtattttatgctcagttctgcagcttatcaacaacattgtaaaagatagtacaggcttcctggaaaatgcttgccttgttggccttattccagtggtgatgaattttgcagaaccaaatcgcccaaaggatgttcgggtgcaagcatccttgtttcttcagcagctttgtcaagccagcaccttgacattgcaaatgttcattgcatgtcaagggatccctgttttggtaagctttatggagcctgactatgcaaaatacagggatatggttcatcttgcaattgacggcatttggcaggtctttaagctccagcactcaactccaagaaatgacttctgccgtatagcagcaaaaaatgggatgcttcctaggctggtgaatacactatatagcttgaacgaagcaacacgatttgcctcagtctcagggtcaggtgcttcagtaacacagaatggctcaaccccccgacgaagatctggccaattagacccttcagttcttgaaagttgcaaggcgaggctggatcatcatcattcatctggttctttgcaatctctacaagcagatgcagataagcaccacatattaatggactcctcgtcatctcctaggttcagcgacaaaacaagcagtaacttggagaggaatgagaacgacttggttattcggccacagaggcttagtgtttctgccggaaggacatctacagacagatcaccgaagcacatagaactagtttcaaatggtcataataacagtcaaaatgaccaggtccgacctctactgagtttattggagaaagaaccaccttctcgacatgtatctggacaacttgattatgttcgccatatatctggtttggaaaggcatgaaaccattctgccactattacatacatcgacagagaggaaaacgaatggtgaacttgacttaatgatggattttgctgaggtttctagacatggaagggagaatggccatctggactctagtataaaagcttcaaatagagttcatagtatgaaatatgcaccttcagcaagtgcgtctaatgaaggggcatcaacttctggagctgcatcacaaactgcatctggtgtgttatcaggatcaggggtgctcaatttaagacctgggagtacaacatcatcaggcccattagctcagatgttctcttccatgagcgcagatgtggcacgtgaatatcttgagaaagtagcagatcttcttttggagtttgcacaggcagacaccgtggtaaaatctctgatggccagccaaagccttcttacaagggttttccaaatgtttaacaagatagagcctcctattcttcttaagattcttaggtgcattaatcatttgtcgggtgatcctaattgtcttgagacacttcaacgcacagatgcaatcaaacatctgataccgattctggagcttcgtgatggacctctggtttatcaaatacatagtgaggtccttaatgctttgttcaacctttgcaaaattaataaaagaagacaggaacaagcagccgaaaatggaatcatccctcacttgatgaaatttgtcatgtcagactcacctttgcggcagtatgccctgcctttgctgtgtgatatggctcatgcttctcgcaactctagagagcagttgagggttcatggaggactagatgtgtacttaaatctgctggaggatgatgcatgggcatgcacggcattagattctattgctgtttgtttggctcacgataatgatcacagaaaagtggaacaagcactgttgaaaaaagaggccattcagaaattagtgaagttcttccaagattgcccagaacagtattttggccatatattggacgctttcttgaagataatcacgaaatcttctaggctaaatacagcaatggctaccaatggtttaacaacattgctcattgcaagacttgaccatcgagaagctattgcccgcttgactctgctgaaactcataaaggttgtctatgagcaccatcctcgaccaaaacagctcatagtagagaatgacctccctcagaagctacagaacctcattgaagagcgcagggatggacaacggggcggccaacaagtgttggtcaaacaaatggccacctcattgctgaaagcgctgcacatcaatacagtattgtgatattggtggatcatatgttttcctctcaagttgtatatgcttgccctagaggagaaggtgccttttccttttgctctgctgtggtggtttctcatgagcaccagactcatctgttgtacctgatccctcttttttcgggagaaaggttttttaggtgcaggatgaaatggacgttctgtccttcagtgttgtttatatttagagtgttagtgaggacattgtaaattaagacatataattaataaacaaaacccatgttgagata

SEQ ID NO: 19036 - DNA, 2915 bp, Zea Mays
ctcaaggcaggcgcatagttctgtttcaacctcacagcgtcgtgacgtcgtcctctgcttcgcaagcgcccgagccgcgcgccgccgaacccgccgcctcctccagcctccgggcacatcggagcacgccagccaatcgcaccccgacacggcggcaccggaggaacccctccttcttggtcgtagcctccgtggcctccctcccctcaccccttccggtgttggattgagggtggagcggagatccgccacggcttgattgatccctggctcgtcctcctacgcaggatcgatacaccatataatttgggattctaaggtcccggtgcagcttcttctcgcagaagtttacgccctatgcccctcgctaagcccacccctgtgattccgccgtgacgcgtcatccacgggagaaacgccatgatgtcgaggtttgcccacttggggaagagcagaaaacttgctgaaacccttttggttgcctcaaagcccaatactgctggtggccaaaacattgcttcaagctttgcattcggcttgggttattccagcagggcctttttgcacgggaaggttcataatggtccaaacacctcctacatgctgggaagagcaaatgatagcttacattggagcactggtgtgaggaaattctcaattctttcatcttgtagccagaatgcatttcagagtcagcttgcttggaagcgacttgtagcactgggttctcgtgcaccaaaagcatctccaatttttagtaaggttgcttgtgccattggcttggctgtgagtaggtctaatatagccccttaccttgtcgcttttattgcgggagaggtaatgctagctcagaagacatctgcagatggagaatactacccaatacgtgagagagctcaggatggccgtatttacgttacctctctaatatattcggcagtagaattggttattataatcttcagatcaatatatttggcattgctgttcactccaagtatactgatggccccatttgcagagactcttggcagtaagtataggaaaacatggcttcgacttgtccatcgtactttggagcttgcaggtcctgcgtttatcaaatggggccaatgggctgcaacacgccctgatctgtttccaagtgacctttgtactgaattgtcaaagctgcacacaaaagcaccagctcacagctttacctatactaagaaaactgttgagaaagcttttggtcgaaagctatcagacatttttgaaaattttgaagaggaccctgttgcatctggaagtgttgctcaagtgcatcgggctgttctacgattccggtatcctaatcggcagacaaagcgtgtaactgttgcagtaaaagtaaggcatcctggtgtaggggactcaataagaagagatttcaatatcatcaatgccgtagcaaaaatatctagatatatccccacgctgaattggttgcgcctagatgagagtgtacaacagtttgctgtcttcatgatgtctcaagttgaccttgcaagggaagctgctcatctgagccggtttatctacaacttccgaaggtggaaggatgtatctttcccaagacctctctatccacttgttcatcctgctgttttagttgagacttacgagcatggggagagtgtttcacactatgttgatgaccttgaaggacatgatcgaattaaaagtgctctggcccatattggtactcacgcgctcttgaaaatgctactggttgataatttcgtccatgcagatatgcacccaggaaatattttagttcgtgttgcacaaccaaagaactcaaataacacccttaaaaagtcaaggccacatgtagtcttcctggatgtaggaatgactgctgaactttcaagtaatgaccgtgtgaatttacttgagttcttcaaggctgttgctcgccgagatggtcgtacagctgcagaaagtactctaaagttgtcaaaacaacagaattgtccaaatccaaaagcttttattgaggaagttgaacgatcattctctttttggggcactgctgaaggtgatgctatccacccagctgagtgtatgcaccaactgcttgagcaagttcgatgtcataaagtgaatatcgatggcaatgtttgtactgtcatggtgactacattagttcttgagggctggcaacgtaagttggatccagattataatgttatgaagactctgcaaactttactttttaaggaagattgggcgaagtctcttcaatacactatccaagggctcatggcgccttagggtcgtccgcaatcctttctaaagttttgatctggtttgtgttcgactggaggatcctcttctctcaccatcacgtctggcttcttttctacgttatttcacgtttcgtttctctgtacctgtcctggcgttgtgctgctaaagcagccttgatgataaagtaataactgcagtaaaaattttcagaagctaccagagtactatgctgctcagctctgggctgtcttcttatatgttcttgatgaagggccaaagaattaggtccttttcccccccctcctaccaacacttttgacaatagctcttagatgatgtagcaaaaggcgttctgttctgatgatcttttttgtaactggagagattgtatccgtggactggagagttgcttatgtacagacagagatactgttaatctcgaaggaatccacttgtcaactgacaattattcccaggaaaaggctcccagttttttcttgttttacatgtattagcaatgctgaatgtctgaaatttgaatgattttgctggtagggaggtatattgaacaacattgtggttacccttatatgtttgtagcgttttataggtcataaattaacttggaacatgaagcgtgc

SEQ ID NO: 19037 - DNA, 2505 bp, Zea Mays
tcacagcgtcgtgacgtcgtcctctgcttcgcaagcgcccgagccgcgcgccgccgaacccgccgcctcctccagcctccgggcacatcggagcacgccagccaatcgcaccccgacacggcggcaccggaggaacccctccttcttggtcgtagcctccgtggcctccctcccctcaccccttccggtgttggattgagggtggagcggagatccgccacggcttgattgatccctggctcgtcctcctacgcaggatcgatacaccatataatttgggattctaaggtcccggtgcagcttcttctcgcagaagtttacgccctatgcccctcgctaagcccacccctgtgattccgccgtgacgcgtcatccacgggagaaacgccatgatgtcgaggtttgcccacttggggaagagcagaaaacttgctgaaacccttttggttgcctcaaagcccaatactgctggtggccaaaacattgcttcaagctttgcattcggcttgggttattccagcagggcctttttgcacgggaaggttcataatggtccaaacacctcctacatgctgggaagagcaaatgatagcttacattggagcactggtagactcttggcagtaagtataggaaaacatggcttcgacttgtccatcgtactttggagcttgcaggtcctgcgtttatcaaatggggccaatgggctgcaacacgccctgatctgtttccaagtgacctttgtactgaattgtcaaagctgcacacaaaagcaccagctcacagctttacctatactaagaaaactgttgagaaagcttttggtcgaaagctatcagacatttttgaaaattttgaagaggaccctgttgcatctggaagtgttgctcaagtgcatcgggctgttctacgattccggtatcctaatcggcagacaaagcgtgtaactgttgcagtaaaagtaaggcatcctggtgtaggggactcaataagaagagatttcaatatcatcaatgccgtagcaaaaatatctagatatatccccacgctgaattggttgcgcctagatgagagtgtacaacagtttgctgtcttcatgatgtctcaagttgaccttgcaagggaagctgctcatctgagccggtttatctacaacttccgaaggtggaaggatgtatctttcccaagacctctctatccacttgttcatcctgctgttttagttgagacttacgagcatggggagagtgtttcacactatgttgatgaccttgaaggacatgatcgaattaaaagtgctctggcccatattggtactcacgcgctcttgaaaatgctactggttgataatttcgtccatgcagatatgcacccaggaaatattttagttcgtgttgcacaaccaaagaactcaaataacacccttaaaaagtcaaggccacatgtagtcttcctggatgtaggaatgactgctgaactttcaagtaatgaccgtgtgaatttacttgagttcttcaaggctgttgctcgccgagatggtcgtacagctgcagaaagtactctaaagttgtcaaaacaacagaattgtccaaatccaaaagcttttattgaggaagttgaacgatcattctctttttggggcactgctgaaggtgatgctatccacccagctgagtgtatgcaccaactgcttgagcaagttcgatgtcataaagtgaatatcgatggcaatgtttgtactgtcatggtgactacattagttcttgagggctggcaacgtaagttggatccagattataatgttatgaagactctgcaaactttactttttaaggaagattgggcgaagtctcttcaatacactatccaagggctcatggcgccttagggtcgtccgcaatcctttctaaagttttgatctggtttgtgttcgactggaggatcctcttctctcaccatcacgtctggcttcttttctacgttatttcacgtttcgtttctctgtacctgtcctggcgttgtgctgctaaagcagccttgatgataaagtaataactgcagtaaaaattttcagaagctaccagagtactatgctgctcagctctgggctgtcttcttatatgttcttgatgaagggccaaagaattaggtccttttcccccccctcctaccaacacttttgacaatagctcttagatgatgtagcaaaaggcgttctgttctgatgatcttttttgtaactggagagattgtatccgtggactggagagttgcttatgtacagacagagatactgttaatctcgaaggaatccacttgtcaactgacaattattcccaggaaaaggctcccagttttttcttgttttacatgtattagcaatgctgaatgtctgaaatttgaatgattttgctggtagggaggtatattgaacaacattgtggttacccttatatgtttgtagcgttttataggtcataaattaacttggaacatgaagcgtgc

SEQ ID NO: 19038 - DNA, 2855 bp, Zea Mays
tcacagcgtcgtgacgtcgtcctctgcttcgcaagcgcccgagccgcgcgccgccgaacccgccgcctcctccagcctccgggcacatcggagcacgccagccaatcgcaccccgacacggcggcaccggaggaacccctccttcttggtcgtagcctccgtggcctccctcccctcaccccttccggtgttggattgagggtggagcggagatccgccacggcttgattgatccctggctcgtcctcctacgcaggatcgatacaccatataatttgggattctaaggtcccggtgcagcttcttctcgcagaagtttacgccctatgcccctcgctaagcccacccctgtgattccgccgtgacgcgtcatccacgggagaaacgccatgatgtcgaggtttgcccacttggggaagagcagaaaacttgctgaaacccttttggttgcctcaaagcccaatactgctggtggccaaaacattgcttcaagctttgcattcggcttgggttattccagcagggcctttttgcacgggaaggttcataatggtccaaacacctcctacatgctgggaagagcaaatgatagcttacattggagcactggtgtgaggaaattctcaattctttcatcttgtagccagaatgcatttcagagtcagcttgcttggaagcgacttgtagcactgggttctcgtgcaccaaaagcatctccaatttttagtaaggttgcttgtgccattggcttggctgtgagtaggtctaatatagccccttaccttgtcgcttttattgcgggagaggtaatgctagctcagaagacatctgcagatggagaatactacccaatacgtgagagagctcaggatggccgtatttacgttacctctctaatatattcggcagtagaattggttattataatcttcagatcaatatatttggcattgctgttcactccaagtatactgatggccccatttgcagagactcttggcagtaagtataggaaaacatggcttcgacttgtccatcgtactttggagcttgcaggtcctgcgtttatcaaatggggccaatgggctgcaacacgccctgatctgtttccaagtgacctttgtactgaattgtcaaagctgcacacaaaagcaccagctcacagctttacctatactaagaaaactgttgagaaagcttttggtcgaaagctatcagacatttttgaaaattttgaagaggaccctgttgcatctggaagtgttgctcaagtgcatcgggctgttctacgattccggtatcctaatcggcagacaaagcgtgtaactgttgcagtaaaagtaaggcatcctggtgtaggggactcaataagaagagatttcaatatcatcaatgccgtagcaaaaatatctagatatatccccacgctgaattggttgcgcctagatgagagtgtacaacagtttgctgtcttcatgatgtctcaagttgaccttgcaagggaagctgctcatctgagccggtttatctacaacttccgaaggtggaaggatgtatctttcccaagacctctctatccacttgttcatcctgctgttttagttgagacttacgagcatggggagagtgtttcacactatgttgatgaccttgaaggacatgatcgaattaaaagtgctctggcccatattggttgataatttcgtccatgcagatatgcacccaggaaatattttagttcgtgttgcacaaccaaagaactcaaataacacccttaaaaagtcaaggccacatgtagtcttcctggatgtaggaatgactgctgaactttcaagtaatgaccgtgtgaatttacttgagttcttcaaggctgttgctcgccgagatggtcgtacagctgcagaaagtactctaaagttgtcaaaacaacagaattgtccaaatccaaaagcttttattgaggaagttgaacgatcattctctttttggggcactgctgaaggtgatgctatccacccagctgagtgtatgcaccaactgcttgagcaagttcgatgtcataaagtgaatatcgatggcaatgtttgtactgtcatggtgactacattagttcttgagggctggcaacgtaagttggatccagattataatgttatgaagactctgcaaactttactttttaaggaagattgggcgaagtctcttcaatacactatccaagggctcatggcgccttagggtcgtccgcaatcctttctaaagttttgatctggtttgtgttcgactggaggatcctcttctctcaccatcacgtctggcttcttttctacgttatttcacgtttcgtttctctgtacctgtcctggcgttgtgctgctaaagcagccttgatgataaagtaataactgcagtaaaaattttcagaagctaccagagtactatgctgctcagctctgggctgtcttcttatatgttcttgatgaagggccaaagaattaggtccttttcccccccctcctaccaacacttttgacaatagctcttagatgatgtagcaaaaggcgttctgttctgatgatcttttttgtaactggagagattgtatccgtggactggagagttgcttatgtacagacagagatactgttaatctcgaaggaatccacttgtcaactgacaattattcccaggaaaaggctcccagttttttcttgttttacatgtattagcaatgctgaatgtctgaaatttgaatgattttgctggtagggaggtatattgaacaacattgtggttacccttatatgtttgtagcgttttataggtcataaattaacttggaacatgaagcgtgc

SEQ ID NO: 19039 - DNA, 1312 bp, Zea Mays
gagaattgaagcatggagccacatacatacatacataagctattagtgcagtgcttgctgttgggtcagatgattgggtatgcatatatatttgtaaaaaattgtggagccatgtcatgtatcttttgtacctagctactagctacacatgtaggtagctgtgtgatacacacacttctcattccgtcaatttccttttttatgcttgcattaggtctatctgaatggggaagaagagatggctcttcgagttagctatatactagctattattcttgtttttctggaatgaggaggtataggtgcggctgcccatgtgtgtatgcatatgtatctctctctctctcttcctctactggtgggagagtctacaactggtaggtgcatgatgctttagctagctgttatttgccttgtgttcaattagtttggtagagtgtttcctttatcctctcatcaaatttgggaaagtgggatccacaaagtctattgctaaactttgagctggagaagacatatgacttgtaggcaaaggaaccaaaagacattctctctacaggcagttagcatcttttgattaaataaaggacctccccttgttttttccccttgggaatacatatttttttcgtctcctctctcaccttcattcagctaggccaactaattatcctcagctcctttttaggtgccaccatctgtaaagactattctctgcgtacttgatggtatctattttttttctctttggttcttccttctcatgtgttattcttggttgttgtctttggcccatgctttggatgttgctttctttgtgaggtaagaaactgaaaggcttaataacgccttcttctgcttgttgatcgataaaaagttaattgtgcaaattgtgtgccactgggtatagttaagcagcacatatattcatgtaaaccttttacactcatcatactacacatgcatatatagttcaggcattgcattcatcataaccgttccttaaagagaggagtctcccttttattcattttattccctctgttctaaaatattagtcgttgtagcttttgttttttatgtatatattcaaatggatgatgatgaatctagacaaatatatgaaacacatacatatatggaacacatacattaattgttgtatgaatccattaaaaaggtaaaacgaattttaatttgggggcggagggagtatttgttttatcttttcacacataaggtctgtttatctattggttccctttattactctatatataggataatcattgtgctgtcaatccgacatgca

SEQ ID NO: 19040 - DNA, 1458 bp, Zea Mays
aaacgacctttagtttcatttgtttttgaaaattttgaagttaagttcttccaaacatggtctaaactagtcctaatttctctcttaatccaccccaaccccctcataatacctggtcaccaaaacagttgggatccaagcgggatggggtacttgagctccgtgatcggccaccccaccgatggatcctccgtcagcggcggcggcctcagaatggtagatttagctatggctatgcaagctcccctggtaaaagggcatccatggaagacttctatgagacaaaaattgattgtgttgatggtcagatagttggtctttttggagtttttgatggtcatggtggtgctaaggtagcagagtatgttaaagaaaacctgttcaacaatcttgttagtcatccaaagttcatcagtgatactaaagtcgctatagatgatgcttataaaagcaccgacagtgaattcttagaatctgacagtagtcaaaatcaatgcgggtcaactgcatcaactgctgtacttgttggtgatcgtctcttcgtcgcaaatgttggtgactctagggctatcatatgcagggaaggaaatgctattgctgtttcaaaggatcacaagcctgatcaaactgatgagcggcagcgtattgaagatgctggaggttttgtgatgtgggcaggaacatggcgcgttggtggtgtacttgctgtttcgcgtgcttttggtgacaaactcttaaagcaatatgtggttgtggatccggagatccgagaggaagttgttgatgacacactcgagtttcttatccttgcaagtgatgggctgtgggatgtggtctctaacgaggaagctgttgcgatgactagatccattaaggacccagaagaggctgcaaagatgctcttgcaagaggcgtacaagagggagagcagtgacaacataacttgcgtcgtcgtgcacttcttgcatgggcaaggtagcagcggatacgcttaaagcgtagcagtaaaattattttacgcagtggtgtgctctgatgtacatgcgtcgattgatttcccgatgttaaatggagaaacgtaactacgtaaggtaggaaacgtgtattatgatgggttgaactgggaaatgcgtgtaccctatactatatatatatactgtagtgtggtcgcggacgatgtttgggtctgaagatagtgttgtattgttgtgggaaaaaagataattgcgctttaggttttgtttgtttcggattattataatctgtctaaattatataatccagcataaacaatccaacaggtaaacaaacatatattatagattctgattatataatctaaagtctagataatcttataatctacttaagcctaccttatttgatattatttttagtaaaagacactatccatagttatgtttataaaattgcaatgtttgcatttttcttcttttc

SEQ ID NO: 19041 - DNA, 2051 bp, Zea Mays
caccgaaacgcccggagaaccccaaaaaaaaaaacgccagcgcatttcaaacaccgaacgaacatatccccctctccagtctccacggatcaaaatcgaatccaacgctactgcctagggtttcctctgcgtttcccctaccacaccccgcgccgcccacccatggccgccgcagacgcgtccgccgagaccgccgccatcgcgcggcgcctggcctcctgcaacaccggcacccgggagcgcgcgctccgctaccttctctccgactttctgccggcctccgcgccgcgcctctccgccaccgacctcctcaagctctggaagggcatcttcttctgcttctggcacgccgacaagccgctctaccagagctccgtcgccacgcgcctcgcctccgccgtctccgccccgccgtcccccaccgatggcaccgccttcctcgccgcctacctcaccacgctccgccgcgagtgggcccacatcgacgtccaccgcctcgacaagttctacctcctcaaccgccggttcctccaccacgccttcctgctcctccgtgctaactccttcgcccccgacgtcacctcccaggtcgtgtccgtcctgtcggacaaggccctgctaccggaagccgacaacgtcgccgctgccacctcccggggcctcgggtaccacgtcgccgaggcgttccttgacgagctcctgcctgtgctccccgtgagcctggagacgatggacaccctgcttgctccgttcttcactgtgttggagaagtcgaccgatcgggtgatggtgagtaaggtgaaggcaggtgtgtttgagaggttactagacagcggcagtcggttgctggagatggtgaaaaaaggggaggaggtggagaagggtgacgccgaggagaagctcggtaaagttggattgctgtttggattcagcaagaggttcctggatattggtgcaatggcagagacagtgcaatcgaaccggaaggtggtctttgggttgagggatgcgtttgtgaagatcgagaagggtttgcagttatctggtcttgagatccctgcaccaaagtttgaggctactgaggtgccagtgccgccaaatgtgggcaagggaaaggcacaaaagaagaaaaaggccaagaaggctgcattggctgaaggtgagatggaggaggacaatgatttgaaacgtgagaagaagataaagaaggaaaagaaggagaagaaaaggaggaaggtggaggttgttgatgaaggggatgtcactgagaagagtactaatgctccaggagctgaccaacagatgggtgatggtactgatggcattacattcgatgcagctttgaagtccaaccttcagaagcagtttgagatggtggcagcagaagctggtatggcagaagggggcagcagctcaagtgattcaccagtgacaccagttactgggaaagtggcaacaaagaggaagcgttcaaaatctgctgataagctgtctgaagcttctgctggggatggtggcagcgaagtgtttgaggctgccaccttcagctactccaagaggaagcgcactaaaaaagggtgtccagccaggtcccataacaccgaccccattgaagaaggctaagccaaaggcaaaatccgcaaagaaggtcttgaagaagccgccttcatctgctgtgaagcgcttgcggaagttgcagagtttctcagcctgagttttgttggtgtatgacgccatgatggtcatgtcaatgtatcttttctgttttagtttatcattacttaattcttatcctttttgtaggttagtttatactgtgttgacttagctgtcagttcatatttgatggattgcttaatgatttgtgtggtcactatgctttataataattatgtggtgattgcaacagtatttagggactgtttggaaccacccagtttttaagaaactggtttatggaaactgagatggttccaaacataccagtttatgtcgagaaacaaattgtctgtgctattaattttactttgcgatttgactcttcctcttcc

SEQ ID NO: 19042 - DNA, 1686 bp, Zea Mays
gggtagccaaccgcatgaagaaacgacagtttggcggtgcctaagtttttcaaatcctctcataatgttcaaattgcacagatccaagaaaaagcccctcataggcagctttagccaagtatttgccattacagacaaccgaaagatatggtcttctttgttcagctgaagctcaacctgtgcaacaatatcccaaagacaaaggaagtctgcaacagcaccaactgacagtcccccccccccccgcccccaagatatcattaatccatagcttatctctgaccgcctcctaaactgtcgtcctgttaatcattctgctaggaattgtctccataaggcgaggggcaatatcagctactcgctgctctccaatccaatgatcaccccaaaagagaatggaggccccatttccgaccttagattgcatggccatttttaagaaatctcgaatttgttttggaacatgaagaggtagagaagactaggggcggtttggctcaattttttgcagccaaccccaccgcatcttgagtgcccatcctagctctgaagatacccagtccttcgagctcaaggggtctacacactcttccctaggccacgagacaatgtcttcctctagcatcttttcgaccacgccaaagaaaaccttttctgattctgtcaattgctaataaaatgttgacatggtgaaagtgttcctgaaataccaaaatttggtgctgttgctagttcataattgttttgctccctggagatgtaccagactaaacatgctgtgaattttgttgatttacttttttcacaagaaaccacttgattttcataagattttgggtgatacaggggaaaatgagttgcttgatgatcaacgatctagatgctggtgttggaagatttggaaacacgcagatgacggtcaataatcaaatagctgttggaactttgatgaatttggcagataatcctactagggtgagcatcggccagaaatggagagaatctgatgttacacacagggtgccaataatagttactggaaatgatttttcaactctatatgcacccttaattcgtgatgggagaatggaaaaattctactggcagcccaaccgtgaagatataattagtattgttcatggcatgtatataaaggatggattatctgttgaagaagtatcaagaattgtagacgcatttccaaaccaagtgggtcgaagaaatcggtgggcatgaacagctaaatgagaagcttcttaagcgaaagaaaggcgaggagcttccaacgtttatacccccaaagccaacactggaagcattgattgagtcagggtactcgctggtgaaggagcaggaactaataatgagctccaagctttcaaaagagtatatgaagaacttagaatagtttgatacacgagaaggggtaacttcttgttttcagtttatttggagcaataatacaccatccaatttgttccaacatccaaccaccggagtcgaatcgatgcttcgattgtcccagaaatcgtggtgggttcagatatgaactgctgaaaggaacgcatatcgtcattgtccttaattactctcatcgtgcattgccaaaaagtctttgggttgactcgaaagacttgtgagctgtgccacggagtggcccatgtatgtatgtatgtggagcgagcg

SEQ ID NO: 19043 - DNA, 1731 bp, Zea Mays
gggtagccaaccgcatgaagaaacgacagtttggcggtgcctaagtttttcaaatcctctcataatgttcaaattgcacagatccaagaaaaagcccctcataggcagctttagccaagtatttgccattacagacaaccgaaagatatggtcttctttgttcagctgaagctcaacctgtgcaacaatatcccaaagacaaaggaagtctgcaacagcaccaactgacagtcccccccccccccgcccccaagatatcattaatccatagcttatctctgaccgcctcctaaactgtcgtcctgttaatcattctgctaggaattgtctccataaggcgaggggcaatatcagctactcgctgctctccaatccaatgatcaccccaaaagagaatggaggccccatttccgaccttagattgcatggccatttttaagaaatctcgaatttgttttggaacatgaagaggtagagaagactaggggcggtttggctcaattttttgcagccaaccccaccgcatcttgagtgcccatcctagctctgaagatacccagtccttcgagctcaaggggtctacacactcttccctaggccacgagacaatgtcttcctctagcatcttttcgaccacgccaaagaaaaccttttctgattctgtcaattgctaataaaatgttgacatggtgaaagtgttcctgaaataccaaaatttggtgctgttgctagttcataattgttttgctccctggagatgtaccagactaaacatgctgtgaattttgttgatttacttttttcacaagaaaccacttgattttcataagattttgggtgatacaggggaaaatgagttgcttgatgatcaacgatctagatgctggtgttggaagatttgatgacggtcaataatcaaatagctgttggaactttgatgaatttggcagataatcctactagggtgagcatcggccagaaatggagagaatctgatgttacacacagggtgccaataatagttactggaaatgatttttcaactctatatgcacccttaattcgtgatgggagaatggaaaaattctactggcagcccaaccgtgaagatataattagtattgttcatggcatgtatataaaggatggattatctgttgaagaagtatcaagaattgtagacgcatttccaaaccaagctctggacttctatggagctttgagatccaggacatatgatcaggctatcttggagtgggtcgaagaaatcggtgggcatgaacagctaaatgagaagcttcttaagcgaaagaaaggcgaggagcttccaacgtttatacccccaaagccaacactggaagcattgattgagtcagggtactcgctggtgaaggagcaggaactaataatgagctccaagctttcaaaagagtatatgaagaacttagaatagtttgatacacgagaaggggtaacttcttgttttcagtttatttggagcaataatacaccatccaatttgttccaacatccaaccaccggagtcgaatcgatgcttcgattgtcccagaaatcgtggtgggttcagatatgaactgctgaaaggaacgcatatcgtcattgtccttaattactctcatcgtgcattgccaaaaagtctttgggttgactcgaaagacttgtgagctgtgccacggagtggcccatgtatgtatgtatgtggagcgagcg

SEQ ID NO: 19044 - DNA, 1901 bp, Zea Mays
ctttgcttcgctttgctttgcttgtgggaaaccaatccaacagatacacgacggctagctagtttatcctccacgcgggattgcttgcttaattagcttttttgatgatttatttgcgtggcagagacggtgagcatgcatgcatggccgagggaggggggagcgtattaggaatgggcgcctggcgcagggcccgaggcaacgtgtagggtatccaacaggggttaggtggcactggcagcaggcggcggcggcgtctcctccccctttcttccttcctttctttgttgtactactactacttaagctcgccgcttctgttcacagtccatgtgattgattctctcctgctccttctttcttccatctctcctgtctctcttctctctctctctctgtctgtctgtctggcaaagggcactgacggccgcggcggtgtcgatggagtggtggcagaaggcggtggtggtgccggtgaagcgcgcgtggatcgccgccgccgcccggctgacgacgcgacataagaaagaagacggcggccacggcgtcctggtgaagctccacgacgacgtccagacgtgcgcgtacgaggacgtgcaggtgatgtgggagatgctgcagcgggccgagacggagaggctggcgcgcgagccctcgccaaagggcgcgcgcgcgctcgtctggctgcgccgccaccacaagatggacccgcgccggcgctgctgaggaggaggacgacgacgacaccctgatgcttttccttcctcctgctgccccttcggctttgcttgccagctgccgtgccaccctgtgcagccttgccctgtgatgcgagagccgctcatctgcggctgtgtgtacatattacatgctacatacagggtacagtacagccctgctgctgcgcctttcgtttccttcgcccggatgtaaatattcacagtttcatctttctaaggaagagaagagagatagagagaccacagtaccggctctgtactttgctcggtgccgccgcagccaatcaatcacctcgcgggatacagttccatttctgaaggtattgggcgagggttctcatgtccaagcagcagggcaacccacctcatctttcatacataaacctgccactcagtctgcaaagcacaagcaaaactttcgtgatcaatatatgttcacaagactggtatatatacaccttagcgaccgttaatgagacagcaaggaaatttatggatgaacaaggtgttaccactggcagcagacggtctgaattttggttcaaacttggacaggtggactgataggctgggtgcctgactgacaaacacaagtccttgttatcactagaaaggcagatctgaattttagttcaaacttggacaattgggccgatagcctggatgccagactgacaaccaaaagtgaacacacacggccagagaacattggggattcaaacagtcagcatccaaggttctctgatcctctccaacaccaataagagcactagttcagatacaacatacttgcggtacaggacagtataacgatagttgaaaatgcttttgacagccttaaaatgacaccagagaccagatatcttttcttatctctgaaacataatactgatattactgaaattgtacagaatggaaaataaaaagttggacaacagaaagaaccgaaagtgacaaaattttgaacggggatctctgtttcagacatgttgacatcaaagaacacggtgtatggggggcatctctgaacagtgtgatcaacgatgcatcatctcgctttttttagtataataaacaccaaaaaagtgtatgggggcaccaacctaatcccaaagacactcacgcacgtcaaggtagaaaggtagggatctaacatataac

SEQ ID NO: 19045 - DNA, 4334 bp, Zea Mays
aatcgccgcagccgcgtgggatgcgatcgccttctttcgcccaatcctgcgtgcgtgccgccgccgccgtggacgggcagacggctggacgcattcgccaggcgccagctcgttcggtctttcctctctgcctgaatcgccagatcgctatctcactgatcgccacgacggcacacagttctgttcctgaatcgctgctactgctagcctgctgctggacgcctgaactggacaggctgtgttccaaattccaatactaacggttgatcttgatatattttaagtctgaattttcccaaactatcttactccgggaccaaataattatgaaattgactctactttgaaacaaatagaagatataatgcaatactttgagacatatagaactgaggggttttcgtctagcttgatcattgccaaaggtattggagataaaatgggtgtggaggcttcatttcctgtaaagcgtcgtgcaataagaaagaaagaatttgatgaaagtaattgtcaagaggaaattcttgaagctgagagggcttttgaagtgaaatattttttggttatggttgacatggcgatcacttctttgaagaccagatttgaagaactcatgatatttaaagatatatttggatttttactgagctcaaacaccctgaagttgttaaatgataatgaacttgaagagtgttgcattaaatttgctaagactttctcccatgatggttcatctaatgttgaggtacatgatcttatttctgaattgaagattatgaaattcactttgccagatggagtattgtctgctaaagagatttttgagcatgtcatagaggtgaattgctatcctaatgtctccattgcatatcgaatcttatttactgtgcatgtgactgttgcatctgccgaaagaagcttttcaaagctgaaattgttgaaaaactatttgagatcaacaatgactcaagaaaggttgaatcatttggcgactttatgcatcgagaagaaattattagatgagattgatatcaacactattattgatgactttgtatcgcaaaatgttagaagaaacttgtcaacttgatatcaagtacaacttcaagccatgccgtaatgccaaacaaattgcttctgtgataaagaacaaatggcaatgacgattggctgaagtattggtcccatcacaaaatactcgtggttgagaaaaaaatgacaaggggttccaaacaactgtaacgaagaatatatgaaacctcgtgaacttcattcttgaattatttcaatgataataatctatttcagtagcaagcaaaaggaaagatgagcattcacaagaccagcatcaggaaggcctcctttcctcacaacaaatgttcttttcttctcatgatcaataatggcaattttcgatggtgtgcccagatatattctgtccagctgtaaaaagtgcaaacgttttgttgagtaataatgagaaagaaagtggacaaatgataaataaaatgctttgtcgacgcacttcggattcaaaaacaattgcatcgccttgttcagtggaacgagctctatcttgtaagttgtctaggtaatccagagtttccaatccttctactcgcacctcactgtattagcatggaatcacgtaaacaattctgtacttaagaacgctaattacaaaatcaaagataattatggtttaataccagagtttggtcaaacgaattgggactggggataaacatgctgccacaagattacttcaaaaactatgctggcaaattgaatatttcaaagatgatgaccataacttgaaacaacatacctgatatcagaaatcttgaagtatgtgtggtatgcaaaagtgaaagagaatggcttcccgtctgcattagtgtttcttatacgtgaagttagcatcaaatcaccaccaggactaagtgcaaccctcaggcggtattcaaaaactgcaaatacaatatatctgtaaaacatacagatagccacgcttgccttctaatgcaacaaacatactaagaaatataacaaagataagtctttcaggtgtcctacagtagcattaaatcaatacaagtgacaataagctcacctatgaggccagatcttcaaatcatcttcagtaggtttgaggatcaagtcaatataagcgctattggaggttggcactggaaatggtggaggatcatcatcaacactccatgtcctattccttgcaaatccatgtggttccagattcccaaagttggagaactacataagtggaattaagattcctgcaaaagaagatacagagaagccaaggctattggaacgacaatggcatacctgcggaaagcatattggtattcctccacgtatagcttttggaggcttgaaaatagcctgatataatagcaatagtagcactcaaaagtcaagcggccaagacaaaatgcaactcaaactcgagcgaatcctcccccccaattcaaatattattgaatttaaagaagcacaaaagagcaccagtaacattcacattattttgacaacacctactgataaagagagaaaggtgcacgcgaaacactgacagtgaaggttagtgtagatattattttgcttactgaagtaaatgatcaactgtaactcaaggaataacttgatggctacagaaattatttccctacaaatgaactaaacaagtagtatactacatttcacaatggcgatgtttttgttagcatgcatgcaaaaatcctaaaaatcattacaggaaagatactgtgctgcttttcgatggacagaacagcagcgaagcaagaatttcaggcaaagggcaaactgtagattagatcaaatcaagcaaataaaggacatacaagttcagtgctcgtacgttgctacggtttttgatttatgcttgagtatgtatagaatataaaacacaaagacatgtgtgttctattggctaggtgtgtgaatgtggggtttagagccaacaaccatggttcgaatccacatttatgcataattttagcttttttaccatttaaatgtgggagaagggagaggtgaaggaaaggggtgacacacgatgatggtggaaattgatgttttatagtagcagagaatgacatactagttaggtgctcgtacgttgctacggtttcgatttatgttcgagtatagagtataaaacacaaagacatgtgtgtaaatgaggtttggatagagattggcgttttatagcagtagagatatagagtcacgcagagatgagactttaattctaacagttcagtgaatcaactcctcactccccccccccccccccaacccccaaaaaaaacgttccatataattgatatactactggaagattatgaaagcaaaaaaatagtagcaccttattgctaacaaaaagtaattcatctccatgctcatctttccatgatgtcacatgcccaccatacaagtacacctacaagcaatgaaatatattgttattgaaagatcaaatgtttgtagtaggtttcaagaagaagacaaaacataaaaagagatcagaagtgcatatacaggatacaaaacaacagataatttcatgtgaactttgtataatcgtgtttcattgctgtcctttcccatgtctatgtatggaaaccatgttgctaattgtttagacaaataatagagcccacagtaacaacttttttgatagtccaagttcaaatatgagtatgatacaatctgtatcaaaattctgagggaatatatcaggttattacaatcggtttctcataaaaaaaaaccttatgcaatggcattttaagtgtgtggttacttagcctcatatacctttatgttattcattagaagtttcgactcgccaaatatagaatggctgtgcttgtaagttaatatagtcaaccagatggtgcaagtaaaagcaagagcaacagaaaaatatctcaggttgtgatgccttgttggtacttgtatgtactagtatatttgtatggaaacaagtcccgggtaataatgatggtcgctggtcagagtggcttagcccgagcggagaacactccctggctctctgtaattcaagtccctggcggaaacaccgtaacagatgaaactctgcttatcgtgtgaatctaggatcgtcattgctcagcaactgtttgcggggagacaaaatgggtcgaaactgaatccatgggacagatctggaccacagcatcagcacactggcctggcgcaccctgtcactcacaggaagccgcagaggcagcttcgctacgagtctacgacgaagccaatctgat

SEQ ID NO: 19046 - DNA, 2998 bp, Zea Mays
aactcatggaggacatattgtccctagcagcgtggtggacatattattgtttcctctccgtccatcacccaccccggtcggtctcaactcaagctctcagccacacacgccgccatcaggcacgtatgcgacctgacctcgtgttacatgctactacggccgtgtatataacagcgatcaatctaccgtgaccacccccatcctctctaacccacggaagcaagacaaaagctcgtgctggacgacatctcccctgtcgatccacgaccatgatgcagcagctccgtcacagccagccgagcccgtgcctctgcggcctgcgggcggcacggcctatgctcgccctcggcgcagcagcatcccgttcgcggcccgccggaaaactgcaaccgagcgtctgcctcggcctcggccatgtagccccagccgcggcgagaggacagccccgtccccgtgccgttgccgactcggcgctgggagcatcgcctacgagcgtgcatgtcggaggcaagctgctgctgcagaacttcgccgccgacagccagcagcggctcaagctctccatccagcttgtcagcgccaccgtggccggcgtgtgtcaaggaagaaacgccgagcgccctgctcaagtaccgggaggacgagctcggcgcgctccggggagacggcgagacgacggagcgaccgttccagccgtgggaccgcgtgtacgactacgcgctgtacaacgacctggggaacccagacctgcgccaggacctggcgcgccccgtgctgggaggatcccaggagtacccgtaccctcggcgtaccaagaccggccgaccagccgccaaaacagatcctcggtcggagagcagagcgccgctggacgaagagatctacgtcccctgcgacgagcgcgtcggcttcgccagcatccccgcgccgacgcttccgccgctgggcgggcacttcaggtccctcgccgatgtctaccgcctcttcggcctcgacgacctcggccggctcccggaggccaaggcggtcatcaacagcggcgcgccgttccccgtcgtgcctcaggtcatttcagtgaacccgacacattggcggaaggacgaagagttcgcgcggcagatgatcgccggggcgaacccggtgtgcatcaagcgcgtcaccaagttcccgctggcgagcgagcttgaccgcggggtgttcggcgaccaggacagcaagataaccaaggaccatgtcgagaagaacatgggcggcatgacggtgcagcaggccgtagaggaggggaggctgtacgtcgtggaccaccacgactgggtgatgccatacctgaagcgcatcaacgagctccctgcgagcgaggagaaggcggaggtgtcgcagaggaaggtgtacgccgccagaacgctcctgttcctggacggcgaggactcgtcgatgctcagaccgctggcgatcgagctcagctcgccgcacccggagaaggagcagctcggcgcggtcagcacggtgtacactccaccggacagcggggacgacggcatcacggccgggaggttctcaacctgggaactggcaaaggtttacgcctctgccaacgacgcagccgagaacaacttcgtcactcactggctcaacacgcacgcatccatggagccgatcgtgatcgcggcgaaccggcagctgagcgtgctgcacccaatccacaggctcctcaagccgcacttccggaagacgctccacatcaacgccgtcgcacgccagatcatcgtcggctcgggtgaccagaggaaggacggcagcgtcttccgtggcatagacgaggtcacgtacttccccagcaagtacaacatggagatgtcctccaaggcgtacaaagcctggaacttcacggaccttgctcttcccaacgatctcatcaagagaggtctggcaaaaggagatccaaagaagccagagacggtggagctggcgataaaggactacccgtacgcggtggacgggctcgacatgtgggcggcgatcaagaagtgggtggctgactactgcgccatctactacgccgacgacggcgcggtggcgagggacagcgagctgcaggggtggtggagcgaggtcaggaacgtggggcacggcgacctggcggacgcgccgtggtggccggcgatggactgcgtcgccgacctcgtggagacctgcgccaccgtcgtctggctgagctcggcgtaccacgcgtccatcagcttcgggcagtacgactacctgggcttcgtcccgaacgggccctccatcaccacgcggccggtgccgggcccggacgccggggcggaggtcacggagtcggacttcctggcgagcgtcacgccggtcaccgaggcgctggcggagttccgggcgaggttggaggaggtcgcgggcaacatcgacaggcggaacgcggaccctgcgctgaagaaccggacggggcaggtggaggtgccctatacgctgctcaagccgacggcacagcccggactggtgctccgtggcatacccaacagcatcaccgtttgagcagcagagcgccgtcggcagctgtcagctgtgtacagtacagaataataaggtggtcgtgtttggcgctatctccaccacataaacgtgaaaatgtttttttttgaattatatggacatgcagggccgcagcccgtaagcctggccccagtttcggttttctgttttttttttttttgcctcgatctggtgatcagcaagccacgtcggtccgggtgatctcgctaccggagatagaatgtgtacacgaaacctaataggtttttactccattaggatacgaggttgagtcaattttcatacctatagatttgttaatgagcataaatttatacccgacgagttcatgagtataagtttattatgtgaaccgtgggtttttaaacccgaccaaacttagtgtatattgtcattttattttataaacggacaataaacttgttatctc

SEQ ID NO: 19047 - DNA, 2261 bp, Zea Mays
  misc_feature (1)..(2): n is a, c, g, or t
nntgaacttggtattgcaatagatgggggaaaagacagtctttccatggcagcccaatgtgatggtgaagtcgtcaaggctcctggaaatctggtcatcagtacttacgtgacatgtcctgatataacattgacagtaacccctgatttgaagcttggtaatgatggcatccttcttcatattgacctcgctaaaggaaatcgccgtcttggtggttctgctcttgcacaagcatttgatcaaattggaaatgattgcccagacattgatgatgttctgtacctgaagaaggtatttgaggccattcaggaattgctcagtcagcgtcttatttcagcaggccatgacataagcgatggtggccttattgtgagtgttcttgagatggcatttgctggtaattgtggttttaagcttgacatagacttggaagataggagccttcttgaaggactttttgcagaggagcttggccttgttattgaagtgcactcgaaatatctcaatatcgtgaagcaaaaacttgaagcaacaggcatttctgctaatgtaattggagaagttacttgctcaccagaaatagaagtttttgttgatggcaatctgcatctcaaggaaaaaacttcagatatcagggatctctgggaggaaacgagcttccagcttgaggagttacaacgactgaaatcttgtgtcaaacttgagaaagaaggattaaaaagcagaacatcaccatcgtggtctctgtcttttactcccaaattcacagatgagaaactgttgattgcttcctcgaaaccaaaggtcgctatcattcgtgaagaagggagcaatggggacagggaaatggctgctgcattccacgctgctggatttgaaccatgggatatcacaatgtcagacctcttggcggggaagtcttcgctaacagtgttccgtgggattgcgtttgttggtggtttcagctatgcagatgtgctggattcagcaaaaggttgggctgcatcaatcaggtttaacaaacccctcattcagcaatttcaggaattctaccataggccagacacgttcagccttggagtatgtaatggttgtcaacttatggctcttcttggctgggtgccaggatctgatgttggaggttctcttagtaaaggtggagatataacccagcccaggtttattcacaatgaatccggtcgtttcgagtgccggtttactagtgtgtccattggggtttctcctgctatcatgttcaaagggatggaaggttctaccttgggtgtttggagtgctcatggtgagggaagagctttcttcccagatgaaaatgttctagctactgtagtgaagtctaatctggcacctgtgcgatattgcgatgattttaacaacataaccgagacctaccccttcaatcctaatggttctccactaggtattggagccctttgctcccctgatgggagacaccttgctatgatgccacatccggagcgttgcttcatgatgtggcaattcccatggtatcccaaggaatggcaggttgagaagagtggccccagcccttggctgcgtatgttccagaatgcaagggaatggtgttcatagtgcagtgcccagctgtagcgatgcggatggttgttttcatctgatgaccccttccttttgcggaataaagaggtgttcgacccgcagcgcgttatccaagctgataacaaacgtgtcaaaattgaagttttatacatagaaaactgccaggttttttgcgtagcctatgccaaagatgcgtaaactgtcagccccatcagggcttgtttggtaatcttggattagagtggattgaagtggtataagatatattaaagtgtaatataaactaatttccctttaaatctctaaaatacacctcaatccacttcaatccctctttatccaaacaaagcctcagtgaatttcccaatcaacgtagagaatgcttgctgcgttactcaaatctgatgcttatgcaatggtcgtttttgtgctgtctgtctgatgatgagtaagtatgagttcattcgcaaccagacaagtcattagtatgaattcagtcgcaaccagacaagtcattgtaatagcttgagataattcatctggtgatgtggcaaattcttagagtcccatattttccgcatatatatacccagcactcctatcaacagacaagaactggcggttggggttttatggcgagaaaaaaaatctggtggctggggttc

SEQ ID NO: 19048 - DNA, 2004 bp, Zea Mays
atggcgagagctggaggcggcggtccggtccgcggcgcggcgctggtggtcgtgctgctaggcatcgtcgtgggcgcggcgagggctcagctgcggcagaactactacggcagctcgtgccccagcgcggagtccacggtgcgctccgtcatctcgcagcgcctccagcagagcttcgccgtggggcccggcacgctccgcctcttcttccacgactgcttcgtcaggggatgcgacgcgtcggtgatgctgatggcgccgaacggggacgacgagagccacagcggcgcggacgccacgctgtcgccggacgccgtggacgccatcaacaaggcgaaggcggccgtggaggcgctccccgggtgcgccggcaaggtctcgtgcgcggacatcctcgccatggccgcacgtgacgtcgtctccctgctgggcggtccgagctacggcgtggagctggggcggctggacggcaagacgttcaacagggccatcgtgaagcacgtcctcccgggccccggcttcaacctggaccagctcaacgccctcttcgcgcagaacggcctcacgcagacggacatgatcgcgctctcaggtcagcctcactgcctgtactctactctactctgcgctcctctcggccacagcactgtcagctctagttcgtcgagatgaatgaaacgcgacagcctaggctgtggctgtcaaattaacgaccgtgcctcctcgctctcgttactgttctcctctttggtcactgtgacaaggtaggtaggtagctcgatcgcagtacaaaaaaacaaagcatcttttgtctgtggctcacgtgactttatctttatcctcccctctgcctttgcggcaccgagacaaagtggttcgctgttctatgctgcacctgcacccgctctgatgttttcaaaaaaaaaaaagaagagccagacaaagtggttcattttctgaggacgttgatttgattcatataaacaactaacaaaaggttcctggtgaacttttcgaggggtttttttagtttgttgcctagctaggctctcatgttttggttctggtttttgtctttgattcggtgttgggaatgataaaagaacgacgtttgtagcgcgcacacgatcggggtgacgcactgcgacaagttcgtgcggcggatctacacgttcaagcagcggctggcgtggaacccgccgatgaacctggacttcctgcgctcgctgcggcgggtgtgccccctcagctacagccccacggcgttcgccatgctggacgtcaccacgcccagggtcttcgacaacgcctacttcaacaacctccgctacaacaagggcctgctcgcctccgaccaggtgctcttcaccgaccgccgctcccgacccaccgtcaacctcttcgccgccaacgccaccgccttctacgaggcattcgtcgccgccatggccaagctcggcaggatcggcctcaagaccggcgccgacggcgagatacgccgcgtctgcaccgccgtcaactaagcctgcattggctgcttgctgcttgcgtgcgtgggtttcacttatttcacttcttctttctcttgtttatatacgtacgtttgtcggatggattttggtagccatgagatgacatccttgctctgagctagcggacctgccccgattggatgatatagattgatccagatgttcttctagtagattctaattctttagggcttgtttgggatcaaaggtaatggagtggattgaggggactagaatcccctactacttaattttgaatagtgagggattatagccccctcaatcccctccattaccctttgtcccaaacaagcccttatggatgtttcccattgacacgcggttacgcgcgcttcaaccgtacgcagctcacgaacttcctctacctctatatcatcagtatgtctccaaaagtccttcagcaacaacttccatgttctcaatcatgtcatccaaaaaaatctaacacccc

SEQ ID NO: 19049 - DNA, 1092 bp, Zea Mays
tggagatggagaggcccaccatttgggttggggcgccgctgggcggtccgagctacggcgtggagctggggcggctggacggcaagacgttcaacagggccatcgtgaagcacgtcctcccgggccccggcttcaacctggaccagctcaacgccctcttcgcgcagaacggcctcacgcagacggacatgatcgcgctctcaggcgcgcacacgatcggggtgacgcactgcgacaagttcgtgcggcggatctacacgttcaagcagcggctggcgtggaacccgccgatgaacctggacttcctgcgctcgctgcggcgggtgtgccccctcagctacagccccacggcgttcgccatgctggacgtcaccacgcccagggtcttcgacaacgcctacttcaacaacctccgctacaacaagggcctgctcgcctccgaccaggtgctcttcaccgaccgccgctcccgacccaccgtcaacctcttcgccgccaacgccaccgccttctacgaggcattcgtcgccgccatggccaagctcggcaggatcggcctcaagaccggcgccgacggcgagatacgccgcgtctgcaccgccgtcaactaagcctgcattggctgcttgctgcttgcgtgcgtgggtttcacttatttcacttcttctttctcttgtttatatacgtacgtttgtcggatggattttggtagccatgagatgacatccttgctctgagctagcggacctgccccgattggatgatatagattgatccagatgttcttctagtagattctaattctttagggcttgtttgggatcaaaggtaatggagtggattgaggggactagaatcccctactacttaattttgaatagtgagggattatagccccctcaatcccctccattaccctttgtcccaaacaagcccttatggatgtttcccattgacacgcggttacgcgcgcttcaaccgtacgcagctcacgaacttcctctacctctatatcatcagtatgtctccaaaagtccttcagcaacaacttccatgttctcaatcatgtcatccaaaaaaatctaacacccc

SEQ ID NO: 19050 - DNA, 924 bp, Zea Mays
ctcgttactgttctcctctttggtcactgtgacaaggcgcgcacacgatcggggtgacgcactgcgacaagttcgtgcggcggatctacacgttcaagcagcggctggcgtggaacccgccgatgaacctggacttcctgcgctcgctgcggcgggtgtgccccctcagctacagccccacggcgttcgccatgctggacgtcaccacgcccagggtcttcgacaacgcctacttcaacaacctccgctacaacaagggcctgctcgcctccgaccaggtgctcttcaccgaccgccgctcccgacccaccgtcaacctcttcgccgccaacgccaccgccttctacgaggcattcgtcgccgccatggccaagctcggcaggatcggcctcaagaccggcgccgacggcgagatacgccgcgtctgcaccgccgtcaactaagcctgcattggctgcttgctgcttgcgtgcgtgggtttcacttatttcacttcttctttctcttgtttatatacgtacgtttgtcggatggattttggtagccatgagatgacatccttgctctgagctagcggacctgccccgattggatgatatagattgatccagatgttcttctagtagattctaattctttagggcttgtttgggatcaaaggtaatggagtggattgaggggactagaatcccctactacttaattttgaatagtgagggattatagccccctcaatcccctccattaccctttgtcccaaacaagcccttatggatgtttcccattgacacgcggttacgcgcgcttcaaccgtacgcagctcacgaacttcctctacctctatatcatcagtatgtctccaaaagtccttcagcaacaacttccatgttctcaatcatgtcatccaaaaaaatctaacacccc

SEQ ID NO: 19051 - DNA, 929 bp, Zea Mays
ctgaggacgttgatttgattcatataaacaactaacaaaaggcgcgcacacgatcggggtgacgcactgcgacaagttcgtgcggcggatctacacgttcaagcagcggctggcgtggaacccgccgatgaacctggacttcctgcgctcgctgcggcgggtgtgccccctcagctacagccccacggcgttcgccatgctggacgtcaccacgcccagggtcttcgacaacgcctacttcaacaacctccgctacaacaagggcctgctcgcctccgaccaggtgctcttcaccgaccgccgctcccgacccaccgtcaacctcttcgccgccaacgccaccgccttctacgaggcattcgtcgccgccatggccaagctcggcaggatcggcctcaagaccggcgccgacggcgagatacgccgcgtctgcaccgccgtcaactaagcctgcattggctgcttgctgcttgcgtgcgtgggtttcacttatttcacttcttctttctcttgtttatatacgtacgtttgtcggatggattttggtagccatgagatgacatccttgctctgagctagcggacctgccccgattggatgatatagattgatccagatgttcttctagtagattctaattctttagggcttgtttgggatcaaaggtaatggagtggattgaggggactagaatcccctactacttaattttgaatagtgagggattatagccccctcaatcccctccattaccctttgtcccaaacaagcccttatggatgtttcccattgacacgcggttacgcgcgcttcaaccgtacgcagctcacgaacttcctctacctctatatcatcagtatgtctccaaaagtccttcagcaacaacttccatgttctcaatcatgtcatccaaaaaaatctaacacccc

SEQ ID NO: 19052 - DNA, 1046 bp, Zea Mays
cttgggcgcagtatataagctagcagccggcacctgaagcatctcaagtccacgcaccaccgaacagacagagaccgcggagcagagtggccgcccatcgccatgccgaagctgcagaggttcagaggagtgaggcagaggcactggggctcctgggtctccgagatccgacacccactcctgaagacgaggatctggctgggcacgtacgagacggcggaggacgcggcgcgggcgtacgacgaggcggcgcgcctgatcagcggccccgcggcgcgcaccaacttcccccttaccggcggcggcggcgggggcacgctctccccgacgctgcgcgcgaagctggagaaatgctgctgcacggcgctggcgcaggaggcgcagcacggcgcggacgtgccgcggacgggtgcgggtcggggcgacgacggcagtagccgccgcgatcgccggcgggacggcgacgaggaggatgaggaggccggcgtgaaagtcgagcccgacgccgacgccgacggcgaggagtacatcgaggagatgatcagggagctcacctactacggccctgtcgagatacagcaccacccgtcggccgccggcggcggcggcgcctgctcgagctcggcgatcgggtgactgacgagctgcctatagattgcttagccggctgtgcagtgcagtcgacgtcgttgtacagcgtttgtttcgctaggcatgcaggcacatttagcctggggcccgcccgacccggagggatgatgggccctttcctgttcctgttcctgggctggggattcggggttgagcgagagccagagcgggaaggggaccaaaggatctttcgggataagggctcctgatttggttcaaaaagaaaaaaaaaattgtcagcgtattgtcgttaaaaaaagaaaaaggaaaaaaaaaggaagcagctcatgcatgcgagcacgcacaacacagaaaggcccatagctcagtacaaaacaagggttacatgagtacatcgcctgaaacaccagcgtccatcatcatacagagagaga

SEQ ID NO: 19053 - DNA, 649 bp, Zea Mays
cacgggtgcgccggctcgccttgtgcatctgcggtgtgggcccggaccagttagagggtcttcttctttccccgcacgactcgctcgcccgcacaccggccacgggggaatccgggggtggttgtgctagtcatgcataccggacctccccttgcccctccgattcgctccacgccagcacctaggaacttgggccagagcttggtgttccgctattcgcaaccgcaaaggagagcttgaagacaccaccgcacccgtatttggtctgtggtgccgttcggctccccggatgtgggtagagcgcatcgtttgcgagtgagggacctggacagggcgactccaggggcggtgaaccggtgagtctctgttaattgctcgctgacgacacatcgccaccgcgggtctgcgctacaccgtggatagggcctcgcatcgcgtgattcatggtaaggactccttcccccgactcgcgttcatctctatttcgtgtagcctcgtccgaatctgggttttgggggcaccagtgccattggtggcttccgctggccatggccgccgccggggtgggtctgcgatgtggcctgtgccaccaggagggcagggatgatgtctaggtcgcttgatgcgaaagcaagggccaagattagat

SEQ ID NO: 19054 - DNA, 772 bp, Zea Mays
cacgggtgcgccggctcgccttgtgcatctgcggtgtgggcccggaccagttagagggtcttcttctttccccgcacgactcgctcgcccgcacaccggccacgggggaatccgggggtggttgtgctagtcatgcataccggacctccccttgcccctccgattcgctccacgccagcacctaggaacttgggccagagcttggtgttccgctattcgcaaccgcaaaggagagcttgaagacaccaccgcacccgtatttggtctgtggtgccgttcggctccccggatgtgggtagagcgcatcgtttgcgagtgagggacctggacagggcgactccaggggcggtgaaccggtgagtctctgttaattgctcgctgacgacacatcgccaccgcgggtctgcgctacaccgtggatagggcctcgcatcgcgtgattcatggagaagaacaggtggttcaagaggagccacacaacgaggagttcgattcgatctaggtggtgtctcccagttgactttctggcgccaaggatggattttagatcctgttatatttatcttttattttgtaagacttccgctatgtaataagtactctgatgttattatgacatttatctctatacactttgttattatatatgttgtcttctttggcgcatgtatgagatgcacctggctttgtctcttagaaatcgcgtgtgacaattttcatcaaggagtaattttaacaaaagtcaacctagctaagagaaattggattggac

SEQ ID NO: 19055 - DNA, 735 bp, Zea Mays
cgcaaacccaggcgacatgggatgcacgacttgtgggtaaagggtacaacctctgcagagtgtaaaactggtatactcgccgagctcacggtcatgagcagcttaggactctcgcatgattaatttatggaacttaaattcaatttgtcatttgaattgcatgggattatgtattaattttgttctattattcttaatatggtttggtatttacttacatttagtaatttataataaaatttgatcaacttattaaaagcaatgctcagctttaaacccctattgttgatcagctttacacatcacataaactcctgcctttggtgagttcatgccacattattctccacaacttgttgagcgatgaacatgtgtgagctcacccttgctgtctcacacctccccacaggagaagaacaggtggttcaagaggagccacacaacgaggagttcgattcgatctaggtggtgtctcccagttgactttctggcgccaaggatggattttagatcctgttatatttatcttttattttgtaagacttccgctatgtaataagtactctgatgttattatgacatttatctctatacactttgttattatatatgttgtcttctttggcgcatgtatgagatgcacctggctttgtctcttagaaatcgcgtgtgacaattttcatcaaggagtaattttaacaaaagtcaacctagctaagagaaattggattggac

SEQ ID NO: 19056 - DNA, 2210 bp, Zea Mays
cccaggccccaactcgcaagtcgcctgccagcccggttagcaaggaagcacgcaggatatttggtgcgcgcgggcggtgtgagcggtgagcctgcaaaagccagcagcagcgagcgtcggtaggggagcccgggcagcggagcacacttgccctctccacctggaaccccgagcaggctccgccggccacggccggtgccgcgacgactcggcacgcgctagctagctagctgttcctcttcccgagggccccaccactaccaccatcctgccgcccggcctcgtgtggcggatgatgattcctagggagccgtggcggccggagcacccttccaactcctgatcccgagctgacccccgccatcgcagcggcggctctgccgcagcgtctgtgtccagacttatgatgatggagacccctcaaatcgagatgggcggtttcaaggtcaacagcccgcaagtgcccaacggcgtgttgcggcccaccgtgtcttcctcctggaactcgcgagggacggtcgagagggcgctcaagagcatcaggatcgtcattttcacttccaagctcaacttgctcatgccgttcgggcctgcgtccatcattctccacttcacgactaggaggcatcatgctaggaataacacctttagctgagcgtttaggatatgcaactgagcagcttgcaatatacactggtccaacagttggtggccttctgaatgctacatttggaaatgcaaccgaaatgatcattgcagtatatgctttgaaaaatggaatgatccgagtagtgcagcagtcactattgggttccatattgtcaaatatgctgttggttatgggttgtgctttctttgctggtggtgttgttcaccgcaacaaagaccaaatcttcagtaaggcaactgcagttgtcaactcaggtttactgttgatggctgtcatgggattgatgtttcctgccgttcttcatttcactcattcagaagtgcgtcaaggggcatcagaggttgcactttcaaggttcagtagttgtattatgcttgtggcgtatgccagctatctctatttccaattaagtggacggagcaacatttacagtccaataggcagtgaagaggcgcctattgaggatattgcagaggaagatgaagaagctgagattggcatgtgggaggcagtaacatggcttgcggttttaacactctgggtgtcttttctttctgagtacctagttaacgccattgagggagcatctgattcattgaacctaccggtggcttttatcagtgttattttgcttcctattgtgggcaatgcagctgaacatgcaagtgcaataatgtttgccatgaaagataagcttgacataacactgggtgttgcaattggttcatcaacacagatatcaatgtttgtgattccattttgtgttgttattggttggatgatgggacaaaggatggacttgaattttcagctatttgagacagcaactctcttcataacagtgcttgtggtagcatttatgctacaggatgggactgcgaactacttgaaaggacttatgctgatcctatgttatctaatagttgctgccagtttctttgttcatgttgatccacaatcaagtgatggttgatgccgtagatgctgtaagtaatgcgtcaaataccttttgaaacttgttaatcctttcttgtggaggtgctactccatagcaacgttccacctgtttcaagcagcatgctggcaaaaaaaaaaggcgggaagatcacacattgtcggttccttcatgaaccgcaaaaggaattcttgtattgtgtggataatgaggtgtactaggggtagtctcaatgtatacagaaacaagaagtgccagcatgttacattcgattaattggatgggtgagtccctctttttttttctggttccctttgagatttgggtatatgatttgatgctgactgaggctaagatctctcatccttttttgtggttgatgatgtccgcgcactcatggttctacatctacgtttctttttcttccctagtgattatgtgtacatttgtggttgaccatgtccgcacagtcacggatggtcataccccatgtgaggatcttaatactctaacgccgcgcaaaaattctagtattccttaaaccaaacacatcttgatggcaaatcaatttgtatggcttgtcct

SEQ ID NO: 19057 - DNA, 2235 bp, Zea Mays
cccaggccccaactcgcaagtcgcctgccagcccggttagcaaggaagcacgcaggatatttggtgcgcgcgggcggtgtgagcggtgagcctgcaaaagccagcagcagcgagcgtcggtaggggagcccgggcagcggagcacacttgccctctccacctggaaccccgagcaggctccgccggccacggccggtgccgcgacgactcggcacgcgctagctagctagctgttcctcttcccgagggccccaccactaccaccatcctgccgcccggcctcgtgtggcggatgatgattcctagggagccgtggcggccggagcacccttccaactcctgatcccgagctgacccccgccatcgcagcggcggctctgccgcagcgtctgtgtccaggtgagacttatgatgatggagacccctcaaatcgagatgggcggtttcaaggtcaacagcccgcaagtgcccaacggcgtgttgcggcccaccgtgtcttcctcctggaactcgcgagggacggtcgagagggcgctcaagagcatcaggatcgtcattttcacttccaagctcaacttgctcatgccgttcgggcctgcgtccatcattctccacttcacgactaggaggcatggattgattttccttttcagcatgctaggaataacacctttagctgagcgtttaggatatgcaactgagcagcttgcaatatacactggtccaacagttggtggccttctgaatgctacatttggaaatgcaaccgaaatgatcattgcagtatatgctttgaaaaatggaatgatccgagtagtgcagcagtcactattgggttccatattgtcaaatatgctgttggttatgggttgtgctttctttgctggtggtgttgttcaccgcaacaaagaccaaatcttcagtaaggcaactgcagttgtcaactcaggtttactgttgatggctgtcatgggattgatgtttcctgccgttcttcatttcactcattcagaagtgcgtcaaggggcatcagaggttgcactttcaaggttcagtagttgtattatgcttgtggcgtatgccagctatctctatttccaattaagtggacggagcaacatttacagtccaataggcagtgaagaggcgcctattgaggatattgcagaggaagatgaagaagctgagattggcatgtgggaggcagtaacatggcttgcggttttaacactctgggtgtcttttctttctgagtacctagttaacgccattgagggagcatctgattcattgaacctaccggtggcttttatcagtgttattttgcttcctattgtgggcaatgcagctgaacatgcaagtgcaataatgtttgccatgaaagataagcttgacataacactgggtgttgcaattggttcatcaacacagatatcaatgtttgtgattccattttgtgttgttattggttggatgatgggacaaaggatggacttgaattttcagctatttgagacagcaactctcttcataacagtgcttgtggtagcatttatgctacaggatgggactgcgaactacttgaaaggacttatgctgatcctatgttatctaatagttgctgccagtttctttgttcatgttgatccacaatcaagtgatggttgatgccgtagatgctgtaagtaatgcgtcaaataccttttgaaacttgttaatcctttcttgtggaggtgctactccatagcaacgttccacctgtttcaagcagcatgctggcaaaaaaaaaaggcgggaagatcacacattgtcggttccttcatgaaccgcaaaaggaattcttgtattgtgtggataatgaggtgtactaggggtagtctcaatgtatacagaaacaagaagtgccagcatgttacattcgattaattggatgggtgagtccctctttttttttctggttccctttgagatttgggtatatgatttgatgctgactgaggctaagatctctcatccttttttgtggttgatgatgtccgcgcactcatggttctacatctacgtttctttttcttccctagtgattatgtgtacatttgtggttgaccatgtccgcacagtcacggatggtcataccccatgtgaggatcttaatactctaacgccgcgcaaaaattctagtattccttaaaccaaacacatcttgatggcaaatcaatttgtatggcttgtcct

SEQ ID NO: 19058 - DNA, 1754 bp, Zea Mays
ataaaaaccaacaccaaataacatgtatacataaagaatttagggagtagccaatatgtcacaatagtggaactccccaacaacatggctagtttagttgttctggttatatgtggtacttgtacatgtctcatcatcactaggaaaccttcgtcagctgagttcatcgagtgctattgcatgctaggaataacacctttagctgagcgtttaggatatgcaactgagcagcttgcaatatacactggtccaacagttggtggccttctgaatgctacatttggaaatgcaaccgaaatgatcattgcagtatatgctttgaaaaatggaatgatccgagtagtgcagcagtcactattgggttccatattgtcaaatatgctgttggttatgggttgtgctttctttgctggtggtgttgttcaccgcaacaaagaccaaatcttcagtaaggcaactgcagttgtcaactcaggtttactgttgatggctgtcatgggattgatgtttcctgccgttcttcatttcactcattcagaagtgcgtcaaggggcatcagaggttgcactttcaaggttcagtagttgtattatgcttgtggcgtatgccagctatctctatttccaattaagtggacggagcaacatttacagtccaataggcagtgaagaggcgcctattgaggatattgcagaggaagatgaagaagctgagattggcatgtgggaggcagtaacatggcttgcggttttaacactctgggtgtcttttctttctgagtacctagttaacgccattgagggagcatctgattcattgaacctaccggtggcttttatcagtgttattttgcttcctattgtgggcaatgcagctgaacatgcaagtgcaataatgtttgccatgaaagataagcttgacataacactgggtgttgcaattggttcatcaacacagatatcaatattccattttgtgttgttattggttggatgatgggacaaaggatggacttgaattttcagctatttgagacagcaactctcttcataacagtgcttgtggtagcatttatgctacaggatgggactgcgaactacttgaaaggacttatgctgatcctatgttatctaatagttgctgccagtttctttgttcatgttgatccacaatcaagtgatggttgatgccgtagatgctgtaagtaatgcgtcaaataccttttgaaacttgttaatcctttcttgtggaggtgctactccatagcaacgttccacctgtttcaagcagcatgctggcaaaaaaaaaaggcgggaagatcacacattgtcggttccttcatgaaccgcaaaaggaattcttgtattgtgtggataatgaggtgtactaggggtagtctcaatgtatacagaaacaagaagtgccagcatgttacattcgattaattggatgggtgagtccctctttttttttctggttccctttgagatttgggtatatgatttgatgctgactgaggctaagatctctcatccttttttgtggttgatgatgtccgcgcactcatggttctacatctacgtttctttttcttccctagtgattatgtgtacatttgtggttgaccatgtccgcacagtcacggatggtcataccccatgtgaggatcttaatactctaacgccgcgcaaaaattctagtattccttaaaccaaacacatcttgatggcaaatcaatttgtatggcttgtcct

SEQ ID NO: 19059 - DNA, 1093 bp, Zea Mays
tgtcttgtattttttcttttatcaatgggtttaagattcactagctttctcattctactctttcacaaaggagtgcgacaagaactcaatgaatcttatgctattcattaaatagatgatttctttttttatttattagagtagagtatcggcaaggaatctcgattattaattcgttttttaagtattattaagtaagccatccataatgcatagactacccctcccatttcctaattttgaatgtaatactttattgattttttagtccctttaattgacatagatgtaaatactttaataagatgatgcacaagaaagggtcaggctagctcagttggtagagcagagcactgaaaatcctcgtgtcaccgtcgagtgagagcctccaatcttggaaggcttgtagccttcgaactgttatgatactataactctctccaacaaagaccatcctgtaaaccaaatttagacaatcgaacgtcctgtatggcgtggtggcgcccaacaacgaagttccgataaaatatcggtccatcatcagcgccgccgtgcatccaccagtcgccgttcagggccaccgtcgtgcatccactagtcgtcgtgcatccaccagcagcggccatgcctgcgttcaaggccctggcgtcgggcttcgccgtgcccaaaactagcaagttagctccggccaccatagccacgcgctacgcccctgatggggcaactttgacgctggtgaagctggattgcggacggcggggaccagctcgtttccaacgccgatgaacagacatgagcgctgggagcgctcggctgtgcctgatgccgacgagtgcgtggtcgtcgaccaggcgcagtcgcggggctcgtcttggctgacgcagaggccgccgtgctgcccgcggtattcttgtagcttcgatttcttttcttgtgcccaattggagtgaagctgtggaagaaaggcgacaacagcttgcaatgcacatgtttgacgaaatggttgagcagaagaacagaaaaataaaccgttgttttcatgctaccaccagtatatgtatagtgaaatctgataccactataattatataga

SEQ ID NO: 19060 - DNA, 2719 bp, Zea Mays
attcacctcaagattgagatactaggccttggagggaatttccgtggagaatcaggatcggccccattgccgtctctagcaccactagtagcgaagccactggttgttggtaggtgcacgcaccccaccccctcctgccgtcctcgatctcgtctcctcctccctacccaatccctcgcggtgggcgagggtggaagcgagtgacgatggcggcgctggaggcggcgagggagtgggcgggctccgtcataccgccggagctcgccgccgccgcggggggagacccactcgccgcgctggcggccaccgccgcggccctcgtcgcggggctgcttattatcgctgtctggttccgatccggaggcgggacgccgtccaagccggtcgccacgccggtacggccaccgccggtcaaggtggacgccgacgccgacgttgatgacggccggaagcgcgtcaccatcttcttcggcacacagactggcaccgccgaggggttcgcaaagtccatggcggaggaggcgagggcgcggtacgagaaggccgtgttcaaagtggtggatctggatgactatgctcaggaggacgaggaatacgaggagaagctgaagaaggaaactgtggtgctgtttttcctagcaacatatggggatggggagccaactgataatgcagcacgattctacaaatggtttactgagggaaaagagaaggaagtttggttgaaggatcttaaatatggtatttttggccttggaaacaggcaatacgaacattttaataaggttgcaaaggtggtagatgagctagtagaggagcagggtgggaaacgtcttgttcctgttggccttggagacgatgatcagtgcattgaggatgatttcactgcatggaaagaactagtgtggccagaattagatcaattgctccgcgacgaggatgacacaactggtgcatcgactccatatactgctgctattcctgaatacagagttgttttcattgacaaatctgacctgtcattccaagatagatcatggacactagccaacggtactggtgtgattgatattcaacacccttgcaggtctaatgttgctgttcggaaggagctgcacaaaccagcttcagatcgctcttgtatccatctcgagtttgacatttctggcactggtcttgtgtatgaaaccggagaccatgttggtgtatatgcagaaaattctgttcagactgtggaggaggttgaaaggctacttgacctttctccagacacattcttctccatccatgcagatgcagaagatggatctcctcgtaaaggaggaggttccttggccccacctttcccatctccatgtaccttgcggactgcgcttctacgatatgctgatctactcaatccaccgaagaaggctgctttgcttgctttagcttctcacgcatctgatccagctgaagctgagcgacttagattcttggcttctccttctggaaaggatgagtattctcaatggataactgctagtcagaggagccttcttgaagttatggccgcattcccttcagctaagccaccactgggagtgttttttgcagcaatagctcctcgtctgcaaccacgatactactcaatttcatcatctccaaagatggctccctccagaattcatgtaacatgtgcgttagtttatgggccttcaccaacaggaaggatccaccaaggagtttgttcaacatggatgaagaatacaattcctctggaatatagcgaagaatgcagctgggctcccatctttgtgaggcagtcaaatttcaagttacctgctgatccgtccactcctattatcatgattggtcctgggacagggctggctccttttagaggcttcttgcaggttagcattgaaacaatctggggcagaattgggcacttcaatccttttctttggatgcaggaaccgtaatatggactacatatatgaagatgagttgcaaactttccttgaggagggggcgctttctgagctaattgttgcattctctcgggaagggccaacgaaagaatatgtgcagcataagatggtggaaaaggccacagatatttggaacatcatctcaaatggtggttacttatatgtttgcggtgatgccaagggaatggctagagatgtacacaaaatgcttcatacaatagtccaagagcagggatctttggataactccaaaaccgagagctatgtaaagagcctgcagatggaaggaaggtacctccgtgatgtatggtgacacatcacctcaaataagccatagctctagcgtgtggaagtaaagctggctttgcgtgtatgacatgtctaatgccaacccaatcgtcagctttggaatgaagcgtgccattgatgatatactgaaatgagttgatcagtgcaattctttgacatctaactatttattattatatgagatgggaggaactgatggagaataaatgctgctgtagatttgtagaagttcaaaaaaattgggtacccctgacaagtttgtagccaagggggtacatcatacagtttgagatgaggacactatgtatactgtttgagacgaggacattatgtatactactctagaaggctaccgaaaccaaattttgcatctgtttattaaaagcttgtacttttatcatggtatccgtcgttggcaatctacaactttgtacagc

SEQ ID NO: 19061 - DNA, 2692 bp, Zea Mays
aagattgagatactaggccttggagggaatttccgtggagaatcaggatcggccccattgccgtctctagcaccactagtagcgaagccactggttgttggtaggtgcacgcaccccaccccctcctgccgtcctcgatctcgtctcctcctccctacccaatccctcgcggtgggcgagggtggaagcgagtgacgatggcggcgctggaggcggcgagggagtgggcgggctccgtcataccgccggagctcgccgccgccgcggggggagacccactcgccgcgctggcggccaccgccgcggccctcgtcgcggggctgcttattatcgctgtctggttccgatccggaggcgggacgccgtccaagccggtcgccacgccggtacggccaccgccggtcaaggtggacgccgacgccgacgttgatgacggccggaagcgcgtcaccatcttcttcggcacacagactggcaccgccgaggggttcgcaaagtccatggcggaggaggcgagggcgcggtacgagaaggccgtgttcaaagtggtggatctggatgactatgctcaggaggacgaggaatacgaggagaagctgaagaaggaaactgtggtgctgtttttcctagcaacatatggggatggggagccaactgataatgcagcacgattctacaaatggtttactgagggaaaagagaaggaagtttggttgaaggatcttaaatatggtatttttggccttggaaacaggcaatacgaacattttaataaggttgcaaaggtggtagatgagctagtagaggagcagggtgggaaacgtcttgttcctgttggccttggagacgatgatcagtgcattgaggatgatttcactgcatggaaagaactagtgtggccagaattagatcaattgctccgcgacgaggatgacacaactggtgcatcgactccatatactgctgctattcctgaatacagagttgttttcattgacaaatctgacctgtcattccaagatagatcatggacactagccaacggtactggtgtgattgatattcaacacccttgcaggtctaatgttgctgttcggaaggagctgcacaaaccagcttcagatcgctcttgtatccatctcgagtttgacatttctggcactggtcttgtgtatgaaaccggagaccatgttggtgtatatgcagaaaattctgttcagactgtggaggaggttgaaaggctacttgacctttctccagacacattcttctccatccatgcagatgcagaagatggatctcctcgtaaaggaggaggttccttggccccacctttcccatctccatgtaccttgcggactgcgcttctacgatatgctgatctactcaatccaccgaagaaggctgctttgcttgctttagcttctcacgcatctgatccagctgaagctgagcgacttagattcttggcttctccttctggaaaggatgagtattctcaatggataactgctagtcagaggagccttcttgaagttatggccgcattcccttcagctaagccaccactgggagtgttttttgcagcaatagctcctcgtctgcaaccacgatactactcaatttcatcatctccaaagatggctccctccagaattcatgtaacatgtgcgttagtttatgggccttcaccaacaggaaggatccaccaaggagtttgttcaacatggatgaagcgaagaatgcagctgggctcccatctttgtgaggcagtcaaatttcaagttacctgctgatccgtccactcctattatcatgattggtcctgggacagggctggctccttttagaggcttcttgcaggaaaggttagcattgaaacaatctggggcagaattgggcacttcaatccttttctttggatgcaggaaccgtaatatggactacatatatgaagatgagttgcaaactttccttgaggagggggcgctttctgagctaattgttgcattctctcgggaagggccaacgaaagaatatgtgcagcataagatggtggaaaaggccacagatatttggaacatcatctcaaatggtggttacttatatgtttgcggtgatgccaagggaatggctagagatgtacacaaaatgcttcatacaatagtccaagagcagggatctttggataactccaaaaccgagagctatgtaaagagcctgcagatggaaggaaggtacctccgtgatgtatggtgacacatcacctcaaataagccatagctctagcgtgtggaagtaaagctggctttgcgtgtatgacatgtctaatgccaacccaatcgtcagctttggaatgaagcgtgccattgatgatatactgaaatgagttgatcagtgcaattctttgacatctaactatttattattatatgagatgggaggaactgatggagaataaatgctgctgtagatttgtagaagttcaaaaaaattgggtacccctgacaagtttgtagccaagggggtacatcatacagtttgagatgaggacactatgtatactgtttgagacgaggacattatgtatactactctagaaggctaccgaaaccaaattttgcatctgtttattaaaagcttgtacttttatcatggtatccgtcgttggcaatctacaactttgtacagc

SEQ ID NO: 19062 - DNA, 2687 bp, Zea Mays
aagattgagatactaggccttggagggaatttccgtggagaatcaggatcggccccattgccgtctctagcaccactagtagcgaagccactggttgttggtaggtgcacgcaccccaccccctcctgccgtcctcgatctcgtctcctcctccctacccaatccctcgcggtgggcgagggtggaagcgagtgacgatggcggcgctggaggcggcgagggagtgggcgggctccgtcataccgccggagctcgccgccgccgcggggggagacccactcgccgcgctggcggccaccgccgcggccctcgtcgcggggctgcttattatcgctgtctggttccgatccggaggcgggacgccgtccaagccggtcgccacgccggtacggccaccgccggtcaaggtggacgccgacgccgacgttgatgacggccggaagcgcgtcaccatcttcttcggcacacagactggcaccgccgaggggttcgcaaagtccatggcggaggaggcgagggcgcggtacgagaaggccgtgttcaaagtggtggatctggatgactatgctcaggaggacgaggaatacgaggagaagctgaagaaggaaactgtggtgctgtttttcctagcaacatatggggatggggagccaactgataatgcagcacgattctacaaatggtttactgagggaaaagagaaggaagtttggttgaaggatcttaaatatggtatttttggccttggaaacaggcaatacgaacattttaataaggttgcaaaggtggtagatgagctagtagaggagcagggtgggaaacgtcttgttcctgttggccttggagacgatgatcagtgcattgaggatgatttcactgcatggaaagaactagtgtggccagaattagatcaattgctccgcgacgaggatgacacaactggtgcatcgactccatatactgctgctattcctgaatacagagttgttttcattgacaaatctgacctgtcattccaagatagatcatggacactagccaacggtactggtgtgattgatattcaacacccttgcaggtctaatgttgctgttcggaaggagctgcacaaaccagcttcagatcgctcttgtatccatctcgagtttgacatttctggcactggtcttgtgtatgaaaccggagaccatgttggtgtatatgcagaaaattctgttcagactgtggaggaggttgaaaggctacttgacctttctccagacacattcttctccatccatgcagatgcagaagatggatctcctcgtaaaggaggaggttccttggccccacctttcccatctccatgtaccttgcggactgcgcttctacgatatgctgatctactcaatccaccgaagaaggctgctttgcttgctttagcttctcacgcatctgatccagctgaagctgagcgacttagattcttggcttctccttctggaaaggatgagtattctcaatggataactgctagtcagaggagccttcttgaagttatggccgcattcccttcagctaagccaccactgggagtgttttttgcagcaatagctcctcgtctgcaaccacgatactactcaatttcatcatctccaaagatggctccctccagaattcatgtaacatgtgcgttagtttatgggccttcaccaacaggaaggatccaccaaggagtttgttcaacatggatgaagaatgcagctgggctcccatctttgtgaggcagtcaaatttcaagttacctgctgatccgtccactcctattatcatgattggtcctgggacagggctggctccttttagaggcttcttgcaggaaaggttagcattgaaacaatctggggcagaattgggcacttcaatccttttctttggatgcaggaaccgtaatatggactacatatatgaagatgagttgcaaactttccttgaggagggggcgctttctgagctaattgttgcattctctcgggaagggccaacgaaagaatatgtgcagcataagatggtggaaaaggccacagatatttggaacatcatctcaaatggtggttacttatatgtttgcggtgatgccaagggaatggctagagatgtacacaaaatgcttcatacaatagtccaagagcagggatctttggataactccaaaaccgagagctatgtaaagagcctgcagatggaaggaaggtacctccgtgatgtatggtgacacatcacctcaaataagccatagctctagcgtgtggaagtaaagctggctttgcgtgtatgacatgtctaatgccaacccaatcgtcagctttggaatgaagcgtgccattgatgatatactgaaatgagttgatcagtgcaattctttgacatctaactatttattattatatgagatgggaggaactgatggagaataaatgctgctgtagatttgtagaagttcaaaaaaattgggtacccctgacaagtttgtagccaagggggtacatcatacagtttgagatgaggacactatgtatactgtttgagacgaggacattatgtatactactctagaaggctaccgaaaccaaattttgcatctgtttattaaaagcttgtacttttatcatggtatccgtcgttggcaatctacaactttgtacagc

SEQ ID NO: 19063 - DNA, 2696 bp, Zea Mays
aagattgagatactaggccttggagggaatttccgtggagaatcaggatcggccccattgccgtctctagcaccactagtagcgaagccactggttgttggtaggtgcacgcaccccaccccctcctgccgtcctcgatctcgtctcctcctccctacccaatccctcgcggtgggcgagggtggaagcgagtgacgatggcggcgctggaggcggcgagggagtgggcgggctccgtcataccgccggagctcgccgccgccgcggggggagacccactcgccgcgctggcggccaccgccgcggccctcgtcgcggggctgcttattatcgctgtctggttccgatccggaggcgggacgccgtccaagccggtcgccacgccggtacggccaccgccggtcaaggtggacgccgacgccgacgttgatgacggccggaagcgcgtcaccatcttcttcggcacacagactggcaccgccgaggggttcgcaaagtccatggcggaggaggcgagggcgcggtacgagaaggccgtgttcaaagtggtggatctggatgactatgctcaggaggacgaggaatacgaggagaagctgaagaaggaaactgtggtgctgtttttcctagcaacatatggggatggggagccaactgataatgcagcacgattctacaaatggtttactgagggaaaagagaaggaagtttggttgaaggatcttaaatatggtatttttggccttggaaacaggcaatacgaacattttaataaggttgcaaaggtggtagatgagctagtagaggagcagggtgggaaacgtcttgttcctgttggccttggagacgatgatcagtgcattgaggatgatttcactgcatggaaagaactagtgtggccagaattagatcaattgctccgcgacgaggatgacacaactggtgcatcgactccatatactgctgctattcctgaatacagagttgttttcattgacaaatctgacctgtcattccaagatagatcatggacactagccaacggtactggtgtgattgatattcaacacccttgcaggtctaatgttgctgttcggaaggagctgcacaaaccagcttcagatcgctcttgtatccatctcgagtttgacatttctggcactggtcttgtgtatgaaaccggagaccatgttggtgtatatgcagaaaattctgttcagactgtggaggaggttgaaaggctacttgacctttctccagacacattcttctccatccatgcagatgcagaagatggatctcctcgtaaaggaggaggttccttggccccacctttcccatctccatgtaccttgcggactgcgcttctacgatatgctgatctactcaatccaccgaagaagcttctcacgcatctgatccagctgaagctgagcgacttagattcttggcttctccttctggaaaggatgagtattctcaatggataactgctagtcagaggagccttcttgaagttatggccgcattcccttcagctaagccaccactgggagtgttttttgcagcaatagctcctcgtctgcaaccacgatactactcaatttcatcatctccaaagatggctccctccagaattcatgtaacatgtgcgttagtttatgggccttcaccaacaggaaggatccaccaaggagtttgttcaacatggatgaagaatacaattcctctggaatatagcgaagaatgcagctgggctcccatctttgtgaggcagtcaaatttcaagttacctgctgatccgtccactcctattatcatgattggtcctgggacagggctggctccttttagaggcttcttgcaggaaaggttagcattgaaacaatctggggcagaattgggcacttcaatccttttctttggatgcaggaaccgtaatatggactacatatatgaagatgagttgcaaactttccttgaggagggggcgctttctgagctaattgttgcattctctcgggaagggccaacgaaagaatatgtgcagcataagatggtggaaaaggccacagatatttggaacatcatctcaaatggtggttacttatatgtttgcggtgatgccaagggaatggctagagatgtacacaaaatgcttcatacaatagtccaagagcagggatctttggataactccaaaaccgagagctatgtaaagagcctgcagatggaaggaaggtacctccgtgatgtatggtgacacatcacctcaaataagccatagctctagcgtgtggaagtaaagctggctttgcgtgtatgacatgtctaatgccaacccaatcgtcagctttggaatgaagcgtgccattgatgatatactgaaatgagttgatcagtgcaattctttgacatctaactatttattattatatgagatgggaggaactgatggagaataaatgctgctgtagatttgtagaagttcaaaaaaattgggtacccctgacaagtttgtagccaagggggtacatcatacagtttgagatgaggacactatgtatactgtttgagacgaggacattatgtatactactctagaaggctaccgaaaccaaattttgcatctgtttattaaaagcttgtacttttatcatggtatccgtcgttggcaatctacaactttgtacagc

SEQ ID NO: 19064 - DNA, 2190 bp, Zea Mays
gtaattttgcatgatctacatctatatgcgatgactatgctcaggaggacgaggaatacgaggagaagctgaagaaggaaactgtggtgctgtttttcctagcaacatatggggatggggagccaactgataatgcagcacgattctacaaatggtttactgagggaaaagagaaggaagtttggttgaaggatcttaaatatggtatttttggccttggaaacaggcaatacgaacattttaataaggttgcaaaggtggtagatgagctagtagaggagcagggtgggaaacgtcttgttcctgttggccttggagacgatgatcagtgcattgaggatgatttcactgcatggaaagaactagtgtggccagaattagatcaattgctccgcgacgaggatgacacaactggtgcatcgactccatatactgctgctattcctgaatacagagttgttttcattgacaaatctgacctgtcattccaagatagatcatggacactagccaacggtactggtgtgattgatattcaacacccttgcaggtctaatgttgctgttcggaaggagctgcacaaaccagcttcagatcgctcttgtatccatctcgagtttgacatttctggcactggtcttgtgtatgaaaccggagaccatgttggtgtatatgcagaaaattctgttcagactgtggaggaggttgaaaggctacttgacctttctccagacacattcttctccatccatgcagatgcagaagatggatctcctcgtaaaggaggaggttccttggccccacctttcccatctccatgtaccttgcggactgcgcttctacgatatgctgatctactcaatccaccgaagaaggctgctttgcttgctttagcttctcacgcatctgatccagctgaagctgagcgacttagattcttggcttctccttctggaaaggatgagtattctcaatggataactgctagtcagaggagccttcttgaagttatggccgcattcccttcagctaagccaccactgggagtgttttttgcagcaatagctcctcgtctgcaaccacgatactactcaatttcatcatctccaaacaggatggctccctccagaattcatgtaacatgtgcgttagtttatgggccttcaccaacaggaaggatccaccaaggagtttgttcaacatggatgaagaatacaattcctctggaatatagcgaagaatgcagctgggctcccatctttgtgaggcagtcaaatttcaagttacctgctgatccgtccactcctattatcatgattggtcctgggacagggctggctccttttagaggcttcttgcaggaaaggttagcattgaaacaatctggggcagaattgggcacttcaatccttttctttggatgcaggaaccgtaatatggactacatatatgaagatgagttgcaaactttccttgaggagggggcgctttctgagctaattgttgcattctctcgggaagggccaacgaaagaatatgtgcagcataagatggtggaaaaggccacagatatttggaacatcatctcaaatggtggttacttatatgtttgcggtgatgccaagggaatggctagagatgtacacaaaatgcttcatacaatagtccaagagcagggatctttggataactccaaaaccgagagctatgtaaagagcctgcagatggaaggaaggtacctccgtgatgtatggtgacacatcacctcaaataagccatagctctagcgtgtggaagtaaagctggctttgcgtgtatgacatgtctaatgccaacccaatcgtcagctttggaatgaagcgtgccattgatgatatactgaaatgagttgatcagtgcaattctttgacatctaactatttattattatatgagatgggaggaactgatggagaataaatgctgctgtagatttgtagaagttcaaaaaaattgggtacccctgacaagtttgtagccaagggggtacatcatacagtttgagatgaggacactatgtatactgtttgagacgaggacattatgtatactactctagaaggctaccgaaaccaaattttgcatctgtttattaaaagcttgtacttttatcatggtatccgtcgttggcaatctacaactttgtacagc

SEQ ID NO: 19065 - DNA, 1533 bp, Zea Mays
aagtttcctgatgtatgaaaccggagaccatgttggtgtatatgcagaaaattctgttcagactgtggaggaggttgaaaggctacttgacctttctccagacacattcttctccatccatgcagatgcagaagatggatctcctcgtaaaggaggaggttccttggccccacctttcccatctccatgtaccttgcggactgcgcttctacgatatgctgatctactcaatccaccgaagaaggctgctttgcttgctttagcttctcacgcatctgatccagctgaagctgagcgacttagattcttggcttctccttctggaaaggatgagtattctcaatggataactgctagtcagaggagccttcttgaagttatggccgcattcccttcagctaagccaccactgggagtgttttttgcagcaatagctcctcgtctgcaaccacgatactactcaatttcatcatctccaaagatggctccctccagaattcatgtaacatgtgcgttagtttatgggccttcaccaacaggaaggatccaccaaggagtttgttcaacatggatgaagcgaagaatgcagctgggctcccatctttgtgaggcagtcaaatttcaagttacctgctgatccgtccactcctattatcatgattggtcctgggacagggctggctccttttagaggcttcttgcaggaaaggttagcattgaaacaatctggggcagaattgggcacttcaatccttttctttggatgcaggaaccgtaatatggactacatatatgaagatgagttgcaaactttccttgaggagggggcgctttctgagctaattgttgcattctctcgggaagggccaacgaaagaatatgtgcagcataagatggtggaaaaggccacagatatttggaacatcatctcaaatggtggttacttatatgtttgcggtgatgccaagggaatggctagagatgtacacaaaatgcttcatacaatagtccaagagcagggatctttggataactccaaaaccgagagctatgtaaagagcctgcagatggaaggaaggtacctccgtgatgtatggtgacacatcacctcaaataagccatagctctagcgtgtggaagtaaagctggctttgcgtgtatgacatgtctaatgccaacccaatcgtcagctttggaatgaagcgtgccattgatgatatactgaaatgagttgatcagtgcaattctttgacatctaactatttattattatatgagatgggaggaactgatggagaataaatgctgctgtagatttgtagaagttcaaaaaaattgggtacccctgacaagtttgtagccaagggggtacatcatacagtttgagatgaggacactatgtatactgtttgagacgaggacattatgtatactactctagaaggctaccgaaaccaaattttgcatctgtttattaaaagcttgtacttttatcatggtatccgtcgttggcaatctacaactttgtacagc

SEQ ID NO: 19066 - DNA, 1645 bp, Zea Mays
aatcactacctcatggctcatgcacttcattgggattgagtcatctcgtcacattttaaggggcaaactcatgatgaaccactctcgatgtaggatgaggtgtatgaaaccggagaccatgttggtgtatatgcagaaaattctgttcagactgtggaggaggttgaaaggctacttgacctttctccagacacattcttctccatccatgcagatgcagaagatggatctcctcgtaaaggaggaggttccttggccccacctttcccatctccatgtaccttgcggactgcgcttctacgatatgctgatctactcaatccaccgaagaaggctgctttgcttgctttagcttctcacgcatctgatccagctgaagctgagcgacttagattcttggcttctccttctggaaaggatgagtattctcaatggataactgctagtcagaggagccttcttgaagttatggccgcattcccttcagctaagccaccactgggagtgttttttgcagcaatagctcctcgtctgcaaccacgatactactcaatttcatcatctccaaagatggctccctccagaattcatgtaacatgtgcgttagtttatgggccttcaccaacaggaaggatccaccaaggagtttgttcaacatggatgaagaatacaattcctctggaatatagcgaagaatgcagctgggctcccatctttgtgaggcagtcaaatttcaagttacctgctgatccgtccactcctattatcatgattggtcctgggacagggctggctccttttagaggcttcttgcaggaaaggttagcattgaaacaatctggggcagaattgggcacttcaatccttttctttggatgcaggaaccgtaatatggactacatatatgaagatgagttgcaaactttccttgaggagggggcgctttctgagctaattgttgcattctctcgggaagggccaacgaaagaatatgtgcagcataagatggtggaaaaggccacagatatttggaacatcatctcaaatggtggttacttatatgtttgcggtgatgccaagggaatggctagagatgtacacaaaatgcttcatacaatagtccaagagcagggatctttggataactccaaaaccgagagctatgtaaagagcctgcagatggaaggaaggtacctccgtgatgtatggtgacacatcacctcaaataagccatagctctagcgtgtggaagtaaagctggctttgcgtgtatgacatgtctaatgccaacccaatcgtcagctttggaatgaagcgtgccattgatgatatactgaaatgagttgatcagtgcaattctttgacatctaactatttattattatatgagatgggaggaactgatggagaataaatgctgctgtagatttgtagaagttcaaaaaaattgggtacccctgacaagtttgtagccaagggggtacatcatacagtttgagatgaggacactatgtatactgtttgagacgaggacattatgtatactactctagaaggctaccgaaaccaaattttgcatctgtttattaaaagcttgtacttttatcatggtatccgtcgttggcaatctacaactttgtacagc

SEQ ID NO: 19067 - DNA, 2004 bp, Zea Mays
ccatccatctctcatctgccagaagatggcagcaaagcgaccgatgagacgtcggcggggcccctggtgcggctgcttccttccttgcttcctccacgcggtgcatgcataaagccccacccgaccagcatgcgctctgggtattacctagccggcgtactcctacaaagctttgggggtcggagatcaggaacacgacggcgacggcgacggcgcccgaccggaaagttttgcgtccaccagaccaccacaccaggttttggggatgcgatgctctgtctgtgtcatatatgcttgctgctacatttacacgttctcaacgaatatgctgatacgcagccatgcaaatacgtgcacgatgtctgttgtttttaatccatagagaagctaggctcaagtgaactggtactagatgtcgtgcttgattatcggcaacaataatataatagattagcaccgtgtttccgttgcaattaagtgaaaagacaggaccatgtgcatggagaggcgccacattttttggtcgccgctagctttacaatcgatggtaacaggacacaagactgagaaacagtgcatcatgcatgcaggcattccatcttgtgttctggactagagctgagctgagctgagctaagctaggagtacgtacagcgattcagcgagcgcacacacggccggcgtacgtggtcacccagaggaacagagggctagctagctgcagataaacatgagctgacacttgactgcacattctagcgttgtctcagcggtcctgtctgtctgcacaatccacagtgcaagcgaccatgcgttgcatgttagatgttaatacgtcgaccgtacgtacccgagcttatctctggactaccttttcttccttttgaactgaacccctctcttgtccatgtgccacgcgaccatgcatgcatgttacgacgttacgtatgcagtgagcatgctttggacttttggagccttgtcgttttcgtcctctagccatgcacctactaatgtggtcgtctttgttgctccaactgcaaccggtatggatgatagatgatggatcgccccccttagctccctcttttttcttttttttttacagcagctagctagcaaggccctttttgaagcaccatgatcattcagccgggacgccgcagatactcacttgtaacctacacatggcgccaatgcaaggtagcagcaagtggtaaaaaaaaaaagctagctagaccgacgcaaggagacgtacgaaaactgaccgcccaaagcatgagcatgcatggcccctgtgtctgtgtgtgcagctgcagccggaacagtccagagacaaccatgcatgaggccggaacggccgccatgcatgcgcaagcacacagacggcacggcgccgccgcggcctacccggctccacaccactgaccacccctttgcttccaaggcggtcaaggataccgccccggccgcccactgccacgcctccacctgtagaacgcagcggcgctagcagcaccacccgcgcgcgcgccgtggaatagataacagagagcggagccgcgggtgggcggaggagtcctgtagtgaaagcatctctctcccccttcacagtacatggcatatggctcctcgaaacccacatataaatataccgcgcctcgttccccgtgcgctctccttctctctctctccttcagtccctcctccgtggagttatttgagattataacaatctcgtcgcgcggcttcaccagtttattactccgcagctatacttcgctagtttggtattatggagctcaaagctacgccagattgggactgttaatcttccatcctctgtaaccttctataagctacggtaaaagtcaattttgtccatgacgatgctgtaaccgatctctacattctggagatggcggacaggggacgacgaaagcgaggaagaatacagcgacggagaccccaccggcccagagcagcagcagcgcggcggccgcc

SEQ ID NO: 19068 - DNA, 2602 bp, Zea Mays
ctccccattcttcaccgcccgagaaatcctcgcccccttgtactgctcgccacagcgcggaatctcacctctcttccccgacccgagagagctcggtcggacaaacccaccacccacaccggccggccgggagagccacgaagttactgcgcgcgtacgtcgccggtttcctttctcaccgcacgtcgtcgtcatggacacctcgcaccactatcatccatggctcaacttctccctcgcccaccactgtgacctcgaggaggaggagaggggcgcggccgccgagctggccgcgatagccggcgccgcgccgccgccgaagctggaggacttcctcggcggaggcgtcgccaccggtggtccggaggcggtggcgcccgcggagatgtacgactcggacctcaagttcatagccgccgccgggttccttggcggctcggcggcggcggcggcgacgtcgccgctgtcctccctcgaccaggccggttccaagctggccttgcctgcggcggcggctgctccggcgccggagcagaggaaggccgtcgactcctttgggcagcgcacgtccatctaccgcggcgtcacacggcaccggtggactggcaggtacgaggcacatctgtgggacaacagctgccgacgcgaagggcagagccgcaagggccgccaagtatatttgggtggctatgataaggaggagaaggctgccagggcgtatgatcttgcagctttgaagtactggggttctagcaccaccaccaactttccggtaagcgcatagatagacgtatgactagtagctataaaagaaaaaaagagagagacaaacgctgatgcagagtgtgtgcaatgaagcgtctaggttgctgagtatgagaaggaggtcgaggagatgaagaacatgacgcgacaagagtttgttgcttcccttcgaaggaagagcagtggattctctcggggtgcttccatctaccgaggtgtaaccagacatcaccagcatggacggtggcaggcgaggatcggaagggtggccggtaacaaggacctctaccttgggacgttcagcaccgaggaggaagctgcagaggcctacgacatagcggccatcaagttcagaggcctgaacgccgtcacaaacttcgagatcagccggtacaacgtggagaccataatgagcagcaaccttccagtcgcgagcatgtcgtcgtcggcggcggcggcggcgggtggccggagcagcaaggcgctggagtcccctccgtccggctcgcttgacggcggcggcggcatgccagtcgtcgaagccagcacggcaccgccgctgttcattccggtgaagtacgaccagcagcagcaggagtacctgtcgatgctcgcgttgcagcagcaccaccagcagcaacaagcagggaacctgttgcaggggccgctagtagggttcggcggcctctactcctccggggtgaacctggatttcgccaactcccacggcacggcggctccgtcgtcgatggcccaccactgctacgccaatggcaccgcctccgcctcgcatgagcaccagcaccagatgcagcagggcggcgagaacgagacgcagccgcagccgcagcagagctccagcagctgctcctccctgccattcgccaccccggtcgctttcaatgggtcctatgaaagctccatcacggcggcaggcccctttggatactcctacccaaatgtggcagcctttcagacgccgatctatggaatggaatgattcgggccgcccggtcgtggctgctggtcggcctccgctcgccgctggcgtctcgcatgtgcgaaaagggtggggagaagccatgagaacacgagactgacatgggcgctctcgcacaaaagacataaagcggggggactgaaagatcagaggtaccagtagacagtagtagtatgatggaagagacagtaagcagcgagtagtgtgctgcaggatacactgaccatcgatctgctaacaacaaaatgatcgttgcagctagctatagcatatttgcctttgcccttttgtagctttggtctggtctctctctctctctctctcttttttcagctttgttgctccccagcgtcctgcactgcatgccagctgctttgaagctttctctttctactgacatggttctgcaagtgccatcatagctttagtcagccctgtacaatggatgcaggaacgtcgtctttgaattggatctctgtagctcatctctccccctagctcccccactttgttttcttttttgtgctttcctttctgctgcctctgctagcgttatgtgtactgaacaagttcatcaaacagatatagcacccttgcaactatgaatcaatgtcggtcttatttaatgaaactctcccaaatttaccgccttaacgatacgttcatactacaaccattttgcctccctggaaggtacggtttcccgttctgctgttgatttctcgtttgcagcattctgtatgcctttcctttgcccagcgagaataatattgtatgcgtttgaataccaatgattttgcaaaatctctactattttatcaatagtgaatgtgtcac

SEQ ID NO: 19069 - DNA, 1951 bp, Zea Mays
gatagagcagaacgaagcaagtgtttggtgattgcaccggtggactggcaggtacgaggcacatctgtgggacaacagctgccgacgcgaagggcagagccgcaagggccgccaagtatatttgggtggctatgataaggaggagaaggctgccagggcgtatgatcttgcagctttgaagtactggggttctagcaccaccaccaactttccggttgctgagtatgagaaggaggtcgaggagatgaagaacatgacgcgacaagagtttgttgcttcccttcgaaggaagagcagtggattctctcggggtgcttccatctaccgaggtgtaaccagacatcaccagcatggacggtggcaggcgaggatcggaagggtggccggtaacaaggacctctaccttgggacgttcagcaccgaggaggaagctgcagaggcctacgacatagcggccatcaagttcagaggcctgaacgccgtcacaaacttcgagatcagccggtacaacgtggagaccataatgagcagcaaccttccagtcgcgagcatgtcgtcgtcggcggcggcggcggcgggtggccggagcagcaaggcgctggagtcccctccgtccggctcgcttgacggcggcggcggcatgccagtcgtcgaagccagcacggcaccgccgctgttcattccggtgaagtacgaccagcagcagcaggagtacctgtcgatgctcgcgttgcagcagcaccaccagcagcaacaagcagggaacctgttgcaggggccgctagtagggttcggcggcctctactcctccggggtgaacctggatttcgccaactcccacggcacggcggctccgtcgtcgatggcccaccactgctacgccaatggcaccgcctccgcctcgcatgagcaccagcaccagatgcagcagggcggcgagaacgagacgcagccgcagccgcagcagagctccagcagctgctcctccctgccattcgccaccccggtcgctttcaatgggtcctatgaaagctccatcacggcggcaggcccctttggatactcctacccaaatgtggcagcctttcagacgccgatctatggaatggaatgattcgggccgcccggtcgtggctgctggtcggcctccgctcgccgctggcgtctcgcatgtgcgaaaagggtggggagaagccatgagaacacgagactgacatgggcgctctcgcacaaaagacataaagcggggggactgaaagatcagaggtaccagtagacagtagtagtatgatggaagagacagtaagcagcgagtagtgtgctgcaggatacactgaccatcgatctgctaacaacaaaatgatcgttgcagctagctatagcatatttgcctttgcccttttgtagctttggtctggtctctctctctctctctctcttttttcagctttgttgctccccagcgtcctgcactgcatgccagctgctttgaagctttctctttctactgacatggttctgcaagtgccatcatagctttagtcagccctgtacaatggatgcaggaacgtcgtctttgaattggatctctgtagctcatctctccccctagctcccccactttgttttcttttttgtgctttcctttctgctgcctctgctagcgttatgtgtactgaacaagttcatcaaacagatatagcacccttgcaactatgaatcaatgtcggtcttatttaatgaaactctcccaaatttaccgccttaacgatacgttcatactacaaccattttgcctccctggaaggtacggtttcccgttctgctgttgatttctcgtttgcagcattctgtatgcctttcctttgcccagcgagaataatattgtatgcgtttgaataccaatgattttgcaaaatctctactattttatcaatagtgaatgtgtcac

SEQ ID NO: 19070 - DNA, 1718 bp, Zea Mays
tccctctatatctccacgctctacagcggttccccctatatcaaacctctataccccactacaactataaaataacattttctatatatttccatcatctattaccatttttctttcaactagcaaatattggcgctcaccaacttcgagacaaggaggcagactagcgtgcccctcgatctggcaccgaggaggaagctgcagaggcctacgacatagcggccatcaagttcagaggcctgaacgccgtcacaaacttcgagatcagccggtacaacgtggagaccataatgagcagcaaccttccagtcgcgagcatgtcgtcgtcggcggcggcggcggcgggtggccggagcagcaaggcgctggagtcccctccgtccggctcgcttgacggcggcggcggcatgccagtcgtcgaagccagcacggcaccgccgctgttcattccggtgaagtacgaccagcagcagcaggagtacctgtcgatgctcgcgttgcagcagcaccaccagcagcaacaagcagggaacctgttgcaggggccgctagtagggttcggcggcctctactcctccggggtgaacctggatttcgccaactcccacggcacggcggctccgtcgtcgatggcccaccactgctacgccaatggcaccgcctccgcctcgcatgagcaccagcaccagatgcagcagggcggcgagaacgagacgcagccgcagccgcagcagagctccagcagctgctcctccctgccattcgccaccccggtcgctttcaatgggtcctatgaaagctccatcacggcggcaggcccctttggatactcctacccaaatgtggcagcctttcagacgccgatctatggaatggaatgattcgggccgcccggtcgtggctgctggtcggcctccgctcgccgctggcgtctcgcatgtgcgaaaagggtggggagaagccatgagaacacgagactgacatgggcgctctcgcacaaaagacataaagcggggggactgaaagatcagaggtaccagtagacagtagtagtatgatggaagagacagtaagcagcgagtagtgtgctgcaggatacactgaccatcgatctgctaacaacaaaatgatcgttgcagctagctatagcatatttgcctttgcccttttgtagctttggtctggtctctctctctctctctctcttttttcagctttgttgctccccagcgtcctgcactgcatgccagctgctttgaagctttctctttctactgacatggttctgcaagtgccatcatagctttagtcagccctgtacaatggatgcaggaacgtcgtctttgaattggatctctgtagctcatctctccccctagctcccccactttgttttcttttttgtgctttcctttctgctgcctctgctagcgttatgtgtactgaacaagttcatcaaacagatatagcacccttgcaactatgaatcaatgtcggtcttatttaatgaaactctcccaaatttaccgccttaacgatacgttcatactacaaccattttgcctccctggaaggtacggtttcccgttctgctgttgatttctcgtttgcagcattctgtatgcctttcctttgcccagcgagaataatattgtatgcgtttgaataccaatgattttgcaaaatctctactattttatcaatagtgaatgtgtcac

SEQ ID NO: 19071 - DNA, 2197 bp, Zea Mays
gtcggtcgctcgttcgcctgttccccttgttcgtctgtctgtctttgacaccacagcgcccgcctccgtttgcactgttgcctgccgccctccttcctgctcctgctcggctcgctacggctacgggcactggcatcgacagtgacatccccgctcgcgccgtcctcggtcctccctttcttctgcctctcgctcgcgcgtgcagttgagagcggctcggcagcgcagcgtgcgcggacacggcagcgccagttactctctctctctctctctctctctctctctctctctctctcctcgctgctcggcgtccaattcaatgcgctcctgcgcaacggggcagagcagcgacctccttccttctccaccattgggttgagctccgccactcaattcaatgcctgtccgctcttgaagaaacgcctcctcctctcttctttaaccgccccgtgtcatcactcttactcgtacgtgctcgcgcacgccggtttcaatacgtccgctggcctctgcgtgcgtcgtctcgtcacgcaggcagcaaggcgtggagaggagaagagggaggggattgaattgattgatggggttgctccgctgagctagctcctccggccgtccttcccgtcttctacctctaggtgggtattgccattgctcggtggatcgcagtgggagatgaattacctccggagccggagcctgaagcggctcctgtccctcggccgccggagcaacgccgatgagtgcgccgaggagtgcgtcgacgtcgacccgccgccgaacaagcccacctggaggtgcttctcgtacgaggagctcaaccaggccaccaatggcttccaccaagacaacatggtgggcaagggcgggtacggagaggtctaccgcggggtgctggacgacggccgcgccgtcgccgtgaagcgcctggcgccgacggccgcggcggacgagaagaaggagaaggacttccttacggagctgggcacggtgggccacgtccgccaccccaacgtgtccgcgctcctgggatgctgcgtcgaccgcggccttcacctcgtcttccacttctccacccgcggctccgtctccgccaacctccacggtggtggagctactggagtccggcgagatttctcaagagcagtggcagatgcccgaggaggaggagcaagacgagctgtgggacttcgacgatctcgacgacttcgacgaggacgactacgacgacgagtccgattccccctcgatctcctcgtcggcatgcagcatccaccccgatgattagccccaaaatacttgcgcgtgtcagtagattattatcgttgttattattcaacctgctgatacggtccttgattgtatcggtgtgtacatacaccatccatccctagtagagaatagtaatatgaaaatccgggagaaaatcgagagagacagagagagagagagaagaggatccaggcccgtggctttcagttttggtgtcgccatctcatcaggaatcttccccgtccataatacgccgtccgtccgtcttaactccagcagccgatctgatcagctcctgacagcgacggatgcgtgctggtttcttcccaaaccagctgacagtttggcatgccgggccgtgcgaaccagaaactgtcgttggtgtggtggtgcttggctttatttctgtgggcgagccatggatgatgcagggactgagggacccctggcctgaatcgcaggagccaggagcggtttggctacgagcggttagctagcttgctagcagccacatgctcagagcagaggcaagccaggtggtgggtttcggtttcggctcggctgccgttggttagcttgcccaagtgcagttgggcggccctactgcccggctgttcaggagcgcgtctgaaagcgaggtgatcagtgagctaaccacggcaacgggatcggttgatcattgagcgaccttgagacaggacgaagcaagtcgctctgtcagacgagaggcaataatttgcccttttttcacttttcatgcatttcagtcgtgtgtgggtgtgttagttaattcgggatgcagtcatgcatggccgcaagcccgttggcttgttttaatctataccgatttttaatacttttagagtgtgttcgtttgtttcggaatcatgacctagaaccaatccaaccagtaatgattatctaa

SEQ ID NO: 19072 - DNA, 1057 bp, Zea Mays
ggggtgcccgctgtgaagtcagtcagcttcagcaccacgagcacgatggccctcgcgctcgccacgaccccactcgcgcatctcgcccttgccccgccctcgatcttcggctcccagtcctcgctgctgctgctcccgcgccgcgcgtcgcccgcccccgtctccctctcccaccgccgcatcatcgcggccgtcgcgaccaaggaacccgagctcggcggcggcggatcgggggccggcgacggtgccggagggagcggcggcggcagcgacccgaggggaggagggcaggaaggagacggggaggaagagaagatggggcagggcctgtccatgtcgcagaaactcaccctcgcctacgccgcgctcgtcggagctggtggtgtaatgggatatatgaagagtggaagccagaaatccttggctgcaggaggcatatcagccctggtcctgtacgtcgtccacactcaactcccagtgagacctgtcctcgcatcatcgatcggtttaggtatatcggccgcgctactgtcagtgatggggtcgcgcttcaagaagtccgggaaggtattccctgccggcgtcgtgtcccttgtatccctggttatggtcggaggctacttccacgggatcttgcgtagctcgcacgcgtgatgcagcctgtggtcttttctgttccgtaatgcaatttggctccccctttgaactgtttctctgtttcacttctcggtggatgttttgtatccgttctcaactttagttcatcttttgtgacagtgggcaataataaccaataagcatgtgagagctgatagaggtgaagtttaagctttgtgagaatttttagatttatactgcagcagcaacaagtgtgaattgcactacgagtgcctgaatatggcttgtgcggacagccaaacagacttatctggatataatggcgagctggacaattcagtggttaccgacgacaccgactcgtgggcgccgccaacagtccaggggttccgcatgcatctgcgtgggacgacatcgaaattttattttatttttggtc

SEQ ID NO: 19073 - DNA, 665 bp, Zea Mays
catcttcatcatccctggattctcacctccttgatctgctctggaacaaatattgggtcaacacgctatcttcatcatcgcttctgggcaacagagattatgttgctgggcagatctttgatttagctgataaactagagcaagctgaaggccagctggcacacagtcgatttggtggtatgattatgccatcgcaacgaaagaaagagcaagaagagtctccactggctaaggtaacacgagatagctccaaaatcacagctgagcaggttcacggcctcatgtcacaggtcataaaagacatccttttcaactctgttcacccgtcaagcaaggcaagcacaagtgctccaccagattcatccggtcctgagcctatggttgaagcctgagttccagcggaaggggacaatggatatttgtgttatgttatctgattcagaaggtgcaaaacaagttatcttttgagtacagaatcatcatgtaattatgagttgccatcttgggctgccactgagagggtgtgatttgggtccggttagcaatctcatgtattggatttcggatcagtattcgaagctttcataacgaggagccatcatcttattttagctgtttgtttggcttgccatttagttattggaagggtcgcttctttaagactg

SEQ ID NO: 19074 - DNA, 1514 bp, Zea Mays
atacagcccacagacacttccttcctccacgcttgggcacggcagcggcgccgcaaagccgaacgagagagagaagcagagaacccctcctcgacctcggcctctcctcttcctcctccgctcccaaaatcctagggttttgctcgccgcggcgcgatggagcccacctcatcggcgtcgatcgcgcggcagacgtgggagctggagaacaatatccccgcggcggcctccgacccggacgcgatggacgcgatctaccgctacgacgacgcgtctcaggcgcgggcgcagcaggagaagccttgggccaacgacccgcaccacttccgccgcaccaagatctccgcgctcgcgctgctcaagatggttgtccacgcccgcgccgggggcaccatcgaggtcatggggctcatgcagggcaagtgcgagggcgacgccatcatcgttatggacgcattcgcgctccccgttgagggcaccgagaccagggtcaatgcccaggccgatgcctacgagtacatggttgactactcaaccatcaacaagcaggctggaaggttggagaatgtggttggctggtatcactcgcaccctggctatggatgctggctgtcaggaatcgacgtgtcaactcagatgctcaatcaacaattcacagaaccattcttggcagttgtgatagaccccacaaggacagtttctgctggtaaagtggagattggagcctttagaacatacccaaaagattacaagccaccagatgagcctgtatctgagtatcagactattccactcaacaagatagaagattttggtgtccattgcaaatcgtactatgctttggatataacttatttcaagtcatccctggattctcacctccttgatctgctctggaacaaatattgggtcaacacgctatcttcatcatcgcttctgggcaacagagattatgttgctgggcagatctttgatttagctgataaactagagcaagctgaaggccagctggcacacagtcgatttggtggtatgattatgccatcgcaacgaaagaaagagaagagtctccactggctaaggtaacacgagatagctccaaaatcacagctgagcaggttcacggcctcatgtcacaggtcataaaagacatccttttcaactctgttcacccgtcaagcaaggcaagcacaagtgctccaccagattcatccggtcctgagcctatggttgaagcctgagttccagcggaaggggacaatggatatttgtgttatgttatctgattcagaaggtgcaaaacaagttatcttttgagtacagaatcatcatgtaattatgagttgccatcttgggctgccactgagagggtgtgatttgggtccggttagcaatctcatgtattggatttcggatcagtattcgaagctttcataacgaggagccatcatcttattttagctgtttgtttggcttgccatttagttattggaagggtcgcttctttaagactg

SEQ ID NO: 19075 - DNA, 1391 bp, Zea Mays
gtggggccccccaaaaagaaggatcccctccaaaaataagcgtatgctgctatgtgcagagcacacacggtattctttagtaaaaggcgaaagaatagttcgctctgtgcgcactgcgcagctgcgtgcttcaactaggtagccttcctgctccttttattcatctcactcgatgctcacctcgcgcatgcaagccgtatggtactaatccctccttgcgaccatctcacgctctacgcgctctgccgcgctagcaaacttgggccaggcccactaaccattgccaacccactactggaccaggccgggcctgatgcatcgaagcgctttacagcgcgagcgattgcgagcggaggttttcctggaccggccacatctgccacctagaaaaaaattctcgccatcacgagcagtcgagcaccaccctctgaccggtgaccgctgtgaagtcagtcagcttcagcaccacgagcacgatggccctcgcgctcgccacgaccccactcgcgcatctcgcccttgccccgccctcgatcttcggctcccagtcctcgctgctgctgctcccgcgccgcgcgtcgcccgcccccgtctccctctcccaccgccgcatcatcgcggccgtcgcgaccaaggaacccgagctcggcggcggcggatcgggggccggcgacggtgccggagggagcggcggcggcagcgacccgaggggaggagggcaggaaggagacggggaggaagagaagatggggcagggcctgtccatgtcgcagaaactcaccctcgcctacgccgcgctcgtcggagctggtggtgtaatgggatatatgaagagtggaagccagaaatccttggctgcaggaggcatatcagccctggtcctgtacgtcgtccacactcaactcccagtgagacctgtcctcgcatcatcgatcggtttaggtatatcggccgcgctactgtcagtgatggggtcgcgcttcaagaagtccgggaaggtattccctgccggcgtcgtgtcccttgtatccctggttatggtcggaggctacttccacgggatcttgcgtagctcgcacgcgtgatgcagcctgtggtcttttctgttccgtaatgcaatttggctccccctttgaactgtttctctgtttcacttctcggtggatgttttgtatccgttctcaactttagttcatcttttgtgacagtgggcaataataaccaataagcatgtgagagctgatagagccaaacagacttatctggatataatggcgagctggacaattcagtggttaccgacgacaccgactcgtgggcgccgccaacagtccaggggttccgcatgcatctgcgtgggacgacatcgaaattttattttatttttggtc

SEQ ID NO: 19076 - DNA, 1852 bp, Zea Mays
cccactaatcagatccccgcaggctggttcactgagccggcttccgagcggcccatgggcttgcccaggaccggctcttccagtcgcctcaacgcgcaggcgccggagttcgtgccgcggggcccgccaccaccgacgccgccccggccgtttgagtactatgcgcctatggtgaacgcagcggatttgctgccaaggagcaacaggcgcgggagccggaagcggagatgctcccgcccgccgcggtgaagacggagctggtgtatctgggcaatttggtcggttggcacggggtatgcatcaataggcaccgtcatcgcagtaggacgcgtgcgtgatcaagcctggatgggacggttttgacacagcacgtcctgtgtgcgaggatctcgaactgggtcagttcgtggtgatgttcttctaggattctttcgtcatttcttttactgcatcgttgaaactgatccagggtagtgcggcggtgttgggggttgcggcgggcctcgccctcatcgtcggcttcgtccgctgcgatacctgtgaagttaacaatctacgctattatcgatagcaatccagcgctgaagtcaagaagttacctgggcaaaaacagtatacccgattctaggtgagaagctcaaagaaggggaagacatctacatctatcaggggtgacaaatccttttgctatgaagatgaccacagggttcttgtttgcgagttcatcctctagaatgtattgggttgtcgccacgaaaaaacacacgaatacataaattcaaataatttctggtgctgtggagtattcataattgtgtgcttttgttgaatccttcatgtaccataattcttactgctttcaagcccttttagaatatgactttaggatgtagaaattggtgaaaggagacaagaaattattctctaaactactattttttataggcaagggaggctggaagcaccttttttgcatgggagctgcatggagagaaattattggcagaaaacaaacttagaccagattcttgaatgtgccaagggaataagcttcgcttgctgcaattcatgtgctgcttggcgccacaaaaggagtagaggtgtgatttgcttgctttgcagggagcggggtcatagtctgaagaactgtcctgacaaaagcgagggaaatttgaagaaattttgctagaactgtggtgaatctggacactgtctttccaagtgccccaagctcattgagaatgggttacaaattttgcaagctgctttatctgcaatcagcaaggacatttgagcaagaactgccctgaaaacaaacatgacatcccatccaaagctccatcttggcgccaacagtggttcacataggtttgctcttgagaattaagttgttaatgaagctactttccgttgccctgatgagctaggatggaaaccacagaggacacctatcatatcatcagatggaagcatcttacacgcaagacagcaagctttctggtatggagctgaatggtactctggattatcaattgttaagtctacaggctctgaaaacaatggacttaagcaacaaccacttgcatgattcaatcccttaccagttgccatcaaaccttacctatctgtaatgtctcccaacctgtacatattattgatgctattcgatttttgaaatttgattcaaagcgaatacaggaatctggcaaaaaataacttctctgttaaaacaatctaactgcaaggaaccattgggtgcagcaatctcagccacaactcgttatttcagaaaattgatacaccagaacacttttttaacataggaacgcttattttactaagaggacaagca

SEQ ID NO: 19077 - DNA, 2162 bp, Zea Mays
cccactaatcagatccccgcaggctggttcactgagccggcttccgagcggcccatgggcttgcccaggaccggctcttccagtcgcctcaacgcgcaggcgccggagttcgtgccgcggggcccgccaccaccgacgccgccccggccgtttgagtactatgcgcctatggtgaacgcagcggatttgctgccaaggagcaacaggcgcgggagccggaagcggagatgctcccgcccgccgcggtgaagacggagctggtgtatctgggcaatttggtcggttggcacggggtatgcatcaataggcaccgtcatcgcagtaggacgcgtgcgtgatcaagcctggatgggacggttttgacacagcacgtcctgtgtgcgaggatctcgaactgggtcagttcgtggtgatgttcttctaggattctttcgtcatttcttttactgcatcgttgaaactgatccagggtagtgcggcggtgttgggggttgcggcgggcctcgccctcatcgtcggcttcgtccgctgcgatacctgtgaagttaacaatctacgctattatcgatagcaatccagcgctgaagtcaagaagttacctgggcaaaaacagtatacccgattctagggcaagggaggctggaagcaccttttttgcatgggagctgcatggagagaaattattggcagaaaacaaacttagaccagattcttgaatgtgccaagggaataagcttcgcttgctgcaattcatgtgctgcttggcgccacaaaaggagtagaggtgtgatttgcttgctttgcagggagcggggtcatagtctgaagaactgtcctgacaaaagcgagggaaatttgaagaaattttgctagaactgtggtgaatctggacactgtctttccaagtgccccaagctcattgagaatgggttacaaattttgcaagctgctttatctgcaatcagcaaggacatttgagcaagaactgccctgaaaacaaacatgacatcccatccaaagctccatcttggcgccaacagtggttcacataggtttgctcttgagaattaagttgttaatgaagctactttccgttgccctgatgagctaggatggaaaccacagaggacacctatcatatcatcagatggaagcatcttacacgcaagacagcaagctttctggtatggagctgaatggtactctggattatcaattgttaagtctacaggctctgaaaacaatggacttaagcaacaaccacttgcatgattcaatcccttaccagttgccatcaaaccttacctatctgaatctggcaaaaaataacttctctggtaatcttccatactctatatccaacttggtttcacttgagtacctcaatctcagccacaactcgttatttcagaaaattggtgaattttctttcagaattgtatattgtgtaaggcctactgtatatttcagaaaattggaagcctcaattcactttcagaactagacgtatctttcaacaacctcacgggaatcttcctttctcaatgggcgctctgtcgaagctttctaccctaggcaaccctttccagtagggtcgcgcccctctggtaagagggtcgctgttaagttgcctgattaatccattctttcactgtgtctgcatgttgcagtagatgccagcagatcatgaagcgcccaaatggtgctgagctacagtactatcagaagctgaatagattgctgctggaattagagcaaaggagtggaggagtttctgaagagagcagacctgcaaaataaccgtcgtcatgtcagtgacatggccgctcaacttcttcctcttactgcattgtatctgaactgcgtcgacctaccaactacatcactgcaccgactgctatactgcatcaaccaaccgaacggctatatgaaacgacacaatgtcagccgtcagatatgaatattaacttcataaaagtaattgtaacttgtgtaggctggttatagcttgtgatttcacatttcatttgttagcggccaagatttatttctgttagtttatgaccaccactcaggaaagttgattgattctccattccaatctttgttagacctgcaagttgtttgctaacagtgatccttcagataaatggggacatggg

SEQ ID NO: 19078 - DNA, 2784 bp, Zea Mays
cccactaatcagatccccgcaggctggttcactgagccggcttccgagcggcccatgggcttgcccaggaccggctcttccagtcgcctcaacgcgcaggcgccggagttcgtgccgcggggcccgccaccaccgacgccgccccggccgtttgagtactatgcgcctatggtgaacgcagcggatttgctgccaaggagcaacaggcgcgggagccggaagcggagatgctcccgcccgccgcggtgaagacggagctggtgtatctgggcaatttggtcggttggcacggggtatgcatcaataggcaccgtcatcgcagtaggacgcgtgcgtgatcaagcctggatgggacggttttgacacagcacgtcctgtgtgcgaggatctcgaactgggtcagttcgtggtgatgttcttctaggattctttcgtcatttcttttactgcatcgttgaaactgatccagggtagtgcggcggtgttgggggttgcggcgggcctcgccctcatcgtcggcttcgtccgctgcgatacctgtgaagttaacaatctacgctattatcgatagcaatccagcgctgaagtcaagaagttacctgggcaaaaacagtatacccgattctaggtgagaagctcaaagaaggggaagacatctacatctatcaggggtgacaaatccttttgctatgaagatgaccacagggttcttgtttgcgagttcatcctctagaatgtattgggttgtcgccacgaaaaaacacacgaatacataaattcaaataatttctggtgctgtggagtattcataattgtgtgcttttgttgaatccttcatgtaccataattcttactgctttcaagcccttttagaatatgactttaggatgtagaaattggtgaaaggagacaagaaattattctctaaactactattttttataggcaagggaggctggaagcaccttttttgcatgggagctgcatggagagaaattattggcagaaaacaaacttagaccagattcttgaatgtgccaagggaataagcttcgcttgctgcaattcatgtgctgcttggcgccacaaaaggagtagaggtgtgatttgcttgctttgcagggagcggggtcatagtctgaagaactgtcctgacaaaagcgagggaaatttgaagaaattttgctagaactgtggtgaatctggacactgtctttccaagtgccccaagctcattgagaatgggttacaaattttgcaagctgctttatctgcaatcagcaaggacatttgagcaagaactgccctgaaaacaaacatgacatcccatccaaagctccatcttggcgccaacagtggttcacataggtttgctcttgagaattaagttgttaatgaagctactttccgttgccctgatgagctaggatggaaaccacagaggacacctatcatatcatcagatggaagcatcttacacgcaagacagcaagctttctggtatggagctgaatggtactctggattatcaattgttaagtctacaggctctgaaaacaatggacttaagcaacaaccacttgcatgattcaatcccttaccagttgccatcaaaccttacctatctgaatctggcaaaaaataacttctctgcaatctcagccacaactcgttatttcagaaaattggtgaattttctttcagaattgtatattgtgtaaggcctactgtatatttcagaaaattggaagcctcaattcactttcagaactttatatgcaaaacaatcaactatcaggcacatttgatgtccttagcaacattagccttgcgacactctgatcactcttaaaaaactaacgggtcctggtgtgagtggcagaactattggataggatcgccctgagggcactcaacatcaccactgttgtacaaaagtaggccaattgacatatacactttgttcatttatgttggtcgattctacccagtttaaagagagactaaaatgtgggcgttgttgcttgtgtccatccatgccacaagctgtaatattttcttctaataagcttttatacattacctctcttgttgactggttgaccatttgtgcagaggcaaccctttccagtagggtcgcgcccctctggtaagagggtcgctgttaagttgcctgattaatccattctttcactgtgtctgcatgttgcagtagatgccagcagatcatgaagcgcccaaatggtgctggtacagatacaaaatatgctcctgcacaagatatatatatatatacatattcacgtgagtttgttctttcttacatccagagctacagtactatcagaagctgaatagattgctgctggaattagagcaaaggagtggaggagtttctgaagagagcagacctgcaaaataaccgtcgtcatgtcagtgacatggccgctcaacttcttcctcttactgcattgtatctgaactgcgtcgacctaccaactacatcactgcaccgactgctatactgcatcaaccaaccgaacggctatatgaaacgacacaatgtcagccgtcagatatgaatattaacttcataaaagtaattgtaacttgtgtaggctggttatagcttgtgatttcacatttcatttgttagcggccaagatttatttctgttagtttatgaccaccactcaggaaagttgattgattctccattccaatctttgttagacctgcaagttgtttgctaacagtgatccttcagataaatggggacatggg

SEQ ID NO: 19079 - DNA, 2064 bp, Zea Mays
cccactaatcagatccccgcaggctggttcactgagccggcttccgagcggcccatgggcttgcccaggaccggctcttccagtcgcctcaacgcgcaggcgccggagttcgtgccgcggggcccgccaccaccgacgccgccccggccgtttgagtactatgcgcctatggtgaacgcagcggatttgctgccaaggagcaacaggcgcgggagccggaagcggagatgctcccgcccgccgcggtgaagacggagctggtgtatctgggcaatttggtcggttggcacgggggtagtgcggcggtgttgggggttgcggcgggcctcgccctcatcgtcggcttcgtccgctgcgatacctgtgaagttaacaatctacgctattatcgatagcaatccagcgctgaagtcaagaagttacctgggcaaaaacagtatacccgattctagggttagcaccgttacccctgcaaccatttccttcttcaagtgagaagctcaaagaaggggaagacatctacatctatcagcaagggaggctggaagcaccttttttgcatgggagctgcatggagagaaattattggcagaaaacaaacttagaccagattcttgaatgtgccaagggaataagcttcgcttgctgcaattcatgtgctgcttggcgccacaaaaggagtagaggtgtgatttgcttgctttgcagggagcggggtcatagtctgaagaactgtcctgacaaaagcgagggaaatttgaagaaattttgctagaactgtggtgaatctggacactgtctttccaagtgccccaagctcattgagaatgggttacaaattttgcaagctgctttatctgcaatcagcaaggacatttgagcaagaactgccctgaaaacaaacatgacatcccatccaaagctccatcttggcgccaacagtggttcacataggtttgctcttgagaattaagttgttaatgaagctactttccgttgccctgatgagctaggatggaaaccacagaggacacctatcatatcatcagatggaagcatcttacacgcaagacagcaagctttctggtatggagctgaatggtactctggattatcaattgttaagtctacaggctctgaaaacaatggacttaagcaacaaccacttgcatgattcaatcccttaccagttgccatcaaaccttacctatctgaatctggcaaaaaataacttctctggtaatcttccatactctatatccaacttggtttcacttgagtacctcaatctcagccacaactcgttatttcagaaaattggtgaattttctttcagaattgtatattgtgtaaggcctactgtatatttcagaaaattggaagcctcaattcactttcagaactagacgtatctttcaacaacctcacgggaatcttcctttctcaatgggcgctctgtcgaagctttctaccctaggcaaccctttccagtagggtcgcgcccctctggtaagagggtcgctgttaagttgcctgattaatccattctttcactgtgtctgcatgttgcagtagatgccagcagatcatgaagcgcccaaatggtgctgagctacagtactatcagaagctgaatagattgctgctggaattagagcaaaggagtggaggagtttctgaagagagcagacctgcaaaataaccgtcgtcatgtcagtgacatggccgctcaacttcttcctcttactgcattgtatctgaactgcgtcgacctaccaactacatcactgcaccgactgctatactgcatcaaccaaccgaacggctatatgaaacgacacaatgtcagccgtcagatatgaatattaacttcataaaagtaattgtaacttgtgtaggctggttatagcttgtgatttcacatttcatttgttagcggccaagatttatttctgttagtttatgaccaccactcaggaaagttgattgattctccattccaatctttgttagacctgcaagttgtttgctaacagtgatccttcagataaatggggacatggg

SEQ ID NO: 19080 - DNA, 2826 bp, Zea Mays
cccactaatcagatccccgcaggctggttcactgagccggcttccgagcggcccatgggcttgcccaggaccggctcttccagtcgcctcaacgcgcaggcgccggagttcgtgccgcggggcccgccaccaccgacgccgccccggccgtttgagtactatgcgcctatggtgaacgcagcggatttgctgccaaggagcaacaggcgcgggagccggaagcggagatgctcccgcccgccgcggtgaagacggagctggtgtatctgggcaatttggtcggttggcacggggtatgcatcaataggcaccgtcatcgcagtaggacgcgtgcgtgatcaagcctggatgggacggttttgacacagcacgtcctgtgtgcgaggatctcgaactgggtcagttcgtggtgatgttcttctaggattctttcgtcatttcttttactgcatcgttgaaactgatccagggtagtgcggcggtgttgggggttgcggcgggcctcgccctcatcgtcggcttcgtccgctgcgatacctgtgaagttaacaatctacgctattatcgatagcaatccagcgctgaagtcaagaagttacctgggcaaaaacagtatacccgattctaggtgagaagctcaaagaaggggaagacatctacatctatcaggggtgacaaatccttttgctatgaagatgaccacagggttcttgtttgcgagttcatcctctagaatgtattgggttgtcgccacgaaaaaacacacgaatacataaattcaaataatttctggtgctgtggagtattcataattgtgtgcttttgttgaatccttcatgtaccataattcttactgctttcaagcccttttagaatatgactttaggatgtagaaattggtgaaaggagacaagaaattattctctaaactactattttttataggcaagggaggctggaagcaccttttttgcatgggagctgcatggagagaaattattggcagaaaacaaacttagaccagattcttgaatgtgccaagggaataagcttcgcttgctgcaattcatgtgctgcttggcgccacaaaaggagtagaggtgtgatttgcttgctttgcagggagcggggtcatagtctgaagaactgtcctgacaaaagcgagggaaatttgaagaaattttgctagaactgtggtgaatctggacactgtctttccaagtgccccaagctcattgagaatgggttacaaattttgcaagctgctttatctgcaatcagcaaggacatttgagcaagaactgccctgaaaacaaacatgacatcccatccaaagctccatcttggcgccaacagtggttcacataggtttgctcttgagaattaagttgttaatgaagctactttccgttgccctgatgagctaggatggaaaccacagaggacacctatcatatcatcagatggaagcatcttacacgcaagacagcaagctttctggtatggagctgaatggtactctggattatcaattgttaagtctacaggctctgaaaacaatggacttaagcaacaaccacttgcatgattcaatcccttaccagttgccatcaaaccttacctatctgaatctggcaaaaaataacttctctgttaaaacaatctaactgcaaggaaccattgggtgcagcaatctcagccacaactcgttatttcagaaaattggtgaattttctttcagaattgtatattgtgtaaggcctactgtatatttcagaaaattggaagcctcaattcactttcagaactagacgtatctttcaacaacctcacgggaatcttcctttctcaatgggcgctctgtcgaagctttctaccctctgatcactcttaaaaaactaacgggtcctggtgtgagtggcagaactattggataggatcgccctgagggcactcaacatcaccactgttgtacaaaagtaggccaattgacatatacactttgttcatttatgttggtcgattctacccagtttaaagagagactaaaatgtgggcgttgttgcttgtgtccatccatgccacaagctgtaatattttcttctaataagcttttatacattacctctcttgttgactggttgaccatttgtgcagaggcaaccctttccagtagggtcgcgcccctctggtaagagggtcgctgttaagttgcctgattaatccattctttcactgtgtctgcatgttgcagtagatgccagcagatcatgaagcgcccaaatggtgctggtacagatacaaaatatgctcctgcacaagatatatatatatatacatattcacgtgagtttgttctttcttacatccagagctacagtactatcagaagctgaatagattgctgctggaattagagcaaaggagtggaggagtttctgaagagagcagacctgcaaaataaccgtcgtcatgtcagtgacatggccgctcaacttcttcctcttactgcattgtatctgaactgcgtcgacctaccaactacatcactgcaccgactgctatactgcatcaaccaaccgaacggctatatgaaacgacacaatgtcagccgtcagatatgaatattaacttcataaaagtaattgtaacttgtgtaggctggttatagcttgtgatttcacatttcatttgttagcggccaagatttatttctgttagtttatgaccaccactcaggaaagttgattgattctccattccaatctttgttagacctgcaagttgtttgctaacagtgatccttcagataaatggggacatggg

SEQ ID NO: 19081 - DNA, 3065 bp, Zea Mays
cccactaatcagatccccgcaggctggttcactgagccggcttccgagcggcccatgggcttgcccaggaccggctcttccagtcgcctcaacgcgcaggcgccggagttcgtgccgcggggcccgccaccaccgacgccgccccggccgtttgagtactatgcgcctatggtgaacgcagcggatttgctgccaaggagcaacaggcgcgggagccggaagcggagatgctcccgcccgccgcggtgaagacggagctggtgtatctgggcaatttggtcggttggcacggggtatgcatcaataggcaccgtcatcgcagtaggacgcgtgcgtgatcaagcctggatgggacggttttgacacagcacgtcctgtgtgcgaggatctcgaactgggtcagttcgtggtgatgttcttctaggattctttcgtcatttcttttactgcatcgttgaaactgatccagggtagtgcggcggtgttgggggttgcggcgggcctcgccctcatcgtcggcttcgtccgctgcgatacctgtgaagttaacaatctacgctattatcgatagcaatccagcgctgaagtcaagaagttacctgggcaaaaacagtatacccgattctagggttagcaccgttacccctgcaaccatttccttcttcaaggttatgattctgaatcaactatgtgcatcgtcatacttaattttagctgtatttcaactttcaacggtatttggatttaagtttgagcttgtatgtttaggtgtcatatcgtcttcaagggtatgttgtttacacatatatttacacattttgtttgatcaactataccatgtgaccacatcggatgtacatgaaaagcaactcaatcatctttagttagtgtttggttcaaagttcgagcttgccatggtgtactagccctggagtcctgaacccagctgccactcatggtttcaaaggttactaggcgtccaggcgagagcttggtgtacataaggaactgatattacatttggataagaggaaggagatatcctaattctaatgtgttaactgctagcagttccttatgtactgttatgcttcaggcccctctattaattgcctcatgtggaaagagggtgtgatgatcttttgttgtttttgtagtgagaagctcaaagaaggggaagacatctacatctatcaggggtgacaaatccttttgctatgaagatgaccacagggttcttgtttgcgagttcatcctctagaatgtattgggttgtcgccacgaaaaaacacacgaatacataaattcaaataatttctggtgctgtggagtattcataattgtgtgcttttgttgaatccttcatgtaccataattcttactgctttcaagcccttttagaatatgactttaggatgtagaaattggtgaaaggagacaagaaattattctctaaactactattttttataggcaagggaggctggaagcaccttttttgcatgggagctgcatggagagaaattattggcagaaaacaaacttagaccagattcttgaatgtgccaagggaataagcttcgcttgctgcaattcatgtgctgcttggcgccacaaaaggagtagagatttgcttgctttgcagggagcggggtcatagtctgaagaactgtcctgacaaaagcgagggaaatttgaagaaattttgctagaactgtggtgaatctggacactgtctttccaagtgccccaagctcattgagaatgggttacaaattttgcaagctgctttatctgcaatcagcaaggacatttgagcaagaactgccctgaaaacaaacatgacatcccatccaaagtggttcacataggtttgctcttgagaattaagttgttaatgaagctactttccgttgccctgatgagctaggatggaaaccacagaggacacctatcatatcatcagatggaagcatcttacacgcaagacagcaagctttctggtatggagctgaatggtactctggattatcaattgttaagtctacaggctctgaaaacaatggacttaagcaacaaccacttgcatgattcaatcccttaccagttgccatcaaaccttacctatctgaatctggcaaaaaataacttctctgttaaaacaatctaactgcaaggaaccattgggtgcagcaatctcagccacaactcgttatttcagaaaattggtgaattttctttcagaattgtatattgtgtaaggcctactgtatatttcagaaaattggaagcctcaattcactttcagaactagacgtatctttcaacaacctcacgggaatcttcctttctcaatgggcgctctgtcgaagctttctaccctctgatcactcttaaaaaactaacgggtcctggtgtgagtggcagaactattggataggatcgccctgagggcactcaacatcaccactgttgtacaaaaaggcaaccctttccagtagggtcgcgcccctctggtaagagggtcgctgttaagttgcctgattaatccattctttcactgtgtctgcatgttgcagtagatgccagcagatcatgaagcgcccaaatgagctacagtactatcagaagctgaatagattgctgctggaattagagcaaaggagtggaggagtttctgaagagagcagacctgcaaaataaccgtcgtcatgtcagtgacatggccgctcaacttcttcctcttactgcattgtatctgaactgcgtcgacctaccaactacatcactgcaccgactgctatactgcatcaaccaaccgaacggctatatgaaacgacacaatgtcagccgtcagatatgaatattaacttcataaaagtaattgtaacttgtgtaggctggttatagcttgtgatttcacatttcatttgttagcggccaagatttatttctgttagtttatgaccaccactcaggaaagttgattgattctccattccaatctttgttagacctgcaagttgtttgctaacagtgatccttcagataaatggggacatggg

SEQ ID NO: 19082 - DNA, 2361 bp, Zea Mays
cccactaatcagatccccgcaggctggttcactgagccggcttccgagcggcccatgggcttgcccaggaccggctcttccagtcgcctcaacgcgcaggcgccggagttcgtgccgcggggcccgccaccaccgacgccgccccggccgtttgagtactatgcgcctatggtgaacgcagcggatttgctgccaaggagcaacaggcgcgggagccggaagcggagatgctcccgcccgccgcggtgaagacggagctggtgtatctgggcaatttggtcggttggcacggggtatgcatcaataggcaccgtcatcgcagtaggacgcgtgcgtgatcaagcctggatgggacggttttgacacagcacgtcctgtgtgcgaggatctcgaactggggtagtgcggcggtgttgggggttgcggcgggcctcgccctcatcgtcggcttcgtccgctgcgatacctgtgaagttaacaatctacgctattatcgatagcaatccagcgctgaagtcaagaagttacctgggcaaaaacagtatacccgattctaggtgagaagctcaaagaaggggaagacatctacatctatcaggggtgacaaatccttttgctatgaagatgaccacagggttcttgtttgcgagttcatcctctagaatgtattgggttgtcgccacgaaaaaacacacgaatacataaattcaaataatttctggtgctgtggagtattcataattgtgtgcttttgttgaatccttcatgtaccataattcttactgctttcaagcccttttagaatatgactttaggatgtagaaattggtgaaaggagacaagaaattattctctaaactactattttttataggcaagggaggctggaagcaccttttttgcatgggagctgcatggagagaaattattggcagaaaacaaacttagaccagattcttgaatgtgccaagggaataagcttcgcttgctgcaattcatgtgctgcttggcgccacaaaaggagtagaggtgtgatttgcttgctttgcagggagcggggtcatagtctgaagaactgtcctgacaaaagcgagggaaatttgaagaaattttgctagaactgtggtgaatctggacactgtctttccaagtgccccaagctcattgagaatgggttacaaattttgcaagctgctttatctgcaatcagcaaggacatttgagcaagaactgccctgaaaacaaacatgacatcccatccaaagctccatcttggcgccaacagtggttcacataggtttgctcttgagaattaagttgttaatgaagctactttccgttgccctgatgagctaggatggaaaccacagaggacacctatcatatcatcagatggaagcatcttacacgcaagacagcaagctttctggtatggagctgaatggtactctggattatcaattgttaagtctacaggctctgaaaacaatggacttaagcaacaaccacttgcatgattcaatcccttaccagttgccatcaaaccttacctatctgaatctggcaaaaaataacttctctgcaatctcagccacaactcgttatttcagaaaattggtgaattttctttcagaattgtatattgtgtaaggcctactgtatatttcagaaaattggaagcctcaattcactttcagaactagacgtatctttcaacaacctcacgggaatcttcctttctcaatgggcgctctgtcgaagctttctaccctaggcaaccctttccagtagggtcgcgcccctctggtaagagggtcgctgttaagttgcctgattaatccattctttcactgtgtctgcatgttgcagtagatgccagcagatcatgaagcgcccaaatggtgctgagctacagtactatcagaagctgaatagattgctgctggaattagagcaaaggagtggaggagtttctgaagagagcagacctgcaaaataaccgtcgtcatgtcagtgacatggccgctcaacttcttcctcttactgcattgtatctgaactgcgtcgacctaccaactacatcactgcaccgactgctatactgcatcaaccaaccgaacggctatatgaaacgacacaatgtcagccgtcagatatgaatattaacttcataaaagtaattgtaacttgtgtaggctggttatagcttgtgatttcacatttcatttgttagcggccaagatttatttctgttagtttatgaccaccactcaggaaagttgattgattctccattccaatctttgttagacctgcaagttgtttgctaacagtgatccttcagataaatggggacatggg

SEQ ID NO: 19083 - DNA, 4304 bp, Zea Mays
cccactaatcagatccccgcaggctggttcactgagccggcttccgagcggcccatgggcttgcccaggaccggctcttccagtcgcctcaacgcgcaggcgccggagttcgtgccgcggggcccgccaccaccgacgccgccccggccgtttgagtactatgcgcctatggtgaacgcagcggatttgctgccaaggagcaacaggcgcgggagccggaagcggagatgctcccgcccgccgcggtgaagacggagctggtgtatctgggcaatttggtcggttggcacggggtatgcatcaataggcaccgtcatcgcagtaggacgcgtgcgtgatcaagcctggatgggacggttttgacacagcacgtcctgtgtgcgaggatctcgaactgggtcagttcgtggtgatgttcttctaggattctttcgtcatttcttttactgcatcgttgaaactgatccagggtagtgcggcggtgttgggggttgcggcgggcctcgccctcatcgtcggcttcgtccgctgcgatacctgtgaagttaacaatctacgctattatcgatagcaatccagcgctgaagtcaagaagttacctgggcaaaaacagtatacccgattctaggtgagaagctcaaagaaggggaagacatctacatctatcaggggtgacaaatccttttgctatgaagatgaccacagggttcttgtttgcgagttcatcctctagaatgtattgggttgtcgccacgaaaaaacacacgaatacataaattcaaataatttctggtgctgtggagtattcataattgtgtgcttttgttgaatccttcatgtaccataattcttactgctttcaagcccttttagaatatgactttaggatgtagaaattggtgaaaggagacaagaaattattctctaaactactattttttataggcaagggaggctggaagcaccttttttgcatgggagctgcatggagagaaattattggcagaaaacaaacttagaccagattcttgaatgtgccaagggaataagcttcgcttgctgcaattcatgtgctgcttggcgccacaaaaggagtagaggtgtgatttgcttgctttgcagggagcggggtcatagtctgaagaactgtcctgacaaaagcgagggaaatttgaagaaattttgctagaactgtggtgaatctggacactgtctttccaagtgccccaagctcattgagaatgggttacaaattttgcaagctgctttatctgcaatcagcaaggacatttgagcaagaactgccctgaaaacaaacatgacatcccatccaaagctccatcttggcgccaacagtggttcacataggtttgctcttgagaattaagttgttaatgaagctactttccgttgccctgatgagctaggatggaaaccacagaggacacctatcatatcatcagatggaagcatcttacacgcaagacagcaagctttctggtatggagctgaatggtactctggattatcaattgttaagtctacaggctctgaaaacaatggacttaagcaacaaccacttgcatgattcaatcccttaccagttgccatcaaaccttacctatctgaatctggcaaaaaataacttctctgcaatctcagccacaactcgttatttcagaaaattggtgaattttctttcagaattgtatattgtgtaaggcctactgtatatttcagaaaattggaagcctcaattcactttcagaactgtaaggcctacttaatcgttgttttcgtatgcaaacttgacttgaatattgtgttgttgaaattattaatcatgcacaaaccatttcagtattgaatgcccttttcattagaaattaagtataattttgagcacaaatacaattcaaaatataacattaccaccaataaaattataacatatttattttggtcacaaatgtaaggccatctacgtctgtcctaagtcaaaaaaagttaactctgattaacaatatattatatgaaactcaagcttattatattataaaatcaattttctttgcagatacaccagaacacttttttaacataggaacgcttattttactaagaggacaagcatattataaacctagtttttataattaatctggtaagaaaatattttgctgtaactctatataattttttggataaataatagtgcaaagttaaactaatttgacttaggacaaagctagttggacttcaattttcgatcatagcaggtatctgtagaatctaataaagagatttttcaagaaaatctactgataccattttcatgtggccaatctaacaatcatatatagacattattggttcaaattaaaataatttgactcatggatcctagttttttttattttgactcgaaagagaatccatttataatacatagagctttcagatactatctgactttttaaccttttaaagaaaggcattcaaaattgctttgagctatccaagcgaggatgacactaattttattagtgttagtatagtatatgagtagctgctcctaaaccctatgaattcatattgtgataattaaaatccttacagagacgtatctttcaacaacctcacgggaatcttcctttctcaatgggcgctctgtcgaagctttctaccctgtaagtattcatggttctgatagctctcttcttgactggtatgcagttatatgcaaaacaatcaactatcaggcacatttgatgtccttagcaacattagccttgcgacactgtaagtagcttcccatgtatcgataagattgctaattttccttttatgttgtgctatatagttgttgatatatttgttatgttgtggaatatggtgtaaaataaaaataaatagcatttgtaatgctactcaaattaacttcctagaggcttattaagccgtaggaagttagccagcaaactttctaggggctacagtaagccgtaggaagttatccagctaacttcctaaaggctacagtaagccgtaggaagttagctagctgacggcgctgacggcgtgaagctactaacttccgagaatctactaacttccgagaggcttagcaagccgtagaaagttagctaacttcctagagccctctaggaagttaagctaacttccgacaaaaaattttcgagagccaaacttccgacgggatggcttaacttccgagagtttcgctaacttcctagagtttaggcctaacttcctagggtttaggctctaggaagtttactattttggtgtagtgccagcaatctagatgtttcaactatatacctaatcattgaccatttctaaatgaatgcacttgctagaaaattatttgttcctcgtgtttttcttctcatcctgcctattggaatctcgcagctgatcactcttaaaaaactaacgggtcctggtgtgagtggcagaactattggataggatcgccctgagggcactcaacatcaccactgttgtacaaaagtaggccaattgacatatacactttgttcatttatgttggtcgattctacccagtttaaagagagactaaaatgtgggcgttgttgcttgtgtccatccatgccacaagctgtaatattttcttctaataagcttttatacattacctctcttgttgactggttgaccatttgtgcagaggcaaccctttccagtagggtcgcgcccctctggtaagagggtcgctgttaagttgcctgattaatccattctttcactgtgtctgcatgttgcagtagatgccagcagatcatgaagcgcccaaatggtgctgagctacagtactatcagaagctgaatagattgctgctggaattagagcaaaggagtggaggagtttctgaagagagcagacctgcaaaataaccgtcgtcatgtcagtgacatggccgctcaacttcttcctcttactgcattgtatctgaactgcgtcgacctaccaactacatcactgcaccgactgctatactgcatcaaccaaccgaacggctatatgaaacgacacaatgtcagccgtcagatatgaatattaacttcataaaagtaattgtaacttgtgtaggctggttatagcttgtgatttcacatttcatttgttagcggccaagatttatttctgttagtttatgaccaccactcaggaaagttgattgattctccattccaatctttgttagacctgcaagttgtttgctaacagtgatccttcagataaatggggacatggg

SEQ ID NO: 19084 - DNA, 3112 bp, Zea Mays
cccactaatcagatccccgcaggctggttcactgagccggcttccgagcggcccatgggcttgcccaggaccggctcttccagtcgcctcaacgcgcaggcgccggagttcgtgccgcggggcccgccaccaccgacgccgccccggccgtttgagtactatgcgcctatggtgaacgcagcggatttgctgccaaggagcaacaggcgcgggagccggaagcggagatgctcccgcccgccgcggtgaagacggagctggtgtatctgggcaatttggtcggttggcacggggtatgcatcaataggcaccgtcatcgcagtaggacgcgtgcgtgatcaagcctggatgggacggttttgacacagcacgtcctgtgtgcgaggatctcgaactgggtcagttcgtggtgatgttcttctaggattctttcgtcatttcttttactgcatcgttgaaactgatccagggtagtgcggcggtgttgggggttgcggcgggcctcgccctcatcgtcggcttcgtccgctgcgatacctgtgaagttaacaatctacgctattatcgatagcaatccagcgctgaagtcaagaagttacctgggcaaaaacagtatacccgattctagggttagcaccgttacccctgcaaccatttccttcttcaaggttatgattctgaatcaactatgtgcatcgtcatacttaattttagctgtatttcaactttcaacggtatttggatttaagtttgagcttgtatgtttaggtgtcatatcgtcttcaagggtatgttgtttacacatatatttacacattttgtttgatcaactataccatgtgaccacatcggatgtacatgaaaagcaactcaatcatctttagttagtgtttggttcaaagttcgagcttgccatggtgtactagccctggagtcctgaacccagctgccactcatggtttcaaaggttactaggcgtccaggcgagagcttggtgtacataaggaactgatattacatttggataagaggaaggagatatcctaattctaatgtgttaactgctagcagttccttatgtactgttatgcttcaggcccctctattaattgcctcatgtggaaagagggtgtgatgatcttttgttgtttttgtagtgagaagctcaaagaaggggaagacatctacatctatcaggggtgacaaatccttttgctatgaagatgaccacagggttcttgtttgcgagttcatcctctagaatgtattgggttgtcgccacgaaaaaacacacgaatacataaattcaaataatttctggtgctgtggagtattcataattgtgtgcttttgttgaatccttcatgtaccataattcttactgctttcaagcccttttagaatatgactttaggatgtagaaattggtgaaaggagacaagaaattattctctaaactactattttttataggcaagggaggctggaagcaccttttttgcatgggagctgcatggagagaaattattggcagaaaacaaacttagaccagattcttgaatgtgccaagggaataagcttcgcttgctgcaattcatgtgctgcttggcgccacaaaaggagtagaggtgtgatttgcttgctttgcagggagcggggtcatagtctgaagaactgtcctgacaaaagcgagggaaatttgaagaaattttgctagaactgtggtgaatctggacactgtctttccaagtgccccaagctcattgagaatgggttacaaattttgcaagctgctttatctgcaatcagcaaggacatttgagcaagaactgccctgaaaacaaacatgacatcccatccaaagctccatcttggcgccaacagtggttcacataggtttgctcttgagaattaagttgttaatgaagctactttccgttgccctgatgagctaggatggaaaccacagaggacacctatcatatcatcagatggaagcatcttacacgcaagacagcaagctttctggtatggagctgaatggtactctggattatcaattgttaagtctacaggctctgaaaacaatggacttaagcaacaaccacttgcatgattcaatcccttaccagttgccatcaaaccttacctatctgaatctggcaaaaaataacttctctggtaatcttccatactctatatccaacttggtttcacttgagtacctcaatctcagccacaactcgttatttcagaaaattggtgaattttctttcagaattgtatattgtgtaaggcctactgtatatttcagaaaattggaagcctcaattcactttcagaactagacgtatctttcaacaacctcacgggaatcttcctttctcaatgggcgctctgtcgaagctttctaccctgtaagtattcatggttctgatagctctcttcttgactggtatgcagttatatgcaaaacaatcaactatcaggcacatttgatgtccttagcaacattagccttgcgacactaggcaaccctttccagtagggtcgcgcccctctggtaagagggtcgctgttaagttgcctgattaatccattctttcactgtgtctgcatgttgcagtagatgccagcagatcatgaagcgcccaaatgagctacagtactatcagaagctgaatagattgctgctggaattagagcaaaggagtggaggagtttctgaagagagcagacctgcaaaataaccgtcgtcatgtcagtgacatggccgctcaacttcttcctcttactgcattgtatctgaactgcgtcgacctaccaactacatcactgcaccgactgctatactgcatcaaccaaccgaacggctatatgaaacgacacaatgtcagccgtcagatatgaatattaacttcataaaagtaattgtaacttgtgtaggctggttatagcttgtgatttcacatttcatttgttagcggccaagatttatttctgttagtttatgaccaccactcaggaaagttgattgattctccattccaatctttgttagacctgcaagttgtttgctaacagtgatccttcagataaatggggacatggg

SEQ ID NO: 19085 - DNA, 4578 bp, Zea Mays
cccactaatcagatccccgcaggctggttcactgagccggcttccgagcggcccatgggcttgcccaggaccggctcttccagtcgcctcaacgcgcaggcgccggagttcgtgccgcggggcccgccaccaccgacgccgccccggccgtttgagtactatgcgcctatggtgaacgcagcggatttgctgccaaggagcaacaggcgcgggagccggaagcggagatgctcccgcccgccgcggtgaagacggagctggtgtatctgggcaatttggtcggttggcacggggtatgcatcaataggcaccgtcatcgcagtaggacgcgtgcgtgatcaagcctggatgggacggttttgacacagcacgtcctgtgtgcgaggatctcgaactgggtcagttcgtggtgatgttcttctaggattctttcgtcatttcttttactgcatcgttgaaactgatccagggtagtgcggcggtgttgggggttgcggcgggcctcgccctcatcgtcggcttcgtccgctgcgatacctgtgaagttaacaatctacgctattatcgatagcaatccagcgctgaagtcaagaagttacctgggcaaaaacagtatacccgattctagggttagcaccgttacccctgcaaccatttccttcttcaaggttatgattctgaatcaactatgtgcatcgtcatacttaattttagctgtatttcaactttcaacggtatttggatttaagtttgagcttgtatgtttaggtgtcatatcgtcttcaagggtatgttgtttacacatatatttacacattttgtttgatcaactataccatgtgaccacatcggatgtacatgaaaagcaactcaatcatctttagttagtgtttggttcaaagttcgagcttgccatggtgtactagccctggagtcctgaacccagctgccactcatggtttcaaaggttactaggcgtccaggcgagagcttggtgtacataaggaactgatattacatttggataagaggaaggagatatcctaattctaatgtgttaactgctagcagttccttatgtactgttatgcttcaggcccctctattaattgcctcatgtggaaagagggtgtgatgatcttttgttgtttttgtagtgagaagctcaaagaaggggaagacatctacatctatcaggggtgacaaatccttttgctatgaagatgaccacagggttcttgtttgcgagttcatcctctagaatgtattgggttgtcgccacgaaaaaacacacgaatacataaattcaaataatttctggtgctgtggagtattcataattgtgtgcttttgttgaatccttcatgtaccataattcttactgctttcaagcccttttagaatatgactttaggatgtagaaattggtgaaaggagacaagaaattattctctaaactactattttttataggcaagggaggctggaagcaccttttttgcatgggagctgcatggagagaaattattggcagaaaacaaacttagaccagattcttgaatgtgccaagggaataagcttcgcttgctgcaattcatgtgctgcttggcgccacaaaaggagtagaggtgtgatttgcttgctttgcagggagcggggtcatagtctgaagaactgtcctgacaaaagcgagggaaatttgaagaaattttgctagaactgtggtgaatctggacactgtctttccaagtgccccaagctcattgagaatgggttacaaattttgcaagctgctttatctgcaatcagcaaggacatttgagcaagaactgccctgaaaacaaacatgacatcccatccaaagctccatcttggcgccaacagtggttcacataggtttgctcttgagaattaagttgttaatgaagctactttccgttgccctgatgagctaggatggaaaccacagaggacacctatcatatcatcagatggaagcatcttacacgcaagacagcaagctttctggtatggagctgaatggtactctggattatcaattgttaagtctacaggctctgaaaacaatggacttaagcaacaaccacttgcatgattcaatcccttaccagttgccatcaaaccttacctatctgtaatgtctcccaacctgtacatattattgatgctattcgatttttgaaatttgattcaaagcgaatacaggaatctggcaaaaaataacttctctggtaatcttccatactctatatccaacttggtttcacttgagtacctgtaagtttctgtccactgcaaagatgtaattctttctgtgatgatctttttagttaaaacaatctaactgcaaggaaccattgggtgcagcaatctcagccacaactcgttatttcagaaaattggtgaattttctttcagaattgtatattgtgtaaggcctactgtatatttcagaaaattggaagcctcaattcactttcagaactgtaaggcctacttaatcgttgttttcgtatgcaaacttgacttgaatattgtgttgttgaaattattaatcatgcacaaaccatttcagtattgaatgcccttttcattagaaattaagtataattttgagcacaaatacaattcaaaatataacattaccaccaataaaattataacatatttattttggtcacaaatgtaaggccatctacgtctgtcctaagtcaaaaaaagttaactctgattaacaatatattatatgaaactcaagcttattatattataaaatcaattttctttgcagatacaccagaacacttttttaacataggaacgcttattttactaagaggacaagcatattataaacctagtttttataattaatctgagacgtatctttcaacaacctcacgggaatcttcctttctcaatgggcgctctgtcgaagctttctaccctgtaagtattcatggttctgatagctctcttcttgactggtatgcagttatatgcaaaacaatcaactatcaggcacatttgatgtccttagcaacattagccttgcgacactgtaagtagcttcccatgtatcgataagattgctaattttccttttatgttgtgctatatagttgttgatatatttgttatgttgtggaatatggtgtaaaataaaaataaatagcatttgtaatgctactcaaattaacttcctagaggcttattaagccgtaggaagttagccagcaaactttctaggggctacagtaagccgtaggaagttatccagctaacttcctaaaggctacagtaagccgtaggaagttagctagctgacggcgctgacggcgtgaagctactaacttccgagaatctactaacttccgagaggcttagcaagccgtagaaagttagctaacttcctagagccctctaggaagttaagctaacttccgacaaaaaattttcgagagccaaacttccgacgggatggcttaacttccgagagtttcgctaacttcctagagtttaggcctaacttcctagggtttaggctctaggaagtttactattttggtgtagtgccagcaatctagatgtttcaactatatacctaatcattgaccatttctaaatgaatgcacttgctagaaaattatttgttcctcgtgtttttcttctcatcctgcctattggaatctcgcagctgatcactcttaaaaaactaacgggtcctggtgtgagtggcagaactattggataggatcgccctgagggcactcaacatcaccactgttgtacaaaagtaggccaattgacatatacactttgttcatttatgttggtcgattctacccagtttaaagagagactaaaatgtgggcgttgttgcttgtgtccatccatgccacaagctgtaatattttcttctaataagcttttatacattacctctcttgttgactggttgaccatttgtgcagaggcaaccctttccagtagggtcgcgcccctctggtaagagggtcgctgttaagttgcctgattaatccattctttcactgtgtctgcatgttgcagtagatgccagcagatcatgaagcgcccaaatgagctacagtactatcagaagctgaatagattgctgctggaattagagcaaaggagtggaggagtttctgaagagagcagacctgcaaaataaccgtcgtcatgtcagtgacatggccgctcaacttcttcctcttactgcattgtatctgaactgcgtcgacctaccaactacatcactgcaccgactgctatactgcatcaaccaaccgaacggctatatgaaacgacacaatgtcagccgtcagatatgaatattaacttcataaaagtaattgtaacttgtgtaggctggttatagcttgtgatttcacatttcatttgttagcggccaagatttatttctgttagtttatgaccaccactcaggaaagttgattgattctccattccaatctttgttagacctgcaagttgtttgctaacagtgatccttcagataaatggggacatggg

SEQ ID NO: 19086 - DNA, 2196 bp, Zea Mays
cccactaatcagatccccgcaggctggttcactgagccggcttccgagcggcccatgggcttgcccaggaccggctcttccagtcgcctcaacgcgcaggcgccggagttcgtgccgcggggcccgccaccaccgacgccgccccggccgtttgagtactatgcgcctatggtgaacgcagcggatttgctgccaaggagcaacaggcgcgggagccggaagcggagatgctcccgcccgccgcggtgaagacggagctggtgtatctgggcaatttggtcggttggcacggggtatgcatcaataggcaccgtcatcgcagtaggacgcgtgcgtgatcaagcctggatgggacggttttgacacagcacgtcctgtgtgcgaggatctcgaactgggtcagttcgtggtgatgttcttctaggattctttcgtcatttcttttactgcatcgttgaaactgatccagggtagtgcggcggtgttgggggttgcggcgggcctcgccctcatcgtcggcttcgtccgctgcgatacctgtgaagttaacaatctacgctattatcgatagcaatccagcgctgaagtcaagaagttacctgggcaaaaacagtatacccgattctaggtgagaagctcaaagaaggggaagacatctacatctatcagcaagggaggctggaagcaccttttttgcatgggagctgcatggagagaaattattggcagaaaacaaacttagaccagattcttgaatgtgccaagggaataagcttcgcttgctgcaattcatgtgctgcttggcgccacaaaaggagtagagatttgcttgctttgcagggagcggggtcatagtctgaagaactgtcctgacaaaagcgagggaaatttgaagaaattttgctagaactgtggtgaatctggacactgtctttccaagtgccccaagctcattgagaatgggttacaaattttgcaagctgctttatctgcaatcagcaaggacatttgagcaagaactgccctgaaaacaaacatgacatcccatccaaagctccatcttggcgccaacagtggttcacataggtttgctcttgagaattaagttgttaatgaagctactttccgttgccctgatgagctaggatggaaaccacagaggacacctatcatatcatcagatggaagcatcttacacgcaagacagcaagctttctggtatggagctgaatggtactctggattatcaattgttaagtctacaggctctgaaaacaatggacttaagcaacaaccacttgcatgattcaatcccttaccagttgccatcaaaccttacctatctgaatctggcaaaaaataacttctctggtaatcttccatactctatatccaacttggtttcacttgagtacctcaatctcagccacaactcgttatttcagaaaattggtgaattttctttcagaattgtatattgtgtaaggcctactgtatatttcagaaaattggaagcctcaattcactttcagaactagacgtatctttcaacaacctcacgggaatcttcctttctcaatgggcgctctgtcgaagctttctaccctaggcaaccctttccagtagggtcgcgcccctctggtaagagggtcgctgttaagttgcctgattaatccattctttcactgtgtctgcatgttgcagtagatgccagcagatcatgaagcgcccaaatggtgctgagctacagtactatcagaagctgaatagattgctgctggaattagagcaaaggagtggaggagtttctgaagagagcagacctgcaaaataaccgtcgtcatgtcagtgacatggccgctcaacttcttcctcttactgcattgtatctgaactgcgtcgacctaccaactacatcactgcaccgactgctatactgcatcaaccaaccgaacggctatatgaaacgacacaatgtcagccgtcagatatgaatattaacttcataaaagtaattgtaacttgtgtaggctggttatagcttgtgatttcacatttcatttgttagcggccaagatttatttctgttagtttatgaccaccactcaggaaagttgattgattctccattccaatctttgttagacctgcaagttgtttgctaacagtgatccttcagataaatggggacatggg

SEQ ID NO: 19087 - DNA, 2196 bp, Zea Mays
cccactaatcagatccccgcaggctggttcactgagccggcttccgagcggcccatgggcttgcccaggaccggctcttccagtcgcctcaacgcgcaggcgccggagttcgtgccgcggggcccgccaccaccgacgccgccccggccgtttgagtactatgcgcctatggtgaacgcagcggatttgctgccaaggagcaacaggcgcgggagccggaagcggagatgctcccgcccgccgcggtgaagacggagctggtgtatctgggcaatttggtcggttggcacggggtatgcatcaataggcaccgtcatcgcagtaggacgcgtgcgtgatcaagcctggatgggacggttttgacacagcacgtcctgtgtgcgaggatctcgaactgggtcagttcgtggtgatgttcttctaggattctttcgtcatttcttttactgcatcgttgaaactgatccagggtagtgcggcggtgttgggggttgcggcgggcctcgccctcatcgtcggcttcgtccgctgcgatacctgtgaagttaacaatctacgctattatcgatagcaatccagcgctgaagtcaagaagttacctgggcaaaaacagtatacccgattctaggtgagaagctcaaagaaggggaagacatctacatctatcaggggtgacaaatccttttgctatgaagatgaccacagggttcttgtttgcgagttcatcctctagaatgcaagggaggctggaagcaccttttttgcatgggagctgcatggagagaaattattggcagaaaacaaacttagaccagattcttgaatgtgccaagggaataagcttcgcttgctgcaattcatgtgctgcttggcgccacaaaaggagtagaggtgtgatttgcttgctttgcagggagcggggtcatagtctgaagaactgtcctgacaaaagcgagggaaatttgaagaaattttgctagaactgtggtgaatctggacactgtctttccaagtgccccaagctcattgagaatgggttacaaattttgcaagctgctttatctgcaatcagcaaggacatttgagcaagaactgccctgaaaacaaacatgacatcccatccaaagctccatcttggcgccaacagtggttcacataggtttgctcttgagaattaagttgttaatgaagctactttccgttgccctgatgagctaggatggaaaccacagaggacacctatcatatcatcagatggaagcatcttacacgcaagacagcaagctttctggtatggagctgaatggtactctggattatcaattgttaagtctacaggctctgaaaacaatggacttaagcaacaaccacttgcatgattcaatcccttaccagttgccatcaaaccttacctatctgtaatgtctcccaacctgtacatattattgatgctattcgatttttgaaatttgattcaaagcgaatacaggaatctggcaaaaaataacttctctgttaaaacaatctaactgcaaggaaccattgggtgcagcaatctcagccacaactcgttatttcagaaaattggtgaattttctttcagaattgtatattgtgtaaggcctactgtatatttcagaaaattggaagcctcaattcactttcagaactagacgtatctttcaacaacctcacgggaatcttcctttctcaatgggcgctctgtcgaagctttctaccctagctacagtactatcagaagctgaatagattgctgctggaattagagcaaaggagtggaggagtttctgaagagagcagacctgcaaaataaccgtcgtcatgtcagtgacatggccgctcaacttcttcctcttactgcattgtatctgaactgcgtcgacctaccaactacatcactgcaccgactgctatactgcatcaaccaaccgaacggctatatgaaacgacacaatgtcagccgtcagatatgaatattaacttcataaaagtaattgtaacttgtgtaggctggttatagcttgtgatttcacatttcatttgttagcggccaagatttatttctgttagtttatgaccaccactcaggaaagttgattgattctccattccaatctttgttagacctgcaagttgtttgctaacagtgatccttcagataaatggggacatggg

SEQ ID NO: 19088 - DNA, 2374 bp, Zea Mays
cccactaatcagatccccgcaggctggttcactgagccggcttccgagcggcccatgggcttgcccaggaccggctcttccagtcgcctcaacgcgcaggcgccggagttcgtgccgcggggcccgccaccaccgacgccgccccggccgtttgagtactatgcgcctatggtgaacgcagcggatttgctgccaaggagcaacaggcgcgggagccggaagcggagatgctcccgcccgccgcggtgaagacggagctggtgtatctgggcaatttggtcggttggcacggggtatgcatcaataggcaccgtcatcgcagtaggacgcgtgcgtgatcaagcctggatgggacggttttgacacagcacgtcctgtgtgcgaggatctcgaactgggtcagttcgtggtgatgttcttctaggattctttcgtcatttcttttactgcatcgttgaaactgatccagggtagtgcggcggtgttgggggttgcggcgggcctcgccctcatcgtcggcttcgtccgctgcgatacctgtgaagttaacaatctacgctattatcgatagcaatccagcgctgaagtcaagaagttacctgggcaaaaacagtatacccgattctaggtgagaagctcaaagaaggggaagacatctacatctatcaggggtgacaaatccttttgctatgaagatgaccacagggttcttgtttgcgagttcatcctctagaatgtattgggttgtcgccacgaaaaaacacacgaatacataaattcaaataatttctggtgctgtggagtattcataattgtgtgcttttgttgaatccttcatgtaccataattcttactgctttcaagcccttttagaatatgactttaggatgtagaaattggtgaaaggagacaagaaattattctctaaactactattttttataggcaagggaggctggaagcaccttttttgcatgggagctgcatggagagaaattattggcagaaaacaaacttagaccagattcttgaatgtgccaagggaataagcttcgcttgctgcaattcatgtgctgcttggcgccacaaaaggagtagaggtgtgatttgcttgctttgcagggagcggggtcatagtctgaagaactgtcctgacaaaagcgagggaaatttgaagaaattttgctagaactgtggtgaatctggacactgtctttccaagtgccccaagctcattgagaatgggttacaaattttgcaagctgctttatctgcaatcagcaaggacatttgagcaagaactgccctgaaaacaaacatgacatcccatccaaagctccatcttggcgccaacagtggttcacataggtttgctcttgagaattaagttgttaatgaagctactttccgttgccctgatgagctaggatggaaaccacagaggacacctatcatatcatcagatggaagcatcttacacgcaagacagcaagctttctggtatggagctgaatggtactctggattatcaattgttaagtctacaggctctgaaaacaatggacttaagcaacaaccacttgcatgattcaatcccttaccagttgccatcaaaccttacctatctgaatctggcaaaaaataacttctctggtaatcttccatactctatatccaacttggtttcacttgagtacctcaatctcagccacaactcgttatttcagaaaattggtgaattttctttcagaattgtatattgtgtaaggcctactgtatatttcagaaaattggaagcctcaattcactttcagaactagacgtatctttcaacaacctcacgggaatcttcctttctcaatgggcgctctgtcgaagctttctaccctaggcaaccctttccagtagggtcgcgcccctctggtaagagggtcgctgttaagttgcctgattaatccattctttcactgtgtctgcatgttgcagtagatgccagcagatcatgaagcgcccaaatgagctacagtactatcagaagctgaatagattgctgctggaattagagcaaaggagtggaggagtttctgaagagagcagacctgcaaaataaccgtcgtcatgtcagtgacatggccgctcaacttcttcctcttactgcattgtatctgaactgcgtcgacctaccaactacatcactgcaccgactgctatactgcatcaaccaaccgaacggctatatgaaacgacacaatgtcagccgtcagatatgaatattaacttcataaaagaaagttgattgattctccattccaatctttgttagacctgcaagttgtttgctaacagtgatccttcagataaatggggacatggg

SEQ ID NO: 19089 - DNA, 3277 bp, Zea Mays
cccactaatcagatccccgcaggctggttcactgagccggcttccgagcggcccatgggcttgcccaggaccggctcttccagtcgcctcaacgcgcaggcgccggagttcgtgccgcggggcccgccaccaccgacgccgccccggccgtttgagtactatgcgcctatggtgaacgcagcggatttgctgccaaggagcaacaggcgcgggagccggaagcggagatgctcccgcccgccgcggtgaagacggagctggtgtatctgggcaatttggtcggttggcacggggtatgcatcaataggcaccgtcatcgcagtaggacgcgtgcgtgatcaagcctggatgggacggttttgacacagcacgtcctgtgtgcgaggatctcgaactgggtcagttcgtggtgatgttcttctaggattctttcgtcatttcttttactgcatcgttgaaactgatccagggtagtgcggcggtgttgggggttgcggcgggcctcgccctcatcgtcggcttcgtccgctgcgatacctgtgaagttaacaatctacgctattatcgatagcaatccagcgctgaagtcaagaagttacctgggcaaaaacagtatacccgattctaggtgagaagctcaaagaaggggaagacatctacatctatcagcaagggaggctggaagcaccttttttgcatgggagctgcatggagagaaattattggcagaaaacaaacttagaccagattcttgaatgtgccaagggaataagcttcgcttgctgcaattcatgtgctgcttggcgccacaaaaggagtagagatttgcttgctttgcagggagcggggtcatagtctgaagaactgtcctgacaaaagcgagggaaatttgaagaaattttgctagaactgtggtgaatctggacactgtctttccaagtgccccaagctcattgagaatgggttacaaattttgcaagctgctttatctgcaatcagcaaggacatttgagcaagaactgccctgaaaacaaacatgacatcccatccaaagctccatcttggcgccaacagtggttcacataggtttgctcttgagaattaagttgttaatgaagctactttccgttgccctgatgagctaggatggaaaccacagaggacacctatcatatcatcagatggaagcatcttacacgcaagacagcaagctttctggtatggagctgaatggtactctggattatcaattgttaagtctacaggctctgaaaacaatggacttaagcaacaaccacttgcatgattcaatcccttaccagttgccatcaaaccttacctatctgtaatgtctcccaacctgtacatattattgatgctattcgatttttgaaatttgattcaaagcgaatacaggaatctggcaaaaaataacttctctgttaaaacaatctaactgcaaggaaccattgggtgcagcaatctcagccacaactcgttatttcagaaaattggtgaattttctttcagaattgtatattgtgtaaggcctactgtatatttcagaaaattggaagcctcaattcactttcagaactagacgtatctttcaacaacctcacgggaatcttcctttctcaatgggcgctctgtcgaagctttctaccctgtaagtattcatggttctgatagctctcttcttgactggtatgcagttatatgcaaaacaatcaactatcaggcacatttgatgtccttagcaacattagccttgcgacactgtaagtagcttcccatgtatcgataagattgctaattttccttttatgttgtgctatatagttgttgatatatttgttatgttgtggaatatggtgtaaaataaaaataaatagcatttgtaatgctactcaaattaacttcctagaggcttattaagccgtaggaagttagccagcaaactttctaggggctacagtaagccgtaggaagttatccagctaacttcctaaaggctacagtaagccgtaggaagttagctagctgacggcgctgacggcgtgaagctactaacttccgagaatctactaacttccgagaggcttagcaagccgtagaaagttagctaacttcctagagccctctaggaagttaagctaacttccgacaaaaaattttcgagagccaaacttccgacgggatggcttaacttccgagagtttcgctaacttcctagagtttaggcctaacttcctagggtttaggctctaggaagtttactattttggtgtagtgccagcaatctagatgtttcaactatatacctaatcattgaccatttctaaatgaatgcacttgctagaaaattatttgttcctcgtgtttttcttctcatcctgcctattggaatctcgcagctgatcactcttaaaaaactaacgggtcctggtgtgagtggcagaactattggataggatcgccctgagggcactcaacatcaccactgttgtacaaaagtaggccaattgacatatacactttgttcatttatgttggtcgattctacccagtttaaagagagactaaaatgtgggcgttgttgcttgtgtccatccatgccacaagctgtaatattttcttctaataagcttttatacattacctctcttgttgactggttgaccatttgtgcagaggcaaccctttccagtagggtcgcgcccctctggtaagagggtcgctgttaagttgcctgattaatccattctttcactgtgtctgcatgttgcagtagatgccagcagatcatgaagcgcccaaatgagctacagtactatcagaagctgaatagattgctgctggaattagagcaaaggagtggaggagtttctgaagagagcagacctgcaaaataaccgtcgtcatgtcagtgacatggccgctcaacttcttcctcttactgcattgtatctgaactgcgtcgacctaccaactacatcactgcaccgactgctatactgcatcaaccaaccgaacggctatatgaaacgacacaatgtcagccgtcagatatgaatattaacttcataaaagtaattgtaacttgtgtaggctggttatagcttgtgatttcacatttcatttgttagcggccaagatttatttctgttagtttatgaccaccactcaggaaagttgattgattctccattccaatctttgttagacctgcaagttgtttgctaacagtgatccttcagataaatggggacatggg

SEQ ID NO: 19090 - DNA, 2968 bp, Zea Mays
cccactaatcagatccccgcaggctggttcactgagccggcttccgagcggcccatgggcttgcccaggaccggctcttccagtcgcctcaacgcgcaggcgccggagttcgtgccgcggggcccgccaccaccgacgccgccccggccgtttgagtactatgcgcctatggtgaacgcagcggatttgctgccaaggagcaacaggcgcgggagccggaagcggagatgctcccgcccgccgcggtgaagacggagctggtgtatctgggcaatttggtcggttggcacgggggtagtgcggcggtgttgggggttgcggcgggcctcgccctcatcgtcggcttcgtccgctgcgatacctgtgaagttaacaatctacgctattatcgatagcaatccagcgctgaagtcaagaagttacctgggcaaaaacagtatacccgattctagggttagcaccgttacccctgcaaccatttccttcttcaagtgagaagctcaaagaaggggaagacatctacatctatcaggggtgacaaatccttttgctatgaagatgaccacagggttcttgtttgcgagttcatcctctagaatgcaagggaggctggaagcaccttttttgcatgggagctgcatggagagaaattattggcagaaaacaaacttagaccagattcttgaatgtgccaagggaataagcttcgcttgctgcaattcatgtgctgcttggcgccacaaaaggagtagagatttgcttgctttgcagggagcggggtcatagtctgaagaactgtcctgacaaaagcgagggaaatttgaagaaattttgctagaactgtggtgaatctggacactgtctttccaagtgccccaagctcattgagaatgggttacaaattttgcaagctgctttatctgcaatcagcaaggacatttgagcaagaactgccctgaaaacaaacatgacatcccatccaaagctccatcttggcgccaacagtggttcacataggtttgctcttgagaattaagttgttaatgaagctactttccgttgccctgatgagctaggatggaaaccacagaggacacctatcatatcatcagatggaagcatcttacacgcaagacagcaagctttctggtatggagctgaatggtactctggattatcaattgttaagtctacaggctctgaaaacaatggacttaagcaacaaccacttgcatgattcaatcccttaccagttgccatcaaaccttacctatctgaatctggcaaaaaataacttctctggtaatcttccatactctatatccaacttggtttcacttgagtacctcaatctcagccacaactcgttatttcagaaaattggtgaattttctttcagaattgtatattgtgtaaggcctactgtatatttcagaaaattggaagcctcaattcactttcagaactagacgtatctttcaacaacctcacgggaatcttcctttctcaatgggcgctctgtcgaagctttctaccctgtaagtattcatggttctgatagctctcttcttgactggtatgcagttatatgcaaaacaatcaactatcaggcacatttgatgtccttagcaacattagccttgcgacactgtaagtagcttcccatgtatcgataagattgctaattttccttttatgttgtgctatatagttgttgatatatttgttatgttgtggaatatggtgtaaaataaaaataaatagcatttgtaatgctactcaaattaacttcctagaggcttattaagccgtaggaagttagccagcaaactttctaggggctacagtaagccgtaggaagttatccagctaacttcctaaaggctacagtaagccgtaggaagttagctagctgacggcgctgacggcgtgaagctactaacttccgagaatctactaacttccgagaggcttagcaagccgtagaaagttagctaacttcctagagccctctaggaagttaagctaacttccgacaaaaaattttcgagagccaaacttccgacgggatggcttaacttccgagagtttcgctaacttcctagagtttaggcctaacttcctagggtttaggctctaggaagtttactattttggtgtagtgccagcaatctagatgtttcaactatatacctaatcattgaccatttctaaatgaatgcacttgctagaaaattatttgttcctcgtgtttttcttctcatcctgcctattggaatctcgcagctgatcactcttaaaaaactaacgggtcctggtgtgagtggcagaactattggataggatcgccctgagggcactcaacatcaccactgttgtacaaaaaggcaaccctttccagtagggtcgcgcccctctggtaagagggtcgctgttaagttgcctgattaatccattctttcactgtgtctgcatgttgcagtagatgccagcagatcatgaagcgcccaaatgagctacagtactatcagaagctgaatagattgctgctggaattagagcaaaggagtggaggagtttctgaagagagcagacctgcaaaataaccgtcgtcatgtcagtgacatggccgctcaacttcttcctcttactgcattgtatctgaactgcgtcgacctaccaactacatcactgcaccgactgctatactgcatcaaccaaccgaacggctatatgaaacgacacaatgtcagccgtcagatatgaatattaacttcataaaagtaattgtaacttgtgtaggctggttatagcttgtgatttcacatttcatttgttagcggccaagatttatttctgttagtttatgaccaccactcaggaaagttgattgattctccattccaatctttgttagacctgcaagttgtttgctaacagtgatccttcagataaatggggacatggg

SEQ ID NO: 19091 - DNA, 2543 bp, Zea Mays
cccactaatcagatccccgcaggctggttcactgagccggcttccgagcggcccatgggcttgcccaggaccggctcttccagtcgcctcaacgcgcaggcgccggagttcgtgccgcggggcccgccaccaccgacgccgccccggccgtttgagtactatgcgcctatggtgaacgcagcggatttgctgccaaggagcaacaggcgcgggagccggaagcggagatgctcccgcccgccgcggtgaagacggagctggtgtatctgggcaatttggtcggttggcacggggtatgcatcaataggcaccgtcatcgcagtaggacgcgtgcgtgatcaagcctggatgggacggttttgacacagcacgtcctgtgtgcgaggatctcgaactgggtcagttcgtggtgatgttcttctaggattctttcgtcatttcttttactgcatcgttgaaactgatccagggtagtgcggcggtgttgggggttgcggcgggcctcgccctcatcgtcggcttcgtccgctgcgatacctgtgaagttaacaatctacgctattatcgatagcaatccagcgctgaagtcaagaagttacctgggcaaaaacagtatacccgattctaggtgagaagctcaaagaaggggaagacatctacatctatcaggggtgacaaatccttttgctatgaagatgaccacagggttcttgtttgcgagttcatcctctagaatgtattgggttgtcgccacgaaaaaacacacgaatacataaattcaaataatttctggtgctgtggagtattcataattgtgtgcttttgttgaatccttcatgtaccataattcttactgctttcaagcccttttagaatatgactttaggatgtagaaattggtgaaaggagacaagaaattattctctaaactactattttttataggcaagggaggctggaagcaccttttttgcatgggagctgcatggagagaaattattggcagaaaacaaacttagaccagattcttgaatgtgccaagggaataagcttcgcttgctgcaattcatgtgctgcttggcgccacaaaaggagtagaggtgtgatttgcttgctttgcagggagcggggtcatagtctgaagaactgtcctgacaaaagcgagggaaatttgaagaaattttgctagaactgtggtgaatctggacactgtctttccaagtgccccaagctcattgagaatgggttacaaattttgcaagctgctttatctgcaatcagcaaggacatttgagcaagaactgccctgaaaacaaacatgacatcccatccaaagtggttcacataggtttgctcttgagaattaagttgttaatgaagctactttccgttgccctgatgagctaggatggaaaccacagaggacacctatcatatcatcagatggaagcatcttacacgcaagacagcaagctttctggtatggagctgaatggtactctggattatcaattgttaagtctacaggctctgaaaacaatggacttaagcaacaaccacttgcatgattcaatcccttaccagttgccatcaaaccttacctatctgaatctggcaaaaaataacttctctggtaatcttccatactctatatccaacttggtttcacttgagtacctgtaagtttctgtccactgcaaagatgtaattctttctgtgatgatctttttagttaaaacaatctaactgcaaggaaccattgggtgcagcaatctcagccacaactcgttatttcagaaaattggtgaattttctttcagaattgtatattgtgtaaggcctactgtatatttcagaaaattggaagcctcaattcactttcagaactttatatgcaaaacaatcaactatcaggcacatttgatgtccttagcaacattagccttgcgacactaggcaaccctttccagtagggtcgcgcccctctggtaagagggtcgctgttaagttgcctgattaatccattctttcactgtgtctgcatgttgcagtagatgccagcagatcatgaagcgcccaaatggtgctgagctacagtactatcagaagctgaatagattgctgctggaattagagcaaaggagtggaggagtttctgaagagagcagacctgcaaaataaccgtcgtcatgtcagtgacatggccgctcaacttcttcctcttactgcattgtatctgaactgcgtcgacctaccaactacatcactgcaccgactgctatactgcatcaaccaaccgaacggctatatgaaacgacacaatgtcagccgtcagatatgaatattaacttcataaaagtaattgtaacttgtgtaggctggttatagcttgtgatttcacatttcatttgttagcggccaagatttatttctgttagtttatgaccaccactcaggaaagttgattgattctccattccaatctttgttagacctgcaagttgtttgctaacagtgatccttcagataaatggggacatggg

SEQ ID NO: 19092 - DNA, 2100 bp, Zea Mays
cccactaatcagatccccgcaggctggttcactgagccggcttccgagcggcccatgggcttgcccaggaccggctcttccagtcgcctcaacgcgcaggcgccggagttcgtgccgcggggcccgccaccaccgacgccgccccggccgtttgagtactatgcgcctatggtgaacgcagcggatttgctgccaaggagcaacaggcgcgggagccggaagcggagatgctcccgcccgccgcggtgaagacggagctggtgtatctgggcaatttggtcggttggcacggggtatgcatcaataggcaccgtcatcgcagtaggacgcgtgcgtgatcaagcctggatgggacggttttgacacagcacgtcctgtgtgcgaggatctcgaactgggtcagttcgtggtgatgttcttctaggattctttcgtcatttcttttactgcatcgttgaaactgatccagggtagtgcggcggtgttgggggttgcggcgggcctcgccctcatcgtcggcttcgtccgctgcgatacctgtgaagttaacaatctacgctattatcgatagcaatccagcgctgaagtcaagaagttacctgggcaaaaacagtatacccgattctagggttagcaccgttacccctgcaaccatttccttcttcaagtgagaagctcaaagaaggggaagacatctacatctatcagcaagggaggctggaagcaccttttttgcatgggagctgcatggagagaaattattggcagaaaacaaacttagaccagattcttgaatgtgccaagggaataagcttcgcttgctgcaattcatgtgctgcttggcgccacaaaaggagtagagatttgcttgctttgcagggagcggggtcatagtctgaagaactgtcctgacaaaagcgagggaaatttgaagaaattttgctagaactgtggtgaatctggacactgtctttccaagtgccccaagctcattgagaatgggttacaaattttgcaagctgctttatctgcaatcagcaaggacatttgagcaagaactgccctgaaaacaaacatgacatcccatccaaagctccatcttggcgccaacagtggttcacataggtttgctcttgagaattaagttgttaatgaagctactttccgttgccctgatgagctaggatggaaaccacagaggacacctatcatatcatcagatggaagcatcttacacgcaagacagcaagctttctggtatggagctgaatggtactctggattatcaattgttaagtctacaggctctgaaaacaatggacttaagcaacaaccacttgcatgattcaatcccttaccagttgccatcaaaccttacctatctgaatctggcaaaaaataacttctctggtaatcttccatactctatatccaacttggtttcacttgagtacctcaatctcagccacaactcgttatttcagaaaattggtgaattttctttcagaattgtatattgtgtaaggcctactgtatatttcagaaaattggaagcctcaattcactttcagaactagacgtatctttcaacaacctcacgggaatcttcctttctcaatgggcgctctgtcgaagctttctaccctagctacagtactatcagaagctgaatagattgctgctggaattagagcaaaggagtggaggagtttctgaagagagcagacctgcaaaataaccgtcgtcatgtcagtgacatggccgctcaacttcttcctcttactgcattgtatctgaactgcgtcgacctaccaactacatcactgcaccgactgctatactgcatcaaccaaccgaacggctatatgaaacgacacaatgtcagccgtcagatatgaatattaacttcataaaagtaattgtaacttgtgtaggctggttatagcttgtgatttcacatttcatttgttagcggccaagatttatttctgttagtttatgaccaccactcaggaaagttgattgattctccattccaatctttgttagacctgcaagttgtttgctaacagtgatccttcagataaatggggacatggg

SEQ ID NO: 19093 - DNA, 2157 bp, Zea Mays
cccactaatcagatccccgcaggctggttcactgagccggcttccgagcggcccatgggcttgcccaggaccggctcttccagtcgcctcaacgcgcaggcgccggagttcgtgccgcggggcccgccaccaccgacgccgccccggccgtttgagtactatgcgcctatggtgaacgcagcggatttgctgccaaggagcaacaggcgcgggagccggaagcggagatgctcccgcccgccgcggtgaagacggagctggtgtatctgggcaatttggtcggttggcacggggtatgcatcaataggcaccgtcatcgcagtaggacgcgtgcgtgatcaagcctggatgggacggttttgacacagcacgtcctgtgtgcgaggatctcgaactgggtcagttcgtggtgatgttcttctaggattctttcgtcatttcttttactgcatcgttgaaactgatccagggtagtgcggcggtgttgggggttgcggcgggcctcgccctcatcgtcggcttcgtccgctgcgatacctgtgaagttaacaatctacgctattatcgatagcaatccagcgctgaagtcaagaagttacctgggcaaaaacagtatacccgattctagggcaagggaggctggaagcaccttttttgcatgggagctgcatggagagaaattattggcagaaaacaaacttagaccagattcttgaatgtgccaagggaataagcttcgcttgctgcaattcatgtgctgcttggcgccacaaaaggagtagagatttgcttgctttgcagggagcggggtcatagtctgaagaactgtcctgacaaaagcgagggaaatttgaagaaattttgctagaactgtggtgaatctggacactgtctttccaagtgccccaagctcattgagaatgggttacaaattttgcaagctgctttatctgcaatcagcaaggacatttgagcaagaactgccctgaaaacaaacatgacatcccatccaaagctccatcttggcgccaacagtggttcacataggtttgctcttgagaattaagttgttaatgaagctactttccgttgccctgatgagctaggatggaaaccacagaggacacctatcatatcatcagatggaagcatcttacacgcaagacagcaagctttctggtatggagctgaatggtactctggattatcaattgttaagtctacaggctctgaaaacaatggacttaagcaacaaccacttgcatgattcaatcccttaccagttgccatcaaaccttacctatctgaatctggcaaaaaataacttctctggtaatcttccatactctatatccaacttggtttcacttgagtacctcaatctcagccacaactcgttatttcagaaaattggtgaattttctttcagaattgtatattgtgtaaggcctactgtatatttcagaaaattggaagcctcaattcactttcagaactagacgtatctttcaacaacctcacgggaatcttcctttctcaatgggcgctctgtcgaagctttctaccctaggcaaccctttccagtagggtcgcgcccctctggtaagagggtcgctgttaagttgcctgattaatccattctttcactgtgtctgcatgttgcagtagatgccagcagatcatgaagcgcccaaatggtgctgagctacagtactatcagaagctgaatagattgctgctggaattagagcaaaggagtggaggagtttctgaagagagcagacctgcaaaataaccgtcgtcatgtcagtgacatggccgctcaacttcttcctcttactgcattgtatctgaactgcgtcgacctaccaactacatcactgcaccgactgctatactgcatcaaccaaccgaacggctatatgaaacgacacaatgtcagccgtcagatatgaatattaacttcataaaagtaattgtaacttgtgtaggctggttatagcttgtgatttcacatttcatttgttagcggccaagatttatttctgttagtttatgaccaccactcaggaaagttgattgattctccattccaatctttgttagacctgcaagttgtttgctaacagtgatccttcagataaatggggacatggg

SEQ ID NO: 19094 - DNA, 3702 bp, Zea Mays
cccactaatcagatccccgcaggctggttcactgagccggcttccgagcggcccatgggcttgcccaggaccggctcttccagtcgcctcaacgcgcaggcgccggagttcgtgccgcggggcccgccaccaccgacgccgccccggccgtttgagtactatgcgcctatggtgaacgcagcggatttgctgccaaggagcaacaggcgcgggagccggaagcggagatgctcccgcccgccgcggtgaagacggagctggtgtatctgggcaatttggtcggttggcacggggtatgcatcaataggcaccgtcatcgcagtaggacgcgtgcgtgatcaagcctggatgggacggttttgacacagcacgtcctgtgtgcgaggatctcgaactgggtcagttcgtggtgatgttcttctaggattctttcgtcatttcttttactgcatcgttgaaactgatccagggtagtgcggcggtgttgggggttgcggcgggcctcgccctcatcgtcggcttcgtccgctgcgatacctgtgaagttaacaatctacgctattatcgatagcaatccagcgctgaagtcaagaagttacctgggcaaaaacagtatacccgattctaggtgagaagctcaaagaaggggaagacatctacatctatcaggggtgacaaatccttttgctatgaagatgaccacagggttcttgtttgcgagttcatcctctagaatgtattgggttgtcgccacgaaaaaacacacgaatacataaattcaaataatttctggtgctgtggagtattcataattgtgtgcttttgttgaatccttcatgtaccataattcttactgctttcaagcccttttagaatatgactttaggatgtagaaattggtgaaaggagacaagaaattattctctaaactactattttttataggcaagggaggctggaagcaccttttttgcatgggagctgcatggagagaaattattggcagaaaacaaacttagaccagattcttgaatgtgccaagggaataagcttcgcttgctgcaattcatgtgctgcttggcgccacaaaaggagtagaggggcggatctgcggctcgcgacccagtaaatacagctacagggaatgagggaaaaggcccaagcgtccagcccagtcgctctcgctcgccctactcgtccagccggcagccgctcgcccagccgctgcctgcccaccggccaccgctcgcccagccggcagccgctgcctgcccagtgcccaccgtcgctcgcccaggcccagccgcagagccgctgcctgcccgccgtcgctcgcctagccgctgccgctgccgccgccgctcgcccagtctaggtccagccgccgccccgcccagccgctcgcggctcgtccaagtgtcctgcgcgcggatctgagcaagcggtcgctgttgggcaactgctaacacatatttgctagatatttgcttgctttgcagggagcggggtcatagtctgaagaactgtcctgacaaaagcgagggaaatttgaagaaattttgctagaactgtggtgaatctggacactgtctttccaagtgccccaagctcattgagaatgggttacaaattttgcaagctgctttatctgcaatcagcaaggacatttgagcaagaactgccctgaaaacaaacatgacatcccatccaaagctccatcttggcgccaacagtggttcacataggtttgctcttgagaattaagttgttaatgaagctactttccgttgccctgatgagctaggatggaaaccacagaggacacctatcatatcatcagatggaagcatcttacacgcaagacagcaagctttctggtatggagctgaatggtactctggattatcaattgttaagtctacaggctctgaaaacaatggacttaagcaacaaccacttgcatgattcaatcccttaccagttgccatcaaaccttacctatctgaatctggcaaaaaataacttctctggtaatcttccatactctatatccaacttggtttcacttgagtacctcaatctcagccacaactcgttatttcagaaaattggtgaattttctttcagaattgtatattgtgtaaggcctactgtatatttcagaaaattggaagcctcaattcactttcagaactagacgtatctttcaacaacctcacgggaatcttcctttctcaatgggcgctctgtcgaagctttctaccctgtaagtattcatggttctgatagctctcttcttgactggtatgcagttatatgcaaaacaatcaactatcaggcacatttgatgtccttagcaacattagccttgcgacactgtaagtagcttcccatgtatcgataagattgctaattttccttttatgttgtgctatatagttgttgatatatttgttatgttgtggaatatggtgtaaaataaaaataaatagcatttgtaatgctactcaaattaacttcctagaggcttattaagccgtaggaagttagccagcaaactttctaggggctacagtaagccgtaggaagttatccagctaacttcctaaaggctacagtaagccgtaggaagttagctagctgacggcgctgacggcgtgaagctactaacttccgagaatctactaacttccgagaggcttagcaagccgtagaaagttagctaacttcctagagccctctaggaagttaagctaacttccgacaaaaaattttcgagagccaaacttccgacgggatggcttaacttccgagagtttcgctaacttcctagagtttaggcctaacttcctagggtttaggctctaggaagtttactattttggtgtagtgccagcaatctagatgtttcaactatatacctaatcattgaccatttctaaatgaatgcacttgctagaaaattatttgttcctcgtgtttttcttctcatcctgcctattggaatctcgcagctgatcactcttaaaaaactaacgggtcctggtgtgagtggcagaactattggataggatcgccctgagggcactcaacatcaccactgttgtacaaaaaggcaaccctttccagtagggtcgcgcccctctggtaagagggtcgctgttaagttgcctgattaatccattctttcactgtgtctgcatgttgcagtagatgccagcagatcatgaagcgcccaaatggtgctgagctacagtactatcagaagctgaatagattgctgctggaattagagcaaaggagtggaggagtttctgaagagagcagacctgcaaaataaccgtcgtcatgtcagtgacatggccgctcaacttcttcctcttactgcattgtatctgaactgcgtcgacctaccaactacatcactgcaccgactgctatactgcatcaaccaaccgaacggctatatgaaacgacacaatgtcagccgtcagatatgaatattaacttcataaaagtaattgtaacttgtgtaggctggttatagcttgtgatttcacatttcatttgttagcggccaagatttatttctgttagtttatgaccaccactcaggaaagttgattgattctccattccaatctttgttagacctgcaagttgtttgctaacagtgatccttcagataaatggggacatggg

SEQ ID NO: 19095 - DNA, 2511 bp, Zea Mays
cccactaatcagatccccgcaggctggttcactgagccggcttccgagcggcccatgggcttgcccaggaccggctcttccagtcgcctcaacgcgcaggcgccggagttcgtgccgcggggcccgccaccaccgacgccgccccggccgtttgagtactatgcgcctatggtgaacgcagcggatttgctgccaaggagcaacaggcgcgggagccggaagcggagatgctcccgcccgccgcggtgaagacggagctggtgtatctgggcaatttggtcggttggcacggggtatgcatcaataggcaccgtcatcgcagtaggacgcgtgcgtgatcaagcctggatgggacggttttgacacagcacgtcctgtgtgcgaggatctcgaactgggtcagttcgtggtgatgttcttctaggattctttcgtcatttcttttactgcatcgttgaaactgatccagggtagtgcggcggtgttgggggttgcggcgggcctcgccctcatcgtcggcttcgtccgctgcgatacctgtgaagttaacaatctacgctattatcgatagcaatccagcgctgaagtcaagaagttacctgggcaaaaacagtatacccgattctagggttagcaccgttacccctgcaaccatttccttcttcaagtgagaagctcaaagaaggggaagacatctacatctatcaggggtgacaaatccttttgctatgaagatgaccacagggttcttgtttgcgagttcatcctctagaatgtattgggttgtcgccacgaaaaaacacacgaatacataaattcaaataatttctggtgctgtggagtattcataattgtgtgcttttgttgaatccttcatgtaccataattcttactgctttcaagcccttttagaatatgactttaggatgtagaaattggtgaaaggagacaagaaattattctctaaactactattttttataggcaagggaggctggaagcaccttttttgcatgggagctgcatggagagaaattattggcagaaaacaaacttagaccagattcttgaatgtgccaagggaataagcttcgcttgctgcaattcatgtgctgcttggcgccacaaaaggagtagaggtgtgatttgcttgctttgcagggagcggggtcatagtctgaagaactgtcctgacaaaagcgagggaaatttgaagaaattttgctagaactgtggtgaatctggacactgtctttccaagtgccccaagctcattgagaatgggttacaaattttgcaagctgctttatctgcaatcagcaaggacatttgagcaagaactgccctgaaaacaaacatgacatcccatccaaagctccatcttggcgccaacagtggttcacataggtttgctcttgagaattaagttgttaatgaagctactttccgttgccctgatgagctaggatggaaaccacagaggacacctatcatatcatcagatggaagcatcttacacgcaagacagcaagctttctggtatggagctgaatggtactctggattatcaattgttaagtctacaggctctgaaaacaatggacttaagcaacaaccacttgcatgattcaatcccttaccagttgccatcaaaccttacctatctgaatctggcaaaaaataacttctctggtaatcttccatactctatatccaacttggtttcacttgagtacctcaatctcagccacaactcgttatttcagaaaattggtgaattttctttcagaattgtatattgtgtaaggcctactgtatatttcagaaaattggaagcctcaattcactttcagaactagacgtatctttcaacaacctcacgggaatcttcctttctcaatgggcgctctgtcgaagctttctaccctaggcaaccctttccagtagggtcgcgcccctctggtaagagggtcgctgttaagttgcctgattaatccattctttcactgtgtctgcatgttgcagtagatgccagcagatcatgaagcgcccaaatgagctacagtactatcagaagctgaatagattgctgctggaattagagcaaaggagtggaggagtttctgaagagagcagacctgcaaaataaccgtcgtcatgtcagtgacatggccgctcaacttcttcctcttactgcattgtatctgaactgcgtcgacctaccaactacatcactgcaccgactgctatactgcatcaaccaaccgaacggctatatgaaacgacacaatgtcagccgtcagatatgaatattaacttcataaaagtaattgtaacttgtgtaggctggttatagcttgtgatttcacatttcatttgttagcggccaagatttatttctgttagtttatgaccaccactcaggaaagttgattgattctccattccaatctttgttagacctgcaagttgtttgctaacagtgatccttcagataaatggggacatggg

SEQ ID NO: 19096 - DNA, 2420 bp, Zea Mays
cccactaatcagatccccgcaggctggttcactgagccggcttccgagcggcccatgggcttgcccaggaccggctcttccagtcgcctcaacgcgcaggcgccggagttcgtgccgcggggcccgccaccaccgacgccgccccggccgtttgagtactatgcgcctatggtgaacgcagcggatttgctgccaaggagcaacaggcgcgggagccggaagcggagatgctcccgcccgccgcggtgaagacggagctggtgtatctgggcaatttggtcggttggcacggggtatgcatcaataggcaccgtcatcgcagtaggacgcgtgcgtgatcaagcctggatgggacggttttgacacagcacgtcctgtgtgcgaggatctcgaactgggtcagttcgtggtgatgttcttctaggattctttcgtcatttcttttactgcatcgttgaaactgatccagggtagtgcggcggtgttgggggttgcggcgggcctcgccctcatcgtcggcttcgtccgctgcgatacctgtgaagttaacaatctacgctattatcgatagcaatccagcgctgaagtcaagaagttacctgggcaaaaacagtatacccgattctagggttagcaccgttacccctgcaaccatttccttcttcaagtgagaagctcaaagaaggggaagacatctacatctatcaggggtgacaaatccttttgctatgaagatgaccacagggttcttgtttgcgagttcatcctctagaatgtattgggttgtcgccacgaaaaaacacacgaatacataaattcaaataatttctggtgctgtggagtattcataattgtgtgcttttgttgaatccttcatgtaccataattcttactgctttcaagcccttttagaatatgactttaggatgtagaaattggtgaaaggagacaagaaattattctctaaactactattttttataggcaagggaggctggaagcaccttttttgcatgggagctgcatggagagaaattattggcagaaaacaaacttagaccagattcttgaatgtgccaagggaataagcttcgcttgctgcaattcatgtgctgcttggcgccacaaaaggagtagaggtgtgatttgcttgctttgcagggagcggggtcatagtctgaagaactgtcctgacaaaagcgagggaaatttgaagaaattttgctagaactgtggtgaatctggacactgtctttccaagtgccccaagctcattgagaatgggttacaaattttgcaagctgctttatctgcaatcagcaaggacatttgagcaagaactgccctgaaaacaaacatgacatcccatccaaagctccatcttggcgccaacagtggttcacataggtttgctcttgagaattaagttgttaatgaagctactttccgttgccctgatgagctaggatggaaaccacagaggacacctatcatatcatcagatggaagcatcttacacgcaagacagcaagctttctggtatggagctgaatggtactctggattatcaattgttaagtctacaggctctgaaaacaatggacttaagcaacaaccacttgcatgattcaatcccttaccagttgccatcaaaccttacctatctgaatctggcaaaaaataacttctctggtaatcttccatactctatatccaacttggtttcacttgagtacctcaatctcagccacaactcgttatttcagaaaattggtgaattttctttcagaattgtatattgtgtaaggcctactgtatatttcagaaaattggaagcctcaattcactttcagaactagacgtatctttcaacaacctcacgggaatcttcctttctcaatgggcgctctgtcgaagctttctacccttagatgccagcagatcatgaagcgcccaaatggtgctgagctacagtactatcagaagctgaatagattgctgctggaattagagcaaaggagtggaggagtttctgaagagagcagacctgcaaaataaccgtcgtcatgtcagtgacatggccgctcaacttcttcctcttactgcattgtatctgaactgcgtcgacctaccaactacatcactgcaccgactgctatactgcatcaaccaaccgaacggctatatgaaacgacacaatgtcagccgtcagatatgaatattaacttcataaaagtaattgtaacttgtgtaggctggttatagcttgtgatttcacatttcatttgttagcggccaagatttatttctgttagtttatgaccaccactcaggaaagttgattgattctccattccaatctttgttagacctgcaagttgtttgctaacagtgatccttcagataaatggggacatggg

SEQ ID NO: 19097 - DNA, 2378 bp, Zea Mays
cccactaatcagatccccgcaggctggttcactgagccggcttccgagcggcccatgggcttgcccaggaccggctcttccagtcgcctcaacgcgcaggcgccggagttcgtgccgcggggcccgccaccaccgacgccgccccggccgtttgagtactatgcgcctatggtgaacgcagcggatttgctgccaaggagcaacaggcgcgggagccggaagcggagatgctcccgcccgccgcggtgaagacggagctggtgtatctgggcaatttggtcggttggcacggggtatgcatcaataggcaccgtcatcgcagtaggacgcgtgcgtgatcaagcctggatgggacggttttgacacagcacgtcctgtgtgcgaggatctcgaactgggtcagttcgtggtgatgttcttctaggattctttcgtcatttcttttactgcatcgttgaaactgatccagggtagtgcggcggtgttgggggttgcggcgggcctcgccctcatcgtcggcttcgtccgctgcgatacctgtgaagttaacaatctacgctattatcgatagcaatccagcgctgaagtcaagaagttacctgggcaaaaacagtatacccgattctaggtgagaagctcaaagaaggggaagacatctacatctatcaggggtgacaaatccttttgctatgaagatgaccacagggttcttgtttgcgagttcatcctctagaatgtattgggttgtcgccacgaaaaaacacacgaatacataaattcaaataatttctggtgctgtggagtattcataattgtgtgcttttgttgaatccttcatgtaccataattcttactgctttcaagcccttttagaatatgactttaggatgtagaaattggtgaaaggagacaagaaattattctctaaactactattttttataggcaagggaggctggaagcaccttttttgcatgggagctgcatggagagaaattattggcagaaaacaaacttagaccagattcttgaatgtgccaagggaataagcttcgcttgctgcaattcatgtgctgcttggcgccacaaaaggagtagaggtgtgatttgcttgctttgcagggagcggggtcatagtctgaagaactgtcctgacaaaagcgagggaaatttgaagaaattttgctagaactgtggtgaatctggacactgtctttccaagtgccccaagctcattgagaatgggttacaaattttgcaagctgctttatctgcaatcagcaaggacatttgagcaagaactgccctgaaaacaaacatgacatcccatccaaagctccatcttggcgccaacagtggttcacataggtttgctcttgagaattaagttgttaatgaagctactttccgttgccctgatgagctaggatggaaaccacagaggacacctatcatatcatcagatggaagcatcttacacgcaagacagcaagctttctggtatggagctgaatggtactctggattatcaattgttaagtctacaggctctgaaaacaatggacttaagcaacaaccacttgcatgattcaatcccttaccagttgccatcaaaccttacctatctgaatctggcaaaaaataacttctctggtaatcttccatactctatatccaacttggtttcacttgagtacctcaatctcagccacaactcgttatttcagaaaattggtgaattttctttcagaattgtatattgtgtaaggcctactgtatatttcagaaaattggaagcctcaattcactttcagaactagacgtatctttcaacaacctcacgggaatcttcctttctcaatgggcgctctgtcgaagctttctaccctatgccagcagatcatgaagcgcccaaatggtgctgagctacagtactatcagaagctgaatagattgctgctggaattagagcaaaggagtggaggagtttctgaagagagcagacctgcaaaataaccgtcgtcatgtcagtgacatggccgctcaacttcttcctcttactgcattgtatctgaactgcgtcgacctaccaactacatcactgcaccgactgctatactgcatcaaccaaccgaacggctatatgaaacgacacaatgtcagccgtcagatatgaatattaacttcataaaagtaattgtaacttgtgtaggctggttatagcttgtgatttcacatttcatttgttagcggccaagatttatttctgttagtttatgaccaccactcaggaaagttgattgattctccattccaatctttgttagacctgcaagttgtttgctaacagtgatccttcagataaatggggacatggg

SEQ ID NO: 19098 - DNA, 3301 bp, Zea Mays
cccactaatcagatccccgcaggctggttcactgagccggcttccgagcggcccatgggcttgcccaggaccggctcttccagtcgcctcaacgcgcaggcgccggagttcgtgccgcggggcccgccaccaccgacgccgccccggccgtttgagtactatgcgcctatggtgaacgcagcggatttgctgccaaggagcaacaggcgcgggagccggaagcggagatgctcccgcccgccgcggtgaagacggagctggtgtatctgggcaatttggtcggttggcacggggtatgcatcaataggcaccgtcatcgcagtaggacgcgtgcgtgatcaagcctggatgggacggttttgacacagcacgtcctgtgtgcgaggatctcgaactggcagggtagtgcggcggtgttgggggttgcggcgggcctcgccctcatcgtcggcttcgtccgctgcgatacctgtgaagttaacaatctacgctattatcgatagcaatccagcgctgaagtcaagaagttacctgggcaaaaacagtatacccgattctagggttagcaccgttacccctgcaaccatttccttcttcaaggttatgattctgaatcaactatgtgcatcgtcatacttaattttagctgtatttcaactttcaacggtatttggatttaagtttgagcttgtatgtttaggtgtcatatcgtcttcaagggtatgttgtttacacatatatttacacattttgtttgatcaactataccatgtgaccacatcggatgtacatgaaaagcaactcaatcatctttagttagtgtttggttcaaagttcgagcttgccatggtgtactagccctggagtcctgaacccagctgccactcatggtttcaaaggttactaggcgtccaggcgagagcttggtgtacataaggaactgatattacatttggataagaggaaggagatatcctaattctaatgtgttaactgctagcagttccttatgtactgttatgcttcaggcccctctattaattgcctcatgtggaaagagggtgtgatgatcttttgttgtttttgtagtgagaagctcaaagaaggggaagacatctacatctatcaggggtgacaaatccttttgctatgaagatgaccacagggttcttgtttgcgagttcatcctctagaatgtattgggttgtcgccacgaaaaaacacacgaatacataaattcaaataatttctggtgctgtggagtattcataattgtgtgcttttgttgaatccttcatgtaccataattcttactgctttcaagcccttttagaatatgactttaggatgtagaaattggtgaaaggagacaagaaattattctctaaactactattttttataggcaagggaggctggaagcaccttttttgcatgggagctgcatggagagaaattattggcagaaaacaaacttagaccagattcttgaatgtgccaagggaataagcttcgcttgctgcaattcatgtgctgcttggcgccacaaaaggagtagagatttgcttgctttgcagggagcggggtcatagtctgaagaactgtcctgacaaaagcgagggaaatttgaagaaattttgctagaactgtggtgaatctggacactgtctttccaagtgccccaagctcattgagaatgggttacaaattttgcaagctgctttatctgcaatcagcaaggacatttgagcaagaactgccctgaaaacaaacatgacatcccatccaaagctccatcttggcgccaacagtggttcacataggtttgctcttgagaattaagttgttaatgaagctactttccgttgccctgatgagctaggatggaaaccacagaggacacctatcatatcatcagatggaagcatcttacacgcaagacagcaagctttctggtatggagctgaatggtactctggattatcaattgttaagtctacaggctctgaaaacaatggacttaagcaacaaccacttgcatgattcaatcccttaccagttgccatcaaaccttacctatctgtaatgtctcccaacctgtacatattattgatgctattcgatttttgaaatttgattcaaagcgaatacaggaatctggcaaaaaataacttctctgttaaaacaatctaactgcaaggaaccattgggtgcagcaatctcagccacaactcgttatttcagaaaattgagacgtatctttcaacaacctcacgggaatcttcctttctcaatgggcgctctgtcgaagctttctaccctaggcaaccctttccagtagggtcgcgcccctctggtaagagggtcgctgttaagttgcctgattaatccattctttcactgtgtctgcatgttgcagtagatgccagcagatcatgaagcgcccaaatggtgctgagctacagtactatcagaagctgaatagattgctgctggaattagagcaaaggagtggaggagtttctgaagagagcagacctgcaaaataaccgtcgtcatgtcagtgacatggccgctcaacttcttcctcttactgcattgtatctgaactgcgtcgacctaccaactacatcactgcaccgactgctatactgcatcaaccaaccgaacggctatatgaaacgacacaatgtcagccgtcagatatgaatattaacttcataaaagtaattgtaacttgtgtaggctggttatagcttgtgatttcacatttcatttgttagcggccaagatttatttctgttagtttatgaccaccactcaggaaagttgattgattctccattccaatctttgttagacctgcaagttgtttgctaacagtgatccttcagataaatggggacatgggaacttacataaccataatgactaaagaaactatggttgcttgaggatgaatcgatccaaagtactaccacattctgatatgaatgaaccacctcccgagttccagttacttactcttatcgggatgggactggacaccaatgaagaattcttaatggctatgcaacaacagcttgtccatgaaattcgtgaagtatggacaacttcagttgagcatctactttatatcaaggaagaccttatcatccctcatggatgtgttcattctcttgtaatctacgaagttctgttaaagttagttgaaccattttctgattctatgttctctctactatttgacaacaacacatcttttatgaattaattattaaacaaaacggggcgcaagact

SEQ ID NO: 19099 - DNA, 2220 bp, Zea Mays
gccgcctccgccgcagcggatttgctgccaaggagcaacaggcgcgggagccggaagcggagatgctcccgcccgccgcggtgaagacggagctggtgtatctgggcaatttggtcggttggcacggggtatgcatcaataggcaccgtcatcgcagtaggacgcgtgcgtgatcaagcctggatgggacggttttgacacagcacgtcctgtgtgcgaggatctcgaactgggtcagttcgtggtgatgttcttctaggattctttcgtcatttcttttactgcatcgttgaaactgatccagggtagtgcggcggtgttgggggttgcggcgggcctcgccctcatcgtcggcttcgtccgctgcgatacctgtgaagttaacaatctacgctattatcgatagcaatccagcgctgaagtcaagaagttacctgggcaaaaacagtatacccgattctaggtgagaagctcaaagaaggggaagacatctacatctatcaggggtgacaaatccttttgctatgaagatgaccacagggttcttgtttgcgagttcatcctctagaatgtattgggttgtcgccacgaaaaaacacacgaatacataaattcaaataatttctggtgctgtggagtattcataattgtgtgcttttgttgaatccttcatgtaccataattcttactgctttcaagcccttttagaatatgactttaggatgtagaaattggtgaaaggagacaagaaattattctctaaactactattttttataggcaagggaggctggaagcaccttttttgcatgggagctgcatggagagaaattattggcagaaaacaaacttagaccagattcttgaatgtgccaagggaataagcttcgcttgctgcaattcatgtgctgcttggcgccacaaaaggagtagaggtgtgatttgcttgctttgcagggagcggggtcatagtctgaagaactgtcctgacaaaagcgagggaaatttgaagaaattttgctagaactgtggtgaatctggacactgtctttccaagtgccccaagctcattgagaatgggttacaaattttgcaagctgctttatctgcaatcagcaaggacatttgagcaagaactgccctgaaaacaaacatgacatcccatccaaagctccatcttggcgccaacagtggttcacataggtttgctcttgagaattaagttgttaatgaagctactttccgttgccctgatgagctaggatggaaaccacagaggacacctatcatatcatcagatggaagcatcttacacgcaagacagcaagctttctggtatggagctgaatggtactctggattatcaattgttaagtctacaggctctgaaaacaatggacttaagcaacaaccacttgcatgattcaatcccttaccagttgccatcaaaccttacctatctgaatctggcaaaaaataacttctctgttaaaacaatctaactgcaaggaaccattgggtgcagcaatctcagccacaactcgttatttcagaaaattgagacgtatctttcaacaacctcacgggaatcttcctttctcaatgggcgctctgtcgaagctttctaccctaggcaaccctttccagtagggtcgcgcccctctggtaagagggtcgctgttaagttgcctgattaatccattctttcactgtgtctgcatgttgcagtagatgccagcagatcatgaagcgcccaaatggtgctgagctacagtactatcagaagctgaatagattgctgctggaattagagcaaaggagtggaggagtttctgaagagagcagacctgcaaaataaccgtcgtcatgtcagtgacatggccgctcaacttcttcctcttactgcattgtatctgaactgcgtcgacctaccaactacatcactgcaccgactgctatactgcatcaaccaaccgaacggctatatgaaacgacacaatgtcagccgtcagatatgaatattaacttcataaaagtaattgtaacttgtgtaggctggttatagcttgtgatttcacatttcatttgttagcggccaagatttatttctgttagtttatgaccaccactcaggaaagttgattgattctccattccaatctttgttagacctgcaagttgtttgctaacagtgatccttcagataaatggggacatggg

SEQ ID NO: 19100 - DNA, 1875 bp, Zea Mays
cccctgcaaccatttccttcttcaagtgagaagctcaaagaaggggaagacatctacatctatcaggggtgacaaatccttttgctatgaagatgaccacagggttcttgtttgcgagttcatcctctagaatgtattgggttgtcgccacgaaaaaacacacgaatacataaattcaaataatttctggtgctgtggagtattcataattgtgtgcttttgttgaatccttcatgtaccataattcttactgctttcaagcccttttagaatatgactttaggatgtagaaattggtgaaaggagacaagaaattattctctaaactactattttttataggcaagggaggctggaagcaccttttttgcatgggagctgcatggagagaaattattggcagaaaacaaacttagaccagattcttgaatgtgccaagggaataagcttcgcttgctgcaattcatgtgctgcttggcgccacaaaaggagtagaggtgtgatttgcttgctttgcagggagcggggtcatagtctgaagaactgtcctgacaaaagcgagggaaatttgaagaaattttgctagaactgtggtgaatctggacactgtctttccaagtgccccaagctcattgagaatgggttacaaattttgcaagctgctttatctgcaatcagcaaggacatttgagcaagaactgccctgaaaacaaacatgacatcccatccaaagctccatcttggcgccaacagtggttcacataggtttgctcttgagaattaagttgttaatgaagctactttccgttgccctgatgagctaggatggaaaccacagaggacacctatcatatcatcagatggaagcatcttacacgcaagacagcaagctttctggtatggagctgaatggtactctggattatcaattgttaagtctacaggctctgaaaacaatggacttaagcaacaaccacttgcatgattcaatcccttaccagttgccatcaaaccttacctatctgaatctggcaaaaaataacttctctggtaatcttccatactctatatccaacttggtttcacttgagtacctcaatctcagccacaactcgttatttcagaaaattggtgaattttctttcagaattgtatattgtgtaaggcctactgtatatttcagaaaattggaagcctcaattcactttcagaactagacgtatctttcaacaacctcacgggaatcttcctttctcaatgggcgctctgtcgaagctttctaccctaggcaaccctttccagtagggtcgcgcccctctggtaagagggtcgctgttaagttgcctgattaatccattctttcactgtgtctgcatgttgcagtagatgccagcagatcatgaagcgcccaaatggtgctgagctacagtactatcagaagctgaatagattgctgctggaattagagcaaaggagtggaggagtttctgaagagagcagacctgcaaaataaccgtcgtcatgtcagtgacatggccgctcaacttcttcctcttactgcattgtatctgaactgcgtcgacctaccaactacatcactgcaccgactgctatactgcatcaaccaaccgaacggctatatgaaacgacacaatgtcagccgtcagatatgaatattaacttcataaaagtaattgtaacttgtgtaggctggttatagcttgtgatttcacatttcatttgttagcggccaagatttatttctgttagtttatgaccaccactcaggaaagttgattgattctccattccaatctttgttagacctgcaagttgtttgctaacagtgatccttcagataaatggggacatggg

SEQ ID NO: 19101 - DNA, 1869 bp, Zea Mays
ccctgcaaccatttccttcttcaagtgagaagctcaaagaaggggaagacatctacatctatcaggggtgacaaatccttttgctatgaagatgaccacagggttcttgtttgcgagttcatcctctagaatgtattgggttgtcgccacgaaaaaacacacgaatacataaattcaaataatttctggtgctgtggagtattcataattgtgtgcttttgttgaatccttcatgtaccataattcttactgctttcaagcccttttagaatatgactttaggatgtagaaattggtgaaaggagacaagaaattattctctaaactactattttttataggcaagggaggctggaagcaccttttttgcatgggagctgcatggagagaaattattggcagaaaacaaacttagaccagattcttgaatgtgccaagggaataagcttcgcttgctgcaattcatgtgctgcttggcgccacaaaaggagtagagatttgcttgctttgcagggagcggggtcatagtctgaagaactgtcctgacaaaagcgagggaaatttgaagaaattttgctagaactgtggtgaatctggacactgtctttccaagtgccccaagctcattgagaatgggttacaaattttgcaagctgctttatctgcaatcagcaaggacatttgagcaagaactgccctgaaaacaaacatgacatcccatccaaagctccatcttggcgccaacagtggttcacataggtttgctcttgagaattaagttgttaatgaagctactttccgttgccctgatgagctaggatggaaaccacagaggacacctatcatatcatcagatggaagcatcttacacgcaagacagcaagctttctggtatggagctgaatggtactctggattatcaattgttaagtctacaggctctgaaaacaatggacttaagcaacaaccacttgcatgattcaatcccttaccagttgccatcaaaccttacctatctgaatctggcaaaaaataacttctctggtaatcttccatactctatatccaacttggtttcacttgagtacctcaatctcagccacaactcgttatttcagaaaattggtgaattttctttcagaattgtatattgtgtaaggcctactgtatatttcagaaaattggaagcctcaattcactttcagaactagacgtatctttcaacaacctcacgggaatcttcctttctcaatgggcgctctgtcgaagctttctaccctaggcaaccctttccagtagggtcgcgcccctctggtaagagggtcgctgttaagttgcctgattaatccattctttcactgtgtctgcatgttgcagtagatgccagcagatcatgaagcgcccaaatggtgctgagctacagtactatcagaagctgaatagattgctgctggaattagagcaaaggagtggaggagtttctgaagagagcagacctgcaaaataaccgtcgtcatgtcagtgacatggccgctcaacttcttcctcttactgcattgtatctgaactgcgtcgacctaccaactacatcactgcaccgactgctatactgcatcaaccaaccgaacggctatatgaaacgacacaatgtcagccgtcagatatgaatattaacttcataaaagtaattgtaacttgtgtaggctggttatagcttgtgatttcacatttcatttgttagcggccaagatttatttctgttagtttatgaccaccactcaggaaagttgattgattctccattccaatctttgttagacctgcaagttgtttgctaacagtgatccttcagataaatggggacatggg

SEQ ID NO: 19102 - DNA, 2551 bp, Zea Mays
gcaaccatttccttcttcaaggcaagggaggctggaagcaccttttttgcatgggagctgcatggagagaaattattggcagaaaacaaacttagaccagattcttgaatgtgccaagggaataagcttcgcttgctgcaattcatgtgctgcttggcgccacaaaaggagtagaggtgtgatttgcttgctttgcagggagcggggtcatagtctgaagaactgtcctgacaaaagcgagggaaatttgaagaaattttgctagaactgtggtgaatctggacactgtctttccaagtgccccaagctcattgagaatgggttacaaattttgcaagctgctttatctgcaatcagcaaggacatttgagcaagaactgccctgaaaacaaacatgacatcccatccaaagctccatcttggcgccaacagtggttcacataggtttgctcttgagaattaagttgttaatgaagctactttccgttgccctgatgagctaggatggaaaccacagaggacacctatcatatcatcagatggaagcatcttacacgcaagacagcaagctttctggtatggagctgaatggtactctggattatcaattgttaagtctacaggctctgaaaacaatggacttaagcaacaaccacttgcatgattcaatcccttaccagttgccatcaaaccttacctatctgtaatgtctcccaacctgtacatattattgatgctattcgatttttgaaatttgattcaaagcgaatacaggaatctggcaaaaaataacttctctgttaaaacaatctaactgcaaggaaccattgggtgcagcaatctcagccacaactcgttatttcagaaaattgagacgtatctttcaacaacctcacgggaatcttcctttctcaatgggcgctctgtcgaagctttctaccctgtaagtattcatggttctgatagctctcttcttgactggtatgcagttatatgcaaaacaatcaactatcaggcacatttgatgtccttagcaacattagccttgcgacactgtaagtagcttcccatgtatcgataagattgctaattttccttttatgttgtgctatatagttgttgatatatttgttatgttgtggaatatggtgtaaaataaaaataaatagcatttgtaatgctactcaaattaacttcctagaggcttattaagccgtaggaagttagccagcaaactttctaggggctacagtaagccgtaggaagttatccagctaacttcctaaaggctacagtaagccgtaggaagttagctagctgacggcgctgacggcgtgaagctactaacttccgagaatctactaacttccgagaggcttagcaagccgtagaaagttagctaacttcctagagccctctaggaagttaagctaacttccgacaaaaaattttcgagagccaaacttccgacgggatggcttaacttccgagagtttcgctaacttcctagagtttaggcctaacttcctagggtttaggctctaggaagtttactattttggtgtagtgccagcaatctagatgtttcaactatatacctaatcattgaccatttctaaatgaatgcacttgctagaaaattatttgttcctcgtgtttttcttctcatcctgcctattggaatctcgcagctgatcactcttaaaaaactaacgggtcctggtgtgagtggcagaactattggataggatcgccctgagggcactcaacatcaccactgttgtacaaaagtaggccaattgacatatacactttgttcatttatgttggtcgattctacccagtttaaagagagactaaaatgtgggcgttgttgcttgtgtccatccatgccacaagctgtaatattttcttctaataagcttttatacattacctctcttgttgactggttgaccatttgtgcagaggcaaccctttccagtagggtcgcgcccctctggtaagagggtcgctgttaagttgcctgattaatccattctttcactgtgtctgcatgttgcagtagatgccagcagatcatgaagcgcccaaatgagctacagtactatcagaagctgaatagattgctgctggaattagagcaaaggagtggaggagtttctgaagagagcagacctgcaaaataaccgtcgtcatgtcagtgacatggccgctcaacttcttcctcttactgcattgtatctgaactgcgtcgacctaccaactacatcactgcaccgactgctatactgcatcaaccaaccgaacggctatatgaaacgacacaatgtcagccgtcagatatgaatattaacttcataaaagtaattgtaacttgtgtaggctggttatagcttgtgatttcacatttcatttgttagcggccaagatttatttctgttagtttatgaccaccactcaggaaagttgattgattctccattccaatctttgttagacctgcaagttgtttgctaacagtgatccttcagataaatggggacatggg

SEQ ID NO: 19103 - DNA, 346 bp, Zea Mays
taagaaacaatggttgcttgaggaggaatcgatcgaaaatgaaccacctcccgagttccagttacttactcttatcgggatgggactggacaccaatgaagaattcttaatggctatgcaacaacagcttgtccatgaaattcgtgaagtatggacaacttcagttgagcatctactttatatcaaggaagaccttatcatccctcatggatgtgttcattctcttgtaatctacgaagttctgttaaagttagttgaaccattttctgattctatgttctctctactatttgacaacaacacatcttttatgaattaattattaaacaaaacggggcgcaagact

SEQ ID NO: 19104 - DNA, 1839 bp, Zea Mays
gtttggcctggcccattttcgttcgccagttgccaccagcggcggttgagcgggcccatcacgtcagtcatcgaccaagtagccggcagccgcgcggcgtccgcgtcactccaatcccctcgccccgcggcgcctccgttcacagcgccatggcggggtggatctcctccaagctcaaagcagccgagaccctcctccaccagatcgatcagcaggcggcggaatccctcggcaagtccccatccgcttccgacctcgccacgctgcactccacaacatctcgctccgccgatgacctccttgacgtgccgctcccgcgcaggccgccgccgtccggcccgcccccctcactcggcctccgtctcgcagcgaagcgccgctccccgccttcccaagggccccgtcgctccgcatcggcggctgcgatgctcgcggtgcaggatcaagccggtggtgaaccaacggtgggggtggtggccgaggtgaaaccggaaacggatggaggggatcgcgaggacggcaagagtgtcgcgtccgagagcgggagcgatgaggactccgatgggtcagggagcgaagattcggaggattccgaggaggagaggcggagggaggaggagaggacgcggcggcgggctgagcggcttgcggccatggccgcacgcgctattgctgagcgcgaagatgctgttgcgaggctcgagggggagaaggcggggcttgagaagctgctcgccgagcgtgagaaggagcaggctcaggaggcttcagagttgcagactagtatgattgaaaccttggaagcagtggagatagagaaacagagacatcacagcactagaatggaagcccttgcacgtttggctagacttgaggttacaaacggtgagcttgcaaagtcacttgccagggaacaatggaatctggaagttcaagtagatcaagtggcgcagcttcgagaggaagttgaattgaagaaacttgctcaagataaatacagaagaaagctaacaaagatacaaaagacaagtgcccctccggttgatgaaaatctttgagaaggttcaagctggaggaagaaattattgatgcagaatacactctgacatgtgacagaattgtgagcttgaaggacaaggcaaggaagattgaagaaagcattgagctgactagaagagacatggttcatcctacagaggtggaaattgagctcaagaagaggcttgatcaactaactgatcggttgattcagaaacaaatgcaggtggagtccctatcttcagagaaggcagctctgttaatgagaatcgaggcagtcacgaggttgcttgacaatagcacctcatcatcagcttcctcaagctcatcaagattggacattgaagctggtgcatggcaacaatcacattcaccaacaatcacattcaccaacaatcacattcgcgacagaatacgggctggacagcagcaactgggatctgcgatccgacagctcgattcgatcttttcagccgggcatatcttcttgaggcggaatccgaaggcgcagtgtcggaaactcgctctggggcaaccttttctttggagacattaaacaagactagcacttgattgctttttcctggcatgttctgatgttatattctggctgtatacatgaggcatcatacctttttctggttgagaaaaatcttagcatataatgcctcgtgcattttgttttggtacctgtccctatccgcaattaaagtgtaacggtggctggttgcatacatgaaagttggaattacttttggacaatggtggctggttttaaacatgagcctcaaattgcttctg

SEQ ID NO: 19105 - DNA, 1840 bp, Zea Mays
gtcagtcatcgaccaagtagccggcagccgcgcggcgtccgcgtcactccaatcccctcgccccgcggcgcctccgttcacagcgccatggcggggtggatctcctccaagctcaaagcagccgagaccctcctccaccagatcgatcagcaggcggcggaatccctcggcaagtccccatccgcttccgacctcgccacgctgcactccacaacatctcgctccgccgatgacctccttgacgtgccgctcccgcgcaggccgccgccgtccggcccgcccccctcactcggcctccgtctcgcagcgaagcgccgctccccgccttcccaagggccccgtcgctccgcatcggcggctgcgatgctcgcggtgcaggatcaagccggtggtgaaccaacggtgggggtggtggccgaggtgaaaccggaaacggatggaggggatcgcgaggacggcaagagtgtcgcgtccgagagcgggagcgatgaggactccgatgggtcagggagcgaagattcggaggattccgaggaggagaggcggagggaggaggagaggacgcggcggcgggctgagcggcttgcggccatggccgcacgcgctattgctgagcgcgaagatgctgttgcgaggctcgagggggagaaggcggggcttgagaagctgctcgccgagcgtgagaaggagcaggctcaggaggcttcagagttgcagactagtatgattgaaaccttggaagcagtggagatagagaaacagagacatcacagcactagaatggaagcccttgcacgtttggctagacttgaggttacaaacggtgagcttgcaaagtcacttgccagggaacaatggaatctggaagttcaagtagatcaagtggcgcagcttcgagaggaagttgaattgaagaaacttgctcaagataaagaaagctaacaaagatacaaaagacaagtgcccctccggttgatgaaaatctttgagaaggttcaagctggaggaagaaattattgatgcagaatacactctgacatgtgacagaattgtgagcttgaaggacaaggcaaggaagattgaagaaagcattgagctgactagaagagacatggttcatcctacagaggtggaaattgagctcaagaagaggcttgatcaactaactgatcggttgattcagaaacaaatgcaggtggagtccctatcttcagagaaggcagctctgttaatgagaatcgaggcagtcacgaggttgcttgacaatagcacctcatcatcagcttcctcaagctcatcaagattggacattgaagctggtgcatggcaacaatcacattcaccaacaatcacattcaccaacaatcacattcgcgacagaatacgggctggacagcagcaactgggatctgcgatccgacagctcgattcgatcttttcagccgggcatatcttcttgaggcggaatccgaaggcgcaggtttgggccttggtgtacctggtatgcctccacttatgggtactgtacatactaacatcacacccaacagtgtcggaaactcgctctggggcaaccttttctttggagacattaaacaagactagcacttgattgctttttcctggcatgttctgatgttatattctggctgtatacatgaggcatcatacctttttctggttgagaaaaatcttagcatataatgcctcgtgcattttgttttggtacctgtccctatccgcaattaaagtgtaacggtggctggttgcatacatgaaagttggaattacttttggacaatggtggctggttttaaacatgagcctcaaattgcttctg

SEQ ID NO: 19106 - DNA, 1837 bp, Zea Mays
atcgaccaagtagccggcagccgcgcggcgtccgcgtcactccaatcccctcgccccgcggcgcctccgttcacagcgccatggcggggtggatctcctccaagctcaaagcagccgagaccctcctccaccagatcgatcagcaggcggcggaatccctcggcaagtccccatccgcttccgacctcgccacgctgcactccacaacatctcgctccgccgatgacctccttgacgtgccgctcccgcgcaggccgccgccgtccggcccgcccccctcactcggcctccgtctcgcagcgaagcgccgctccccgccttcccaagggccccgtcgctccgcatcggcggctgcgatgctcgcggtgcaggatcaagccggtggtgaaccaacggtgggggtggtggccgaggtgaaaccggaaacggatggaggggatcgcgaggacggcaagagtgtcgcgtccgagagcgggagcgatgaggactccgatgggtcagggagcgaagattcggaggattccgaggaggagaggcggagggaggaggagaggacgcggcggcgggctgagcggcttgcggccatggccgcacgcgctattgctgagcgcgaagatgctgttgcgaggctcgagggggagaaggcggggcttgagaagctgctcgccgagcgtgagaaggagcaggctcaggaggcttcagagttgcagactagtatgattgaaaccttggaagcagtggagatagagaaacagagacatcacagcactagaatggaagcccttgcacgtttggctagacttgaggttacaaacggtgagcttgcaaagtcacttgccagggaacaatggaatctggaagttcaagtagatcaagtggcgcagcttcgagaggaagttgaattgaagaaacttgctcaagataaagaaagctaacaaagatacaaaagacaagtgcccctccggttgatgaaatagaatctttgagaaggttcaagctggaggaagaaattattgatgcagaatacactctgacatgtgacagaattgtgagcttgaaggacaaggcaaggaagattgaagaaagcattgagctgactagaagagacatggttcatcctacagaggtggaaattgagctcaagaagaggcttgatcaactaactgatcggttgattcagaaacaaatgcaggtggagtccctatcttcagagaaggcagctctgttaatgagaatcgaggcagtcacgaggttgcttgacaatagcacctcatcatcagcttcctcaagctcatcaagattggacattgaagctggtgcatggcaacaatcacattcaccaacaatcacattcaccaacaatcacattcgcgacagaatacgggctggacagcagcaactgggatctgcgatccgacagctcgattcgatcttttcagccgggcatatcttcttgaggcggaatccgaaggcgcaggtttgggccttggtgtacctggtatgcctccacttatgggtactgtacatactaacatcacacccaacagtgtcggaaactcgctctggggcaaccttttctttggagacattaaacaagactagcacttgattgctttttcctggcatgttctgatgttatattctggctgtatacatgaggcatcatacctttttctggttgagaaaaatcttagcatataatgcctcgtgcattttgttttggtacctgtccctatccgcaattaaagtgtaacggtggctggttgcatacatgaaagttggaattacttttggacaatggtggctggttttaaacatgagcctcaaattgcttctg

SEQ ID NO: 19107 - DNA, 2058 bp, Zea Mays
atcgaccaagtagccggcagccgcgcggcgtccgcgtcactccaatcccctcgccccgcggcgcctccgttcacagcgccatggcggggtggatctcctccaagctcaaagcagccgagaccctcctccaccagatcgatcagcaggcggcggaatccctcggcaagtccccatccgcttccgacctcgccacgctgcactccacaacatctcgctccgccgatgacctccttgacgtgccgctcccgcgcaggccgccgccgtccggcccgcccccctcactcggcctccgtctcgcagcgaagcgccgctccccgccttcccaagggccccgtcgctccgcatcggcggctgcgatgctcgcggtgcaggatcaagccggtggtgaaccaacggtgggggtggtggccgaggtgaaaccggaaacggatggaggggatcgcgaggacggcaagagtgtcgcgtccgagagcgggagcgatgaggactccgatgggtcagggagcgaagattcggaggattccgaggaggagaggcggagggaggaggagaggacgcggcggcgggctgagcggcttgcggccatggccgcacgcgctattgctgagcgcgaagatgctgttgcgaggctcgagggggagaaggcggggcttgagaagctgctcgccgagcgtgagaaggagcaggctcaggaggcttcagagttgcagactagtatgattgaaaccttggaagcagtggagatagagaaacagagacatcacagcactagaatggaagcccttgcacgtttggctagacttgaggttacaaacggtgagcttgcaaagtcacttgccagggaacaatggaatctggaagttcaagtagatcaagtggcgcagcttcgagaggaagttgaattgaagaaacttgctcaagatagtaagttgaccatgaccttctttttggggctctctggcttagagtttactgtgtttttaagcacttttagttcgttcttaggccaacgctatattatgctgacttattttgttttcttcttgaacctatttaagtatgacatgccattctttttggtttcgactaatagcacttttttttggtatgtgacctttgttaccattccatgaacaagaatacagaagaaagctaacaaagatacaaaagacaagtgcccctccggttgatgaaatagaatctttgagaaggttcaagctggaggaagaaattattgatgcagaatacactctgacatgtgacagaattgtgagcttgaaggacaaggcaaggaagattgaagaaagcattgagctgactagaagagacatggttcatcctacagaggtggaaattgagctcaagaagaggcttgatcaactaactgatcggttgattcagaaacaaatgcaggtggagtccctatcttcagagaaggcagctctgttaatgagaatcgaggcagtcacgaggttgcttgacaatagcacctcatcatcagcttcctcaagctcatcaagattggacattgaagctggtgcatggcaacaatcacattcaccaacaatcacattcaccaacaatcacattcgcgacagaatacgggctggacagcagcaactgggatctgcgatccgacagctcgattcgatcttttcagccgggcatatcttcttgaggcggaatccgaaggcgcaggtttgggccttggtgtacctggtatgcctccacttatgggtactgtacatactaacatcacacccaacagtgtcggaaactcgctctggggcaaccttttctttggagacattaaacaagactagcacttgattgctttttcctggcatgttctgatgttatattctggctgtatacatgaggcatcatacctttttctggttgagaaaaatcttagcatataatgcctcgtgcattttgttttggtacctgtccctatccgcaattaaagtgtaacggtggctggttgcatacatgaaagttggaattacttttggacaatggtggctggttttaaacatgagcctcaaattgcttctg

SEQ ID NO: 19108 - DNA, 3190 bp, Zea Mays
attctccgtgccacaggtagagagtgtgtgtgcagctagcaatgctgatgattagctgatcacatgctctataggtcaaaggatcaattatgtgtgtgaatctttaattattctatgcatatgcttttgcacatgtaaacaccaaggaatatattagtgctgcatgggtccggtccctccttgttggcgtatttaatttgtggtcatgtgcaatggcgatgtcaaattaaagcgagagtaaaaaagtggtggtgtggatggtttgtttctctgccatcacaagctacgatgggggttgtggtatcaaatccatgggatggatgaaaactgctgccaattttttagatgtgtgcctcgctatggctgtacgtgtagctaaaattattggacaccaaccctaccctttgtgtcgcgcgcgcttctccctttctcaaagttgcgtaccgcttttcctcttcatctgaagctgctgccatataccgccctcttcctctcctttatatctaccccttggacctggaggagaggagctagtgagctaccgagaagaagaaggaagggccatcttccgacccacttgtaggcgctgtaagcctgtaagcagtcacctctcagccacagacatggtgggcatgagaggcgcctacggtggtgcttgcaatgacgacagcaagagccggctgcacggaggcaaggcggcggagccggagatcgcgtcgatggcagtgcacaaggtggcgccgccaccggcgcggagcacggcgagcaagatgaaggtgagggtgaaggagaccttcttccccgacgacccgttccgggcgttcaaggggcagccgccggggacgcagtggctcatggcggtcaggtacctcttccccatcctggactgggtgccgagctactccttgtcgctcttcaagtccgacctcgtcgcgggcctcaccattgccagcctcgccattcctcagggcattagctacgcgaagctggcaagcttgcctcccataatcgggctgtgccgtgagccccaccgcggagccgacgctgttcctgcagctggccttcacctccaccctgttcgcggggctggtgcaggcctccctgggcatcctcaggctcggcttcgtcatcgacttcctgtccaaggcgacgctggtggggttcatggccggcgccgccatcatcgtggcgctgcagcagctcaaggcgctgctgggcatcgtccacttcaccaccgagatgggcatcgtcccagtcatggcctccgtcttccaccacaccagcgagtggtcgtggcagacgatcctcatgggcgtctgcttcctcgtcttcctgctgtcggcgaggcatgtgagcatcagatggccaaagcttttctgggtttcggcgtgcgcgcccctggcatcggtcaccatctcgacgctgcttgttttcctcttcaaagctcagaaccatggcatcagcatcattgggcagctcaagtgcggcctgaatcgcccctcgtgggacaagctcctgtttgacacggcgtatttaggcctcaccatgaagactggccttgtcaccggaatcatctcactgacggaaggaatagcggttggtagaacatttgcctcactcaaggactaccagatagatggaaacaaggagatgatggccatagggttgatgaatgttgttgggtcctgcacatcatgctacgtaacaacaggtgcgttctcccgctctgctgtaaaccacaacgccggctgcaagactgccatgtccaacgtgatcatggcgctgactgtgatggtcacgctgctgttcctcatgccactgttcgtgtacacacccaacgttgtcctcggagcgatcatcatcgccgcggtgatcggcctgatcgatttccccgcggtgtaccacatctggaagatggacaagatggattttctggtgtgcgtttgcgcgtttgccggcgtcatcttcatctcagtccaagaaggccttgcgatagcggttggtatatctatatttagggtgttgatgcagatcacaaggccgaagatgatggttcaagggaacatcaaggggactgatatttacagagacctgcatcactacaaggaggcccaaagagtttctgggttcttgatcttggccattgaagcaccgataaacttcgccaactccaactacctgaatgaaaggattaaaagatggatagaggaagaatcttttgaacaggataaacatactgaactccatttcataatcttggatctgtcagctgttcctgcaattgacacaagtggcatagcgttcctcattgacataaagaaatcaatagagaaacgtggtctggagcttgtgcttgtcaatccaactggagaagtcatggagaaaatacaacgtgcaaacgaggctgaaaactattttaggccagattgcttgtatctgaccactggcgaagcaatcgcttcactttctgcacttgccaagatgacaaaaccctaaatggattgctgaattgtcattgtgttcatccctagcactgttaaaagttttcggtgcaggattttctgtaatggggagtgcatccaataggagtacatcacagctatgtttgtatctagtagaattcttcagatccatgtgatgcaaattcaatggaaaacaaatatgacagtacaatagtagatcttacagaaattttctgctgcagcgataaatattaggtgtcataagagtatagagtatatttgaattcatctatttactacaaagttcttcttcgttctacattgacagttggtacaatttttggagcgaggtgcgctagtagatatatatcagaatacctgattggcatcccactttgcaatatggcacctgagagtagtagataacttacattacatggtgcatgaaatcgaagtcatcttggaattttagatgattgtatgaactctttctccaagctgaagagtctagtaccttcacttcctctattaccgttgcatgactcaacttttggggcatttttgaagactagattgataaatcctcgagacgagattaacaagtcaccataaacgtctcgttgttaatgggccgtcgcctaaaaaatacaaaacattaaattttaaaatactcacttcaacatggagtcggacccaatatctttgatgatattgaggctgtggatgag

SEQ ID NO: 19109 - DNA, 3280 bp, Zea Mays
gctgatgattagctgatcacatgctctataggtcaaaggatcaattatgtgtgtgaatctttaattattctatgcatatgcttttgcacatgtaaacaccaaggaatatattagtgctgcatgggtccggtccctccttgttggcgtatttaatttgtggtcatgtgcaatggcgatgtcaaattaaagcgagagtaaaaaagtggtggtgtggatggtttgtttctctgccatcacaagctacgatgggggttgtggtatcaaatccatgggatggatgaaaactgctgccaattttttagatgtgtgcctcgctatggctgtacgtgtagctaaaattattggacaccaaccctaccctttgtgtcgcgcgcgcttctccctttctcaaagttgcgtaccgcttttcctcttcatctgaagctgctgccatataccgccctcttcctctcctttatatctaccccttggacctggaggagaggagctagtgagctaccgagaagaagaaggaagggccatcttccgacccacttgtaggcgctgtaagcctgtaagcagtcacctctcagccacagacatggtgggcatgagaggcgcctacggtggtgcttgcaatgacgacagcaagagccggctgcacggaggcaaggcggcggagccggagatcgcgtcgatggcagtgcacaaggtggcgccgccaccggcgcggagcacggcgagcaagatgaaggtgagggtgaaggagaccttcttccccgacgacccgttccgggcgttcaaggggcagccgccggggacgcagtggctcatggcggtcaggtacctcttccccatcctggactgggtgccgagctactccttgtcgctcttcaagtccgacctcgtcgcgggcctcaccattgccagcctcgccattcctcagtgttcttggctgcatgcatgcagggcattagctacgcgaagctggcaagcttgcctcccataatcgggctgtattcgagcttcgtgccgccgatggtgtacgcggtgctggggagctcccgtgacctggcggtgggcccggtgtcgatctcgtcgctgatcatggggtccatgctgcggcaggccgtgagccccaccgcggagccgacgctgttcctgcagctggccttcacctccaccctgttcgcggggctggtgcaggcctccctgggcatcctcaggctcggcttcgtcatcgacttcctgtccaaggcgacgctggtggggttcatggccggcgccgccatcatcgtggcgctgcagcagctcaaggcgctgctgggcatcgtccacttcaccaccgagatgggcatcgtcccagtcatggcctccgtcttccaccacaccagcgagtggtcgtggcagacgatcctcatgggcgtctgcttcctcgtcttcctgctgtcggcgaggcatgtgagcatcagatggccaaagcttttctgggtttcggcgtgcgcgcccctggcatcggtcaccatctcgacgctgcttgttttcctcttcaaagctcagaaccatggcatcagcatcattgggcagctcaagtgcggcctgaatcgcccctcgtgggacaagctcctgtttgacacggcgtatttaggcctcaccatgaagactggccttgtcaccggaatcatctcactgacggaaggaatagcggttggtagaacatttgcctcactcaaggactaccagatagatggaaacaaggagatgatggccatagggttgatgaatgttgttgggtcctgcacatcatgctacgtaacaacaggtgcgttctcccgctctgctgtaaaccacaacgccggctgcaagactgccatgtccaacgtgatcatggcgctgactgtgatggtcacgctgctgttcctcatgccactgttcgtgtacacacccaacgttgtcctcggagcgatcatcatcgccgcggtgatcggcctgatcgatttccccgcggtgtaccacatctggaagatggacaagatggattttctggtgtgcgtttgcgcgtttgccggcgtcatcttcatctcagtccaagaaggccttgcgatagcggttggtatatctatatttagggtgttgatgcagatcacaaggccgaagatgatggttcaagggaacatcaaggggactgatatttacagagacctgcatcactacaaggaggcccaaagagtttctgggttcttgatcttggccattgaagcaccgataaacttcgccaactccaactacctgaatgaaaggattaaaagatggatagaggaagaatcttttgaacaggataaacatactgaactccatttcataatcttggatctgtcagctgttcctgcaattgacacaagtggcatagcgttcctcattgacataaagaaatcaatagagaaacgtggtctggagcttgtgcttgtcaatccaactggagaagtcatggagaaaatacaacgtgcaaacgaggctgaaaactattttaggccagattgcttgtatctgaccactggcgaagcaatcgcttcactttctgcacttgccaagatgacaaaaccctaaatggattgctgaattgtcattgtgttcatccctagcactgttaaaagttttcggtgcaggattttctgtaatggggagtgcatccaataggagtacatcacagctatgtttgtatctagtagaattcttcagatccatgtgatgcaaattcaatggaaaacaaatatgacagtacaatagtagatcttacagaaattttctgctgcagcgataaatattaggtgtcataagagtatagagtatatttgaattcatctatttactacaaagttcttcttcgttctacattgacagttggtacaatttttggagcgaggtgcgctagtagatatatatcagaatacctgattggcatcccactttgcaatatggcacctgagagtagtagataacttacattacatggtgcatgaaatcgaagtcatcttggaattttagatgattgtatgaactctttctccaagctgaagagtctagtaccttcacttcctctattaccgttgcatgactcaacttttggggcatttttgaagactagattgataaatcctcgagacgagattaacaagtcaccataaacgtctcgttgttaatgggccgtcgcctaaaaaatacaaaacattaaattttaaaatactcacttcaacatggagtcggacccaatatctttgatgatattgaggctgtggatgag

SEQ ID NO: 19110 - DNA, 2873 bp, Zea Mays
cgcttttcctcttcatctgaagctgctgccatataccgccctcttcctctcctttatatctaccccttggacctggaggagaggagctagtgagctaccgagaagaagaaggaagggccatcttccgacccacttgtaggcgctgtaagcctgtaagcagtcacctctcagccacagacatggtgggcatgagaggcgcctacggtggtgcttgcaatgacgacagcaagagccggctgcacggaggcaaggcggcggagccggagatcgcgtcgatggcagtgcacaaggtggcgccgccaccggcgcggagcacggcgagcaagatgaaggtgagggtgaaggagaccttcttccccgacgacccgttccgggcgttcaaggggcagccgccggggacgcagtggctcatggcggtcaggtacctcttccccatcctggactgggtgccgagctactccttgtcgctcttcaagtccgacctcgtcgcgggcctcaccattgccagcctcgccattcctcagggcattagctacgcgaagctggcaagcttgcctcccataatcgggctgtattcgagcttcgtgccgccgatggtgtacgcggtgctggggagctcccgtgacctggcggtgggcccggtgtcgatctcgtcgctgatcatggggtccatgctgcggcaggccgtgagccccaccgcggagccgacgctgttcctgcagctggccttcacctccaccctgttcgcggggctggtgcaggcctccctgggcatcctcaggctcggcttcgtcatcgacttcctgtccaaggcgacgctggtggggttcatggccggcgccgccatcatcgtggcgctgcagcagctcaaggcgctgctgggcatcgtccacttcaccaccgagatgggcatcgtcccagtcatggcctccgtcttccaccacaccagcgagtggtcgtggcagacgatcctcatgggcgtctgcttcctcgtcttcctgctgtcggcgaggcatgtgagcatcagatggccaaagcttttctgggtttcggcgtgcgcgcccctggcatcggtcaccatctcgacgctgcttgttttcctcttcaaagctcagaaccatggcatcagcatcattgggcagctcaagtgcggcctgaatcgcccctcgtgggacaagctcctgtttgacacggcgtatttaggcctcaccatgaagactggccttgtcaccggaatcatctcactgacgttactgtactactgcaggaaggaatagcggttggtagaacatttgcctcactcaaggactaccagatagatggaaacaaggagatgatggccatagggttgatgaatgttgttgggtcctgcacatcatgctacgtaacaacaggtgcgttctcccgctctgctgtaaaccacaacgccggctgcaagactgccatgtccaacgtgatcatggcgctgactgtgatggtcacgctgctgttcctcatgccactgttcgtgtacacacccaacgttgtcctcggagcgatcatcatcgccgcggtgatcggcctgatcgatttccccgcggtgtaccacatctggaagatggacaagatggattttctggtgtgcgtttgcgcgtttgccggcgtcatcttcatctcagtccaagaaggccttgcgatagcggttggtatatctatatttagggtgttgatgcagatcacaaggccgaagatgatggttcaagggaacatcaaggggactgatatttacagagacctgcatcactacaaggaggcccaaagagtttctgggttcttgatcttggccattgaagcaccgataaacttcgccaactccaactacctgaatgaaaggattaaaagatggatagaggaagaatcttttgaacaggataaacatactgaactccatttcataatcttggatctgtcagctgttcctgcaattgacacaagtggcatagcgttcctcattgacataaagaaatcaatagagaaacgtggtctggagcttgtgcttgtcaatccaactggagaagtcatggagaaaatacaacgtgcaaacgaggctgaaaactattttaggccagattgcttgtatctgaccactggcgaagcaatcgcttcactttctgcacttgccaagatgacaaaaccctaaatggattgctgaattgtcattgtgttcatccctagcactgttaaaagttttcggtgcaggattttctgtaatggggagtgcatccaataggagtacatcacagctatgtttgtatctagtagaattcttcagatccatgtgatgcaaattcaatggaaaacaaatatgacagtacaatagtagatcttacagaaattttctgctgcagcgataaatattaggtgtcataagagtatagagtatatttgaattcatctatttactacaaagttcttcttcgttctacattgacagttggtacaatttttggagcgaggtgcgctagtagatatatatcagaatacctgattggcatcccactttgcaatatggcacctgagagtagtagataacttacattacatggtgcatgaaatcgaagtcatcttggaattttagatgattgtatgaactctttctccaagctgaagagtctagtaccttcacttcctctattaccgttgcatgactcaacttttggggcatttttgaagactagattgataaatcctcgagacgagattaacaagtcaccataaacgtctcgttgttaatgggccgtcgcctaaaaaatacaaaacattaaattttaaaatactcacttcaacatggagtcggacccaatatctttgatgatattgaggctgtggatgag

SEQ ID NO: 19111 - DNA, 2625 bp, Zea Mays
cgcttttcctcttcatctgaagctgctgccatataccgccctcttcctctcctttatatctaccccttggacctggaggagaggagctagtgagctaccgagaagaagaaggaagggccatcttccgacccacttgtaggcgctgtaagcctgtaagcagtcacctctcagccacagacatggtgggcatgagaggcgcctacggtggtgcttgcaatgacgacagcaagagccggctgcacggaggcaaggcggcggagccggagatcgcgtcgatggcagtgcacaaggtggcgccgccaccggcgcggagcacggcgagcaagatgaaggtgagggtgaaggagaccttcttccccgacgacccgttccgggcgttcaaggggcagccgccggggacgcagtggctcatggcggtcaggtacctcttccccatcctggactgggtgccgagctactccttgtcgctcttcaagtccgacctcgtcgcgggcctcaccattgccagcctcgccattcctcagggcattagctacgcgaagctggcaagcttgcctcccataatcgggctgtattcgagcttcgtgccgccgatggtgtacgcggtgctggggagctcccgtgacctggcggtgggcccggtgtcgatctcgtcgctgatcatggggtccatgctgcggcaggccgtgagccccaccgcggagccgacgctgttcctgcagctggccttcacctccaccctgttcgcggggctggtgcaggcctccctgggcatcctcaggctcggcttcgtcatcgacttcctgtccaaggcgacgctggtggggttcatggccggcgccgccatcatcgtggcgctgcagcagctcaaggcgctgctgggcatcgtccacttcaccaccgagatgggcatcgtcccagtcatggcctccgtcttccaccacaccagcgagtggtcgtggcagacgatcctcatgggcgtctgcttcctcgtcttcctgctgtcggcgaggcatgtggaaggaatagcggttggtagaacatttgcctcactcaaggactaccagatagatggaaacaaggagatgatggccatagggttgatgaatgttgttgggtcctgcacatcatgctacgtaacaacaggtgcgttctcccgctctgctgtaaaccacaacgccggctgcaagactgccatgtccaacgtgatcatggcgctgactgtgatggtcacgctgctgttcctcatgccactgttcgtgtacacacccaacgttgtcctcggagcgatcatcatcgccgcggtgatcggcctgatcgatttccccgcggtgtaccacatctggaagatggacaagatggattttctggtgtgcgtttgcgcgtttgccggcgtcatcttcatctcagtccaagaaggccttgcgatagcggttggtatatctatatttagggtgttgatgcagatcacaaggccgaagatgatggttcaagggaacatcaaggggactgatatttacagagacctgcatcactacaaggaggcccaaagagtttctgggttcttgatcttggccattgaagcaccgataaacttcgccaactccaactacctgaatgaaaggattaaaagatggatagaggaagaatcttttgaacaggataaacatactgaactccatttcataatcttggatctgtcagctgttcctgcaattgacacaagtggcatagcgttcctcattgacataaagaaatcaatagagaaacgtggtctggagcttgtgcttgtcaatccaactggagaagtcatggagaaaatacaacgtgcaaacgaggctgaaaactattttaggccagattgcttgtatctgaccactggcgaagcaatcgcttcactttctgcacttgccaagatgacaaaaccctaaatggattgctgaattgtcattgtgttcatccctagcactgttaaaagttttcggtgcaggattttctgtaatggggagtgcatccaataggagtacatcacagctatgtttgtatctagtagaattcttcagatccatgtgatgcaaattcaatggaaaacaaatatgacagtacaatagtagatcttacagaaattttctgctgcagcgataaatattaggtgtcataagagtatagagtatatttgaattcatctatttactacaaagttcttcttcgttctacattgacagttggtacaatttttggagcgaggtgcgctagtagatatatatcagaatacctgattggcatcccactttgcaatatggcacctgagagtagtagataacttacattacatggtgcatgaaatcgaagtcatcttggaattttagatgattgtatgaactctttctccaagctgaagagtctagtaccttcacttcctctattaccgttgcatgactcaacttttggggcatttttgaagactagattgataaatcctcgagacgagattaacaagtcaccataaacgtctcgttgttaatgggccgtcgcctaaaaaatacaaaacattaaattttaaaatactcacttcaacatggagtcggacccaatatctttgatgatattgaggctgtggatgag

SEQ ID NO: 19112 - DNA, 2872 bp, Zea Mays
tgacctcacggccccaccctacctccgtctccccttcccagcgcgggcgctcggcctgccgctcttgtcgtcttcggcccttccgttcgccgtctgcccgtcgccgtccccaaactatcgccctttcgctgtcgccttccattttccaatcgtcaacaaccacctcgctcccgcttagttaaactcgtcgccatgccgtccgtggaggtccactggccactccaaccttccccttcctcccctactatccgctctccggtccccacccacgaccgccgtgatgcggccgcggccctcccgcttcctccagctactccttgtcgttgtgatcgcctgcgccgttccgggggtgagatgctccgaccggcggtttccgcacctcgaccgcgtccgcgagctccaacgccgggagggctcgtcatcggccgagcaggaggccgctgcgaggggacttctggcgcgcctcctaccgtcacactctaccagctttgagttcagagtcatctccacctccacggagctatgtggtgggaagacatgtttcgtcatcaacaaccacccgttgtttgatggagaagggactccagaaatattgatacttggagcaagtggggtggaaatttctgctggctttcattggtacttgaaacactattgtgcagcacatatatcttgggataaaaccggtggtgcacaactatcaaccattccgcgtcctgggtcactacctcgtgttcctgatggtggtgtactgattcaaagacccattgactggagctactaccagaatgcagttacatccagctattcttttgcttggtgggattgggaccgttgggagaaggaaattgactggatggctcttcaaggaataaatttgcctcttgctttcactgggcaagagtctatatggcagaggatttttgagaggtacaacattagcaaatcagatctggatgatttctttggtgggccagcctttcttgcatggtctcgaatggctaatatgcatggatggggtggacctctccctcagacttggcttgatgaccaactagttcttcaaaagaaaatcctttctaggatgtactcttttggcatgttcccagttcttccagccttctctggcaacatcccagctgcgttaaagtcaaagttcccttcagctaaagtcactcaccttggaaactggtttacagttgacagcaatccaaggtggtgctgcacatatcttcttgatgcatctgatcctttatttgtagaaattgggaagatgtttatagaagagcaaatcagagaatatggtaggacaagtcacatctacaactggtgcatgctccacaatttcgctgcagattttgaaatgtatggtgttttagatgctttggcttctgggcctattgatgctcgattaagtgataactccacaatggttggagttggtatgtctatggaaggtattgagcaaaatcctattgtttatgaccttatgtcagaaatggccttccatcacagacaagttgatcttcaggtttgggtcaagacatatccaacaagaagatatggaaaaccagtgaagggactgcaagatgcttggtggattttgtatcgaactttatataactgcacagatggtaaaaatgacaaaaatcgggacgtgatagtagccttcccagatgtcgaaccttttgttattgcgacaccagggttgcatgtgaatactagacaaatgtattctacagtaccatcgaagaattacatacggaaggacgtctctagtgatgcatatgaacatcctcatctatggtatgatactaatgctgttattcatgccctggaactttttcttcaacatggagatgaagtatctgacagcaacaccttcaggtatgatcttgtggatttgactcgtcaagttctggctaaatatgctaatgacgtttttctaaagatcatcgagagctataaatcaaacaacatgaatcaagtcaccatcctctgccagcactttctcagcctcgtaaatgaccttgacacattactatcctctcatgagggttttctgcttggcccttggttggaaagtgccaagggccttgcacgaaacagtgagcaagaaatacagtatgaatggaatgctagaacacaaattacaatgtggtttgacaacactgagacaaaagcaagtttattgcgcgactatgcaaacaagtactggagcggcctgctgcaagattactatgggccaagggccgccatctacttcaagcacttgttattaagcatggagaacaatgcacctttcgccctcaaagaatggaggagggaatggatcagtctcaccaacaactggcagagcgataggaaggtgttttcaaccacggctacaggagaccctctgaacatatcgcagtcgctttacacgaagtacttgagcaacgctgatctacttgggctagtagaaggtacaggctctccttggaagtctgcaagcttataagtaggtgatgcgtgcaatcatgggtcatttcagattcgcaattacttttttttctctaatgtttttcctcaaactcataaatatcgtttggctgcgacatggttgctacgaatcagttctgtgtgaactgtgaagtactgaagtctttctgtatagcagtagaaggacgggtttctttcctttttccagtgttccttgccgtaaatttttcagttctgtatgtatccccatttttccatgaccatgcacagtaaagtagcccttaggagaatggtcatggaaaaattcggcctagttcagggtgtcggaactttactgtgcgtctgtacctgagaatcgtgctgctttctgtgaaatccatgtctttcaaac

SEQ ID NO: 19113 - DNA, 3346 bp, Zea Mays
tgacctcacggccccaccctacctccgtctccccttcccagcgcgggcgctcggcctgccgctcttgtcgtcttcggcccttccgttcgccgtctgcccgtcgccgtccccaaactatcgccctttcgctgtcgccttccattttccaatcgtcaacaaccacctcgctcccgcttagttaaactcgtcgccatgccgtccgtggaggtccactggccactccaaccttccccttcctcccctactatccgctctccggtccccacccacgaccgccgtgatgcggccgcggccctcccgcttcctccagctactccttgtcgttgtgatcgcctgcgccgttccgggggtgagatgctccgaccggcggtttccgcacctcgaccgcgtccgcgagctccaacgccgggagggctcgtcatcggccgagcaggaggccgctgcgaggggacttctggcgcgcctcctaccgtcacactctaccagctttgagttcagagtcatctccacctccacggagctatgtggtgggaagacatgtttcgtcatcaacaaccacccgttgtttgatggagaagggactccagaaatattgatacttggagcaagtggggtggaaatttctgctggctttcattggtacttgaaacactattgtgcagcacatatatcttgggataaaaccggtggtgcacaactatcaaccattccgcgtcctgggtcactacctcgtgttcctgatggtggtgtactgattcaaagacccattgactggagctactaccagaatgcagttacatccagctattcttttgcttggtgggattgggaccgttgggagaaggaaattgactggatggctcttcaaggaataaatttgcctcttgctttcactgggcaagagtctatatggcagaggatttttgagaggtacaacattagcaaatcagatctggatgatttctttggtgggccagcctttcttgcatggtctcgaatggctaatatgcatggatggggtggacctctccctcagacttggcttgatgaccaactagttcttcaaaagaaaatcctttctaggatgtactcttttggcatgttcccagttcttccagccttctctggcaacatcccagctgcgttaaagtcaaagttcccttcagctaaagtcactcaccttggaaactgttgacagcaatccaaggtggtgctgcacatatcttcttgatgcatctgatcctttatttgtagaaattgggaagatgtttatagaagagcaaatcagagaatatggtaggacaagtcacatctacaactgcgatacttttgatgagaacactcctccattaagtgacccgaattatatatcttcgttgggtgctgcaacgttcaggggtatgcagagcggtgacaacgatgctatttggttgatgcaaggttggctgtttacctatgatcctttctgggaacctccacaaatgaaggcactactgcattctgttcctgttggcaaaatgattgttcttgatctttacgccgaagttaaaccagtgtggataaattctgatcagttatatggtgttccctacatctggtgcatgctccacaatttcgctgcagattttgaaatgtatggtgttttagatgctttggcttctgggcctattgatgctcgattaagtgataactccacaatggttggagttggtatgtctatggaaggtattgagcaaaatcctattgtttatgaccttatgtcagaaatggccttccatcacagacaagttgatcttcaggtttgggtcaagacatatccaacaagaagatatggaaaaccagtgaagggactgcaagatgcttggtggattttgtatcgaactttatataactgcacagatggtaaaaatgacaaaaatcgggacgtgatagtagccttcccagatgtcgaaccttttgttattgcgacaccagggttgcatgtgaatactagacaaatgtattctacagtaccatcgaagaattacatacggaaggacgtctctagtgatgcatatgaacatcctcatctatggtatgatactaatgctgttattcatgccctggaactttttcttcaacatggagatgaagtatctgacagcaacaccttcaggtatgatcttgtggatttgactcgtcaagttctggctaaatatgctaatgacgtttttctaaagatcatcgagagctataaatcaaacaacatgaatcaagtcaccatcctctgccagcactttctcagcctcgtaaatgaccttgacacattactatcctctcatgagggttttctgcttggcccttggttggaaagtgccaagggccttgcacgaaacagtgagcaagaaatacaggtaatctttttcttttgtcattttttgaagctgaattatgtctaatgatatggcatcataccatatttatcaaaatcccaaattcctacagttgtgaaagtaggtataattccattcttatcgacctgtttgattcttcctgttgttaggctgtttatgagcattaggctcaaacttgtggagcggttcacgttgagccaatctaagatttttcatatatgcactgtggtcatgatcgtgtgatgtatgtcactccagcattgatgacaagtagtcatgttcgtctaatttttgaattacaacttcgttgaaatccttgcagtatgaatggaatgctagaacacaaattacaatgtggtttgacaacactgagacaaaagcaagtttattgcgcgactatgcaaacaagtactggagcggcctgctgcaagattactatgggccaagggccgccatctacttcaagcacttgttattaagcatggagaacaatgcacctttcgccctcaaagaatggaggagggaatggatcagtctcaccaacaactggcagagcgataggaaggtgttttcaaccacggctacaggagaccctctgaacatatcgcagtcgctttacacgaagtacttgagcaacgctgatctacttgggctagtagaaggtacaggctctccttggaagtctgcaagcttataattctgtgtgaactgtgaagtactgaagtctttctgtatagcagtagaaggacgggtttctttcctttttccagtgttccttgccgtaaatttttcagttctgtatgtatccccatttttccatgaccatgcacagtaaagtagcccttaggagaatggtcatggaaaaattcggcctagttcagggtgtcggaactttactgtgcgtctgtacctgagaatcgtgctgctttctgtgaaatccatgtctttcaaac

SEQ ID NO: 19114 - DNA, 5214 bp, Zea Mays
tgacctcacggccccaccctacctccgtctccccttcccagcgcgggcgctcggcctgccgctcttgtcgtcttcggcccttccgttcgccgtctgcccgtcgccgtccccaaactatcgccctttcgctgtcgccttccattttccaatcgtcaacaaccacctcgctcccgcttagttaaactcgtcgccatgccgtccgtggaggtccactggccactccaaccttccccttcctcccctactatccgctctccggtccccacccacgaccgccgtgatgcggccgcggccctcccgcttcctccagctactccttgtcgttgtgatcgcctgcgccgttccgggggtgagatgctccgaccggcggtttccgcacctcgaccgcgtccgcgagctccaacgccgggagggctcgtcatcggccgagcaggaggccgctgcgaggggacttctggcgcgcctcctaccgtcacactctaccagctttgagttcagagtcatctccacctccacggagctatgtggtgggaagacatgtttcgtcatcaacaaccacccgttgtttgatggagaagggactccagaaatattgatacttggagcaagtggggtggaaatttctgctggctttcattggtacttgaaacactattgtgcagcacatatatcttgggataaaaccggtggtgcacaactatcaaccattccgcgtcctgggtcactacctcgtgttcctgatggtggtgtactgattcaaagacccattgactggagctactaccagaatgcagttacatccagctattcttttgcttggtgggattgggaccgttgggagaaggaaattgactggatggctcttcaaggaataaatttgcctcttgctttcactgggcaagagtctatatggcagaggatttttgagaggtacaacattagcaaatcagatctggatgatttctttggtgggccagcctttcttgcatggtctcgaatggctaatatgcatggatggggtggacctctccctcagacttggcttgatgaccaactagttcttcaaaagaaaatcctttctaggatgtactcttttggcatgttcccagttcttccagccttctctggcaacatcccagctgcgttaaagtcaaagttcccttcagctaaagtcactcaccttggaaactggtttacagttgacagcaatccaaggtggtgctgcacatatcttcttgatgcatctgatcctttatttgtagaaattgggaagatgtttatagaagagcaaatcagagaatatggtaggacaagtcacatctacaactgcgatacttttgatgagaacactcctccattaagtgacccgaattatatatcttcgttgggtgctgcaacgttcaggggtatgcagagcggtgacaacgatgctatttggttgatgcaaggttggctgtttacctatgatcctttctgggaacctccacaaatgaaggcactactgcattctgttcctgttggcaaaatgattgttcttgatctttacgccgaagttaaaccagtgtggataaattctgatcagttatatggtgttccctacatctggaaagttctcttttctctttctgccaactccatgcactattaccctccttttattttccttcataaaaaaactcgtgtgaccccttttcaggtgcatgctccacaatttcgctgcagattttgaaatgtatggtgttttagatgctttggcttctgggcctattgatgctcgattaagtgataactccacaatggttggagttggtatgtctatggaaggtattgagcaaaatcctattgtttatgaccttatgtcagaaatggccttccatcacagacaagttgatcttcagttttgtattacttccaggtttgggtcaagacatatccaacaagaagatatggaaaaccagtgaagggactgcaagatgcttggtggattttgtatcgaactttatataactgcacagatggacaaaaatcgggacgtgatagtagccttcccagatgtcgaaccttttgttattgcgacaccagggttgcatgtgaatactagacaaatgtattctacagtaccatcgaagaattacatacggaaggacgtctctagtgatgcatatgaacatcctcatctatggtatgatactaatgctgttattcatgccctggaactttttcttcaacatggagatgaagtatctgacagcaacaccttcaggtatgatcttgtggatttgactcgtcaagttctggctaaatatgctaatgacgtttttctaaagatcatcgagagctataaatcaaacaacatgaatcaagtcaccatcctctgccagcactttctcagcctcgtaaatgaccttgacacattactatcctctcatgagggttttctgcttggcccttggttggaaagtgccaagggccttgcacgaaacagtgagcaagaaatacagtatgaatggaatgctagaacacaaattacaatgtggtttgacaacactgagacaaaagcaagtttattgcgcgactatgcaaacaagtactggagcggcctgctgcaagattactatgggccaagggccgccatctacttcaagcacttgttattaagcatggagaacaatgcacctttcgccctcaaagaatggaggagggaatggatcagtctcaccaacaactggcagagcgataggaaggtgttttcaaccacggctacaggagaccctctgaacatatcgcagtcgctttacacgaagtacttgagcaacgctgatctacttgggctagtagaagtggggtggggctccttccagctgggctactccggcaatgcggatctggagcctgggcggtgccgccggacggacggcaagaagtggcggtgctccagggacgcggtcgccgaccagaagtactgcgagcgacacatgaaccggggacgccatcgttcaagaaagcatgtggaaggccagcctggccatgctgcgaaagccatgtccgcggtggccgtggcggctgctgttgctgctctggccggcgccgaagctaccgctgctgctggccttgctgtcaaccagcaccggcagccggggaagagctatgccacggttattgggaaaagtggggctaatgttaggcgggtagagcagcagactggtgctcgcattaaagttcaagagattgacaaagatgcttctggagaaaggctgatcattgtttcatctaacgagataccaactgaaccaatatccccaacaattgaggcactcattttgctccatgataaagttgcagggcctccagctattgcaagaggagccctcacagagattgcttcaaggcttagaactaggactttgagagatacaagcacaagtggtctttggaatggtggaaacaccaaaaactgtatctacgacgtctcgagtagaggcagagcacttgcacggtccacggaggacctcgcccgagccaccgggtcggtcgctgcctccccctccggctctacctcctccacgtcgtcctctccagagtccagagccaccagtcctttcccagcgctagattcagatccctgccgcacatttctccattgttatctacagaagggtaaggaatgtcgtgcagggtccaacgttgtgggaatctacctgagatttctacaattggaatacaattgttataagatagggaaaactaaggtattcctaagagctggtcagatggcagagctggctgctcgaagagcagaaattttggctaatgctgcgcgactaatccaaaggcgtataaagacacatcttatgcgaaaggaattcatcaaattaagaaaagcctcagttcaatctcagaagttctggagagcacgactagctaaaaagatttttgagtatatgaggagagacgttgcttcaattaggatacaaaagcacgtgcgtgcgcattctgccagaaaagcgtacctgcaagtatatgaatcagctacagcaatacaaacaggattacgagcaatggcagctcgcaacgaacatagattccgaagagagaccagggcatccataattatccaattatccaggtttgcactattatgcctatcattatttgcaaatggtttttctaggaaaaacataatgaacagttccttgaatcacagactcggtggcgccaacacagagcttatgctgcttacaaacagcaacagaaagcttctttgattctccaatgcttgtggagggcacgcattgcaagaaaggaacttcggaaactgagaatggaagcaagagagaccggcgcactgaaagaagcaaaagacaagctagaaaagagagtagaagaactgacatggcggttagacgtcgagaagcgtttgagggctgaccttgaagaagcaaagagccatgaaattgaaaagttgcaatctgcactgcaaaaaatgcaagaaaatctcaaggaagcccatgcagcaatagtaaatgagaaagaggctgcaaagttagcgattgaacaggcaccaccaaagatagtagaagtgccggttattgacaatgcaaaacttgaggagttgacaacccaaaataaagaacttgaggaggaactaagtacgtttaaacagaaggttgaggatcttgaaaataagcttattgagttccaaaaacagtctgatgaactgtcacaggagacacaagaacaagcatccaaagttattcaacttcaagagctggtcgaaaggcttgaagcaagtttatccaatatggaatctcaaaaccaagttctacgacaatagtcattggttgttgcatcagctgatgaggataaatcaaaacagatagagagattggaaagcaagatcgccacctttgagtcagagatcgagttgctccacaacaattctgcactagctattcaggccgtggttactcctgaaatgaatcagacaacaataattgaggaatttgacaagggacaccagcttgaagaagttaaaacggtcaatgagcaagtggttgttcctcctgtaaagaatctaagcaaacaaaaatcccaacaaatccaagaagactaaaagaggagaattactatctgtgttgttttttctaccaaattgggagaactatgttagcagtttcatgatgaagttgcttgaggaaggttttgatctttgtg

SEQ ID NO: 19115 - DNA, 1693 bp, Zea Mays
gaaaaaagggttttctccggccgttaccccgaggagccattggcaattttgccattatcatttgtgggcttcgccaagccgtccgccgccactcgaccaccaccgccgccgcggcgccgccgacgccgaccacaaccactcgcggttactaccgcctccgccccccgctgcttctcgtctccgcgcagccgtccgatggccaagcggctcgccggcgccgacaaagaggtgctcgtcgaggtggtgaggttcacgcagaagagcggcctgaggggctgtgacggcggctggaaggatttcctggcccggaacgacaggaagtttggcgcgtcggtcagcgaccccaggaagcgctccagggatgtgctgctcgccttcctgcagaccttccccaaggatttccagaagtacttcggcaaattagtgaagcgtcataatgaaagaagtgctgttcagcagtatgtggctgatttccccgacgaagtttctccccagcagaaacttgttcaactgacggcagagcacccagagtacagaaaacactactgcttcccatcgtaccaggagtgatggcacagaggctgtggtcagagtatgtgttgtagacgacaagcttaaggctaagttggacatacttgtaaacccatcgaagactgttgctgactataggacacacatcactggtgtatctaagaaggatttagaaggagtcacatcatcattagttgatgttcagaaatcgctgaagagaatgttatccaaaggaaatattttgattggccatagcttacatagagatttatgcgccttaaagattgattactctcaagttattgatacagcatacatatttaagtatgcaaatttaccaactactgcatcaccttccttgaacagtctgtgcaaggctattttggggtattcagttcgagaagaaggagaaccacataattgcttgaaggatgcagaagctgcgatgaatctagttcttgcaaagcttaagaatgagtttaatgaccccattgaaattgctgcaagtagtgtaactgaatctgatgtggtgaagttgctcgctcatagaattccagtgtacctgccttgtcaagagctgtgcaaaattttctctgggaaccccaatattgatgacaagattgattcgagaatacgaggtgaattttattccacatgtatttcattcaatgacgtagatgaggtggacaaggcatttgaagaactggatggccaaaagaccaaggactcaggtgggagacttcaaaagcatgtactgctgaagcttgacaatggagatgtcgtgagcttctatgttcggaagatggtatacgattcctggcccaaacagatcgaagttccaaggaagagaccagagcctactgaggatccagagccaaagaaagagcatgccaagggggttcagcaaaagaagagaaataactttgtgagagatactgaggatccagagccaaagaagagaccagagcctattgaggatccagagccaaagaaagagcatgccgagggggcacaggcagacctggaggcgtcggctacggcggcgattccagaaacggcgcggttgagaaggacagcgacgagggaggcgccgccgacgaggatgggcaggccgcggaccagcgtgacgtttcgccggacccaaccctccacccactcttga

SEQ ID NO: 19116 - DNA, 1483 bp, Zea Mays
atggccaagcggctcgccggcgccgacaaagaggtgctcgtcgaggtggtgaggttcacgcagaagagcggcctgaggggctgtgacggcggctggaaggatttcctggcccggaacgacaggaagtttggcgcgtcggtcagcgaccccaggaagcgctccagggatgtgctgctcgccttcctgcagaccttccccaaggatttccagaagtacttcggcaaattagtgaagcgtcataatgaaagaagtgctgttcagcagtatgtggctgatttccccgacgaagtttctccccagcagaaacttgttcaactgacggcagagcacccagagtacagaaaacactactgcttcccatcgtaccaggaggcgtcgaaagtattgcagatagatgtctctagtttaacgagctcaagtgctatgttgtcaattgactgtgagatggtcctttgcagtgatggcacagaggctgtggtcagagtatgtgttgtagacgacaagcttaaggctaagttggacatacttgtaaacccatcgaagactgttgctgactataggacacacatcactggtgtatctaagaaggatttagaaggagtcacatcatcattagttgatgttcagaaatcgctgaagagaatgttatccaaaggaaatattttgattggccatagcttacatagagatttatgcggctattttggggtattcagttcgagaagaaggagaaccacataattgcttgaaggatgcagaagctgcgatgaatctagttcttgcaaagcttaagaatgagtttaatgaccccattgaaattgctgcaagtagtgtaactgaatctgatgtggtgaagttgctcgctcatagaattccagtgtacctgccttgtcaagagctgtgcaaaattttctctgggaaccccaatattgatgacaagattgattcgagaatacgaggtgaattttattccacatgtatttcattcaatgacgtagatgaggtggacaaggcatttgaagaactggatggccaaaagaccaaggactcaggtgggagacttcaaaagcatgtactgctgaagcttgacaatggagatgtcgtgagcttctatgttcggaagatggtatacgattcctggcccaaacagatcgaagttccaaggaagagaccagagcctactgaggatccagagccaaagaaagagcatgccaagggggttcagcaaaagaagagaaataactttgtgagagatactgaggatccagagccaaagaagagaccagagcctattgaggatccagagccaaagaaagagcatgccgagggggcacaggcagacctggaggcgtcggctacggcggcgattccagaaacggcgcggttgagaaggacagcgacgagggaggcgccgccgacgaggatgggcaggccgcggaccagcgtgacgtttcgccggacccaaccctccacccactcttga

SEQ ID NO: 19117 - DNA, 1642 bp, Zea Mays
ctaatgggtatggcttcgtgtgtccactggtaccttacccactgccatccctacccccaccacggccgaaacggatcgcagcgagcgaaaatggatgcacggtttgtgtgcgccgccgactctgagctccagctggcgcgggcccggtgcgtcgcgctgcaggaccacctcgccgcttcgccggacctgccacgccatcccgcgctccgctccctccttcgcctcgtcaacgccgagctgcgcttcctctcctcgctccgcctcgccccggccacgccgctctcctccaacctgccccacctcgtggcgctccacctcgtcctcacccaccctgccatacggagcccgtcccggctctcgccgctccccggcgtagatttctcctgcgccttccgcggccggcccgcgtgggtgctcgtgtccgcgagcaaccccgccaggctcgcctgggccccgcccgggggtctccgtgcccgcttcgcggcggcgctagaagccgcgcgcggtgccccgcccgctacgcggcccgagaagctgcttgtagtcttctcccgcggtgtcggcgtggatatcgcgcgggggctaaccgaggggttcgaggccgtggaggctgacttgctcgaggagttcattggcgactccgaggaggagaatgagcacgggtgggttgtcatcagcttggactcgagtgaggagctcaggaatttcagggcgttcgagattgatgtcgtggagggtgctagtgaggttttgcttccatcagacgtcgcggtggacgaggtaagtgctgatgaggaagagcttttgggtttctggggatcctttgctgcctttatggagaagatgtggaaagtatcgagggagctggtgaatctggacaccacggcactggtcgctatagtgtcagggatcagcaatggcggggtagggaagctgatggctgcacctgaggcagagaccagagcaaggttcaagtgcaactacaagttcgtcatggatcaggcacaatacgaactgcagtttccaatactcatagagttacggaaagcagtggaggggaagcaatgtatcatatgtgaaactgtcaacttggaattcaaagaaattgtttctatgtgtggtgggcctgaggagaacaccagagcaagacatttgttgaaacaacttacgtgaccattggcgggcccctactttgactgctaacatgggttttgtaagagctgtttcccagtctggtatgtccttgctaaccatcgagcaccgacctcgggcgctgattggtctgtgacagttagtatgccataactattctataggtgttttgagatcctaacgtttgtaattctgccccttctgaacattaaacaatatgaagttctggtaattgtagttgtcctactcctagaactatggtgtagtgtaggatgtcctagtttactccagtgtctagtactgcgagctttgtccatgactgtgtaactggtccagatccactggagtttattcgagcgagaatgcttactatctgtacttgtatccttgacgtcaaagtcaagcaaagcatatgtacaatatgaatgaacgcatcagcatgaatgactcgttggcagcgtgaattgttgcagctgatagctgttgatcg

SEQ ID NO: 19118 - DNA, 1713 bp, Zea Mays
ctaatgggtatggcttcgtgtgtccactggtaccttacccactgccatccctacccccaccacggccgaaacggatcgcagcgagcgaaaatggatgcacggtttgtgtgcgccgccgactctgagctccagctggcgcgggcccggtgcgtcgcgctgcaggaccacctcgccgcttcgccggacctgccacgccatcccgcgctccgctccctccttcgcctcgtcaacgccgagctgcgcttcctctcctcgctccgcctcgccccggccacgccgctctcctccaacctgccccacctcgtggcgctccacctcgtcctcacccaccctgccatacggagcccgtcccggctctcgccgctccccggcgtagatttctcctgcgccttccgcggccggcccgcgtgggtgctcgtgtccgcgagcaaccccgccaggctcgcctgggccccgcccgggggtctccgtgcccgcttcgcggcggcgctagaagccgcgcgcggtgccccgcccgctacgcggcccgagaagctgcttgtagtcttctcccgcggtgtcggcgtggatatcgcgcgggggctaaccgaggggttcgaggccgtggaggctgacttgctcgaggagttcattggcgactccgaggaggagaatgagcacgggtgggttgtcatcagcttggactcgagtgaggagctcaggaatttcagggcgttcgagattgatgtcgtggagggtgctagtgaggttttgcttccatcagacgtcgcggtggacgaggtaagtgctgatgaggaagagcttttgggtttctggggatcctttgctgcctttatggagaagatgtggaaagtatcgagggagctggtgaatctggacaccacggcactggtcgctatagtgtcagggatcagcaatggcggggtagggaagctgatggctgcacctgaggcagagaccagagcaaggttcaagtgcaactacaagttcgtcatggatcagtttccaatactcatagagttacggaaagcagtggaggggaagcaatgtatcatatgtgaaactgtcaacttggaattcaaagaaattgtttctatgtgtggtgggcctgaggagaacaccagagcaagacatttgttgaaacaacttaccattgtcccagacaatccttcagcacgaatgatggatcttccaaccacaaggaagctcgcgatgaaaaataaaattgtttttggcacaggtgaccattggcgggcccctactttgactgctaacatgggttttgtaagagctgtttcccagtctggtatgtccttgctaaccatcgagcaccgacctcgggcgctgattggtctgtgacagttagtatgccataactattctataggtgttttgagatcctaacgtttgtaattctgccccttctgaacattaaacaatatgaagttctggtaattgtagttgtcctactcctagaactatggtgtagtgtaggatgtcctagtttactccagtgtctagtactgcgagctttgtccatgactgtgtaactggtccagatccactggagtttattcgagcgagaatgcttactatctgtacttgtatccttgacgtcaaagtcaagcaaagcatatgtacaatatgaatgaacgcatcagcatgaatgactcgttggcagcgtgaattgttgcagctgatagctgttgatcg

SEQ ID NO: 19119 - DNA, 1770 bp, Zea Mays
cactggtccaccgtccccaacccatcccccgcccgctccgccacagtccacacaggccccagccatggaggcggccccaacccccgagccggggccgcacgtgcttgtcatccccttccccgcgcaaggccacgcgctgccgctcatcgacttcgtcgccctcctggcggcgcgcggcctccgcctcaccgtggtcacgaccccggcaaaccttcagcttctctcctctctcctcgccgcacaccccaccgccgtccgcgccgctaccttcccgttcccctcccacccatccctgcccccggggctcgagaataccaagggttgcagcccggtgcagttccccgccttcgtccacgccttggccgagctgcgtgggcccatcctcgcgtgggttaaagcgcagcccgatcccgtcgtcgccgtggtcgccgacttcttctgcggatgggctcagccgctggcccgcgagataggcgccgctgggatcgtgttctcgccgtccggcgtcctcggcaccgccgtcccgcactcgaccttccgccgcctggtgaggcgccccgcggagtgcgatggcgacgacgagttcagcgtctcgttcccggcgattcccggcgagccgtcttaccagtggagagagctcttgatgatgtacaggaactacatggcaggcgctctggacgagcaggtcggcgcgtcggtgaggcagaacttcatgtggaacctgcacgacagctgggggttcgtgttcaactcgttcagagcgctggaggggaggtacctggagcagcctctcgaggacctgggcttcaagcgcgcctgggcagtgggccccgtggctccggaggcggacgccgcggttgcccgcggcgggcaggcaaccgtcgagctcgccgatctcagcgcgtggctggacgcgttcccggaaggttcggttgtatacgtgtgcttcgggagccaggccgtgctgagccccgccgtggcggcggcgctggccgaggcgcttgagcgcagcgccgtgccgttcatgtgggccgtgggcgacgccgtggtcccggacgggttcgaggcgcgcgccgcggcgtcggggcgcggctcggtggtgcgcgggtgggcgccgcaggtggcgctgctgcggcatccggcggtggggtggttcgtgacgcactgcggctggaactcgactttggaggcggtggccgcgggggtgcccatgctggcgtggcccctgacgggcgaccagttctttgacgctcggctgctcgtggacgaggcccgcgtcgcggtccgcgcatgcaagggcggcctcggctttgtccccgacgcaggtgagctggcgtccgtgttggccgacgccaccggggagaagggccacgacgtgaggacccgcgccaaggcactcgcggcagaggccgcccgcgccatgaagcctggcgggacatcgtacgcggatctagagctgttggtgcaggaaattcggaatcggaagcttagctagctccctctccaggaatacatcagctcgattcccatgcgatctaacttgatcgcactgaaagatgatgcaagatgatacaatactgaaagatgatacaagactttaagttatgtaattttagttgttttgtatgaattgtataattttatctatttaattgtgtatttggatgtatttattcaataaaataacatattttatgtcacctaaagtctataatagattgacgtttcgctaagataactgtaagctgaagataaaggttttatactaag

SEQ ID NO: 19120 - DNA, 1765 bp, Zea Mays
ccgtccccaacccatcccccgcccgctccgccacagtccacacaggccccagccatggaggcggccccaacccccgagccggggccgcacgtgcttgtcatccccttccccgcgcaaggccacgcgctgccgctcatcgacttcgtcgccctcctggcggcgcgcggcctccgcctcaccgtggtcacgaccccggcaaaccttcagcttctctcctctctcctcgccgcacaccccaccgccgtccgcgccgctaccttcccgttcccctcccacccatccctgcccccggggctcgagaataccaagggttgcagcccggtgcagttccccgccttcgtccacgccttggccgagctgcgtgggcccatcctcgcgtgggttaaagcgcagcccgatcccgtcgtcgccgtggtcgccgacttcttctgcggatgggctcagccgctggcccgcgagataggcgccgctgggatcgtgttctcgccgtccggcgtcctcggcaccgccgtcccgcactcgaccttccgccgcctggaactacatggcaggcgctctggacgagcaggtcggcgcgtcggtgaggcagaacttcatgtggaacctgcacgacagctgggggttcgtgttcaactcgttcagagcgctggaggggaggtacctggagcagcctctcgaggacctgggcttcaagcgcgcctgggcagtgggccccgtggctccggaggcggacgccgcggttgcccgcggcgggcaggcaaccgtcgagctcgccgatctcagcgcgtggctggacgcgttcccggaaggttcggttgtatacgtgtgcttcgggagccaggccgtgctgagccccgccgtggcggcggcgctggccgaggcgcttgagcgcagcgccgtgccgttcatgtgggccgtgggcgacgccgtggtcccggacgggttcgaggcgcgcgccgcggcgtcggggcgcggctcggtggtgcgcgggtgggcgccgcaggtggcgctgctgcggcatccggcggtggggtggttcgtgacgcactgcggctggaactcgactttggaggcggtggccgcgggggtgcccatgctggcgtggcccctgacgggcgaccagttctttgacgctcggctgctcgtggacgaggcccgcgtcgcggtccgcgcatgcaagggcggcctcggctttgtccccgacgcaggtgagctggcgtccgtgttggccgacgccaccggggagaagggccacgacgtgaggacccgcgccaaggcactcgcggcagaggccgcccgcgccatgaagcctggcgggacatcgtacgcggatctagagctgttggtgcaggaaattcggaatcggaagcttagctagctccctctccaggaatacatcaggtacccttctagatcaaagcagatacttccatgcattcggactcatttgttaaagctgaacttcgctgtggcttcagcttgaacctatttaagtgccttcccatgtgtgcacgggaataattggtttccgtttggcactcagttgtgctgtgtttttgcagctttgcatgaactgaagaccagctaaggccccgtatgaatccactcagtttattagaaactggttttaaaagttataaagcctccaaacaaatcaagtttttattcagtttctaaaaattactttctaggtttcttaaaaaccaaaaaactggttagcattagctaaaaccagttttttagatggttagccattgtttatata

SEQ ID NO: 19121 - DNA, 2905 bp, Zea Mays
cccacgtccgcgccacctccacgaccccacgactaataaaaaaaccaaccgaaaatatcgtactggcgagtggtccgggtgtgaatgaattagacaacattttcaaattttaaaatagaaaagcgacggggaaagggtaggaagaaaaaaagagaaaaaaaaacgccggaggccggagggatcacggaatctgagcccaccactcccccgcccccacttgtataaagcgaccccgataccagcccgtcatgggaagaaaaggaaggaagaagggcctcctgtatcctctcacttccctcagtcctcgtccgtctgctccctcctctctctacctagctctagctagccttcctgtagcgcggcagagatggctgcccctgcctccaccacggcggcggcggcggcagcgctgctgctgctgctcctcctgtcgctcgccgcggcggcggacatgtcgatcgtgtcctacggggagcgcagcgacgaggaggcgcggcggatgtacgcggagtggatggcggcgcacggccggacctacaacgccgtcggcgaggaggagcggcggtaccaggtgttccgggacaacctccgctacatcgacgcgcacaacgccgccgccgacgcgggcgtccactccttccgcctcggcctcaaccgcttcgccgacctcaccaacgacgagtaccgcgccacctacctcggcgccaggaccaggccgcagagggagaggaagctcggcgccaggtaccacgccgccgacaacgaggacctgccggagtccgtcgactggagggccaagggcgccgtcgccgaggtcaaggaccagggcagctgcgggagctgttgggctttctcaacaatagcagctgtggaaggcatcaaccagattgttacaggcgacttgatctccttgtctgaacaagagcttgtcgactgtgacacttcgtacaatcaggggtgcaatggaggtctgatggactatgcatttgagttcatcatcaacaatggcggaatcgacaccgagaaggattacccttacaagggcacggacggacggtgtgatgtcaacaggaaaaacgcgaaggttgtcactattgacagctacgaagatgtaccagcgaacgatgagaagagtctgcagaaggcagttgcaaaccagcctgtcagtgtcgcaattgaggctgctggcacagcatttcagctctacagctcggtaattggcgctcaccttgctgctgggttcatctgtggaccatttggttaaagtccgagatgaatgattcaatcatctagtgtttgattattagttggtggccatgaaagaaataaaatccatctgccttgaacaagacatgcccatgttaggtcgaggtcacctaattgctttaaaattgtctctttcatatcgctttactcaagattattttctctggaaagaatgattctgttgtcaccctgcaagctgcaactgttacacaccatacccctgacctagtttacttcgatccagactatatatttagcaacttttacagtacgatagtccttcagtgccccaccactgaatcatgctcccttgtttttctcaaagactatcctgccacttcctgtgaagcacttttaatggtatacaactttgatgtgtttctgtgaggccttttggaaagacgtgctttgggtatcttcactggaagctgtggaacagcgctggaccatggtgtcacggccgtcggctacgggacagagaacggcaaggactactggatcgtgaagaactcatggggcagcagctggggcgagtccgggtacgtgaggatggagcgcaacatcaaggcgtccagcggcaagtgcggtatcgcggttgagccgtcatacccgttgaaggagggcgccaacccgccgaaccctggccccagcccgccgtccccgaccccggcgcccgccgtgtgcgacaactactactcgtgccctgacagcaccacctgctgctgcatctacgagtacggcaagtactgcttcgcctggggctgctgcccgctcgagggcgccacctgctgcgacgatcactacagctgctgcccccatgactaccccatctgcaacgtcaggcagggaacctgcctcatgggcaaggacagcccactgtcactgtcagtgaaggctacgaagcgaaccctggccaagccgcactgggctttctccggcaacacagctgacggaatgaagagcagcgcatgagaaaacgcagcgtggcattaggtcgtcagcaacctgggtggtcgattagagcccctgcgtgggaaatggtcacctggccccctgattgacgacggaagcatggctcggcggccgctatctacctatatcgattttagtaggtactcactcctgtacataaaccctgcagaaaaaaagagggttcagttgtttatggaaccctggcaaatttgctttcgcgcacaatgtaaaactcagctaagctccccggcgtagctcgacacagctgcgatctattattatttgatgtaatggggactgatattgcaacgaccagcaatgttatactacattcattttcttggacgcgctctgttatgtgtcggcggtgataccctctgatggtttttgtatttggttcttttactaacggagagtggacaatagattctagcttcattgcatcacatcagtggcagcagataccagcacgagtgcacgagttacacgagcccaagaggccagccaactgttggaggtagagatggcaatgggtaaatacccacgacaaaaaaataaccccaccgggtcacccatatacactggtgggtatggatttacccccatacccatacccacgtgggtatgggtcacccgtacccacaaaaattaaacatctatcaaaata

SEQ ID NO: 19122 - DNA, 2214 bp, Zea Mays
aatagaaaagcgacggggaaagggtaggaagaaaaaaagagaaaaaaaaacgccggaggccggagggatcacggaatctgagcccaccactcccccgcccccacttgtataaagcgaccccgataccagcccgtcatgggaagaaaaggaaggaagaagggcctcctgtatcctctcacttccctcagtcctcgtccgtctgctccctcctctctctacctagctctagctagccttcctgtagagcggcggtaccaggtgttccgggacaacctccgctacatcgacgcgcacaacgccgccgccgacgcgggcgtccactccttccgcctcggcctcaaccgcttcgccgacctcaccaacgacgagtaccgcgccacctacctcggcgccaggaccaggccgcagagggagaggaagctcggcgccaggtaccacgccgccgacaacgaggacctgccggagtccgtcgactggagggccaagggcgccgtcgccgaggtcaaggaccagggcagctgcgggagctgttgggctttctcaacaatagcagctgtggaaggcatcaaccagattgttacaggcgacttgatctccttgtctgaacaagagcttgtcgactgtgacacttcgtacaatcaggggtgcaatggaggtctgatggactatgcatttgagttcatcatcaacaatggcggaatcgacaccgagaaggattacccttacaagggcacggacggacggtgtgatgtcaacaggaaaaacgcgaaggttgtcactattgacagctacgaagatgtaccagcgaacgatgagaagagtctgcagaaggcagttgcaaaccagcctgtcagtgtcgcaattgaggctgctggcacagcatttcagctctacagctcgactatcctgccacttcctgtgaagcacttttaatggtatacaactttgatgtgtttctgtgaggccttttggaaagacgtgctttgggtatcttcactggaagctgtggaacagcgctggaccatggtgtcacggccgtcggctacgggacagagaacggcaaggactactggatcgtgaagaactcatggggcagcagctggggcgagtccgggtacgtgaggatggagcgcaacatcaaggcgtccagcggcaagtgcggtatcgcggttgagccgtcatacccgttgaaggagggcgccaacccgccgaaccctggccccagcccgccgtccccgaccccggcgcccgccgtgtgcgacaactactactcgtgccctgacagcaccacctgctgctgcatctacgagtacggcaagtactgcttcgcctggggctgctgcccgctcgagggcgccacctgctgcgacgatcactacagctgctgcccccatgactaccccatctgcaacgtcaggcagggaacctgcctcatgggcaaggacagcccactgtcactgtcagtgaaggctacgaagcgaaccctggccaagccgcactgggctttctccggcaacacagctgacggaatgaagagcagcgcatgagaaaacgcagcgtggcattaggtcgtcagcaacctgggtggtcgattagagcccctgcgtgggaaatggtcacctggccccctgattgacgacggaagcatggctcggcggccgctatctacctatatcgattttagtaggtactcactcctgtacataaaccctgcagaaaaaaagagggttcagttgtttatggaaccctggcaaatttgctttcgcgcacaatgtaaaactcagctaagctccccggcgtagctcgacacagctgcgatctattattatttgatgtaatggggactgatattgcaacgaccagcaatgttatactacattcattttcttggacgcgctctgttatgtgtcggcggtgataccctctgatggtttttgtatttggttcttttactaacggagagtggacaatagattctagcttcattgcatcacatcagtggcagcagataccagcacgagtgcacgagttacacgagcccaagaggccagccaactgttggaggtagagatggcaatgggtaaatacccacgacaaaaaaataaccccaccgggtcacccatatacactggtgggtatggatttacccccatacccatacccacgtgggtatgggtcacccgtacccacaaaaattaaacatctatcaaaata

SEQ ID NO: 19123 - DNA, 2259 bp, Zea Mays
aatagaaaagcgacggggaaagggtaggaagaaaaaaagagaaaaaaaaacgccggaggccggagggatcacggaatctgagcccaccactcccccgcccccacttgtataaagcgaccccgataccagcccgtcatgggaagaaaaggaaggaagaagggcctcctgtatcctctcacttccctcagtcctcgtccgtctgctccctcctctctctacctagctctagctagccttcctgtagcgcggcagagatggctgcccctgcctccaccacggcggcggcggcggcagcgctgctgctgctgctcctcctgtcgctcgccgcggcggcggacatgtcgatcgtgtcctacggggagcgcagcgacgaggaggcgcggcggatgtacgcggagtggatggcggcgcacggccggacctacaacgccgtcggcgaggaggagcggcggtaccaggtgttccgggacaacctccgctacatcgacgcgcacaacgccgccgccgacgcgggcgtccactccttccgcctcggcctcaaccgcttcgccgacctcaccaacgacgagtaccgcgccacctacctcggcgccaggaccaggccgcagagggagaggaagctcggcgccaggtaccacgccgccgacaacgaggacctgccggagtccgtcgactggagggccaagggcgccgtcgccgaggtcaaggaccagggcagctgcgggagctgttgggctttctcaacaatagcagctgtggaaggcatcaaccagattgttacaggcgacttgatctccttgtctgaacaagagcttgtcgactgtgacacttcgtacaatcaggggtgcaatggaggtctgatggactatgcatttgagttcatcatcaacaatggcggaatcgacaccgagaaggattacccttacaagggcacggacggacggtgtgatgtcaacaggaaaaacgcgaaggttgtcactattgacagctacgaagatgtaccagcgaacgatgagaagagtctgcagaaggcagttgcaaaccagcctgtcagtgtcgcaattgaggctgctggcacagcatttcagctctacagctcgggtatcttcactggaagctgtggaacagcgctggaccatggtgtcacggccgtcggctacgggacagagaacggcaaggactactggatcgtgaagaactcatggggcagcagctggggcgagtccgggtacgtgaggatggagcgcaacatcaaggcgtccagcggcaagtgcggtatcgcggttgagccgtcatacccgttgaaggagggcgccaacccgccgaaccctggccccagcccgccgtccccgaccccggcgcccgccgtgtgcgacaactactactcgtgccctgacagcaccacctgctgctgcgatcactacagctgctgcccccatgactaccccatctgcaacgtcaggcagggaacctgcctcatgggcaaggacagcccactgtcactgtcagtgaaggctacgaagcgaaccctggccaagccgcactgggctttctccggcaacacagctgacggaatgaagagcagcgcatgagaaaacgcagcgtggcattaggtcgtcagcaacctgggtggtcgattagagcccctgcgtgggaaatggtcacctggccccctgattgacgacggaagcatggctcggcggccgctatctacctatatcgattttagtaggtactcactcctgtacataaaccctgcagaaaaaaagagggttcagttgtttatggaaccctggcaaatttgctttcgcgcacaatgtaaaactcagctaagctccccggcgtagctcgacacagctgcgatctattattatttgatgtaatggggactgatattgcaacgaccagcaatgttatactacattcattttcttggacgcgctctgttatgtgtcggcggtgataccctctgatggtttttgtatttggttcttttactaacggagagtggacaatagattctagcttcattgcatcacatcagtggcagcagataccagcacgagtgcacgagttacacgagcccaagaggccagccaactgttggaggtagagatggcaatgggtaaatacccacgacaaaaaaataaccccaccgggtcacccatatacactggtgggtatggatttacccccatacccatacccacgtgggtatgggtcacccgtacccacaaaaattaaacatctatcaaaata

SEQ ID NO: 19124 - DNA, 1602 bp, Zea Mays
gctgttgggctttctcaacaatagcagctgtggaaggcatcaaccagattgttacaggcgacttgatctccttgtctgaacaagagcttgtcgactgtgacacttcgtacaatcaggggtgcaatggaggtctgatggactatgcatttgagttcatcatcaacaatggcggaatcgacaccgagaaggattacccttacaagggcacggacggacggtgtgatgtcaacaggaaaaacgcgaaggttgtcactattgacagctacgaagatgtaccagcgaacgatgagaagagtctgcagaaggcagttgcaaaccagcctgtcagtgtcgcaattgaggctgctggcacagcatttcagctctacagctcgggtatcttcactggaagctgtggaacagcgctggaccatggtgtcacggccgtcggctacgggacagagaacggcaaggactactggatcgtgaagaactcatggggcagcagctggggcgagtccgggtacgtgaggatggagcgcaacatcaaggcgtccagcggcaagtgcggtatcgcggttgagccgtcatacccgttgaaggagggcgccaacccgccgaaccctggccccagcccgccgtccccgaccccggcgcccgccgtgtgcgacaactactactcgtgccctgacagcaccacctgctgctgcatctacgagtacggcaagtactgcttcgcctggggctgctgcccgctcgagggcgccacctgctgcgacgatcactacagctgctgcccccatgactaccccatctgcaacgtcaggcagggaacctgcctcatgggcaaggacagcccactgtcactgtcagtgaaggctacgaagcgaaccctggccaagccgcactgggctttctccggcaacacagctgacggaatgaagagcagcgcatgagaaaacgcagcgtggcattaggtcgtcagcaacctgggtggtcgattagagcccctgcgtgggaaatggtcacctggccccctgattgacgacggaagcatggctcggcggccgctatctacctatatcgattttagtaggtactcactcctgtacataaaccctgcagaaaaaaagagggttcagttgtttatggaaccctggcaaatttgctttcgcgcacaatgtaaaactcagctaagctccccggcgtagctcgacacagctgcgatctattattatttgatgtaatggggactgatattgcaacgaccagcaatgttatactacattcattttcttggacgcgctctgttatgtgtcggcggtgataccctctgatggtttttgtatttggttcttttactaacggagagtggacaatagattctagcttcattgcatcacatcagtggcagcagataccagcacgagtgcacgagttacacgagcccaagaggccagccaactgttggaggtagagatggcaatgggtaaatacccacgacaaaaaaataaccccaccgggtcacccatatacactggtgggtatggatttacccccatacccatacccacgtgggtatgggtcacccgtacccacaaaaattaaacatctatcaaaata

SEQ ID NO: 19125 - DNA, 151 bp, Zea Mays
ggccgctcgcttaccgcttggcatcgcccgccagcaaccggatgggaaaaaataaaagaaaaaaagagacgccactgttctgagacaagatccaaccaccaccaccacacactccgttgttcctcgttcgttcgttcatcctggacctgga

SEQ ID NO: 19126 - DNA, 1174 bp, Zea Mays
cttgctgtccgtcattactcattgcccaacaccaacagcagctgctcggtcgtccgcgctcgcaaccggggaaggccgcacccgcgaccgcgagccgcgcagcccaacctacccgaccggcaaagtgacacagcgacgtcgccgtcctttacttaaccctccacccacagcgattcccgcctcgtccaccagctgagctgagctgcgcccgtttttagcgagcgagacaggtccgcgcgcgcgtgcgccggcgaggattggattggaaccgtcgcccgtcggtcgtcgatggggatccacctggtggcgttcgtggcggcgaggggcttcctgcaggtgttccaggtgtcggcgccgctgctgtggccgctcaacctctggctgccgctcgcgcgccacctgcccgaggcctgcgccgccttctacgacgccctcgtctcgcacgccgccagcctgcgcgccaccgtccggcgccgccgacgcgacagcggggacgccctcgacgagtacctccgcagcgccatcatgctaaccctctccgactgagactcttgagccgagcgcgcggccaccggccagtgccaggcaacggccagtaccggaggcgggcgtgcacaggccggccgcccggcgcgcgctgtgatgtaccggccgctggaggccagactcgcgatttctttccaacacgacgacgaccggtgcagatttcacgacttgttggccccatatattcatagctttcccgtactaccaattgcacctgattttgtcgaggatgcgaaccaaacacgagaaagaagacggtttggttctcgggaaaatcgacggcagtcgccactcgccagctgggtttggtccagacagcagttacgtgcggattgctcaacgaagctgttatcagagcatcttcaagagactcatcattttctctctattttacttcctatttactttttcataaaaattatattctatatgtagcatctctatttcaacaaattatctatctagtttggctagtcaggttgctagttaaatttagctagtgaggatgctaatttggagagtcggatagcttggtgaatcacatagctagtctgttgaaaaagtattttattgagtaactaaaagttggcttggcgagccattttgctagtctcttggagatgctcac

SEQ ID NO: 19127 - DNA, 2026 bp, Zea Mays
cttgctgtccgtcattactcattgcccaacaccaacagcagctgctcggtcgtccccgcgcagcccaacctacccgaccggcaaagtgacacagcgacgtcgccgtcctttacttaaccctccacccacagcgattcccgcctcgtccaccagctgagctgagctgcgcccgtttttagcgagcgagacaggtccgcgcgcgcgtgcgccggcgaggattggattggaaccgtcgcccgtcggtcgtcgatggggatccacctggtggcgttcgtggcggcgaggggcttcctgcaggtgttccaggtgtcggcgccgctgctgtggccgctcaacctctggctgccgctcgcgcgccacctgcccgaggcctgcgccgccttctacgacgccctcgtctcgcacgccgccagcctgcgcgccaccgtccggcgccgccgacgcgacagcggggacgccctcgacgagtacctccgcagcgccatcatgctaaccctctccgactgagactcttgagccgagcgcgcggccaccggccagtgccaggcaacggccagtaccggaggcgggcgtgcacaggccggccgcccggcgcgcgctgtgatgtgagtagccatagctaggatctgtgttatctcgtttgtttgtttgtttttcccttggctcgctcttcttttgctgcttttcggtcggtgcctaatctagctatctactactagcactagctagctagcatctcaagactgagctccgtatggtcaatttgtaatgctcgtctgtgactgaactgaagaacaagaccattttaatcggcttcttgcttccagcaacaacatctactatgttctacagtctacacatgtaaacgtctgcctgtgcagtgtgtgtacgtaggagtgcctcaccatcactgtttcagattgttttctttcttgcaacgacgggatatatgccggtagtctctggagaaattatcaaaagatcacataaacggcattaatgccgtacccactcgcgattaaggagaaaacaacaagtatcaaggatgatcgtagtcgtagccgctgcgcaggcaggcgttggcgcgttttattcgtcgccaaccaagcgtgcgaatcgaaaccgtcggattagacactggtcaccactcattatcgtccactgcccgctgtctcctaccagtacgtgtactaccttcgtccaaggtcaggccactgttctctactgtctatactgtttatagatgtttatagagtttaaaatagaatgtgagatagagagatagtctaaaaagatctataaagctttttaatcaaatcttttttaaaagtttgaccagaaacagtaccaagatactagatatatacgagtagaatatgttattatttttgtctgtaactatacatatggatattattttttatggtccgaattggagataatatagtttgatttggacaagatttagaaatagattccttttttggacgatgtaggtaccggccgctggaggccagactcgcgatttctttccaacacgacgacgaccggtgcagatttcacgacttgttggccccatatattcatagctttcccgtactaccaattgcacctgattttgtcgaggatgcgaaccaaacacgagaaagaagacggtttggttctcgggaaaatcgacggcagtcgccactcgccagctgggtttggtccagacagcagttacgtgcggattgctcaacgaagctgttatcagagcatcttcaagagactcatcattttctctctattttacttcctatttactttttcataaaaattatattctatatgtagcatctctatttcaacaaattatctatctagtttggctagtcaggttgctagttaaatttagctagtgaggatgctaatttggagagtcggatagcttggtgaatcacatagctagtctgttgaaaaagtattttattgagtaactaaaagttggcttggcgagccattttgctagtctcttggagatgctcac

SEQ ID NO: 19128 - DNA, 1774 bp, Zea Mays
cttgctgtccgtcattactcattgcccaacaccaacagcagctgctcggtcgtccgcgctcgcaaccggggaaggccgcacccgcgaccgcgagccgcgcagcccaacctacccgaccggcaaagtgacacagcgacgtcgccgtcctttacttaaccctccacccacagcgattcccgcctcgtccaccagctgagctgagctgcgcccgtttttagcgagcgagacaggtccgcgcgcgcgtgcgccggcgaggattggattggaaccgtcgcccgtcggtcgtcgatggggatccacctggtggcgttcgtggcggcgaggggcttcctgcaggtgttccaggtgtcggcgccgctgctgtggccgctcaacctctggctgccgctcgcgcgccacctgcccgaggcctgcgccgccttctacgacgccctcgtctcgcacgccgccagcctgcgcgccaccgtccggcgccgccgacgcgacagcggggacgccctcgacgagtacctccgcagcgccatcatgctaaccctctccgactgagactcttgagccgagcgcgcggccaccggccagtgccaggcaacggccagtaccggaggcgggcgtgcacaggccggccgcccggcgcgcgctgtgatgtgagtagccatagctaggatctgtgttatctcgtttgtttgtttgtttttcccttggctcgctcttcttttgctgcttttcggtcggtgcctaatctagctatctactactagcactagctagctagcatctcaagactgagctccgtatggtcaatttgtaatgctcgtctgtgactgaactgaagaacaagaccattttaatcggcttcttgcttccagcaacaacatctactatgttctacagtctacacatgtaaacgtctgcctgtgcagtgtgtgtacgtaggagtgcctcaccatcactgtttcagattgttttctttcttgcaacgacgggatatatgccggtagtctctggagaaattatcaaaagatcacataaacggcattaatgccgtacccactcgcgattaaggagaaaacaacaagtatcaaggatgatcgtagtcgtagccgctgcgcaggcaggcgttggcgcgttttattcgtcgccaaccaagcgtgcgaatcgaaaccgtcggattagacactggtcaccactcattatcgtccactgcccgctgtctcctaccagtacgtgtactaccttcgtccaaggtaccggccgctggaggccagactcgcgatttctttccaacacgacgacgaccggtgcagatttcacgacttgttggccccatatattcatagctttcccgtactaccaattgcacctgattttgtcgaggatgcgaaccaaacacgagaaagaagacggtttggttctcgggaaaatcgacggcagtcgccactcgccagctgggtttggtccagacagcagttacgtgcggattgctcaacgaagctgttatcagagcatcttcaagagactcatcattttctctctattttacttcctatttactttttcataaaaattatattctatatgtagcatctctatttcaacaaattatctatctagtttggctagtcaggttgctagttaaatttagctagtgaggatgctaatttggagagtcggatagcttggtgaatcacatagctagtctgttgaaaaagtattttattgagtaactaaaagttggcttggcgagccattttgctagtctcttggagatgctcac

SEQ ID NO: 19129 - DNA, 1563 bp, Zea Mays
ctaaaaactagactacctctgcggagagggatagaaaaagatgcaaaacgaccttctcctgtcctgcatctgcatgcaataagcagccgctttagtgctgccgtgcagagagtacttccatgctgctcctggccgtgccggccgtgctggccgggttcctcaaggcgttccgcctcgccttcctgctttggccgctcaacctcgcgctcccgctggcgcgcgacctgccgcgggcctgcatcacggtccgggccatcgcgtccttctacgccgccgggctgcggggctacgtcgccggcgcccgccgcggggtgcagctgctgcatgcgcggagacagctgggccagcagcaacagcagctcgccgcctcctcctcctcttcttcctcctcctcggcgctcggcgtggcgtggacgcgtgaggatgccgatgtcgtcgcccatgccatgctcgccttcgacgacatctactgatgatctgcaaggggatcttcttcgaacggttatgttagcgtgccgttatatctcttggccgctcctttggttaattttagcgtgcgtaattaaggatcatagcttcgttcctccaaacatatcctgtttcctcagaacttttctagtcgcgtggccgctttttggtcctctctctcgctcgttttctgcatatatactctattctttttcgtctttgtacatacatttgaacttgtgcaattttttttgggtctgctgtggaacgtaacgtacggcaacccactactggcattctgcagaataaaaagattatcggagttttgtgttcgtgacttgatactgtgtgttgagctcatcgctaagctcgatcggtagtttaccagcaggccggcgggctcatcttcgccacgatcatagcaacaccgatttgctcgaccttttttttataaagaaattatctaacttcatctgaacatatacttcttatatggtggattcaataaacctaatttaatgctgtacaaataatgcaaccttgccttcgcaccggggaaagagaaacaagatcccaagcaacgatcccaagaattctcaagatatactgcgaaaagtatttaggcattaagcaccgtagtagtccagtttactcggagtgtgaacgtcgactgtttggaggaaaaaacgagagagaaaaaccattatatttgacggatgaatggagatcctctctttgatctcgaagttctcgtcgtatgacattttagtcggatcattatttgttgcaaaacatataccgctcacgcatgtttcgcacggaaattaagcataatgtaattaaaatcgagaccgaggttctgctaaaaagaagttgcagaaattcgtcttatgggatgggacgcgggggggtatggagatcagtccaatcgaaatctagatccaaaaacactatactctacgggtccttgccgctcgcaactggggaagggcgcaagcgcaaccctaccgccggcaaatcagtatcacgcaccagcgggtagcgacgttgtctcggcacgtcgccgtctcgtgcgagtgcgaacctaacccgtcg

SEQ ID NO: 19130 - DNA, 2063 bp, Zea Mays
cccagccatcatgttcgtcctgcgaatccagtccgtcgacttccccgacgccgccgtggcagcagtcgccgccgacgaagtcggcaccagcagcggcggcgttaccacctctcgtccgctctccagccaccctcccccctctaccaccacatcgtccatacttactctcgagctccccggcgcaaaccccgtcgcgcccagccgaagccctaggatcctccacacccgcggcgtcatccacctctaccactcgtcgtcctccacttccacctcctcctcctacgcctcggcggtcgcagccacctcttcctcctcatccgggccggccaccccgcagcccgcctccgactcgcacctgcccctatgtcgcggcacgcgcctcctggtgctcgccgttccgacgcgcgtttcgccggaggactttgttcgcttctgcggcccccacctcgagtgtgcagccgacattcgtttcatcagggatgatggagtggaggaccggtacagcgttctagtggagtttgaggaccagagtagcgctgaatggttctacgccgatctcaatggctggaggttctcaacctctgagagtgaggtgtgccatgttctgtttatagctgctgtgcagtatacaccttcctcagaggttgccacaactccaccggctggatccactgaacttccaatgtgtcctgtttgcattggtgaacttactgttttgtatttttttttgtattttggggcctctgcaatacaatttatagtcatatgtacgtgtcaccatggtgtcacatttgaattcaatttgtgatctccgttgaagagatttaggcacctctgttctatcctggccatagttttaactttaaataccattctgtttgatgcaacagcaacccttcatctattattttcacttttcatattttgttggttgtttaagttgtctgccttgtttctggtacacctaactattttctgccatcttaatatgttaatttgtcagaaagattggatcaggacatcagtgggattttggcaactacttgtgatcactctttccgttgctcatgtgtttcagtgtggaccaattcatcctgtccggtatgccagttttgtcagaagcagtctgaaaattctacatgttctgtttgccaaaccactggaaacctctggatatgtgtgatatgtggttttgttggatgcggacggtatcaagaaggacatgcgaaacagcactggaaagatactcagcattgctattcgctagatttggaaacacaacgtgtttgggactatgttggtgacagttttgtacatcggctgaatcaatccaagagtgacgcaaagcatgctaagttcaaatcaaaaagtaaatattctggggatgaatgtgtaaactgctcgtgcaatgatgactctgatatgggtggagctatgttcagcagcaaagctgaaacaattgtggacgagtacaatcgtctcctggcaagccaacttgaaactcagagagagtattatgagggcctgttgtctgaggctaaaagaaacaaggagcaccagatttctgaagctgctgataaagctatgaacgaaaaactcactaggagccaagacatgtggcgccagacactaagagatatagaggaaagggaaagagcacagttgaagtcgaaggacgaaatgattctcgatctggaagaacagataaaggatttcaaattttccatcaaactgcagaagtcaatagagaagaacgatggtgtcaagggtggtacgctggttccactccctacggtttcagattctggaggcaagggtaaaaggtcatcaagaacaagcaagaggaggaattagtatcctttgctgagtagcaattagtcttgactggaacagacgtatacgaaccttattggcatgtatttactagcctgttatgatgaactacagcgtgatgtttgatttgtcacgaaaattagtacgatcataaactgcttcgaagatttgaacttggatactacatgtggaaaatacaatctaaatcgaagtacagccagttatttcgt

SEQ ID NO: 19131 - DNA, 1907 bp, Zea Mays
cccagccatcatgttcgtcctgcgaatccagtccgtcgacttccccgacgccgccgtggcagcagtcgccgccgacgaagtcggcaccagcagcggcggcgttaccacctctcgtccgctctccagccaccctcccccctctaccaccacatcgtccatacttactctcgagctccccggcgcaaaccccgtcgcgcccagccgaagccctaggatcctccacacccgcggcgtcatccacctctaccactcgtcgtcctccacttccacctcctcctcctacgcctcggcggtcgcagccacctcttcctcctcatccgggccggccaccccgcagcccgcctccgactcgcacctgcccctatgtcgcggcacgcgcctcctggtgctcgccgttccgacgcgcgtttcgccggaggactttgttcgcttctgcggcccccacctcgagtgtgcagccgacattcgtttcatcagggatgatggagtggaggaccggtacagcgttctagtggagtttgaggaccagagtagcgctgaatggttctacgccgatctcaatggctggaggttctcaacctctgagagtgaggtgtgccatgttctgtttatagctgctgtgcagtatacaccttcctcagaggttgccacaactccaccggctggatccactgaacttccaatgtgtcctgtttgcattgaaagattggatcaggacatcagtgggattttggcaactacttgtgatcactctttccgttgctcatgtgtttcagtgtggaccaattcatcctgtccggtatgccagttttgtcagaagcagtctgaaaattctacatgttctgtttgccaaaccactggaaacctctggatatgtgtgatatgtggttttgttggatgcggacggtatcaagaaggacatgcgaaacagcactggaaagatactcagcattgctattcgctagatttggaaacacaacgtgtttgggactatgttggtgacagttttgtacatcggctgaatcaatccaagagtgacgcaaagcatgctaagttcaaatcaaaaagtaaatattctggggatgaatgtgtaaactgctcgtgcaatgatgactctgatatgggtggagctatgttcagcagcaaagctgaaacaattgtggacgagtacaatcgtctcctggcaagccaacttgaaactcagagagaggtgcagacgtgcagttcattcctgctaagttttctatgtcactattgaaagcaaagtttgtctctgatgtatagtattatgagggcctgttgtctgaggctaaaagaaacaaggagcaccagatttctgaagctgctgataaagctgtaagtgataagcttgaagagatgcaacttaagctcgagaatcttattgtggagaaaaagaaagttgcagatatgaacgaaaaactcactaggagccaagacatgtggcgccagacactaagagatatagaggaaagggaaagagcacagttgaagtcgaaggacgaaatgattctcgatctggaagaacagataaaggatttcaaattttccatcaaactgcagaagtcaatagagaagaacgatggtgtcaagggtggtacgctggttccactccctacggtttcagattctggaggcaagggtaaaaggtcatcaagaacaagcaagaggaggaattagtatcctttgctgagtagcaattagtcttgactggaacagacgtatacgaaccttattggcatgtatttactagcctgttatgatgaactacagcgtgatgtttgatttgtcacgaaaattagtacgatcataaactgcttcgaagatttgaacttggatactacatgtggaaaatacaatctaaatcgaagtacagccagttatttcgt

SEQ ID NO: 19132 - DNA, 2081 bp, Zea Mays
cccagccatcatgttcgtcctgcgaatccagtccgtcgacttccccgacgccgccgtggcagcagtcgccgccgacgaagtcggcaccagcagcggcggcgttaccacctctcgtccgctctccagccaccctcccccctctaccaccacatcgtccatacttactctcgagctccccggcgcaaaccccgtcgcgcccagccgaagccctaggatcctccacacccgcggcgtcatccacctctaccactcgtcgtcctccacttccacctcctcctcctacgcctcggcggtcgcagccacctcttcctcctcatccgggccggccaccccgcagcccgcctccgactcgcacctgcccctatgtcgcggcacgcgcctcctggtgctcgccgttccgacgcgcgtttcgccggaggactttgttcgcttctgcggcccccacctcgagtgtgcagccgacattcgtttcatcagggatgatggagtggaggaccggtacagcgttctagtggagtttgaggaccagagtagcgctgaatggttctacgccgatctcaatggctggaggttctcaacctctgagagtgaggtgtgccatgttctgtttatagctgctgtgcagtatacaccttcctcagaggttgccacaactccaccggctggatccactgaacttccaatgtgtcctgtttgcattggtgaacttactgttttgtatttttttttgtattttggggcctctgcaatacaatttatagtcatatgtacgtgtcaccatggtgtcacatttgaattcaatttgtgatctccgttgaagagatttaggcacctctgttctatcctggccatagttttaactttaaataccattctgtttgatgcaacagcaacccttcatctattattttcacttttcatattttgttggttgtttaagttgtctgccttgtttctggtacacctaactattttctgccatcttaatatgttaatttgtcagaaagattggatcaggacatcagtgggattttggcaactacttgtgatcactctttccgttgctcatgtgtttcagtgtggaccaattcatcctgtccggtatgccagttttgtcagaagcagtctgaaaattctacatgttctgtttgccaaaccactggaaacctctggatatgtgtgatatgtggttttgttggatgcggacggtatcaagaaggacatgcgaaacagcactggaaagatactcagcattgctattcgctagatttggaaacacaacgtgtttgggactatgttggtgacagttttgtacatcggctgaatcaatccaagagtgacgcaaagcatgctaagttcaaatcaaaaagtaaatattctggggatgaatgtgtaaactgctcgtgcaatgatgactctgatatgggtggagctatgttcagcagcaaagctgaaacatattatgagggcctgttgtctgaggctaaaagaaacaaggagcaccagatttctgaagctgctgataaagctgtaagtgataagcttgaagagatgcaacttaagctcgagaatcttattgtggagaaaaagaaagttgcagatatgaacgaaaaactcactaggagccaagacatgtggcgccagacactaagagatatagaggaaagggaaagagcacagttgaagtcgaaggacgaaatgattctcgatctggaagaacagataaaggatttcaaattttccatcaaactgcagaagtcaatagagaagaacgatggtgtcaagggtggtacgctggttccactccctacggtttcagattctggaggcaagggtaaaaggtcatcaagaacaagcaagaggaggaattagtatcctttgctgagtagcaattagtcttgactggaacagacgtatacgaaccttattggcatgtatttactagcctgttatgatgaactacagcgtgatgtttgatttgtcacgaaaattagtacgatcataaactgcttcgaagatttgaacttggatactacatgtggaaaatacaatctaaatcgaagtacagccagttatttcgt

SEQ ID NO: 19133 - DNA, 1888 bp, Zea Mays
cccagccatcatgttcgtcctgcgaatccagtccgtcgacttccccgacgccgccgtggcagcagtcgccgccgacgaagtcggcaccagcagcggcggcgttaccacctctcgtccgctctccagccaccctcccccctctaccaccacatcgtccatacttactctcgagctccccggcgcaaaccccgtcgcgcccagccgaagccctaggatcctccacacccgcggcgtcatccacctctaccactcgtcgtcctccacttccacctcctcctcctacgcctcggcggtcgcagccacctcttcctcctcatccgggccggccaccccgcagcccgcctccgactcgcacctgcccctatgtcgcggcacgcgcctcctggtgctcgccgttccgacgcgcgtttcgccggaggactttgttcgcttctgcggcccccacctcgagtgtgcagccgacattcgtttcatcagggatgatggagtggaggaccggtacagcgttctagtggagtttgaggaccagagtagcgctgaatggttctacgccgatctcaatggctggaggttctcaacctctgagagtgaggtgtgccatgttctgtttatagctgctgtgcagtatacaccttcctcagaggttgccacaactccaccggctggatccactgaacttccaatgtgtcctgtttgcattgaaagattggatcaggacatcagtgggattttggcaactacttgtgatcactctttccgttgctcatgtgtttcagtgtggaccaattcatcctgtccggtatgccagttttgtcagaagcagtctgaaaattctacatgttctgtttgccaaaccactggaaacctctggatatgtgtgatatgtggttttgttggatgcggacggtatcaagaaggacatgcgaaacagcactggaaagatactcagcattgctattcgctagatttggaaacacaacgtgtttgggactatgttggtgacagttttgtacatcggctgaatcaatccaagagtgacgcaaagcatgctaagttcaaatcaaaaagtaaatattctggggatgaatgtgtaaactgctcgtgcaatgatgactctgatatgggtggagctatgttcagcagcaaagctgaaacaattgtggacgagtacaatcgtctcctggcaagccaacttgaaactcagagagaggtgcagacgtgcagttcattcctgctaagttttctatgtcactattgaaagcaaatattatgagggcctgttgtctgaggctaaaagaaacaaggagcaccagatttctgaagctgctgataaagctgtaagtgataagcttgaagagatgcaacttaagctcgagaatcttattgtggagaaaaagaaagttgcagatatgaacgaaaaactcactaggagccaagacatgtggcgccagacactaagagatatagaggaaagggaaagagcacagttgaagtcgaaggacgaaatgattctcgatctggaagaacagataaaggatttcaaattttccatcaaactgcagaagtcaatagagaagaacgatggtgtcaagggtggtacgctggttccactccctacggtttcagattctggaggcaagggtaaaaggtcatcaagaacaagcaagaggaggaattagtatcctttgctgagtagcaattagtcttgactggaacagacgtatacgaaccttattggcatgtatttactagcctgttatgatgaactacagcgtgatgtttgatttgtcacgaaaattagtacgatcataaactgcttcgaagatttgaacttggatactacatgtggaaaatacaatctaaatcgaagtacagccagttatttcgt

SEQ ID NO: 19134 - DNA, 2135 bp, Zea Mays
cccagccatcatgttcgtcctgcgaatccagtccgtcgacttccccgacgccgccgtggcagcagtcgccgccgacgaagtcggcaccagcagcggcggcgttaccacctctcgtccgctctccagccaccctcccccctctaccaccacatcgtccatacttactctcgagctccccggcgcaaaccccgtcgcgcccagccgaagccctaggatcctccacacccgcggcgtcatccacctctaccactcgtcgtcctccacttccacctcctcctcctacgcctcggcggtcgcagccacctcttcctcctcatccgggccggccaccccgcagcccgcctccgactcgcacctgcccctatgtcgcggcacgcgcctcctggtgctcgccgttccgacgcgcgtttcgccggaggactttgttcgcttctgcggcccccacctcgagtgtgcagccgacattcgtttcatcagggatgatggagtggaggaccggtacagcgttctagtggagtttgaggaccagagtagcgctgaatggttctacgccgatctcaatggctggaggttctcaacctctgagagtgaggtgtgccatgttctgtttatagctgctgtgcagtatacaccttcctcagaggttgccacaactccaccggctggatccactgaacttccaatgtgtcctgtttgcattggtgaacttactgttttgtatttttttttgtattttggggcctctgcaatacaatttatagtcatatgtacgtgtcaccatggtgtcacatttgaattcaatttgtgatctccgttgaagagatttaggcacctctgttctatcctggccatagttttaactttaaataccattctgtttgatgcaacagcaacccttcatctattattttcacttttcatattttgttggttgtttaagttgtctgccttgtttctggtacacctaactattttctgccatcttaatatgttaatttgtcagaaagattggatcaggacatcagtgggattttggcaactacttgtgatcactctttccgttgctcatgtgtttcagtgtggaccaattcatcctgtccggtatgccagttttgtcagaagcagtctgaaaattctacatgttctgtttgccaaaccactggaaacctctggatatgtgtgatatgtggttttgttggatgcggacggtatcaagaaggacatgcgaaacagcactggaaagatactcagcattgctattcgctagatttggaaacacaacgtgtttgggactatgttggtgacagttttgtacatcggctgaatcaatccaagagtgacgcaaagcatgctaagttcaaatcaaaaagtaaatattctggggatgaatgtgtaaactgctcgtgcaatgatgactctgatatgggtggagctatgttcagcagcaaagctgaaacaattgtggacgagtacaatcgtctcctggcaagccaacttgaaactcagagagagtattatgagggcctgttgtctgaggctaaaagaaacaaggagcaccagatttctgaagctgctgataaagctgtaagtgataagcttgaagagatgcaacttaagctcgagaatcttattgtggagaaaaagaaagttgcagatatgaacgaaaaactcactaggagccaagacatgtggcgccagacactaagagatatagaggaaagggaaagagcacagttgaagtcgaaggacgaaatgattctcgatctggaagaacagataaaggatttcaaattttccatcaaactgcagaagtcaatagagaagaacgatggtgtcaagggtggtacgctggttccactccctacggtttcagattctggaggcaagggtaaaaggtcatcaagaacaagcaagaggaggaattagtatcctttgctgagtagcaattagtcttgactggaacagacgtatacgaaccttattggcatgtatttactagcctgttatgatgaactacagcgtgatgtttgatttgtcacgaaaattagtacgatcataaactgcttcgaagatttgaacttggatactacatgtggaaaatacaatctaaatcgaagtacagccagttatttcgt

SEQ ID NO: 19135 - DNA, 1919 bp, Zea Mays
atcatgttcgtcctgcgaatccagtccgtcgacttccccgacgccgccgtggcagcagtcgccgccgacgaagtcggcaccagcagcggcggcgttaccacctctcgtccgctctccagccaccctcccccctctaccaccacatcgtccatacttactctcgagctccccggcgcaaaccccgtcgcgcccagccgaagccctaggatcctccacacccgcggcgtcatccacctctaccactcgtcgtcctccacttccacctcctcctcctacgcctcggcggtcgcagccacctcttcctcctcatccgggccggccaccccgcagcccgcctccgactcgcacctgcccctatgtcgcggcacgcgcctcctggtgctcgccgttccgacgcgcgtttcgccggaggactttgttcgcttctgcggcccccacctcgagtgtgcagccgacattcgtttcatcagggatgatggagtggaggaccggtacagcgttctagtggagtttgaggaccagagtagcgctgaatggttctacgccgatctcaatggctggaggttctcaacctctgagagtgaggtgtgccatgttctgtttatagctgctgtgcagtatacaccttcctcagagaaagattggatcaggacatcagtgggattttggcaactacttgtgatcactctttccgttgctcatgtgtttcagtgtggaccaattcatcctgtccggtatgccagttttgtcagaagcagtctgaaaattctacatgttctgtttgccaaaccactggaaacctctggatatgtgtgatatgtggttttgttggatgcggacggtatcaagaaggacatgcgaaacagcactggaaagatactcagcattgctattcgctagatttggaaacacaacgtgtttgggactatgttggtgacagttttgtacatcggctgaatcaatccaagagtgacgcaaagcatgctaagttcaaatcaaaaagtaaatattctggggatgaatgtgtaaactgctcgtgcaatgatgactctgatatgggtggagctatgttcagcagcaaagctgaaacaattgtggacgagtacaatcgtctcctggcaagccaacttgaaactcagagagaggtgcagacgtgcagttcattcctgctaagttttctatgtcactattgaaagcaaagtttgtctctgatgtataggttgtatagactttgttagccagctgaaaatgtggttatctctgatgcatccatctgcctaatgttcatgcttgcagtattatgagggcctgttgtctgaggctaaaagaaacaaggagcaccagatttctgaagctgctgataaagctgtaagtgataagcttgaagagatgcaacttaagctcgagaatcttattgtggagaaaaagaaagttgcagatatgaacgaaaaactcactaggagccaagacatgtggcgccagacactaagagatatagaggaaagggaaagagcacagttgaagtcgaaggacgaaatgattctcgatctggaagaacagataaaggatttcaaattttccatcaaactgcagaagtcaatagagaagaacgatggtgtcaagggtggtacgctggttccactccctacggtttcagattctggaggcaagggtaaaaggtcatcaagaacaagcaagaggaggaattagtatcctttgctgagtagcaattagtcttgactggaacagacgtatacgaaccttattggcatgtatttactagcctgttatgatgaactacagcgtgatgtttgatttgtcacgaaaattagtacgatcataaactgcttcgaagatttgaacttggatactacatgtggaaaatacaatctaaatcgaagtacagccagttatttcgt

SEQ ID NO: 19136 - DNA, 1811 bp, Zea Mays
atgttcgtcctgcgaatccagtccgtcgacttccccgacgccgccgtggcagcagtcgccgccgacgaagtcggcaccagcagcggcggcgttaccacctctcgtccgctctccagccaccctcccccctctaccaccacatcgtccatacttactctcgagctccccggcgcaaaccccgtcgcgcccagccgaagccctaggatcctccacacccgcggcgtcatccacctctaccactcgtcgtcctccacttccacctcctcctcctacgcctcggcggtcgcagccacctcttcctcctcatccgggccggccaccccgcagcccgcctccgactcgcacctgcccctatgtcgcggcacgcgcctcctggtgctcgccgttccgacgcgcgtttcgccggaggactttgttcgcttctgcggcccccacctcgagtgtgcagccgacattcgtttcatcagggatgatggagtggaggaccggtacagcgttctagtggagtttgaggaccagagtagcgctgaatggttctacgccgatctcaatggctggaggttctcaacctctgagagtgaggtgtgccatgttctgtttatagctgctgtgcagtatacaccttcctcagagaaagattggatcaggacatcagtgggattttggcaactacttgtgatcactctttccgttgctcatgtgtttcagtgtggaccaattcatcctgtccggtatgccagttttgtcagaagcagtctgaaaattctacatgttctgtttgccaaaccactggaaacctctggatatgtgtgatatgtggttttgttggatgcggacggtatcaagaaggacatgcgaaacagcactggaaagatactcagcattgctattcgctagatttggaaacacaacgtgtttgggactatgttggtgacagttttgtacatcggctgaatcaatccaagagtgacgcaaagcatgctaagttcaaatcaaaaagtaaatattctggggatgaatgtgtaaactgctcgtgcaatgatgactctgatatgggtggagctatgttcagcagcaaagctgaaacaattgtggacgagtacaatcgtctcctggcaagccaacttgaaactcagagagaggtgcagacgtgcagttcattcctgctaagttttctatgtcactattgaaagcaaagtttgtctctgatgtataggttgtatagactttgttagccagctgaaaatgtggttatctctgatgcatccatctgcctaatgttcatgcttgcagtattatgagggcctgttgtctgaggctaaaagaaacaaggagcaccagatttctgaagctgctgataaagctatgaacgaaaaactcactaggagccaagacatgtggcgccagacactaagagatatagaggaaagggaaagagcacagttgaagtcgaaggacgaaatgattctcgatctggaagaacagaagtcaatagagaagaacgatggtgtcaagggtggtacgctggttccactccctacggtttcagattctggaggcaagggtaaaaggtcatcaagaacaagcaagaggaggaattagtatcctttgctgagtagcaattagtcttgactggaacagacgtatacgaaccttattggcatgtatttactagcctgttatgatgaactacagcgtgatgtttgatttgtcacgaaaattagtacgatcataaactgcttcgaagatttgaacttggatactacatgtggaaaatacaatctaaatcgaagtacagccagttatttcgt

SEQ ID NO: 19137 - DNA, 1980 bp, Zea Mays
atgttcgtcctgcgaatccagtccgtcgacttccccgacgccgccgtggcagcagtcgccgccgacgaagtcggcaccagcagcggcggcgttaccacctctcgtccgctctccagccaccctcccccctctaccaccacatcgtccatacttactctcgagctccccggcgcaaaccccgtcgcgcccagccgaagccctaggatcctccacacccgcggcgtcatccacctctaccactcgtcgtcctccacttccacctcctcctcctacgcctcggcggtcgcagccacctcttcctcctcatccgggccggccaccccgcagcccgcctccgactcgcacctgcccctatgtcgcggcacgcgcctcctggtgctcgccgttccgacgcgcgtttcgccggaggactttgttcgcttctgcggcccccacctcgagtgtgcagccgacattcgtttcatcagggatgatggagtggaggaccggtacagcgttctagtggagtttgaggaccagagtagcgctgaatggttctacgccgatctcaatggctggaggttgccacaactccaccggctggatccactgaacttccaatgtgtcctgtttgcattggtgaacttactgttttgtatttttttttgtattttggggcctctgcaatacaatttatagtcatatgtacgtgtcaccatggtgtcacatttgaattcaatttgtgatctccgttgaagagatttaggcacctctgttctatcctggccatagttttaactttaaataccattctgtttgatgcaacagcaacccttcatctattattttcacttttcatattttgttggttgtttaagttgtctgccttgtttctggtacacctaactattttctgccatcttaatatgttaatttgtcagaaagattggatcaggacatcagtgggattttggcaactacttgtgatcactctttccgttgctcatgtgtttcagtgtggaccaattcatcctgtccggtatgccagttttgtcagaagcagtctgaaaattctacatgttctgtttgccaaaccactggaaacctctggatatgtgtgatatgtggttttgttggatgcggacggtatcaagaaggacatgcgaaacagcactggaaagatactcagcattgctattcgctagatttggaaacacaacgtgtttgggactatgttggtgacagttttgtacatcggctgaatcaatccaagagtgacgcaaagcatgctaagttcaaatcaaaaagtaaatattctggggatgaatgtgtaaactgctcgtgcaatgatgactctgatatgggtggagctatgttcagcagcaaagctgaaacaattgtggacgagtacaatcgtctcctggcaagccaacttgaaactcagagagagtattatgagggcctgttgtctgaggctaaaagaaacaaggagcaccagatttctgaagctgctgataaagctatgaacgaaaaactcactaggagccaagacatgtggcgccagacactaagagatatagaggaaagggaaagagcacagttgaagtcgaaggacgaaatgattctcgatctggaagaacagataaaggatttcaaattttccatcaaactgcagaagtcaatagagaagaacgatggtgtcaagggtggtacgctggttccactccctacggtttcagattctggaggcaagggtaaaaggtcatcaagaacaagcaagaggaggaattagtatcctttgctgagtagcaattagtcttgactggaacagacgtatacgaaccttattggcatgtatttactagcctgttatgatgaactacagcgtgatgtttgatttgtcacgaaaattagtacgatcataaactgcttcgaagatttgaacttggatactacatgtggaaaatacaatctaaatcgaagtacagccagttatttcgt

SEQ ID NO: 19138 - DNA, 1777 bp, Zea Mays
cccgtcggcgaaccgatcacagtcggcgagggccgaggggaggccttttttttttttttgacgcggacgccagaaatcccgtcatgtcaggtcccgccgtcccggcgcagaggagagcgcgagccccgagaagcgcggagcggaattgcaagagcagacgagcagtgtagacaacgggacagccattgacttccccgcctaccctgccccgtcccgtccgtctccgtcccaatcggatccacccgcccgtcgtcgcctataaactctccctcccatccgcctctcgaggggcccggcttcctcccaactgccaccgatttgtttgttcggcttcggccccatctccagtcacccgttcccacttcattggtcgctgctccctccctccacggccgatcccgtgccggcgagagggaccatggcggggaaagggaaggaggtgtacgtggccgccatcgaccagggcaccacaagcacccggttcatcgtctacgaccgccacgccaaacccgtcgcatcgcaccagctcgagttcaagcaacactacccggaggcagggtgggttgagcatgatcctatggagattatagagactgttaaggtgtgtatgaaagaggcagttggcaaagccaaagatggtaaacacaatgtggttgctggtttgaaggccattgggatcacaaatcagagggaaaccactgttatgtggagtaaatccactggccgtccactgtataatgctattgtgtggatggatgctcgcacaagccctgtttgcaggagattggaaaatgagctgtcaggcggtaggacccacttcgtggagacatgcgggttgccaatcagtacctatttcagtgctctgaaattattatggttgatggaaaatgtggatgctgtcaaggatgcagtccggactggtgacgctttattcggcacgatcgacacctggttgatttggaaccttacaggaggtgttgctggtgggcagcatgtcacggattgctcaaatgcatctcgtacaatgcttatgaatctaaagacacttgactgggataagccaacacttgctgtgttaggagttcctgttgagattttgccaaagattatcagtaattcagagaaaatcggtgtggtcgccaaagagttcccgtttgcaggagttcccatctcggggtgtcttggagatcagcatgctgctatgcttgggcagctgtgccagaagggtgaagcgaaaagcacctatggaactggtgccttcatccttcttaacacaggggaagagcctacccaatcctcccatggccttcttagtaccattgcttacaagcttggtccagctgcacccactaactatgctcttgaagggtccattgcaattgcaggcgcagcagttcagtggctgagggacagccttggaatcattcagtcagcagctgagatcgaaaagttggctgaaacagtgccagattcaggtggagtgtactttgtgccagcatttaatgggttgtttgcaccatggtggagagatgatgcgaggggaatttgcatcggaatcacaaggttcacaaataaggggcacattgctcgagcagtgctcgagagtatgtgttttcaggtgaatgatgtcctcagctccatgcacaaggatgctggagaggcaggagaagtaaagagcgcagaaggagagttcttattgcgtgttgatggtggtgctactgttaataatcttctaatgcagatccaggccatgctttcagttagtgcttttggctcg

SEQ ID NO: 19139 - DNA, 2247 bp, Zea Mays
cccgtcggcgaaccgatcacagtcggcgagggccgaggggaggccttttttttttttttgacgcggacgccagaaatcccgtcatgtcaggtcccgccgtcccggcgcagaggagagcgcgagccccgagaagcgcggagcggaattgcaagagcagacgagcagtgtagacaacgggacagccattgacttccccgcctaccctgccccgtcccgtccgtctccgtcccaatcggatccacccgcccgtcgtcgcctataaactctccctcccatccgcctctcgaggggcccggcttcctcccaactgccaccgatttgtttgttcggcttcggccccatctccagtcacccgttcccacttcattggtcgctgctccctccctccacggccgatcccgtgccggcgagagggaccatggcggggaaagggaaggaggtgtacgtggccgccatcgaccagggcaccacaagcacccggttcatcgtctacgaccgccacgccaaacccgtcgcatcgcaccagctcgagttcaagcaacactacccggaggcaggtatttccatttatatgtggatatgaagctagatatctactataccttagtcacgctgtttcatgctatttgctcgagtcactgtagctggtgggttgagcatgatcctatggagattatagagactgttaaggtgtgtatgaaagaggcagttggcaaagccaaagatggtaaacacaatgtggttgctggtttgaaggccattgggatcacaaatcagagggaaaccactgttatgtggagtaaatccactggccgtccactgtataatgctattgtgtggatggatgctcgcacaagccctgtttgcaggagattggaaaatgagctgtcaggcggtaggacccacttcgtggagacatgcgggttgccaatcagtacctatttcagtgctctgaaattattatggttgatggaaaatgtggatgctgtcaaggatgcagtccggactggtgacgctttattcggcacgatcgacacctggttgatttggaaccttacaggaggtgttgctggtgggcagcatgtcacggattgctcaaatgcatctcgtacaatgcttatgaatctaaagacacttgactgggataagccaacacttgctgtgttaggagttcctgttgagattttgccaaagattatcagtaattcagagaaaatcggtgtggtcgccaaagagttcccgtttgcaggagttcccatctcggggtgtcttggagatcagcatgctgctatgcttgggcagctgtgccagaagggtgaagcgaaaagcacctatggaactggtgccttcatccttcttaacacaggggaagagcctacccaatcctcccatggccttcttagtaccattgcttacaagcttggtccagctgcacccactaactatgctcttgaagggtccattgcaattgcaggcgcagcagttcagtggctgagggacagccttggaatcattcagtcagcagctgagatcgaaaagttggctgaaacagtgccagattcaggtggagtgtactttgtgccagcatttaatgggttgtttgcaccatggtggagagatgatgcgaggggaatttgcatcggaatcacaaggttcacaaataaggggcacattgctcgagcagtgctcgagagtatgtgttttcaggtgaatgatgtcctcagctccatgcacaaggatgctggagaggcaggagaagtaaagagcgcagaaggagagttcttattgcgtgttgatggtggtgctactgttaataatcttctaatgcagatccaggctgatttattaggcagccctgttgtcagaccagctgacatagagaccacagccctcggagctgcatatgctgctgggttggctgcaggagtttggaccaaggagaaggtttttgcaggtttgcacaaggagaacacgacagtcttccgcccgaaactggatgaggcgcacaggaaaaagagggcggattcatggtacaaggcggtttcaagatcattcgatctggctgatctttctctgtaaatttatcctgccagcgctcctctatctggttttggaagctgcaaatgaataaattggtcttcgctgggactaatcttaactgcttgttatttatatataacatcacgatgtttataaaagtgagtacatgaatatcctcagattttcagcaggaagtgtttttctaga

SEQ ID NO: 19140 - DNA, 3834 bp, Zea Mays
cgcagtgctagtgtgctacgcgcagtgagtgaaaccaataccgtcacggcgtcactcatccgtccatccccgcgaccgcaccgccaccgccatcggaccagagtaccagaccaccacctccccccgcaccacgctgccacactccaccggccgcacccccaccccgacccggccaccccgtcacccgccgccgccgtccccaccacagcacaccccggtccgtcccctcccctccccgatgtccaccccgtccgtgccaccgccctgcccgcacctcgccgcgcaccgcctgtcctcacgcccgctgcgcttcctccgccgctgcctgcgcgtgcgcccgctcggccgccccgagatccggcgggacccgcgcgagctcccgcgctgctcgccctgctccgccgcgtccccgtcccccacctcccgcctctacgcctgcctctcctgcgccgccgtcttctgcccctcccacgccgccacgcacgcctccgcctccgcggggcccggccaccagatcgccgtcgacgtcgaccgcgccgagctcttctgcgccgcctgcggggaccaggtctacgatcccgacttcgaccacgccgtcttcctcgcccagtcctcctcgcttctcccctccacctccacctcctccgcctccgcctccgcctccccggccctccgcaagcgccggcgcgtcgattaccgcgcgtgggcgccagatccggccgagttcgcgctcatgacctccgcggaccccaccacctccgcctcagcctccgcgccggcggggctgcgggggctcaacaacctcggcaacacctgcttcatgaactccgtgctccaggcgctcctccacgcgcccccgctccggaactacttcctcggtgatcgccacaaccggttcctctgcccgcgccgcacgcccgtcaggcaccgcgcctcagacgccgacagggtcgcgtgcctcgcgtgtgatctcgacgagatctactccgcggccttctccggggaccgcacgccatacagccccgccaagtttctatataggtctggactctggatctcgcgcgctaatcgcaatggttgatgccatttcgggcctatagcagcatgccttactcctttctgctggatccatagcgtattgggaaagcaaagttaatatttatggtagccaaaatgggttcttgatgagttgtaacgtgggaaagagaatcttgcctgagatgttgggttgtatttcttgcttgcaaagatacattacagtgctatttggattacatgccttgtatttcaactagaccatgatcgtgcagaattgcaaatggaactacttaatacaaaatggaatgaacagagaatgtgcaactgaagagggaggcatttttagcattatatgttattgcaatgctagtagaaaagggagcacagtgacacgtctcaatacatggcaattgattaatgacatggcatggcatttttagcgttatattttattgtagtgctagtatgaaaaagggggaacagtgacaacagccacacatctcaatacatgacaattgtttgctgacatggcatcctatcctatatcaaacatagaaccttaagctcccaagttaacctgttcggcctaactgcttaagtcatgtggcatacttagcagtcactaaactgtctaaaaacatttaaagtgataaaatgcacgaaaatctgcaaattcagtgcaggtaacgcttggccaagtgaatttgtatgtattctgggggacttggtctatgttggataaattttattacagttcccatgtttaaggatatatggaccatatgcattctatgcttaggttatttttttctggtcttctatgagactgagcatagaaaacaatatgacatctatttattctacctcctgaatagaagtatttaaatttcttctgattattgagtatcattgtgatttttttagttggtggcagcatgcatcaaaccttgcaagctacgagcaacaggatgctcatgaattctttatttccatccttgatcatatccatgaaaatataaaggatgatcaacaaaagtcatatgcccaaggccatggggattgttgcattgctcacagagtgttttctggtatcctgaggtcagatgtcacctgcacaagctgtgggttcacatccacaacttttgagccctgtatggacatttccttagacatggatgcaggagataacagttcttttggtgttgcaaacacaaagtcgcatgtgcgcaatggagagcgaggcttggctggcgtgaattccaaggtattaactctaatgaggtgtttggagaggtttacaaggtctgagagacttgatgccgagcagaagttcttctgtgaacactgcaacgagaggcaagagtccctgaagcaaatgtccattcgcaggcttccattagtttcctgctttcacataaagagatttgagcattcgtcagtcaaaaaggtgtcgaggaaagtcgatcactgtttgcagtttcccttttcccttgacatggcaccttacctgtcgtcatctattctcaggagtagatatggtaaccgtatatttcctgcagaagctagtgacgcggacgcagtttcagaagtgtcgtcagaattcgaaatatttgcggtgatcacacatagcggtaagctagaagctggccattatgtgacatatctgaggctaaacaatcattggtacaaatgtgatgatgcctgggtaaccagagttgaggagcataccgtcaggacttctcaggcatacatgctcttctacgtgcagaagacgttttactacaaagcttgtgaaagagcagccacagtctgatctgaagcaaacattgatgacacaactccagaccaccataaatttatttgtcaccgaatcagatacacatgtagtagtagttcgtcaatcgagagggaaaacgggcgccgtatccacagcacagccatggcctgtcaaatcttttcgttctccactgacctgtagttccaatcagagagaaagctttttcggcagatttttttctttacagacagacatctgcccaagcgaagatgcttgaatttatgcattgagttatattgtgctggctaatggatatgttgtggcgatttccttaatactcaggtgcttcaccgtttggtacctgtggtggtgactggcgaggatgctcttaaccagttgtgcttgtgttcaatataaggtggagcaaggaagaggagtataaaacgtggaaagaaaacataaagaaagggaaccgatttttttttaatgtgttcctgtcagcaattgcattcttgttctactgaaggtagagggtttcttgctgataccgattgttgtgtatttgctcccttgcctttttttcgcttggtctttgtcttaatgaatgagctgaaatctatagcagttgtcatagtgcccactacccaccaaaatgtagggcattacagtgctgagatgagcaggaacatgcagacatcatgcgggtcgcattttgccatctcttgtcgcttgaaaatctgattggagctctggtatgagttggtgtgatgagtgtgaggctaatcgtagattccgacccatgtccatgtgtggtatactggtataacaatctgaggtcagtgccctgtgccagacggcatcaagctagtagtactgcattattagtgggcgctcacaggtttagttcgatcggagatagtatcctgctattacgtgatggttatttgccttaatcagctacgcactcacctatataagtgcattcatgtaaccagacgtttagagccatctgatcggtg

SEQ ID NO: 19141 - DNA, 1964 bp, Zea Mays
cccgcaccgatcgcgcgcacctgcttcccacccaaactcgccgtccgcctccgccaccacccccgcccgcgcccatagcaagctcgccttccacgcgcgcggccgcgccagcgcaccacgcctcgcttcgttttcccgttgcttgacgctgaatccattccaccaccacccaggcacggccaggccagcgccagcgcgtcgtccccggcccccgctccgcctctccggtcgcgcccgcctcggggcgaccaccaccaaaatagaaacttccgtgtgtaggtgacccccggctttacccccgcccgaccgcccccaccccaccccgcccacgcctccctccctcccgccgggacaaaaccgccgctcctcctcctccgcccctccccgctctttctgtgaggcgggaagcgaggcggatgccgaggcgacggggctcgcgcaccgcacgcgtgtgcccgccgcccgggggccaggcgaggtggtgaggtgaggccgagcgcggttttaaattgttcacccggccgcccttctcgccgtagttttcagtggtacaagcaagggaggaacgaacgtgagggctgcctgcctgcctgcggacatgggctccagcctcaagtaccgatctggcctgtgcctcatcgtcgccgtcgtgctgatctgggtcatctctgccgaggtcacgcagtatttatcgaatgcagcgcttgcaagaactagtgttgccagtaccacagtgctgtcttcaacttcaggactcttcactcttttcattggtgttttacttggccaagactccataaatgctgcgaaaattattgctgttttcattagcatggctggcgttgtaatgacaactgtgggccagacttgggcatctgatgaatcagaagcaggcaaatctggttttacacagaggactcttctaggtgatatgtttggtcttatgtcagcaatcgcctatggtctatttactgtgctgcttaaaaaattttgtggagaggaaggagaaaaggttgatgtccaaaaactgtttggttatcttgggctttttacccttgttgctctatggtggattgtctggccattaaccgcactaggcgttgagccaaagttttcaatgccccactcagctaaagtggatgaagtggtggtggcaaatagcctaatcggaagtgtattatcagactacttctgggctctttctgttgtttggactactcccttggtggccactctaggcatgtctctcacaattccaatagcaatggttgctgatatgatcattcacggccgtcactattcagcagtatatattcttggttctgtccaggtacgagtatccagcagcccagtatttttttatcttaaattacatcagatatctaccatcttacaacagctaccgctaccagtttggatgctttgaaggttctgttctgacagagccttgtgttgctaactcgtcatttgcattaccatgtttcaactatgtgttcctcttcaccgttctagcgcactgctgcatacacacatctgacattctgtttaaccctgtgagctttgttcctttgcaggtattttcaggctttgttatcgcgaaccttgcagatcgcttttctcgttctctagggctatcatagtctcataaaacagaacaggcccttattagagcgtgcatcaggaagctccaaggtcgggttggttaggccaatacttcagaaaacctggatcgggagataccaggaattattttccctttgcttctttaaacatagtggaggtgaattttgccgtggtgaatagtgaaaggcagcagatgaagaagaaaacatatgttatagcaaccctttgcaactgtaaattctcttactacaaattgcgcgacagtgtagactgcggccgttctcggcccatgtcaacaggcttgctcgatttcaaatttgcaatgtccttttatccgtgtt

SEQ ID NO: 19142 - DNA, 401 bp, Zea Mays
aaagatttgtttaagtaaacttgtgcatccatcggatagatacagtgaagctacaccagattcataagtacctgattaaaatctccagtatgataaagcaccacagcaagaaggctgtatgcattagctgccagtcgatggtatggaccacaaacagctataattttggacagtgccttcagtaagggggaaaacacaaacttatttagtagataaataaataattttgctaaacaaaatgtggacataaatttaacacaacagttaataatgaaaaagacacaaaagttgaccatatgcacctttgttccatagctcacagcatcatctaattttcctttatccaatgccatctttgatgattcaagcaagtttcgaccatcaatagatgagtagaccac

SEQ ID NO: 19143 - DNA, 175 bp, Zea Mays
ctgcaaagccctctcagaatgatacatttccgtaaatgtgcaaattcatctttcagtttccagcagaatctttttgaaaggaagctctctacccatttcagtcgcaaattattgtcaatatgggcatccgtgtcagcaccattttcaagtctgggagatcctagtaatatgttta

SEQ ID NO: 19144 - DNA, 2730 bp, Zea Mays
gccacacacagtacgtacaagcctcatcagctcgctagcatagcagcaaccagcaatggactccaccaagttatccgcgctgctggcgctcgccatgctcgcgctctcctcgtcgccgctcgctctcgcgtgggagaaggcggagccggaatgccactcgtgcgagtccggctcgccgccctcgaccggcgtccccctgcccccaatcagcataccgtcagtcccactgccccctgtcagtataccgtcggtccccatcccaccggtcacccagctgcccccagtcgtcggactgccgccggtgacccttcctcccattccgatcatcggaggaagcccgccgaagaagggccaccggaaggcgtgcccgccgcctccgtctcccccgacgcccacgcccacgcccacgccgtcctcggacaagtgccccatcgacgcgctgaagctcggcgcgtgcgtggacattctcgggaacgaggtgcacatcggcgacgccaacgtcaagtgctgcccgctcgtgaagggcatcgccgggctctccgcggcggcgtgcctgtgcaccgccatcaaggccaaggtgctggacatttccgtctacgtgcccatcgcgctggaggtgctcgtcaactgcggctgcgaggtcccgccaggctacaaatgcacttaaacgactccattccatttcatcccatctcaccatgcgtgcacagcgaggtctccttttgccctcccgaatgcaaagtttgaaaggctcgtcgacggatttgggtctccttttgcccacccgaatgcaaagtttcgaaggctcgtcgacggattgggctcttcggctactgcattcttccttatttcattcttccttagtgtcttctcaaatgtcactttgtactttgtgtgaacctgtatcaaactttttttagttggattcgattattgtttgaagtgttaaattaaggcgcattgtcatcatcatttattcaaatcttgtgcgaaaggatctctagctaagttgttaggtgcatgtggtctaagtagcacttcttaggtcttagttgtttttatgggttgggaattcggatgcggctgtatatgaatggagcgaaaccggggcgcttgatgattcaattcagaacaccgctacaagcgatgtagttctgaactttcgtatccagcaaacgtgtcagagcccccacgtaactgtgtatgcagcgcaagagacttcttcgacacaacgttaagaaatttctaagcatcatatatataatccataagggtagcattatttatgtacaaatcgattgaaaccacctgtattttatccttctaaagtcggagatacctatcgagcactgtagatctttgcaatctaagaactgctaggagcagcctccagtaagctcaagtactctgcgatagcctgtccttcgttactgacatcaatatcgtagtcatccaaggcatcccccttcagttcattggcaagctcactttccatcgacgcatccctggctggaactggatgagagtttgcgtcttcatcttcatcatctacagctacttcaccaatcataatttcatcttggtttgcaatttcttcattgttcattggaggagcatctccatctgcagcatgtggaggagcacctccatcggcagcatgtggaggggcatctccatcagcaggatgtggaggagcattatcaagagtctgagaattgttgattgctggagcagccctggcaacagctgccctggaacgcgaggatcctgcaccaaaccctggcaagaaagaagataacagataagggagtgggaattcattactccaattgatttgaggccacaaagtttttggagatctgtgttgacccatacataccacaagatgcccggcttctccttgcctgaattttactctgcgattaaacataatgtgttagcaactgtggagtagcttgttacgagtaaaagaacaacgggggtgcagagaaggcatacttgtaggatacagttttgttcaggatttgtcaaaaggtctaatgctttgtcagcatcattttcatttatgcgcagtgcttctgcagcaagatacttctcaaatcttgaaggttgaaacaatcggtcagtaatagacaggaaatacaggcagtacaaatcatcgcccatgtaaagaaaaatagcatcaccatgcacaaacaactaaaacgtattctacctttgtatctgacatattagtcaatttctagaaggtcaatttctaaaatattagtcaactaaaacatattagtcaatttctaaaataaaatattactgcctttcatcatttggtcacaaacatttggtcaatagcattcctctgtaacaactacaatttgactcattgtttgcaatcagccaaatgttgaataaaattaagcccatacacaatatggtggaagagctggcattgttttgggtggatgtgtcaagcattgtggtggccttttcaagaacttctattttgttatgtcagatttactagctgaatcagcgctcatgtgcggccattatacatcctgtttttccaggtttaggccccatttcatctggcagtttactaaaactacagcacatgaaaatacaatttaaaataactcttgagattaatatgaaaagacccacattcttacccgatagcagtcaagcctttcagcttctgcatgtcaactgccttgttcatgggagttttac

SEQ ID NO: 19145 - DNA, 899 bp, Zea Mays
ctcaccctctaagcgaacctcgtcgccctacacccggtgcagtttggtcaaaccacgcagtatcctcgcgtcacagctctgcccgttcttatccacaatttcttcgtcccgattcctccgccgacgcccacgctgcggacaaatcagccgccgtcgccctctcgggatcgctggctcccctgcctctgtgcacactcctcaccaggacccaagccagctccgtcgggcgccgtggggaactgctgggaggggcggtcgaccggcggtgcctctgcttcgggttctccgtaccggcgtcggaggggatcggatggcataaggtgtgtcaaattactgtttcggtgcctataatcttgcaatctgcctactagttgttgctcctgaatgccactggtgtggtacctggaaaggtgataaaatatgtagtagcagcaagaaagcaaggtactgttctgagaaacatcaggcactgcattggcgtactggtcataaaaatgattgcctccagataataagttctgctgcttcaaatttagttctgccagctgtaggaataggtgattatcttttttatatggctgacaatgatagtattctcagtatcaaagaatatagtttttgaattgtgttttctgctaggtacgacatctattaatttttttgtttgttatatatgttttttctccacaaacattctttagatttgatagcctttttaacatctagattctaagaatgtgcttaatctgtattacgtgcacaaatagttcaagaaaaaatagcaaaaaggagataaatgtcccagaagaaaatagatgaattaacagggctattagaaccttttgtcaaagaagttttggtccctgtattcaatgtaataacgacttacattattttag

SEQ ID NO: 19146 - DNA, 820 bp, Zea Mays
ctcaccctctaagcgaacctcgtcgccctacacccggtgcagtttggtcaaaccacgcagtatcctcgcgtcacagctctgcccgttcttatccacaatttcttcgtcccgattcctccgccgacgcccacgctgcggacaaatcagccgccgtcgccctctcgggatcgctggctcccctgcctctgtgcacactcctcaccaggacccaagccagctccgtcgggcgccgtggggaactgctgggaggggcggtcgaccggcggtgcctctgcttcgggttctccgtaccggcgtcggaggggatcggatggcataagctcctgaatgccactggtgtggtacctggaaaggtgataaaatatgtagtagcagcaagaaagcaaggcactgcattggcgtactggtcataaaaatgattgcctccagataataagttctgctgcttcaaatttagttctgccagctgtaggaataggtgattatcttttttatatggctgacaatgatagtattctcagtatcaaagaatatagtttttgaattgtgttttctgctaggtacgacatctattaatttttttgtttgttatatatgttttttctccacaaacattctttagatttgatagcctttttaacatctagattctaagaatgtgcttaatctgtattacgtgcacaaatagttcaagaaaaaatagcaaaaaggagataaatgtcccagaagaaaatagatgaattaacagggctattagaaccttttgtcaaagaagttttggtccctgtattcaatgtaataacgacttacattattttag

SEQ ID NO: 19147 - DNA, 782 bp, Zea Mays
ctcaccctctaagcgaacctcgtcgccctacacccggtgcagtttggtcaaaccacgcagtatcctcgcgtcacagctctgcccgttcttatccacaatttcttcgtcccgattcctccgccgacgcccacgctgcggacaaatcagccgccgtcgccctctcgggatcgctggctcccctgcctctgtgcacactcctcaccaggacccaagccagctccgtcgggcgccgtggggaactgctgggaggggcggtcgaccggcggtgcctctgcttcgggttctccgtaccggcgtcggaggggatcggatggcataagctcctgaatgccactggtgtggtacctggaaaggtgataaaatatgtagtagcagcaagaaagcaaggtactgttctgagaaacatcagattgatggctcttgattgttgtttctcaggcactgcattggcgtactggtcataaaaatgattgcctccagataataagttctgctgcttcaaatttagttctgccagctgtaggaatagggtttgtccgctggtttgctaaggcaagcaacgtacatagactgctcgtcttggatccttcaggtttgtatagtgtgttgctttatgatcaattgaccattcattaccttcgcctgatggcccttattaacaacaataagaactaagaatgtgcgctaagatttttcttgctatctgaagtggtaaatttgttaatcctaattctttgttgaatgggtatgggggttttgtgggtgctggatggtgttgtggg

SEQ ID NO: 19148 - DNA, 731 bp, Zea Mays
ctcaccctctaagcgaacctcgtcgccctacacccggtgcagtttggtcaaaccacgcagtatcctcgcgtcacagctctgcccgttcttatccacaatttcttcgtcccgattcctccgccgacgcccacgctgcggacaaatcagccgccgtcgccctctcgggatcgctggctcccctgcctctgtgcacactcctcaccaggacccaagccagctccgtcgggcgccgtggggaactgctgggaggggcggtcgaccggcggtgcctctgcttcgggttctccgtaccggcgtcggaggggatcggatggcataagctcctgaatgccactggtgtggtacctggaaaggtgataaaatatgtagtagcagcaagaaagcaaggcactgcattggcgtactggtcataaaaatgattgcctccagataataagttctgctgcttcaaatttagttctgccagctgtaggaatagggtttgtccgctggtttgctaaggcaagcaacgtacatagactgctcgtcttggatccttcaggtttgtatagtgtgttgctttatgatcaattgaccattcattaccttcgcctgatggcccttattaacaacaataagaactaagaatgtgcgctaagatttttcttgctatctgaagtggtaaatttgttaatcctaattctttgttgaatgggtatgggggttttgtgggtgctggatggtgttgtggg

SEQ ID NO: 19149 - DNA, 806 bp, Zea Mays
ctcaccctctaagcgaacctcgtcgccctacacccggtgcagtttggtcaaaccacgcagtatcctcgcgtcacagctctgcccgttcttatccacaatttcttcgtcccgattcctccgccgacgcccacgctgcggacaaatcagccgccgtcgccctctcgggatcgctggctcccctgcctctgtgcacactcctcaccaggacccaagccagctccgtcgggcgccgtggggaactgctgggaggggcggtcgaccggcggtgcctctgcttcgggttctccgtaccggcgtcggaggggatcggatggcataagctcctgaatgccactggtgtggtacctggaaaggtgataaaatatgtagtagcagcaagaaagcaaggtactgttctgagaaacatcaggcactgcattggcgtactggtcataaaaatgattgcctccagataataagttctgctgcttcaaatttagttctgccagctgtaggaataggaatcataaaagcatatggaggaactatgtataggctacaaagaagcataagaagcatttttatagcagaagccaagtgttctgatgattttgttttttcaattgtgttttctgttattggttcagcatgcgcatatattgacatgatttatggcatggcatctgtcatctttgttatatttatgacatcattcttgattgatgtgtgcgacatgaatgatggatctttttaacatcctcaccatcattgtgtcgctcattatcgtgttttgtatatcatttatgggttcacggatatgaaatgac

SEQ ID NO: 19150 - DNA, 969 bp, Zea Mays
ccaagacatctccatacctcgatagggataccatcagggcccatcgcctttcctacaccatttaaaaaaagtgttgctttagatatatgaaagcaacaataatctagtaatagaacaattcaatctacaaatataacaacataatcagcatagatgttatattacaatgacgctgcttgaagagagctgagcagatatatatacatgtattgaagcaacaaaatgctggtcaactactaccttgttttctcatttgggaacatttctgtttatttatgtttggagtttctagggacctatggcagatgcaaattttattcaagagaagtttattcggaagtatgtaaacttagcataaatatacgacaattgttgtcttaaaactttcaggtgtgtcaaattactgtttcggtgcctataatcttgcaatctgcctactagttgttgctcctgaatgccactggtgtggtacctggaaaggtgataaaatatgtagtagcagcaagaaagcaaggtactgttctgagaaacatcaggcactgcattggcgtactggtcataaaaatgattgcctccagataataagttctgctgcttcaaatttagttctgccagctgtaggaataggtgattatcttttttatatggctgacaatgatagtattctcagtatcaaagaatatagtttttgaattgtgttttctgctaggtacgacatctattaatttttttgtttgttatatatgttttttctccacaaacattctttagatttgatagcctttttaacatctagattctaagaatgtgcttaatctgtattacgtgcacaaatagttcaagaaaaaatagcaaaaaggagataaatgtcccagaagaaaatagatgaattaacagggctattagaaccttttgtcaaagaagttttggtccctgtattcaatgtaataacgacttacattattttag

SEQ ID NO: 19151 - DNA, 344 bp, Zea Mays
atcaaagaatatagtttttgaattgtgttttctgctaggaatcataaaagcatatggaggaactatgtataggctacaaagaagcataagaagcatttttatagcagaagccaagtgttctgatgattttgttttttcaattgtgttttctgttattggttcagcatgcgcatatattgacatgatttatggcatggcatctgtcatctttgttatatttatgacatcattcttgattgatgtgtgcgacatgaatgatggatctttttaacatcctcaccatcattgtgtcgctcattatcgtgttttgtatatcatttatgggttcacggatatgaaatgac

SEQ ID NO: 19152 - DNA, 845 bp, Zea Mays
ctgacctcgtcgggcgtgaccatggcagggttaggttggtgcacggttctgccataccccctcctccgcgattcgcgtctctgccgccatgcccgctctccatcgaaggaaggcgccattccagggattatcgcaccattctcgccctcgtccgctctccggcaccattctagcattccagggattaccgcctccccctcgatccgcggcactctcccccgtccttctcgagtatggcaccgccagtccgcctcgcgacccctgcctcctcccccctcgctctcttgttcccccagccaccgcgaggaactctgaaccccattccccaccaccgtaccaatccccgcatctacgccgctccccccgccccctgtcaactacgccaggtcctcgccatcgatgtcgcccaagcgcgtcgtcctcgcccccgacctcggcgtgcgggattcggtaccgaaagaagagacaggaggagaatacaagccctcagcctcggtgttccccattcaccgctcaggcgcagtccatcgctccttcgacgagggctccagcgactacggctccatcgctcctcatggtgatgccgccgagggttgtcctacgaagccgtccgcgatgccgagggttgtcctacgaagcagacacgccctgcggctgcccacacaaagggtttggttcttgttcctccaagctactgcgcgtgtgctttcacattcggcacagtgggagccctcatggcagcagacgacgtgtgactccagactcggcgtagacgacccacaaggagctgctaatggcggaggctgagcgccgccatggatctgacacggtgtggaatgggagga

SEQ ID NO: 19153 - DNA, 823 bp, Zea Mays
ctgacctcgtcgggcgtgaccatggcagggttaggttggtgcacggttctgccataccccctcctccgcgattcgcgtctctgccgccatgcccgctctccatcgaaggaaggcgccattccagggattatcgcaccattctcgccctcgtccgctctccggcaccattctagcattccagggattaccgcctccccctcgatccgcggcactctcccccgtccttctcgagtatggcaccgccagtccgcctcgcgacccctgcctcctcccccctcgctctcttgttcccccagccaccgcgaggaactctgaaccccattccccaccaccgtaccaatccccgcatctacgccgctccccccgccccctgtcaactacgccaggtcctcgccatcgatgtcgcccaagcgcgtcgtcctcgcccccgacctcggcgtgcgggattcggtaccgaaagaagagacaggaggagaatacaagccctcagcctcggtgttccccattcaccgctcaggcgcagtccatcgctccttcgacgagggctccagcgactacggctccatcgctcctcatggtgatgccgccgagggttgtcctacgaagccgtccgcgatgccgagggttgtcctacgaagcagacacgccctgcggctgcccacacaaaggctactgcgcgtgtgctttcacattcggcacagtgggagccctcatggcagcagacgacgtgtgactccagactcggcgtagacgacccacaaggagctgctaatggcggaggctgagcgccgccatggatctgacacggtgtggaatgggagga

SEQ ID NO: 19154 - DNA, 4729 bp, Zea Mays
ctgaccaccgcagtgcggaacacaaaagctcaccagtcacccctgcggcgccacccccacaaacctcgcctgcacgtcaccaataccgaggctatccccggcaggcgcttccggattcccccctttcttcctttgcagcctgccaggcaccgctggccaagagacaagcaaaaacggcgacaccttcaccaatgccgcagggcgccgctgctgcggcctgagagtgcgagccccgctaccgaggtccgggtcaggcggggggtgtggggggggggggggggggggggagcgcattgcgatggcggagtcggcggcggctgacgggaagtcggacaaggtggcgaacggaggagggggaggcggcgatgcagcgggggaggggaagaagcggggggaccaggccgtggcgttccacgagctcttctcgtttgccgacaagtgggacctgatgctcatggcggcgggcagcatgggtgcactggcgcacggcgccgccatgccgttcttcttcctgctcttcggggacctcatcaacggcttcggcaagaatcagaccgacctccgcaccatgaccgatgaggtcgcaaagtacgcgctctacttcgtctacctggggctggtggtctgcgtctcctcctacgcagagatcgcgtgctggatgtacaccggggagcggcaggtgatcgcgctccggaaggcttacctggacgccgtgctgcggcaggacgtgggtttcttcgatacggacgcgcgcacgggcgacatcgtcttcggcgtctccaccgacacgctgctcgtgcaggatggcatcggcgagaaggtcggcaacttcatgcactacatcgccaccttcctggcggggctcgtcgtcgggttcgtctcggcatggcggcttgcgctgctcagtgtggccgtcatcccggccatcgccttcgccggcggcctgtacgcgtacacgctcaccgggctcacttccaaaagccgggagtcgtatgctaatgccggcgtcgtcgcggagcaggggtgcaccctcctccctgcacattctccgccaacgatgcaaagaagaagcacgcctatggagccccaggatgaaactttatgggcttgatgccagaagctggtgccctgtattttgaccatttgtaacccttgtgttcagtgttctgaatcatgtatccgacttctgtaactttcactcctggtttctaatataattcaagcggggacagatcccccccccccccagtctgttttcaaaaaaaagaggaaggcaattggacaagtaagaacagtgtactcttttgtcggagagagcaaagcgctcaattcatattctgaagcaatccagaacacactgaagcttggttacaaagctgggatggccaaaggtcttggaattggatgtacttatgggatagcttgcatgtcatgggcactggtattttggtatgctggggtcttcatcaggaatgggcagactgatggtggaaaggcttttaccgcgatcttttctgcaattgtcggtggcatgagtcttggtcaggctttctcaaaccttggagccttcagtaagggaaagattgctggttacaaactgttggaggtcattcgccagaaaccctccatagtcaatgatcataaggatggaaaatggttggcagaggtccatggaaacatagaattcaaggaagttactttcagttatccatcaaggcctgatgttataatcttccgggatttctctcttttcttccctgctggtaaaacagttgcagttgttggagggagtgggtctggaaagagcactgttgtggctttgatagaaaggttctatgatcctaatgaaggccaggttttgctagacaatgttgacataaagacactccagctgaggtggcttagagaacagattggtctggtaaaccaagaacctgctctttttgcaacaacgatcctcgagaatatactgtatggaaagccagatgcaactattgcagaagttgaggctgcagcgactgcatccaatgcacatagtttcatatctcttcttccgaatggttacaacacaatggcaggtgagagaggaatccagctctctggtggtcagaaacaacgtatagcaatagctcgtgctatgctgaaaaacccaaagatcctgctcctggatgaggctaccagtgcattagatgcagactcggaaagcattgtgcaagaagctttagaccgtttgatggttgggaggacgactgtagttgttgcccaccgtctgtcgacgataagaaacgttaacatgatcgctgtgatccaacaaggccaagttgttgagactgggacgcatgatgaactcattgcaaaaggaacctctggagcatatgcctcccttgttcgttttcaggaaacggcacggaacagggatcttggaggtgcatctagccgcaggtcacggtcaattcacttgacaagctcactttccaccaaatctctcagcctcaggtctggaagtctaaagaacctcagctatcagtacagtactggagcagatggtcgcattgagatgatttctaatgctgataatgaccgcaaatacccagcgccacgtggctacttcttcaagcttctgaaactgaacgcacctgaatggccatatgcagtgttgggggccattggttctgtcctctccggatttattggcccaacttttgccattgttatgggtgaaatgcttgatgtgttctactacagggaccccaatgaaattgagaagaaaaccaagctatatgtgttcatttatattggcacaggcatatatgccgttgttgcttatcttgtgcagcattacttcttcagcatcatgggggaaaatcttacaaccagggttcggaggatgatgttgtccgcaatacttaggaatgaagttggttggtttgacgaagaagaaaacaactctagtcttgtggctgcgcgtctaggtgttgatgcagctgatgtgaagtcggctatagccgagagaatttcagtcatcctgcagaacatgacttctcttatgacttctttcgtcgttggatttatcatcgagtggagagtggcaatacttattctggccactttccctctgcttgtgcttgccaactttgctcagcaactttcaatgaagggctttgctggtgatacggcaaaggcacatgccaggagcagtatggttgcaggtgaagcagtgagcaatatccgcaccgtagcggcgttcaacgctcaaagcaagatcctgtcactcttcagccatgaactgcgtgtgccagagcagcaaatcctccgccgcagccagacatctggtcttctgtttggcctgtcacagctctgcttatactcctcagaagcgctcatcctctggtatggttctcatctcgtgcggtcacatgggtccaccttctccaaggtcatcaaggtttttgttgtcctggtggtgactgccaactcggtagccgagacggtgagcctggccccagagatcatccgcggaggtgagtccatccgatccatcttcggcatcctcaacagagcaacgagaatcgagcctgacgatccagagtcagagcgtgtcaccaccatccgaggggacatcgagctgcggcatgtagacttctcgtatccagcacgcccagacattcaaatcttcaaggacttcaacctgaaaatccaagctgggcgcagccaggcactagtcggagccagcggttcaggcaagagcaccgtcattgctctcatcgagcggttctatgatccatgcgggggcaaagtggccatcgacggcaaggacatccggacgctgaacctgaagtccttgcggctcaagatcggactcgtgcagcaggagccggtcctcttcgcatcgagcatcctagagaacattgcgtacggcaaggaaggcgcgagcgaggaggaggtggtggaggcggcgaagacggcgaacgtgcacggcttcgtcagccagctgcccgacggctacaggacggcggtcggcgagcaggggatgcagctgtcaggcgggcagaagcaacggatcgccatcgccagggcggtgctcaaggacccggccatcctgctgctggacgaggcgacgagcgcgctggacgcggagtccgagtgcgtgctgcaggaggcgctggagcggctgatgaaggggcggaccaccgtgctggtggcgcaccggctgtctacgatccgaggggtggaccgcatcgcggtggtgcaggacgggcgggtcgtggagcacggcagccactccgacctcctggcccggccggagggcgcctacttgcggctgctgcagttgcagcaccatcgtgtctgacggcgccgtgcatcctctgatgatgtatattaattacacgatgacatcttagtttcggaggtctggggcggtggcggcttccttttcggtttcttgggttggcggtggccggtggtcgtgcatggggatgttgatactagggcaaaacgtgttgcgttcttatgcataaacttggaacatgtgatctgtatcttcacctcttctcgtccacctcgatctcctcatcagccctcctctcattctttagcagtaataagttcaccgtgagatcaatggtaatgtggtttatgaagaggaacagatccgagtgccccgagcaagcgcaagaacagatatggaaacagaaatttcattaaaaaaccacgctctatatctttc

SEQ ID NO: 19155 - DNA, 4464 bp, Zea Mays
ctgaccaccgcagtgcggaacacaaaagctcaccagtcacccctgcggcgccacccccacaaacctcgcctgcacgtcaccaataccgaggctatccccggcaggcgcttccggattcccccctttcttcctttgcagcctgccaggcaccgctggccaagagacaagcaaaaacggcgacaccttcaccaatgccgcagggcgccgctgctgcggcctgagagtgcgagccccgctaccgaggtccgggtcaggcggggggtgtggggggggggggggggggggggagcgcattgcgatggcggagtcggcggcggctgacgggaagtcggacaaggtggcgaacggaggagggggaggcggcgatgcagcgggggaggggaagaagcggggggaccaggccgtggcgttccacgagctcttctcgtttgccgacaagtgggacctgatgctcatggcggcgggcagcatgggtgcactggcgcacggcgccgccatgccgttcttcttcctgctcttcggggacctcatcaacggcttcggcaagaatcagaccgacctccgcaccatgaccgatgaggtcgcaaagtacgcgctctacttcgtctacctggggctggtggtctgcgtctcctcctacgcagagatcgcgtgctggatgtacaccggggagcggcaggtgatcgcgctccggaaggcttacctggacgccgtgctgcggcaggacgtgggtttcttcgatacggacgcgcgcacgggcgacatcgtcttcggcgtctccaccgacacgctgctcgtgcaggatggcatcggcgagaaggtcggcaacttcatgcactacatcgccaccttcctggcggggctcgtcgtcgggttcgtctcggcatggcggcttgcgctgctcagtgtggccgtcatcccggccatcgccttcgccggcggcctgtacgcgtacacgctcaccgggctcacttccaaaagccgggagtcgtatgctaatgccggcgtcgtcgcggagcaggcaattggacaagtaagaacagtgtactcttttgtcggagagagcaaagcgctcaattcatattctgaagcaatccagaacacactgaagcttggttacaaagctgggatggccaaaggtcttggaattggatgtacttatgggatagcttgcatgtcatgggcactggtattttggtatgctggggtcttcatcaggaatgggcagactgatggtggaaaggcttttaccgcgatcttttctgcaattgtcggtggcatgctttctcaaaccttggagccttcagtaagggaaagattgctggttacaaactgttggaggtcattcgccagaaaccctccatagtcaatgatcataaggatggaaaatggttggcagaggtccatggaaacatagaattcaaggaagttactttcagttatccatcaaggcctgatgttataatcttccgggatttctctcttttcttccctgctggtaaaacagttgcagttgttggagggagtgggtctggaaagagcactgttgtggctttgatagaaaggttctatgatcctaatgaaggccaggttttgctagacaatgttgacataaagacactccagctgaggtggcttagagaacagattggtctggtaaaccaagaacctgctctttttgcaacaacgatcctcgagaatatactgtatggaaagccagatgcaactattgcagaagttgaggctgcagcgactgcatccaatgcacatagtttcatatctcttcttccgaatggttacaacacaatggcaggtgagagaggaatccagctctctggtggtcagaaacaacgtatagcaatagctcgtgctatgctgaaaaacccaaagatcctgctcctggatgaggctaccagtgcattagatgcagactcggaaagcattgtgcaagaagctttagaccgtttgatggttgggaggacgactgtagttgttgcccaccgtctgtcgacgataagaaacgttaacatgatcgctgtgatccaacaaggccaagttgttgagactgggacgcatgatgaactcattgcaaaaggaacctctggagcatatgcctcccttgttcgttttcaggaaacggcacggaacagggatcttggaggtgcatctagccgcaggtcacggtcaattcacttgacaagctcactttccaccaaatctctcagcctcaggtctggaagtctaaagaacctcagctatcagtacagtactggagcagatggtcgcattgagatgatttctaatgctgataatgaccgcaaatacccagcgccacgtggctacttcttcaagcttctgaaactgaacgcacctgaatggccatatgcagtgttgggggccattggttctgtcctctccggatttattggcccaacttttgccattgttatgggtgaaatgcttgatgtgttctactacagggaccccaatgaaattgagaagaaaaccaagctatatgtgttcatttatattggcacaggcatatatgccgttgttgcttatcttgtgcagcattacttcttcagcatcatgggggaaaatcttacaaccagggttcggaggatgatgttgtccgcaatacttaggaatgaagttggttggtttgacgaagaagaaaacaactctagtcttgtggctgcgcgtctaggtgttgatgcagctgatgtgaagtcggctatagccgagagaatttcagtcatcctgcagaacatgacttctcttatgacttctttcgtcgttggatttatcatcgagtggagagtggcaatacttattctggccactttccctctgcttgtgcttgccaactttgctcagcaactttcaatgaagggctttgctggtgatacggcaaaggcacatgccaggagcagtatggttgcaggtgaagcagtgagcaatatccgcaccgtagcggcgttcaacgctcaaagcaagatcctgtcactcttcagccatgaactgcgtgtgccagagcagcaaatcctccgccgcagccagacatctggtcttctgtttggcctgtcacagctctgcttatactcctcagaagcgctcatcctctggtatggttctcatctcgtgcggtcacatgggtccaccttctccaaggtcatcaaggtttttgttgtcctggtggtgactgccaactcggtagccgagacggtgagcctggccccagagatcatccgcggaggtgagtccatccgatccatcttcggcatcctcaacagagcaacgagaatcgagcctgacgatccagagtcagagcgtgtcaccaccatccgaggggacatcgagctgcggcatgtagacttctcgtatccagcacgcccagacattcaaatcttcaaggacttcaacctgaaaatccaagctgggcgcagccaggcactagtcggagccagcggttcaggcaagagcaccgtcattgctctcatcgagcggttctatgatccatgcgggggcaaagtggccatcgacggcaaggacatccggacgctgaacctgaagtccttgcggctcaagatcggactcgtgcagcaggagccggtcctcttcgcatcgagcatcctagagaacattgcgtacggcaaggaaggcgcgagcgaggaggaggtggtggaggcggcgaagacggcgaacgtgcacggcttcgtcagccagctgcccgacggctacaggacggcggtcggcgagcaggggatgcagctgtcaggcgggcagaagcaacggatcgccatcgccagggcggtgctcaaggacccggccatcctgctgctggacgaggcgacgagcgcgctggacgcggagtccgagtgcgtgctgcaggaggcgctggagcggctgatgaaggggcggaccaccgtgctggtggcgcaccggctgtctacgatccgaggggtggaccgcatcgcggtggtgcaggacgggcgggtcgtggagcacggcagccactccgacctcctggcccggccggagggcgcctacttgcggctgctgcagttgcagcaccatcgtgtctgacggcgccgtgcatcctctgatgatgtatattaattacacgatgacatcttagtttcggaggtctggggcggtggcggcttccttttcggtttcttgggttggcggtggccggtggtcgtgcatggggatgttgatactagggcaaaacgtgttgcgttcttatgcataaacttggaacatgtgatctgtatcttcacctcttctcgtccacctcgatctcctcatcagccctcctctcattctttagcagtaataagttcaccgtgagatcaatggtaatgtggtttatgaagaggaacagatccgagtgccccgagcaagcgcaagaacagatatggaaacagaaatttcattaaaaaaccacgctctatatctttc

SEQ ID NO: 19156 - DNA, 3909 bp, Zea Mays
aacccactcatcagttacacaagtcccgtcaggccgtcaccatcacacccaacggggaaaagttaacaattactccagatcgcgtgctggatgtacaccggggagcggcaggtgatcgcgctccggaaggcttacctggacgccgtgctgcggcaggacgtgggtttcttcgatacggacgcgcgcacgggcgacatcgtcttcggcgtctccaccgacacgctgctcgtgcaggatggcatcggcgagaaggtcggcaacttcatgcactacatcgccaccttcctggcggggctcgtcgtcgggttcgtctcggcatggcggcttgcgctgctcagtgtggccgtcatcccggccatcgccttcgccggcggcctgtacgcgtacacgctcaccgggctcacttccaaaagccgggagtcgtatgctaatgccggcgtcgtcgcggagcaggcaattggacaagtaagaacagtgtactcttttgtcggagagagcaaagcgctcaattcatattctgaagcaatccagaacacactgaagcttggttacaaagctgggatggccaaaggtcttggaattggatgtacttatgggatagcttgcatgtcatgggcactggtattttggtatgctggggtcttcatcaggaatgggcagactgatggtggaaaggcttttaccgcgatcttttctgcaattgtcggtggcatgagtcttggtcaggctttctcaaaccttggagccttcagtaagggaaagattgctggttacaaactgttggaggtcattcgccagaaaccctccatagtcaatgatcataaggatggaaaatggttggcagaggtccatggaaacatagaattcaaggaagttactttcagttatccatcaaggcctgatgttataatcttccgggatttctctcttttcttccctgctggtaaaacagttgcagttgttggagggagtgggtctggaaagagcactgttgtggctttgatagaaaggttctatgatcctaatgaaggccaggttttgctagacaatgttgacataaagacactccagctgaggtggcttagagaacagattggtctggtaaaccaagaacctgctctttttgcaacaacgatcctcgagaatatactgtatggaaagccagatgcaactattgcagaagttgaggctgcagcgactgcatccaatgcacatagtttcatatctcttcttccgaatggttacaacacaatggcaggtgagagaggaatccagctctctggtggtcagaaacaacgtatagcaatagctcgtgctatgctgaaaaacccaaagatcctgctcctggatgaggctaccagtgcattagatgcagactcggaaagcattgtgcaagaagctttagaccgtttgatggttgggaggacgactgtagttgttgcccaccgtctgtcgacgataagaaacgttaacatgatcgctgtgatccaacaaggccaagttgttgagactgggacgcatgatgaactcattgcaaaaggaacctctggagcatatgcctcccttgttcgttttcaggaaacggcacggaacagggatcttggaggtgcatctagccgcaggtcacggtcaattcacttgacaagctcactttccaccaaatctctcagcctcaggtctggaagtctaaagaacctcagctatcagtacagtactggagcagatggtcgcattgagatgatttctaatgctgataatgaccgcaaatacccagcgccacgtggctacttcttcaagcttctgaaactgaacgcacctgaatggccatatgcagtgttgggggccattggttctgtcctctccggatttattggcccaacttttgccattgttatgggtgaaatgcttgatgtgttctactacagggaccccaatgaaattgagaagaaaaccaagctatatgtgttcatttatattggcacaggcatatatgccgttgttgcttatcttgtgcagcattacttcttcagcatcatgggggaaaatcttacaaccagggttcggaggatgatgttgtccgcaatacttaggaatgaagttggttggtttgacgaagaagaaaacaactctagtcttgtggctgcgcgtctaggtgttgatgcagctgatgtgaagtcggctatagccgagagaatttcagtcatcctgcagaacatgacttctcttatgacttctttcgtcgttggatttatcatcgagtggagagtggcaatacttattctggccactttccctctgcttgtgcttgccaactttgctcagcaactttcaatgaagggctttgctggtgatacggcaaaggcacatgccaggagcagtatggttgcaggtgaagcagtgagcaatatccgcaccgtagcggcgttcaacgctcaaagcaagatcctgtcactcttcagccatgaactgcgtgtgccagagcagcaaatcctccgccgcagccagacatctggtcttctgtttggcctgtcacagctctgcttatactcctcagaagcgctcatcctctggtatggttctcatctcgtgcggtcacatgggtccaccttctccaaggtcatcaaggtttttgttgtcctggtggtgactgccaactcggtagccgagacggtgagcctggccccagagatcatccgcggaggtgagtccatccgatccatcttcggcatcctcaacagagcaacgagaatcgagcctgacgatccagagtcagagcgtgtcaccaccatccgaggggacatcgagctgcggcatgtagacttctcgtatccagcacgcccagacattcaaatcttcaaggacttcaacctgaaaatccaagctgggcgcagccaggcactagtcggagccagcggttcaggcaagagcaccgtcattgctctcatcgagcggttctatgatccatgcgggggcaaagtggccatcgacggcaaggacatccggacgctgaacctgaagtccttgcggctcaagatcggactcgtgcagcaggagccggtcctcttcgcatcgagcatcctagagaacattgcgtacggcaaggaaggcgcgagcgaggaggaggtggtggaggcggcgaagacggcgaacgtgcacggcttcgtcagccagctgcccgacggctacaggacggcggtcggcgagcaggggatgcagctgtcaggcgggcagaagcaacggatcgccatcgccagggcggtgctcaaggacccggccatcctgctgctggacgaggcgacgagcgcgctggacgcggagtccgagtgcgtgctgcaggaggcgctggagcggctgatgaaggggcggaccaccgtgctggtggcgcaccggctgtctacgatccgaggggtggaccgcatcgcggtggtgcaggacgggcgggtcgtggagcacggcagccactccgacctcctggcccggccggagggcgcctacttgcggctgctgcagttgcagcaccatcgtgtctgacggcgccgtgcatcctctgatgatgtatattaattacacgatgacatcttagtttcggaggtctggggcggtggcggcttccttttcggtttcttgggttggcggtggccggtggtcgtgcatggggatgttgatactagggcaaaacgtgttgcgttcttatgcataaacttggaacatgtgatctgtatcttcacctcttctcgtccacctcgatctcctcatcagccctcctctcattctttagcagtaataagttcaccgtgagatcaatggtaatgtggtttatgaagaggaacagatccgagtgccccgagcaagcgcaagaacagatatggaaacagaaatttcattaaaaaaccacgctctatatctttc

SEQ ID NO: 19157 - DNA, 3532 bp, Zea Mays
agccattccacgagcttggtcggggcaagtgccttgtgggtttctgctttccacgacttgtttggctcaacttttggcaattggacaagtaagaacagtgtactcttttgtcggagagagcaaagcgctcaattcatattctgaagcaatccagaacacactgaagcttggttacaaagctgggatggccaaaggtcttggaattggatgtacttatgggatagcttgcatgtcatgggcactggtattttggtatgctggggtcttcatcaggaatgggcagactgatggtggaaaggcttttaccgcgatcttttctgcaattgtcggtggcatgagtcttggtcaggctttctcaaaccttggagccttcagtaagggaaagattgctggttacaaactgttggaggtcattcgccagaaaccctccatagtcaatgatcataaggatggaaaatggttggcagaggtccatggaaacatagaattcaaggaagttactttcagttatccatcaaggcctgatgttataatcttccgggatttctctcttttcttccctgctggtaaaacagttgcagttgttggagggagtgggtctggaaagagcactgttgtggctttgatagaaaggttctatgatcctaatgaaggccaggttttgctagacaatgttgacataaagacactccagctgaggtggcttagagaacagattggtctggtaaaccaagaacctgctctttttgcaacaacgatcctcgagaatatactgtatggaaagccagatgcaactattgcagaagttgaggctgcagcgactgcatccaatgcacatagtttcatatctcttcttccgaatggttacaacacaatggcaggtgagagaggaatccagctctctggtggtcagaaacaacgtatagcaatagctcgtgctatgctgaaaaacccaaagatcctgctcctggatgaggctaccagtgcattagatgcagactcggaaagcattgtgcaagaagctttagaccgtttgatggttgggaggacgactgtagttgttgcccaccgtctgtcgacgataagaaacgttaacatgatcgctgtgatccaacaaggccaagttgttgagactgggacgcatgatgaactcattgcaaaaggaacctctggagcatatgcctcccttgttcgttttcaggaaacggcacggaacagggatcttggaggtgcatctagccgcaggtcacggtcaattcacttgacaagctcactttccaccaaatctctcagcctcaggtctggaagtctaaagaacctcagctatcagtacagtactggagcagatggtcgcattgagatgatttctaatgctgataatgaccgcaaatacccagcgccacgtggctacttcttcaagcttctgaaactgaacgcacctgaatggccatatgcagtgttgggggccattggttctgtcctctccggatttattggcccaacttttgccattgttatgggtgaaatgcttgatgtgttctactacagggaccccaatgaaattgagaagaaaaccaagctatatgtgttcatttatattggcacaggcatatatgccgttgttgcttatcttgtgcagcattacttcttcagcatcatgggggaaaatcttacaaccagggttcggaggatgatgttgtccgcaatacttaggaatgaagttggttggtttgacgaagaagaaaacaactctagtcttgtggctgcgcgtctaggtgttgatgcagctgatgtgaagtcggctatagccgagagaatttcagtcatcctgcagaacatgacttctcttatgacttctttcgtcgttggatttatcatcgagtggagagtggcaatacttattctggccactttccctctgcttgtgcttgccaactttgctcagcaactttcaatgaagggctttgctggtgatacggcaaaggcacatgccaggagcagtatggttgcaggtgaagcagtgagcaatatccgcaccgtagcggcgttcaacgctcaaagcaagatcctgtcactcttcagccatgaactgcgtgtgccagagcagcaaatcctccgccgcagccagacatctggtcttctgtttggcctgtcacagctctgcttatactcctcagaagcgctcatcctctggtatggttctcatctcgtgcggtcacatgggtccaccttctccaaggtcatcaaggtttttgttgtcctggtggtgactgccaactcggtagccgagacggtgagcctggccccagagatcatccgcggaggtgagtccatccgatccatcttcggcatcctcaacagagcaacgagaatcgagcctgacgatccagagtcagagcgtgtcaccaccatccgaggggacatcgagctgcggcatgtagacttctcgtatccagcacgcccagacattcaaatcttcaaggacttcaacctgaaaatccaagctgggcgcagccaggcactagtcggagccagcggttcaggcaagagcaccgtcattgctctcatcgagcggttctatgatccatgcgggggcaaagtggccatcgacggcaaggacatccggacgctgaacctgaagtccttgcggctcaagatcggactcgtgcagcaggagccggtcctcttcgcatcgagcatcctagagaacattgcgtacggcaaggaaggcgcgagcgaggaggaggtggtggaggcggcgaagacggcgaacgtgcacggcttcgtcagccagctgcccgacggctacaggacggcggtcggcgagcaggggatgcagctgtcaggcgggcagaagcaacggatcgccatcgccagggcggtgctcaaggacccggccatcctgctgctggacgaggcgacgagcgcgctggacgcggagtccgagtgcgtgctgcaggaggcgctggagcggctgatgaaggggcggaccaccgtgctggtggcgcaccggctgtctacgatccgaggggtggaccgcatcgcggtggtgcaggacgggcgggtcgtggagcacggcagccactccgacctcctggcccggccggagggcgcctacttgcggctgctgcagttgcagcaccatcgtgtctgacggcgccgtgcatcctctgatgatgtatattaattacacgatgacatcttagtttcggaggtctggggcggtggcggcttccttttcggtttcttgggttggcggtggccggtggtcgtgcatggggatgttgatactagggcaaaacgtgttgcgttcttatgcataaacttggaacatgtgatctgtatcttcacctcttctcgtccacctcgatctcctcatcagccctcctctcattctttagcagtaataagttcaccgtgagatcaatggtaatgtggtttatgaagaggaacagatccgagtgccccgagcaagcgcaagaacagatatggaaacagaaatttcattaaaaaaccacgctctatatctttc

SEQ ID NO: 19158 - DNA, 802 bp, Zea Mays
aaagaaggaagcttatctcattccaacatggaactaccaaacatgccagtacaacactactccgcaggaagcttttacagtggctcaagatatcatgaagacgatgctagaaaaggggtacgtgctcagcaaggatgctttggctaaggctagagcctttgatgagtcctatggattaacagctgcagcagcagccagggctgcagagctgagcaagagaattggtttaactgatagggtcaatgctggtgttggtgcaatgcgatcagtcgatgagacatatcgcgtaagagagacaaccaagacggttgctactgccactggaagaacggcagcaaaggtggtaaatggcatcgtcaccagcagctacttctctgcaggagccatgatcttgtctgatgctcttactagggctgccaaggccgcggcagatctggccgctcatggtaggcagaattaagtgaaaaatagacataaagttcatccttgcagttactaaacatgaggacgaacaccttcaagtgatgttgcttgatgtatatttatgacacaacagtgtcgtaaattaaaaggagacgatcactgcgtttggaacaaattgtttgctctgataagtttgattattgcaaatgtagtcaagtgatcgtgcagtcatgtttcggacttcctgcgcatttcatattcgcgcattgctgttgagtatctggagaatcaaagcaactgttctcccctagacaagtgttgtattacgaatataatatccctgattccagagcaaaaaaaaaatcatccttttttcaac

SEQ ID NO: 19159 - DNA, 149 bp, Zea Mays
gagaggagaaaccaaatcgtgagcacaagcacaaacctcacacccaagagctcctccaacaaggttaaatcttgaggaagatttaagtgtgagagaaaagggagagaggagtgctttgtctcaagttaggtgagcaataaatgtgtaag

SEQ ID NO: 19160 - DNA, 802 bp, Zea Mays
gtataccaccactgacaaaacctgatgtatcagccctatccatgagcatgaagttttattgatcccaaatggaaaacaatgaggctgcagaaactatgggcaaatcacatacaccactatcttatgcatccataatcccaacaaaacttcataaactttccacgatctgcaggtgaaggaagaccataagtgaaattgaacaaataagattgaagcataataagacaaccgctgattaaagttaatattccatttctattaagatgacacaaacaatgttagaggggggaaaaagggtgcaaatatcaagccaactcaatgttttgaaaatcagcatgcaaataaaccacaagaacctggggactgaggtacaattataaatggactcaacagtgagaagaatcgtaccaaagttagcatatgtatctaataaaaacagtgtcaacactcaacaagcatacacaggaaacttttgttgatcagttgatttcaaagttagtagcatgaaaaaaatcatgagtacatacagaagcaatatgattactgaagaaacttaaacgtctatggggaagccatctgatgatcaacatatttttttcttaatttgaaacagcaacgtcatttgaaagacttcaatagcaattgttacttcaaaatccttacatcaatactcattaacatatcttcacaaccctctgaagtcagagttactaagtttgaaaactttactgtagagacaatccatgtgatcgtgtccactggacaagaagctgcatagtttcaaatataattgttttcgttg

SEQ ID NO: 19161 - DNA, 1164 bp, Zea Mays
attcccactaaaattcacaagatccacggcaaagtttcagttatgcgaactttcccattagaatcaatgcactgaaaccatagagaaagacaatcatttaaggtagtatcttaacttttgtgcatccaataattcctgaaatgattgtcataagaactccactcaaaggaaagcctttaattttcaaaacttgcaactaaagaagaaagaagattaaacagggaagagggaaagaagtgtgaactttgcaagcagctgcgaatctacagtaacagagtgcacaccatgtttgcctgaactctagatggatataagaagttgcaaatccccaaagaaggcaaagataacgatttcttgtgtttaaccaaatttcttgagctcatgatataagttagaaaacgtagagaccgtcaaacagatacgcaaaaaaaaggtcgtgtgctaccttacggctaagacaattgcttaggtgctattagaaaaccaacttccttggatttggaaggcagaaattgacaaggaatgatgaatattgcaaatcacagcatgtagcttggtttttctaactgtagagaagataagcatactaatattatacagagacataagtttaccaaatttccacggaaaactcacaagtcacagcaactgctacaatttgcgaagttttgctctaaaactcattcaatggggggtcacaaaggaaaccaacccttcaagcacaagaccttaagcttcatgcctatcgcagcacagggcaaacaagtcctactaataaatagtactaataaaacgaccggcacacaactcaaccagaaggaaagtgtaatccttctccaagaaacaacggttaaaactttgagcgaaggttagagtttgcgcttttcatagcaagagagagagagagaagtgagaggcggagatcagtaccggcgcggagaaccccggaggcggcgaagcgaaagggtgggggagacccgggcagcgaggggagcgctcgatggggacgggagccgggagataaaaagaggcgtggggaggaaaagctgggagatttatgccatcgtgcgtaccgatgccatagggcgatggaatttggcttttgggggctcgggaggagccgcagtgcaccaccaccacccgagtgccatcaaccacctaatc

SEQ ID NO: 19162 - DNA, 2945 bp, Zea Mays
gaaaggaatagataccagagaaattcctggcgtgaaccacgggtgttgttcacatttggtaccagagccaatactggatcctccacacgggtactggacgagatcgcaatcgaagttgggcggcatggcgccagcgaagacggacgatcctttgtcccagcttctggcgaagatcgaggagggaaacaaggagactcaccgacgcatggaggcgattcagggggcggtgggaaatatggaggcggcggtcaaggtggtgatgacggagcacggagatcttcagaagtggaaaccggaggtggaagcgaaagtgacggagatttctgatgctctaaaggcgatccagatccagatgggaaagatggagaagaagccgctcggtttcgggtcgagacaggaagaagaaggagaagacggatttctgaagccgccaccatctgattcttcgaatttggagtttcgtcgtgaagaagggcggacccaattctcgcatggaggtgccggaggaagttctggagtccaggcttcttcgtaaagggggtaaggtgatttcgcagttgctcattaagtggtccaattggccggtgtcactgtcaacctgggaggatgaagaggccattaagcagaaatttccacaagcaccagcttggggtcaagctgtcgttaaagaagggggaaatgtcagcagagcagatcacatggaccatgcagaggagcggactcaagcagtgcaacagaaggcacagacagagggagtcaaggaagacaatcagagcccgcgcagccgtcgtgtaccaaagccaaataccaagtacatcggtgcagagtggcgcgtataggtatacggagttatacgtattgatgagggcaggtgtgccggtataaataatattgtaatcgtttctaaactcagtctggaacatgttattgccgagtcggcaagaaaggaatagataccagagaaattcctggcgtgaaccacgggtgttgttcacactcgctgtccctgcctgactcttaaaaagggcggcgtgtcaccgcctggttactcacagtcatagattcacgccgcggaacgcggattccaagaacccaagtgaatcgcggctcctcgagtccggcggtgccgtccggagaggtagagctagactgctagagcacagccccgccatggcggccgcggcgcgcgcgatcatctgcgagctggcgccgcagaaggtgtcgtcgacggcgtcggggcccgcggcgccgaagaagcgtgacgccgggacgaaggtggtgctgcagccccgcctctgcacgctccggtcgtacggcgccggcagcggcgtggtgacgcggaggattctggccggggaggaggacggcagcggggccgccgactcgggcggctccgcggcgttgccgttcttcgcctcgctcgctgactacatcgagagctcccgcaagagccaggacttcgagaccatctccggccgcctcgccatggtggcgttcgcggcggcggtggccgtggagacgacgacgggcagctccctgttcaagaagctggacaccatggagatcgaggaggcggcgggggtgtgcgtggcggtggtcgccagcgccgcggcgttcgcatgggcctccagcgcgcgcaataggatcgggcagatgttcacgctgggctgcaacgccttcgtcgactccctgatcgacaatatcgtcgaggcgctcttctccgagggcgagctgcaggactggtccgatgacatatgaacatgcacatgcatatatagagactaatagtagacagacagtaatacagtatacgtacatacatagagtcaactattaacagtaagacactaggtagatgaagttgttaagtgagttccatgcattttcgcaagcttcgtcatcgctgcacaacggcaaggctgaatatttcagagatggatcgttgattagagctccgcattctgcgtaggaacacacaagcagggatgtctttcagaagtgaggcggctcttaaagccttcaaggttgtgaaatatgtagatctcttctcttgggagaaatagtggtatcctactatcctaggctctggaaagattggcccccagaattaactgtacctgctactagtactactagctataccgagtgtatttagagaatgaatcatgtaatcaaatccatgtaatatatgccaagtgtagtcagagtcaaatctggagtattgattcttgacattgtaccacatggagtggaaatgagagcctatacaccgcgtttctctagcctatctccagctacccaaacgcctgtgcatactcattttttgcactcacgttcagttactcatcttccatcagagcgcagggcgtgaaactgcctccaacaatgtatggtcctgaactctaaatttagagaacctaacctcctataaaacatccaacaatgaacagtaaagcatccagtaaaatagcggtccgtcctttcgcacgctatttttggagaggttcactgtgtatccgctatccggccaccgggcgcaagcttcgccaccttcgaggacaccaagttgagcgcatagacaagtgcggcaagggtgtcctcggcggcgggcatgacgaagctctcggatatgacggtggagcgctacgatctgtggggcgtcctcggcggcgggtacctcacacaggcgcaaggccagttcgttggtttcgcagtccttcaaccccggaccccgtggtgtcgacctgggcggccgtccaagagggccatgatggagatcagaccgtgtacatgcgccacgaggaggccggaaaagacgcttcctggacgcatgcatcgtcgccaccggagttctctaggcaggccacgtacttgtgacatccgatgtgtgcatgtgaacattgcttctgtcactgctactcacatgttgtatatagcaattcaag

SEQ ID NO: 19163 - DNA, 1954 bp, Zea Mays
gaaaggaatagataccagagaaattcctggcgtgaaccacgggtgttgttcacatttggtaccagagccaatactggatcctccacacgggtactggacgagatcgcaatcgaagttgggcggcatggcgccagcgaagacggacgatcctttgtcccagcttctggcgaagatcgaggagggaaacaaggagactcaccgacgcatggaggcgattcagggggcggtgggaaatatggaggcggcggtcaaggtggtgatgacggagcacggagatcttcagaagtggaaaccggaggtggaagcgaaagtgacggagatttctgatgctctaaaggcgatccagatccagatgggaaagatggagaagaagccgctcggtttcgggtcgagacaggaagaagaaggagaagacggatttctgaagccgccaccatctgattcttcgaatttggagtttcgtcgtgaagaagggcggacccaattctcgcatggaggtggcgttcgcggcggcggtggccgtggagacgacgacgggcagctccctgttcaagaagctggacaccatggagatcgaggaggcggcgggggtgtgcgtggcggtggtcgccagcgccgcggcgttcgcatgggcctccagcgcgcgcaataggatcgggcagatgttcacgctgggctgcaacgccttcgtcgactccctgatcgacaatatcgtcgaggcgctcttctccgagggcgagctgcaggactggtccgatgacatatgaacatgcacatgcatatatagagactaatagtagacagacagtaatacagtatacgtacatacatagagtcaactattaacagtaagacactaggtagatgaagttgttaagtgagttccatgcattttcgcaagcttcgtcatcgctgcacaacggcaaggctgaatatttcagagatggatcgttgattagagctccgcattctgcgtaggaacacacaagcagggatgtctttcagaagtgaggcggctcttaaagccttcaaggttgtgaaatatgtagatctcttctcttgggagaaatagtggtatcctactatcctaggctctggaaagattggcccccagaattaactgtacctgctactagtactactagctataccgagtgtatttagagaatgaatcatgtaatcaaatccatgtaatatatgccaagtgtagtcagagtcaaatctggagtattgattcttgacattgtaccacatggagtggaaatgagagcctatacaccgcgtttctctagcctatctccagctacccaaacgcctgtgcatactcattttttgcactcacgttcagttactcatcttccatcagagcgcagggcgtgaaactgcctccaacaatgtatggtcctgaactctaaatttagagaacctaacctcctataaaacatccaacaatgaacagtaaagcatccagtaaaatagcggtccgtcctttcgcacgctatttttggagaggttcactgtgtatccgctatccggccaccgggcgcaagcttcgccaccttcgaggacaccaagttgagcgcatagacaagtgcggcaagggtgtcctcggcggcgggcatgacgaagctctcggatatgacggtggagcgctacgatctgtggggcgtcctcggcggcgggtacctcacacaggcgcaaggccagttcgttggtttcgcagtccttcaaccccggaccccgtggtgtcgacctgggcggccgtccaagagggccatgatggagatcagaccgtgtacatgcgccacgaggaggccggaaaagacgcttcctggacgcatgcatcgtcgccaccggagttctctaggcaggccacgtacttgtgacatccgatgtgtgcatgtgaacattgcttctgtcactgctactcacatgttgtatatagcaattcaag

SEQ ID NO: 19164 - DNA, 7023 bp, Zea Mays
gaaaggaatagataccagagaaattcctggcgtgaaccacgggtgttgttcacatttggtaccagagccaatactggatcctccacacgggtactggacgagatcgcaatcgaagttgggcggcatggcgccagcgaagacggacgatcctttgtcccagcttctggcgaagatcgaggagggaaacaaggagactcaccgacgcatggaggcgattcagggggcggtgggaaatatggaggcggcggtcaaggtggtgatgacggagcacggagatcttcagaagtggaaaccggaggtggaagcgaaagtgacggagatttctgatgctctaaaggcgatccagatccagatgggaaagatggagaagaagccgctcggtttcgggtcgagacaggaagaagaaggagaagacggatttctgaagccgccaccatctgattcttcgaatttggagtttcgtcgtgaagaagggcggacccaattctcgcatggaggtatgaactcgccctggaactccaactctttcagattcgaggctgctggaaaccattcctttggcgactggtcacatgggtccggatcgggtatacctagtatgagtttccctgtttttgatggatccaaccctaagctgtggagaacgcggtgtgaaacctactttgatttctattctgttgctcgtcccatgtggattcggttggccatcatgcattttgagggtgcggcgttattctggttacaatctgtagaacatcggcttagatacatgaagtgggatgaattctgttctggattgtataacagatttggaagggatcaacatggtaccttgattcgacacttctatcacatataccagcagaactcagtggtggaatatgtggaacagtttgacatgctgttacatcaactactagcccatgaaagccagttgacgccaatgatgatcacttccagatttgtggatggtttaaaggatgatatacaggctgtggtggccattcaacgcccagccgatctggacacagcctgttcgctagctctattacaggaggatatgttgacacaacccaatcggaaggaaggcaggagagtggaattgggtggttatactagaccctccaatccctccatgaagactgcgaccatggctggacatcaagtatcagttaccacaagtcggatccatcccttgtcggaagatcgtcgtaggccgtctgggagcggtggaaggacggaggatcagaaacttgctgccttgaagtcctacagaagagccaagggcttatgttttaaatgtggtgaaaagtggaattataatcaccattgctctaacagtgttcctcttcatgtggtggaggagatgtgggctgtgactgatcagggaaaggaggaaggggacactgatccaaaggatgagcattatgaaactgagaacgaggaggcagtgttggcgttgtctacggcggcagtaaatggtagtgaaaacaacaggactattcggttatgggcctcgattcactgtcaacaggtgctcgtattggtggattctggtagctcggctagttttatgggtacccatctgatggaagtagtgaaaggggtgcagaatttggtcagacctgttaaagtcaaagttgctgacgggtactatttgtggtgtgaaaaatgggtaccaagctgtcaatggctatgtgagggaataactttttatactgatttcaagttcttgccattggacggttatgatcttatactagggatggactggttggaggatcttagtcctatgtctatagactgggctgcaaaatggatggagttcgtgtacaagggtaagaaagtgcagttacaaggcgtaactcctaaattaaaagcttgtactcccatgtctagtgtgcaattgaagggtttgctcaggaaggaagcggtggaacaagtaatcgagttgaggatcaccatggagactgagacaaacactgttcccgatcagattgttgagttggtgaacaaataccaggaattgtttgcagccccaaaaggcctgcctccaaagaggttgtttgatcatgacattcctttgttgcctggtgtaaatcctttccgactcaggccttatcgatacactcctcaacaaaaaaatgagattgagaaacagattaaggaaatgttggaaggtggaattatccagcagagttccagtcccttcgcttcaccggtgctgttagtaaagaagaaggatggagagtggaggttatgcgtggactacaggaaactcaatgcttatacggtgaagaataggtttcccatgccagtttttgatgagattgcagatgagctgagtggagccaccgtattcacaaagttggaccatagggctggttaccatcaaatcaggattaaagagggagaggagtataaaacgaccttccatacgcataatggacactatgaatataaggtcatgccattcggtctgacaggagcaccggctacctttcaagattttatgaatcacatcttagctccccttttgagaaagtgtgttgtggtattcttggatgatattttggtttatagtactactttagaagatcacgttggacatttggaacaggtttttggtattctgacccaaaatcagttgaaactaaaacaatccaagtgtaagtttgcccaagacaaattggaatttttgggccatgtaatcagtgctgctggtatttcgactgaaccagccaaggtggaagtgataaaaaattggccaattccgaaatctgtcaaggaggtgagaagttttttgggtatggcggggtattaccgacgttttgtggcagggtttggcatcataagtaaacctctgaccaacctgctgaagaaagatcaaatgtttgtttggactgacaccacacaaaaatcttttgaggcattggagctgtattacagcaagatggacatcctatcgcctatattagtaaagctctgggtcccaggaatgctgctttgtcaacatatgagaaggagtgcttggcgatactttttgcagttgatcattggagaccttatttgcaacatgcccagtttctcattaaaaccgaccagcaaagtttgactcacctggatgatcaaagggtcacaacaccttggcaacaaaaggctttgactaaactaatgggccttaattttcaaattatctacaagaagggggtagagaacaaggtagctgatgccttatccagaagggcagatttacaatccgatgacactaccctgcaactgcatgtcctgagtagttcctctatgatccctagctggctgactgaggtcacgaaaggatatgaaaatgatgaagttgctcagaaaattcttagtgctttatctacaggacatccgttggagcattatacgttggtggccggggtgatcaagcataaaggcagggtgtggctgggtcacaatcaagatttgcagacgaaggttatgtcttcactgcatgacagtgccatagggggacactcaggttttccggtaacatacagaagaattaaagcaatatttagttggcctggaatgaaaaatcagattcgtgagtttgttggcacttgctcaatctgtcagcaggccaagccggataggagcaaatatcctggacttctgttacccctacccatcccagatcatgcctggcaagtcgtgacgatggactttatttctgggctgcctgtgtcccacaagtacaattgtatcatggttgtggtggataagttttcgaagtatgcacatttcctagcactagctcatccgttcacagctttaaccgtagctaagctttatctgtcagacatatataagttgcatggactgccatcgtcgattgtgtctgatcgggatcccatattcactagcaagttatggcaagaactgttcagattggctgggacaaagctgtgcatgagtagtgcctatcatccacagtctgatggtcagacagaaagggttaatcagtgtttggaagcttatctgagatgcttcgttcattcttgccccaaacagtggtattcttggctctcgctggctgaattttggtataacacttgctatcataccgctctgggtaaatctcctttcgaagtgttatacggtcatgctccttctcagcttggattagacaccgttgatcagtgttcggttcctgatttacaaacttggttgcttggtcaccaacagatgctacagcaagtaaagttccatcttcagcgtgctcaggacagaatgaagaaacaggctgataagggtcgagtggaacgtacttatactgtgggcgatcaagtttttctgaaacttcagcccttctgtcaacgatcagtggctgacagaccagtttctaaactggcatttcggttttttggtccctttgaggtgattaagcagatcaatcctgtggcctatgaactagcgttaccatctgggagtgctatccacccggtctttcatgtatcgcagttaaaatcggccaacggcgtgcgggttcctagcactgactctcttccagatatctttactgggttgcaggtgccggaggaagttctggagtccaggcttcttcgtaaagggggtaaggtgatttcgcagttgctcattaagtggtccaattggccggtgtcactgtcaacctgggaggatgaagaggccattaagcagaaatttccacaagcaccagcttggggtcaagctgtcgttaaagaagggggaaatgtcagcagagcagatcacatggaccatgcagaggagcggactcaagcagtgcaacagaaggcacagacagagggagtcaaggaagacaatcagagcccgcgcagccgtcgtgtaccaaagccaaataccaagtacatcggtgcagagtggcgcgtataggtatacggagttatacgtattgatgagggcaggtgtgccggtataaataatattgtaatcgtttctaaactcagtctggaacatgttattgccgagtcggcaagaaaggaatagataccagagaaattcctggcgtgaaccacgggtgttgttcacactcgctgtccctgcctgactcttaaaaagggcggcgtgtcaccgcctggttactcacagtcatagattcacgccgcggaacgcggattccaagaacccaagtgaatcgcggctcctcgagtccggcggtgccgtccggagaggtagagctagactgctagagcacagccccgccatggcggccgcggcgcgcgcgatcatctgcgagctggcgccgcagaaggtgtcgtcgacggcgtcggggcccgcggcgccgaagaagcgtgacgccgggacgaaggtggtgctgcagccccgcctctgcacgctccggtcgtacggcgccggcagcggcgtggtgacgcggaggattctggccggggaggaggacggcagcggggccgccgactcgggcggctccgcggcgttgccgttcttcgcctcgctcgctgactacatcgagagctcccgcaagagccaggacttcgagaccatctccggccgcctcgccatggtggcgttcgcggcggcggtggccgtggagacgacgacgggcagctccctgttcaagaagctggacaccatggagatcgaggaggcggcgggggtgtgcgtggcggtggtcgccagcgccgcggcgttcgcatgggcctccagcgcgcgcaataggatcgggcagatgttcacgctgggctgcaacgccttcgtcgactccctgatcgacaatatcgtcgaggcgctcttctccgagggcgagctgcaggactggtccgatgacatatgaacatgcacatgcatatatagagactaatagtagacagacagtaatacagtatacgtacatacatagagtcaactattaacagtaagacactaggtagatgaagttgttaagtgagttccatgcattttcgcaagcttcgtcatcgctgcacaacggcaaggctgaatatttcagagatggatcgttgattagagctccgcattctgcgtaggaacacacaagcagggatgtctttcagaagtgaggcggctcttaaagccttcaaggttgtgaaatatgtagatctcttctcttgggagaaatagtggtatcctactatcctaggctctggaaagattggcccccagaattaactgtacctgctactagtactactagctataccgagtgtatttagagaatgaatcatgtaatcaaatccatgtaatatatgccaagtgtagtcagagtcaaatctggagtattgattcttgacattgtaccacatggagtggaaatgagagcctatacaccgcgtttctctagcctatctccagctacccaaacgcctgtgcatactcattttttgcactcacgttcagttactcatcttccatcagagcgcagggcgtgaaactgcctccaacaatgtatggtcctgaactctaaatttagagaacctaacctcctataaaacatccaacaatgaacagtaaagcatccagtaaaatagcggtccgtcctttcgcacgctatttttggagaggttcactgtgtatccgctatccggccaccgggcgcaagcttcgccaccttcgaggacaccaagttgagcgcatagacaagtgcggcaagggtgtcctcggcggcgggcatgacgaagctctcggatatgacggtggagcgctacgatctgtggggcgtcctcggcggcgggtacctcacacaggcgcaaggccagttcgttggtttcgcagtccttcaaccccggaccccgtggtgtcgacctgggcggccgtccaagagggccatgatggagatcagaccgtgtacatgcgccacgaggaggccggaaaagacgcttcctggacgcatgcatcgtcgccaccggagttctctaggcaggccacgtacttgtgacatccgatgtgtgcatgtgaacattgcttctgtcactgctactcacatgttgtatatagcaattcaag

SEQ ID NO: 19165 - DNA, 2677 bp, Zea Mays
tcgtgtcgtctcctacgccccccggcgattttccgattttcgtagattctgggccgcgcgttcggaggtggagtttgcgccggaaaatgctgagccacaaaaaatcacgccgttacaaacactactactccatttggcgcctatgcctatcccatccgtttctccagtttcgtcttccccgctcgctgcagctccactcagagcctccgttcccaactcgaatctccccagatcctccgcatcatctgaaaacccagatgcttctcctccagcccagtgcagtccctgcgcctgctctgcgggggaggcctcggccacgtcggcggctggtgccgcctcccctcgcctccgcgcccgcttccatcgtcgtcagctccgacgaggacgcattcaccaggtgctccgggtacctgttcgaggagggcgcggccaccgagtcggagctccccaccgcgtacgacctccccggcatcgcggccgtgtaccgccgccgcccgctcctcgtgctccgccgctccctgcagatcggcacctccttcggccggtggttcgcgctgcggtacctcgatcgcgtcaacgagcgcgccgacgacatgttcgagcttcgggcggctcagctcaggaggatactcttggagcttggcccggcatttgtgaagatcgcacaagcagtttcgtcacggccggatgttgttccacctgcataccttgatgagctctcactacttcaggaccgcatagcaccattttcaaacgatgttgcttttaatattatagagaaagagcttgggcttccactggatatggttttctctgagataacaccagagcctgttgctgctgcatctcttgggcaggtttaccaggctaggctccgctccagtgggaagattgttgctgtcaaagtacaaagacctggagttcaagcagcaatttcattagacatatatatcttgaggttcctagctagtcttgcaaggaaggctgccaagttgaacacagaccttccagctgtgcttgacgaatgggcatcaagcctattccgggtaaatcacatttgatgcaggagatggattatagagaagaagcaagaaatggacttaagttcagagaattgtttgggaaatttagagatgtgtcggttcctgaaatgtatctggaacagacaagaaggcgagtccttatcatggaatggatcgagggggaaaagttatcagaagtcagagatcaatatttggttgaggttggagtatattgttcactttcacagctattagaatatggattctatcatgcagatccacaccctggaaatcttttgcgtacagttgatgggaaattagcctacttagattttgggatgatgggagaattccgacaagaacttcgtgatggatttattgaagcttgtcttcatcttgttaaccgtgattttgatgctttagcaaaagactttgtaacccttggtttacttcctccaactgcccagaaaggtgaagtcacaaaggcattgacaggtgtatttgagaatgctgttaacagaggagttcagaatataagctttggagatctgtcaggaaatcttggacgaacaatgtataaattcaagttccagataccgtcttacttttcccttgtaattcgaagccttgctgttttagaaggtatcgcaatcagcttcaatccaaagtataaagttctggggagttcatatccatggattgcaagaaaagttctcactgacagttcaccaaagcttcgatcaactttgcagactcttctttataaggatggcactttccaaattgatcgcctggaatctttgttaactgagtcacttcgtgcaagaacagagcaatcattggtcagaaatgaacaagatgtcgacagtacgagatatgcaattaagcaagtcttgtcattcacactcgctgaccagggtgcctttgtgaaggacttacttcttcaggagattgctaagggaatagatgcacttggtgtagccacattaagttctgcaacgtctgcagcagcctccagattgccattcggtggtggaccatccccattgacctcactagatgacgaagatgccacaaacttaagaaatctgtatcgcctgctcctacttttatctaaggtttctcagaaggaaaatccatctccaattcctgaatataacagtgccatagagaaggaaggtggtagcacggatgaacttgctcttgcgctgtatggaatgacctctctgccagaatttcttccagttctttctgtcattcctgagcttccaccggagtcccaacagcagttgcttcttctgccagcggatttaaccaatcgtattttatctcgggctctcgcgagaaccattagaagactcatgtaaagccataggtgcagaaattttcggtccctgcttaatttttattttactattctttttggttcactgctagaagatggggatttttttagcatctcatctacaacccaagatcaatcccttttttgttatctacgattactatgtacatattgttcaaactaaagcaggcattgtaaatggcccatgttgttatgcacatatggtgtaactgataaactttaaatatatgtgaacatagaaataattctgtaatgcaatttgcctcgaaagcatggattcatgtcattt

SEQ ID NO: 19166 - DNA, 3291 bp, Zea Mays
gtgtcgtctcctacgccccccggcgattttccgattttcgtagattctgggccgcgcgttcggaggtggagtttgcgccggaaaatgctgagccacaaaaaatcacgccgttacaaacactactactccatttggcgcctatgcctatcccatccgtttctccagtttcgtcttccccgctcgctgcagctccactcagagcctccgttcccaactcgaatctccccagatcctccgcatcatctgaaaacccagatgcttctcctccagcccagtgcagtccctgcgcctgctctgcgggggaggcctcggccacgtcggcggctggtgccgcctcccctcgcctccgcgcccgcttccatcgtcgtcagctccgacgaggacgcattcaccaggtgctccgggtacctgttcgaggagggcgcggccaccgagtcggagctccccaccgcgtacgacctccccggcatcgcggccgtgtaccgccgccgcccgctcctcgtgctccgccgctccctgcagatcggcacctccttcggccggtggttcgcgctgcggtacctcgatcgcgtcaacgagcgcgccgacgacatgttcgagcttcgggcggctcagctcaggaggatactcttggagcttggcccggcatttgtgaagatcgcacaagcagtttcgtcacggccggatgttgttccacctgcataccttgatgagctctcactacttcaggaccgcatagcaccattttcaaacgatgttgcttttaatattatagagaaagagcttgggcttccactggatatggttttctctgagataacaccagagcctgttgctgctgcatctcttgggcaggtttaccaggctaggctccgctccagtgggaagattgttgctgtcaaagtacaaagacctggagttcaagcagcaatttcattagacatatatatcttgaggttcctagctagtcttgcaaggaaggctgccaagttgaacacagaccttccagctgtgcttgacgaatgggcatcaagcctattccgggtaactcttctccatatatgatggcatgctatttaaatagtgaacatatctatacatcagtttgttcatttatttcagttcacttcaacacatttcaatttggttatagcatttgtaggcattggcatgagataaaattagactgtagtatgaaaagtaaccattaacttgaggcttagaatagtattcctatgcggacccttaagaatgatttcaatgggctatgtggatagtgacagtttgctagaaaaaaaaacaatctaggaaaaattatgggaggtggaggtcaacatccaaaatgtggtattggttgcgggatccaaatgaacatttaaatttgttaattatttttttgttctatgatcctattcatagttcactatgctcaagtaattttgaggctgcaagttatggacacatgttaccatatatccaaggaggaacataaatatcaatctttttcaatgtgatagtggtttgaaaccattgcatttgtacttttaccgtgagagtccatagcttttgtgataaacatgttttcagaagcctggccaagaaaagttgatattattctagtattctagcaggactgtgctagcagtattctaggctattgcagattctgactaaaacattaggtgtatatccttagatattcacattgaatacaggtaaatcacatttgatgcaggagatggattatagagaagaagcaagaaatggacttaagttcagagaattgtttgggaaatttagagatgtgtcggttcctgaaatgtatctggaacagacaagaaggcgagtccttatcatggaatggatcgagggggaaaagttatcagaagtcagagatcaatatttggttgagatccacaccctggaaatcttttgcgtacagttgatgggaaattagcctacttagattttgggatgatgggagaattccgacaagaacttcgtgatggatttattgaagcttgtcttcatcttgttaaccgtgattttgatgctttagcaaaagactttgtaacccttggtttacttcctccaactgcccagaaaggtgaagtcacaaaggcattgacaggtgtatttgagaatgctgttaacagaggagttcagaatataagctttggagatctgtcaggaaatcttggacgaacaatgtataaattcaagttccagataccgtcttacttttcccttgtaattcgaagccttgctgttttagaaggtatcgcaatcagcttcaatccaaagtataaagttctggggagttcatatccatggattgcaagaaaagttctcactgacagttcaccaaagcttcgatcaactttgcagactcttctttataaggatggcactttccaaattgatcgcctggaatctttgttaactgagtcacttcgtgcaagaacagagcaatcattggtcagaaatgaacaagatgtcgacagtacgagatatgcaattaagcaagtcttgtcattcacactcgctgaccagggtgcctttgtgaaggacttacttcttcaggagattgctaagggaatagatgcacttggtgtagccacattaagttctgcaacgtctgcagcagcctccagattgccattcggtggtggaccatccccattgacctcactagatgacgaagatgccacaaacttaagaaatctgtatcgcctgctcctacttttatctaaggtttctcagaaggaaaatccatctccaattcctgaatataacagtgccatagagaaggaaggtggtagcacggatgaacttgctcttgcgctgtatggaatgacctctctgccagaatttcttccagttctttctgtcattcctgagcttccaccggagtcccaacagcagttgcttcttctgccagcggatttaaccaatcgtattttatctcgggctctcgcgagaaccattagaagactcatgtaaagccataggtgcagaaattttcggtccctgcttaatttttattttactattctttttggttcactgctagaagatggggatttttttagcatctcatctacaacccaagatcaatcccttttttgttatctacgattactatgtacatattgttcaaactaaagcaggcattgtaaatggcccatgttgttatgcacatatggtgtaactgataaactttaaatatatgtgaacatagaaataattctgtaatgcaatttgcctcgaaagcatggattcatgtcattt

SEQ ID NO: 19167 - DNA, 3249 bp, Zea Mays
aaaaatcacgccgttacaaacactactactccatttggcgcctatgcctatcccatccgtttctccagtttcgtcttccccgctcgctgcagctccactcagagcctccgttcccaactcgaatctccccagatcctccgcatcatctgaaaacccagatgcttctcctccagcccagtgcagtccctgcgcctgctctgcgggggaggcctcggccacgtcggcggctggtgccgcctcccctcgcctccgcgcccgcttccatcgtcgtcagctccgacgaggacgcattcaccaggtgctccgggtacctgttcgaggagggcgcggccaccgagtcggagctccccaccgcgtacgacctccccggcatcgcggccgtgtaccgccgccgcccgctcctcgtgctccgccgctccctgcagatcggcacctccttcggccggtggttcgcgctgcggtacctcgatcgcgtcaacgagcgcgccgacgacatgttcgagcttcgggcggctcagctcaggaggatactcttggagcttggcccggcatttgtgaagatcgcacaagcagtttcgtcacggccggatgttgttccacctgcataccttgatgagctctcactacttcaggaccgcatagcaccattttcaaacgatgttgcttttaatattatagagaaagagcttgggcttccactggatatggttttctctgagataacaccagagcctgttgctgctgcatctcttgggcaggtttaccaggctaggctccgctccagtgggaagattgttgctgtcaaagtacaaagacctggagttcaagcagcaatttcattagacatatatatcttgaggttcctagctagtcttgcaaggaaggctgccaagttgaacacagaccttccagctgtgcttgacgaatgggcatcaagcctattccgggtaactcttctccatatatgatggcatgctatttaaatagtgaacatatctatacatcagtttgttcatttatttcagttcacttcaacacatttcaatttggttatagcatttgtaggcattggcatgagataaaattagactgtagtatgaaaagtaaccattaacttgaggcttagaatagtattcctatgcggacccttaagaatgatttcaatgggctatgtggatagtgacagtttgctagaaaaaaaaacaatctaggaaaaattatgggaggtggaggtcaacatccaaaatgtggtattggttgcgggatccaaatgaacatttaaatttgttaattatttttttgttctatgatcctattcatagttcactatgctcaagtaattttgaggctgcaagttatggacacatgttaccatatatccaaggaggaacataaatatcaatctttttcaatgtgatagtggtttgaaaccattgcatttgtacttttaccgtgagagtccatagcttttgtgataaacatgttttcagaagcctggccaagaaaagttgatattattctagtattctagcaggactgtgctagcagtattctaggctattgcagattctgactaaaacattaggtgtatatccttagatattcacattgaatacaggtaaatcacatttgatgcaggagatggattatagagaagaagcaagaaatggacttaagttcagagaattgtttgggaaatttagagatgtgtcggttcctgaaatgtatctggaacagacaagaaggcgagtccttatcatggaatggatcgagggggaaaagttatcagaagtcagagatcaatatttggttgaggttggagtatattgttcactttcacagctattagaatatggattctatcatgcagatccacaccctggaaatcttttgcgtacagttgatgggaaattagcctacttagattttgggatgatgggagaattccgacaagaacttcgtgatggatttattgaagcttgtcttcatcttgttaaccgtgattttgatgctttagcaaaagactttgtaacccttggtttacttcctccaactgcccagaaaggtgaagtcacaaaggcattgacaggtgtatttgagaatgctgttaacagaggagttcagaatataagctttggagatctgtcaggaaatcttggacgaacaatgtataaattcaagttccagataccgtcttacttttcccttgtaattcgaagccttgctgttttagaaggtatcgcaatcagcttcaatccaaagtataaagttctggggagttcatatccatggattgcaagaaaagttctcactgacagttcaccaaagcttcgatcaactttgcagactcttctttataaggatggcactttccaaattgatcgcctggaatctttgttaactgagtcacttcgtgcaagaacagagcaatcattggtcagaaatgaacaagatgtcgacagtacgagatatgcaattaagcaagtcttgtcattcacactcgctgaccagggtgcctttgtgaaggacttacttcttcaggagattgctaagggaatagatgcacttggtgtagccacattaagttctgcaacgtctgcagcagcctccagattgccattcggtggtggaccatccccattgacctcactagatgacgaagatgccacaaacttaagaaatctgtatcgcctgctcctacttttatctaaggtttctcagaaggaaaatccatctccaattcctgaatataacagtgccatagagaaggaaggtggtagcacggatgaacttgctcttgcgctgtatggaatgacctctctgccagaatttcttccagttctttctgtcattcctgagcttccaccggagtcccaacagcagttgcttcttctgccagcggatttaaccaatcgtattttatctcgggctctcgcgagaaccattagaagactcatgtaaagccataggtgcagaaattttcggtccctgcttaatttttattttactattctttttggttcactgctagaagatggggatttttttagcatctcatctacaacccaagatcaatcccttttttgttatctacgattactatgtacatattgttcaaactaaagcaggcattgtaaatggcccatgttgttatgcacatatggtgtaactgataaactttaaatatatgtgaacatagaaataattctgtaatgcaatttgcctcgaaagcatggattcatgtcattt

SEQ ID NO: 19168 - DNA, 2621 bp, Zea Mays
ctactactccatttggcgcctatgcctatcccatccgtttctccagtttcgtcttccccgctcgctgcagctccactcagagcctccgttcccaactcgaatctccccagatcctccgcatcatctgaaaacccagatgcttctcctccagcccagtgcagtccctgcgcctgctctgcgggggaggcctcggccacgtcggcggctggtgccgcctcccctcgcctccgcgcccgcttccatcgtcgtcagctccgacgaggacgcattcaccaggtgctccgggtacctgttcgaggagggcgcggccaccgagtcggagctccccaccgcgtacgacctccccggcatcgcggccgtgtaccgccgccgcccgctcctcgtgctccgccgctccctgcagatcggcacctccttcggccggtggttcgcgctgcggtacctcgatcgcgtcaacgagcgcgccgacgacatgttcgagcttcgggcggctcagctcaggaggatactcttggagcttggcccggtatgtctcatttcctattgccttatctgatgatcataaagtttattgatgttccttttttaatcacaggcatttgtgaagatcgcacaagcagtttcgtcacggccggatgttgttccacctgcataccttgatgagctctcactacttcaggaccgcatagcaccattttcaaacgatgttgcttttaatattatagagaaagagcttgggcttccactggatatggttttctctgagataacaccagagcctgttgctgctgcatctcttgggcaggtttaccaggctaggctccgctccagtgggaagattgttgctgtcaaagtacaaagacctggagttcaagcagcaatttcattagacatatatatcttgaggttcctagctagtcttgcaaggaaggctgccaagttgaacacagaccttccagctgtgcttgacgaatgggcatcaagcctattccgggtaaatcacatttgatgcaggagatggattatagagaagaagcaagaaatggacttaagttcagagaattgtttgggaaatttagagatgtgtcggttcctgaaatgtatctggaacagacaagaaggcgagtccttatcatggaatggatcgagggggaaaagttatcagaagtcagagatcaatatttggttgagatccacaccctggaaatcttttgcgtacagttgatgggaaattagcctacttagtttacttcctccaactgcccagaaaggtgaagtcacaaaggcattgacaggtgtatttgagaatgctgttaacagaggagttcagaatataagctttggagatctgtcaggaaatcttggacgaacaatgtacaattctagcttataaccatttttcaatagatgtactgtaagtttgtcctaataattagagttaacgttgtttcaggtataaattcaagttccagataccgtcttacttttcccttgtaattcgaagccttgctgttttagaaggtatcgcaatcagcttcaatccaaagtataaagttctggggagttcatatccatggattgcaagaaaagttctcactgacagttcaccaaagcttcgatcaactttgcagactcttctttataaggatggcactttccaaattgatcgcctggaatctttgttaactgagtcacttcgtgcaagaacagagcaatcattggtcagaaatgaacaagatgtcgacagtacgagatatgcaattaagcaagtcttgtcattcacactcgctgaccagggtgcctttgtgaaggacttacttcttcaggagattgctaagggaatagatgcacttggtgtagccacattaagttctgcaacgtctgcagcagcctccagattgccattcggtggtggaccatccccattgacctcactagatgacgaagatgccacaaacttaagaaatctgtatcgcctgctcctacttttatctaaggtttctcagaaggaaaatccatctccaattcctgaatataacagtgccatagagaaggaaggtggtagcacggatgaacttgctcttgcgctgtatggaatgacctctctgccagaatttcttccagttctttctgtcattcctgaggtaagttggacataagttacgtgagaccatatatgtcaaaatccacatggcacatggctcatttgtgtatacccttctccatcgaagcttccaccggagtcccaacagcagttgcttcttctgccagcggatttaaccaatcgtattttatctcgggctctcgcgagaaccattagaagactcatgtaaagccataggtgcagaaattttcggtccctgcttaatttttattttactattctttttggttcactgctagaagatggggatttttttagcatctcatctacaacccaagatcaatcccttttttgttatctacgattactatgtacatattgttcaaactaaagcaggcattgtaaatggcccatgttgttatgcacatatggtgtaactgataaactttaaatatatgtgaacatagaaataattctgtaatgcaatttgcctcgaaagcatggattcatgtcattt

SEQ ID NO: 19169 - DNA, 2611 bp, Zea Mays
ctactactccatttggcgcctatgcctatcccatccgtttctccagtttcgtcttccccgctcgctgcagctccactcagagcctccgttcccaactcgaatctccccagatcctccgcatcatctgaaaacccagatgcttctcctccagcccagtgcagtccctgcgcctgctctgcgggggaggcctcggccacgtcggcggctggtgccgcctcccctcgcctccgcgcccgcttccatcgtcgtcagctccgacgaggacgcattcaccaggtgctccgggtacctgttcgaggagggcgcggccaccgagtcggagctccccaccgcgtacgacctccccggcatcgcggccgtgtaccgccgccgcccgctcctcgtgctccgccgctccctgcagatcggcacctccttcggccggtggttcgcgctgcggtacctcgatcgcgtcaacgagcgcgccgacgacatgttcgagcttcgggcggctcagctcaggaggatactcttggagcttggcccggtatgtctcatttcctattgccttatctgatgatcataaagtttattgatgttccttttttaatcacaggcatttgtgaagatcgcacaagcagtttcgtcacggccggatgttgttccacctgcataccttgatgagctctcactacttcaggaccgcatagcaccattttcaaacgatgttgcttttaatattatagagaaagagcttgggcttccactggatatggttttctctgagataacaccagagcctgttgctgctgcatctcttgggcaggtttaccaggctaggctccgctccagtgggaagattgttgctgtcaaagtacaaagacctggagttcaagcagcaatttcattagacatatatatcttgaggttcctagctagtcttgcaaggaaggctgccaagttgaacacagaccttccagctgtgcttgacgaatgggcatcaagcctattccgggagatggattatagagaagaagcaagaaatggacttaagttcaggttgaattcttcatccattagacaagagaattgtttgggaaatttagagatgtgtcggttcctgaaatgtatctggaacagacaagaaggcgagtccttatcatggaatggatcgagggggaaaagttatcagaagtcagagatcaatatttggttgagatccacaccctggaaatcttttgcgtacagttgatgggaaattagcctacttagattttgggatgatgggagaattccgacaagaacttcgtgatggatttattgaagcttgtcttcatcttgttaaccgtgattttgatgctttagcaaaagactttgtaacccttggtttacttcctccaactgcccagaaaggtgaagtcacaaaggcattgacaggtgtatttgagaatgctgttaacagaggagttcagaatataagctttggagatctgtcaggaaatcttggacgaacaatgtataaattcaagttccagataccgtcttacttttcccttgtaattcgaagccttgctgttttagaaggtatcgcaatcagcttcaatccaaagtataaagttctggggagttcatatccatggattgcaagaaaagttctcactgacagttcaccaaagcttcgatcaactttgcagactcttctttataaggatggcactttccaaattgatcgcctggaatctttgttaactgagtcacttcgtgcaagaacagagcaatcattggtcagaaatgaacaagatgtcgacagtacgagatatgcaattaagcaagtcttgtcattcacactcgctgaccagggtgcctttgtgaaggacttacttcttcaggagattgctaagcctccagattgccattcggtggtggaccatccccattgacctcactagatgacgaagatgccacaaacttaagaaatctgtatcgcctgctcctacttttatctaaggtttctcagaaggaaaatccatctccaattcctgaatataacagtgccatagagaaggaaggtggtagcacggatgaacttgctcttgcgctgtatggaatgacctctctgccagaatttcttccagttctttctgtcattcctgaggtaagttggacataagttacgtgagaccatatatgtcaaaatccacatggcacatggctcatttgtgtatacccttctccatcgaagcttccaccggagtcccaacagcagttgcttcttctgccagcggatttaaccaatcgtattttatctcgggctctcgcgagaaccattagaagactcatgtaaagccataggtgcagaaattttcggtccctgcttaatttttattttactattctttttggttcactgctagaagatggggatttttttagcatctcatctacaacccaagatcaatcccttttttgttatctacgattactatgtacatattgttcaaactaaagcaggcattgtaaatggcccatgttgttatgcacatatggtgtaactgataaactttaaatatatgtgaacatagaaataattctgtaatgcaatttgcctcgaaagcatggattcatgtcattt

SEQ ID NO: 19170 - DNA, 3322 bp, Zea Mays
ctactactccatttggcgcctatgcctatcccatccgtttctccagtttcgtcttccccgctcgctgcagctccactcagagcctccgttcccaactcgaatctccccagatcctccgcatcatctgaaaacccagatgcttctcctccagcccagtgcagtccctgcgcctgctctgcgggggaggcctcggccacgtcggcggctggtgccgcctcccctcgcctccgcgcccgcttccatcgtcgtcagctccgacgaggacgcattcaccaggtgctccgggtacctgttcgaggagggcgcggccaccgagtcggagctccccaccgcgtacgacctccccggcatcgcggccgtgtaccgccgccgcccgctcctcgtgctccgccgctccctgcagatcggcacctccttcggccggtggttcgcgctgcggtacctcgatcgcgtcaacgagcgcgccgacgacatgttcgagcttcgggcggctcagctcaggaggatactcttggagcttggcccggtatgtctcatttcctattgccttatctgatgatcataaagtttattgatgttccttttttaatcacaggcatttgtgaagatcgcacaagcagtttcgtcacggccggatgttgttccacctgcataccttgatgagctctcactacttcaggaccgcatagcaccattttcaaacgatgttgcttttaatattatagagaaagagcttgggcttccactggatatggttttctctgagataacaccagagcctgttgctgctgcatctcttgggcaggtttaccaggctaggctccgctccagtgggaagattgttgctgtcaaagtacaaagacctggagttcaagcagcaatttcattagacatatatatcttgaggttcctagctagtcttgcaaggaaggctgccaagttgaacacagaccttccagctgtgcttgacgaatgggcatcaagcctattccgggtaactcttctccatatatgatggcatgctatttaaatagtgaacatatctatacatcagtttgttcatttatttcagttcacttcaacacatttcaatttggttatagcatttgtaggcattggcatgagataaaattagactgtagtatgaaaagtaaccattaacttgaggcttagaatagtattcctatgcggacccttaagaatgatttcaatgggctatgtggatagtgacagtttgctagaaaaaaaaacaatctaggaaaaattatgggaggtggaggtcaacatccaaaatgtggtattggttgcgggatccaaatgaacatttaaatttgttaattatttttttgttctatgatcctattcatagttcactatgctcaagtaattttgaggctgcaagttatggacacatgttaccatatatccaaggaggaacataaatatcaatctttttcaatgtgatagtggtttgaaaccattgcatttgtacttttaccgtgagagtccatagcttttgtgataaacatgttttcagaagcctggccaagaaaagttgatattattctagtattctagcaggactgtgctagcagtattctaggctattgcagattctgactaaaacattaggtgtatatccttagatattcacattgaatacaggtaaatcacatttgatgcaggagatggattatagagaagaagcaagaaatggacttaagttcaggttgaattcttcatccattagacaagagaattgtttgggaaatttagagatgtgtcggttcctgaaatgtatctggaacagacaagaaggcgagtccttatcatggaatggatcgagggggaaaagttatcagaagtcagagatcaatatttggttgaggttggagtatattgttcactttcacagctattagaatatggattctatcatgcagatccacaccctggaaatcttttgcgtacagttgatgggaaattagcctacttagattttgggatgatgggagaattccgacaagaacttcgtgatggatttattgaagcttgtcttcatcttgttaaccgtgattttgatgctttagcaaaagactttgtaacccttggtttacttcctccaactgcccagaaaggtgaagtcacaaaggcattgacaggtgtatttgagaatgctgttaacagaggagttcagaatataagctttggagatctgtcaggaaatcttggacgaacaatgtataaattcaagttccagataccgtcttacttttcccttgtaattcgaagccttgctgttttagaaggtatcgcaatcagcttcaatccaaagtataaagttctggggagttcatatccatggattgcaagaaaagttctcactgacagttcaccaaagcttcgatcaactttgcagactcttctttataaggatggcactttccaaattgatcgcctggaatctttgttaactgagtcacttcgtgcaagaacagagcaatcattggtcagaaatgaacaagatgtcgacagtacgagatatgcaattaagcaagtcttgtcattcacactcgctgaccagggtgcctttgtgaaggacttacttcttcaggagattgctaagggaatagatgcacttggtgtagccacattaagttctgcaacgtctgcagcagcctccagattgccattcggtggtggaccatccccattgacctcactagatgacgaagatgccacaaacttaagaaatctgtatcgcctgctcctacttttatctaaggtttctcagaaggaaaatccatctccaattcctgaatataacagtgccatagagaaggaaggtggtagcacggatgaacttgctcttgcgctgtatggaatgacctctctgccagaatttcttccagttctttctgtcattcctgagcttccaccggagtcccaacagcagttgcttcttctgccagcggatttaaccaatcgtattttatctcgggctctcgcgagaaccattagaagactcatgtaaagccataggtgcagaaattttcggtccctgcttaatttttattttactattctttttggttcactgctagaagatggggatttttttagcatctcatctacaacccaagatcaatcccttttttgttatctacgattactatgtacatattgttcaaactaaagcaggcattgtaaatggcccatgttgttatgcacatatggtgtaactgataaactttaaatatatgtgaacatagaaataattctgtaatgcaatttgcctcgaaagcatggattcatgtcattt

SEQ ID NO: 19171 - DNA, 2651 bp, Zea Mays
ctactactccatttggcgcctatgcctatcccatccgtttctccagtttcgtcttccccgctcgctgcagctccactcagagcctccgttcccaactcgaatctccccagatcctccgcatcatctgaaaacccagatgcttctcctccagcccagtgcagtccctgcgcctgctctgcgggggaggcctcggccacgtcggcggctggtgccgcctcccctcgcctccgcgcccgcttccatcgtcgtcagctccgacgaggacgcattcaccaggtgctccgggtacctgttcgaggagggcgcggccaccgagtcggagctccccaccgcgtacgacctccccggcatcgcggccgtgtaccgccgccgcccgctcctcgtgctccgccgctccctgcagatcggcacctccttcggccggtggttcgcgctgcggtacctcgatcgcgtcaacgagcgcgccgacgacatgttcgagcttcgggcggctcagctcaggaggatactcttggagcttggcccggtatgtctcatttcctattgccttatctgatgatcataaagtttattgatgttccttttttaatcacaggcatttgtgaagatcgcacaagcagtttcgtcacggccggatgttgttccacctgcataccttgatgagctctcactacttcaggaccgcatagcaccattttcaaacgatgttgcttttaatattatagagaaagagcttgggcttccactggatatggttttctctgagataacaccagagcctgttgctgctgcatctcttgggcaggtttaccaggctaggctccgctccagtgggaagattgttgctgtcaaagtacaaagacctggagttcaagcagcaatttcattagacatatatatcttgaggttcctagctagtcttgcaaggaaggctgccaagttgaacacagaccttccagctgtgcttgacgaatgggcatcaagcctattccgggtaaatcacatttgatgcaggagatggattatagagaagaagcaagaaatggacttaagttcaggttgaattcttcatccattagacaagagaattgtttgggaaatttagagatgtgtcggttcctgaaatgtatctggaacagacaagaaggcgagtccttatcatggaatggatcgagggggaaaagttatcagaagtcagagatcaatatttggttgaggttggagtatattgttcactttcacagctattagaatatggattctatcatgcagatccacaccctggaaatcttttgcgtacagttgatgggaaattagcctacttagattttgggatgatgggagaattccgacaagaacttcgtgatggatttattgaagcttgtcttcatcttgttaaccgtgattttgatgctttagcaaaagactttgtaacccttggtttacttcctccaactgcccagaaaggtgaagtcacaaaggcattgacaggtgtatttgagaatgctgttaacagaggagttcagaatataagctttggagatctgtcaggaaatcttggacgaacaatgtataaattcaagttccagataccgtcttacttttcccttgtaattcgaagccttgctgttttagaaggtatcgcaatcagcttcaatccaaagtataaagttctggggagttcatatccatggattgcaagaaaagttctcactgacagttcaccaaagcttcgatcaactttgcagactcttctttataaggatggcactttccaaattgatcgcctggaatctttgttaactgagtcacttcgtgcaagaacagagcaatcattggtcagaaatgaacaagatgtcgacagtacgagatatgcaattaagcaagtcttgtcattcacactcgctgaccagggtgcctttgtgaaggacttacttcttcaggagattgctaagggaatagatgcacttggtgtagccacattaagttctgcaacgtctgcagcagcctccagattgccattcggtggtggaccatccccattgacctcactagatgacgaagatgccacaaacttaagaaatctgtatcgcctgctcctacttttatctaaggtttctcagaaggaaaatccatctccaattcctgaatataacagtgccatagagaaggaaggtggtagcacggatgaacttgctcttgcgctgtatggaatgacctctctgccagaatttcttccagttctttctgtcattcctgagcttccaccggagtcccaacagcagttgcttcttctgccagcggatttaaccaatcgtattttatctcgggctctcgcgagaaccattagaagactcatgtaaagccataggtgcagaaattttcggtccctgcttaatttttattttactattctttttggttcactgctagaagatggggatttttttagcatctcatctacaacccaagatcaatcccttttttgttatctacgattactatgtacatattgttcaaactaaagcaggcattgtaaatggcccatgttgttatgcacatatggtgtaactgataaactttaaatatatgtgaacatagaaataattctgtaatgcaatttgcctcgaaagcatggattcatgtcattt

SEQ ID NO: 19172 - DNA, 2571 bp, Zea Mays
ctactactccatttggcgcctatgcctatcccatccgtttctccagtttcgtcttccccgctcgctgcagctccactcagagcctccgttcccaactcgaatctccccagatcctccgcatcatctgaaaacccagatgcttctcctccagcccagtgcagtccctgcgcctgctctgcgggggaggcctcggccacgtcggcggctggtgccgcctcccctcgcctccgcgcccgcttccatcgtcgtcagctccgacgaggacgcattcaccaggtgctccgggtacctgttcgaggagggcgcggccaccgagtcggagctccccaccgcgtacgacctccccggcatcgcggccgtgtaccgccgccgcccgctcctcgtgctccgccgctccctgcagatcggcacctccttcggccggtggttcgcgctgcggtacctcgatcgcgtcaacgagcgcgccgacgacatgttcgagcttcgggcggctcagctcaggaggatactcttggagcttggcccggcatttgtgaagatcgcacaagcagtttcgtcacggccggatgttgttccacctgcataccttgatgagctctcactacttcaggaccgcatagcaccattttcaaacgatgttgcttttaatattatagagaaagagcttgggcttccactggatatggttttctctgagataacaccagagcctgttgctgctgcatctcttgggcaggtttaccaggctaggctccgctccagtgggaagattgttgctgtcaaagtacaaagacctggagttcaagcagcaatttcattagacatatatatcttgaggttcctagctagtcttgcaaggaaggctgccaagttgaacacagaccttccagctgtgcttgacgaatgggcatcaagcctattccgggagatggattatagagaagaagcaagaaatggacttaagttcagagaattgtttgggaaatttagagatgtgtcggttcctgaaatgtatctggaacagacaagaaggcgagtccttatcatggaatggatcgagggggaaaagttatcagaagtcagagatcaatatttggttgaggttggagtatattgttcactttcacagctattagaatatggattctatcatgcagatccacaccctggaaatcttttgcgtacagttgatgggaaattagcctacttagattttgggatgatgggagaattccgacaagaacttcgtgatggatttattgaagcttgtcttcatcttgttaaccgtgattttgatgctttagcaaaagactttgtaacccttggtttacttcctccaactgcccagaaaggtgaagtcacaaaggcattgacaggtgtatttgagaatgctgttaacagaggagttcagaatataagctttggagatctgtcaggaaatcttggacgaacaatgtataaattcaagttccagataccgtcttacttttcccttgtaattcgaagccttgctgttttagaaggtatcgcaatcagcttcaatccaaagtataaagttctggggagttcatatccatggattgcaagaaaagttctcactgacagttcaccaaagcttcgatcaactttgcagactcttctttataaggatggcactttccaaattgatcgcctggaatctttgttaactgagtcacttcgtgcaagaacagagcaatcattggtcagaaatgaacaagatgtcgacagtacgagatatgcaattaagcaagtcttgtcattcacactcgctgaccagggtgcctttgtgaaggacttacttcttcaggagattgctaagcctccagattgccattcggtggtggaccatccccattgacctcactagatgacgaagatgccacaaacttaagaaatctgtatcgcctgctcctacttttatctaaggtttctcagaaggaaaatccatctccaattcctgaatataacagtgccatagagaaggaaggtggtagcacggatgaacttgctcttgcgctgtatggaatgacctctctgccagaatttcttccagttctttctgtcattcctgaggtaagttggacataagttacgtgagaccatatatgtcaaaatccacatggcacatggctcatttgtgtatacccttctccatcgaagcttccaccggagtcccaacagcagttgcttcttctgccagcggatttaaccaatcgtattttatctcgggctctcgcgagaaccattagaagactcatgtaaagccataggtgcagaaattttcggtccctgcttaatttttattttactattctttttggttcactgctagaagatggggatttttttagcatctcatctacaacccaagatcaatcccttttttgttatctacgattactatgtacatattgttcaaactaaagcaggcattgtaaatggcccatgttgttatgcacatatggtgtaactgataaactttaaatatatgtgaacatagaaataattctgtaatgcaatttgcctcgaaagcatggattcatgtcattt

SEQ ID NO: 19173 - DNA, 3120 bp, Zea Mays
ctactactccatttggcgcctatgcctatcccatccgtttctccagtttcgtcttccccgctcgctgcagctccactcagagcctccgttcccaactcgaatctccccagatcctccgcatcatctgaaaacccagatgcttctcctccagcccagtgcagtccctgcgcctgctctgcgggggaggcctcggccacgtcggcggctggtgccgcctcccctcgcctccgcgcccgcttccatcgtcgtcagctccgacgaggacgcattcaccaggtgctccgggtacctgttcgaggagggcgcggccaccgagtcggagctccccaccgcgtacgacctccccggcatcgcggccgtgtaccgccgccgcccgctcctcgtgctccgccgctccctgcagatcggcacctccttcggccggtggttcgcgctgcggtacctcgatcgcgtcaacgagcgcgccgacgacatgttcgagcttcgggcggctcagctcaggaggatactcttggagcttggcccggcatttgtgaagatcgcacaagcagtttcgtcacggccggatgttgttccacctgcataccttgatgagctctcactacttcaggaccgcatagcaccattttcaaacgatgttgcttttaatattatagagaaagagcttgggcttccactggatatggttttctctgagataacaccagagcctgttgctgctgcatctcttgggcaggtttaccaggctaggctccgctccagtgggaagattgttgctgtcaaagtacaaagacctggagttcaagcagcaatttcattagacatatatatcttgaggttcctagctagtcttgcaaggaaggctgccaagttgaacacagaccttccagctgtgcttgacgaatgggcatcaagcctattccgggtaactcttctccatatatgatggcatgctatttaaatagtgaacatatctatacatcagtttgttcatttatttcagttcacttcaacacatttcaatttggttatagcatttgtaggcattggcatgagataaaattagactgtagtatgaaaagtaaccattaacttgaggcttagaatagtattcctatgcggacccttaagaatgatttcaatgggctatgtggatagtgacagtttgctagaaaaaaaaacaatctaggaaaaattatgggaggtggaggtcaacatccaaaatgtggtattggttgcgggatccaaatgaacatttaaatttgttaattatttttttgttctatgatcctattcatagttcactatgctcaagtaattttgaggctgcaagttatggacacatgttaccatatatccaaggaggaacataaatatcaatctttttcaatgtgatagtggtttgaaaccattgcatttgtacttttaccgtgagagtccatagcttttgtgataaacatgttttcagaagcctggccaagaaaagttgatattattctagtattctagcaggactgtgctagcagtattctaggctattgcagattctgactaaaacattaggtgtatatccttagatattcacattgaatacaggtaaatcacatttgatgcaggagatggattatagagaagaagcaagaaatggacttaagttcagagaattgtttgggaaatttagagatgtgtcggttcctgaaatgtatctggaacagacaagaaggcgagtccttatcatggaatggatcgagggggaaaagttatcagaagtcagagatcaatatttggttgagatccacaccctggaaatcttttgcgtacagttgatgggaaattagcctacttagattttgggatgatgggagaattccgacaagaacttcgtgatggatttattgaagcttgtcttcatcttgttaaccgtgattttgatgctttagcaaaagactttgtaacccttggtttacttcctccaactgcccagaaaggtgaagtcacaaaggcattgacaggtgtatttgagaatgctgttaacagaggagttcagaatataagctttggagatctgtcaggaaatcttggacgaacaatgtataaattcaagttccagataccgtcttacttttcccttgtaattcgaagccttgctgttttagaaggtatcgcaatcagcttcaatccaaagtataaagttctggggagttcatatccatggattgcaagaaaagttctcactgacagttcaccaaagcttcgatcaactttgcagactcttctttataaggatggcactttccaaattgatcgcctggaatctttgttaactgagtcacttcgtgcaagaacagagcaatcattggtcagaaatgaacaagatgtcgacagtacgagatatgcaattaagcaagtcttgtcattcacactcgctgaccagggtgcctttgtgaaggacttacttcttcaggagattgctaagcctccagattgccattcggtggtggaccatccccattgacctcactagatgacgaagatgccacaaacttaagaaatctgtatcgcctgctcctacttttatctaaggtttctcagaaggaaaatccatctccaattcctgaatataacagtgccatagagaaggaaggtggtagcacggatgaacttgctcttgcgctgtatggaatgacctctctgccagaatttcttccagttctttctgtcattcctgagcttccaccggagtcccaacagcagttgcttcttctgccagcggatttaaccaatcgtattttatctcgggctctcgcgagaaccattagaagactcatgtaaagccataggtgcagaaattttcggtccctgcttaatttttattttactattctttttggttcactgctagaagatggggatttttttagcatctcatctacaacccaagatcaatcccttttttgttatctacgattactatgtacatattgttcaaactaaagcaggcattgtaaatggcccatgttgttatgcacatatggtgtaactgataaactttaaatatatgtgaacatagaaataattctgtaatgcaatttgcctcgaaagcatggattcatgtcattt

SEQ ID NO: 19174 - DNA, 2589 bp, Zea Mays
gatgcttctcctccagcccagtgcagtccctgcgcctgctctgcgggggaggcctcggccacgtcggcggctggtgccgcctcccctcgcctccgcgcccgcttccatcgtcgtcagctccgacgaggacgcattcaccaggtgctccgggtacctgttcgaggagggcgcggccaccgagtcggagctccccaccgcgtacgacctccccggcatcgcggccgtgtaccgccgccgcccgctcctcgtgctccgccgctccctgcagatcggcacctccttcggccggtggttcgcgctgcggtacctcgatcgcgtcaacgagcgcgccgacgacatgttcgagcttcgggcggctcagctcaggaggatactcttggagcttggcccggcatttgtgaagatcgcacaagcagtttcgtcacggccggatgttgttccacctgcataccttgatgagctctcactacttcaggaccgcatagcaccattttcaaacgatgttgcttttaatattatagagaaagagcttgggcttccactggatatggttttctctgagataacaccagagcctgttgctgctgcatctcttgggcaggtttaccaggctaggctccgctccagtgggaagattgttgctgtcaaagtacaaagacctggagttcaagcagcaatttcattagacatatatatcttgaggttcctagctagtcttgcaaggaaggctgccaagttgaacacagaccttccagctgtgcttgacgaatgggcatcaagcctattccgggagatggattatagagaagaagcaagaaatggacttaagttcagagaattgtttgggaaatttagagatgtgtcggttcctgaaatgtatctggaacagacaagaaggcgagtccttatcatggaatggatcgaggtgcagtctgtgatcttattgaactgttagcaaatgaacatgcatgcaaaaaatgcagttcataattctacttgcactctgtgatcttctagggggaaaagttatcagaagtcagagatcaatatttggttgaggttggagtatattgttcactttcacagctattagaatatggattctatcatgcagatccacaccctggaaatcttttgcgtacagttgatgggaaattagcctacttagattttgggatgatgggagaattccgacaagaacttcgtgatggatttattgaagcttgtcttcatcttgttaaccgtgattttgatgctttagcaaaagactttgtaacccttggtttacttcctccaactgcccagaaaggtgaagtcacaaaggcattgacaggtgtatttgagaatgctgttaacagaggagttcagaatataagctttggagatctgtcaggaaatcttggacgaacaatgtataaattcaagttccagataccgtcttacttttcccttgtaattcgaagccttgctgttttagaaggtatcgcaatcagcttcaatccaaagtataaagttctggggagttcatatccatggattgcaagaaaagttctcactgacagttcaccaaagcttcgatcaactttgcagactcttctttataaggatggcactttccaaattgatcgcctggaatctttgttaactgagtcacttcgtgcaagaacagagcaatcattggtcagaaatgaacaagatgtcgacagtacgagatatgcaattaagcaagtcttgtcattcacactcgctgaccagggtgcctttgtgaaggacttacttcttcaggagattgctaagtttttgtagggaatagatgcacttggtgtagccacattaagttctgcaacgtctgcagcagcctccagattgccattcggtggtggaccatccccattgacctcactagatgacgaagatgccacaaacttaagaaatctgtatcgcctgctcctacttttatctaaggtttctcagaaggaaaatccatctccaattcctgaatataacagtgccatagagaaggaaggtggtagcacggatgaacttgctcttgcgctgtatggaatgacctctctgccagaatttcttccagttctttctgtcattcctgaggtaagttggacataagttacgtgagaccatatatgtcaaaatccacatggcacatggctcatttgtgtatacccttctccatcgaagcttccaccggagtcccaacagcagttgcttcttctgccagcggatttaaccaatcgtattttatctcgggctctcgcgagaaccattagaagactcatgtaaagccataggtgcagaaattttcggtccctgcttaatttttattttactattctttttggttcactgctagaagatggggatttttttagcatctcatctacaacccaagatcaatcccttttttgttatctacgattactatgtacatattgttcaaactaaagcaggcattgtaaatggcccatgttgttatgcacatatggtgtaactgataaactttaaatatatgtgaacatagaaataattctgtaatgcaatttgcctcgaaagcatggattcatgtcattt

SEQ ID NO: 19175 - DNA, 2346 bp, Zea Mays
gatgcttctcctccagcccagtgcagtccctgcgcctgctctgcgggggaggcctcggccacgtcggcggctggtgccgcctcccctcgcctccgcgcccgcttccatcgtcgtcagctccgacgaggacgcattcaccaggtgctccgggtacctgttcgaggagggcgcggccaccgagtcggagctccccaccgcgtacgacctccccggcatcgcggccgtgtaccgccgccgcccgctcctcgtgctccgccgctccctgcagatcggcacctccttcggccggtggttcgcgctgcggtacctcgatcgcgtcaacgagcgcgccgacgacatgttcgagcttcgggcggctcagctcaggaggatactcttggagcttggcccggcatttgtgaagatcgcacaagcagtttcgtcacggccggatgttgttccacctgcataccttgatgagctctcactacttcaggaccgcatagcaccattttcaaacgatgttgcttttaatattatagagaaagagcttgggcttccactggatatggttttctctgagataacaccagagcctgttgctgctgcatctcttgggcaggtttaccaggctaggctccgctccagtgggaagattgttgctgtcaaagtacaaagacctggagttcaagcagcaatttcattagacatatatatcttgaggttcctagctagtcttgcaaggaaggctgccaagttgaacacagaccttccagctgtgcttgacgaatgggcatcaagcctattccgggagatggattatagagaagaagcaagaaatggacttaagttcagagaattgtttgggaaatttagagatgtgtcggttcctgaaatgtatctggaacagacaagaaggcgagtccttatcatggaatggatcgagggggaaaagttatcagaagtcagagatcaatatttggttgagatccacaccctggaaatcttttgcgtacagttgatgggaaattagcctacttagattttgggatgatgggagaattccgacaagaacttcgtgatggatttattgaagcttgtcttcatcttgttaaccgtgattttgatgctttagcaaaagactttgtaacccttggtttacttcctccaactgcccagaaaggtgaagtcacaaaggcattgacaggtgtatttgagaatgctgttaacagaggagttcagaatataagctttggagatctgtcaggaaatcttggacgaacaatgtataaattcaagttccagataccgtcttacttttcccttgtaattcgaagccttgctgttttagaaggtatcgcaatcagcttcaatccaaagtataaagttctggggagttcatatccatggattgcaagaaaagttctcactgacagttcaccaaagcttcgatcaactttgcagactcttctttataaggatggcactttccaaattgatcgcctggaatctttgttaactgagtcacttcgtgcaagaacagagcaatcattggtcagaaatgaacaagatgtcgacagtacgagatatgcaattaagcaagtcttgtcattcacactcgctgaccagggtgcctttgtgaaggacttacttcttcaggagattgctaagggaatagatgcacttggtgtagccacattaagttctgcaacgtctgcagcagcctccagattgccattcggtggtggaccatccccattgacctcactagatgacgaagatgccacaaacttaagaaatctgtatcgcctgctcctacttttatctaaggtttctcagaaggaaaatccatctccaattcctgaatataacagtgccatagagaaggaaggtggtagcacggatgaacttgctcttgcgctgtatggaatgacctctctgccagaatttcttccagttctttctgtcattcctgagcttccaccggagtcccaacagcagttgcttcttctgccagcggatttaaccaatcgtattttatctcgggctctcgcgagaaccattagaagactcatgtaaagccataggtgcagaaattttcggtccctgcttaatttttattttactattctttttggttcactgctagaagatggggatttttttagcatctcatctacaacccaagatcaatcccttttttgttatctacgattactatgtacatattgttcaaactaaagcaggcattgtaaatggcccatgttgttatgcacatatggtgtaactgataaactttaaatatatgtgaacatagaaataattctgtaatgcaatttgcctcgaaagcatggattcatgtcattt

SEQ ID NO: 19176 - DNA, 2201 bp, Zea Mays
agcttcgggcggctcagctcaggaggatactcttggagcttggcccggcatttgtgaagatcgcacaagcagtttcgtcacggccggatgttgttccacctgcataccttgatgagctctcactacttcaggaccgcatagcaccattttcaaacgatgttgcttttaatattatagagaaagagcttgggcttccactggatatggttttctctgagataacaccagagcctgttgctgctgcatctcttgggcaggtttaccaggctaggctccgctccagtgggaagattgttgctgtcaaagtacaaagacctggagttcaagcagcaatttcattagacatatatatcttgaggttcctagctagtcttgcaaggaaggctgccaagttgaacacagaccttccagctgtgcttgacgaatgggcatcaagcctattccggatattcacattgaatacaggtaaatcacatttgatgcaggagatggattatagagaagaagcaagaaatggacttaagttcagagaattgtttgggaaatttagagatgtgtcggttcctgaaatgtatctggaacagacaagaaggcgagtccttatcatggaatggatcgagggggaaaagttatcagaagtcagagatcaatatttggttgaggttggagtatattgttcactttcacagctattagaatatggattctatcatgcagatccacaccctggaaatcttttgcgtacagttgatgggaaattagcctacttagattttgggatgatgggagaattccgacaagaacttcgtgatggatttattgaagcttgtcttcatcttgttaaccgtgattttgatgctttagcaaaagactttgtaacccttggtttacttcctccaactgcccagaaaggtgaagtcacaaaggcattgacaggtgtatttgagaatgctgttaacagaggagttcagaatataagctttggagatctgtcaggaaatcttggacgaacaatgtataaattcaagttccagataccgtcttacttttcccttgtaattcgaagccttgctgttttagaaggtatcgcaatcagcttcaatccaaagtataaagttctggggagttcatatccatggattgcaagaaaagttctcactgacagttcaccaaagcttcgatcaactttgcagactcttctttataaggatggcactttccaaattgatcgcctggaatctttgttaactgagtcacttcgtgcaagaacagagcaatcattggtcagaaatgaacaagatgtcgacagtacgagatatgcaattaagcaagtcttgtcattcacactcgctgaccaggttggaccgaaaccaaactgggcaaataatttttgaatactgaaccataaccaaacaagatagaacttggcagataaatatttgaagctctatgctctcttgcagggtgcctttgtgaaggacttacttcttcaggagattgctaagggaatagatgcacttggtgtagccacattaagttctgcaacgtctgcagcagcctccagattgccattcggtggtggaccatccccattgacctcactagatgacgaagatgccacaaacttaagaaatctgtatcgcctgctcctacttttatctaaggtttctcagaaggaaaatccatctccaattcctgaatataacagtgccatagagaaggaaggtggtagcacggatgaacttgctcttgcgctgtatggaatgacctctctgccagaatttcttccagttctttctgtcattcctgagcttccaccggagtcccaacagcagttgcttcttctgccagcggatttaaccaatcgtattttatctcgggctctcgcgagaaccattagaagactcatgtaaagccataggtgcagaaattttcggtccctgcttaatttttattttactattctttttggttcactgctagaagatggggatttttttagcatctcatctacaacccaagatcaatcccttttttgttatctacgattactatgtacatattgttcaaactaaagcaggcattgtaaatggcccatgttgttatgcacatatggtgtaactgataaactttaaatatatgtgaacatagaaataattctgtaatgcaatttgcctcgaaagcatggattcatgtcattt

SEQ ID NO: 19177 - DNA, 2209 bp, Zea Mays
tcgggcggctcagctcaggaggatactcttggagcttggcccggcatttgtgaagatcgcacaagcagtttcgtcacggccggatgttgttccacctgcataccttgatgagctctcactacttcaggaccgcatagcaccattttcaaacgatgttgcttttaatattatagagaaagagcttgggcttccactggatatggttttctctgagataacaccagagcctgttgctgctgcatctcttgggcaggtttaccaggctaggctccgctccagtgggaagattgttgctgtcaaagtacaaagacctggagttcaagcagcaatttcattagacatatatatcttgaggttcctagctagtcttgcaaggaaggctgccaagttgaacacagaccttccagctgtgcttgacgaatgggcatcaagcctattccgggtaaatcacatttgatgcaggagatggattatagagaagaagcaagaaatggacttaagttcagagaattgtttgggaaatttagagatgtgtcggttcctgaaatgtatctggaacagacaagaaggcgagtccttatcatggaatggatcgagggggaaaagttatcagaagtcagagatcaatatttggttgaggttggagtatattgttcactttcacagctattagaatatggattctatcatgcagatccacaccctggaaatcttttgcgtacagttgatgggaaattagcctacttagattttgggatgatgggagaattccgacaagaacttcgtgatggatttattgaagcttgtcttcatcttgttaaccgtgattttgatgctttagcaaaagactttgtaacccttggtttacttcctccaactgcccagaaaggtgaagtcacaaaggcattgacaggtgtatttgagaatgctgttaacagaggagttcagaatataagctttggagatctgtcaggaaatcttggacgaacaatgtataaattcaagttccagataccgtcttacttttcccttgtaattcgaagccttgctgttttagaaggtatcgcaatcagcttcaatccaaagtataaagttctggggagttcatatccatggattgcaagaaaagttctcactgacagttcaccaaagcttcgatcaactttgcagactcttctttataaggatggcactttccaaattgatcgcctggaatctttgttaactgagtcacttcgtgcaagaacagagcaatcattggtcagaaatgaacaagatgtcgacagtacgagatatgcaattaagcaagtcttgtcattcacactcgctgaccagggtgcctttgtgaaggacttacttcttcaggagattgctaagcttaggttccacttttgaacattctatggcatggatgctaacaagggagggaatagatgcacttggtgtagccacattaagttctgcaacgtctgcagcagcctccagattgccattcggtggtggaccatccccattgacctcactagatgacgaagatgccacaaacttaagaaatctgtatcgcctgctcctacttttatctaaggtttctcagaaggaaaatccatctccaattcctgaatataacagtgccatagagaaggaaggtggtagcacggatgaacttgctcttgcgctgtatggaatgacctctctgccagaatttcttccagttctttctgtcattcctgaggtaagttggacataagttacgtgagaccatatatgtcaaaatccacatggcacatggctcatttgtgtatacccttctccatcgaagcttccaccggagtcccaacagcagttgcttcttctgccagcggatttaaccaatcgtattttatctcgggctctcgcgagaaccattagaagactcatgtaaagccataggtgcagaaattttcggtccctgcttaatttttattttactattctttttggttcactgctagaagatggggatttttttagcatctcatctacaacccaagatcaatcccttttttgttatctacgattactatgtacatattgttcaaactaaagcaggcattgtaaatggcccatgttgttatgcacatatggtgtaactgataaactttaaatatatgtgaacatagaaataattctgtaatgcaatttgcctcgaaagcatggattcatgtcattt

SEQ ID NO: 19178 - DNA, 2032 bp, Zea Mays
gctcagctcaggaggatactcttggagcttggcccggcatttgtgaagatcgcacaagcagtttcgtcacggccggatgttgttccacctgcataccttgatgagctctcactacttcaggaccgcatagcaccattttcaaacgatgttgcttttaatattatagagaaagagcttgggcttccactggatatggttttctctgagataacaccagagcctgttgctgctgcatctcttgggcaggtttaccaggctaggctccgctccagtgggaagattgttgctgtcaaagtacaaagacctggagttcaagcagcaatttcattagacatatatatcttgaggttcctagctagtcttgcaaggaaggctgccaagttgaacacagaccttccagctgtgcttgacgaatgggcatcaagcctattccggagaagaagcaagaaatggacttaagttcagagaattgtttgggaaatttagagatgtgtcggttcctgaaatgtatctggaacagacaagaaggcgagtccttatcatggaatggatcgagggggaaaagttatcagaagtcagagatcaatatttggttgaggttggagtatattgttcactttcacagctattagaatatggattctatcatgcagatccacaccctggaaatcttttgcgtacagttgatgggaaattagcctacttagattttgggatgatgggagaattccgacaagaacttcgtgatggatttattgaagcttgtcttcatcttgttaaccgtgattttgatgctttagcaaaagactttgtaacccttggtttacttcctccaactgcccagaaaggtgaagtcacaaaggcattgacaggtgtatttgagaatgctgttaacagaggagttcagaatataagctttggagatctgtcaggaaatcttggacgaacaatgtataaattcaagttccagataccgtcttacttttcccttgtaattcgaagccttgctgttttagaaggtatcgcaatcagcttcaatccaaagtataaagttctggggagttcatatccatggattgcaagaaaagttctcactgacagttcaccaaagcttcgatcaactttgcagactcttctttataaggatggcactttccaaattgatcgcctggaatctttgttaactgagtcacttcgtgcaagaacagagcaatcattggtcagaaatgaacaagatgtcgacagtacgagatatgcaattaagcaagtcttgtcattcacactcgctgaccagggtgcctttgtgaaggacttacttcttcaggagattgctaagggaatagatgcacttggtgtagccacattaagttctgcaacgtctgcagcagcctccagattgccattcggtggtggaccatccccattgacctcactagatgacgaagatgccacaaacttaagaaatctgtatcgcctgctcctacttttatctaaggtttctcagaaggaaaatccatctccaattcctgaatataacagtgccatagagaaggaaggtggtagcacggatgaacttgctcttgcgctgtatggaatgacctctctgccagaatttcttccagttctttctgtcattcctgagcttccaccggagtcccaacagcagttgcttcttctgccagcggatttaaccaatcgtattttatctcgggctctcgcgagaaccattagaagactcatgtaaagccataggtgcagaaattttcggtccctgcttaatttttattttactattctttttggttcactgctagaagatggggatttttttagcatctcatctacaacccaagatcaatcccttttttgttatctacgattactatgtacatattgttcaaactaaagcaggcattgtaaatggcccatgttgttatgcacatatggtgtaactgataaactttaaatatatgtgaacatagaaataattctgtaatgcaatttgcctcgaaagcatggattcatgtcattt

SEQ ID NO: 19179 - DNA, 1671 bp, Zea Mays
aattcttcatccattagacaagagaattgtttgggaaatttagagatgtgtcggttcctgaaatgtatctggaacagacaagaaggcgagtccttatcatggaatggatcgaggtgcagtctgtgatcttattgaactgttagcaaatgaacatgcatgcaaaaaatgcagttcataattctacttgcactctgtgatcttctagggggaaaagttatcagaagtcagagatcaatatttggttgaggttggagtatattgttcactttcacagctattagaatatggattctatcatgcagatccacaccctggaaatcttttgcgtacagttgatgggaaattagcctacttagtttacttcctccaactgcccagaaaggtgaagtcacaaaggcattgacaggtgtatttgagaatgctgttaacagaggagttcagaatataagctttggagatctgtcaggaaatcttggacgaacaatgtataaattcaagttccagataccgtcttacttttcccttgtaattcgaagccttgctgttttagaaggtatcgcaatcagcttcaatccaaagtataaagttctggggagttcatatccatggattgcaagaaaagttctcactgacagttcaccaaagcttcgatcaactttgcagactcttctttataaggatggcactttccaaattgatcgcctggaatctttgttaactgagtcacttcgtgcaagaacagagcaatcattggtcagaaatgaacaagatgtcgacagtacgagatatgcaattaagcaagtcttgtcattcacactcgctgaccaggttggaccgaaaccaaactgggcaaataatttttgaatactgaaccataaccaaacaagatagaacttggcagataaatatttgaagctctatgctctcttgcagggtgcctttgtgaaggacttacttcttcaggagattgctaagggaatagatgcacttggtgtagccacattaagttctgcaacgtctgcagcagcctccagattgccattcggtggtggaccatccccattgacctcactagatgacgaagatgccacaaacttaagaaatctgtatcgcctgctcctacttttatctaaggtttctcagaaggaaaatccatctccaattcctgaatataacagtgccatagagaaggaaggtggtagcacggatgaacttgctcttgcgctgtatggaatgacctctctgccagaatttcttccagttctttctgtcattcctgagcttccaccggagtcccaacagcagttgcttcttctgccagcggatttaaccaatcgtattttatctcgggctctcgcgagaaccattagaagactcatgtaaagccataggtgcagaaattttcggtccctgcttaatttttattttactattctttttggttcactgctagaagatggggatttttttagcatctcatctacaacccaagatcaatcccttttttgttatctacgattactatgtacatattgttcaaactaaagcaggcattgtaaatggcccatgttgttatgcacatatggtgtaactgataaactttaaatatatgtgaacatagaaataattctgtaatgcaatttgcctcgaaagcatggattcatgtcattt

SEQ ID NO: 19180 - DNA, 1513 bp, Zea Mays
cagaaaatttatatggatcagttaattttaacagaaaaaatgcggtaaaccgaaaaattccccgcattcaaagtggcctagaataacccgcgatcctatcctgtctgctgtctctcccgagtgacctcaaagtcagcgagcgccacatccgactccgagggccaccggtggccggttgcccgttgacgccgcggcacgcgattccgatcctgggttttacctaagaaataaacaactctgaatttcccaagacctgaagaccagccagcgcaagcctgtggctgccacggtgccaccatgtcccgcggcagtgccgcctccgtattcctcggcgtcgacgttggtactggcagcgctcgtgcaggactcttcgatgaaaacggcaaattgctggggtcagcaagcagccctatacagatatggaaagagaaagactgtatcgagcaatcatcaaccgatatctggcatgcggtctgtgctgcggtgaaatctgcgtgctcactggcaaatgttgctcctgaggacgttgctggccttggctttgccgccacttgctcccttgttgctgtcgatgctgatggttcccctgtttcggtttctttgagtggtgatacaaggaggaatatcattgtgtggatggaccatagagctgtgaatcaggcagagcgaatcaatgctaccaattcgccagtactgcaatactgcggtgggggtgtttccccagaaatgcaggctccaaagctcctatggatgaaggaaaatcttctagattcgtggtctatggtatgtaggtggatggacctaagtgactggttagcatatagagcaacaggtgacgacactcgcagcttatgcacaactgtctgcaaatggacatatcttggacatgcacacatgaaacagtggaaggaatctgattcacgtgatatggaggcatgcggatgggacaatgttttttgggaagaaatagggttgggagacctcctcgaaggaaattgtgcaaaaataggacgcagtgtcgcttttcctggtcatgctcttggttctggtttgacgcctactgctgcaaaggagttaggcttacttcctggtactcctgttggaacctcacttattgatgctcatgctggtggagttggagtcatggaaagcattcctgatgcaggatctaaagctgtgtctgatgaacatgcaatatgtcaccgtatggtattggtatgtgggacatcaacctgccacatggctgtttcaaaggacagattgtttatacctggtgtctgggggccgttttggtctgcgatgatccctgagttttggctcacagaaggtggccaaagtgcaactggcgctctgctcgattacattattgaaaaccatgttgcttctcctcttctttctaaccatgctgcttctcaaagtatatccatatttgagctactgaacaagatgttgctttctatgtcacaagagcagaatagtccgtttctttctgcattaactcaagacacccaga

SEQ ID NO: 19181 - DNA, 1513 bp, Zea Mays
aaaatttatatggatcagttaattttaacagaaaaaatgcggtaaaccgaaaaattccccgcattcaaagtggcctagaataacccgcgatcctatcctgtctgctgtctctcccgagtgacctcaaagtcagcgagcgccacatccgactccgagggccaccggtggccggttgcccgttgacgccgcggcacgcgattccgatcctgggttttacctaagaaataaacaactctgaatttcccaagacctgaagaccagccagcgcaagcctgtggctgccacggtgccaccatgtcccgcggcagtgccgcctccgtattcctcggcgtcgacgttggtactggcagcgctcgtgcaggactcttcgatgaaaacggcaaattgctggggtcagcaagcagccctatacagatatggaaagagaaagactgtatcgagcaatcatcaaccgatatctggcatgcggtctgtgctgcggtgaaatctgcgtgctcactggcaaatgttgctcctgaggacgttgctggccttggctttgccgccacttgctcccttgttgctgtcgatgctgatggttcccctgtttcggtttctttgagtggtgatacaaggaggaatatcattgtgtggatggaccatagagctgtgaatcaggcagagcgaatcaatgctaccaattcgccagtactgcaatactgcggtgggggtgtttccccagaaatgcaggctccaaagctcctatggatgaaggaaaatcttctagattcgtggtctatggtatgtaggtggatggacctaagtgactggttagcatatagagcaacaggtgacgacactcgcagcttatgcacaactgtctgcaaatggacatatcttggacatgcacacatgaaacagtggaaggaatctgattcacgtgatatggaggcatgcggatgggacaatgttttttgggaagaaatagggttgggagacctcctcgaaggaaattgtgcaaaaataggacgcagtgtcgcttttcctggtcatgctcttggttctggtttgacgcctactgctgcaaaggagttaggcttacttcctggtactcctgttggaacctcacttattgatgctcatgctggtggagttggagtcatggaaagcattcctgatgcaggatctaaagctggtttgtctgatgaacatgcaatatgtcaccgtatggtattggtatgtgggacatcaacctgccacatggctgtttcaaaggacagattgtttatacctggtgtctgggggccgttttggtctgcgatgatccctgagttttggctcacagaaggtggccaaagtgcaactggcgctctgctcgattacattattgaaaaccatgttgcttctcctcttctttctaaccatgctgcttctcaaagtatatccatatttgagctactgaacaagatgttgctttctatgtcacaagagcagaatagtccgtttctttctgcattaactcaagacacccaga

SEQ ID NO: 19182 - DNA, 1438 bp, Zea Mays
atcctgtctgctgtctctcccgagtgacctcaaagtcagcgagcgccacatccgactccgagggccaccggtggccggttgcccgttgacgccgcggcacgcgattccgatcctgggttttacctaagaaataaacaactctgaatttcccaagacctgaagaccagccagcgcaagcctgtggctgccacggtgccaccatgtcccgcggcagtgccgcctccgtattcctcggcgtcgacgttggtactggcagcgctcgtgcaggactcttcgatgaaaacggcaaattgctggggtcagcaagcagccctatacagatatggaaagagaaagactgtatcgagcaatcatcaaccgatatctggcatgcggtctgtgctgcggtgaaatctgcgtgctcactggcaaatgttgctcctgaggacgttgctggccttggctttgccgccacttgctcccttgttgctgtcgatgctgatggttcccctgtttcggtttctttgagtggtgatacaaggaggaatatcattgtgtggatggaccatagagctgtgaatcaggcagagcgaatcaatgctaccaattcgccagtactgcaatactgcggtgggggtgtttccccagaaatgcaggctccaaaggtttgggtctcctatggatgaaggaaaatcttctagattcgtggtctatggtatgtaggtggatggacctaagtgactggttagcatatagagcaacaggtgacgacactcgcagcttatgcacaactgtctgcaaatggacatatcttggacatgcacacatgaaacagtggaaggaatctgattcacgtgatatggaggcatgcggatgggacaatgttttttgggaagaaatagggttgggagacctcctcgaaggaaattgtgcaaaaataggacgcagtgtcgcttttcctggtcatgctcttggttctggtttgacgcctactgctgcaaaggagttaggcttacttcctggtactcctgttggaacctcacttattgatgctcatgctggtggagttggagtcatggaaagcattcctgatgcaggatctaaagctggttgtcagtgatgatgtctgatgaacatgcaatatgtcaccgtatggtattggtatgtgggacatcaacctgccacatggctgtttcaaaggacagattgtttatacctggtgtctgggggccgttttggtctgcgatgatccctgagttttggctcacagaaggtggccaaagtgcaactggcgctctgctcgattacattattgaaaaccatgttgcttctcctcttctttctaaccatgctgcttctcaaagtatatccatatttgagctactgaacaagatgttgctttctatgtcacaagagcagaatagtccgtttctttctgcattaactcaagacacccaga

SEQ ID NO: 19183 - DNA, 1264 bp, Zea Mays
atcctgtctgctgtctctcccgagtgacctcaaagtcagcgagcgccacatccgactccgagggccaccggtggccggttgcccgttgacgccgcggcacgcgattccgatcctggactcttcgatgaaaacggcaaattgctggggtcagcaagcagccctatacagatatggaaagagaaagactgtatcgagcaatcatcaaccgatatctggcatgcggtctgtgctgcggtgaaatctgcgtgctcactggcaaatgttgctcctgaggacgttgctggccttggctttgccgccacttgctcccttgttgctgtcgatgctgatggttcccctgtttcggtttctttgagtggtgatacaaggaggaatatcattgtgtggatggaccatagagctgtgaatcaggcagagcgaatcaatgctaccaattcgccagtactgcaatactgcggtgggggtgtttccccagaaatgcaggctccaaagctcctatggatgaaggaaaatcttctagattcgtggtctatggtatgtaggtggatggacctaagtgactggttagcatatagagcaacaggtgacgacactcgcagcttatgcacaactgtctgcaaatggacatatcttggacatgcacacatgaaacagtggaaggaatctgattcacgtgatatggaggcatgcggatgggacaatgttttttgggaagaaatagggttgggagacctcctcgaaggaaattgtgcaaaaataggacgcagtgtcgcttttcctggtcatgctcttggttctggtttgacgcctactgctgcaaaggagttaggcttacttcctggtactcctgttggaacctcacttattgatgctcatgctggtggagttggagtcatggaaagcattcctgatgcaggatctaaagctgtgtctgatgaacatgcaatatgtcaccgtatggtattggtatgtgggacatcaacctgccacatggctgtttcaaaggacagattgtttatacctggtgtctgggggccgttttggtctgcgatgatccctgagttttggctcacagaaggtggccaaagtgcaactggcgctctgctcgattacattattgaaaaccatgttgcttctcctcttctttctaaccatgctgcttctcaaagtatatccatatttgagctactgaacaagatgttgctttctatgtcacaagagcagaatagtccgtttctttctgcattaactcaagacacccaga

SEQ ID NO: 19184 - DNA, 1499 bp, Zea Mays
atcctgtctgctgtctctcccgagtgacctcaaagtcagcgagcgccacatccgactccgagggccaccggtggccggttgcccgttgacgccgcggcacgcgattccgatcctgggttttacctaagaaataaacaactctgaatttcccaagacctgaagaccagccagcgcaagcctgtggctgccacggtgccaccatgtcccgcggcagtgccgcctccgtattcctcggcgtcgacgttggtactggcagcgctcgtgcaggactcttcgatgaaaacggcaaattgctggggtcagcaagcagccctatacagatatggaaagagaaagactgtatcgagcaatcatcaaccgatatctggcatgcggtctgtgctgcggtgaaatctgcgtgctcactggcaaatgttgctcctgaggacgttgctggccttggctttgccgccacttgctcccttgttgctgtcgatgctgatggttcccctgtttcggtttctttgagtggtgatacaaggaggaatatcattgtgtggatggaccatagagctgtgaatcaggcagagcgaatcaatgctaccaattcgccagtactgcaatactgcggtgggggtgtttccccagaaatgcaggctccaaagctcctatggatgaaggaaaatcttctagattcgtggtctatggtatgtaggtggatggacctaagtgactggttagcatataggtgacgacactcgcagcttatgcacaactgtctgcaaatggacatatcttggacatgcacacatgaaacagtggaaggaatctgattcacgtgatatggaggcatgcggatgggacaatgttttttgggaagaaatagggttgggagacctcctcgaaggaaattgtgcaaaaataggacgcagtgtcgcttttcctggtcatgctcttggttctggtttgacgcctactgctgcaaaggagttaggcttacttcctggtactcctgttggaacctcacttattgatgctcatgctggtggagttggagtcatggaaagcattcctgatgcaggatctaaagctggttgtcagtgatgagtaattttgtgttttgctagagaaattgttttcaaaacattgtgtatgttgtatatattctaatatgtttttaacagtgtctgatgaacatgcaatatgtcaccgtatggtattggtatgtgggacatcaacctgccacatggctgtttcaaaggacagattgtttatacctggtgtctgggggccgttttggtctgcgatgatccctgagttttggctcacagaaggtggccaaagtgcaactggcgctctgctcgattacattattgaaaaccatgttgcttctcctcttctttctaaccatgctgcttctcaaagtatatccatatttgagctactgaacaagatgttgctttctatgtcacaagagcagaatagtccgtttctttctgcattaactcaagacacccaga

SEQ ID NO: 19185 - DNA, 1447 bp, Zea Mays
atcctgtctgctgtctctcccgagtgacctcaaagtcagcgagcgccacatccgactccgagggccaccggtggccggttgcccgttgacgccgcggcacgcgattccgatcctgggttttacctaagaaataaacaactctgaatttcccaagacctgaagaccagccagcgcaagcctgtggctgccacggtgccaccatgtcccgcggcagtgccgcctccgtattcctcggcgtcgacgttggtactggcagcgctcgtgcaggactcttcgatgaaaacggcaaattgctggggtcagcaagcagccctatacagatatggaaagagaaagactgtatcgagcaatcatcaaccgatatctggcatgcggtctgtgctgcggtgaaatctgcgtgctcactggcaaatgttgctcctgaggacgttgctggccttggctttgccgccacttgctcccttgtttgacaaaaataggatgcttcttgcagttgctgtcgatgctgatggttcccctgtttcggtttctttgagtggtgatacaaggaggaatatcattgtgtggatggaccatagagctgtgaatcaggcagagcgaatcaatgctaccaattcgccagtactgcaatactgcggtgggggtgtttccccagaaatgcaggctccaaagctcctatggatgaaggaaaatcttctagattcgtggtctatggtatgtaggtggatggacctaagtgactggttagcatatagagcaacaggtgacgacactcgcagcttatgcacaactgtctgcaaatggacatatcttggacatgcacacatgaaacagtggaaggaatctgattcacgtgatatggaggcatgcggatgggacaatgttttttgggaagaaatagggttgggagacctcctcgaaggaaattgtgcaaaaataggacgcagtgtcgcttttcctggtcatgctcttggttctggtttgacgcctactgctgcaaaggagttaggcttacttcctggtactcctgttggaacctcacttattgatgctcatgctggtggagttggagtcatggaaagcattcctgatgcaggatctaaagctggtttgtctgatgaacatgcaatatgtcaccgtatggtattggtatgtgggacatcaacctgccacatggctgtttcaaaggacagattgtttatacctggtgtctgggggccgttttggtctgcgatgatccctgagttttggctcacagaaggtggccaaagtgcaactggcgctctgctcgattacattattgaaaaccatgttgcttctcctcttctttctaaccatgctgcttctcaaagtatatccatatttgagctactgaacaagatgttgctttctatgtcacaagagcagaatagtccgtttctttctgcattaactcaagacacccaga

SEQ ID NO: 19186 - DNA, 1477 bp, Zea Mays
gtttgggtgtaagatcatgtacatttcgttgttatggtcatccgatgcatgcacacaagcttttggcatcctggttcaccatcggtaaacaataaacacagtcatgcagctagctggaaatggcagccactgtgctgatcatcagatacaatttcttgtcacccttcagtcctagaagttcagcttgaatgtttcagtatgtcatagtactagcatcacccattgtgatgtgatcaatattctgacttatctgcattagatttgctgaatgagtggatgtgttgctcagaaagcgatgcacatggatagtggtttgtgaagttcactgtagttactgttgttctttatcattctgagcatgtattcatagtattcacatttgatatttagttattttgtactaaaaagtggtgaaacaatttgtggcatgcagcatcaattcatctctatagctagtgtcatgttttgtttgtgtgcatttgcagctcctatggatgaaggaaaatcttctagattcgtggtctatggtatgtaggtggatggacctaagtgactggttagcatatagagcaacaggtgacgacactcgcagcttatgcacaactgtctgcaaatggacatatcttggacatgcacacatgaaacagtggaaggaatctgattcacgtgatatggaggcatgcggatgggacaatgttttttgggaagaaatagggttgggagacctcctcgaaggaaattgtgcaaaaataggacgcagtgtcgcttttcctggtcatgctcttggttctggtttgacgcctactgctgcaaaggagttaggcttacttcctggtactcctgttggaacctcacttattgatgctcatgctggtggagttggagtcatggaaagcattcctgatgcaggatctaaagctggttgtcagtgatgagtaattttgtgttttgctagagaaattgttttcaaaacattgtgtatgttgtatatattctaatatgtttttaacagtgtctgatgaacatgcaatatgtcaccgtatggtattggtatgtgggacatcaacctgccacatggctgtttcaaaggacagattgtttatacctggtgtctgggggccgttttggtctggtacagctgccttctcaaatatatattttaatttcccttaaaaacaaattcaaccagcatttatgttggtttcttttctatctcttgtgcttcagtttggctaatattacattgtgcttccaaattcagcgatgatccctgagttttggctcacagaaggtggccaaagtgcaactggcgctctgctcgattacattattgaaaaccatgttgcttctcctcttctttctaaccatgctgcttctcaaagtatatccatatttgagctactgaacaagatgttgctttctatgtcacaagagcagaatagtccgtttctttctgcattaactcaagacacccaga

SEQ ID NO: 19187 - DNA, 868 bp, Zea Mays
tttggctcctatggatgaaggaaaatcttctagattcgtggtctatggtatgtaggtggatggacctaagtgactggttagcatatagagcaacaggtgacgacactcgcagcttatgcacaactgtctgcaaatggacatatcttggacatgcacacatgaaacagtggaaggaatctgattcacgtgatatggaggcatgcggatgggacaatgttttttgggaagaaatagggttgggagacctcctcgaaggaaattgtgcaaaaataggacgcagtgtcgcttttcctggtcatgctcttggttctggtttgacgcctactgctgcaaaggagttaggcttacttcctggtactcctgttggaacctcacttattgatgctcatgctggtggagttggagtcatggaaagcattcctgatgcaggatctaaagctggttgtcagtgatgagtaattttgtgttttgctagagaaattgttttcaaaacattgtgtatgttgtatatattctaatatgtttttaacagtgtctgatgaacatgcaatatgtcaccgtatggtattggtatgtgggacatcaacctgccacatggctgtttcaaaggacagattgtttatacctggtgtctgggggccgttttggtctgcgatgatccctgagttttggctcacagaaggtggccaaagtgcaactggcgctctgctcgattacattattgaaaaccatgttgcttctcctcttctttctaaccatgctgcttctcaaagtatatccatatttgagctactgaacaagatgttgctttctatgtcacaagagcagaatagtccgtttctttctgcattaactcaagacacccaga

SEQ ID NO: 19188 - DNA, 1255 bp, Zea Mays
caacatgtagtggctgactgacaactacttgactgctacaggaatccaagcgctcagactcactcttactggagaccactatatggtttacctgtggcacatgcaaactctccaggggcattctcgggcaatgctttgtggccccacatgtcccagcttcatattcggtgctcgacgccgtgtgactctgccagagtgccacctgccacggacacggagggagggaggtgtgccatcagcgcgcagcatcctccagccgatagcctctcactgcctcacttcagcctcggacctgaacagacctcaggaaaggggagacctggaacgaccgtcgagctagagcggctgcgcgctgcgccgagagctggggagtggggactggggaccgaattgaaggcaagaaagtagaaacgaaccaccacaggcggcgcggcaatggatgagcgcggggagaaggaggaggagcacggagtagtggaggaggagacggcggcggttgtgctcaaggaggtggaggtggagatggagatggtcggcggctctgaagaagcctcggcggcgccgctcctcctcgcgcacccgtgctcgctgctgcagctcctgctccgcgcctgcgccggctgcctggtgcgcctgctgcacggccactgcagcgacggcgccaacgacgacccaaaagctgctgccgacgacgacgacgctgcgcctgaagctgctgctgctgcggcggcggcggcgggcgatggcggcgacaaggcagccacctacttgtacatgcaggaggtgtgggcagtgaggaggaggccgacgacgcccggccgtccgagagaaggttccggtggcaatggagggaaccaccactagctagctagctctctagcgcgacgccgctgcaaccgatccgaatgaaatcaccttggggccgggggcaggtcgggtgtttttattgaaacgaaaaggacgacgggaggcgaaaataaagcatacccgatcgagagggcagaaacgacagcgccaaccttgcactgcactggcgtcttggcagttggcacaacccatgcatgaccgaaactacttctgatgaaccacacgcgcgcgtgcacagctgcgcaggacgtacgcgacgacgaccaccaagtacgacgtgtgccccggcctggctatatgtcgtcgttgttagaaagttaggcatttttagttttaatttaatccagataatcagtgcgatatatgtaatgacatgtatatgcatgtg

SEQ ID NO: 19189 - DNA, 1328 bp, Zea Mays
tgccagagtgccacctgccacggacacggagggagggaggtgtgccatcagcgcgcagcatcctccagccgatagcctctcactgcctcacttcagcctcggacctgaacagacctcaggaaaggggagacctggaacgaccgtcgagctagagcggctgcgcgctgcgccgagagctggggagtggggactggggaccgaattgaaggcaagaaagtagaaacgaaccaccacaggcggcgcggcaatggatgagcgcggggagaaggaggaggagcacggagtagtggaggaggagacggcggcggttgtgctcaaggaggtggaggtggagatggagatggtcggcggctctgaagaagcctcggcggcgccgctcctcctcgcgcacccgtgctcgctgctgcagctcctgctccgcgcctgcgccggctgcctggtgcgcctgctgcacggccactgcagcgacggcgccaacgacgacccaaaagctgctgccgacgacgacgacgctgcgcctgaagctgctgctgctgcggcggcggcggcgggcgatggcggcgacaaggcagccaccgaggtgtgggcagtgaggaggaggccgacgacgcccggccgtccgagagaaggttccggtggcaatggagggaaccaccactagctagctagctctctagcgcgacgccgctgcaacgtacgtacggtgaccctagcttgttcgcttgcgcgtgatcagagtgcgtagcttcttgtaagttgtaacttacttggtactcgtactagatttcgaaagtaacgtcgttaattagtaagtagtactagtacgtgagtgtggtttatgttatatgttctgtagcttcaatgcaaagaagactgtgtgcatgtgtttgaggattattgtttcgactttcgccgaatgattccaggtagatgcggtagtatgtgattcacacgtcttatttcttggcagcgatccgaatgaaatcaccttggggccgggggcaggtcgggtgtttttattgaaacgaaaaggacgacgggaggcgaaaataaagcatacccgatcgagagggcagaaacgacagcgccaaccttgcactgcactggcgtcttggcagttggcacaacccatgcatgaccgaaactacttctgatgaaccacacgcgcgcgtgcacagctgcgcaggacgtacgcgacgacgaccaccaagtacgacgtgtgccccggcctggctatatgtcgtcgttgttagaaagttaggcatttttagttttaatttaatccagataatcagtgcgatatatgtaatgacatgtatatgcatgtg

SEQ ID NO: 19190 - DNA, 716 bp, Zea Mays
cagagtgccacctgccacggacacggagggagggaggtgtgccatcagcgcgcagcatcctccagccgatagcctctcactgcctcacttcagcctcggacctgaacagacctcaggaaaggggagacctggaacgaccgtcgagctagagcggctgcgcgctgcgccgagagctggggagtggggactggggaccgaattgaaggcaagaaagtagaaacgaaccaccacaggcggcgcggcaatggatgagcgcggggagaaggaggaggagcacggagtagtggaggaggagacggcggcggttgtgctcaaggaggtggaggtggagatggagatggtcggcggctctgaagaagcctcggcggcgccgctcctcctcgcgcacccgtgctcgctgctgcagctcctgctccgcgcctgcgccggctgcctggtgcgcctgctgcacggccactgcagcgacggcgccaacgacgacccaaaagctgctgccgacgacgacgacgctgcgcctgaagctgctgctgctgcggcggcggcggcgggcgatggcggcgacaaggcagccaccgaggtgtgggcagtgaggaggaggccgacgacgcccggccgtccgagagaaggttccggtggcaatggagggaaccaccactagctagctagctctctagcgcgacgccgctgcaaccgatccgaatgaaatcaccttgggg

SEQ ID NO: 19191 - DNA, 1728 bp, Zea Mays
aactggtagtgagtgtcctttgaagctgggctagacgctagagcacatcctgtgctgtgagaaacgtaacctaataaaccttgtgttcagcgatttgacggcctccgttatccgaagaaacaacttcaaccagacatgtggcgagcgaggtgattagctagtgacaagtgttgatctaagggagatcgttttgagcatgctatgatggagctctactccggatatcttgaagatcatttcaacctccacaagctaagctacaagatgttccacaggtagcactcgagccagagaggagtacggatcaggaaacgagcaggccgccagagagggtcatgagaaggctcgcgcagaacagggaggctgctcggaagagtcgcctgcggaaaaaggtggccacaaggcctacatccagcagctagagacaagccggatgaagctggcccagctagagctggagcttcaacgggctcgacggcagcagggcgcgtacgcaaatgggagcatgggagacccagctctcggatacacagggtcgatcgatccaggcgtcgccgcgttcgagatcgaatacaggcactgggtggacgagcagaagcggcacacggcggagctgatgtcggcgctccaggggcagcagacgtcggagctggagctccgcttgctggtggagacggggctcagcaactacgagcacctcttcaggatcaaggcgctggccgccaacgcggacgtgttccacgtcatgtcgggcgtgtggaagacccccgccgagaggttcttcctctggatcggcgggttcaggccgtcggaggtcctaaagattctgagcccgcagctggagccgctggcggaggcgcagcgcatgctcgtgggcggcctccagcacacgtcaacgcaggcggaggacgcgctgtcgcagggcatggagaagctacagcagaacctcgccgagatcctgaccgccgaggctgaccccttcggggcccccgacgcctacatgctgcagatggccactgcggtggagaagctgaaagagctcgtcaacttcgtcacccaggcggaccatctccggctgatgacgctgcaacagatgcacaagatcctgacgacgcggcaggcggccaggggcctgctggcgctcggcgactacttccagcgcctccgcacgctgagctcgctgtgggcggcgcgcccgcgggaggcggcgattagctagatgcccgcggtgtgggtgtggccagccaaaggcccaccaaagaacacgacgacgacgaatagtagcagttcgctgtatactttcccaagctgtaaagtccagtggaggacgaaaaaagcgacctcacagtcactggggttcggttccgacgaaaggatgcaaggcttttaagtcaatggcggtgtctccgcagcagcagcagcagcagcaagcggtgtgcgtttgtcaagcgaagcgactagagaataaaacggaaatggattgaggccttctctatttgacgggcggaagacgtgtacatatattgttttgccacccggccgtggccttctagagaggcgtatgattcatgatgcaggccatactaggatcatatttgtacgtggtggaaccgagagcaaaacaatattacaatagtttaaattagggtataccaagtgcaatcttgttggagcgaaggcaaagacgccacccttcgctcgaggccttcgctgcagccgctggtccgc

SEQ ID NO: 19192 - DNA, 1653 bp, Zea Mays
aactggtagtgagtgtcctttgaagctgggctagacgctagagcacatcctgtgctgtgagaaacgtaacctaataaaccttgtgttcagcgatttgacggcctccgttatccgaagaaacaacttcaaccagacatgtggcgagcgaggtgattagctagtgacaagtgttgatctaagggagatcgttttgagcatgctatgatggagctctactccggatatcttgaagatcatttcaacctccacaagctaaggtcatgagaaggctcgcgcagaacagggaggctgctcggaagagtcgcctgcggaaaaaggtggccacaaggcctacatccagcagctagagacaagccggatgaagctggcccagctagagctggagcttcaacgggctcgacggcagcagggcgcgtacgcaaatgggagcatgggagacccagctctcggatacacagggtcgatcgatccaggcgtcgccgcgttcgagatcgaatacaggcactgggtggacgagcagaagcggcacacggcggagctgatgtcggcgctccaggggcagcagacgtcggagctggagctccgcttgctggtggagacggggctcagcaactacgagcacctcttcaggatcaaggcgctggccgccaacgcggacgtgttccacgtcatgtcgggcgtgtggaagacccccgccgagaggttcttcctctggatcggcgggttcaggccgtcggaggtcctaaagattctgagcccgcagctggagccgctggcggaggcgcagcgcatgctcgtgggcggcctccagcacacgtcaacgcaggcggaggacgcgctgtcgcagggcatggagaagctacagcagaacctcgccgagatcctgaccgccgaggctgaccccttcggggcccccgacgcctacatgctgcagatggccactgcggtggagaagctgaaagagctcgtcaacttcgtcacccaggcggaccatctccggctgatgacgctgcaacagatgcacaagatcctgacgacgcggcaggcggccaggggcctgctggcgctcggcgactacttccagcgcctccgcacgctgagctcgctgtgggcggcgcgcccgcgggaggcggcgattagctagatgcccgcggtgtgggtgtggccagccaaaggcccaccaaagaacacgacgacgacgaatagtagcagttcgctgtatactttcccaagctgtaaagtccagtggaggacgaaaaaagcgacctcacagtcactggggttcggttccgacgaaaggatgcaaggcttttaagtcaatggcggtgtctccgcagcagcagcagcagcagcaagcggtgtgcgtttgtcaagcgaagcgactagagaataaaacggaaatggattgaggccttctctatttgacgggcggaagacgtgtacatatattgttttgccacccggccgtggccttctagagaggcgtatgattcatgatgcaggccatactaggatcatatttgtacgtggtggaaccgagagcaaaacaatattacaatagtttaaattagggtataccaagtgcaatcttgttggagcgaaggcaaagacgccacccttcgctcgaggccttcgctgcagccgctggtccgc

SEQ ID NO: 19193 - DNA, 1868 bp, Zea Mays
aactggtagtgagtgtcctttgaagctgggctagacgctagagcacatcctgtgctgtgagaaacgtaacctaataaaccttgtgttcagcgatttgacggcctccgttatccgaagaaacaacttcaaccagacatgtggcgagcgaggtgattagctagtgacaagtgttgatctaagggagatcgttttgagcatgctatgatggagctctactccggatatcttgaagatcatttcaacctccacaagctaagctccgcctcgccgccgcagtacatgacgccggcggcgtcgcccgcgcagttcgcgccggcgcccctcaggatggggtacgggcggccggcgcccgtgatgggcatgtggagcagcgagccgttcaaggtcgacagcggcgggcacgccacctgcagcgcgtccaccgtcatggaggcggacaccaagctcgagacaagcaggctacaagatgttccacaggtagcactcgagccagagaggagtacggatcaggaaacgagcaggccgccagagagggtcatgagaaggctcgcgcagaacagggaggctgctcggaagagtcgcctgcggaaaaaggcctacatccagcagctagagacaagccggatgaagctggcccagctagagctggagcttcaacgggctcgacggcagcagggcgcgtacgcaaatgggagcatgggagacccagctctcggatacacagggtcgatcgatccaggcgtcgccgcgttcgagatcgaatacaggcactgggtggacgagcagaagcggcacacggcggagctgatgtcggcgctccaggggcagcagacgtcggagctggagctccgcttgctggtggagacggggctcagcaactacgagcacctcttcaggatcaaggcgctggccgccaacgcggacgtgttccacgtcatgtcgggcgtgtggaagacccccgccgagaggttcttcctctggatcggcgggttcaggccgtcggaggtcctaaagattctgagcccgcagctggagccgctggcggaggacgcgctgtcgcagggcatggagaagctacagcagaacctcgccgagatcctgaccgccgaggctgaccccttcggggcccccgacgcctacatgctgcagatggccactgcggtggagaagctgaaagagctcgtcaacttcgtcacccaggcggaccatctccggctgatgacgctgcaacagatgcacaagatcctgacgacgcggcaggcggccaggggcctgctggcgctcggcgactacttccagcgcctccgcacgctgagctcgctgtgggcggcgcgcccgcgggaggcggcgattagctagatgcccgcggtgtgggtgtggccagccaaaggcccaccaaagaacacgacgacgacgaatagtagcagttcgctgtatactttcccaagctgtaaagtccagtggaggacgaaaaaagcgacctcacagtcactggggttcggttccgacgaaaggatgcaaggcttttaagtcaatggcggtgtctccgcagcagcagcagcagcagcaagcggtgtgcgtttgtcaagcgaagcgactagagaataaaacggaaatggattgaggccttctctatttgacgggcggaagacgtgtacatatattgttttgccacccggccgtggccttctagagaggcgtatgattcatgatgcaggccatactaggatcatatttgtacgtggtggaaccgagagcaaaacaatattacaatagtttaaattagggtataccaagtgcaatcttgttggagcgaaggcaaagacgccacccttcgctcgaggccttcgctgcagccgctggtccgc

SEQ ID NO: 19194 - DNA, 2636 bp, Zea Mays
caggtctcaaaactctacatgccctaatcgaaccatccttgtgcttcggcattatccccagctttttctccaagcgtccgttcaggaagctgtccggcaacgagccgctcggcactgggcggtggccgtgcaagagcgatcgggaccgcatcgctcgtctgctcctccaggcctccgcctccctcatcatcactgcagcggcgagaagaacaagggacggtccggcggtggtctccactgacatcgcctaccatggctaccatgctgcgccggtgcatgcgggatctgcgcccgctgcggtctctcgcgagggtccccagaccgatcttcggcgagagtccaacatttcttaaatgtagaagcaactcaacaaaggcatctccaaagagttctacacagaatgctgccccaggtcctcaaggacaaccttctcagtcgggaagtaatgtttcaaagcttgctcttggaactcttgtggtcggtgcagcagctataggtgcacatcaacttggttatatagatcttcaatttaaggacaagacattgccttttagcttaaagaaggaagatgtcggaaaggtggtatatgaagatctgaagattccttctgaacagaaggttgaccagacacaaaacatgtcaggaccaaacactgagattgttcaagagaacaataatgagactcatacttcaaaggactttcgaaatggtggggtgggggcaccagagcttccaatcaatggggatcagcttgttcctgcagaagaaaagaaatcagaaaccctagcccatgagacaaatccagttccagatgaacctggatctgatactgaaatgccatctgaagattctccagctgttgatataaggacagttgccatcgatgctactgaatctagtgaagttcctcatgaacagcaaactgataagatagacggcacagttactcctgtacagtcaaccccaacaacagttagtacttacgatcaccccacagatccagactcaccaaaggatctcacaatagctggtgctgttgagcagaaatctcttgctgagacttatttactgcaagatgaacctggtctttcgaaagacgcaaccattaaagagaaaagaagcgatgaagttgttcgagaaaaaaattctgaagatggtaagattgtacttgatatcattgaggctattcatgctgccgaaaagaagcaggcagatgtagatgcatacatgtattcagaagagagaagaaagttgaaggagaagtatgaaaaggagctgaaagacaccagggccagggaactgatgtatgcagaggaggcagcaattctagataaggagctaaagaaagaaaaactgaagaatgctgctgccataaaggaactgcaagagaaggctgaacaaacgttgcaggatgagctgcagaggaagggtgaagaaacaatccaacagattgagaaggctcaagagatagcaaaagctgaactggctgcagctgttgcaaaagagaaagcatcccagattgaacagattgctgaagcaaatctcaatattgatgctctgtgtatggcattctatgcgcgatctgaagaagctaggcagagccattcagttcataaacttgctctgggcactcttgctttagaacacgctttatccagtggatcaccaatccgatcagaagtggggctattgcgaaaatctgttgaaggcattgacaaagattcactgttagaattggctttttcatcactcccagaagatgttttagattatggatcagataccaggatggggttgaagcaacagtttaactccttgaaggaaactatcagacatctcagccttctaccagcaggtggtggtggaatcctggcacacgctgttgcacgtgttgcttcttcaatcaagattaaaggcgataactctggagatggcattgagtcccttataaacaaagtagaaagcatgattgtcaatggagacttgagtacagcggccgatgccttggagcaagggctacatggaactgaagcagaggagatagctaccgagtgggtgaagcaagccaggaaacgcgctcttgcagagcagacacttgctctccttcgcgcttgtgcttcttcgaccacgttctcgtgattttgacaaccatttccccttccttttcttcgaccgcatttgccggtactccttgcaaccgcatattttttccccagaccatgctgcaaatgtgtggacggtgagcgagaagactagatacaatactgtatgagccactcggtctcaaagtgggcccctgcctagctttcctcctgtaaacagagctaataagttctggcgttctgccctgtatctacttgctgttcttaacattttagtggccagttaaagcaatgtttttggatccaattgctgaaggattctttgtatctgtagtatctgtagtcatgtacagttcaacaaggggtcagtggacactggacatagtgggcgaaaagaaccttatgctccgtttggatgtcgatattgaattgaaatgagatgtaattctaattctattatttggatgtcactgaattggagtttagaattgtgtggtccaatttcacttaatacaaaggagtattgggagaaag

SEQ ID NO: 19195 - DNA, 2572 bp, Zea Mays
tgcttcggcattatccccagctttttctccaagcgtccgttcaggaagctgtccggcaacgagccgctcggcactgggcggtggccgtgcaagagcgatcgggaccgcatcgctcgtctgctcctccaggcctccgcctccctcatcatcactgcagcggcgagaagaacaagggacggtccggcggtggtctccactgacatcgcctaccatggctaccatgctgcgccggtgcatgcgggatctgcgcccgctgcggtctctcgcgagggtccccagaccgatcttcggcgagaagcaactcaacaaaggcatctccaaagagttctacacagaatgctgccccaggtcctcaaggacaaccttctcagtcgggaagtaatgtttcaaagcttgctcttggaactcttgtggtcggtgcagcagctataggtgcacatcaacttggttatatagatcttcaatttaaggacaagacattgccttttagcttaaagaaggaagatgtcggaaaggtggtatatgaagatctgaagattccttctgaacagaaggttgaccagacacaaaacatgtcaggaccaaacactgagattgttcaagagaacaataatgagactcatacttcaaaggactttcgaaatggtggggtgggggcaccagagcttccaatcaatggggatcagcttgttcctgcagaagaaaagaaatcagaaaccctagcccatgagacaaatccagttccagatgaacctggatctgatactgaaatgccatctgaagattctccagctgttgatataaggacagttgccatcgatgctactgaatctagtgaagttcctcatgaacagcaaactgataagatagacggcacagttactcctgtacagtcaaccccaacaacagttagtacttacgatcaccccacagatccagactcaccaaaggatctcacaatagctggtgctgttgagcagaaatctcttgctgagacttatttactgcaagatgaacctggtctttcgaaagacgcaaccattaaagagaaaagaagcgatgaagttgttcgagaaaaaaattctgaagatggtaagattgtacttgatatcattgaggctattcatgctgccgaaaagaagcaggcagatgtagatgcatacatgtattcagaagagagaagaaagttgaaggagaagtatgaaaaggagctgaaagacaccagggccagggaactgatgtatgcagaggaggcagcaattctagataaggagctaaagaaagaaaaactgaagaatgctgctgccataaaggaactgcaagagaaggctgaacaaacgttgcaggatgagctgcagaggaagggtgaagaaacaatccaacagattgagaaggctcaagagatagcaaaagctgaactggctgcagctgttgcaaaagagaaagcatcccagattgaacagattgctgaagcaaatctcaatattgatgctctgtgtatggcattctatgcgcgatctgaagaagctaggcagagccattcagttcataaacttgctctgggcactcttgctttagaacacgctttatccagtggatcaccaatccgatcagaagtggggctattgcgaaaatctgttgaaggcattgacaaagattcactgttagaattggctttttcatcactcccagaagatgttttagattatggatcagataccaggatggggttgaagcaacagtttaactccttgaaggaaactatcagacatctcagccttctaccagcaggtggtggtggaatcctggcacacgctgttgcacgtgttgcttcttcaatcaagattaaaggcgataactctggagatggcattgagtcccttataaacaaagtagaaagcatgattgtcaatggagacttgagtacagcggccgatgccttggagcaagggctacatggaactgaagcagaggagatagctaccgagtgggtgaagcaagccaggaaacgcgctcttgcagagcagacacttgctctccttcgcgcttgtgcttcttcgaccacgttctcgtgattttgacaaccatttccccttccttttcttcgaccgcatttgccggtactccttgcaaccgcatattttttccccagaccatgctgcaaatgtgtggacggtgagcgagaagactagatacaatactgtatgagccactcggtctcaaagtgggcccctgcctagctttcctcctgtaaacagagctaataagttctggcgttctgccctgtatctacttgctgttcttaacattttagtggccagttaaagcaatgtttttggatccaattgctgaaggattctttgtatctgtagtatctgtagtcatgtacagttcaacaaggggtcagtggacactggacatagtgggcgaaaagaaccttatgctccgtttggatgtcgatattgaattgaaatgagatgtaattctaattctattatttggatgtcactgaattggagtttagaattgtgtggtccaatttcacttaatacaaaggagtattgggagaaag

SEQ ID NO: 19196 - DNA, 1516 bp, Zea Mays
agctttttctccaagcgtccgttcaggaagctgtccggcaacgagccgctcggcactgggcggtggccgtgcaagagcgatcgggaccgcatcgctcgtctgctcctccaggcctccgcctccctcatcatcactgcagcggcgagaagaacaagggacggtccggcggtggtctccactgacatcgcctaccatggctaccatgctgcgccggtgcatgcgggatctgcgcccgctgcggtctctcgcgagggtccccagaccgatcttcggcgagagtccaacatttcttaaatgtagaagcaactcaacaaaggcatctccaaagagttctacacagaatgctgccccaggtcctcaaggacaaccttctcagtcgggaagtaatgtttcaaagcttgctcttggaactcttgtggtcggtgcagcagctataggtgcacatcaacttggttatatagatcttcaatttaaggacaagacattgccttttagcttaaagaaggaagatgtcggaaaggtggtatatgaagatctgaagattccttctgaacagaaggttgaccagacacaaaacatgtcaggaccaaacactgagattgttcaagagaacaataatgagactcatacttcaaaggactttcgaaatggtggggtgggggcaccagagcttccaatcaatggggatcagcttgttcctgcagaagaaaagaaatcagaaaccctagcccatgagacaaatccagttccagatgaacctggatctgatactgaaatgccatctgaagattctccagctgttgatataaggacagttgccatcgatgctactgaatctagtgaagttcctcatgaacagcaaactgataagatagacggcacagttactcctgtacagtcaaccccaacaacagttagtacttacgatcaccccacagatccagactcaccaaaggatctcacaatagctggtgctgttgagcagaaatctcttgctgagacttatttactgcaagatgaacctggtctttcgaaagacgcaaccattaaagagaaaagaagcgatgaagttgttcgagaaaaaaattctgaagatggtaagattgtacttgatatcattgaggctattcatgctgccgaaaagaagcaggcagatgtagatgcatacatgtattcagaagagagaagaaagttgaaggagaagtatgaaaaggagctgaaagacaccagggccagggaactgatgtatgcagaggaggcagcaattctagataaggagctaaagaaagaaaaactgaagaatgctgctgccataaaggaactgcaagagaaggctgaacaaacgttgcaggatgagctgcagaggaagggtgaagaaacaatccaacagattgagaaggctcaagagatagcaaaagctgaactggctgcagctgttgcaaaagagaaagcatcccagattgaacagattgctgaagcaaatctcaatgatcttcccactcggcgcgagatcttc

SEQ ID NO: 19197 - DNA, 2674 bp, Zea Mays
agctttttctccaagcgtccgttcaggaagctgtccggcaacgagccgctcggcactgggcggtggccgtgcaagagcgatcgggaccgcatcgctcgtctgctcctccaggcctccgcctccctcatcatcactgcagcggcgagaagaacaagggacggtccggcggtggtctccactgacatcgcctaccatggctaccatgctgcgccggtacgggcactgactctggtctcaacccaccacgaactagggtttcgatgcctaatgctctgttcttcctgccactgcaggtgcatgcgggatctgcgcccgctgcggtctctcgcgagggtccccagaccgatcttcggcgagagtccaacatttcttaaatgtagaagcaactcaacaaaggcatctccaaagagttctacacagaatgctgccccaggtcctcaaggacaaccttctcagtcgggaagtaatgtttcaaagcttgctcttggaactcttgtggtcggtgcagcagctataggtgcacatcaacttggttatatagatcttcaatttaaggacaagacattgccttttagcttaaagaaggaagatgtcggaaaggtggtatatgaagatctgaagattccttctgaacagaaggttgaccagacacaaaacatgtcaggaccaaacactgagattgttcaagagaacaataatgagactcatacttcaaaggactttcgaaatggtggggtgggggcaccagagcttccaatcaatggggatcagcttgttcctgcagaagaaaagaaatcagaaaccctagcccatgagacaaatccagttccagatgaacctggatctgatactgaaatgccatctgaagattctccagctgttgatataaggacagttgccatcgatgctactgaatctagtgaagttcctcatgaacagcaaactgataagatagacggcacagttactcctgtacagtcaaccccaacaacagttagtacttacgatcaccccacagatccagactcaccaaaggatctcacaatagctggtgctgttgagcagaaatctcttgctgagacttatttactgcaagatgaacctggtctttcgaaagacgcaaccattaaagagaaaagaagcgatgaagttgttcgagaaaaaaattctgaagatggtaagattgtacttgatatcattgaggctattcatgctgccgaaaagaagcaggcagatgtagatgcatacatgtattcagaagagagaagaaagttgaaggagaagtatgaaaaggagctgaaagacaccagggccagggaactgatgtatgcagaggaggcagcaattctagataaggagctaaagaaagaaaaactgaagaatgctgctgccataaaggaactgcaagagaaggctgaacaaacgttgcaggatgagctgcagaggaagtactactgatttaacagggtgaagaaacaatccaacagattgagaaggctcaagagatagcaaaagctgaactggctgcagctgttgcaaaagagaaagcatcccagattgaacagattgctgaagcaaatctcaatattgatgctctgtgtatggcattctatgcgcgatctgaagaagctaggcagagccattcagttcataaacttgctctgggcactcttgctttagaacacgctttatccagtggatcaccaatccgatcagaagtggggctattgcgaaaatctgttgaaggcattgacaaagattcactgttagaattggctttttcatcactcccagaagatgttttagattatggatcagataccaggatggggttgaagcaacagtttaactccttgaaggaaactatcagacatctcagccttctaccagcaggtggtggtggaatcctggcacacgctgttgcacgtgttgcttcttcaatcaagattaaaggcgataactctggagatggcattgagtcccttataaacaaagtagaaagcatgattgtcaatggagacttgagtacagcggccgatgccttggagcaagggctacatggaactgaagcagaggagatagctaccgagtgggtgaagcaagccaggaaacgcgctcttgcagagcagacacttgctctccttcgcgcttgtgcttcttcgaccacgttctcgtgattttgacaaccatttccccttccttttcttcgaccgcatttgccggtactccttgcaaccgcatattttttccccagaccatgctgcaaatgtgtggacggtgagcgagaagactagatacaatactgtatgagccactcggtctcaaagtgggcccctgcctagctttcctcctgtaaacagagctaataagttctggcgttctgccctgtatctacttgctgttcttaacattttagtggccagttaaagcaatgtttttggatccaattgctgaaggattctttgtatctgtagtatctgtagtcatgtacagttcaacaaggggtcagtggacactggacatagtgggcgaaaagaaccttatgctccgtttggatgtcgatattgaattgaaatgagatgtaattctaattctattatttggatgtcactgaattggagtttagaattgtgtggtccaatttcacttaatacaaaggagtattgggagaaag

SEQ ID NO: 19198 - DNA, 1667 bp, Zea Mays
cttcactcgctcgctgcagccgcgcggcgatgacggccaccgccagctgcttctccagccccgtcgcgtgggcgcggcctcgcgccggccccgcaggcgcgagtgcggccttgcgcgtgggccggtgtcccgcggccgcggtagcggcgcacgacgtggcgttccacccggacgtgtcccgcgcggcggattcgctgcaggcggagttccgcgccgtggaccgcgccatcgctctcaactcctcccgcgtggccgccgccttccgtcgcgcgcgcgtcgccccgcaccatttcggtgggtccacggggtacggccacgacgacggtggcggccgggaagcgttggactccgtcttcgccgacattgttggtgcggaggctgccattgtgcgcccgcagttcttctcaggtacccacgccattgcctgtgcgttgtttgcgcttctgaggcctgggcatgagctcctggcagtcgctgggcccccgtacgacaccttggaggaggtgattgggatcagggggtcggccaatgtagggtcactcaaggatttcggagtgacgtaccgagaagttccgcttgtagcagatggtggccttgattgggatgctcttgcttgctccatcaggccggaaactgggtgtgccttcatacagagatcgtgtggatattcgtggcgcaagagcttaagtgtagcagatattcacaaagctataggtttgatcaagatgcaaaatccaaactgcatggtgatggttgataattgctatggtgaatttgttgagatatcggaacctgcaatggtgggagcagacttgattgctggaagtttgataaagaatccaggtggaactattgcgccttgtggtggttatgttgctgggaaggagcatttagtcgaagcagctgcagcccgtctatctgcacctggccttggggtggaatttgggtcaacacctggccatgttatgcgtgcgctgtttcaaggcctgtttcttggtccgcaaatggttggagaagcagtaaaagtaggtttgctaactgcaaatggttggagatacaatgcatgcacttgatgatataatatgatccacagggaggtttgctcattgcggaagtcatgtcagccaagggatacaaagttgaaccacttccgagggttcctcgtcatgatattgtgcaggcagtggagcttggcagcagggaaagactcatagcattctgtgaagtagtgcaacaaacttgtccagtaggatctttcatcaaaccaactgctggggaaacgcctggctatgcttcagaggtcattttcgccgacgggacattcatagatggaagcacaagcgaactgtcatgtgatgggcccttgagagatccatatgccgtcttttgccagtgaagaggcaggcgtcactaatatgcgagcgcttgcacttcagtggatacggacaacgacaagctgtcgttagtgttacccgactactacctcccctgctgctcatgtggacaaatcaccagcgacctcaccaccagtgaccccacttttaacctccctatttactcaccaccagatattttttagggactcaaacatgatgtatgatttagcatatgatctatgagcacaaagaatatgcaaattgctgtattgtgtatatagaggtttgttt

SEQ ID NO: 19199 - DNA, 1524 bp, Zea Mays
cttcactcgctcgctgcagccgcgcggcgatgacggccaccgccagctgcttctccagccccgtcgcgtgggcgcggcctcgcgccggccccgcaggcgcgagtgcggccttgcgcgtgggccggtgtcccgcggccgcggtagcggcgcacgacgtggcgttccacccggacgtgtcccgcgcggcggattcgctgcaggcggagttccgcgccgtggaccgcgccatcgctctcaactcctcccgcgtggccgccgccttccgtcgcgcgcgcgtcgccccgcaccatttcggtgggtccacggggtacggccacgacgacggtggcggccgggaagcgttggactccgtcttcgccgacattgttggtgcggaggctgccattgtgcgcccgcagttcttctcaggtacccacgccattgcctgtgcgttgtttgcgcttctgaggcctgggcatgagctcctggcagtcgctgggcccccgtacgacaccttggaggaggtgattgggatcagggggtcggccaatgtagggtcactcaaggatttcggagtgacgtaccgagaagttccgcttgtagcagatggtggccttgattgggatgctcttgcttgctccatcaggccggaaactgggtgtgccttcatacagagatcgtgtggatattcgtggcgcaagagcttaagtgtagcagatattcacaaagctataggtttgatcaagatgcaaaatccaaactgcatggtgatggttgataattgctatggtgaatttgttgagatatcggaacctgcaatggtggtatgtccatgattttcactttctcctgaagacgatctctatttcatcttgtgtttcatggcagggagcagacttgattgctggaagtttgataaagaatccaggtggaactattgcgccttgtggtggttatgttgctgggaaggagcatttagtcgaagcagctgcagcccgtctatctgcacctggccttggggtggaatttgggtcaacacctggccatgttatgcgtgcgctgtttcaaggcctgtttcttggtccgcaaatggttggagaagcagtaaaaggaggtttgctcattgcggaagtcatgtcagccaagggatacaaagttgaaccacttccgagggttcctcgtcatgatattgtgcaggcagtggagcttggcagcagggaaagactcatagcattctgtgaagtagtgcaacaaacttgtccagtaggatctttcatcaaaccaactgctggggaaacgcctggctatgcttcagaggtcattttcgccgacgggacattcatagatggaagcacaagcgaactgtcatgtgatgggcccttgagagatccatatgccgtcttttgccagggaggaacacattggacgcagtgggcacttgtccttgcttcgtcaaagacacgcggaaaagaagaggaagggggaggcgactcgaccgaggcccggtttcgatctctggtcctccgattgcgtccagatctacca

SEQ ID NO: 19200 - DNA, 1804 bp, Zea Mays
atgacggccaccgccagctgcttctccagccccgtcgcgtgggcgcggcctcgcgccggccccgcaggcgcgagtgcggccttgcgcgtgggccggtgtcccgcggccgcggtagcggcgcacgacgtggcgttccacccggacgtgtcccgcgcggcggattcgctgcaggcggagttccgcgccgtggaccgcgccatcgctctcaactcctcccgcgtggccgccgccttccgtcgcgcgcgcgtcgccccgcaccatttcggtgggtccacggggtacggccacgacgacggtggcggccgggaagcgttggactccgtcttcgccgacattgttggtgcggaggctgccattgtgcgcccgcagttcttctcaggtacccacgccattgcctgtgcgttgtttgcgcttctgaggcctgggcatgagctcctggcagtcgctgggcccccgtacgacaccttggaggaggtgattgggatcagggggtcggccaatgtagggtcactcaaggatttcggagtgacgtaccgagaagttccgatggtggccttgattgggatgctcttgcttgctccatcaggccggaaactgggtgtgccttcatacagagatcgtgtggatattcgtggcgcaagagcttaagtgtagcagatattcacaaagctataggtttgatcaagatgcaaaatccaaactgcatggtgatggttgataattgctatggtgaatttgttgagatatcggaacctgcaatggtgggagcagacttgattgctggaagtttgataaagaatccaggtggaactattgcgccttgtggtggttatgttgctgggaaggagcatttagtcgaagcagctgcagcccgtctatctgcacctggccttggggtggaatttgggtcaacacctggccatgttatgcgtgcgctgtttcaaggcctgtttcttggtccgcaaatggttggagaagcagtaaaaggaggtttgctcattgcggaagtcatgtcagccaagggatacaaagttgaaccacttccgagggttcctcgtcatgatattgtgcaggcagtggagcttggcagcagggaaagactcatagcattctgtgaagtagtgcaacaaacttgtccagtaggatctttcatcaaaccaactgctggggaaacgcctggctatgcttcagaggtcattttcgccgacgggacattcatagatggaagcacaagcgaactgtcatgtgatgggcccttgagagatccatatgccgtcttttgccagggaggaacacattggacgcagtgggcacttgtccttggaatggtggatactcactccgtctcagtttataaggctttataaggcgtaactactttttattcttgtcccataatataaggcgtgctctctctaggcgtacgtacatcaatgcagtagtatagagaaaattaaatgtatttcttgatttttgaactagaggtggttacaccttatatattgagacgcagcgggtattgtgcaacagtgaagaggcaggcgtcactaatatgcgagcgcttgcacttcagtggatacggacaacgacaagctgtcgttagtgttacccgactactacctcccctgctgctcatgtggacaaatcaccagcgacctcaccaccagtgaccccacttttaacctccctatttactcaccaccagatattttttagggactcaaacatgatgtatgatttagcatatgatctatgagcacaaagaatatgcaaattgctgtattgtgtatatagaggtttgttt

SEQ ID NO: 19201 - DNA, 1875 bp, Zea Mays
atgacggccaccgccagctgcttctccagccccgtcgcgtgggcgcggcctcgcgccggccccgcaggcgcgagtgcggccttgcgcgtgggccggtgtcccgcggccgcggtagcggcgcacgacgtggcgttccacccggacgtgtcccgcgcggcggattcgctgcaggcggagttccgcgccgtggaccgcgccatcgctctcaactcctcccgcgtggccgccgccttccgtcgcgcgcgcgtcgccccgcaccatttcggtgggtccacggggtacggccacgacgacggtggcggccgggaagcgttggactccgtcttcgccgacattgttggtgcggaggctgccattgtgcgcccgcagttcttctcaggtacccacgccattgcctgtgcgttgtttgcgcttctgaggcctgggcatgagctcctggcagtcgctgggcccccgtacgacaccttggaggaggtgattgggatcagggggtcggccaatgtagggtcactcaaggatttcggagtgacgtaccgagaagttccgcttgtagcagatggtggccttgattgggatgctcttgcttgctccatcaggccggaaactgggtgtgccttcatacagagatcgtgtggatattcgtggcgcaagagcttaagtgtagcagatattcacaaagctataggtttgatcaagatgcaaaatccaaactgcatggtgatggttgataattgctatggtgaatttgttgagatatcggaacctgcaatggtgacttgattgctggaagtttgataaagaatccaggtggaactattgcgccttgtggtggttatgttgctgggaaggagcatttagtcgaagcagctgcagcccgtctatctgcacctggccttggggtggaatttgggtcaacacctggccatgttatgcgtgcgctgtttcaaggcctgtttcttggtccgcaaatggttggagaagcagtaaaagtaggtttgctaactgcaaatggttggagatacaatgcatgcacttgatgatataatatgatccacagggaggtttgctcattgcggaagtcatgtcagccaagggatacaaagttgaaccacttccgagggttcctcgtcatgatattgtgcaggcagtggagcttggcagcagggaaagactcatagcattctgtgaagtagtgcaacaaacttgtccagtaggatctttcatcaaaccaactgctggggaaacgcctggctatgcttcagaggtcattttcgccgacgggacattcatagatggaagcacaagcgaactgtcatgtgatgggcccttgagagatccatatgccgtcttttgccagggaggaacacattggacgcagtgggcacttgtccttggaatggtggatactcactccgtctcagtttataaggctttataaggcgtaactactttttattcttgtcccataatataaggcgtgctctctctaggcgtacgtacatcaatgcagtagtatagagaaaattaaatgtatttcttgatttttgaactagaggtggttacaccttatatattgagacgcagcgggtattgtgcaacagtgaagaggcaggcgtcactaatatgcgagcgcttgcacttcagtggatacggacaacgacaagctgtcgttagtgttacccgactactacctcccctgctgctcatgtggacaaatcaccagcgacctcaccaccagtgaccccacttttaacctccctatttactcaccaccagatattttttagggactcaaacatgatgtatgatttagcatatgatctatgagcacaaagaatatgcaaattgctgtattgtgtatatagaggtttgttt

SEQ ID NO: 19202 - DNA, 1703 bp, Zea Mays
atgacggccaccgccagctgcttctccagccccgtcgcgtgggcgcggcctcgcgccggccccgcaggcgcgagtgcggccttgcgcgtgggccggtgtcccgcggccgcggtagcggcgcacgacgtggcgttccacccggacgtgtcccgcgcggcggattcgctgcaggcggagttccgcgccgtggaccgcgccatcgctctcaactcctcccgcgtggccgccgccttccgtcgcgcgcgcgtcgccccgcaccatttcggtgggtccacggggtacggccacgacgacggtggcggccgggaagcgttggactccgtcttcgccgacattgttggtgcggaggctgccattgtgcgcccgcagctcctggcagtcgctgggcccccgtacgacaccttggaggaggtgattgggatcagggggtcggccaatgtagggtcactcaaggatttcggagtgacgtaccgagaagttccgatgcaaaatccaaactgcatggtgatggttgataattgctatggtgaatttgttgagatatcggaacctgcaatggtgggagcagacttgattgctggaagtttgataaagaatccaggtggaactattgcgccttgtggtggttatgttgctgggaaggagcatttagtcgaagcagctgcagcccgtctatctgcacctggccttggggtggaatttgggtcaacacctggccatgttatgcgtgcgctgtttcaaggcctgtttcttggtccgcaaatggttggagaagcagtaaaaggaggtttgctcattgcggaagtcatgtcagccaagggatacaaagttgaaccacttccgagggttcctcgtcatgatattgtgcaggcagtggagcttggcagcagggaaagactcatagcattctgtgaagtagtgcaacaaacttgtccagtaggatctttcatcaaaccaactgctggggaaacgcctggctatgcttcagaggtcattttcgccgacgggacattcatagatggaagcacaagcgaactgtcatgtgatgggcccttgagagatccatatgccgtcttttgccagggaggaacacattggacgcagtgggcacttgtccttggtaatgttctgaaggtcatataaacgtgcggtgtgataatgttgtcacatttcttgtatgggcatgctcttttcctatcctaactctgtactcgtttactaggaatggtggatactcactccgtctcagtttataaggctttataaggcgtaactactttttattcttgtcccataatataaggcgtgctctctctaggcgtacgtacatcaatgcagtagtatagagaaaattaaatgtatttcttgatttttgaactagaggtggttacaccttatatattgagacgcagcgggtattgtgcaacagtgaagaggcaggcgtcactaatatgcgagcgcttgcacttcagtggatacggacaacgacaagctgtcgttagtgttacccgactactacctcccctgctgctcatgtggacaaatcaccagcgacctcaccaccagtgaccccacttttaacctccctatttactcaccaccagatattttttagggactcaaacatgatgtatgatttagcatatgatctatgagcacaaagaatatgcaaattgctgtattgtgtatatagaggtttgttt

SEQ ID NO: 19203 - DNA, 1575 bp, Zea Mays
atgacggccaccgccagctgcttctccagccccgtcgcgtgggcgcggcctcgcgccggccccgcaggcgcgagtgcggccttgcgcgtgggccggtgtcccgcggccgcggtagcggcgcacgacgtggcgttccacccggacgtgtcccgcgcggcggattcgctgcaggcggagttccgcgccgtggaccgcgccatcgctctcaactcctcccgcgtggccgccgccttccgtcgcgcgcgcgtcgccccgcaccatttcggtgggtccacggggtacggccacgacgacggtggcggccgggaagcgttggactccgtcttcgccgacattgttggtgcggaggctgccattgtgcgcccgcagctcctggcagtcgctgggcccccgtacgacaccttggaggaggtgattgggatcagggggtcggccaatgtagggtcactcaaggatttcggagtgacgtaccgagaagttccgcttgtagcagatggtggccttgattgggatgctcttgcttgctccatcaggccggaaactgggtgtgccttcatacagagatcgtgtggatattcgtggcgcaagagcttaagtgtagcagatattcacaaagctataggtttgatcaagatgcaaaatccaaactgcatggtgatggttgataattgctatggtgaatttgttgagatatcggaacctgcaatggtgggagcagacttgattgctggaagtttgataaagaatccaggtggaactattgcgccttgtggtggttatgttgctgggaaggagcatttagtcgaagcagctgcagcccgtctatctgcacctggccttggggtggaatttgggtcaacacctggccatgttatgcgtgcgctgtttcaaggcctgtttcttggtccgcaaatggttggagaagcagtaaaagtaggtttgctaactgcaaatggttggagatacaatgcatgcacttgatgatataatatgatccacagggaggtttgctcattgcggaagtcatgtcagccaagggatacaaagttgaaccacttccgagggttcctcgtcatgatattgtgcaggcagtggagcttggcagcagggaaagactcatagcattctgtgaagtagtgcaacaaacttgtccagtaggatctttcatcaaaccaactgctggggaaacgcctggctatgcttcagaggtcattttcgccgacgggacattcatagatggaagcacaagcgaactgtcatgtgatgggcccttgagagatccatatgccgtcttttgccagtgaagaggcaggcgtcactaatatgcgagcgcttgcacttcagtggatacggacaacgacaagctgtcgttagtgttacccgactactacctcccctgctgctcatgtggacaaatcaccagcgacctcaccaccagtgaccccacttttaacctccctatttactcaccaccagatattttttagggactcaaacatgatgtatgatttagcatatgatctatgagcacaaagaatatgcaaattgctgtattgtgtatatagaggtttgttt

SEQ ID NO: 19204 - DNA, 1828 bp, Zea Mays
atgacggccaccgccagctgcttctccagccccgtcgcgtgggcgcggcctcgcgccggccccgcaggcgcgagtgcggccttgcgcgtgggccggtgtcccgcggccgcggtagcggcgcacgacgtggcgttccacccggacgtgtcccgcgcggcggattcgctgcaggcggagttccgcgccgtggaccgcgccatcgctctcaactcctcccgcgtggccgccgccttccgtcgcgcgcgcgtcgccccgcaccatttcggtgggtccacggggtacggccacgacgacggtggcggccgggaagcgttggactccgtcttcgccgacattgttggtgcggaggctgccattgtgcgcccgcagttcttctcaggtacccacgccattgcctgtgcgttgtttgcgcttctgaggcctgggcatgagctcctggcagtcgctgggcccccgtacgacaccttggaggaggtgattgggatcagggggtcggccaatgtagggtcactcaaggatttcggagtgacgtaccgagaagttccgcttgtagcagatggtggccttgattgggatgctcttgcttgctccatcaggccggaaactgggtgtgccttcatacagagatcgtgtggatattcgtggcgcaagagcttaagtgtagcagatattcacaaagctataggtttgatcaagatgcaaaatccaaactgcatggtgatggttgataattgctatggtgaatttgttgagatatcggaacctgcaatggtgggagcagacttgattgctggaagtttgataaagaatccaggtggaactattgcgccttgtggtggttatgttgctgggaaggagcatttagtcgaagcagctgcagcccgtctatctgcacctggccttggggtggaatttgggtcaacacctggccatgttatgcgtgcgctgtttcaaggcctgtttcttggtccgcaaatggttggagaagcagtaaaaggaggtttgctcattgcggaagtcatgtcagccaagggatacaaagttgaaccacttccgagggttcctcgtcatgatattgtgcaggcagtggagcttggcagcagggaaagactcatagcattctgtgaagtagtgcaacaaacttgtccagtaggatctttcatcaaaccaactgctggggaaacgcctggctatgcttcagaggtcattttcgccgacgggacattcatagatggaagcacaagcgaactgtcatgtgatgggcccttgagagatccatatgccgtcttttgccagggaggaacacattggacgcagtgggcacttgtccttggtaatgttctgaaggaatggtggatactcactccgtctcagtttataaggctttataaggcgtaactactttttattcttgtcccataatataaggcgtgctctctctaggcgtacgtacatcaatgcagtagtatagagaaaattaaatgtatttcttgatttttgaactagaggtggttacaccttatatattgagacgcagcgggtattgtgcaacagtgaagaggcaggcgtcactaatatgcgagcgcttgcacttcagtggatacggacaacgacaagctgtcgttagtgttacccgactactacctcccctgctgctcatgtggacaaatcaccagcgacctcaccaccagtgaccccacttttaacctccctatttactcaccaccagatattttttagggactcaaacatgatgtatgatttagcatatgatctatgagcacaaagaatatgcaaattgctgtattgtgtatatagaggtttgttt

SEQ ID NO: 19205 - DNA, 1751 bp, Zea Mays
atgacggccaccgccagctgcttctccagccccgtcgcgtgggcgcggcctcgcgccggccccgcaggcgcgagtgcggccttgcgcgtgggccggtgtcccgcggccgcggtagcggcgcacgacgtggcgttccacccggacgtgtcccgcgcggcggattcgctgcaggcggagttccgcgccgtggaccgcgccatcgctctcaactcctcccgcgtggccgccgccttccgtcgcgcgcgcgtcgccccgcaccatttcggtgggtccacggggtacggccacgacgacggtggcggccgggaagcgttggactccgtcttcgccgacattgttggtgcggaggctgccattgtgcgcccgcagctcctggcagtcgctgggcccccgtacgacaccttggaggaggtgattgggatcagggggtcggccaatgtagggtcactcaaggatttcggagtgacgtaccgagaagttccgcttgtagcagatggtggccttgattgggatgctcttgcttgctccatcaggccggaaactgggtgtgccttcatacagagatcgtgtggatattcgtggcgcaagagcttaagtgtagcagatattcacaaagctataggtttgatcaagatgcaaaatccaaactgcatggtgatggttgataattgctatggtgaatttgttgagatatcggaacctgcaatggtgggagcagacttgattgctggaagtttgataaagaatccaggtggaactattgcgccttgtggtggttatgttgctgggaaggagcatttagtcgaagcagctgcagcccgtctatctgcacctggccttggggtggaatttgggtcaacacctggccatgttatgcgtgcgctgtttcaaggcctgtttcttggtccgcaaatggttggagaagcagtaaaaggaggtttgctcattgcggaagtcatgtcagccaagggatacaaagttgaaccacttccgagggttcctcgtcatgatattgtgcaggcagtggagcttggcagcagggaaagactcatagcattctgtgaagtagtgcaacaaacttgtccagtaggatctttcatcaaaccaactgctggggaaacgcctggctatgcttcagaggtcattttcgccgacgggacattcatagatggaagcacaagcgaactgtcatgtgatgggcccttgagagatccatatgccgtcttttgccagggaggaacacattggacgcagtgggcacttgtccttggaatggtggatactcactccgtctcagtttataaggctttataaggcgtaactactttttattcttgtcccataatataaggcgtgctctctctaggcgtacgtacatcaatgcagtagtatagagaaaattaaatgtatttcttgatttttgaactagaggtggttacaccttatatattgagacgcagcgggtattgtgcaacagtgaagaggcaggcgtcactaatatgcgagcgcttgcacttcagtggatacggacaacgacaagctgtcgttagtgttacccgactactacctcccctgctgctcatgtggacaaatcaccagcgacctcaccaccagtgaccccacttttaacctccctatttactcaccaccagatattttttagggactcaaacatgatgtatgatttagcatatgatctatgagcacaaagaatatgcaaattgctgtattgtgtatatagaggtttgttt

SEQ ID NO: 19206 - DNA, 1705 bp, Zea Mays
atgacggccaccgccagctgcttctccagccccgtcgcgtgggcgcggcctcgcgccggccccgcaggcgcgagtgcggccttgcgcgtgggccggtgtcccgcggccgcggtagcggcgcacgacgtggcgttccacccggacgtgtcccgcgcggcggattcgctgcaggcggagttccgcgccgtggaccgcgccatcgctctcaactcctcccgcgtggccgccgccttccgtcgcgcgcgcgtcgccccgcaccatttcggtgggtccacggggtacggccacgacgacggtggcggccgggaagcgttggactccgtcttcgccgacattgttggtgcggaggctgccattgtgcgcccgcagttcttctcaggtacccacgccattgcctgtgcgttgtttgcgcttctgaggcctgggcatgagctcctggcagtcgctgggcccccgtacgacaccttggaggaggtgattgggatcagggggtcggccaatgtagggtcactcaaggatttcggagtgacgtaccgagaagttccgcttgtagcagatggtggccttgattgggatgctcttgcttgctccatcaggccggaaactgggtgtgccttcatacagagatcgtgtggatattcgtggcgcaagagcttaagtgtagcagatattcacaaagctataggtttgatcaagatgcaaaatccaaactgcatggtgatggttgataattgctatggtgaatttgttgagatatcggaacctgcaatggtgggagcagacttgattgctggaagtttgataaagaatccaggtggaactattgcgccttgtggtggttatgttgctgggaaggagcatttagtcgaagcagctgcagcccgtctatctgcacctggccttggggtggaatttgggtcaacacctggccatgttatgcgtgcgctgtttcaaggcctgtttcttggtccgcaaatggttggagaagcagtaaaaggaggtttgctcattgcggaagtcatgtcagccaagggatacaaagttgaaccacttccgagggttcctcgtcatgatattgtgcaggcagtggagcttggcagcagggaaagactcatagcattctgtgaagtagtgcaacaaacttgtccagtaggatctttcatcaaaccaactgctggggaaacgcctggctatgcttcagaggtcattttcgccgacgggacattcatagatggaagcacaagcgaactgtcatgtgatgggcccttgagagatccatatgccgtcttttgccagggaggaacacattggacgcagtgggcacttgtccttggaatggtggatactcactccgtctcagtttataaggctttataaggcgtaactactttttattcttgtcccataatataaggcgtgctctctctaggctgaagaggcaggcgtcactaatatgcgagcgcttgcacttcagtggatacggacaacgacaagctgtcgttagtgttacccgactactacctcccctgctgctcatgtggacaaatcaccagcgacctcaccaccagtgaccccacttttaacctccctatttactcaccaccagatattttttagggactcaaacatgatgtatgatttagcatatgatctatgagcacaaagaatatgcaaattgctgtattgtgtatatagaggtttgttt

SEQ ID NO: 19207 - DNA, 3163 bp, Zea Mays
atggaccaaggagcgccggaggcggacaataatgccatgccagcaccatctgacggcaattcgaacggaggtcctgtcctcggggagccgaatccacacggaccacaccagaggacgcgggggacgccccggattcttcggattccaggatggaactacacagaaatagcactaatggttcctgcctcagtgcatgtgggccactgacagactactacattcctgattacatactgaagccggcctatgaaccggtcactgttgataatgtgccatgttgtcctgtggtagtcttcatcaactctagaagtggtggccaactgggaagcagtctgataaaaacataccgtgaacttctcaatgaagcgcaggtttttgatctctcagaagagtctcctgataaggttctacatagattatacagcaactttgaaaggctcaagtctagtggtgaccatgttgctactcaaattcagaagagcttaaggctaattgttgctggtggtgacggtacagcaagttggctgcttggagtagttagtgacctgaaactatcacatccacctcctgttgctaccgtacctcttgggactggaaacaacctccctttttcatttggatgggggaaaaagaatcccgctactgaccaggcagcagtgaaatcattcctggatcaagtaaaaggagcaagagaaatgaatatcgatagctggcatatcatcatgaggatgcgaattccacaggaaggcccatgtgatcctattgctcccttagatcttccacattcgttgcatgctttccaccgcgtatcagcttgtgactctctcaatttggagggataccacacattccgtggaggattctggaattattttagcttgggaatggatgcacaagtatcctatgaattccactctgaaaggaagagaaatccagagaagttcagacaccagctaagaaatcagggtacatatgctaagcttggatttaagcattccctaaaccatctttcatcgaggaacatttctcaacttgcaaaggtgaagatcatgaaaagacctggttcccagtgggaagagctaaagattcctcgcagcattcaatcagttatctgcctgaacctgccaagcttctctggaggattgaatccatggggaacacctggcacaaggaaagcacaagacagagacctgactgcaccttacgttgacgatgggcttatcgaggttgtcggcttccgtgatgcctggcatgggctcatcttgctggctcctaatggccatggaactcgtctagcgcccaccgaatccgtttcgagttccacaagggagcagccgagcacacgttcatgaggatcgacggggagccatggaagcagcctctccccaaggaggacgacaccgtggtggtggagatctccaacctccgtcaggtggccatgctggccaacgacccgtgcaggtccaagagcgtgaacgagccgtcctccccgtcgtgccacggccatgaggacgacgacagcaacagcctggaggacgaggacgaggacgagtgggaggacgggaggaagaagttcggtgcggcggccaccttcaagatccccgacgaggtggacatcgctcatctcagttagaacctagaaaccccgccggctgcttctgcgtcggttggtggtgctgactgctgagtctgtgcatttcagagtgtttgctgcttgctacagcctacagtgctactgctccctttttttttgttgttttttttttggttgcctccacgagctcagatttcagaagctaaccactgctgttggtgaaactgctcgttatgatcccccattgttctgtaaattttcaagttttagcagccatgtgtatttcactggctgataatttttttgtgtgctacgtaatttgaaacgtggaaacgacttgtaccaaaggtctgataccgtgtactatggagtatgtaggagagtagaaagcaacagattttgaatcacgtaatctgtcagaggagaagtcgtcacgtaacaaatgacggctcggcttctggagttcgctgcgtccgtccgtccgcccgccgctgtttgataggagtactcccgcacccgcacccggttccaggccaaaccgcgttccccacgcgcccaccagaaagcagaggcggcagcataaaaggcccccgcgcgcctctccgcactccacgtcaatccaatccaggacacaaagttgcggtgagcaattgcaaggcgatgagcttgaggtacatgagccgtgtgggcgcgcgggtggtgcgggagagcacgggcaggtcggtcaaggcgcaggcgcaggcggcgtccatggcgaggagcggcggcagcagggcgccggccgccgggtcggtggagtcggggagagcgagcgccgtggcggcggcggcggcggccaggaggaaggcggaggaggagaagcggcggcgcgccgagcaggcgctgcgcaccgtcatgttcctctccgtctggggccccaacacctaggcctagtaggaatcaaggagtgttagcatcatcatgtgtagcgttctgtgcacgtttgtttgtttgtttgtttgtttgtttgaggttcagaaaacaaagtgtatattacttacagtggtataatctttgaagacatcacatccctacgttgattctttggcgaaacaaagttaccgagggggcttccactttccacgacggcgttgaacgccagcctgagctacaacttccaggaggcaggaggcaggaggcactcaggctcatcgatgctgtgactccagagctcacgaagtgccgaagttgagcgaaaccaaatggcggttggttgcggtggtgcctgcacacaacttgcgggaggcagacgtgctgaacagcaaaccgcgacaggtttcacgcacacagggtgtagcgaattgggctctggggatgtgtcgtgtggtgggtggggcgaccggagctgactagatcgaggtggattagaacaaagtggtacactgccgtcactgtatgggttgggtccatacagacgtacccttttttggcaggatatattataaccggaagaaactttttttttaaaaaaaatgtgatcatggagacttgcaaatgtaatagagaagctagcaaatcggtgctcggaac

SEQ ID NO: 19208 - DNA, 3178 bp, Zea Mays
atggaccaaggagcgccggaggcggacaataatgccatgccagcaccatctgacggcaattcgaacggaggtccttttcttctttctcgtctgcttcctccttccctcgtcgtcctcgcgtcgcctccttcggccctccctattaatacctgcctcctcacaaccaggtcctgtcctcggggagccgaatccacacggaccacaccagaggacgcgggggacgccccggattcttcggattccaggatggaactacacagaaatagcactaatggttcctgcctcagtgcatgtgggccactgacagactactacattcctgattacatactgaagccggcctatgaaccggtcactgttgataatgtgccatgttgtcctgtggtagtcttcatcaactctagaagtggtggccaactgggaagcagtctgataaaaacataccgtgaacttctcaatgaagcgcaggtttttgatctctcagaagagtctcctgataaggttctacatagattatacagcaactttgaaaggctcaagtctagtggtgaccatgttgctactcaaattcagaagagcttaaggctaattgttgctggtggtgacggtacagcaagttggctgcttggagtagttagtgacctgaaactatcacatccacctcctgttgctaccgtacctcttgggactggaaacaacctccctttttcatttggatggctggcatatcatcatgaggatgcgaattccacaggaaggcccatgtgatcctattgctcccttagatcttccacattcgttgcatgctttccaccgcgtatcagcttgtgactctctcaatttggagggataccacacattccgtggaggattctggaattattttagcttgggaatggatgcacaagtatcctatgaattccactctgaaaggaagagaaatccagagaagttcagacaccagctaagaaatcagggtacatatgctaagcttggatttaagcattccctaaaccatctttcatcgaggaacatttctcaacttgcaaaggtgaagatcatgaaaagacctggttcccagtgggaagagctaaagattcctcgcagcattcaatcagttatctgcctgaacctgccaagcttctctggaggattgaatccatggggaacacctggcacaaggaaagcacaagacagagacctgactgcaccttacgttgacgatgggcttatcgaggttgtcggcttccgtgatgcctggcatgggctcatcttgctggctcctaatggccatggaactcgtctagcgcaggcccaccgaatccgtttcgagttccacaagggagcagccgagcacacgttcatgaggatcgacggggagccatggaagcagcctctccccaaggaggacgacaccgtggtggtggagatctccaacctccgtcaggtggccatgctggccaacgacccgtgcaggtccaagagcgtgaacgagccgtcctccccgtcgtgccacggccatgaggacgacgacagcaacagcctggaggacgaggacgaggacgagtgggaggacgggaggaagaagttcggtgcggcggccaccttcaagatccccgacgaggtggacatcgctcatctcagttagaacctagaaaccccgccggctgcttctgcgtcggttggtggtgctgactgctgagtctgtgcatttcagagtgtttgctgcttgctacagcctacagtgctactgctccctttttttttgttgttttttttttggttgcctccacgagctcagatttcagaagctaaccactgctgttggtgaaactgctcgttatgatcccccattgttctgtaaattttcaagttttagcagccatgtgtatttcactggctgataatttttttgtgtgctacgtaatttgaaacgtggaaacgacttgtaccaaaggtctgataccgtgtactatggagtatgtaggagagtagaaagcaacagattttgaatcacgtaatctgtcagaggagaagtcgtcacgtaacaaatgacggctcggcttctggagttcgctgcgtccgtccgtccgcccgccgctgtttgataggagtactcccgcacccgcacccggttccaggccaaaccgcgttccccacgcgcccaccagaaagcagaggcggcagcataaaaggcccccgcgcgcctctccgcactccacgtcaatccaatccaggacacaaagttgcggtgagcaattgcaaggcgatgagcttgaggtacatgagccgtgtgggcgcgcgggtggtgcgggagagcacgggcaggtcggtcaaggcgcaggcgcaggcggcgtccatggcgaggagcggcggcagcagggcgccggccgccgggtcggtggagtcggggagagcgagcgccgtggcggcggcggcggcggccaggaggaaggcggaggaggagaagcggcggcgcgccgagcaggcgctgcgcaccgtcatgttcctctccgtctggggccccaacacctaggcctagtaggaatcaaggagtgttagcatcatcatgtgtagcgttctgtgcacgtttgtttgtttgtttgtttgtttgtttgaggttcagaaaacaaagtgtatattacttacagtggtataatctttgaagacatcacatccctacgttgattctttggcgaaacaaagttaccgagggggcttccactttccacgacggcgttgaacgccagcctgagctacaacttccaggaggcaggaggcaggaggcactcaggctcatcgatgctgtgactccagagctcacgaagtgccgaagttgagcgaaaccaaatggcggttggttgcggtggtgcctgcacacaacttgcgggaggcagacgtgctgaacagcaaaccgcgacaggtttcacgcacacagggtgtagcgaattgggctctggggatgtgtcgtgtggtgggtggggcgaccggagctgactagatcgaggtggattagaacaaagtggtacactgccgtcactgtatgggttgggtccatacagacgtacccttttttggcaggatatattataaccggaagaaactttttttttaaaaaaaatgtgatcatggagacttgcaaatgtaatagagaagctagcaaatcggtgctcggaac

SEQ ID NO: 19209 - DNA, 3114 bp, Zea Mays
atggaccaaggagcgccggaggcggacaataatgccatgccagcaccatctgacggcaattcgaacggaggtcctgtcctcggggagccgaatccacacggaccacaccagaggacgcgggggacgccccggattcttcggattccaggatggaactacacagaaatagcactaatggttcctgcctcagtgcatgtgggccactgacagactactacattcctgattacatactgaagccggcctatgaaccggtcactgttgataatgtgccatgttgtcctgtggtagtcttcatcaactctagaagtggtggccaactgggaagcagtctgataaaaacataccgtgaacttctcaatgaagcgcagcaactttgaaaggctcaagtctagtggtgaccatgttgctactcaaattcagaagagcttaaggctaattgttgctggtggtgacggtacagcaagttggctgcttggagtagttagtgacctgaaactatcacatccacctcctgttgctaccgtacctcttgggactggaaacaacctccctttttcatttggatgggggaaaaagaatcccgctactgaccaggcagcagtgaaatcattcctggatcaagtaaaaggagcaagagaaatgaatatcgatagctggcatatcatcatgaggatgcgaattccacaggaaggcccatgtgatcctattgctcccttagatcttccacattcgttgcatgctttccaccgcgtatcagcttgtgactctctcaatttggagggataccacacattccgtggaggattctggaattattttagcttgggaatggatgcacaagtatcctatgaattccactctgaaaggaagagaaatccagagaagttcagacaccagctaagaaatcagggtacatatgctaagcttggatttaagcattccctaaaccatctttcatcgaggaacatttctcaacttgcaaaggtgaagatcatgaaaagacctggttcccagtgggaagagctaaagattcctcgcagcattcaatcagttatctgcctgaacctgccaagcttctctggaggattgaatccatggggaacacctggcacaaggaaagcacaagacagagacctgactgcaccttacgttgacgatgggcttatcgaggttgtcggcttccgtgatgcctggcatgggctcatcttgctggctcctaatggccatggaactcgtctagcgcaggcccaccgaatccgtttcgagttccacaagggagcagccgagcacacgttcatgaggatcgacggggagccatggaagcagcctctccccaaggaggacgacaccgtggtggtggagatctccaacctccgtcaggtggccatgctggccaacgacccgtgcaggtccaagagcgtgaacgagccgtcctccccgtcgtgccacggccatgaggacgacgacagcaacagcctggaggacgaggacgaggacgagtgggaggacgggaggaagaagttcggtgcggcggccaccttcaagatccccgacgaggtggacatcgctcatctcagttagaacctagaaaccccgccggctgcttctgcgtcggttggtggtgctgactgctgagtctgtgcatttcagagtgtttgctgcttgctacagcctacagtgctactgctccctttttttttgttgttttttttttggttgcctccacgagctcagatttcagaagctaaccactgctgttggtgaaactgctcgttatgatcccccattgttctgtaaattttcaagttttagcagccatgtgtatttcactggctgataatttttttgtgtgctacgtaatttgaaacgtggaaacgacttgtaccaaaggtctgataccgtgtactatggagtatgtaggagagtagaaagcaacagattttgaatcacgtaatctgtcagaggagaagtcgtcacgtaacaaatgacggctcggcttctggagttcgctgcgtccgtccgtccgcccgccgctgtttgataggagtactcccgcacccgcacccggttccaggccaaaccgcgttccccacgcgcccaccagaaagcagaggcggcagcataaaaggcccccgcgcgcctctccgcactccacgtcaatccaatccaggacacaaagttgcggtgagcaattgcaaggcgatgagcttgaggtacatgagccgtgtgggcgcgcgggtggtgcgggagagcacgggcaggtcggtcaaggcgcaggcgcaggcggcgtccatggcgaggagcggcggcagcagggcgccggccgccgggtcggtggagtcggggagagcgagcgccgtggcggcggcggcggcggccaggaggaaggcggaggaggagaagcggcggcgcgccgagcaggcgctgcgcaccgtcatgttcctctccgtctggggccccaacacctaggcctagtaggaatcaaggagtgttagcatcatcatgtgtagcgttctgtgcacgtttgtttgtttgtttgtttgtttgtttgaggttcagaaaacaaagtgtatattacttacagtggtataatctttgaagacatcacatccctacgttgattctttggcgaaacaaagttaccgagggggcttccactttccacgacggcgttgaacgccagcctgagctacaacttccaggaggcaggaggcaggaggcactcaggctcatcgatgctgtgactccagagctcacgaagtgccgaagttgagcgaaaccaaatggcggttggttgcggtggtgcctgcacacaacttgcgggaggcagacgtgctgaacagcaaaccgcgacaggtttcacgcacacagggtgtagcgaattgggctctggggatgtgtcgtgtggtgggtggggcgaccggagctgactagatcgaggtggattagaacaaagtggtacactgccgtcactgtatgggttgggtccatacagacgtacccttttttggcaggatatattataaccggaagaaactttttttttaaaaaaaatgtgatcatggagacttgcaaatgtaatagagaagctagcaaatcggtgctcggaac

SEQ ID NO: 19210 - DNA, 3167 bp, Zea Mays
atggaccaaggagcgccggaggcggacaataatgccatgccagcaccatctgacggcaattcgaacggaggtcctgtcctcggggagccgaatccacacggaccacaccagaggacgcgggggacgccccggattcttcggattccaggatggaactacacagaaatagcactaatggttcctgcctcagtgcatgtgggccactgacagactactacattcctgattacatactgaagccggcctatgaaccggtcactgttgataatgtgccatgttgtcctgtggtagtcttcatcaactctagaagtggtggccaactgggaagcagtctgataaaaacataccgtgaacttctcaatgaagcgcaggtttttgatctctcagaagagtctcctgataaggttctacatagattatacagcaactttgaaaggctcaagtctagtggtgaccatgttgctactcaaattcagaagagcttaaggctaattgttgctggtggtgacggtacagcaagttggctgcttggagtagttagtgacctgaaactatcacatccacctcctgttgctaccgtacctcttgggactggaaacaacctccctttttcatttggatgggggaaaaagaatcccgctactgaccaggcagcagtgaaatcattcctggatcaagtaaaaggagcaagagaaatgaatatcgatagctggcatatcatcatgaggatgcgaattccacaggaaggcccatgtgatcctattgctcccttagatcttccacattcgttgcatgctttccaccgcgtatcagcttgtgactctctcaatttggagggataccacacattccgtggaggattctggaattattttagcttgggaatggatgcacaagtatcctatgaattccactctgaaaggaagagaaatccagagaagttcagacaccagctaagaaatcagggtacatatgctaagcttggatttaagcattccctaaaccatctttcatcgaggaacatttctcaacttgcaaaggtgaagatcatgaaaagacctggttcccagtgggaagagctaaagattcctcgcagcattcaatcagttatctgcctgaacctgccaagcttctctggaggattgaatccatggggaacacctggcacaaggaaagcacaagacagagacctgactgcaccttacgttgacgatgggcttatcgaggttgtcggcttccgtgatgcctggcatgggctcatcttgctggctcctaatggccatggaactcgtctagcgcaggcccaccgaatccgtttcgagttccacaagggagcagccgagcacacgttcatgaggatcgacggggagccatggaagcagcctctccccaaggaggacgacaccgtggtggtggagatctccaacctccgtcaggtggccatgctggccaacgacccgtgcaggtccaagagcgtgaacgagccgtcctccccgtcgtgccacggccatgaggacgacgacagcaacagcctggaggacgaggacgaggacgagtgggaggacgggaggaagaagttcggtgcggcggccaccttcaagatccccgacgaggtggacatcgctcatctcagttagaacctagaaaccccgccggctgcttctgcgtcggttggtggtgctgactgctgagtctgtgcatttcagagtgtttgctgcttgctacagcctacagtgctactgctccctttttttttgttgttttttttttggttgcctccacgagctcagatttcagaagctaaccactgctgttggtgaaactgctcgttatgatcccccattgttctgtaaattttcaagttttagcagccatgtgtatttcactggctgataatttttttgtgtgctacgtaatttgaaacgtggaaacgacttgtaccaaaggtctgataccgtgtactatggagtatgtaggagagtagaaagcaacagattttgaatcacgtaatctgtcagaggagaagtcgtcacgtaacaaatgacggctcggcttctggagttcgctgcgtccgtccgtccgcccgccgctgtttgataggagtactcccgcacccgcacccggttccaggccaaaccgcgttccccacgcgcccaccagaaagcagaggcggcagcataaaaggcccccgcgcgcctctccgcactccacgtcaatccaatccaggacacaaagttgcggtgagcaattgcaaggcgatgagcttgaggtacatgagccgtgtgggcgcgcgggtggtgcgggagagcacgggcaggtcggtcaaggcgcaggcgcaggcggcgtccatggcgaggagcggcggcagcagggcgccggccgccgggtcggtggagtcggggagagcgagcgccgtggcggcggcggcggcggccaggaggaaggcggaggaggagaagcggcggcgcgccgagcaggcgctgcgcaccgtcatgttcctctccgtctggggccccaacacctaggcctagtaggaatcaaggagtgttagcatcatcatgtgtagcgttctgtgcacgtttgtttgtttgtttgtttgtttgtttgaggttcagaaaacaaagtgtatattacttacagtggtataatctttgaagacatcacatccctacgttgattctttggcgaaacaaagttaccgagggggcttccactttccacgacggcgttgaacgccagcctgagctacaacttccaggaggcaggaggcaggaggcactcaggctcatcgatgctgtgactccagagctcacgaagtgccgaagttgagcgaaaccaaatggcggttggttgcggtggtgcctgcacacaacttgcgggaggcagacgtgctgaacagcaaaccgcgacaggtttcacgcacacagggtgtagcgaattgggctctggggatgtgtcgtgtggtgggtggggcgaccggagctgactagatcgaggtggattagaacaaagtggtacactgccgtcactgtatgggttgggtccatacagacgtacccttttttggcaggatatattataaccggaagaaactttttttttaaaaaaaatgtgatcatggagacttgcaaatgtaatagagaagctagcaaatcggtgctcggaac
